United States Patent Application Publication US 2011/0191912 A1 - sequence listing, part 25

SEQ ID NO: 119537 - DNA, 6 bp, Unknown
  misc_feature (1)..( 6): Result.002 file - promoters60/1538641
caataa

SEQ ID NO: 119538 - DNA, 6 bp, Unknown
  misc_feature (1)..( 6): Result.002 file - promoters60/1538641
taaaat

SEQ ID NO: 119539 - DNA, 6 bp, Unknown
  misc_feature (1)..( 6): Result.002 file - promoters60/1538641
taaaat

SEQ ID NO: 119540 - DNA, 6 bp, Unknown
  misc_feature (1)..( 6): Result.002 file - promoters60/1538641
taaaat

SEQ ID NO: 119541 - DNA, 8 bp, Unknown
  misc_feature (1)..( 8): Result.002 file - promoters60/1538641
ggaaaaat

SEQ ID NO: 119542 - DNA, 8 bp, Unknown
  misc_feature (1)..( 8): Result.002 file - promoters60/1538641
ggaataat

SEQ ID NO: 119543 - DNA, 7 bp, Unknown
  misc_feature (1)..( 7): Result.002 file - promoters60/1538641
aaagcaa

SEQ ID NO: 119544 - DNA, 7 bp, Unknown
  misc_feature (1)..( 7): Result.002 file - promoters60/1538641
aaaccaa

SEQ ID NO: 119545 - DNA, 6 bp, Unknown
  misc_feature (1)..( 6): Result.002 file - promoters60/1538641
aaaaag

SEQ ID NO: 119546 - DNA, 6 bp, Unknown
  misc_feature (1)..( 6): Result.002 file - promoters60/1538641
aaaaag

SEQ ID NO: 119547 - DNA, 6 bp, Unknown
  misc_feature (1)..( 6): Result.002 file - promoters60/1538641
aagtga

SEQ ID NO: 119548 - DNA, 6 bp, Unknown
  misc_feature (1)..( 6): Result.002 file - promoters60/1538641
aagtga

SEQ ID NO: 119549 - DNA, 7 bp, Unknown
  misc_feature (1)..( 7): Result.002 file - promoters60/1538641
taaaccc

SEQ ID NO: 119550 - DNA, 7 bp, Unknown
  misc_feature (1)..( 7): Result.002 file - promoters60/1538641
taaaccc

SEQ ID NO: 119551 - DNA, 7 bp, Unknown
  misc_feature (1)..( 7): Result.002 file - promoters60/1538641
tttcctt

SEQ ID NO: 119552 - DNA, 7 bp, Unknown
  misc_feature (1)..( 7): Result.002 file - promoters60/1538641
tttactt

SEQ ID NO: 119553 - DNA, 10 bp, Unknown
  misc_feature (1)..( 10): Result.002 file - promoters60/1538641
cttttttttt

SEQ ID NO: 119554 - DNA, 10 bp, Unknown
  misc_feature (1)..( 10): Result.002 file - promoters60/1538641
cttttttttt

SEQ ID NO: 119555 - DNA, 8 bp, Unknown
  misc_feature (1)..( 8): Result.002 file - promoters60/1538641
tataatat

SEQ ID NO: 119556 - DNA, 8 bp, Unknown
  misc_feature (1)..( 8): Result.002 file - promoters60/1538641
tataatat

SEQ ID NO: 119557 - DNA, 7 bp, Unknown
  misc_feature (1)..( 7): Result.002 file - promoters60/1538641
aaatcaa

SEQ ID NO: 119558 - DNA, 7 bp, Unknown
  misc_feature (1)..( 7): Result.002 file - promoters60/1538641
aaaacaa

SEQ ID NO: 119559 - DNA, 9 bp, Unknown
  misc_feature (1)..( 9): Result.002 file - promoters60/1538641
aactatttt

SEQ ID NO: 119560 - DNA, 9 bp, Unknown
  misc_feature (1)..( 9): Result.002 file - promoters60/1538641
atctatttt

SEQ ID NO: 119561 - DNA, 9 bp, Unknown
  misc_feature (1)..( 9): Result.002 file - promoters60/1538641
atcaattct

SEQ ID NO: 119562 - DNA, 6 bp, Unknown
  misc_feature (1)..( 6): Result.002 file - promoters60/1538641
cacaca

SEQ ID NO: 119563 - DNA, 6 bp, Unknown
  misc_feature (1)..( 6): Result.002 file - promoters60/1538641
cacaca

SEQ ID NO: 119564 - DNA, 7 bp, Unknown
  misc_feature (1)..( 7): Result.002 file - promoters60/1538641
agaaaga

SEQ ID NO: 119565 - DNA, 7 bp, Unknown
  misc_feature (1)..( 7): Result.002 file - promoters60/1538641
agacaga

SEQ ID NO: 119566 - DNA, 7 bp, Unknown
  misc_feature (1)..( 7): Result.002 file - promoters60/1538641
gagagta

SEQ ID NO: 119567 - DNA, 7 bp, Unknown
  misc_feature (1)..( 7): Result.002 file - promoters60/1538641
gagggta

SEQ ID NO: 119568 - DNA, 8 bp, Unknown
  misc_feature (1)..( 8): Result.002 file - promoters60/1538641
aaatggag

SEQ ID NO: 119569 - DNA, 8 bp, Unknown
  misc_feature (1)..( 8): Result.002 file - promoters60/1538641
aaaaggag

SEQ ID NO: 119570 - DNA, 6 bp, Unknown
  misc_feature (1)..( 6): Result.002 file - promoters60/1538641
ttgtat

SEQ ID NO: 119571 - DNA, 6 bp, Unknown
  misc_feature (1)..( 6): Result.002 file - promoters60/1538641
ttgtat

SEQ ID NO: 119572 - DNA, 8 bp, Unknown
  misc_feature (1)..( 8): Result.002 file - promoters60/1538641
ttgcttac

SEQ ID NO: 119573 - DNA, 8 bp, Unknown
  misc_feature (1)..( 8): Result.002 file - promoters60/1538641
ttgtttac

SEQ ID NO: 119574 - DNA, 7 bp, Unknown
  misc_feature (1)..( 7): Result.002 file - promoters60/1538641
ataacta

SEQ ID NO: 119575 - DNA, 7 bp, Unknown
  misc_feature (1)..( 7): Result.002 file - promoters60/1538641
atatcta

SEQ ID NO: 119576 - DNA, 6 bp, Unknown
  misc_feature (1)..( 6): Result.002 file - promoters60/1538641
taaaac

SEQ ID NO: 119577 - DNA, 6 bp, Unknown
  misc_feature (1)..( 6): Result.002 file - promoters60/1538641
taaaac

SEQ ID NO: 119578 - DNA, 6 bp, Unknown
  misc_feature (1)..( 6): Result.002 file - promoters60/1538738
gttctg

SEQ ID NO: 119579 - DNA, 6 bp, Unknown
  misc_feature (1)..( 6): Result.002 file - promoters60/1538738
gttctg

SEQ ID NO: 119580 - DNA, 6 bp, Unknown
  misc_feature (1)..( 6): Result.002 file - promoters60/1538738
aaatga

SEQ ID NO: 119581 - DNA, 6 bp, Unknown
  misc_feature (1)..( 6): Result.002 file - promoters60/1538738
aaatga

SEQ ID NO: 119582 - DNA, 8 bp, Unknown
  misc_feature (1)..( 8): Result.002 file - promoters60/1538738
tccagata

SEQ ID NO: 119583 - DNA, 8 bp, Unknown
  misc_feature (1)..( 8): Result.002 file - promoters60/1538738
tccagata

SEQ ID NO: 119584 - DNA, 10 bp, Unknown
  misc_feature (1)..( 10): Result.002 file - promoters60/1538738
ttggagatgt

SEQ ID NO: 119585 - DNA, 10 bp, Unknown
  misc_feature (1)..( 10): Result.002 file - promoters60/1538738
ttgcagatgt

SEQ ID NO: 119586 - DNA, 8 bp, Unknown
  misc_feature (1)..( 8): Result.002 file - promoters60/1538738
ctcatctt

SEQ ID NO: 119587 - DNA, 8 bp, Unknown
  misc_feature (1)..( 8): Result.002 file - promoters60/1538738
ctcaactt

SEQ ID NO: 119588 - DNA, 7 bp, Unknown
  misc_feature (1)..( 7): Result.002 file - promoters60/1538738
taggtat

SEQ ID NO: 119589 - DNA, 7 bp, Unknown
  misc_feature (1)..( 7): Result.002 file - promoters60/1538738
tagatat

SEQ ID NO: 119590 - DNA, 7 bp, Unknown
  misc_feature (1)..( 7): Result.002 file - promoters60/1538738
atcatat

SEQ ID NO: 119591 - DNA, 7 bp, Unknown
  misc_feature (1)..( 7): Result.002 file - promoters60/1538738
atcttat

SEQ ID NO: 119592 - DNA, 7 bp, Unknown
  misc_feature (1)..( 7): Result.002 file - promoters60/1538738
atatata

SEQ ID NO: 119593 - DNA, 7 bp, Unknown
  misc_feature (1)..( 7): Result.002 file - promoters60/1538738
atacata

SEQ ID NO: 119594 - DNA, 6 bp, Unknown
  misc_feature (1)..( 6): Result.002 file - promoters60/1538738
cttcat

SEQ ID NO: 119595 - DNA, 6 bp, Unknown
  misc_feature (1)..( 6): Result.002 file - promoters60/1538738
cttcat

SEQ ID NO: 119596 - DNA, 7 bp, Unknown
  misc_feature (1)..( 7): Result.002 file - promoters60/1538738
tttctat

SEQ ID NO: 119597 - DNA, 7 bp, Unknown
  misc_feature (1)..( 7): Result.002 file - promoters60/1538738
tttttat

SEQ ID NO: 119598 - DNA, 6 bp, Unknown
  misc_feature (1)..( 6): Result.002 file - promoters60/1538738
aaaatc

SEQ ID NO: 119599 - DNA, 6 bp, Unknown
  misc_feature (1)..( 6): Result.002 file - promoters60/1538738
aaaatc

SEQ ID NO: 119600 - DNA, 7 bp, Unknown
  misc_feature (1)..( 7): Result.002 file - promoters60/1538804
agcatta

SEQ ID NO: 119601 - DNA, 7 bp, Unknown
  misc_feature (1)..( 7): Result.002 file - promoters60/1538804
agcctta

SEQ ID NO: 119602 - DNA, 7 bp, Unknown
  misc_feature (1)..( 7): Result.002 file - promoters60/1538804
ttagatt

SEQ ID NO: 119603 - DNA, 7 bp, Unknown
  misc_feature (1)..( 7): Result.002 file - promoters60/1538804
ttaaatt

SEQ ID NO: 119604 - DNA, 7 bp, Unknown
  misc_feature (1)..( 7): Result.002 file - promoters60/1538804
gtttgag

SEQ ID NO: 119605 - DNA, 7 bp, Unknown
  misc_feature (1)..( 7): Result.002 file - promoters60/1538804
gttagag

SEQ ID NO: 119606 - DNA, 7 bp, Unknown
  misc_feature (1)..( 7): Result.002 file - promoters60/1538804
gttggag

SEQ ID NO: 119607 - DNA, 6 bp, Unknown
  misc_feature (1)..( 6): Result.002 file - promoters60/1538804
ccaatc

SEQ ID NO: 119608 - DNA, 6 bp, Unknown
  misc_feature (1)..( 6): Result.002 file - promoters60/1538804
ccaatc

SEQ ID NO: 119609 - DNA, 6 bp, Unknown
  misc_feature (1)..( 6): Result.002 file - promoters60/1538804
atcatt

SEQ ID NO: 119610 - DNA, 6 bp, Unknown
  misc_feature (1)..( 6): Result.002 file - promoters60/1538804
atcatt

SEQ ID NO: 119611 - DNA, 7 bp, Unknown
  misc_feature (1)..( 7): Result.002 file - promoters60/1538804
cttttgt

SEQ ID NO: 119612 - DNA, 7 bp, Unknown
  misc_feature (1)..( 7): Result.002 file - promoters60/1538804
cttgtgt

SEQ ID NO: 119613 - DNA, 12 bp, Unknown
  misc_feature (1)..( 12): Result.002 file - promoters60/1538804
tttatataaaca

SEQ ID NO: 119614 - DNA, 12 bp, Unknown
  misc_feature (1)..( 12): Result.002 file - promoters60/1538804
tttatataaaca

SEQ ID NO: 119615 - DNA, 8 bp, Unknown
  misc_feature (1)..( 8): Result.002 file - promoters60/1538804
acggtttt

SEQ ID NO: 119616 - DNA, 8 bp, Unknown
  misc_feature (1)..( 8): Result.002 file - promoters60/1538804
acggattt

SEQ ID NO: 119617 - DNA, 9 bp, Unknown
  misc_feature (1)..( 9): Result.002 file - promoters60/1538804
atatgattt

SEQ ID NO: 119618 - DNA, 9 bp, Unknown
  misc_feature (1)..( 9): Result.002 file - promoters60/1538804
atatgattt

SEQ ID NO: 119619 - DNA, 8 bp, Unknown
  misc_feature (1)..( 8): Result.002 file - promoters60/1538804
ttctatct

SEQ ID NO: 119620 - DNA, 8 bp, Unknown
  misc_feature (1)..( 8): Result.002 file - promoters60/1538804
ttctttct

SEQ ID NO: 119621 - DNA, 7 bp, Unknown
  misc_feature (1)..( 7): Result.002 file - promoters60/1538804
cttagaa

SEQ ID NO: 119622 - DNA, 7 bp, Unknown
  misc_feature (1)..( 7): Result.002 file - promoters60/1538804
cttcgaa

SEQ ID NO: 119623 - DNA, 6 bp, Unknown
  misc_feature (1)..( 6): Result.002 file - promoters60/1538804
cataaa

SEQ ID NO: 119624 - DNA, 6 bp, Unknown
  misc_feature (1)..( 6): Result.002 file - promoters60/1538804
cataaa

SEQ ID NO: 119625 - DNA, 7 bp, Unknown
  misc_feature (1)..( 7): Result.002 file - promoters60/1538804
gaaaaat

SEQ ID NO: 119626 - DNA, 7 bp, Unknown
  misc_feature (1)..( 7): Result.002 file - promoters60/1538804
gaaaaat

SEQ ID NO: 119627 - DNA, 6 bp, Unknown
  misc_feature (1)..( 6): Result.002 file - promoters60/1538804
attgga

SEQ ID NO: 119628 - DNA, 6 bp, Unknown
  misc_feature (1)..( 6): Result.002 file - promoters60/1538804
attgga

SEQ ID NO: 119629 - DNA, 6 bp, Unknown
  misc_feature (1)..( 6): Result.002 file - promoters60/1538804
tttaat

SEQ ID NO: 119630 - DNA, 6 bp, Unknown
  misc_feature (1)..( 6): Result.002 file - promoters60/1538804
tttaat

SEQ ID NO: 119631 - DNA, 6 bp, Unknown
  misc_feature (1)..( 6): Result.002 file - promoters60/1538804
ttgatt

SEQ ID NO: 119632 - DNA, 6 bp, Unknown
  misc_feature (1)..( 6): Result.002 file - promoters60/1538804
ttgatt

SEQ ID NO: 119633 - DNA, 7 bp, Unknown
  misc_feature (1)..( 7): Result.002 file - promoters60/1557475
ttacata

SEQ ID NO: 119634 - DNA, 7 bp, Unknown
  misc_feature (1)..( 7): Result.002 file - promoters60/1557475
ttacata

SEQ ID NO: 119635 - DNA, 10 bp, Unknown
  misc_feature (1)..( 10): Result.002 file - promoters60/1557475
caaatttttt

SEQ ID NO: 119636 - DNA, 10 bp, Unknown
  misc_feature (1)..( 10): Result.002 file - promoters60/1557475
caattttttt

SEQ ID NO: 119637 - DNA, 10 bp, Unknown
  misc_feature (1)..( 10): Result.002 file - promoters60/1557475
aaaatttaca

SEQ ID NO: 119638 - DNA, 8 bp, Unknown
  misc_feature (1)..( 8): Result.002 file - promoters60/1557475
aaagtcaa

SEQ ID NO: 119639 - DNA, 8 bp, Unknown
  misc_feature (1)..( 8): Result.002 file - promoters60/1557475
aaaatcaa

SEQ ID NO: 119640 - DNA, 8 bp, Unknown
  misc_feature (1)..( 8): Result.002 file - promoters60/1557475
aaaatcac

SEQ ID NO: 119641 - DNA, 8 bp, Unknown
  misc_feature (1)..( 8): Result.002 file - promoters60/1557475
atataaat

SEQ ID NO: 119642 - DNA, 8 bp, Unknown
  misc_feature (1)..( 8): Result.002 file - promoters60/1557475
atatgaat

SEQ ID NO: 119643 - DNA, 9 bp, Unknown
  misc_feature (1)..( 9): Result.002 file - promoters60/1557475
taaataatc

SEQ ID NO: 119644 - DNA, 9 bp, Unknown
  misc_feature (1)..( 9): Result.002 file - promoters60/1557475
taaattatc

SEQ ID NO: 119645 - DNA, 8 bp, Unknown
  misc_feature (1)..( 8): Result.002 file - promoters60/1557475
atcaatca

SEQ ID NO: 119646 - DNA, 8 bp, Unknown
  misc_feature (1)..( 8): Result.002 file - promoters60/1557475
atcgatca

SEQ ID NO: 119647 - DNA, 7 bp, Unknown
  misc_feature (1)..( 7): Result.002 file - promoters60/1557475
aaaatac

SEQ ID NO: 119648 - DNA, 7 bp, Unknown
  misc_feature (1)..( 7): Result.002 file - promoters60/1557475
aaaatac

SEQ ID NO: 119649 - DNA, 8 bp, Unknown
  misc_feature (1)..( 8): Result.002 file - promoters60/1557475
aataatcc

SEQ ID NO: 119650 - DNA, 10 bp, Unknown
  misc_feature (1)..( 10): Result.002 file - promoters60/1557475
caaatgcggt

SEQ ID NO: 119651 - DNA, 10 bp, Unknown
  misc_feature (1)..( 10): Result.002 file - promoters60/1557475
caaaagcggt

SEQ ID NO: 119652 - DNA, 8 bp, Unknown
  misc_feature (1)..( 8): Result.002 file - promoters60/1557475
gatctgaa

SEQ ID NO: 119653 - DNA, 8 bp, Unknown
  misc_feature (1)..( 8): Result.002 file - promoters60/1557475
gatttgaa

SEQ ID NO: 119654 - DNA, 7 bp, Unknown
  misc_feature (1)..( 7): Result.002 file - promoters60/1557475
tactatt

SEQ ID NO: 119655 - DNA, 7 bp, Unknown
  misc_feature (1)..( 7): Result.002 file - promoters60/1557475
tacaatt

SEQ ID NO: 119656 - DNA, 6 bp, Unknown
  misc_feature (1)..( 6): Result.002 file - promoters60/1557475
tctcta

SEQ ID NO: 119657 - DNA, 6 bp, Unknown
  misc_feature (1)..( 6): Result.002 file - promoters60/1557475
tctcta

SEQ ID NO: 119658 - DNA, 6 bp, Unknown
  misc_feature (1)..( 6): Result.002 file - promoters60/1557475
tataag

SEQ ID NO: 119659 - DNA, 6 bp, Unknown
  misc_feature (1)..( 6): Result.002 file - promoters60/1557475
tataag

SEQ ID NO: 119660 - DNA, 6 bp, Unknown
  misc_feature (1)..( 6): Result.002 file - promoters60/1557475
atattt

SEQ ID NO: 119661 - DNA, 6 bp, Unknown
  misc_feature (1)..( 6): Result.002 file - promoters60/1557475
atattt

SEQ ID NO: 119662 - DNA, 14 bp, Unknown
  misc_feature (1)..( 14): Result.002 file - promoters60/1557475
cgaaaaaacaaaaa

SEQ ID NO: 119663 - DNA, 14 bp, Unknown
  misc_feature (1)..( 14): Result.002 file - promoters60/1557475
cgacaaaacaaaaa

SEQ ID NO: 119664 - DNA, 7 bp, Unknown
  misc_feature (1)..( 7): Result.002 file - promoters60/1557475
aaaataa

SEQ ID NO: 119665 - DNA, 7 bp, Unknown
  misc_feature (1)..( 7): Result.002 file - promoters60/1557475
aaattaa

SEQ ID NO: 119666 - DNA, 6 bp, Unknown
  misc_feature (1)..( 6): Result.002 file - promoters60/1557475
atttta

SEQ ID NO: 119667 - DNA, 6 bp, Unknown
  misc_feature (1)..( 6): Result.002 file - promoters60/1557475
atttta

SEQ ID NO: 119668 - DNA, 6 bp, Unknown
  misc_feature (1)..( 6): Result.002 file - promoters60/1557475
taaaaa

SEQ ID NO: 119669 - DNA, 6 bp, Unknown
  misc_feature (1)..( 6): Result.002 file - promoters60/1557475
taaaaa

SEQ ID NO: 119670 - DNA, 7 bp, Unknown
  misc_feature (1)..( 7): Result.002 file - promoters60/1557475
tttgaaa

SEQ ID NO: 119671 - DNA, 7 bp, Unknown
  misc_feature (1)..( 7): Result.002 file - promoters60/1557475
tttaaaa

SEQ ID NO: 119672 - DNA, 6 bp, Unknown
  misc_feature (1)..( 6): Result.002 file - promoters60/1557475
ttcttc

SEQ ID NO: 119673 - DNA, 6 bp, Unknown
  misc_feature (1)..( 6): Result.002 file - promoters60/1557475
ttcttc

SEQ ID NO: 119674 - DNA, 6 bp, Unknown
  misc_feature (1)..( 6): Result.002 file - promoters60/1557475
aattac

SEQ ID NO: 119675 - DNA, 6 bp, Unknown
  misc_feature (1)..( 6): Result.002 file - promoters60/1557475
aattac

SEQ ID NO: 119676 - DNA, 6 bp, Unknown
  misc_feature (1)..( 6): Result.002 file - promoters60/1557475
aatttg

SEQ ID NO: 119677 - DNA, 6 bp, Unknown
  misc_feature (1)..( 6): Result.002 file - promoters60/1557475
aatttg

SEQ ID NO: 119678 - DNA, 7 bp, Unknown
  misc_feature (1)..( 7): Result.002 file - promoters60/1557475
aaagtaa

SEQ ID NO: 119679 - DNA, 7 bp, Unknown
  misc_feature (1)..( 7): Result.002 file - promoters60/1557475
aaactaa

SEQ ID NO: 119680 - DNA, 9 bp, Unknown
  misc_feature (1)..( 9): Result.002 file - promoters60/1557475
atccatata

SEQ ID NO: 119681 - DNA, 9 bp, Unknown
  misc_feature (1)..( 9): Result.002 file - promoters60/1557475
atccttata

SEQ ID NO: 119682 - DNA, 6 bp, Unknown
  misc_feature (1)..( 6): Result.002 file - promoters60/1557475
tcaacg

SEQ ID NO: 119683 - DNA, 6 bp, Unknown
  misc_feature (1)..( 6): Result.002 file - promoters60/1557475
tcaacg

SEQ ID NO: 119684 - DNA, 13 bp, Unknown
  misc_feature (1)..( 13): Result.002 file - promoters60/1557501
gaataatcaatga

SEQ ID NO: 119685 - DNA, 13 bp, Unknown
  misc_feature (1)..( 13): Result.002 file - promoters60/1557501
tgaagatcattga

SEQ ID NO: 119686 - DNA, 13 bp, Unknown
  misc_feature (1)..( 13): Result.002 file - promoters60/1557501
tatttatcaaaga

SEQ ID NO: 119687 - DNA, 13 bp, Unknown
  misc_feature (1)..( 13): Result.002 file - promoters60/1557501
tatgtatatacat

SEQ ID NO: 119688 - DNA, 11 bp, Unknown
  misc_feature (1)..( 11): Result.002 file - promoters60/1557501
atcttcatgtt

SEQ ID NO: 119689 - DNA, 11 bp, Unknown
  misc_feature (1)..( 11): Result.002 file - promoters60/1557501
atgttcatgtt

SEQ ID NO: 119690 - DNA, 11 bp, Unknown
  misc_feature (1)..( 11): Result.002 file - promoters60/1557501
atcttcatgac

SEQ ID NO: 119691 - DNA, 11 bp, Unknown
  misc_feature (1)..( 11): Result.002 file - promoters60/1557501
atcttcctttt

SEQ ID NO: 119692 - DNA, 8 bp, Unknown
  misc_feature (1)..( 8): Result.002 file - promoters60/1557501
tctgttca

SEQ ID NO: 119693 - DNA, 8 bp, Unknown
  misc_feature (1)..( 8): Result.002 file - promoters60/1557501
tatgttca

SEQ ID NO: 119694 - DNA, 8 bp, Unknown
  misc_feature (1)..( 8): Result.002 file - promoters60/1557501
tatcttcc

SEQ ID NO: 119695 - DNA, 8 bp, Unknown
  misc_feature (1)..( 8): Result.002 file - promoters60/1557501
gatcttca

SEQ ID NO: 119696 - DNA, 12 bp, Unknown
  misc_feature (1)..( 12): Result.002 file - promoters60/1557501
tatatatgaata

SEQ ID NO: 119697 - DNA, 12 bp, Unknown
  misc_feature (1)..( 12): Result.002 file - promoters60/1557501
tatttatcaaag

SEQ ID NO: 119698 - DNA, 12 bp, Unknown
  misc_feature (1)..( 12): Result.002 file - promoters60/1557501
tatctatgtata

SEQ ID NO: 119699 - DNA, 12 bp, Unknown
  misc_feature (1)..( 12): Result.002 file - promoters60/1557501
cattgatcgtac

SEQ ID NO: 119700 - DNA, 10 bp, Unknown
  misc_feature (1)..( 10): Result.002 file - promoters60/1557501
aatcttcatg

SEQ ID NO: 119701 - DNA, 10 bp, Unknown
  misc_feature (1)..( 10): Result.002 file - promoters60/1557501
tatcttcctt

SEQ ID NO: 119702 - DNA, 10 bp, Unknown
  misc_feature (1)..( 10): Result.002 file - promoters60/1557501
gatcttcatg

SEQ ID NO: 119703 - DNA, 10 bp, Unknown
  misc_feature (1)..( 10): Result.002 file - promoters60/1557501
aatcttgcca

SEQ ID NO: 119704 - DNA, 10 bp, Unknown
  misc_feature (1)..( 10): Result.002 file - promoters60/1557501
tatgttcatg

SEQ ID NO: 119705 - DNA, 10 bp, Unknown
  misc_feature (1)..( 10): Result.002 file - promoters60/1557501
caataaaaaa

SEQ ID NO: 119706 - DNA, 10 bp, Unknown
  misc_feature (1)..( 10): Result.002 file - promoters60/1557501
gtttaacaaa

SEQ ID NO: 119707 - DNA, 10 bp, Unknown
  misc_feature (1)..( 10): Result.002 file - promoters60/1557501
gtttgacaaa

SEQ ID NO: 119708 - DNA, 10 bp, Unknown
  misc_feature (1)..( 10): Result.002 file - promoters60/1557501
aaataaaaaa

SEQ ID NO: 119709 - DNA, 12 bp, Unknown
  misc_feature (1)..( 12): Result.002 file - promoters60/1557565
aaattaattatg

SEQ ID NO: 119710 - DNA, 12 bp, Unknown
  misc_feature (1)..( 12): Result.002 file - promoters60/1557565
ctattaattatg

SEQ ID NO: 119711 - DNA, 12 bp, Unknown
  misc_feature (1)..( 12): Result.002 file - promoters60/1557565
agtttatttata

SEQ ID NO: 119712 - DNA, 12 bp, Unknown
  misc_feature (1)..( 12): Result.002 file - promoters60/1557565
aaaataacgtca

SEQ ID NO: 119713 - DNA, 7 bp, Unknown
  misc_feature (1)..( 7): Result.002 file - promoters60/1557573
tcagagc

SEQ ID NO: 119714 - DNA, 7 bp, Unknown
  misc_feature (1)..( 7): Result.002 file - promoters60/1557573
tcatagc

SEQ ID NO: 119715 - DNA, 8 bp, Unknown
  misc_feature (1)..( 8): Result.002 file - promoters60/1557573
agtatatt

SEQ ID NO: 119716 - DNA, 8 bp, Unknown
  misc_feature (1)..( 8): Result.002 file - promoters60/1557573
agtttatt

SEQ ID NO: 119717 - DNA, 7 bp, Unknown
  misc_feature (1)..( 7): Result.002 file - promoters60/1557573
ttaaaaa

SEQ ID NO: 119718 - DNA, 7 bp, Unknown
  misc_feature (1)..( 7): Result.002 file - promoters60/1557573
ttataaa

SEQ ID NO: 119719 - DNA, 7 bp, Unknown
  misc_feature (1)..( 7): Result.002 file - promoters60/1557573
ttaaaag

SEQ ID NO: 119720 - DNA, 8 bp, Unknown
  misc_feature (1)..( 8): Result.002 file - promoters60/1557573
taaccaaa

SEQ ID NO: 119721 - DNA, 8 bp, Unknown
  misc_feature (1)..( 8): Result.002 file - promoters60/1557573
taacaaaa

SEQ ID NO: 119722 - DNA, 6 bp, Unknown
  misc_feature (1)..( 6): Result.002 file - promoters60/1557573
ttatca

SEQ ID NO: 119723 - DNA, 6 bp, Unknown
  misc_feature (1)..( 6): Result.002 file - promoters60/1557573
ttatca

SEQ ID NO: 119724 - DNA, 7 bp, Unknown
  misc_feature (1)..( 7): Result.002 file - promoters60/1557573
tttttta

SEQ ID NO: 119725 - DNA, 7 bp, Unknown
  misc_feature (1)..( 7): Result.002 file - promoters60/1557573
tttatta

SEQ ID NO: 119726 - DNA, 7 bp, Unknown
  misc_feature (1)..( 7): Result.002 file - promoters60/1557573
gtatatt

SEQ ID NO: 119727 - DNA, 7 bp, Unknown
  misc_feature (1)..( 7): Result.002 file - promoters60/1557573
gtagatt

SEQ ID NO: 119728 - DNA, 7 bp, Unknown
  misc_feature (1)..( 7): Result.002 file - promoters60/1557573
ttccaaa

SEQ ID NO: 119729 - DNA, 7 bp, Unknown
  misc_feature (1)..( 7): Result.002 file - promoters60/1557573
ttctaaa

SEQ ID NO: 119730 - DNA, 7 bp, Unknown
  misc_feature (1)..( 7): Result.002 file - promoters60/1557573
tttgatt

SEQ ID NO: 119731 - DNA, 7 bp, Unknown
  misc_feature (1)..( 7): Result.002 file - promoters60/1557573
tttgatt

SEQ ID NO: 119732 - DNA, 6 bp, Unknown
  misc_feature (1)..( 6): Result.002 file - promoters60/1557573
gtctcc

SEQ ID NO: 119733 - DNA, 6 bp, Unknown
  misc_feature (1)..( 6): Result.002 file - promoters60/1557573
gtctcc

SEQ ID NO: 119734 - DNA, 11 bp, Unknown
  misc_feature (1)..( 11): Result.002 file - promoters60/1557573
accctagtttt

SEQ ID NO: 119735 - DNA, 11 bp, Unknown
  misc_feature (1)..( 11): Result.002 file - promoters60/1557573
accgtagattt

SEQ ID NO: 119736 - DNA, 8 bp, Unknown
  misc_feature (1)..( 8): Result.002 file - promoters60/1557648
aaaaaaaa

SEQ ID NO: 119737 - DNA, 8 bp, Unknown
  misc_feature (1)..( 8): Result.002 file - promoters60/1557648
aaaaaaaa

SEQ ID NO: 119738 - DNA, 10 bp, Unknown
  misc_feature (1)..( 10): Result.002 file - promoters60/1557648
aaattggtag

SEQ ID NO: 119739 - DNA, 10 bp, Unknown
  misc_feature (1)..( 10): Result.002 file - promoters60/1557648
aaatcggtca

SEQ ID NO: 119740 - DNA, 10 bp, Unknown
  misc_feature (1)..( 10): Result.002 file - promoters60/1557648
cgatttgtag

SEQ ID NO: 119741 - DNA, 7 bp, Unknown
  misc_feature (1)..( 7): Result.002 file - promoters60/1557648
tacaaat

SEQ ID NO: 119742 - DNA, 7 bp, Unknown
  misc_feature (1)..( 7): Result.002 file - promoters60/1557648
tactaat

SEQ ID NO: 119743 - DNA, 11 bp, Unknown
  misc_feature (1)..( 11): Result.002 file - promoters60/1557648
aatttagaatc

SEQ ID NO: 119744 - DNA, 11 bp, Unknown
  misc_feature (1)..( 11): Result.002 file - promoters60/1557648
aattttgaacg

SEQ ID NO: 119745 - DNA, 11 bp, Unknown
  misc_feature (1)..( 11): Result.002 file - promoters60/1557648
taaatagtatc

SEQ ID NO: 119746 - DNA, 6 bp, Unknown
  misc_feature (1)..( 6): Result.002 file - promoters60/1557648
tgttta

SEQ ID NO: 119747 - DNA, 6 bp, Unknown
  misc_feature (1)..( 6): Result.002 file - promoters60/1557648
tgttta

SEQ ID NO: 119748 - DNA, 6 bp, Unknown
  misc_feature (1)..( 6): Result.002 file - promoters60/1557648
ttttaa

SEQ ID NO: 119749 - DNA, 6 bp, Unknown
  misc_feature (1)..( 6): Result.002 file - promoters60/1557648
ttttaa

SEQ ID NO: 119750 - DNA, 6 bp, Unknown
  misc_feature (1)..( 6): Result.002 file - promoters60/1557648
agaaaa

SEQ ID NO: 119751 - DNA, 6 bp, Unknown
  misc_feature (1)..( 6): Result.002 file - promoters60/1557648
agaaaa

SEQ ID NO: 119752 - DNA, 8 bp, Unknown
  misc_feature (1)..( 8): Result.002 file - promoters60/1557648
aaaacatt

SEQ ID NO: 119753 - DNA, 8 bp, Unknown
  misc_feature (1)..( 8): Result.002 file - promoters60/1557648
aaaacaaa

SEQ ID NO: 119754 - DNA, 8 bp, Unknown
  misc_feature (1)..( 8): Result.002 file - promoters60/1557648
taaatatt

SEQ ID NO: 119755 - DNA, 6 bp, Unknown
  misc_feature (1)..( 6): Result.002 file - promoters60/1557648
atagaa

SEQ ID NO: 119756 - DNA, 6 bp, Unknown
  misc_feature (1)..( 6): Result.002 file - promoters60/1557648
atagaa

SEQ ID NO: 119757 - DNA, 7 bp, Unknown
  misc_feature (1)..( 7): Result.002 file - promoters60/1557648
catcatt

SEQ ID NO: 119758 - DNA, 7 bp, Unknown
  misc_feature (1)..( 7): Result.002 file - promoters60/1557648
cataatt

SEQ ID NO: 119759 - DNA, 8 bp, Unknown
  misc_feature (1)..( 8): Result.002 file - promoters60/1557648
tcatttga

SEQ ID NO: 119760 - DNA, 8 bp, Unknown
  misc_feature (1)..( 8): Result.002 file - promoters60/1557648
aaatttga

SEQ ID NO: 119761 - DNA, 8 bp, Unknown
  misc_feature (1)..( 8): Result.002 file - promoters60/1557648
aaaattga

SEQ ID NO: 119762 - DNA, 8 bp, Unknown
  misc_feature (1)..( 8): Result.002 file - promoters60/1557648
aaaagaaa

SEQ ID NO: 119763 - DNA, 8 bp, Unknown
  misc_feature (1)..( 8): Result.002 file - promoters60/1557648
aaaaaaaa

SEQ ID NO: 119764 - DNA, 8 bp, Unknown
  misc_feature (1)..( 8): Result.002 file - promoters60/1557648
caaataaa

SEQ ID NO: 119765 - DNA, 6 bp, Unknown
  misc_feature (1)..( 6): Result.002 file - promoters60/1557648
acatct

SEQ ID NO: 119766 - DNA, 6 bp, Unknown
  misc_feature (1)..( 6): Result.002 file - promoters60/1557648
acatct

SEQ ID NO: 119767 - DNA, 7 bp, Unknown
  misc_feature (1)..( 7): Result.002 file - promoters60/1557648
gtacaat

SEQ ID NO: 119768 - DNA, 7 bp, Unknown
  misc_feature (1)..( 7): Result.002 file - promoters60/1557648
gtagaat

SEQ ID NO: 119769 - DNA, 7 bp, Unknown
  misc_feature (1)..( 7): Result.002 file - promoters60/1557648
aaaagtt

SEQ ID NO: 119770 - DNA, 7 bp, Unknown
  misc_feature (1)..( 7): Result.002 file - promoters60/1557648
aaaggtt

SEQ ID NO: 119771 - DNA, 6 bp, Unknown
  misc_feature (1)..( 6): Result.002 file - promoters60/1557648
caaatt

SEQ ID NO: 119772 - DNA, 6 bp, Unknown
  misc_feature (1)..( 6): Result.002 file - promoters60/1557648
caaatt

SEQ ID NO: 119773 - DNA, 7 bp, Unknown
  misc_feature (1)..( 7): Result.002 file - promoters60/1557648
cagcaaa

SEQ ID NO: 119774 - DNA, 7 bp, Unknown
  misc_feature (1)..( 7): Result.002 file - promoters60/1557648
cagcaaa

SEQ ID NO: 119775 - DNA, 8 bp, Unknown
  misc_feature (1)..( 8): Result.002 file - promoters60/1557648
attctcac

SEQ ID NO: 119776 - DNA, 8 bp, Unknown
  misc_feature (1)..( 8): Result.002 file - promoters60/1557648
aatctcac

SEQ ID NO: 119777 - DNA, 8 bp, Unknown
  misc_feature (1)..( 8): Result.002 file - promoters60/1557648
aatatcaa

SEQ ID NO: 119778 - DNA, 9 bp, Unknown
  misc_feature (1)..( 9): Result.002 file - promoters60/1557648
caacaaaat

SEQ ID NO: 119779 - DNA, 9 bp, Unknown
  misc_feature (1)..( 9): Result.002 file - promoters60/1557648
caactaaat

SEQ ID NO: 119780 - DNA, 8 bp, Unknown
  misc_feature (1)..( 8): Result.002 file - promoters60/1557648
acacacac

SEQ ID NO: 119781 - DNA, 8 bp, Unknown
  misc_feature (1)..( 8): Result.002 file - promoters60/1557648
acatacac

SEQ ID NO: 119782 - DNA, 7 bp, Unknown
  misc_feature (1)..( 7): Result.002 file - promoters60/1557648
aatttga

SEQ ID NO: 119783 - DNA, 7 bp, Unknown
  misc_feature (1)..( 7): Result.002 file - promoters60/1557648
aatttga

SEQ ID NO: 119784 - DNA, 7 bp, Unknown
  misc_feature (1)..( 7): Result.002 file - promoters60/1557648
aaactga

SEQ ID NO: 119785 - DNA, 7 bp, Unknown
  misc_feature (1)..( 7): Result.002 file - promoters60/1557648
aaaatga

SEQ ID NO: 119786 - DNA, 7 bp, Unknown
  misc_feature (1)..( 7): Result.002 file - promoters60/1557648
tgaagga

SEQ ID NO: 119787 - DNA, 7 bp, Unknown
  misc_feature (1)..( 7): Result.002 file - promoters60/1557648
tgaggga

SEQ ID NO: 119788 - DNA, 6 bp, Unknown
  misc_feature (1)..( 6): Result.002 file - promoters60/1557712
ttccga

SEQ ID NO: 119789 - DNA, 6 bp, Unknown
  misc_feature (1)..( 6): Result.002 file - promoters60/1557712
ttccga

SEQ ID NO: 119790 - DNA, 6 bp, Unknown
  misc_feature (1)..( 6): Result.002 file - promoters60/1557712
aagctc

SEQ ID NO: 119791 - DNA, 6 bp, Unknown
  misc_feature (1)..( 6): Result.002 file - promoters60/1557712
aagctc

SEQ ID NO: 119792 - DNA, 7 bp, Unknown
  misc_feature (1)..( 7): Result.002 file - promoters60/1557712
ttttaag

SEQ ID NO: 119793 - DNA, 7 bp, Unknown
  misc_feature (1)..( 7): Result.002 file - promoters60/1557712
tttaaag

SEQ ID NO: 119794 - DNA, 8 bp, Unknown
  misc_feature (1)..( 8): Result.002 file - promoters60/1557712
taaaaaaa

SEQ ID NO: 119795 - DNA, 8 bp, Unknown
  misc_feature (1)..( 8): Result.002 file - promoters60/1557712
taaacaaa

SEQ ID NO: 119796 - DNA, 7 bp, Unknown
  misc_feature (1)..( 7): Result.002 file - promoters60/1557712
caacttc

SEQ ID NO: 119797 - DNA, 7 bp, Unknown
  misc_feature (1)..( 7): Result.002 file - promoters60/1557712
caatttc

SEQ ID NO: 119798 - DNA, 6 bp, Unknown
  misc_feature (1)..( 6): Result.002 file - promoters60/1557712
tgattc

SEQ ID NO: 119799 - DNA, 6 bp, Unknown
  misc_feature (1)..( 6): Result.002 file - promoters60/1557712
tgattc

SEQ ID NO: 119800 - DNA, 6 bp, Unknown
  misc_feature (1)..( 6): Result.002 file - promoters60/1557712
aaaaac

SEQ ID NO: 119801 - DNA, 6 bp, Unknown
  misc_feature (1)..( 6): Result.002 file - promoters60/1557712
aaaaac

SEQ ID NO: 119802 - DNA, 6 bp, Unknown
  misc_feature (1)..( 6): Result.002 file - promoters60/1557712
tttatt

SEQ ID NO: 119803 - DNA, 6 bp, Unknown
  misc_feature (1)..( 6): Result.002 file - promoters60/1557712
tttatt

SEQ ID NO: 119804 - DNA, 8 bp, Unknown
  misc_feature (1)..( 8): Result.002 file - promoters60/1557712
tttccata

SEQ ID NO: 119805 - DNA, 8 bp, Unknown
  misc_feature (1)..( 8): Result.002 file - promoters60/1557712
ttttcata

SEQ ID NO: 119806 - DNA, 7 bp, Unknown
  misc_feature (1)..( 7): Result.002 file - promoters60/1557712
tattttg

SEQ ID NO: 119807 - DNA, 7 bp, Unknown
  misc_feature (1)..( 7): Result.002 file - promoters60/1557712
tatcttg

SEQ ID NO: 119808 - DNA, 8 bp, Unknown
  misc_feature (1)..( 8): Result.002 file - promoters60/1557712
ttagtgtt

SEQ ID NO: 119809 - DNA, 8 bp, Unknown
  misc_feature (1)..( 8): Result.002 file - promoters60/1557712
ttagtgtt

SEQ ID NO: 119810 - DNA, 7 bp, Unknown
  misc_feature (1)..( 7): Result.002 file - promoters60/1557730
gccaatt

SEQ ID NO: 119811 - DNA, 7 bp, Unknown
  misc_feature (1)..( 7): Result.002 file - promoters60/1557730
gcctatt

SEQ ID NO: 119812 - DNA, 9 bp, Unknown
  misc_feature (1)..( 9): Result.002 file - promoters60/1557730
aatgtgtta

SEQ ID NO: 119813 - DNA, 9 bp, Unknown
  misc_feature (1)..( 9): Result.002 file - promoters60/1557730
aatttgtta

SEQ ID NO: 119814 - DNA, 8 bp, Unknown
  misc_feature (1)..( 8): Result.002 file - promoters60/1557730
ttaattat

SEQ ID NO: 119815 - DNA, 8 bp, Unknown
  misc_feature (1)..( 8): Result.002 file - promoters60/1557730
ttatttat

SEQ ID NO: 119816 - DNA, 7 bp, Unknown
  misc_feature (1)..( 7): Result.002 file - promoters60/1557730
tatgtta

SEQ ID NO: 119817 - DNA, 7 bp, Unknown
  misc_feature (1)..( 7): Result.002 file - promoters60/1557730
tatatta

SEQ ID NO: 119818 - DNA, 7 bp, Unknown
  misc_feature (1)..( 7): Result.002 file - promoters60/1557730
taagaaa

SEQ ID NO: 119819 - DNA, 7 bp, Unknown
  misc_feature (1)..( 7): Result.002 file - promoters60/1557730
taagaaa

SEQ ID NO: 119820 - DNA, 6 bp, Unknown
  misc_feature (1)..( 6): Result.002 file - promoters60/1557730
ttgtct

SEQ ID NO: 119821 - DNA, 6 bp, Unknown
  misc_feature (1)..( 6): Result.002 file - promoters60/1557730
ttgtct

SEQ ID NO: 119822 - DNA, 7 bp, Unknown
  misc_feature (1)..( 7): Result.002 file - promoters60/1557730
agatacg

SEQ ID NO: 119823 - DNA, 7 bp, Unknown
  misc_feature (1)..( 7): Result.002 file - promoters60/1557730
agatacg

SEQ ID NO: 119824 - DNA, 6 bp, Unknown
  misc_feature (1)..( 6): Result.002 file - promoters60/1557730
acaaga

SEQ ID NO: 119825 - DNA, 6 bp, Unknown
  misc_feature (1)..( 6): Result.002 file - promoters60/1557730
acaaga

SEQ ID NO: 119826 - DNA, 6 bp, Unknown
  misc_feature (1)..( 6): Result.002 file - promoters60/1557730
aattaa

SEQ ID NO: 119827 - DNA, 6 bp, Unknown
  misc_feature (1)..( 6): Result.002 file - promoters60/1557730
aattaa

SEQ ID NO: 119828 - DNA, 8 bp, Unknown
  misc_feature (1)..( 8): Result.002 file - promoters60/1557730
ttagttga

SEQ ID NO: 119829 - DNA, 8 bp, Unknown
  misc_feature (1)..( 8): Result.002 file - promoters60/1557730
ttagttga

SEQ ID NO: 119830 - DNA, 7 bp, Unknown
  misc_feature (1)..( 7): Result.002 file - promoters60/1557730
tttcttt

SEQ ID NO: 119831 - DNA, 7 bp, Unknown
  misc_feature (1)..( 7): Result.002 file - promoters60/1557730
tttgttt

SEQ ID NO: 119832 - DNA, 7 bp, Unknown
  misc_feature (1)..( 7): Result.002 file - promoters60/1557730
ttacttt

SEQ ID NO: 119833 - DNA, 7 bp, Unknown
  misc_feature (1)..( 7): Result.002 file - promoters60/1557730
ttaattt

SEQ ID NO: 119834 - DNA, 7 bp, Unknown
  misc_feature (1)..( 7): Result.002 file - promoters60/1557730
atgtata

SEQ ID NO: 119835 - DNA, 7 bp, Unknown
  misc_feature (1)..( 7): Result.002 file - promoters60/1557730
atgaata

SEQ ID NO: 119836 - DNA, 9 bp, Unknown
  misc_feature (1)..( 9): Result.002 file - promoters60/1557730
atcaaatta

SEQ ID NO: 119837 - DNA, 9 bp, Unknown
  misc_feature (1)..( 9): Result.002 file - promoters60/1557730
atcatatta

SEQ ID NO: 119838 - DNA, 8 bp, Unknown
  misc_feature (1)..( 8): Result.002 file - promoters60/1557730
taaaaaaa

SEQ ID NO: 119839 - DNA, 8 bp, Unknown
  misc_feature (1)..( 8): Result.002 file - promoters60/1557730
taagaaaa

SEQ ID NO: 119840 - DNA, 7 bp, Unknown
  misc_feature (1)..( 7): Result.002 file - promoters60/1557730
acagaaa

SEQ ID NO: 119841 - DNA, 7 bp, Unknown
  misc_feature (1)..( 7): Result.002 file - promoters60/1557730
acaaaaa

SEQ ID NO: 119842 - DNA, 6 bp, Unknown
  misc_feature (1)..( 6): Result.002 file - promoters60/1557730
cacctt

SEQ ID NO: 119843 - DNA, 6 bp, Unknown
  misc_feature (1)..( 6): Result.002 file - promoters60/1557730
cacctt

SEQ ID NO: 119844 - DNA, 8 bp, Unknown
  misc_feature (1)..( 8): Result.002 file - promoters60/1557730
caccatca

SEQ ID NO: 119845 - DNA, 8 bp, Unknown
  misc_feature (1)..( 8): Result.002 file - promoters60/1557730
caccttca

SEQ ID NO: 119846 - DNA, 7 bp, Unknown
  misc_feature (1)..( 7): Result.002 file - promoters60/1557730
atgaaaa

SEQ ID NO: 119847 - DNA, 7 bp, Unknown
  misc_feature (1)..( 7): Result.002 file - promoters60/1557730
atgaaaa

SEQ ID NO: 119848 - DNA, 6 bp, Unknown
  misc_feature (1)..( 6): Result.002 file - promoters60/1557730
ccatcc

SEQ ID NO: 119849 - DNA, 6 bp, Unknown
  misc_feature (1)..( 6): Result.002 file - promoters60/1557730
ccatcc

SEQ ID NO: 119850 - DNA, 7 bp, Unknown
  misc_feature (1)..( 7): Result.002 file - promoters60/1557775
tttgttc

SEQ ID NO: 119851 - DNA, 7 bp, Unknown
  misc_feature (1)..( 7): Result.002 file - promoters60/1557775
ttttttc

SEQ ID NO: 119852 - DNA, 7 bp, Unknown
  misc_feature (1)..( 7): Result.002 file - promoters60/1557775
attatat

SEQ ID NO: 119853 - DNA, 7 bp, Unknown
  misc_feature (1)..( 7): Result.002 file - promoters60/1557775
attctat

SEQ ID NO: 119854 - DNA, 6 bp, Unknown
  misc_feature (1)..( 6): Result.002 file - promoters60/1557775
aaaaga

SEQ ID NO: 119855 - DNA, 6 bp, Unknown
  misc_feature (1)..( 6): Result.002 file - promoters60/1557775
aaaaga

SEQ ID NO: 119856 - DNA, 6 bp, Unknown
  misc_feature (1)..( 6): Result.002 file - promoters60/1557775
ttcggt

SEQ ID NO: 119857 - DNA, 6 bp, Unknown
  misc_feature (1)..( 6): Result.002 file - promoters60/1557775
ttcggt

SEQ ID NO: 119858 - DNA, 8 bp, Unknown
  misc_feature (1)..( 8): Result.002 file - promoters60/1557775
cactcaaa

SEQ ID NO: 119859 - DNA, 8 bp, Unknown
  misc_feature (1)..( 8): Result.002 file - promoters60/1557775
cacacaaa

SEQ ID NO: 119860 - DNA, 7 bp, Unknown
  misc_feature (1)..( 7): Result.002 file - promoters60/1557775
ggattcg

SEQ ID NO: 119861 - DNA, 7 bp, Unknown
  misc_feature (1)..( 7): Result.002 file - promoters60/1557775
ggattcg

SEQ ID NO: 119862 - DNA, 6 bp, Unknown
  misc_feature (1)..( 6): Result.002 file - promoters60/1557775
gaaacg

SEQ ID NO: 119863 - DNA, 6 bp, Unknown
  misc_feature (1)..( 6): Result.002 file - promoters60/1557775
gaaacg

SEQ ID NO: 119864 - DNA, 7 bp, Unknown
  misc_feature (1)..( 7): Result.002 file - promoters60/1557775
agtttct

SEQ ID NO: 119865 - DNA, 7 bp, Unknown
  misc_feature (1)..( 7): Result.002 file - promoters60/1557775
agtttct

SEQ ID NO: 119866 - DNA, 10 bp, Unknown
  misc_feature (1)..( 10): Result.002 file - promoters60/1557775
aacaacaagt

SEQ ID NO: 119867 - DNA, 10 bp, Unknown
  misc_feature (1)..( 10): Result.002 file - promoters60/1557775
aacaacgagt

SEQ ID NO: 119868 - DNA, 6 bp, Unknown
  misc_feature (1)..( 6): Result.002 file - promoters60/1557775
ttgact

SEQ ID NO: 119869 - DNA, 6 bp, Unknown
  misc_feature (1)..( 6): Result.002 file - promoters60/1557775
ttgact

SEQ ID NO: 119870 - DNA, 6 bp, Unknown
  misc_feature (1)..( 6): Result.002 file - promoters60/1557775
tataaa

SEQ ID NO: 119871 - DNA, 6 bp, Unknown
  misc_feature (1)..( 6): Result.002 file - promoters60/1557775
tataaa

SEQ ID NO: 119872 - DNA, 8 bp, Unknown
  misc_feature (1)..( 8): Result.002 file - promoters60/1557775
ggccaagt

SEQ ID NO: 119873 - DNA, 8 bp, Unknown
  misc_feature (1)..( 8): Result.002 file - promoters60/1557775
ggcgaagt

SEQ ID NO: 119874 - DNA, 6 bp, Unknown
  misc_feature (1)..( 6): Result.002 file - promoters60/1557775
aagaaa

SEQ ID NO: 119875 - DNA, 6 bp, Unknown
  misc_feature (1)..( 6): Result.002 file - promoters60/1557775
aagaaa

SEQ ID NO: 119876 - DNA, 6 bp, Unknown
  misc_feature (1)..( 6): Result.002 file - promoters60/1557775
gaatca

SEQ ID NO: 119877 - DNA, 6 bp, Unknown
  misc_feature (1)..( 6): Result.002 file - promoters60/1557775
gaatca

SEQ ID NO: 119878 - DNA, 7 bp, Unknown
  misc_feature (1)..( 7): Result.002 file - promoters60/1557775
tccggtt

SEQ ID NO: 119879 - DNA, 7 bp, Unknown
  misc_feature (1)..( 7): Result.002 file - promoters60/1557775
tccagtt

SEQ ID NO: 119880 - DNA, 6 bp, Unknown
  misc_feature (1)..( 6): Result.002 file - promoters60/1557775
tttccg

SEQ ID NO: 119881 - DNA, 6 bp, Unknown
  misc_feature (1)..( 6): Result.002 file - promoters60/1557775
tttccg

SEQ ID NO: 119882 - DNA, 6 bp, Unknown
  misc_feature (1)..( 6): Result.002 file - promoters60/1557775
ataaat

SEQ ID NO: 119883 - DNA, 6 bp, Unknown
  misc_feature (1)..( 6): Result.002 file - promoters60/1557775
ataaat

SEQ ID NO: 119884 - DNA, 6 bp, Unknown
  misc_feature (1)..( 6): Result.002 file - promoters60/1557775
aaccct

SEQ ID NO: 119885 - DNA, 6 bp, Unknown
  misc_feature (1)..( 6): Result.002 file - promoters60/1557775
aaccct

SEQ ID NO: 119886 - DNA, 11 bp, Unknown
  misc_feature (1)..( 11): Result.002 file - promoters60/1557783
aagtgtagatt

SEQ ID NO: 119887 - DNA, 11 bp, Unknown
  misc_feature (1)..( 11): Result.002 file - promoters60/1557783
aagtgttggtt

SEQ ID NO: 119888 - DNA, 11 bp, Unknown
  misc_feature (1)..( 11): Result.002 file - promoters60/1557783
tagtattgaga

SEQ ID NO: 119889 - DNA, 11 bp, Unknown
  misc_feature (1)..( 11): Result.002 file - promoters60/1557783
ccctatattat

SEQ ID NO: 119890 - DNA, 11 bp, Unknown
  misc_feature (1)..( 11): Result.002 file - promoters60/1557783
gattgtaatct

SEQ ID NO: 119891 - DNA, 13 bp, Unknown
  misc_feature (1)..( 13): Result.002 file - promoters60/1557783
aacgcaaatattt

SEQ ID NO: 119892 - DNA, 13 bp, Unknown
  misc_feature (1)..( 13): Result.002 file - promoters60/1557783
aaaacaaatatta

SEQ ID NO: 119893 - DNA, 13 bp, Unknown
  misc_feature (1)..( 13): Result.002 file - promoters60/1557783
agtcctaatttta

SEQ ID NO: 119894 - DNA, 13 bp, Unknown
  misc_feature (1)..( 13): Result.002 file - promoters60/1557783
aaaacaaatttaa

SEQ ID NO: 119895 - DNA, 13 bp, Unknown
  misc_feature (1)..( 13): Result.002 file - promoters60/1557783
gaaccgaaactat

SEQ ID NO: 119896 - DNA, 11 bp, Unknown
  misc_feature (1)..( 11): Result.002 file - promoters60/1557783
ttatgtttctc

SEQ ID NO: 119897 - DNA, 11 bp, Unknown
  misc_feature (1)..( 11): Result.002 file - promoters60/1557783
atgtgtttctc

SEQ ID NO: 119898 - DNA, 11 bp, Unknown
  misc_feature (1)..( 11): Result.002 file - promoters60/1557783
atgggtttgaa

SEQ ID NO: 119899 - DNA, 11 bp, Unknown
  misc_feature (1)..( 11): Result.002 file - promoters60/1557783
tagtgattcca

SEQ ID NO: 119900 - DNA, 10 bp, Unknown
  misc_feature (1)..( 10): Result.002 file - promoters60/1557783
agttataaat

SEQ ID NO: 119901 - DNA, 10 bp, Unknown
  misc_feature (1)..( 10): Result.002 file - promoters60/1557783
gtatatgaat

SEQ ID NO: 119902 - DNA, 10 bp, Unknown
  misc_feature (1)..( 10): Result.002 file - promoters60/1557783
gtttatgaat

SEQ ID NO: 119903 - DNA, 10 bp, Unknown
  misc_feature (1)..( 10): Result.002 file - promoters60/1557783
tgtaataaat

SEQ ID NO: 119904 - DNA, 10 bp, Unknown
  misc_feature (1)..( 10): Result.002 file - promoters60/1557783
gtagatgaga

SEQ ID NO: 119905 - DNA, 12 bp, Unknown
  misc_feature (1)..( 12): Result.002 file - promoters60/1557783
cgacgaagattc

SEQ ID NO: 119906 - DNA, 12 bp, Unknown
  misc_feature (1)..( 12): Result.002 file - promoters60/1557783
acacgtagatga

SEQ ID NO: 119907 - DNA, 12 bp, Unknown
  misc_feature (1)..( 12): Result.002 file - promoters60/1557783
aaaagtatatga

SEQ ID NO: 119908 - DNA, 12 bp, Unknown
  misc_feature (1)..( 12): Result.002 file - promoters60/1557783
acaagtagaaga

SEQ ID NO: 119909 - DNA, 8 bp, Unknown
  misc_feature (1)..( 8): Result.002 file - promoters60/1557783
tttgtaaa

SEQ ID NO: 119910 - DNA, 8 bp, Unknown
  misc_feature (1)..( 8): Result.002 file - promoters60/1557783
attgtaat

SEQ ID NO: 119911 - DNA, 8 bp, Unknown
  misc_feature (1)..( 8): Result.002 file - promoters60/1557783
aatgtaaa

SEQ ID NO: 119912 - DNA, 8 bp, Unknown
  misc_feature (1)..( 8): Result.002 file - promoters60/1557783
tttgtaat

SEQ ID NO: 119913 - DNA, 7 bp, Unknown
  misc_feature (1)..( 7): Result.002 file - promoters60/1557806
ggatgaa

SEQ ID NO: 119914 - DNA, 7 bp, Unknown
  misc_feature (1)..( 7): Result.002 file - promoters60/1557806
ggaagaa

SEQ ID NO: 119915 - DNA, 6 bp, Unknown
  misc_feature (1)..( 6): Result.002 file - promoters60/1557806
agaaga

SEQ ID NO: 119916 - DNA, 6 bp, Unknown
  misc_feature (1)..( 6): Result.002 file - promoters60/1557806
agaaga

SEQ ID NO: 119917 - DNA, 6 bp, Unknown
  misc_feature (1)..( 6): Result.002 file - promoters60/1557806
gaagaa

SEQ ID NO: 119918 - DNA, 6 bp, Unknown
  misc_feature (1)..( 6): Result.002 file - promoters60/1557806
gaagaa

SEQ ID NO: 119919 - DNA, 9 bp, Unknown
  misc_feature (1)..( 9): Result.002 file - promoters60/1557806
tcttagcaa

SEQ ID NO: 119920 - DNA, 9 bp, Unknown
  misc_feature (1)..( 9): Result.002 file - promoters60/1557806
tcttatcaa

SEQ ID NO: 119921 - DNA, 10 bp, Unknown
  misc_feature (1)..( 10): Result.002 file - promoters60/1557806
aagaatctgt

SEQ ID NO: 119922 - DNA, 10 bp, Unknown
  misc_feature (1)..( 10): Result.002 file - promoters60/1557806
gataatttgt

SEQ ID NO: 119923 - DNA, 10 bp, Unknown
  misc_feature (1)..( 10): Result.002 file - promoters60/1557806
gatgatttga

SEQ ID NO: 119924 - DNA, 8 bp, Unknown
  misc_feature (1)..( 8): Result.002 file - promoters60/1557806
tataaatt

SEQ ID NO: 119925 - DNA, 8 bp, Unknown
  misc_feature (1)..( 8): Result.002 file - promoters60/1557806
tataaatt

SEQ ID NO: 119926 - DNA, 8 bp, Unknown
  misc_feature (1)..( 8): Result.002 file - promoters60/1557806
tttcattt

SEQ ID NO: 119927 - DNA, 8 bp, Unknown
  misc_feature (1)..( 8): Result.002 file - promoters60/1557806
tttaattt

SEQ ID NO: 119928 - DNA, 7 bp, Unknown
  misc_feature (1)..( 7): Result.002 file - promoters60/1557806
aaaccaa

SEQ ID NO: 119929 - DNA, 7 bp, Unknown
  misc_feature (1)..( 7): Result.002 file - promoters60/1557806
aaatcaa

SEQ ID NO: 119930 - DNA, 6 bp, Unknown
  misc_feature (1)..( 6): Result.002 file - promoters60/1557806
aaccga

SEQ ID NO: 119931 - DNA, 6 bp, Unknown
  misc_feature (1)..( 6): Result.002 file - promoters60/1557806
aaccga

SEQ ID NO: 119932 - DNA, 6 bp, Unknown
  misc_feature (1)..( 6): Result.002 file - promoters60/1557806
caagtt

SEQ ID NO: 119933 - DNA, 6 bp, Unknown
  misc_feature (1)..( 6): Result.002 file - promoters60/1557806
caagtt

SEQ ID NO: 119934 - DNA, 6 bp, Unknown
  misc_feature (1)..( 6): Result.002 file - promoters60/1557806
acagtg

SEQ ID NO: 119935 - DNA, 6 bp, Unknown
  misc_feature (1)..( 6): Result.002 file - promoters60/1557806
acagtg

SEQ ID NO: 119936 - DNA, 6 bp, Unknown
  misc_feature (1)..( 6): Result.002 file - promoters60/1557806
gaactt

SEQ ID NO: 119937 - DNA, 6 bp, Unknown
  misc_feature (1)..( 6): Result.002 file - promoters60/1557806
gaactt

SEQ ID NO: 119938 - DNA, 8 bp, Unknown
  misc_feature (1)..( 8): Result.002 file - promoters60/1557806
aatttatt

SEQ ID NO: 119939 - DNA, 8 bp, Unknown
  misc_feature (1)..( 8): Result.002 file - promoters60/1557806
aattgatt

SEQ ID NO: 119940 - DNA, 6 bp, Unknown
  misc_feature (1)..( 6): Result.002 file - promoters60/1557806
aaaatt

SEQ ID NO: 119941 - DNA, 6 bp, Unknown
  misc_feature (1)..( 6): Result.002 file - promoters60/1557806
aaaatt

SEQ ID NO: 119942 - DNA, 10 bp, Unknown
  misc_feature (1)..( 10): Result.002 file - promoters60/1557806
tatgttttgg

SEQ ID NO: 119943 - DNA, 10 bp, Unknown
  misc_feature (1)..( 10): Result.002 file - promoters60/1557806
tatgctttgg

SEQ ID NO: 119944 - DNA, 8 bp, Unknown
  misc_feature (1)..( 8): Result.002 file - promoters60/1557806
ttcacaga

SEQ ID NO: 119945 - DNA, 8 bp, Unknown
  misc_feature (1)..( 8): Result.002 file - promoters60/1557806
ttcacaga

SEQ ID NO: 119946 - DNA, 6 bp, Unknown
  misc_feature (1)..( 6): Result.002 file - promoters60/1557806
tcttgt

SEQ ID NO: 119947 - DNA, 6 bp, Unknown
  misc_feature (1)..( 6): Result.002 file - promoters60/1557806
tcttgt

SEQ ID NO: 119948 - DNA, 6 bp, Unknown
  misc_feature (1)..( 6): Result.002 file - promoters60/1557806
gtgtgc

SEQ ID NO: 119949 - DNA, 6 bp, Unknown
  misc_feature (1)..( 6): Result.002 file - promoters60/1557806
gtgtgc

SEQ ID NO: 119950 - DNA, 12 bp, Unknown
  misc_feature (1)..( 12): Result.002 file - promoters60/1565965
gtaccattggga

SEQ ID NO: 119951 - DNA, 12 bp, Unknown
  misc_feature (1)..( 12): Result.002 file - promoters60/1565965
agaacattggat

SEQ ID NO: 119952 - DNA, 12 bp, Unknown
  misc_feature (1)..( 12): Result.002 file - promoters60/1565965
agaaaatttgat

SEQ ID NO: 119953 - DNA, 12 bp, Unknown
  misc_feature (1)..( 12): Result.002 file - promoters60/1565965
cgaaaatcgcgt

SEQ ID NO: 119954 - DNA, 9 bp, Unknown
  misc_feature (1)..( 9): Result.002 file - promoters60/1565965
ttttatagt

SEQ ID NO: 119955 - DNA, 9 bp, Unknown
  misc_feature (1)..( 9): Result.002 file - promoters60/1565965
gtttataaa

SEQ ID NO: 119956 - DNA, 9 bp, Unknown
  misc_feature (1)..( 9): Result.002 file - promoters60/1565965
ttttatagt

SEQ ID NO: 119957 - DNA, 9 bp, Unknown
  misc_feature (1)..( 9): Result.002 file - promoters60/1565965
cattatagt

SEQ ID NO: 119958 - DNA, 8 bp, Unknown
  misc_feature (1)..( 8): Result.002 file - promoters60/1565965
attgatcg

SEQ ID NO: 119959 - DNA, 8 bp, Unknown
  misc_feature (1)..( 8): Result.002 file - promoters60/1565965
tttgttcg

SEQ ID NO: 119960 - DNA, 8 bp, Unknown
  misc_feature (1)..( 8): Result.002 file - promoters60/1565965
attaatcg

SEQ ID NO: 119961 - DNA, 8 bp, Unknown
  misc_feature (1)..( 8): Result.002 file - promoters60/1565965
cttgttct

SEQ ID NO: 119962 - DNA, 8 bp, Unknown
  misc_feature (1)..( 8): Result.002 file - promoters60/1565965
attgttct

SEQ ID NO: 119963 - DNA, 15 bp, Unknown
  misc_feature (1)..( 15): Result.002 file - promoters60/1565965
taaagagtaaagacc

SEQ ID NO: 119964 - DNA, 15 bp, Unknown
  misc_feature (1)..( 15): Result.002 file - promoters60/1565965
taaatagtaacggga

SEQ ID NO: 119965 - DNA, 15 bp, Unknown
  misc_feature (1)..( 15): Result.002 file - promoters60/1565965
tttatagtaaccgga

SEQ ID NO: 119966 - DNA, 15 bp, Unknown
  misc_feature (1)..( 15): Result.002 file - promoters60/1565965
attatagtcccttaa

SEQ ID NO: 119967 - DNA, 8 bp, Unknown
  misc_feature (1)..( 8): Result.002 file - promoters60/1565965
ccgtactt

SEQ ID NO: 119968 - DNA, 8 bp, Unknown
  misc_feature (1)..( 8): Result.002 file - promoters60/1565965
atgtactt

SEQ ID NO: 119969 - DNA, 8 bp, Unknown
  misc_feature (1)..( 8): Result.002 file - promoters60/1565965
ttgttctt

SEQ ID NO: 119970 - DNA, 8 bp, Unknown
  misc_feature (1)..( 8): Result.002 file - promoters60/1565965
ttgttctc

SEQ ID NO: 119971 - DNA, 7 bp, Unknown
  misc_feature (1)..( 7): Result.002 file - promoters60/1566253
tgggttt

SEQ ID NO: 119972 - DNA, 7 bp, Unknown
  misc_feature (1)..( 7): Result.002 file - promoters60/1566253
tggtttt

SEQ ID NO: 119973 - DNA, 6 bp, Unknown
  misc_feature (1)..( 6): Result.002 file - promoters60/1566253
ttgttg

SEQ ID NO: 119974 - DNA, 6 bp, Unknown
  misc_feature (1)..( 6): Result.002 file - promoters60/1566253
ttgttg

SEQ ID NO: 119975 - DNA, 6 bp, Unknown
  misc_feature (1)..( 6): Result.002 file - promoters60/1566253
agtaaa

SEQ ID NO: 119976 - DNA, 6 bp, Unknown
  misc_feature (1)..( 6): Result.002 file - promoters60/1566253
agtaaa

SEQ ID NO: 119977 - DNA, 7 bp, Unknown
  misc_feature (1)..( 7): Result.002 file - promoters60/1566253
aagaaaa

SEQ ID NO: 119978 - DNA, 7 bp, Unknown
  misc_feature (1)..( 7): Result.002 file - promoters60/1566253
aagtaaa

SEQ ID NO: 119979 - DNA, 9 bp, Unknown
  misc_feature (1)..( 9): Result.002 file - promoters60/1566253
gagcctgat

SEQ ID NO: 119980 - DNA, 9 bp, Unknown
  misc_feature (1)..( 9): Result.002 file - promoters60/1566253
gagtctgat

SEQ ID NO: 119981 - DNA, 6 bp, Unknown
  misc_feature (1)..( 6): Result.002 file - promoters60/1566253
aattgc

SEQ ID NO: 119982 - DNA, 6 bp, Unknown
  misc_feature (1)..( 6): Result.002 file - promoters60/1566253
aattgc

SEQ ID NO: 119983 - DNA, 6 bp, Unknown
  misc_feature (1)..( 6): Result.002 file - promoters60/1566253
tccaaa

SEQ ID NO: 119984 - DNA, 6 bp, Unknown
  misc_feature (1)..( 6): Result.002 file - promoters60/1566253
tccaaa

SEQ ID NO: 119985 - DNA, 6 bp, Unknown
  misc_feature (1)..( 6): Result.002 file - promoters60/1566253
aaacga

SEQ ID NO: 119986 - DNA, 6 bp, Unknown
  misc_feature (1)..( 6): Result.002 file - promoters60/1566253
aaacga

SEQ ID NO: 119987 - DNA, 6 bp, Unknown
  misc_feature (1)..( 6): Result.002 file - promoters60/1566253
tctaaa

SEQ ID NO: 119988 - DNA, 6 bp, Unknown
  misc_feature (1)..( 6): Result.002 file - promoters60/1566253
tctaaa

SEQ ID NO: 119989 - DNA, 8 bp, Unknown
  misc_feature (1)..( 8): Result.002 file - promoters60/1566253
aacacaaa

SEQ ID NO: 119990 - DNA, 8 bp, Unknown
  misc_feature (1)..( 8): Result.002 file - promoters60/1566253
aacaaaaa

SEQ ID NO: 119991 - DNA, 6 bp, Unknown
  misc_feature (1)..( 6): Result.002 file - promoters60/1566253
ttgact

SEQ ID NO: 119992 - DNA, 6 bp, Unknown
  misc_feature (1)..( 6): Result.002 file - promoters60/1566253
ttgact

SEQ ID NO: 119993 - DNA, 8 bp, Unknown
  misc_feature (1)..( 8): Result.002 file - promoters60/1566253
ccaagacg

SEQ ID NO: 119994 - DNA, 8 bp, Unknown
  misc_feature (1)..( 8): Result.002 file - promoters60/1566253
ccaagacg

SEQ ID NO: 119995 - DNA, 7 bp, Unknown
  misc_feature (1)..( 7): Result.002 file - promoters60/1566253
aggccca

SEQ ID NO: 119996 - DNA, 7 bp, Unknown
  misc_feature (1)..( 7): Result.002 file - promoters60/1566253
aggccca

SEQ ID NO: 119997 - DNA, 6 bp, Unknown
  misc_feature (1)..( 6): Result.002 file - promoters60/1566423
tcaaaa

SEQ ID NO: 119998 - DNA, 6 bp, Unknown
  misc_feature (1)..( 6): Result.002 file - promoters60/1566423
tcaaaa

SEQ ID NO: 119999 - DNA, 8 bp, Unknown
  misc_feature (1)..( 8): Result.002 file - promoters60/1566423
aaatcata

SEQ ID NO: 120000 - DNA, 8 bp, Unknown
  misc_feature (1)..( 8): Result.002 file - promoters60/1566423
aaataata

SEQ ID NO: 120001 - DNA, 7 bp, Unknown
  misc_feature (1)..( 7): Result.002 file - promoters60/1566423
taggtaa

SEQ ID NO: 120002 - DNA, 7 bp, Unknown
  misc_feature (1)..( 7): Result.002 file - promoters60/1566423
tagataa

SEQ ID NO: 120003 - DNA, 12 bp, Unknown
  misc_feature (1)..( 12): Result.002 file - promoters60/1566423
ctgaaatatatt

SEQ ID NO: 120004 - DNA, 12 bp, Unknown
  misc_feature (1)..( 12): Result.002 file - promoters60/1566423
ctgaaataaatt

SEQ ID NO: 120005 - DNA, 6 bp, Unknown
  misc_feature (1)..( 6): Result.002 file - promoters60/1566423
ttatgt

SEQ ID NO: 120006 - DNA, 6 bp, Unknown
  misc_feature (1)..( 6): Result.002 file - promoters60/1566423
ttatgt

SEQ ID NO: 120007 - DNA, 11 bp, Unknown
  misc_feature (1)..( 11): Result.002 file - promoters60/1566423
tttgtaaacaa

SEQ ID NO: 120008 - DNA, 11 bp, Unknown
  misc_feature (1)..( 11): Result.002 file - promoters60/1566423
tttgtatacaa

SEQ ID NO: 120009 - DNA, 9 bp, Unknown
  misc_feature (1)..( 9): Result.002 file - promoters60/1566423
tatattatt

SEQ ID NO: 120010 - DNA, 9 bp, Unknown
  misc_feature (1)..( 9): Result.002 file - promoters60/1566423
tattttatt

SEQ ID NO: 120011 - DNA, 9 bp, Unknown
  misc_feature (1)..( 9): Result.002 file - promoters60/1566423
attaaaatt

SEQ ID NO: 120012 - DNA, 9 bp, Unknown
  misc_feature (1)..( 9): Result.002 file - promoters60/1566423
attaatatt

SEQ ID NO: 120013 - DNA, 7 bp, Unknown
  misc_feature (1)..( 7): Result.002 file - promoters60/1566423
gaccaaa

SEQ ID NO: 120014 - DNA, 7 bp, Unknown
  misc_feature (1)..( 7): Result.002 file - promoters60/1566423
gacaaaa

SEQ ID NO: 120015 - DNA, 7 bp, Unknown
  misc_feature (1)..( 7): Result.002 file - promoters60/1566423
ttcaata

SEQ ID NO: 120016 - DNA, 7 bp, Unknown
  misc_feature (1)..( 7): Result.002 file - promoters60/1566423
ttccata

SEQ ID NO: 120017 - DNA, 8 bp, Unknown
  misc_feature (1)..( 8): Result.002 file - promoters60/1566423
atttcaca

SEQ ID NO: 120018 - DNA, 8 bp, Unknown
  misc_feature (1)..( 8): Result.002 file - promoters60/1566423
attttaca

SEQ ID NO: 120019 - DNA, 6 bp, Unknown
  misc_feature (1)..( 6): Result.002 file - promoters60/1566423
tattta

SEQ ID NO: 120020 - DNA, 6 bp, Unknown
  misc_feature (1)..( 6): Result.002 file - promoters60/1566423
tattta

SEQ ID NO: 120021 - DNA, 6 bp, Unknown
  misc_feature (1)..( 6): Result.002 file - promoters60/1566423
taaaac

SEQ ID NO: 120022 - DNA, 6 bp, Unknown
  misc_feature (1)..( 6): Result.002 file - promoters60/1566423
taaaac

SEQ ID NO: 120023 - DNA, 6 bp, Unknown
  misc_feature (1)..( 6): Result.002 file - promoters60/1566423
cccaat

SEQ ID NO: 120024 - DNA, 6 bp, Unknown
  misc_feature (1)..( 6): Result.002 file - promoters60/1566423
cccaat

SEQ ID NO: 120025 - DNA, 11 bp, Unknown
  misc_feature (1)..( 11): Result.002 file - promoters60/1566423
aagcaaagagg

SEQ ID NO: 120026 - DNA, 11 bp, Unknown
  misc_feature (1)..( 11): Result.002 file - promoters60/1566423
aaggaaacagg

SEQ ID NO: 120027 - DNA, 6 bp, Unknown
  misc_feature (1)..( 6): Result.002 file - promoters60/1566715
tcaaaa

SEQ ID NO: 120028 - DNA, 6 bp, Unknown
  misc_feature (1)..( 6): Result.002 file - promoters60/1566715
tcaaaa

SEQ ID NO: 120029 - DNA, 8 bp, Unknown
  misc_feature (1)..( 8): Result.002 file - promoters60/1566715
aaatcata

SEQ ID NO: 120030 - DNA, 8 bp, Unknown
  misc_feature (1)..( 8): Result.002 file - promoters60/1566715
aaataata

SEQ ID NO: 120031 - DNA, 7 bp, Unknown
  misc_feature (1)..( 7): Result.002 file - promoters60/1566715
taggtaa

SEQ ID NO: 120032 - DNA, 7 bp, Unknown
  misc_feature (1)..( 7): Result.002 file - promoters60/1566715
tagataa

SEQ ID NO: 120033 - DNA, 12 bp, Unknown
  misc_feature (1)..( 12): Result.002 file - promoters60/1566715
ctgaaatatatt

SEQ ID NO: 120034 - DNA, 12 bp, Unknown
  misc_feature (1)..( 12): Result.002 file - promoters60/1566715
ctgaaataaatt

SEQ ID NO: 120035 - DNA, 6 bp, Unknown
  misc_feature (1)..( 6): Result.002 file - promoters60/1566715
ttatgt

SEQ ID NO: 120036 - DNA, 6 bp, Unknown
  misc_feature (1)..( 6): Result.002 file - promoters60/1566715
ttatgt

SEQ ID NO: 120037 - DNA, 11 bp, Unknown
  misc_feature (1)..( 11): Result.002 file - promoters60/1566715
tttgtaaacaa

SEQ ID NO: 120038 - DNA, 11 bp, Unknown
  misc_feature (1)..( 11): Result.002 file - promoters60/1566715
tttgtatacaa

SEQ ID NO: 120039 - DNA, 9 bp, Unknown
  misc_feature (1)..( 9): Result.002 file - promoters60/1566715
tatattatt

SEQ ID NO: 120040 - DNA, 9 bp, Unknown
  misc_feature (1)..( 9): Result.002 file - promoters60/1566715
tattttatt

SEQ ID NO: 120041 - DNA, 9 bp, Unknown
  misc_feature (1)..( 9): Result.002 file - promoters60/1566715
attaaaatt

SEQ ID NO: 120042 - DNA, 9 bp, Unknown
  misc_feature (1)..( 9): Result.002 file - promoters60/1566715
attaatatt

SEQ ID NO: 120043 - DNA, 7 bp, Unknown
  misc_feature (1)..( 7): Result.002 file - promoters60/1566715
gaccaaa

SEQ ID NO: 120044 - DNA, 7 bp, Unknown
  misc_feature (1)..( 7): Result.002 file - promoters60/1566715
gacaaaa

SEQ ID NO: 120045 - DNA, 7 bp, Unknown
  misc_feature (1)..( 7): Result.002 file - promoters60/1566715
ttcaata

SEQ ID NO: 120046 - DNA, 7 bp, Unknown
  misc_feature (1)..( 7): Result.002 file - promoters60/1566715
ttccata

SEQ ID NO: 120047 - DNA, 8 bp, Unknown
  misc_feature (1)..( 8): Result.002 file - promoters60/1566715
atttcaca

SEQ ID NO: 120048 - DNA, 8 bp, Unknown
  misc_feature (1)..( 8): Result.002 file - promoters60/1566715
attttaca

SEQ ID NO: 120049 - DNA, 6 bp, Unknown
  misc_feature (1)..( 6): Result.002 file - promoters60/1566715
tattta

SEQ ID NO: 120050 - DNA, 6 bp, Unknown
  misc_feature (1)..( 6): Result.002 file - promoters60/1566715
tattta

SEQ ID NO: 120051 - DNA, 6 bp, Unknown
  misc_feature (1)..( 6): Result.002 file - promoters60/1566715
taaaac

SEQ ID NO: 120052 - DNA, 6 bp, Unknown
  misc_feature (1)..( 6): Result.002 file - promoters60/1566715
taaaac

SEQ ID NO: 120053 - DNA, 6 bp, Unknown
  misc_feature (1)..( 6): Result.002 file - promoters60/1566715
cccaat

SEQ ID NO: 120054 - DNA, 6 bp, Unknown
  misc_feature (1)..( 6): Result.002 file - promoters60/1566715
cccaat

SEQ ID NO: 120055 - DNA, 11 bp, Unknown
  misc_feature (1)..( 11): Result.002 file - promoters60/1566715
aagcaaagagg

SEQ ID NO: 120056 - DNA, 11 bp, Unknown
  misc_feature (1)..( 11): Result.002 file - promoters60/1566715
aaggaaacagg

SEQ ID NO: 120057 - DNA, 6 bp, Unknown
  misc_feature (1)..( 6): Result.002 file - promoters60/1566797
aaaaac

SEQ ID NO: 120058 - DNA, 6 bp, Unknown
  misc_feature (1)..( 6): Result.002 file - promoters60/1566797
aaaaac

SEQ ID NO: 120059 - DNA, 6 bp, Unknown
  misc_feature (1)..( 6): Result.002 file - promoters60/1566797
ttaaat

SEQ ID NO: 120060 - DNA, 6 bp, Unknown
  misc_feature (1)..( 6): Result.002 file - promoters60/1566797
ttaaat

SEQ ID NO: 120061 - DNA, 6 bp, Unknown
  misc_feature (1)..( 6): Result.002 file - promoters60/1566797
taaaat

SEQ ID NO: 120062 - DNA, 6 bp, Unknown
  misc_feature (1)..( 6): Result.002 file - promoters60/1566797
taaaat

SEQ ID NO: 120063 - DNA, 10 bp, Unknown
  misc_feature (1)..( 10): Result.002 file - promoters60/1566797
ttcgtttctt

SEQ ID NO: 120064 - DNA, 10 bp, Unknown
  misc_feature (1)..( 10): Result.002 file - promoters60/1566797
ttcttttctt

SEQ ID NO: 120065 - DNA, 6 bp, Unknown
  misc_feature (1)..( 6): Result.002 file - promoters60/1566797
aatgct

SEQ ID NO: 120066 - DNA, 6 bp, Unknown
  misc_feature (1)..( 6): Result.002 file - promoters60/1566797
aatgct

SEQ ID NO: 120067 - DNA, 8 bp, Unknown
  misc_feature (1)..( 8): Result.002 file - promoters60/1566797
tttggtta

SEQ ID NO: 120068 - DNA, 8 bp, Unknown
  misc_feature (1)..( 8): Result.002 file - promoters60/1566797
tttgttta

SEQ ID NO: 120069 - DNA, 7 bp, Unknown
  misc_feature (1)..( 7): Result.002 file - promoters60/1566797
aaagata

SEQ ID NO: 120070 - DNA, 7 bp, Unknown
  misc_feature (1)..( 7): Result.002 file - promoters60/1566797
aaagata

SEQ ID NO: 120071 - DNA, 6 bp, Unknown
  misc_feature (1)..( 6): Result.002 file - promoters60/1566797
cacata

SEQ ID NO: 120072 - DNA, 6 bp, Unknown
  misc_feature (1)..( 6): Result.002 file - promoters60/1566797
cacata

SEQ ID NO: 120073 - DNA, 7 bp, Unknown
  misc_feature (1)..( 7): Result.002 file - promoters60/1566797
aacgttt

SEQ ID NO: 120074 - DNA, 7 bp, Unknown
  misc_feature (1)..( 7): Result.002 file - promoters60/1566797
aaccttt

SEQ ID NO: 120075 - DNA, 6 bp, Unknown
  misc_feature (1)..( 6): Result.002 file - promoters60/1566797
ttaaac

SEQ ID NO: 120076 - DNA, 6 bp, Unknown
  misc_feature (1)..( 6): Result.002 file - promoters60/1566797
ttaaac

SEQ ID NO: 120077 - DNA, 7 bp, Unknown
  misc_feature (1)..( 7): Result.002 file - promoters60/1566797
aattaat

SEQ ID NO: 120078 - DNA, 7 bp, Unknown
  misc_feature (1)..( 7): Result.002 file - promoters60/1566797
aatgaat

SEQ ID NO: 120079 - DNA, 8 bp, Unknown
  misc_feature (1)..( 8): Result.002 file - promoters60/1566797
acatgacg

SEQ ID NO: 120080 - DNA, 8 bp, Unknown
  misc_feature (1)..( 8): Result.002 file - promoters60/1566797
acataacg

SEQ ID NO: 120081 - DNA, 7 bp, Unknown
  misc_feature (1)..( 7): Result.002 file - promoters60/1566797
cattttt

SEQ ID NO: 120082 - DNA, 7 bp, Unknown
  misc_feature (1)..( 7): Result.002 file - promoters60/1566797
cattttt

SEQ ID NO: 120083 - DNA, 13 bp, Unknown
  misc_feature (1)..( 13): Result.002 file - promoters60/1566948
ttggatcaacaat

SEQ ID NO: 120084 - DNA, 13 bp, Unknown
  misc_feature (1)..( 13): Result.002 file - promoters60/1566948
ttgaatcaatatt

SEQ ID NO: 120085 - DNA, 13 bp, Unknown
  misc_feature (1)..( 13): Result.002 file - promoters60/1566948
ttgattcaaaatt

SEQ ID NO: 120086 - DNA, 6 bp, Unknown
  misc_feature (1)..( 6): Result.002 file - promoters60/1566948
tggatt

SEQ ID NO: 120087 - DNA, 6 bp, Unknown
  misc_feature (1)..( 6): Result.002 file - promoters60/1566948
tggatt

SEQ ID NO: 120088 - DNA, 6 bp, Unknown
  misc_feature (1)..( 6): Result.002 file - promoters60/1566948
tggatt

SEQ ID NO: 120089 - DNA, 13 bp, Unknown
  misc_feature (1)..( 13): Result.002 file - promoters60/1566948
tttaggaaaaatt

SEQ ID NO: 120090 - DNA, 13 bp, Unknown
  misc_feature (1)..( 13): Result.002 file - promoters60/1566948
ttgattcaaaatt

SEQ ID NO: 120091 - DNA, 13 bp, Unknown
  misc_feature (1)..( 13): Result.002 file - promoters60/1566948
ttgaatcaatatt

SEQ ID NO: 120092 - DNA, 7 bp, Unknown
  misc_feature (1)..( 7): Result.002 file - promoters60/1567007
aaaagaa

SEQ ID NO: 120093 - DNA, 7 bp, Unknown
  misc_feature (1)..( 7): Result.002 file - promoters60/1567007
aaaagaa

SEQ ID NO: 120094 - DNA, 7 bp, Unknown
  misc_feature (1)..( 7): Result.002 file - promoters60/1567007
aaaagat

SEQ ID NO: 120095 - DNA, 9 bp, Unknown
  misc_feature (1)..( 9): Result.002 file - promoters60/1567007
aaatattaa

SEQ ID NO: 120096 - DNA, 9 bp, Unknown
  misc_feature (1)..( 9): Result.002 file - promoters60/1567007
aaatatctt

SEQ ID NO: 120097 - DNA, 9 bp, Unknown
  misc_feature (1)..( 9): Result.002 file - promoters60/1567007
gaattttaa

SEQ ID NO: 120098 - DNA, 8 bp, Unknown
  misc_feature (1)..( 8): Result.002 file - promoters60/1567007
taaaatct

SEQ ID NO: 120099 - DNA, 8 bp, Unknown
  misc_feature (1)..( 8): Result.002 file - promoters60/1567007
caaaatca

SEQ ID NO: 120100 - DNA, 8 bp, Unknown
  misc_feature (1)..( 8): Result.002 file - promoters60/1567007
caaattca

SEQ ID NO: 120101 - DNA, 8 bp, Unknown
  misc_feature (1)..( 8): Result.002 file - promoters60/1567007
ttaaaatc

SEQ ID NO: 120102 - DNA, 8 bp, Unknown
  misc_feature (1)..( 8): Result.002 file - promoters60/1567007
ttaaaaaa

SEQ ID NO: 120103 - DNA, 8 bp, Unknown
  misc_feature (1)..( 8): Result.002 file - promoters60/1567007
ctaaaaaa

SEQ ID NO: 120104 - DNA, 8 bp, Unknown
  misc_feature (1)..( 8): Result.002 file - promoters60/1567007
ctaaaaga

SEQ ID NO: 120105 - DNA, 8 bp, Unknown
  misc_feature (1)..( 8): Result.002 file - promoters60/1567007
ctaaaaaa

SEQ ID NO: 120106 - DNA, 8 bp, Unknown
  misc_feature (1)..( 8): Result.002 file - promoters60/1567007
ttaaaaaa

SEQ ID NO: 120107 - DNA, 8 bp, Unknown
  misc_feature (1)..( 8): Result.002 file - promoters60/1567007
aaaagaac

SEQ ID NO: 120108 - DNA, 8 bp, Unknown
  misc_feature (1)..( 8): Result.002 file - promoters60/1567007
taaaaaac

SEQ ID NO: 120109 - DNA, 8 bp, Unknown
  misc_feature (1)..( 8): Result.002 file - promoters60/1567007
taaaaaaa

SEQ ID NO: 120110 - DNA, 10 bp, Unknown
  misc_feature (1)..( 10): Result.002 file - promoters60/1567092
tttgcttaca

SEQ ID NO: 120111 - DNA, 10 bp, Unknown
  misc_feature (1)..( 10): Result.002 file - promoters60/1567092
ttttcttttc

SEQ ID NO: 120112 - DNA, 10 bp, Unknown
  misc_feature (1)..( 10): Result.002 file - promoters60/1567092
gttgtttata

SEQ ID NO: 120113 - DNA, 10 bp, Unknown
  misc_feature (1)..( 10): Result.002 file - promoters60/1567092
catgtttaat

SEQ ID NO: 120114 - DNA, 10 bp, Unknown
  misc_feature (1)..( 10): Result.002 file - promoters60/1567092
aaagttaaat

SEQ ID NO: 120115 - DNA, 10 bp, Unknown
  misc_feature (1)..( 10): Result.002 file - promoters60/1567092
catatttagc

SEQ ID NO: 120116 - DNA, 10 bp, Unknown
  misc_feature (1)..( 10): Result.002 file - promoters60/1567092
tgagttcata

SEQ ID NO: 120117 - DNA, 10 bp, Unknown
  misc_feature (1)..( 10): Result.002 file - promoters60/1567092
caagtaaaag

SEQ ID NO: 120118 - DNA, 13 bp, Unknown
  misc_feature (1)..( 13): Result.002 file - promoters60/1567092
cgcaactattttg

SEQ ID NO: 120119 - DNA, 13 bp, Unknown
  misc_feature (1)..( 13): Result.002 file - promoters60/1567092
cctgcatatttta

SEQ ID NO: 120120 - DNA, 13 bp, Unknown
  misc_feature (1)..( 13): Result.002 file - promoters60/1567092
agtcataatttta

SEQ ID NO: 120121 - DNA, 13 bp, Unknown
  misc_feature (1)..( 13): Result.002 file - promoters60/1567092
tcataatattagt

SEQ ID NO: 120122 - DNA, 13 bp, Unknown
  misc_feature (1)..( 13): Result.002 file - promoters60/1567092
gtatcataaagca

SEQ ID NO: 120123 - DNA, 13 bp, Unknown
  misc_feature (1)..( 13): Result.002 file - promoters60/1567092
aactagaattttc

SEQ ID NO: 120124 - DNA, 13 bp, Unknown
  misc_feature (1)..( 13): Result.002 file - promoters60/1567092
caacaatgtacaa

SEQ ID NO: 120125 - DNA, 13 bp, Unknown
  misc_feature (1)..( 13): Result.002 file - promoters60/1567092
caataatttacat

SEQ ID NO: 120126 - DNA, 13 bp, Unknown
  misc_feature (1)..( 13): Result.002 file - promoters60/1567092
ttacaatttacaa

SEQ ID NO: 120127 - DNA, 13 bp, Unknown
  misc_feature (1)..( 13): Result.002 file - promoters60/1567092
gaataataaaatg

SEQ ID NO: 120128 - DNA, 13 bp, Unknown
  misc_feature (1)..( 13): Result.002 file - promoters60/1567092
atataacttatcc

SEQ ID NO: 120129 - DNA, 13 bp, Unknown
  misc_feature (1)..( 13): Result.002 file - promoters60/1567092
tgaaaatttatac

SEQ ID NO: 120130 - DNA, 11 bp, Unknown
  misc_feature (1)..( 11): Result.002 file - promoters60/1567949
ataatcaatga

SEQ ID NO: 120131 - DNA, 11 bp, Unknown
  misc_feature (1)..( 11): Result.002 file - promoters60/1567949
aagatcattga

SEQ ID NO: 120132 - DNA, 11 bp, Unknown
  misc_feature (1)..( 11): Result.002 file - promoters60/1567949
ccaatcaaatg

SEQ ID NO: 120133 - DNA, 11 bp, Unknown
  misc_feature (1)..( 11): Result.002 file - promoters60/1567949
gtaataaattc

SEQ ID NO: 120134 - DNA, 11 bp, Unknown
  misc_feature (1)..( 11): Result.002 file - promoters60/1567949
gagatcatttg

SEQ ID NO: 120135 - DNA, 11 bp, Unknown
  misc_feature (1)..( 11): Result.002 file - promoters60/1567949
aagatcatgta

SEQ ID NO: 120136 - DNA, 10 bp, Unknown
  misc_feature (1)..( 10): Result.002 file - promoters60/1567957
ccagaattaa

SEQ ID NO: 120137 - DNA, 10 bp, Unknown
  misc_feature (1)..( 10): Result.002 file - promoters60/1567957
ccataattag

SEQ ID NO: 120138 - DNA, 10 bp, Unknown
  misc_feature (1)..( 10): Result.002 file - promoters60/1567957
aaatacttaa

SEQ ID NO: 120139 - DNA, 10 bp, Unknown
  misc_feature (1)..( 10): Result.002 file - promoters60/1567957
tcatcaatat

SEQ ID NO: 120140 - DNA, 10 bp, Unknown
  misc_feature (1)..( 10): Result.002 file - promoters60/1567957
ttatccatat

SEQ ID NO: 120141 - DNA, 11 bp, Unknown
  misc_feature (1)..( 11): Result.002 file - promoters60/1567957
atggtttatta

SEQ ID NO: 120142 - DNA, 11 bp, Unknown
  misc_feature (1)..( 11): Result.002 file - promoters60/1567957
cttttttttta

SEQ ID NO: 120143 - DNA, 11 bp, Unknown
  misc_feature (1)..( 11): Result.002 file - promoters60/1567957
atactttattt

SEQ ID NO: 120144 - DNA, 11 bp, Unknown
  misc_feature (1)..( 11): Result.002 file - promoters60/1567957
aacattttttt

SEQ ID NO: 120145 - DNA, 13 bp, Unknown
  misc_feature (1)..( 13): Result.002 file - promoters60/1567957
acaactttaaaca

SEQ ID NO: 120146 - DNA, 13 bp, Unknown
  misc_feature (1)..( 13): Result.002 file - promoters60/1567957
atttttttaaaaa

SEQ ID NO: 120147 - DNA, 13 bp, Unknown
  misc_feature (1)..( 13): Result.002 file - promoters60/1567957
gctggtttcaaca

SEQ ID NO: 120148 - DNA, 13 bp, Unknown
  misc_feature (1)..( 13): Result.002 file - promoters60/1567957
attattttaattt

SEQ ID NO: 120149 - DNA, 11 bp, Unknown
  misc_feature (1)..( 11): Result.002 file - promoters60/1567957
gcccaaatacg

SEQ ID NO: 120150 - DNA, 11 bp, Unknown
  misc_feature (1)..( 11): Result.002 file - promoters60/1567957
atccatatata

SEQ ID NO: 120151 - DNA, 11 bp, Unknown
  misc_feature (1)..( 11): Result.002 file - promoters60/1567957
ttacataaata

SEQ ID NO: 120152 - DNA, 11 bp, Unknown
  misc_feature (1)..( 11): Result.002 file - promoters60/1567957
atcaatattct

SEQ ID NO: 120153 - DNA, 6 bp, Unknown
  misc_feature (1)..( 6): Result.002 file - promoters60/1568230
gattga

SEQ ID NO: 120154 - DNA, 6 bp, Unknown
  misc_feature (1)..( 6): Result.002 file - promoters60/1568230
gattga

SEQ ID NO: 120155 - DNA, 8 bp, Unknown
  misc_feature (1)..( 8): Result.002 file - promoters60/1568230
tcggtttt

SEQ ID NO: 120156 - DNA, 8 bp, Unknown
  misc_feature (1)..( 8): Result.002 file - promoters60/1568230
tcgatttt

SEQ ID NO: 120157 - DNA, 6 bp, Unknown
  misc_feature (1)..( 6): Result.002 file - promoters60/1568230
atttta

SEQ ID NO: 120158 - DNA, 6 bp, Unknown
  misc_feature (1)..( 6): Result.002 file - promoters60/1568230
atttta

SEQ ID NO: 120159 - DNA, 10 bp, Unknown
  misc_feature (1)..( 10): Result.002 file - promoters60/1568230
ttaatataaa

SEQ ID NO: 120160 - DNA, 10 bp, Unknown
  misc_feature (1)..( 10): Result.002 file - promoters60/1568230
acaatttaaa

SEQ ID NO: 120161 - DNA, 10 bp, Unknown
  misc_feature (1)..( 10): Result.002 file - promoters60/1568230
ttattataaa

SEQ ID NO: 120162 - DNA, 6 bp, Unknown
  misc_feature (1)..( 6): Result.002 file - promoters60/1568230
aaccgt

SEQ ID NO: 120163 - DNA, 6 bp, Unknown
  misc_feature (1)..( 6): Result.002 file - promoters60/1568230
aaccgt

SEQ ID NO: 120164 - DNA, 7 bp, Unknown
  misc_feature (1)..( 7): Result.002 file - promoters60/1568230
taatcta

SEQ ID NO: 120165 - DNA, 7 bp, Unknown
  misc_feature (1)..( 7): Result.002 file - promoters60/1568230
taaacta

SEQ ID NO: 120166 - DNA, 6 bp, Unknown
  misc_feature (1)..( 6): Result.002 file - promoters60/1568230
aatatt

SEQ ID NO: 120167 - DNA, 6 bp, Unknown
  misc_feature (1)..( 6): Result.002 file - promoters60/1568230
aatatt

SEQ ID NO: 120168 - DNA, 7 bp, Unknown
  misc_feature (1)..( 7): Result.002 file - promoters60/1568230
attctaa

SEQ ID NO: 120169 - DNA, 7 bp, Unknown
  misc_feature (1)..( 7): Result.002 file - promoters60/1568230
attataa

SEQ ID NO: 120170 - DNA, 8 bp, Unknown
  misc_feature (1)..( 8): Result.002 file - promoters60/1568230
tattttaa

SEQ ID NO: 120171 - DNA, 8 bp, Unknown
  misc_feature (1)..( 8): Result.002 file - promoters60/1568230
tattataa

SEQ ID NO: 120172 - DNA, 8 bp, Unknown
  misc_feature (1)..( 8): Result.002 file - promoters60/1568230
tttatggt

SEQ ID NO: 120173 - DNA, 8 bp, Unknown
  misc_feature (1)..( 8): Result.002 file - promoters60/1568230
tttctggt

SEQ ID NO: 120174 - DNA, 7 bp, Unknown
  misc_feature (1)..( 7): Result.002 file - promoters60/1568230
aatgaaa

SEQ ID NO: 120175 - DNA, 7 bp, Unknown
  misc_feature (1)..( 7): Result.002 file - promoters60/1568230
aataaaa

SEQ ID NO: 120176 - DNA, 7 bp, Unknown
  misc_feature (1)..( 7): Result.002 file - promoters60/1568230
acaaatt

SEQ ID NO: 120177 - DNA, 7 bp, Unknown
  misc_feature (1)..( 7): Result.002 file - promoters60/1568230
acacatt

SEQ ID NO: 120178 - DNA, 6 bp, Unknown
  misc_feature (1)..( 6): Result.002 file - promoters60/1568230
agaaaa

SEQ ID NO: 120179 - DNA, 6 bp, Unknown
  misc_feature (1)..( 6): Result.002 file - promoters60/1568230
agaaaa

SEQ ID NO: 120180 - DNA, 6 bp, Unknown
  misc_feature (1)..( 6): Result.002 file - promoters60/1568230
taataa

SEQ ID NO: 120181 - DNA, 6 bp, Unknown
  misc_feature (1)..( 6): Result.002 file - promoters60/1568230
taataa

SEQ ID NO: 120182 - DNA, 7 bp, Unknown
  misc_feature (1)..( 7): Result.002 file - promoters60/1568230
tgtttga

SEQ ID NO: 120183 - DNA, 7 bp, Unknown
  misc_feature (1)..( 7): Result.002 file - promoters60/1568230
tgtgtga

SEQ ID NO: 120184 - DNA, 6 bp, Unknown
  misc_feature (1)..( 6): Result.002 file - promoters60/1568230
taaaca

SEQ ID NO: 120185 - DNA, 6 bp, Unknown
  misc_feature (1)..( 6): Result.002 file - promoters60/1568230
taaaca

SEQ ID NO: 120186 - DNA, 7 bp, Unknown
  misc_feature (1)..( 7): Result.002 file - promoters60/1568230
acaaaat

SEQ ID NO: 120187 - DNA, 7 bp, Unknown
  misc_feature (1)..( 7): Result.002 file - promoters60/1568230
acaaaat

SEQ ID NO: 120188 - DNA, 8 bp, Unknown
  misc_feature (1)..( 8): Result.002 file - promoters60/1568230
gttaaata

SEQ ID NO: 120189 - DNA, 8 bp, Unknown
  misc_feature (1)..( 8): Result.002 file - promoters60/1568230
gttatata

SEQ ID NO: 120190 - DNA, 6 bp, Unknown
  misc_feature (1)..( 6): Result.002 file - promoters60/1568230
aaacct

SEQ ID NO: 120191 - DNA, 6 bp, Unknown
  misc_feature (1)..( 6): Result.002 file - promoters60/1568230
aaacct

SEQ ID NO: 120192 - DNA, 15 bp, Unknown
  misc_feature (1)..( 15): Result.002 file - promoters60/1568386
tttaaattttaatct

SEQ ID NO: 120193 - DNA, 15 bp, Unknown
  misc_feature (1)..( 15): Result.002 file - promoters60/1568386
tgtaaattgtaatta

SEQ ID NO: 120194 - DNA, 15 bp, Unknown
  misc_feature (1)..( 15): Result.002 file - promoters60/1568386
tttaactttttcaat

SEQ ID NO: 120195 - DNA, 15 bp, Unknown
  misc_feature (1)..( 15): Result.002 file - promoters60/1568386
cacaaatttgttgta

SEQ ID NO: 120196 - DNA, 15 bp, Unknown
  misc_feature (1)..( 15): Result.002 file - promoters60/1568386
cttcatttttattct

SEQ ID NO: 120197 - DNA, 15 bp, Unknown
  misc_feature (1)..( 15): Result.002 file - promoters60/1568386
attaaatatgttaac

SEQ ID NO: 120198 - DNA, 15 bp, Unknown
  misc_feature (1)..( 15): Result.002 file - promoters60/1568386
gtataattttgtttc

SEQ ID NO: 120199 - DNA, 15 bp, Unknown
  misc_feature (1)..( 15): Result.002 file - promoters60/1568386
ttcaaaatgtaaata

SEQ ID NO: 120200 - DNA, 10 bp, Unknown
  misc_feature (1)..( 10): Result.002 file - promoters60/1568386
ttttgacaaa

SEQ ID NO: 120201 - DNA, 10 bp, Unknown
  misc_feature (1)..( 10): Result.002 file - promoters60/1568386
cttttacata

SEQ ID NO: 120202 - DNA, 10 bp, Unknown
  misc_feature (1)..( 10): Result.002 file - promoters60/1568386
tttttacaca

SEQ ID NO: 120203 - DNA, 10 bp, Unknown
  misc_feature (1)..( 10): Result.002 file - promoters60/1568386
tgattaaata

SEQ ID NO: 120204 - DNA, 10 bp, Unknown
  misc_feature (1)..( 10): Result.002 file - promoters60/1568386
gattcaatca

SEQ ID NO: 120205 - DNA, 10 bp, Unknown
  misc_feature (1)..( 10): Result.002 file - promoters60/1568386
taaataaata

SEQ ID NO: 120206 - DNA, 13 bp, Unknown
  misc_feature (1)..( 13): Result.002 file - promoters60/1568386
tttaattttgaca

SEQ ID NO: 120207 - DNA, 13 bp, Unknown
  misc_feature (1)..( 13): Result.002 file - promoters60/1568386
cataatttttacc

SEQ ID NO: 120208 - DNA, 13 bp, Unknown
  misc_feature (1)..( 13): Result.002 file - promoters60/1568386
ttcatttttattc

SEQ ID NO: 120209 - DNA, 13 bp, Unknown
  misc_feature (1)..( 13): Result.002 file - promoters60/1568386
gttggttttattt

SEQ ID NO: 120210 - DNA, 13 bp, Unknown
  misc_feature (1)..( 13): Result.002 file - promoters60/1568386
ttcaattttatgc

SEQ ID NO: 120211 - DNA, 13 bp, Unknown
  misc_feature (1)..( 13): Result.002 file - promoters60/1568386
atttgttgtattc

SEQ ID NO: 120212 - DNA, 13 bp, Unknown
  misc_feature (1)..( 13): Result.002 file - promoters60/1568386
aaaaaatgtagta

SEQ ID NO: 120213 - DNA, 13 bp, Unknown
  misc_feature (1)..( 13): Result.002 file - promoters60/1568386
aaactttttacgg

SEQ ID NO: 120214 - DNA, 11 bp, Unknown
  misc_feature (1)..( 11): Result.002 file - promoters60/1568386
agtaatttaat

SEQ ID NO: 120215 - DNA, 11 bp, Unknown
  misc_feature (1)..( 11): Result.002 file - promoters60/1568386
cacaatttacc

SEQ ID NO: 120216 - DNA, 11 bp, Unknown
  misc_feature (1)..( 11): Result.002 file - promoters60/1568386
agtagtttcca

SEQ ID NO: 120217 - DNA, 11 bp, Unknown
  misc_feature (1)..( 11): Result.002 file - promoters60/1568386
tcaaattaaat

SEQ ID NO: 120218 - DNA, 11 bp, Unknown
  misc_feature (1)..( 11): Result.002 file - promoters60/1568386
caaaattgacc

SEQ ID NO: 120219 - DNA, 11 bp, Unknown
  misc_feature (1)..( 11): Result.002 file - promoters60/1568386
acaaatttatt

SEQ ID NO: 120220 - DNA, 11 bp, Unknown
  misc_feature (1)..( 11): Result.002 file - promoters60/1568386
atgtatttaat

SEQ ID NO: 120221 - DNA, 14 bp, Unknown
  misc_feature (1)..( 14): Result.002 file - promoters60/1568386
tcaattgtacttat

SEQ ID NO: 120222 - DNA, 14 bp, Unknown
  misc_feature (1)..( 14): Result.002 file - promoters60/1568386
caacttgtacacgc

SEQ ID NO: 120223 - DNA, 14 bp, Unknown
  misc_feature (1)..( 14): Result.002 file - promoters60/1568386
ttaattgtataatt

SEQ ID NO: 120224 - DNA, 14 bp, Unknown
  misc_feature (1)..( 14): Result.002 file - promoters60/1568386
ttctttgaacttat

SEQ ID NO: 120225 - DNA, 14 bp, Unknown
  misc_feature (1)..( 14): Result.002 file - promoters60/1568386
taaattgtaattag

SEQ ID NO: 120226 - DNA, 14 bp, Unknown
  misc_feature (1)..( 14): Result.002 file - promoters60/1568386
ttatttgagttatg

SEQ ID NO: 120227 - DNA, 10 bp, Unknown
  misc_feature (1)..( 10): Result.002 file - promoters60/1568386
atatatctta

SEQ ID NO: 120228 - DNA, 10 bp, Unknown
  misc_feature (1)..( 10): Result.002 file - promoters60/1568386
ataaatcttt

SEQ ID NO: 120229 - DNA, 11 bp, Unknown
  misc_feature (1)..( 11): Result.002 file - promoters60/1568386
ttatcatatta

SEQ ID NO: 120230 - DNA, 11 bp, Unknown
  misc_feature (1)..( 11): Result.002 file - promoters60/1568386
acatcatttta

SEQ ID NO: 120231 - DNA, 11 bp, Unknown
  misc_feature (1)..( 11): Result.002 file - promoters60/1568386
ataaaacttga

SEQ ID NO: 120232 - DNA, 11 bp, Unknown
  misc_feature (1)..( 11): Result.002 file - promoters60/1568386
ttgaaatttga

SEQ ID NO: 120233 - DNA, 9 bp, Unknown
  misc_feature (1)..( 9): Result.002 file - promoters60/1568386
gttatttaa

SEQ ID NO: 120234 - DNA, 9 bp, Unknown
  misc_feature (1)..( 9): Result.002 file - promoters60/1568386
attattttc

SEQ ID NO: 120235 - DNA, 9 bp, Unknown
  misc_feature (1)..( 9): Result.002 file - promoters60/1568386
tttatttac

SEQ ID NO: 120236 - DNA, 9 bp, Unknown
  misc_feature (1)..( 9): Result.002 file - promoters60/1568386
tatattcta

SEQ ID NO: 120237 - DNA, 9 bp, Unknown
  misc_feature (1)..( 9): Result.002 file - promoters60/1568386
tttatttat

SEQ ID NO: 120238 - DNA, 9 bp, Unknown
  misc_feature (1)..( 9): Result.002 file - promoters60/1568386
catatatat

SEQ ID NO: 120239 - DNA, 11 bp, Unknown
  misc_feature (1)..( 11): Result.002 file - promoters60/1568386
aaattttgtaa

SEQ ID NO: 120240 - DNA, 11 bp, Unknown
  misc_feature (1)..( 11): Result.002 file - promoters60/1568386
aaatttattgt

SEQ ID NO: 120241 - DNA, 11 bp, Unknown
  misc_feature (1)..( 11): Result.002 file - promoters60/1568386
taattttgttt

SEQ ID NO: 120242 - DNA, 11 bp, Unknown
  misc_feature (1)..( 11): Result.002 file - promoters60/1568386
caatttaccaa

SEQ ID NO: 120243 - DNA, 11 bp, Unknown
  misc_feature (1)..( 11): Result.002 file - promoters60/1568386
ctatttatttc

SEQ ID NO: 120244 - DNA, 11 bp, Unknown
  misc_feature (1)..( 11): Result.002 file - promoters60/1568386
taatttcaaaa

SEQ ID NO: 120245 - DNA, 8 bp, Unknown
  misc_feature (1)..( 8): Result.002 file - promoters60/1568405
attaatac

SEQ ID NO: 120246 - DNA, 8 bp, Unknown
  misc_feature (1)..( 8): Result.002 file - promoters60/1568405
tttaataa

SEQ ID NO: 120247 - DNA, 8 bp, Unknown
  misc_feature (1)..( 8): Result.002 file - promoters60/1568405
ttttataa

SEQ ID NO: 120248 - DNA, 7 bp, Unknown
  misc_feature (1)..( 7): Result.002 file - promoters60/1568405
atagaaa

SEQ ID NO: 120249 - DNA, 7 bp, Unknown
  misc_feature (1)..( 7): Result.002 file - promoters60/1568405
ataaaaa

SEQ ID NO: 120250 - DNA, 7 bp, Unknown
  misc_feature (1)..( 7): Result.002 file - promoters60/1568405
ataaaat

SEQ ID NO: 120251 - DNA, 7 bp, Unknown
  misc_feature (1)..( 7): Result.002 file - promoters60/1568405
tttctga

SEQ ID NO: 120252 - DNA, 7 bp, Unknown
  misc_feature (1)..( 7): Result.002 file - promoters60/1568405
tttgtga

SEQ ID NO: 120253 - DNA, 7 bp, Unknown
  misc_feature (1)..( 7): Result.002 file - promoters60/1568405
aacaaaa

SEQ ID NO: 120254 - DNA, 7 bp, Unknown
  misc_feature (1)..( 7): Result.002 file - promoters60/1568405
aacaaaa

SEQ ID NO: 120255 - DNA, 8 bp, Unknown
  misc_feature (1)..( 8): Result.002 file - promoters60/1568405
aaagttat

SEQ ID NO: 120256 - DNA, 8 bp, Unknown
  misc_feature (1)..( 8): Result.002 file - promoters60/1568405
aaaattat

SEQ ID NO: 120257 - DNA, 6 bp, Unknown
  misc_feature (1)..( 6): Result.002 file - promoters60/1568405
aggaag

SEQ ID NO: 120258 - DNA, 6 bp, Unknown
  misc_feature (1)..( 6): Result.002 file - promoters60/1568405
aggaag

SEQ ID NO: 120259 - DNA, 10 bp, Unknown
  misc_feature (1)..( 10): Result.002 file - promoters60/1568405
acttttgctt

SEQ ID NO: 120260 - DNA, 10 bp, Unknown
  misc_feature (1)..( 10): Result.002 file - promoters60/1568405
acttttcctt

SEQ ID NO: 120261 - DNA, 8 bp, Unknown
  misc_feature (1)..( 8): Result.002 file - promoters60/1568405
tcccataa

SEQ ID NO: 120262 - DNA, 8 bp, Unknown
  misc_feature (1)..( 8): Result.002 file - promoters60/1568405
tccaataa

SEQ ID NO: 120263 - DNA, 11 bp, Unknown
  misc_feature (1)..( 11): Result.002 file - promoters60/1568405
gaaatcagtgt

SEQ ID NO: 120264 - DNA, 11 bp, Unknown
  misc_feature (1)..( 11): Result.002 file - promoters60/1568405
tttatcattgt

SEQ ID NO: 120265 - DNA, 11 bp, Unknown
  misc_feature (1)..( 11): Result.002 file - promoters60/1568405
tttatcatatt

SEQ ID NO: 120266 - DNA, 7 bp, Unknown
  misc_feature (1)..( 7): Result.002 file - promoters60/1568405
aaataag

SEQ ID NO: 120267 - DNA, 7 bp, Unknown
  misc_feature (1)..( 7): Result.002 file - promoters60/1568405
aaaaaag

SEQ ID NO: 120268 - DNA, 6 bp, Unknown
  misc_feature (1)..( 6): Result.002 file - promoters60/1568405
gaaact

SEQ ID NO: 120269 - DNA, 6 bp, Unknown
  misc_feature (1)..( 6): Result.002 file - promoters60/1568405
gaaact

SEQ ID NO: 120270 - DNA, 6 bp, Unknown
  misc_feature (1)..( 6): Result.002 file - promoters60/1568405
tgagag

SEQ ID NO: 120271 - DNA, 6 bp, Unknown
  misc_feature (1)..( 6): Result.002 file - promoters60/1568405
tgagag

SEQ ID NO: 120272 - DNA, 7 bp, Unknown
  misc_feature (1)..( 7): Result.002 file - promoters60/1568405
tttgatt

SEQ ID NO: 120273 - DNA, 7 bp, Unknown
  misc_feature (1)..( 7): Result.002 file - promoters60/1568405
ttttatt

SEQ ID NO: 120274 - DNA, 7 bp, Unknown
  misc_feature (1)..( 7): Result.002 file - promoters60/1568405
ttactct

SEQ ID NO: 120275 - DNA, 7 bp, Unknown
  misc_feature (1)..( 7): Result.002 file - promoters60/1568405
ttagtct

SEQ ID NO: 120276 - DNA, 6 bp, Unknown
  misc_feature (1)..( 6): Result.002 file - promoters60/1568405
gaatct

SEQ ID NO: 120277 - DNA, 6 bp, Unknown
  misc_feature (1)..( 6): Result.002 file - promoters60/1568405
gaatct

SEQ ID NO: 120278 - DNA, 6 bp, Unknown
  misc_feature (1)..( 6): Result.002 file - promoters60/1568405
tttgta

SEQ ID NO: 120279 - DNA, 6 bp, Unknown
  misc_feature (1)..( 6): Result.002 file - promoters60/1568405
tttgta

SEQ ID NO: 120280 - DNA, 8 bp, Unknown
  misc_feature (1)..( 8): Result.002 file - promoters60/1568405
ccaatggg

SEQ ID NO: 120281 - DNA, 8 bp, Unknown
  misc_feature (1)..( 8): Result.002 file - promoters60/1568405
ccaatggg

SEQ ID NO: 120282 - DNA, 7 bp, Unknown
  misc_feature (1)..( 7): Result.002 file - promoters60/1568409
attatat

SEQ ID NO: 120283 - DNA, 7 bp, Unknown
  misc_feature (1)..( 7): Result.002 file - promoters60/1568409
attgtat

SEQ ID NO: 120284 - DNA, 9 bp, Unknown
  misc_feature (1)..( 9): Result.002 file - promoters60/1568409
tgtgaatct

SEQ ID NO: 120285 - DNA, 9 bp, Unknown
  misc_feature (1)..( 9): Result.002 file - promoters60/1568409
tgtcaatct

SEQ ID NO: 120286 - DNA, 7 bp, Unknown
  misc_feature (1)..( 7): Result.002 file - promoters60/1568409
acgttta

SEQ ID NO: 120287 - DNA, 7 bp, Unknown
  misc_feature (1)..( 7): Result.002 file - promoters60/1568409
acgatta

SEQ ID NO: 120288 - DNA, 9 bp, Unknown
  misc_feature (1)..( 9): Result.002 file - promoters60/1568409
atatcattc

SEQ ID NO: 120289 - DNA, 9 bp, Unknown
  misc_feature (1)..( 9): Result.002 file - promoters60/1568409
caatctttc

SEQ ID NO: 120290 - DNA, 9 bp, Unknown
  misc_feature (1)..( 9): Result.002 file - promoters60/1568409
caatttttg

SEQ ID NO: 120291 - DNA, 8 bp, Unknown
  misc_feature (1)..( 8): Result.002 file - promoters60/1568409
aaagtctt

SEQ ID NO: 120292 - DNA, 8 bp, Unknown
  misc_feature (1)..( 8): Result.002 file - promoters60/1568409
aaagtcga

SEQ ID NO: 120293 - DNA, 8 bp, Unknown
  misc_feature (1)..( 8): Result.002 file - promoters60/1568409
aaaggctt

SEQ ID NO: 120294 - DNA, 6 bp, Unknown
  misc_feature (1)..( 6): Result.002 file - promoters60/1568409
catatt

SEQ ID NO: 120295 - DNA, 6 bp, Unknown
  misc_feature (1)..( 6): Result.002 file - promoters60/1568409
catatt

SEQ ID NO: 120296 - DNA, 7 bp, Unknown
  misc_feature (1)..( 7): Result.002 file - promoters60/1568409
atttgat

SEQ ID NO: 120297 - DNA, 7 bp, Unknown
  misc_feature (1)..( 7): Result.002 file - promoters60/1568409
atttgat

SEQ ID NO: 120298 - DNA, 11 bp, Unknown
  misc_feature (1)..( 11): Result.002 file - promoters60/1568409
tgtattcgatt

SEQ ID NO: 120299 - DNA, 11 bp, Unknown
  misc_feature (1)..( 11): Result.002 file - promoters60/1568409
tgtcttcgatt

SEQ ID NO: 120300 - DNA, 7 bp, Unknown
  misc_feature (1)..( 7): Result.002 file - promoters60/1568409
ttctttt

SEQ ID NO: 120301 - DNA, 7 bp, Unknown
  misc_feature (1)..( 7): Result.002 file - promoters60/1568409
ttcgttt

SEQ ID NO: 120302 - DNA, 6 bp, Unknown
  misc_feature (1)..( 6): Result.002 file - promoters60/1568409
gtttgg

SEQ ID NO: 120303 - DNA, 6 bp, Unknown
  misc_feature (1)..( 6): Result.002 file - promoters60/1568409
gtttgg

SEQ ID NO: 120304 - DNA, 6 bp, Unknown
  misc_feature (1)..( 6): Result.002 file - promoters60/1568409
cttttt

SEQ ID NO: 120305 - DNA, 6 bp, Unknown
  misc_feature (1)..( 6): Result.002 file - promoters60/1568409
cttttt

SEQ ID NO: 120306 - DNA, 7 bp, Unknown
  misc_feature (1)..( 7): Result.002 file - promoters60/1568409
ctttatt

SEQ ID NO: 120307 - DNA, 7 bp, Unknown
  misc_feature (1)..( 7): Result.002 file - promoters60/1568409
cttgatt

SEQ ID NO: 120308 - DNA, 7 bp, Unknown
  misc_feature (1)..( 7): Result.002 file - promoters60/1568409
tacattt

SEQ ID NO: 120309 - DNA, 7 bp, Unknown
  misc_feature (1)..( 7): Result.002 file - promoters60/1568409
tacgttt

SEQ ID NO: 120310 - DNA, 14 bp, Unknown
  misc_feature (1)..( 14): Result.002 file - promoters60/1568409
ttattatcttccta

SEQ ID NO: 120311 - DNA, 14 bp, Unknown
  misc_feature (1)..( 14): Result.002 file - promoters60/1568409
ttattaactttcta

SEQ ID NO: 120312 - DNA, 7 bp, Unknown
  misc_feature (1)..( 7): Result.002 file - promoters60/1568409
agagaag

SEQ ID NO: 120313 - DNA, 7 bp, Unknown
  misc_feature (1)..( 7): Result.002 file - promoters60/1568409
agagaag

SEQ ID NO: 120314 - DNA, 7 bp, Unknown
  misc_feature (1)..( 7): Result.002 file - promoters60/1568409
gagcaaa

SEQ ID NO: 120315 - DNA, 7 bp, Unknown
  misc_feature (1)..( 7): Result.002 file - promoters60/1568409
gaggaaa

SEQ ID NO: 120316 - DNA, 6 bp, Unknown
  misc_feature (1)..( 6): Result.002 file - promoters60/1568409
ttattg

SEQ ID NO: 120317 - DNA, 6 bp, Unknown
  misc_feature (1)..( 6): Result.002 file - promoters60/1568409
ttattg

SEQ ID NO: 120318 - DNA, 7 bp, Unknown
  misc_feature (1)..( 7): Result.002 file - promoters60/1568409
tgataaa

SEQ ID NO: 120319 - DNA, 7 bp, Unknown
  misc_feature (1)..( 7): Result.002 file - promoters60/1568409
tgacaaa

SEQ ID NO: 120320 - DNA, 8 bp, Unknown
  misc_feature (1)..( 8): Result.002 file - promoters60/1568409
tgtgactc

SEQ ID NO: 120321 - DNA, 8 bp, Unknown
  misc_feature (1)..( 8): Result.002 file - promoters60/1568409
tgtcactc

SEQ ID NO: 120322 - DNA, 7 bp, Unknown
  misc_feature (1)..( 7): Result.002 file - promoters60/1568409
tattaaa

SEQ ID NO: 120323 - DNA, 7 bp, Unknown
  misc_feature (1)..( 7): Result.002 file - promoters60/1568409
tataaaa

SEQ ID NO: 120324 - DNA, 9 bp, Unknown
  misc_feature (1)..( 9): Result.002 file - promoters60/1568508
aattacaat

SEQ ID NO: 120325 - DNA, 9 bp, Unknown
  misc_feature (1)..( 9): Result.002 file - promoters60/1568508
tcttataat

SEQ ID NO: 120326 - DNA, 9 bp, Unknown
  misc_feature (1)..( 9): Result.002 file - promoters60/1568508
tcttataaa

SEQ ID NO: 120327 - DNA, 7 bp, Unknown
  misc_feature (1)..( 7): Result.002 file - promoters60/1568508
acatcaa

SEQ ID NO: 120328 - DNA, 7 bp, Unknown
  misc_feature (1)..( 7): Result.002 file - promoters60/1568508
acaccaa

SEQ ID NO: 120329 - DNA, 8 bp, Unknown
  misc_feature (1)..( 8): Result.002 file - promoters60/1568508
acttatat

SEQ ID NO: 120330 - DNA, 8 bp, Unknown
  misc_feature (1)..( 8): Result.002 file - promoters60/1568508
tcttataa

SEQ ID NO: 120331 - DNA, 8 bp, Unknown
  misc_feature (1)..( 8): Result.002 file - promoters60/1568508
tcttataa

SEQ ID NO: 120332 - DNA, 8 bp, Unknown
  misc_feature (1)..( 8): Result.002 file - promoters60/1568508
aaaacaca

SEQ ID NO: 120333 - DNA, 8 bp, Unknown
  misc_feature (1)..( 8): Result.002 file - promoters60/1568508
aaaacaca

SEQ ID NO: 120334 - DNA, 8 bp, Unknown
  misc_feature (1)..( 8): Result.002 file - promoters60/1568508
caagcttt

SEQ ID NO: 120335 - DNA, 8 bp, Unknown
  misc_feature (1)..( 8): Result.002 file - promoters60/1568508
caaacttt

SEQ ID NO: 120336 - DNA, 6 bp, Unknown
  misc_feature (1)..( 6): Result.002 file - promoters60/1568508
aatatt

SEQ ID NO: 120337 - DNA, 6 bp, Unknown
  misc_feature (1)..( 6): Result.002 file - promoters60/1568508
aatatt

SEQ ID NO: 120338 - DNA, 6 bp, Unknown
  misc_feature (1)..( 6): Result.002 file - promoters60/1568508
atcaaa

SEQ ID NO: 120339 - DNA, 6 bp, Unknown
  misc_feature (1)..( 6): Result.002 file - promoters60/1568508
atcaaa

SEQ ID NO: 120340 - DNA, 7 bp, Unknown
  misc_feature (1)..( 7): Result.002 file - promoters60/1568508
caaatcc

SEQ ID NO: 120341 - DNA, 7 bp, Unknown
  misc_feature (1)..( 7): Result.002 file - promoters60/1568508
caagtcc

SEQ ID NO: 120342 - DNA, 7 bp, Unknown
  misc_feature (1)..( 7): Result.002 file - promoters60/1568508
cacaaga

SEQ ID NO: 120343 - DNA, 7 bp, Unknown
  misc_feature (1)..( 7): Result.002 file - promoters60/1568508
cacgaga

SEQ ID NO: 120344 - DNA, 8 bp, Unknown
  misc_feature (1)..( 8): Result.002 file - promoters60/1568508
ctcgcttc

SEQ ID NO: 120345 - DNA, 8 bp, Unknown
  misc_feature (1)..( 8): Result.002 file - promoters60/1568508
ctcgcttc

SEQ ID NO: 120346 - DNA, 8 bp, Unknown
  misc_feature (1)..( 8): Result.002 file - promoters60/1568508
cttctcga

SEQ ID NO: 120347 - DNA, 8 bp, Unknown
  misc_feature (1)..( 8): Result.002 file - promoters60/1568508
cttctcga

SEQ ID NO: 120348 - DNA, 8 bp, Unknown
  misc_feature (1)..( 8): Result.002 file - promoters60/1569568
caaataaa

SEQ ID NO: 120349 - DNA, 8 bp, Unknown
  misc_feature (1)..( 8): Result.002 file - promoters60/1569568
aaaataaa

SEQ ID NO: 120350 - DNA, 8 bp, Unknown
  misc_feature (1)..( 8): Result.002 file - promoters60/1569568
aaaataaa

SEQ ID NO: 120351 - DNA, 8 bp, Unknown
  misc_feature (1)..( 8): Result.002 file - promoters60/1569568
caaagaaa

SEQ ID NO: 120352 - DNA, 8 bp, Unknown
  misc_feature (1)..( 8): Result.002 file - promoters60/1569568
aaaataat

SEQ ID NO: 120353 - DNA, 8 bp, Unknown
  misc_feature (1)..( 8): Result.002 file - promoters60/1569568
taaaattt

SEQ ID NO: 120354 - DNA, 8 bp, Unknown
  misc_feature (1)..( 8): Result.002 file - promoters60/1569568
taaaataa

SEQ ID NO: 120355 - DNA, 8 bp, Unknown
  misc_feature (1)..( 8): Result.002 file - promoters60/1569568
gaaacttt

SEQ ID NO: 120356 - DNA, 8 bp, Unknown
  misc_feature (1)..( 8): Result.002 file - promoters60/1569568
aaaaataa

SEQ ID NO: 120357 - DNA, 7 bp, Unknown
  misc_feature (1)..( 7): Result.002 file - promoters60/1569568
aaataaa

SEQ ID NO: 120358 - DNA, 7 bp, Unknown
  misc_feature (1)..( 7): Result.002 file - promoters60/1569568
aaataac

SEQ ID NO: 120359 - DNA, 7 bp, Unknown
  misc_feature (1)..( 7): Result.002 file - promoters60/1569568
aaagaaa

SEQ ID NO: 120360 - DNA, 7 bp, Unknown
  misc_feature (1)..( 7): Result.002 file - promoters60/1569568
aaataat

SEQ ID NO: 120361 - DNA, 10 bp, Unknown
  misc_feature (1)..( 10): Result.002 file - promoters60/1569568
tttatttact

SEQ ID NO: 120362 - DNA, 10 bp, Unknown
  misc_feature (1)..( 10): Result.002 file - promoters60/1569568
ggtatttact

SEQ ID NO: 120363 - DNA, 10 bp, Unknown
  misc_feature (1)..( 10): Result.002 file - promoters60/1569568
tttatttcat

SEQ ID NO: 120364 - DNA, 10 bp, Unknown
  misc_feature (1)..( 10): Result.002 file - promoters60/1569568
aatatctcat

SEQ ID NO: 120365 - DNA, 9 bp, Unknown
  misc_feature (1)..( 9): Result.002 file - promoters60/1569568
aaaattaaa

SEQ ID NO: 120366 - DNA, 9 bp, Unknown
  misc_feature (1)..( 9): Result.002 file - promoters60/1569568
aaacttaat

SEQ ID NO: 120367 - DNA, 9 bp, Unknown
  misc_feature (1)..( 9): Result.002 file - promoters60/1569568
tagattaaa

SEQ ID NO: 120368 - DNA, 9 bp, Unknown
  misc_feature (1)..( 9): Result.002 file - promoters60/1569568
tgccttaat

SEQ ID NO: 120369 - DNA, 9 bp, Unknown
  misc_feature (1)..( 9): Result.002 file - promoters60/1569568
cagcttaat

SEQ ID NO: 120370 - DNA, 15 bp, Unknown
  misc_feature (1)..( 15): Result.002 file - promoters60/1569568
ttttactaaaaaaga

SEQ ID NO: 120371 - DNA, 15 bp, Unknown
  misc_feature (1)..( 15): Result.002 file - promoters60/1569568
ctttaataagaaata

SEQ ID NO: 120372 - DNA, 15 bp, Unknown
  misc_feature (1)..( 15): Result.002 file - promoters60/1569568
ttttacttgatctaa

SEQ ID NO: 120373 - DNA, 15 bp, Unknown
  misc_feature (1)..( 15): Result.002 file - promoters60/1569568
accaaaaaagaaata

SEQ ID NO: 120374 - DNA, 11 bp, Unknown
  misc_feature (1)..( 11): Result.002 file - promoters60/1569568
taatgtctcgt

SEQ ID NO: 120375 - DNA, 11 bp, Unknown
  misc_feature (1)..( 11): Result.002 file - promoters60/1569568
ctttgtctcca

SEQ ID NO: 120376 - DNA, 11 bp, Unknown
  misc_feature (1)..( 11): Result.002 file - promoters60/1569568
taatatctcat

SEQ ID NO: 120377 - DNA, 11 bp, Unknown
  misc_feature (1)..( 11): Result.002 file - promoters60/1569568
tgatggctcgg

SEQ ID NO: 120378 - DNA, 11 bp, Unknown
  misc_feature (1)..( 11): Result.002 file - promoters60/1569568
ttttatttcat

SEQ ID NO: 120379 - DNA, 14 bp, Unknown
  misc_feature (1)..( 14): Result.002 file - promoters60/1569568
ctcttttatttatt

SEQ ID NO: 120380 - DNA, 14 bp, Unknown
  misc_feature (1)..( 14): Result.002 file - promoters60/1569568
aaattttataatca

SEQ ID NO: 120381 - DNA, 14 bp, Unknown
  misc_feature (1)..( 14): Result.002 file - promoters60/1569568
tctctttatttatt

SEQ ID NO: 120382 - DNA, 14 bp, Unknown
  misc_feature (1)..( 14): Result.002 file - promoters60/1569568
aaaatttacctaac

SEQ ID NO: 120383 - DNA, 11 bp, Unknown
  misc_feature (1)..( 11): Result.002 file - promoters60/1569568
tttaaccaaaa

SEQ ID NO: 120384 - DNA, 11 bp, Unknown
  misc_feature (1)..( 11): Result.002 file - promoters60/1569568
tttcaccaagg

SEQ ID NO: 120385 - DNA, 11 bp, Unknown
  misc_feature (1)..( 11): Result.002 file - promoters60/1569568
tataaccaaaa

SEQ ID NO: 120386 - DNA, 11 bp, Unknown
  misc_feature (1)..( 11): Result.002 file - promoters60/1569568
ataaactaaac

SEQ ID NO: 120387 - DNA, 10 bp, Unknown
  misc_feature (1)..( 10): Result.002 file - promoters60/1569721
atattattag

SEQ ID NO: 120388 - DNA, 10 bp, Unknown
  misc_feature (1)..( 10): Result.002 file - promoters60/1569721
atattaataa

SEQ ID NO: 120389 - DNA, 10 bp, Unknown
  misc_feature (1)..( 10): Result.002 file - promoters60/1569721
atattattag

SEQ ID NO: 120390 - DNA, 10 bp, Unknown
  misc_feature (1)..( 10): Result.002 file - promoters60/1569721
atataattat

SEQ ID NO: 120391 - DNA, 10 bp, Unknown
  misc_feature (1)..( 10): Result.002 file - promoters60/1569721
atataaagct

SEQ ID NO: 120392 - DNA, 10 bp, Unknown
  misc_feature (1)..( 10): Result.002 file - promoters60/1569721
atacaatgaa

SEQ ID NO: 120393 - DNA, 10 bp, Unknown
  misc_feature (1)..( 10): Result.002 file - promoters60/1569721
tgtttgttta

SEQ ID NO: 120394 - DNA, 10 bp, Unknown
  misc_feature (1)..( 10): Result.002 file - promoters60/1569721
tatttattta

SEQ ID NO: 120395 - DNA, 10 bp, Unknown
  misc_feature (1)..( 10): Result.002 file - promoters60/1569721
tttttatttc

SEQ ID NO: 120396 - DNA, 10 bp, Unknown
  misc_feature (1)..( 10): Result.002 file - promoters60/1569721
cttttgtttc

SEQ ID NO: 120397 - DNA, 10 bp, Unknown
  misc_feature (1)..( 10): Result.002 file - promoters60/1569721
actttttttg

SEQ ID NO: 120398 - DNA, 10 bp, Unknown
  misc_feature (1)..( 10): Result.002 file - promoters60/1569721
aattcattag

SEQ ID NO: 120399 - DNA, 10 bp, Unknown
  misc_feature (1)..( 10): Result.002 file - promoters60/1569721
aatgcatgaa

SEQ ID NO: 120400 - DNA, 9 bp, Unknown
  misc_feature (1)..( 9): Result.002 file - promoters60/1569721
aattaaaat

SEQ ID NO: 120401 - DNA, 9 bp, Unknown
  misc_feature (1)..( 9): Result.002 file - promoters60/1569721
aatgaaaaa

SEQ ID NO: 120402 - DNA, 9 bp, Unknown
  misc_feature (1)..( 9): Result.002 file - promoters60/1569721
aataaaaaa

SEQ ID NO: 120403 - DNA, 9 bp, Unknown
  misc_feature (1)..( 9): Result.002 file - promoters60/1569721
gatgaaacc

SEQ ID NO: 120404 - DNA, 9 bp, Unknown
  misc_feature (1)..( 9): Result.002 file - promoters60/1569721
cagaaaaaa

SEQ ID NO: 120405 - DNA, 9 bp, Unknown
  misc_feature (1)..( 9): Result.002 file - promoters60/1569721
aaaaaaaaa

SEQ ID NO: 120406 - DNA, 10 bp, Unknown
  misc_feature (1)..( 10): Result.002 file - promoters60/1569721
aaaatattaa

SEQ ID NO: 120407 - DNA, 10 bp, Unknown
  misc_feature (1)..( 10): Result.002 file - promoters60/1569721
taaaaattaa

SEQ ID NO: 120408 - DNA, 10 bp, Unknown
  misc_feature (1)..( 10): Result.002 file - promoters60/1569721
aaaagattca

SEQ ID NO: 120409 - DNA, 10 bp, Unknown
  misc_feature (1)..( 10): Result.002 file - promoters60/1569721
gtaaaattcc

SEQ ID NO: 120410 - DNA, 10 bp, Unknown
  misc_feature (1)..( 10): Result.002 file - promoters60/1569721
taacaattct

SEQ ID NO: 120411 - DNA, 10 bp, Unknown
  misc_feature (1)..( 10): Result.002 file - promoters60/1569721
ataaacttaa

SEQ ID NO: 120412 - DNA, 12 bp, Unknown
  misc_feature (1)..( 12): Result.002 file - promoters60/1569721
tgaaaaacaaac

SEQ ID NO: 120413 - DNA, 12 bp, Unknown
  misc_feature (1)..( 12): Result.002 file - promoters60/1569721
ctataaataaat

SEQ ID NO: 120414 - DNA, 12 bp, Unknown
  misc_feature (1)..( 12): Result.002 file - promoters60/1569721
ttttaaaaaaag

SEQ ID NO: 120415 - DNA, 12 bp, Unknown
  misc_feature (1)..( 12): Result.002 file - promoters60/1569721
atgtatatatta

SEQ ID NO: 120416 - DNA, 12 bp, Unknown
  misc_feature (1)..( 12): Result.002 file - promoters60/1569721
ctggtcataaat

SEQ ID NO: 120417 - DNA, 12 bp, Unknown
  misc_feature (1)..( 12): Result.002 file - promoters60/1569721
ttagaaacagac

SEQ ID NO: 120418 - DNA, 8 bp, Unknown
  misc_feature (1)..( 8): Result.002 file - promoters60/1569763
agaagaac

SEQ ID NO: 120419 - DNA, 8 bp, Unknown
  misc_feature (1)..( 8): Result.002 file - promoters60/1569763
agaggaac

SEQ ID NO: 120420 - DNA, 8 bp, Unknown
  misc_feature (1)..( 8): Result.002 file - promoters60/1569763
tcaagaac

SEQ ID NO: 120421 - DNA, 8 bp, Unknown
  misc_feature (1)..( 8): Result.002 file - promoters60/1569763
tcaggaaa

SEQ ID NO: 120422 - DNA, 6 bp, Unknown
  misc_feature (1)..( 6): Result.002 file - promoters60/1570085
tattat

SEQ ID NO: 120423 - DNA, 6 bp, Unknown
  misc_feature (1)..( 6): Result.002 file - promoters60/1570085
tattat

SEQ ID NO: 120424 - DNA, 7 bp, Unknown
  misc_feature (1)..( 7): Result.002 file - promoters60/1570085
tttattt

SEQ ID NO: 120425 - DNA, 7 bp, Unknown
  misc_feature (1)..( 7): Result.002 file - promoters60/1570085
tttgttt

SEQ ID NO: 120426 - DNA, 7 bp, Unknown
  misc_feature (1)..( 7): Result.002 file - promoters60/1570085
cttattt

SEQ ID NO: 120427 - DNA, 8 bp, Unknown
  misc_feature (1)..( 8): Result.002 file - promoters60/1570085
tttgtaat

SEQ ID NO: 120428 - DNA, 8 bp, Unknown
  misc_feature (1)..( 8): Result.002 file - promoters60/1570085
tttggaat

SEQ ID NO: 120429 - DNA, 8 bp, Unknown
  misc_feature (1)..( 8): Result.002 file - promoters60/1570085
tagtccaa

SEQ ID NO: 120430 - DNA, 8 bp, Unknown
  misc_feature (1)..( 8): Result.002 file - promoters60/1570085
taggccaa

SEQ ID NO: 120431 - DNA, 9 bp, Unknown
  misc_feature (1)..( 9): Result.002 file - promoters60/1570085
aaagctata

SEQ ID NO: 120432 - DNA, 9 bp, Unknown
  misc_feature (1)..( 9): Result.002 file - promoters60/1570085
aaagctata

SEQ ID NO: 120433 - DNA, 7 bp, Unknown
  misc_feature (1)..( 7): Result.002 file - promoters60/1570085
tctcata

SEQ ID NO: 120434 - DNA, 7 bp, Unknown
  misc_feature (1)..( 7): Result.002 file - promoters60/1570085
tcttata

SEQ ID NO: 120435 - DNA, 8 bp, Unknown
  misc_feature (1)..( 8): Result.002 file - promoters60/1570085
ttgctaac

SEQ ID NO: 120436 - DNA, 8 bp, Unknown
  misc_feature (1)..( 8): Result.002 file - promoters60/1570085
ttgttaac

SEQ ID NO: 120437 - DNA, 6 bp, Unknown
  misc_feature (1)..( 6): Result.002 file - promoters60/1570085
tatcat

SEQ ID NO: 120438 - DNA, 6 bp, Unknown
  misc_feature (1)..( 6): Result.002 file - promoters60/1570085
tatcat

SEQ ID NO: 120439 - DNA, 10 bp, Unknown
  misc_feature (1)..( 10): Result.002 file - promoters60/1570085
tctatatata

SEQ ID NO: 120440 - DNA, 10 bp, Unknown
  misc_feature (1)..( 10): Result.002 file - promoters60/1570085
tctatatata

SEQ ID NO: 120441 - DNA, 6 bp, Unknown
  misc_feature (1)..( 6): Result.002 file - promoters60/1570085
catttt

SEQ ID NO: 120442 - DNA, 6 bp, Unknown
  misc_feature (1)..( 6): Result.002 file - promoters60/1570085
catttt

SEQ ID NO: 120443 - DNA, 6 bp, Unknown
  misc_feature (1)..( 6): Result.002 file - promoters60/1570085
ttttat

SEQ ID NO: 120444 - DNA, 6 bp, Unknown
  misc_feature (1)..( 6): Result.002 file - promoters60/1570085
ttttat

SEQ ID NO: 120445 - DNA, 6 bp, Unknown
  misc_feature (1)..( 6): Result.002 file - promoters60/1570085
ttattt

SEQ ID NO: 120446 - DNA, 6 bp, Unknown
  misc_feature (1)..( 6): Result.002 file - promoters60/1570085
ttattt

SEQ ID NO: 120447 - DNA, 6 bp, Unknown
  misc_feature (1)..( 6): Result.002 file - promoters60/1570085
cattta

SEQ ID NO: 120448 - DNA, 6 bp, Unknown
  misc_feature (1)..( 6): Result.002 file - promoters60/1570085
cattta

SEQ ID NO: 120449 - DNA, 6 bp, Unknown
  misc_feature (1)..( 6): Result.002 file - promoters60/1570085
gttgca

SEQ ID NO: 120450 - DNA, 6 bp, Unknown
  misc_feature (1)..( 6): Result.002 file - promoters60/1570085
gttgca

SEQ ID NO: 120451 - DNA, 8 bp, Unknown
  misc_feature (1)..( 8): Result.002 file - promoters60/1570085
aatagtta

SEQ ID NO: 120452 - DNA, 8 bp, Unknown
  misc_feature (1)..( 8): Result.002 file - promoters60/1570085
aataatta

SEQ ID NO: 120453 - DNA, 8 bp, Unknown
  misc_feature (1)..( 8): Result.002 file - promoters60/1570085
atatttac

SEQ ID NO: 120454 - DNA, 8 bp, Unknown
  misc_feature (1)..( 8): Result.002 file - promoters60/1570085
atatatac

SEQ ID NO: 120455 - DNA, 8 bp, Unknown
  misc_feature (1)..( 8): Result.002 file - promoters60/1570085
ttatataa

SEQ ID NO: 120456 - DNA, 7 bp, Unknown
  misc_feature (1)..( 7): Result.002 file - promoters60/1570085
ttagaaa

SEQ ID NO: 120457 - DNA, 7 bp, Unknown
  misc_feature (1)..( 7): Result.002 file - promoters60/1570085
ttagaaa

SEQ ID NO: 120458 - DNA, 7 bp, Unknown
  misc_feature (1)..( 7): Result.002 file - promoters60/1570085
tcatata

SEQ ID NO: 120459 - DNA, 7 bp, Unknown
  misc_feature (1)..( 7): Result.002 file - promoters60/1570085
tcaaata

SEQ ID NO: 120460 - DNA, 7 bp, Unknown
  misc_feature (1)..( 7): Result.002 file - promoters60/1570085
aaaaaag

SEQ ID NO: 120461 - DNA, 7 bp, Unknown
  misc_feature (1)..( 7): Result.002 file - promoters60/1570085
aaaaaag

SEQ ID NO: 120462 - DNA, 7 bp, Unknown
  misc_feature (1)..( 7): Result.002 file - promoters60/1570085
agaatta

SEQ ID NO: 120463 - DNA, 7 bp, Unknown
  misc_feature (1)..( 7): Result.002 file - promoters60/1570085
agactta

SEQ ID NO: 120464 - DNA, 7 bp, Unknown
  misc_feature (1)..( 7): Result.002 file - promoters60/1570085
ataattt

SEQ ID NO: 120465 - DNA, 7 bp, Unknown
  misc_feature (1)..( 7): Result.002 file - promoters60/1570085
ataattt

SEQ ID NO: 120466 - DNA, 7 bp, Unknown
  misc_feature (1)..( 7): Result.002 file - promoters60/1570085
aactatt

SEQ ID NO: 120467 - DNA, 7 bp, Unknown
  misc_feature (1)..( 7): Result.002 file - promoters60/1570085
aacaatt

SEQ ID NO: 120468 - DNA, 9 bp, Unknown
  misc_feature (1)..( 9): Result.002 file - promoters60/1570085
atcacatga

SEQ ID NO: 120469 - DNA, 9 bp, Unknown
  misc_feature (1)..( 9): Result.002 file - promoters60/1570085
atcacatga

SEQ ID NO: 120470 - DNA, 8 bp, Unknown
  misc_feature (1)..( 8): Result.002 file - promoters60/1570085
aacctttc

SEQ ID NO: 120471 - DNA, 8 bp, Unknown
  misc_feature (1)..( 8): Result.002 file - promoters60/1570085
aaccattc

SEQ ID NO: 120472 - DNA, 8 bp, Unknown
  misc_feature (1)..( 8): Result.002 file - promoters60/1570107
tcaataac

SEQ ID NO: 120473 - DNA, 8 bp, Unknown
  misc_feature (1)..( 8): Result.002 file - promoters60/1570107
tcaacaac

SEQ ID NO: 120474 - DNA, 7 bp, Unknown
  misc_feature (1)..( 7): Result.002 file - promoters60/1570107
attaaaa

SEQ ID NO: 120475 - DNA, 7 bp, Unknown
  misc_feature (1)..( 7): Result.002 file - promoters60/1570107
tttaaaa

SEQ ID NO: 120476 - DNA, 8 bp, Unknown
  misc_feature (1)..( 8): Result.002 file - promoters60/1570107
tttcaaaa

SEQ ID NO: 120477 - DNA, 7 bp, Unknown
  misc_feature (1)..( 7): Result.002 file - promoters60/1570107
aattaag

SEQ ID NO: 120478 - DNA, 7 bp, Unknown
  misc_feature (1)..( 7): Result.002 file - promoters60/1570107
aattaag

SEQ ID NO: 120479 - DNA, 8 bp, Unknown
  misc_feature (1)..( 8): Result.002 file - promoters60/1570107
atgttgtg

SEQ ID NO: 120480 - DNA, 8 bp, Unknown
  misc_feature (1)..( 8): Result.002 file - promoters60/1570107
atgtagtg

SEQ ID NO: 120481 - DNA, 8 bp, Unknown
  misc_feature (1)..( 8): Result.002 file - promoters60/1570107
agaaaaaa

SEQ ID NO: 120482 - DNA, 8 bp, Unknown
  misc_feature (1)..( 8): Result.002 file - promoters60/1570107
tcaaaaaa

SEQ ID NO: 120483 - DNA, 8 bp, Unknown
  misc_feature (1)..( 8): Result.002 file - promoters60/1570107
agacaaac

SEQ ID NO: 120484 - DNA, 8 bp, Unknown
  misc_feature (1)..( 8): Result.002 file - promoters60/1570107
aaaagatc

SEQ ID NO: 120485 - DNA, 8 bp, Unknown
  misc_feature (1)..( 8): Result.002 file - promoters60/1570107
aaaaaatc

SEQ ID NO: 120486 - DNA, 16 bp, Unknown
  misc_feature (1)..( 16): Result.002 file - promoters60/1570107
acggtcacataataaa

SEQ ID NO: 120487 - DNA, 16 bp, Unknown
  misc_feature (1)..( 16): Result.002 file - promoters60/1570107
caataaccataataaa

SEQ ID NO: 120488 - DNA, 16 bp, Unknown
  misc_feature (1)..( 16): Result.002 file - promoters60/1570107
caattaccttaattat

SEQ ID NO: 120489 - DNA, 7 bp, Unknown
  misc_feature (1)..( 7): Result.002 file - promoters60/1570107
aaataga

SEQ ID NO: 120490 - DNA, 7 bp, Unknown
  misc_feature (1)..( 7): Result.002 file - promoters60/1570107
aaaaaga

SEQ ID NO: 120491 - DNA, 6 bp, Unknown
  misc_feature (1)..( 6): Result.002 file - promoters60/1570107
accaaa

SEQ ID NO: 120492 - DNA, 6 bp, Unknown
  misc_feature (1)..( 6): Result.002 file - promoters60/1570107
accaaa

SEQ ID NO: 120493 - DNA, 8 bp, Unknown
  misc_feature (1)..( 8): Result.002 file - promoters60/1570107
tataattt

SEQ ID NO: 120494 - DNA, 8 bp, Unknown
  misc_feature (1)..( 8): Result.002 file - promoters60/1570107
tatcattt

SEQ ID NO: 120495 - DNA, 7 bp, Unknown
  misc_feature (1)..( 7): Result.002 file - promoters60/1570107
ttcaaac

SEQ ID NO: 120496 - DNA, 7 bp, Unknown
  misc_feature (1)..( 7): Result.002 file - promoters60/1570107
ttcaaac

SEQ ID NO: 120497 - DNA, 6 bp, Unknown
  misc_feature (1)..( 6): Result.002 file - promoters60/1570107
gaaatg

SEQ ID NO: 120498 - DNA, 6 bp, Unknown
  misc_feature (1)..( 6): Result.002 file - promoters60/1570107
gaaatg

SEQ ID NO: 120499 - DNA, 6 bp, Unknown
  misc_feature (1)..( 6): Result.002 file - promoters60/1570107
aagcag

SEQ ID NO: 120500 - DNA, 6 bp, Unknown
  misc_feature (1)..( 6): Result.002 file - promoters60/1570107
aagcag

SEQ ID NO: 120501 - DNA, 6 bp, Unknown
  misc_feature (1)..( 6): Result.002 file - promoters60/1570107
gccgac

SEQ ID NO: 120502 - DNA, 6 bp, Unknown
  misc_feature (1)..( 6): Result.002 file - promoters60/1570107
gccgac

SEQ ID NO: 120503 - DNA, 9 bp, Unknown
  misc_feature (1)..( 9): Result.002 file - promoters60/1570107
aaaataaaa

SEQ ID NO: 120504 - DNA, 9 bp, Unknown
  misc_feature (1)..( 9): Result.002 file - promoters60/1570107
caaaaaaaa

SEQ ID NO: 120505 - DNA, 9 bp, Unknown
  misc_feature (1)..( 9): Result.002 file - promoters60/1570107
caaaaaagc

SEQ ID NO: 120506 - DNA, 6 bp, Unknown
  misc_feature (1)..( 6): Result.002 file - promoters60/1570107
tctctc

SEQ ID NO: 120507 - DNA, 6 bp, Unknown
  misc_feature (1)..( 6): Result.002 file - promoters60/1570107
tctctc

SEQ ID NO: 120508 - DNA, 11 bp, Unknown
  misc_feature (1)..( 11): Result.002 file - promoters60/1570107
agagagtcggc

SEQ ID NO: 120509 - DNA, 11 bp, Unknown
  misc_feature (1)..( 11): Result.002 file - promoters60/1570107
agagattcgta

SEQ ID NO: 120510 - DNA, 11 bp, Unknown
  misc_feature (1)..( 11): Result.002 file - promoters60/1570107
taagatacgta

SEQ ID NO: 120511 - DNA, 6 bp, Unknown
  misc_feature (1)..( 6): Result.002 file - promoters60/1570107
tatttt

SEQ ID NO: 120512 - DNA, 6 bp, Unknown
  misc_feature (1)..( 6): Result.002 file - promoters60/1570107
tatttt

SEQ ID NO: 120513 - DNA, 6 bp, Unknown
  misc_feature (1)..( 6): Result.002 file - promoters60/1570107
tattat

SEQ ID NO: 120514 - DNA, 6 bp, Unknown
  misc_feature (1)..( 6): Result.002 file - promoters60/1570107
tattat

SEQ ID NO: 120515 - DNA, 8 bp, Unknown
  misc_feature (1)..( 8): Result.002 file - promoters60/1570107
aattcttc

SEQ ID NO: 120516 - DNA, 8 bp, Unknown
  misc_feature (1)..( 8): Result.002 file - promoters60/1570107
aattgttc

SEQ ID NO: 120517 - DNA, 8 bp, Unknown
  misc_feature (1)..( 8): Result.002 file - promoters60/1570107
tttacaaa

SEQ ID NO: 120518 - DNA, 8 bp, Unknown
  misc_feature (1)..( 8): Result.002 file - promoters60/1570107
ttttcaaa

SEQ ID NO: 120519 - DNA, 8 bp, Unknown
  misc_feature (1)..( 8): Result.002 file - promoters60/1570107
taataaaa

SEQ ID NO: 120520 - DNA, 8 bp, Unknown
  misc_feature (1)..( 8): Result.002 file - promoters60/1570107
taaaaaaa

SEQ ID NO: 120521 - DNA, 6 bp, Unknown
  misc_feature (1)..( 6): Result.002 file - promoters60/1570107
aaaaat

SEQ ID NO: 120522 - DNA, 6 bp, Unknown
  misc_feature (1)..( 6): Result.002 file - promoters60/1570107
aaaaat

SEQ ID NO: 120523 - DNA, 7 bp, Unknown
  misc_feature (1)..( 7): Result.002 file - promoters60/1570107
ctttttt

SEQ ID NO: 120524 - DNA, 7 bp, Unknown
  misc_feature (1)..( 7): Result.002 file - promoters60/1570107
ctttttt

SEQ ID NO: 120525 - DNA, 9 bp, Unknown
  misc_feature (1)..( 9): Result.002 file - promoters60/1570116
aataaatta

SEQ ID NO: 120526 - DNA, 9 bp, Unknown
  misc_feature (1)..( 9): Result.002 file - promoters60/1570116
aataaacgc

SEQ ID NO: 120527 - DNA, 9 bp, Unknown
  misc_feature (1)..( 9): Result.002 file - promoters60/1570116
aaaaaaagt

SEQ ID NO: 120528 - DNA, 9 bp, Unknown
  misc_feature (1)..( 9): Result.002 file - promoters60/1570116
aatacattt

SEQ ID NO: 120529 - DNA, 9 bp, Unknown
  misc_feature (1)..( 9): Result.002 file - promoters60/1570116
aatacatac

SEQ ID NO: 120530 - DNA, 9 bp, Unknown
  misc_feature (1)..( 9): Result.002 file - promoters60/1570116
taaacattt

SEQ ID NO: 120531 - DNA, 6 bp, Unknown
  misc_feature (1)..( 6): Result.002 file - promoters60/1570293
cttttt

SEQ ID NO: 120532 - DNA, 6 bp, Unknown
  misc_feature (1)..( 6): Result.002 file - promoters60/1570293
cttttt

SEQ ID NO: 120533 - DNA, 6 bp, Unknown
  misc_feature (1)..( 6): Result.002 file - promoters60/1570293
ttttaa

SEQ ID NO: 120534 - DNA, 6 bp, Unknown
  misc_feature (1)..( 6): Result.002 file - promoters60/1570293
ttttaa

SEQ ID NO: 120535 - DNA, 6 bp, Unknown
  misc_feature (1)..( 6): Result.002 file - promoters60/1570293
aacaga

SEQ ID NO: 120536 - DNA, 6 bp, Unknown
  misc_feature (1)..( 6): Result.002 file - promoters60/1570293
aacaga

SEQ ID NO: 120537 - DNA, 7 bp, Unknown
  misc_feature (1)..( 7): Result.002 file - promoters60/1570293
cacaaca

SEQ ID NO: 120538 - DNA, 7 bp, Unknown
  misc_feature (1)..( 7): Result.002 file - promoters60/1570293
caccaca

SEQ ID NO: 120539 - DNA, 6 bp, Unknown
  misc_feature (1)..( 6): Result.002 file - promoters60/1570293
acaaaa

SEQ ID NO: 120540 - DNA, 6 bp, Unknown
  misc_feature (1)..( 6): Result.002 file - promoters60/1570293
acaaaa

SEQ ID NO: 120541 - DNA, 8 bp, Unknown
  misc_feature (1)..( 8): Result.002 file - promoters60/1570293
aaagtttt

SEQ ID NO: 120542 - DNA, 8 bp, Unknown
  misc_feature (1)..( 8): Result.002 file - promoters60/1570293
aaaatttt

SEQ ID NO: 120543 - DNA, 8 bp, Unknown
  misc_feature (1)..( 8): Result.002 file - promoters60/1570293
cgaatttt

SEQ ID NO: 120544 - DNA, 6 bp, Unknown
  misc_feature (1)..( 6): Result.002 file - promoters60/1570293
gaataa

SEQ ID NO: 120545 - DNA, 6 bp, Unknown
  misc_feature (1)..( 6): Result.002 file - promoters60/1570293
gaataa

SEQ ID NO: 120546 - DNA, 8 bp, Unknown
  misc_feature (1)..( 8): Result.002 file - promoters60/1570293
ttttcttc

SEQ ID NO: 120547 - DNA, 8 bp, Unknown
  misc_feature (1)..( 8): Result.002 file - promoters60/1570293
ttttattc

SEQ ID NO: 120548 - DNA, 8 bp, Unknown
  misc_feature (1)..( 8): Result.002 file - promoters60/1570293
aaaattgc

SEQ ID NO: 120549 - DNA, 8 bp, Unknown
  misc_feature (1)..( 8): Result.002 file - promoters60/1570293
gaaattgt

SEQ ID NO: 120550 - DNA, 8 bp, Unknown
  misc_feature (1)..( 8): Result.002 file - promoters60/1570293
gaatttgt

SEQ ID NO: 120551 - DNA, 8 bp, Unknown
  misc_feature (1)..( 8): Result.002 file - promoters60/1570293
ggatagtg

SEQ ID NO: 120552 - DNA, 8 bp, Unknown
  misc_feature (1)..( 8): Result.002 file - promoters60/1570293
ggaaagtg

SEQ ID NO: 120553 - DNA, 6 bp, Unknown
  misc_feature (1)..( 6): Result.002 file - promoters60/1570293
cacaca

SEQ ID NO: 120554 - DNA, 6 bp, Unknown
  misc_feature (1)..( 6): Result.002 file - promoters60/1570293
cacaca

SEQ ID NO: 120555 - DNA, 6 bp, Unknown
  misc_feature (1)..( 6): Result.002 file - promoters60/1570293
aaggta

SEQ ID NO: 120556 - DNA, 6 bp, Unknown
  misc_feature (1)..( 6): Result.002 file - promoters60/1570293
aaggta

SEQ ID NO: 120557 - DNA, 7 bp, Unknown
  misc_feature (1)..( 7): Result.002 file - promoters60/1570293
tataatt

SEQ ID NO: 120558 - DNA, 7 bp, Unknown
  misc_feature (1)..( 7): Result.002 file - promoters60/1570293
tatgatt

SEQ ID NO: 120559 - DNA, 6 bp, Unknown
  misc_feature (1)..( 6): Result.002 file - promoters60/1570293
tcgtta

SEQ ID NO: 120560 - DNA, 6 bp, Unknown
  misc_feature (1)..( 6): Result.002 file - promoters60/1570293
tcgtta

SEQ ID NO: 120561 - DNA, 7 bp, Unknown
  misc_feature (1)..( 7): Result.002 file - promoters60/1570293
aaaatga

SEQ ID NO: 120562 - DNA, 7 bp, Unknown
  misc_feature (1)..( 7): Result.002 file - promoters60/1570293
aaactga

SEQ ID NO: 120563 - DNA, 8 bp, Unknown
  misc_feature (1)..( 8): Result.002 file - promoters60/1570293
cgggaaaa

SEQ ID NO: 120564 - DNA, 8 bp, Unknown
  misc_feature (1)..( 8): Result.002 file - promoters60/1570293
cgggaaaa

SEQ ID NO: 120565 - DNA, 7 bp, Unknown
  misc_feature (1)..( 7): Result.002 file - promoters60/1570293
ggaatat

SEQ ID NO: 120566 - DNA, 7 bp, Unknown
  misc_feature (1)..( 7): Result.002 file - promoters60/1570293
ggaatat

SEQ ID NO: 120567 - DNA, 7 bp, Unknown
  misc_feature (1)..( 7): Result.002 file - promoters60/1570293
gaataaa

SEQ ID NO: 120568 - DNA, 7 bp, Unknown
  misc_feature (1)..( 7): Result.002 file - promoters60/1570293
gaaaaaa

SEQ ID NO: 120569 - DNA, 7 bp, Unknown
  misc_feature (1)..( 7): Result.002 file - promoters60/1570293
aaaaaaa

SEQ ID NO: 120570 - DNA, 7 bp, Unknown
  misc_feature (1)..( 7): Result.002 file - promoters60/1570293
aaaaaaa

SEQ ID NO: 120571 - DNA, 7 bp, Unknown
  misc_feature (1)..( 7): Result.002 file - promoters60/1570293
acaaaat

SEQ ID NO: 120572 - DNA, 7 bp, Unknown
  misc_feature (1)..( 7): Result.002 file - promoters60/1570293
acagaat

SEQ ID NO: 120573 - DNA, 7 bp, Unknown
  misc_feature (1)..( 7): Result.002 file - promoters60/1570293
ggtttgg

SEQ ID NO: 120574 - DNA, 7 bp, Unknown
  misc_feature (1)..( 7): Result.002 file - promoters60/1570293
ggtttgg

SEQ ID NO: 120575 - DNA, 10 bp, Unknown
  misc_feature (1)..( 10): Result.002 file - promoters60/1570474
attataaaac

SEQ ID NO: 120576 - DNA, 10 bp, Unknown
  misc_feature (1)..( 10): Result.002 file - promoters60/1570474
tttataatgt

SEQ ID NO: 120577 - DNA, 11 bp, Unknown
  misc_feature (1)..( 11): Result.002 file - promoters60/1570474
tttcatatgta

SEQ ID NO: 120578 - DNA, 11 bp, Unknown
  misc_feature (1)..( 11): Result.002 file - promoters60/1570474
acttagattca

SEQ ID NO: 120579 - DNA, 11 bp, Unknown
  misc_feature (1)..( 11): Result.002 file - promoters60/1570474
atttttaaatt

SEQ ID NO: 120580 - DNA, 11 bp, Unknown
  misc_feature (1)..( 11): Result.002 file - promoters60/1570474
ctttttaaccg

SEQ ID NO: 120581 - DNA, 11 bp, Unknown
  misc_feature (1)..( 11): Result.002 file - promoters60/1570474
agtaagattct

SEQ ID NO: 120582 - DNA, 11 bp, Unknown
  misc_feature (1)..( 11): Result.002 file - promoters60/1570474
ttgtttaacaa

SEQ ID NO: 120583 - DNA, 9 bp, Unknown
  misc_feature (1)..( 9): Result.002 file - promoters60/1570474
ataatttga

SEQ ID NO: 120584 - DNA, 9 bp, Unknown
  misc_feature (1)..( 9): Result.002 file - promoters60/1570474
ctaattttg

SEQ ID NO: 120585 - DNA, 9 bp, Unknown
  misc_feature (1)..( 9): Result.002 file - promoters60/1570474
atattttta

SEQ ID NO: 120586 - DNA, 10 bp, Unknown
  misc_feature (1)..( 10): Result.002 file - promoters60/1570474
ataagtttgt

SEQ ID NO: 120587 - DNA, 10 bp, Unknown
  misc_feature (1)..( 10): Result.002 file - promoters60/1570474
tgatatttat

SEQ ID NO: 120588 - DNA, 10 bp, Unknown
  misc_feature (1)..( 10): Result.002 file - promoters60/1570474
attgattttt

SEQ ID NO: 120589 - DNA, 12 bp, Unknown
  misc_feature (1)..( 12): Result.002 file - promoters60/1570474
taataaattcat

SEQ ID NO: 120590 - DNA, 12 bp, Unknown
  misc_feature (1)..( 12): Result.002 file - promoters60/1570474
ttatatattttt

SEQ ID NO: 120591 - DNA, 12 bp, Unknown
  misc_feature (1)..( 12): Result.002 file - promoters60/1570474
taacaaatacca

SEQ ID NO: 120592 - DNA, 12 bp, Unknown
  misc_feature (1)..( 12): Result.002 file - promoters60/1570474
atatttatgtgt

SEQ ID NO: 120593 - DNA, 12 bp, Unknown
  misc_feature (1)..( 12): Result.002 file - promoters60/1570474
tgattcatgcta

SEQ ID NO: 120594 - DNA, 12 bp, Unknown
  misc_feature (1)..( 12): Result.002 file - promoters60/1570474
cgattgattttt

SEQ ID NO: 120595 - DNA, 11 bp, Unknown
  misc_feature (1)..( 11): Result.002 file - promoters60/1570622
ccatctccaca

SEQ ID NO: 120596 - DNA, 11 bp, Unknown
  misc_feature (1)..( 11): Result.002 file - promoters60/1570622
aaatctccaac

SEQ ID NO: 120597 - DNA, 11 bp, Unknown
  misc_feature (1)..( 11): Result.002 file - promoters60/1570622
acatctcgttg

SEQ ID NO: 120598 - DNA, 11 bp, Unknown
  misc_feature (1)..( 11): Result.002 file - promoters60/1570622
ttctctgcaat

SEQ ID NO: 120599 - DNA, 11 bp, Unknown
  misc_feature (1)..( 11): Result.002 file - promoters60/1570622
aaaactctatt

SEQ ID NO: 120600 - DNA, 11 bp, Unknown
  misc_feature (1)..( 11): Result.002 file - promoters60/1570622
taagctgcaat

SEQ ID NO: 120601 - DNA, 11 bp, Unknown
  misc_feature (1)..( 11): Result.002 file - promoters60/1570622
taaactctgat

SEQ ID NO: 120602 - DNA, 9 bp, Unknown
  misc_feature (1)..( 9): Result.002 file - promoters60/1570860
gattagaaa

SEQ ID NO: 120603 - DNA, 9 bp, Unknown
  misc_feature (1)..( 9): Result.002 file - promoters60/1570860
gatgagaac

SEQ ID NO: 120604 - DNA, 9 bp, Unknown
  misc_feature (1)..( 9): Result.002 file - promoters60/1570860
cattcgaaa

SEQ ID NO: 120605 - DNA, 9 bp, Unknown
  misc_feature (1)..( 9): Result.002 file - promoters60/1570860
aattcgaat

SEQ ID NO: 120606 - DNA, 10 bp, Unknown
  misc_feature (1)..( 10): Result.002 file - promoters60/1570860
tttgctgaat

SEQ ID NO: 120607 - DNA, 10 bp, Unknown
  misc_feature (1)..( 10): Result.002 file - promoters60/1570860
aatgcagaaa

SEQ ID NO: 120608 - DNA, 12 bp, Unknown
  misc_feature (1)..( 12): Result.002 file - promoters60/1570860
agagaaagaaag

SEQ ID NO: 120609 - DNA, 12 bp, Unknown
  misc_feature (1)..( 12): Result.002 file - promoters60/1570860
agaaaaaattca

SEQ ID NO: 120610 - DNA, 12 bp, Unknown
  misc_feature (1)..( 12): Result.002 file - promoters60/1570860
taaaaaaatctt

SEQ ID NO: 120611 - DNA, 12 bp, Unknown
  misc_feature (1)..( 12): Result.002 file - promoters60/1570860
aaataaaacatt

SEQ ID NO: 120612 - DNA, 12 bp, Unknown
  misc_feature (1)..( 12): Result.002 file - promoters60/1570860
ttctaaaatctt

SEQ ID NO: 120613 - DNA, 12 bp, Unknown
  misc_feature (1)..( 12): Result.002 file - promoters60/1570860
atcatcaatctt

SEQ ID NO: 120614 - DNA, 16 bp, Unknown
  misc_feature (1)..( 16): Result.002 file - promoters60/1570860
aaactaattagatata

SEQ ID NO: 120615 - DNA, 16 bp, Unknown
  misc_feature (1)..( 16): Result.002 file - promoters60/1570860
ttcccacttaaatatc

SEQ ID NO: 120616 - DNA, 16 bp, Unknown
  misc_feature (1)..( 16): Result.002 file - promoters60/1570860
aaactaattaaatagt

SEQ ID NO: 120617 - DNA, 16 bp, Unknown
  misc_feature (1)..( 16): Result.002 file - promoters60/1570860
cgataactgaaaagtc

SEQ ID NO: 120618 - DNA, 16 bp, Unknown
  misc_feature (1)..( 16): Result.002 file - promoters60/1570860
ttcaaactcaaaatca

SEQ ID NO: 120619 - DNA, 16 bp, Unknown
  misc_feature (1)..( 16): Result.002 file - promoters60/1570860
cgaaattgcaaaaagt

SEQ ID NO: 120620 - DNA, 14 bp, Unknown
  misc_feature (1)..( 14): Result.002 file - promoters60/1570869
tgcattagttcttc

SEQ ID NO: 120621 - DNA, 14 bp, Unknown
  misc_feature (1)..( 14): Result.002 file - promoters60/1570869
taaatttgttatgt

SEQ ID NO: 120622 - DNA, 14 bp, Unknown
  misc_feature (1)..( 14): Result.002 file - promoters60/1570869
gttattagttaacc

SEQ ID NO: 120623 - DNA, 14 bp, Unknown
  misc_feature (1)..( 14): Result.002 file - promoters60/1570869
taaattttttaaaa

SEQ ID NO: 120624 - DNA, 14 bp, Unknown
  misc_feature (1)..( 14): Result.002 file - promoters60/1570869
tatacgttttaaaa

SEQ ID NO: 120625 - DNA, 14 bp, Unknown
  misc_feature (1)..( 14): Result.002 file - promoters60/1570869
gaaatttcctcgct

SEQ ID NO: 120626 - DNA, 16 bp, Unknown
  misc_feature (1)..( 16): Result.002 file - promoters60/1570869
attcgaatttttcaat

SEQ ID NO: 120627 - DNA, 16 bp, Unknown
  misc_feature (1)..( 16): Result.002 file - promoters60/1570869
tttagtctattttaat

SEQ ID NO: 120628 - DNA, 16 bp, Unknown
  misc_feature (1)..( 16): Result.002 file - promoters60/1570869
atttgaaattttcata

SEQ ID NO: 120629 - DNA, 16 bp, Unknown
  misc_feature (1)..( 16): Result.002 file - promoters60/1570869
caatcccaattctaac

SEQ ID NO: 120630 - DNA, 16 bp, Unknown
  misc_feature (1)..( 16): Result.002 file - promoters60/1570869
gaacggagattttaac

SEQ ID NO: 120631 - DNA, 16 bp, Unknown
  misc_feature (1)..( 16): Result.002 file - promoters60/1570869
tagaaaagaatgaaat

SEQ ID NO: 120632 - DNA, 11 bp, Unknown
  misc_feature (1)..( 11): Result.002 file - promoters60/1570869
ttttgaagaat

SEQ ID NO: 120633 - DNA, 11 bp, Unknown
  misc_feature (1)..( 11): Result.002 file - promoters60/1570869
ttttgatgaat

SEQ ID NO: 120634 - DNA, 11 bp, Unknown
  misc_feature (1)..( 11): Result.002 file - promoters60/1570869
gtttgaatcgt

SEQ ID NO: 120635 - DNA, 11 bp, Unknown
  misc_feature (1)..( 11): Result.002 file - promoters60/1570869
atttgctgaat

SEQ ID NO: 120636 - DNA, 11 bp, Unknown
  misc_feature (1)..( 11): Result.002 file - promoters60/1570869
aaaagatgaag

SEQ ID NO: 120637 - DNA, 11 bp, Unknown
  misc_feature (1)..( 11): Result.002 file - promoters60/1570869
tttcgatgtat

SEQ ID NO: 120638 - DNA, 11 bp, Unknown
  misc_feature (1)..( 11): Result.002 file - promoters60/1570869
ttttaaatcag

SEQ ID NO: 120639 - DNA, 19 bp, Unknown
  misc_feature (1)..( 19): Result.002 file - promoters60/1570869
ataaaaatgttagatagga

SEQ ID NO: 120640 - DNA, 19 bp, Unknown
  misc_feature (1)..( 19): Result.002 file - promoters60/1570869
tcataaattttaaaattat

SEQ ID NO: 120641 - DNA, 19 bp, Unknown
  misc_feature (1)..( 19): Result.002 file - promoters60/1570869
tgttaaatatgaatattac

SEQ ID NO: 120642 - DNA, 20 bp, Unknown
  misc_feature (1)..( 20): Result.002 file - promoters60/1570869
tgttaaactgttagtgcaag

SEQ ID NO: 120643 - DNA, 20 bp, Unknown
  misc_feature (1)..( 20): Result.002 file - promoters60/1570869
atgtaaattttgaaataatt

SEQ ID NO: 120644 - DNA, 20 bp, Unknown
  misc_feature (1)..( 20): Result.002 file - promoters60/1570869
ctgagaaatagatttgaaaa

SEQ ID NO: 120645 - DNA, 20 bp, Unknown
  misc_feature (1)..( 20): Result.002 file - promoters60/1570869
ttttaaattttttaaaatat

SEQ ID NO: 120646 - DNA, 11 bp, Unknown
  misc_feature (1)..( 11): Result.002 file - promoters60/1570869
cttatataaac

SEQ ID NO: 120647 - DNA, 11 bp, Unknown
  misc_feature (1)..( 11): Result.002 file - promoters60/1570869
tatatataata

SEQ ID NO: 120648 - DNA, 11 bp, Unknown
  misc_feature (1)..( 11): Result.002 file - promoters60/1570869
agtatataaac

SEQ ID NO: 120649 - DNA, 11 bp, Unknown
  misc_feature (1)..( 11): Result.002 file - promoters60/1570869
tataaataaaa

SEQ ID NO: 120650 - DNA, 11 bp, Unknown
  misc_feature (1)..( 11): Result.002 file - promoters60/1570869
tgtatataaat

SEQ ID NO: 120651 - DNA, 11 bp, Unknown
  misc_feature (1)..( 11): Result.002 file - promoters60/1570869
ctactataaaa

SEQ ID NO: 120652 - DNA, 11 bp, Unknown
  misc_feature (1)..( 11): Result.002 file - promoters60/1570869
tccccataaaa

SEQ ID NO: 120653 - DNA, 11 bp, Unknown
  misc_feature (1)..( 11): Result.002 file - promoters60/1570869
gataaatatcc

SEQ ID NO: 120654 - DNA, 12 bp, Unknown
  misc_feature (1)..( 12): Result.002 file - promoters60/1570869
tatataaacaaa

SEQ ID NO: 120655 - DNA, 12 bp, Unknown
  misc_feature (1)..( 12): Result.002 file - promoters60/1570869
ataataaccaaa

SEQ ID NO: 120656 - DNA, 12 bp, Unknown
  misc_feature (1)..( 12): Result.002 file - promoters60/1570869
tatataaactct

SEQ ID NO: 120657 - DNA, 12 bp, Unknown
  misc_feature (1)..( 12): Result.002 file - promoters60/1570869
tttataaataaa

SEQ ID NO: 120658 - DNA, 12 bp, Unknown
  misc_feature (1)..( 12): Result.002 file - promoters60/1570869
tatataaatgac

SEQ ID NO: 120659 - DNA, 12 bp, Unknown
  misc_feature (1)..( 12): Result.002 file - promoters60/1570869
actataaaatca

SEQ ID NO: 120660 - DNA, 12 bp, Unknown
  misc_feature (1)..( 12): Result.002 file - promoters60/1570869
cccataaaagca

SEQ ID NO: 120661 - DNA, 10 bp, Unknown
  misc_feature (1)..( 10): Result.002 file - promoters60/1570869
caaaatttgt

SEQ ID NO: 120662 - DNA, 10 bp, Unknown
  misc_feature (1)..( 10): Result.002 file - promoters60/1570869
caatatttta

SEQ ID NO: 120663 - DNA, 10 bp, Unknown
  misc_feature (1)..( 10): Result.002 file - promoters60/1570869
gaatatgttt

SEQ ID NO: 120664 - DNA, 10 bp, Unknown
  misc_feature (1)..( 10): Result.002 file - promoters60/1570869
aattatttta

SEQ ID NO: 120665 - DNA, 11 bp, Unknown
  misc_feature (1)..( 11): Result.002 file - promoters60/1570869
atttagtttga

SEQ ID NO: 120666 - DNA, 11 bp, Unknown
  misc_feature (1)..( 11): Result.002 file - promoters60/1570869
agatagtatat

SEQ ID NO: 120667 - DNA, 11 bp, Unknown
  misc_feature (1)..( 11): Result.002 file - promoters60/1570869
tcatattatta

SEQ ID NO: 120668 - DNA, 11 bp, Unknown
  misc_feature (1)..( 11): Result.002 file - promoters60/1570869
tggttattttt

SEQ ID NO: 120669 - DNA, 11 bp, Unknown
  misc_feature (1)..( 11): Result.002 file - promoters60/1570869
gatttagtttg

SEQ ID NO: 120670 - DNA, 11 bp, Unknown
  misc_feature (1)..( 11): Result.002 file - promoters60/1570869
atgtttttttt

SEQ ID NO: 120671 - DNA, 11 bp, Unknown
  misc_feature (1)..( 11): Result.002 file - promoters60/1570869
aaattatttta

SEQ ID NO: 120672 - DNA, 11 bp, Unknown
  misc_feature (1)..( 11): Result.002 file - promoters60/1570869
atattattagt

SEQ ID NO: 120673 - DNA, 11 bp, Unknown
  misc_feature (1)..( 11): Result.002 file - promoters60/1570869
atactatgata

SEQ ID NO: 120674 - DNA, 11 bp, Unknown
  misc_feature (1)..( 11): Result.002 file - promoters60/1570869
atagtatatac

SEQ ID NO: 120675 - DNA, 10 bp, Unknown
  misc_feature (1)..( 10): Result.002 file - promoters60/1570966
gaaatatagg

SEQ ID NO: 120676 - DNA, 10 bp, Unknown
  misc_feature (1)..( 10): Result.002 file - promoters60/1570966
aaaatattaa

SEQ ID NO: 120677 - DNA, 10 bp, Unknown
  misc_feature (1)..( 10): Result.002 file - promoters60/1570966
tagatatatt

SEQ ID NO: 120678 - DNA, 10 bp, Unknown
  misc_feature (1)..( 10): Result.002 file - promoters60/1570966
taaaaattaa

SEQ ID NO: 120679 - DNA, 10 bp, Unknown
  misc_feature (1)..( 10): Result.002 file - promoters60/1570966
caaatattgc

SEQ ID NO: 120680 - DNA, 10 bp, Unknown
  misc_feature (1)..( 10): Result.002 file - promoters60/1570966
aagatatttc

SEQ ID NO: 120681 - DNA, 10 bp, Unknown
  misc_feature (1)..( 10): Result.002 file - promoters60/1570966
gtaaaatttc

SEQ ID NO: 120682 - DNA, 10 bp, Unknown
  misc_feature (1)..( 10): Result.002 file - promoters60/1570966
taacaattct

SEQ ID NO: 120683 - DNA, 9 bp, Unknown
  misc_feature (1)..( 9): Result.002 file - promoters60/1570966
caacaaagt

SEQ ID NO: 120684 - DNA, 9 bp, Unknown
  misc_feature (1)..( 9): Result.002 file - promoters60/1570966
aaacaaacg

SEQ ID NO: 120685 - DNA, 9 bp, Unknown
  misc_feature (1)..( 9): Result.002 file - promoters60/1570966
gaacaaaac

SEQ ID NO: 120686 - DNA, 9 bp, Unknown
  misc_feature (1)..( 9): Result.002 file - promoters60/1570966
aaataaatt

SEQ ID NO: 120687 - DNA, 9 bp, Unknown
  misc_feature (1)..( 9): Result.002 file - promoters60/1570966
aaacaaatg

SEQ ID NO: 120688 - DNA, 9 bp, Unknown
  misc_feature (1)..( 9): Result.002 file - promoters60/1570966
aaaaaaaga

SEQ ID NO: 120689 - DNA, 9 bp, Unknown
  misc_feature (1)..( 9): Result.002 file - promoters60/1570966
gtatatatt

SEQ ID NO: 120690 - DNA, 13 bp, Unknown
  misc_feature (1)..( 13): Result.002 file - promoters60/1570966
ccactatataaga

SEQ ID NO: 120691 - DNA, 13 bp, Unknown
  misc_feature (1)..( 13): Result.002 file - promoters60/1570966
ccattatatatag

SEQ ID NO: 120692 - DNA, 13 bp, Unknown
  misc_feature (1)..( 13): Result.002 file - promoters60/1570966
caaccatataaat

SEQ ID NO: 120693 - DNA, 13 bp, Unknown
  misc_feature (1)..( 13): Result.002 file - promoters60/1570966
cgcctatatataa

SEQ ID NO: 120694 - DNA, 13 bp, Unknown
  misc_feature (1)..( 13): Result.002 file - promoters60/1570966
cttttatatataa

SEQ ID NO: 120695 - DNA, 13 bp, Unknown
  misc_feature (1)..( 13): Result.002 file - promoters60/1570966
tatttatacaaat

SEQ ID NO: 120696 - DNA, 13 bp, Unknown
  misc_feature (1)..( 13): Result.002 file - promoters60/1570966
tgtttgattgaat

SEQ ID NO: 120697 - DNA, 13 bp, Unknown
  misc_feature (1)..( 13): Result.002 file - promoters60/1570966
tgtttaattaaac

SEQ ID NO: 120698 - DNA, 13 bp, Unknown
  misc_feature (1)..( 13): Result.002 file - promoters60/1570966
tatttcatttcca

SEQ ID NO: 120699 - DNA, 13 bp, Unknown
  misc_feature (1)..( 13): Result.002 file - promoters60/1570966
aaataaataaaag

SEQ ID NO: 120700 - DNA, 13 bp, Unknown
  misc_feature (1)..( 13): Result.002 file - promoters60/1570966
aataaaattaata

SEQ ID NO: 120701 - DNA, 13 bp, Unknown
  misc_feature (1)..( 13): Result.002 file - promoters60/1570966
gacattataaaat

SEQ ID NO: 120702 - DNA, 13 bp, Unknown
  misc_feature (1)..( 13): Result.002 file - promoters60/1570966
tctaacataggca

SEQ ID NO: 120703 - DNA, 15 bp, Unknown
  misc_feature (1)..( 15): Result.002 file - promoters60/1570966
cgaattctttaaact

SEQ ID NO: 120704 - DNA, 15 bp, Unknown
  misc_feature (1)..( 15): Result.002 file - promoters60/1570966
aaaatccttaattac

SEQ ID NO: 120705 - DNA, 15 bp, Unknown
  misc_feature (1)..( 15): Result.002 file - promoters60/1570966
ttatttctttaaact

SEQ ID NO: 120706 - DNA, 15 bp, Unknown
  misc_feature (1)..( 15): Result.002 file - promoters60/1570966
ataattattttgcag

SEQ ID NO: 120707 - DNA, 15 bp, Unknown
  misc_feature (1)..( 15): Result.002 file - promoters60/1570966
atgtttgtttaacaa

SEQ ID NO: 120708 - DNA, 15 bp, Unknown
  misc_feature (1)..( 15): Result.002 file - promoters60/1570966
ttatttatttactaa

SEQ ID NO: 120709 - DNA, 15 bp, Unknown
  misc_feature (1)..( 15): Result.002 file - promoters60/1570966
tttacccttaaaagt

SEQ ID NO: 120710 - DNA, 11 bp, Unknown
  misc_feature (1)..( 11): Result.002 file - promoters60/1570966
ttttaaaaatt

SEQ ID NO: 120711 - DNA, 11 bp, Unknown
  misc_feature (1)..( 11): Result.002 file - promoters60/1570966
ggctaaaaatg

SEQ ID NO: 120712 - DNA, 11 bp, Unknown
  misc_feature (1)..( 11): Result.002 file - promoters60/1570966
gtttcaaatac

SEQ ID NO: 120713 - DNA, 11 bp, Unknown
  misc_feature (1)..( 11): Result.002 file - promoters60/1570966
gtttccaatat

SEQ ID NO: 120714 - DNA, 11 bp, Unknown
  misc_feature (1)..( 11): Result.002 file - promoters60/1570966
agatcaaatag

SEQ ID NO: 120715 - DNA, 11 bp, Unknown
  misc_feature (1)..( 11): Result.002 file - promoters60/1570966
cctggaaatag

SEQ ID NO: 120716 - DNA, 12 bp, Unknown
  misc_feature (1)..( 12): Result.002 file - promoters60/1570966
ttgagtttaggc

SEQ ID NO: 120717 - DNA, 12 bp, Unknown
  misc_feature (1)..( 12): Result.002 file - promoters60/1570966
ttaagtctagta

SEQ ID NO: 120718 - DNA, 12 bp, Unknown
  misc_feature (1)..( 12): Result.002 file - promoters60/1570966
ttgacttttgac

SEQ ID NO: 120719 - DNA, 12 bp, Unknown
  misc_feature (1)..( 12): Result.002 file - promoters60/1570966
gatagtttaaaa

SEQ ID NO: 120720 - DNA, 12 bp, Unknown
  misc_feature (1)..( 12): Result.002 file - promoters60/1570966
ttggcttctatt

SEQ ID NO: 120721 - DNA, 12 bp, Unknown
  misc_feature (1)..( 12): Result.002 file - promoters60/1570966
ataagtttcaaa

SEQ ID NO: 120722 - DNA, 12 bp, Unknown
  misc_feature (1)..( 12): Result.002 file - promoters60/1570966
acaattctaatt

SEQ ID NO: 120723 - DNA, 9 bp, Unknown
  misc_feature (1)..( 9): Result.002 file - promoters60/1570966
aaaaataaa

SEQ ID NO: 120724 - DNA, 9 bp, Unknown
  misc_feature (1)..( 9): Result.002 file - promoters60/1570966
aaacatata

SEQ ID NO: 120725 - DNA, 9 bp, Unknown
  misc_feature (1)..( 9): Result.002 file - promoters60/1570966
aaaattaat

SEQ ID NO: 120726 - DNA, 9 bp, Unknown
  misc_feature (1)..( 9): Result.002 file - promoters60/1570966
taaaataca

SEQ ID NO: 120727 - DNA, 9 bp, Unknown
  misc_feature (1)..( 9): Result.002 file - promoters60/1570966
taacatagg

SEQ ID NO: 120728 - DNA, 9 bp, Unknown
  misc_feature (1)..( 9): Result.002 file - promoters60/1570966
gataatatt

SEQ ID NO: 120729 - DNA, 10 bp, Unknown
  misc_feature (1)..( 10): Result.002 file - promoters60/1570966
atattattag

SEQ ID NO: 120730 - DNA, 10 bp, Unknown
  misc_feature (1)..( 10): Result.002 file - promoters60/1570966
atattaataa

SEQ ID NO: 120731 - DNA, 10 bp, Unknown
  misc_feature (1)..( 10): Result.002 file - promoters60/1570966
atattattag

SEQ ID NO: 120732 - DNA, 10 bp, Unknown
  misc_feature (1)..( 10): Result.002 file - promoters60/1570966
ttattatatt

SEQ ID NO: 120733 - DNA, 10 bp, Unknown
  misc_feature (1)..( 10): Result.002 file - promoters60/1570966
atataattat

SEQ ID NO: 120734 - DNA, 10 bp, Unknown
  misc_feature (1)..( 10): Result.002 file - promoters60/1570966
ccttaattac

SEQ ID NO: 120735 - DNA, 10 bp, Unknown
  misc_feature (1)..( 10): Result.002 file - promoters60/1570966
atataactaa

SEQ ID NO: 120736 - DNA, 11 bp, Unknown
  misc_feature (1)..( 11): Result.002 file - promoters60/1571014
caaaatgttat

SEQ ID NO: 120737 - DNA, 11 bp, Unknown
  misc_feature (1)..( 11): Result.002 file - promoters60/1571014
tccaatgtttt

SEQ ID NO: 120738 - DNA, 11 bp, Unknown
  misc_feature (1)..( 11): Result.002 file - promoters60/1571014
caaaatttttt

SEQ ID NO: 120739 - DNA, 11 bp, Unknown
  misc_feature (1)..( 11): Result.002 file - promoters60/1571014
cttcattcttt

SEQ ID NO: 120740 - DNA, 11 bp, Unknown
  misc_feature (1)..( 11): Result.002 file - promoters60/1571014
gcaaatgttaa

SEQ ID NO: 120741 - DNA, 11 bp, Unknown
  misc_feature (1)..( 11): Result.002 file - promoters60/1571014
ttcaatcttct

SEQ ID NO: 120742 - DNA, 11 bp, Unknown
  misc_feature (1)..( 11): Result.002 file - promoters60/1571422
actaattaata

SEQ ID NO: 120743 - DNA, 11 bp, Unknown
  misc_feature (1)..( 11): Result.002 file - promoters60/1571422
actaatttgta

SEQ ID NO: 120744 - DNA, 11 bp, Unknown
  misc_feature (1)..( 11): Result.002 file - promoters60/1571422
aataattagta

SEQ ID NO: 120745 - DNA, 11 bp, Unknown
  misc_feature (1)..( 11): Result.002 file - promoters60/1571422
ataaattaatg

SEQ ID NO: 120746 - DNA, 11 bp, Unknown
  misc_feature (1)..( 11): Result.002 file - promoters60/1571422
gtaaattatat

SEQ ID NO: 120747 - DNA, 11 bp, Unknown
  misc_feature (1)..( 11): Result.002 file - promoters60/1571422
atatattaatg

SEQ ID NO: 120748 - DNA, 11 bp, Unknown
  misc_feature (1)..( 11): Result.002 file - promoters60/1571422
gtaaataatta

SEQ ID NO: 120749 - DNA, 7 bp, Unknown
  misc_feature (1)..( 7): Result.002 file - promoters60/1571422
aaaaaaa

SEQ ID NO: 120750 - DNA, 7 bp, Unknown
  misc_feature (1)..( 7): Result.002 file - promoters60/1571422
aaaaaaa

SEQ ID NO: 120751 - DNA, 7 bp, Unknown
  misc_feature (1)..( 7): Result.002 file - promoters60/1571422
aaaaaac

SEQ ID NO: 120752 - DNA, 9 bp, Unknown
  misc_feature (1)..( 9): Result.002 file - promoters60/1571422
ttattttat

SEQ ID NO: 120753 - DNA, 9 bp, Unknown
  misc_feature (1)..( 9): Result.002 file - promoters60/1571422
ttaatttat

SEQ ID NO: 120754 - DNA, 9 bp, Unknown
  misc_feature (1)..( 9): Result.002 file - promoters60/1571422
tttttttga

SEQ ID NO: 120755 - DNA, 8 bp, Unknown
  misc_feature (1)..( 8): Result.002 file - promoters60/1571422
taataaag

SEQ ID NO: 120756 - DNA, 8 bp, Unknown
  misc_feature (1)..( 8): Result.002 file - promoters60/1571422
atataaag

SEQ ID NO: 120757 - DNA, 8 bp, Unknown
  misc_feature (1)..( 8): Result.002 file - promoters60/1571422
taacaaaa

SEQ ID NO: 120758 - DNA, 8 bp, Unknown
  misc_feature (1)..( 8): Result.002 file - promoters60/1571422
atataaat

SEQ ID NO: 120759 - DNA, 9 bp, Unknown
  misc_feature (1)..( 9): Result.002 file - promoters60/1571422
actatcata

SEQ ID NO: 120760 - DNA, 9 bp, Unknown
  misc_feature (1)..( 9): Result.002 file - promoters60/1571422
tcaatcata

SEQ ID NO: 120761 - DNA, 9 bp, Unknown
  misc_feature (1)..( 9): Result.002 file - promoters60/1571422
actatcatt

SEQ ID NO: 120762 - DNA, 8 bp, Unknown
  misc_feature (1)..( 8): Result.002 file - promoters60/1571422
aatttcat

SEQ ID NO: 120763 - DNA, 8 bp, Unknown
  misc_feature (1)..( 8): Result.002 file - promoters60/1571422
aatttcat

SEQ ID NO: 120764 - DNA, 8 bp, Unknown
  misc_feature (1)..( 8): Result.002 file - promoters60/1571422
tatttcag

SEQ ID NO: 120765 - DNA, 9 bp, Unknown
  misc_feature (1)..( 9): Result.002 file - promoters60/1571422
cataatttt

SEQ ID NO: 120766 - DNA, 9 bp, Unknown
  misc_feature (1)..( 9): Result.002 file - promoters60/1571422
cataataaa

SEQ ID NO: 120767 - DNA, 9 bp, Unknown
  misc_feature (1)..( 9): Result.002 file - promoters60/1571422
aataataaa

SEQ ID NO: 120768 - DNA, 8 bp, Unknown
  misc_feature (1)..( 8): Result.002 file - promoters60/1571422
ttttcaaa

SEQ ID NO: 120769 - DNA, 8 bp, Unknown
  misc_feature (1)..( 8): Result.002 file - promoters60/1571422
gttttaaa

SEQ ID NO: 120770 - DNA, 8 bp, Unknown
  misc_feature (1)..( 8): Result.002 file - promoters60/1571422
gttataag

SEQ ID NO: 120771 - DNA, 8 bp, Unknown
  misc_feature (1)..( 8): Result.002 file - promoters60/1572151
tttactaa

SEQ ID NO: 120772 - DNA, 8 bp, Unknown
  misc_feature (1)..( 8): Result.002 file - promoters60/1572151
attattaa

SEQ ID NO: 120773 - DNA, 8 bp, Unknown
  misc_feature (1)..( 8): Result.002 file - promoters60/1572151
attattat

SEQ ID NO: 120774 - DNA, 11 bp, Unknown
  misc_feature (1)..( 11): Result.002 file - promoters60/1572151
taattttagag

SEQ ID NO: 120775 - DNA, 11 bp, Unknown
  misc_feature (1)..( 11): Result.002 file - promoters60/1572151
taattttaatt

SEQ ID NO: 120776 - DNA, 11 bp, Unknown
  misc_feature (1)..( 11): Result.002 file - promoters60/1572151
tagtttgagag

SEQ ID NO: 120777 - DNA, 11 bp, Unknown
  misc_feature (1)..( 11): Result.002 file - promoters60/1572151
tcgttttaatt

SEQ ID NO: 120778 - DNA, 13 bp, Unknown
  misc_feature (1)..( 13): Result.002 file - promoters60/1572151
ccactatatatat

SEQ ID NO: 120779 - DNA, 13 bp, Unknown
  misc_feature (1)..( 13): Result.002 file - promoters60/1572151
catttatttatat

SEQ ID NO: 120780 - DNA, 13 bp, Unknown
  misc_feature (1)..( 13): Result.002 file - promoters60/1572151
agtgtatatatat

SEQ ID NO: 120781 - DNA, 13 bp, Unknown
  misc_feature (1)..( 13): Result.002 file - promoters60/1572151
catctatttttat

SEQ ID NO: 120782 - DNA, 9 bp, Unknown
  misc_feature (1)..( 9): Result.002 file - promoters60/1572151
taaacaaca

SEQ ID NO: 120783 - DNA, 9 bp, Unknown
  misc_feature (1)..( 9): Result.002 file - promoters60/1572151
taatcaaat

SEQ ID NO: 120784 - DNA, 9 bp, Unknown
  misc_feature (1)..( 9): Result.002 file - promoters60/1572151
caatcaaat

SEQ ID NO: 120785 - DNA, 11 bp, Unknown
  misc_feature (1)..( 11): Result.002 file - promoters60/1572151
gtaaacataat

SEQ ID NO: 120786 - DNA, 11 bp, Unknown
  misc_feature (1)..( 11): Result.002 file - promoters60/1572151
aaaaacattaa

SEQ ID NO: 120787 - DNA, 11 bp, Unknown
  misc_feature (1)..( 11): Result.002 file - promoters60/1572151
aaaaaaattaa

SEQ ID NO: 120788 - DNA, 9 bp, Unknown
  misc_feature (1)..( 9): Result.002 file - promoters60/1572151
atttctttg

SEQ ID NO: 120789 - DNA, 9 bp, Unknown
  misc_feature (1)..( 9): Result.002 file - promoters60/1572151
attactttt

SEQ ID NO: 120790 - DNA, 9 bp, Unknown
  misc_feature (1)..( 9): Result.002 file - promoters60/1572151
tttaatttt

SEQ ID NO: 120791 - DNA, 9 bp, Unknown
  misc_feature (1)..( 9): Result.002 file - promoters60/1572151
attttagtc

SEQ ID NO: 120792 - DNA, 9 bp, Unknown
  misc_feature (1)..( 9): Result.002 file - promoters60/1572151
attttggtc

SEQ ID NO: 120793 - DNA, 9 bp, Unknown
  misc_feature (1)..( 9): Result.002 file - promoters60/1572151
tctttggtt

SEQ ID NO: 120794 - DNA, 8 bp, Unknown
  misc_feature (1)..( 8): Result.002 file - promoters60/1572151
tatttcta

SEQ ID NO: 120795 - DNA, 8 bp, Unknown
  misc_feature (1)..( 8): Result.002 file - promoters60/1572151
tatttcaa

SEQ ID NO: 120796 - DNA, 8 bp, Unknown
  misc_feature (1)..( 8): Result.002 file - promoters60/1572151
gatttcaa

SEQ ID NO: 120797 - DNA, 8 bp, Unknown
  misc_feature (1)..( 8): Result.002 file - promoters60/1572151
aacaaata

SEQ ID NO: 120798 - DNA, 8 bp, Unknown
  misc_feature (1)..( 8): Result.002 file - promoters60/1572151
ttcaaata

SEQ ID NO: 120799 - DNA, 8 bp, Unknown
  misc_feature (1)..( 8): Result.002 file - promoters60/1572151
ttcgaatt

SEQ ID NO: 120800 - DNA, 8 bp, Unknown
  misc_feature (1)..( 8): Result.002 file - promoters60/1572151
atagaaga

SEQ ID NO: 120801 - DNA, 8 bp, Unknown
  misc_feature (1)..( 8): Result.002 file - promoters60/1572151
ataaaagt

SEQ ID NO: 120802 - DNA, 8 bp, Unknown
  misc_feature (1)..( 8): Result.002 file - promoters60/1572151
ttaaaaaa

SEQ ID NO: 120803 - DNA, 8 bp, Unknown
  misc_feature (1)..( 8): Result.002 file - promoters60/1572151
ttaatttt

SEQ ID NO: 120804 - DNA, 8 bp, Unknown
  misc_feature (1)..( 8): Result.002 file - promoters60/1572151
ttagtttg

SEQ ID NO: 120805 - DNA, 8 bp, Unknown
  misc_feature (1)..( 8): Result.002 file - promoters60/1572151
aaagtttg

SEQ ID NO: 120806 - DNA, 8 bp, Unknown
  misc_feature (1)..( 8): Result.002 file - promoters60/1572151
aattcaaa

SEQ ID NO: 120807 - DNA, 8 bp, Unknown
  misc_feature (1)..( 8): Result.002 file - promoters60/1572151
atttcaaa

SEQ ID NO: 120808 - DNA, 8 bp, Unknown
  misc_feature (1)..( 8): Result.002 file - promoters60/1572151
atttcaat

SEQ ID NO: 120809 - DNA, 8 bp, Unknown
  misc_feature (1)..( 8): Result.002 file - promoters60/1572151
tgtaacat

SEQ ID NO: 120810 - DNA, 8 bp, Unknown
  misc_feature (1)..( 8): Result.002 file - promoters60/1572151
tgtaaccc

SEQ ID NO: 120811 - DNA, 8 bp, Unknown
  misc_feature (1)..( 8): Result.002 file - promoters60/1572151
tgtcaccc

SEQ ID NO: 120812 - DNA, 8 bp, Unknown
  misc_feature (1)..( 8): Result.002 file - promoters60/1572404
gttaagct

SEQ ID NO: 120813 - DNA, 8 bp, Unknown
  misc_feature (1)..( 8): Result.002 file - promoters60/1572404
gttgagct

SEQ ID NO: 120814 - DNA, 8 bp, Unknown
  misc_feature (1)..( 8): Result.002 file - promoters60/1572404
gaaaaaaa

SEQ ID NO: 120815 - DNA, 8 bp, Unknown
  misc_feature (1)..( 8): Result.002 file - promoters60/1572404
gaagaaaa

SEQ ID NO: 120816 - DNA, 7 bp, Unknown
  misc_feature (1)..( 7): Result.002 file - promoters60/1572404
gtcaaaa

SEQ ID NO: 120817 - DNA, 7 bp, Unknown
  misc_feature (1)..( 7): Result.002 file - promoters60/1572404
gtcgaaa

SEQ ID NO: 120818 - DNA, 7 bp, Unknown
  misc_feature (1)..( 7): Result.002 file - promoters60/1572404
agaaaat

SEQ ID NO: 120819 - DNA, 7 bp, Unknown
  misc_feature (1)..( 7): Result.002 file - promoters60/1572404
agagaat

SEQ ID NO: 120820 - DNA, 8 bp, Unknown
  misc_feature (1)..( 8): Result.002 file - promoters60/1572404
aattgttt

SEQ ID NO: 120821 - DNA, 8 bp, Unknown
  misc_feature (1)..( 8): Result.002 file - promoters60/1572404
aatttttt

SEQ ID NO: 120822 - DNA, 8 bp, Unknown
  misc_feature (1)..( 8): Result.002 file - promoters60/1572404
ttttttta

SEQ ID NO: 120823 - DNA, 8 bp, Unknown
  misc_feature (1)..( 8): Result.002 file - promoters60/1572404
ttttttta

SEQ ID NO: 120824 - DNA, 6 bp, Unknown
  misc_feature (1)..( 6): Result.002 file - promoters60/1572404
attata

SEQ ID NO: 120825 - DNA, 6 bp, Unknown
  misc_feature (1)..( 6): Result.002 file - promoters60/1572404
attata

SEQ ID NO: 120826 - DNA, 7 bp, Unknown
  misc_feature (1)..( 7): Result.002 file - promoters60/1572404
aaatatc

SEQ ID NO: 120827 - DNA, 7 bp, Unknown
  misc_feature (1)..( 7): Result.002 file - promoters60/1572404
aaacatc

SEQ ID NO: 120828 - DNA, 8 bp, Unknown
  misc_feature (1)..( 8): Result.002 file - promoters60/1572404
tagtcctc

SEQ ID NO: 120829 - DNA, 8 bp, Unknown
  misc_feature (1)..( 8): Result.002 file - promoters60/1572404
tagacctc

SEQ ID NO: 120830 - DNA, 6 bp, Unknown
  misc_feature (1)..( 6): Result.002 file - promoters60/1572404
acttat

SEQ ID NO: 120831 - DNA, 6 bp, Unknown
  misc_feature (1)..( 6): Result.002 file - promoters60/1572404
acttat

SEQ ID NO: 120832 - DNA, 9 bp, Unknown
  misc_feature (1)..( 9): Result.002 file - promoters60/1572796
tccagtagg

SEQ ID NO: 120833 - DNA, 9 bp, Unknown
  misc_feature (1)..( 9): Result.002 file - promoters60/1572796
tccagaagg

SEQ ID NO: 120834 - DNA, 6 bp, Unknown
  misc_feature (1)..( 6): Result.002 file - promoters60/1572796
agtaca

SEQ ID NO: 120835 - DNA, 6 bp, Unknown
  misc_feature (1)..( 6): Result.002 file - promoters60/1572796
agtaca

SEQ ID NO: 120836 - DNA, 6 bp, Unknown
  misc_feature (1)..( 6): Result.002 file - promoters60/1572796
agctca

SEQ ID NO: 120837 - DNA, 6 bp, Unknown
  misc_feature (1)..( 6): Result.002 file - promoters60/1572796
agctca

SEQ ID NO: 120838 - DNA, 8 bp, Unknown
  misc_feature (1)..( 8): Result.002 file - promoters60/1572796
aacataaa

SEQ ID NO: 120839 - DNA, 8 bp, Unknown
  misc_feature (1)..( 8): Result.002 file - promoters60/1572796
aacacaaa

SEQ ID NO: 120840 - DNA, 8 bp, Unknown
  misc_feature (1)..( 8): Result.002 file - promoters60/1572796
acaaaacg

SEQ ID NO: 120841 - DNA, 8 bp, Unknown
  misc_feature (1)..( 8): Result.002 file - promoters60/1572796
acaagacg

SEQ ID NO: 120842 - DNA, 6 bp, Unknown
  misc_feature (1)..( 6): Result.002 file - promoters60/1572796
gtagag

SEQ ID NO: 120843 - DNA, 6 bp, Unknown
  misc_feature (1)..( 6): Result.002 file - promoters60/1572796
gtagag

SEQ ID NO: 120844 - DNA, 6 bp, Unknown
  misc_feature (1)..( 6): Result.002 file - promoters60/1572796
aacctg

SEQ ID NO: 120845 - DNA, 6 bp, Unknown
  misc_feature (1)..( 6): Result.002 file - promoters60/1572796
aacctg

SEQ ID NO: 120846 - DNA, 7 bp, Unknown
  misc_feature (1)..( 7): Result.002 file - promoters60/1572796
aatttca

SEQ ID NO: 120847 - DNA, 7 bp, Unknown
  misc_feature (1)..( 7): Result.002 file - promoters60/1572796
gatttca

SEQ ID NO: 120848 - DNA, 7 bp, Unknown
  misc_feature (1)..( 7): Result.002 file - promoters60/1572796
aatttcg

SEQ ID NO: 120849 - DNA, 8 bp, Unknown
  misc_feature (1)..( 8): Result.002 file - promoters60/1572796
ttaattaa

SEQ ID NO: 120850 - DNA, 8 bp, Unknown
  misc_feature (1)..( 8): Result.002 file - promoters60/1572796
ttatttaa

SEQ ID NO: 120851 - DNA, 6 bp, Unknown
  misc_feature (1)..( 6): Result.002 file - promoters60/1572796
attgta

SEQ ID NO: 120852 - DNA, 6 bp, Unknown
  misc_feature (1)..( 6): Result.002 file - promoters60/1572796
attgta

SEQ ID NO: 120853 - DNA, 6 bp, Unknown
  misc_feature (1)..( 6): Result.002 file - promoters60/1572796
gtgaat

SEQ ID NO: 120854 - DNA, 6 bp, Unknown
  misc_feature (1)..( 6): Result.002 file - promoters60/1572796
gtgaat

SEQ ID NO: 120855 - DNA, 7 bp, Unknown
  misc_feature (1)..( 7): Result.002 file - promoters60/1572796
tacagta

SEQ ID NO: 120856 - DNA, 7 bp, Unknown
  misc_feature (1)..( 7): Result.002 file - promoters60/1572796
tactgta

SEQ ID NO: 120857 - DNA, 6 bp, Unknown
  misc_feature (1)..( 6): Result.002 file - promoters60/1572796
caatat

SEQ ID NO: 120858 - DNA, 6 bp, Unknown
  misc_feature (1)..( 6): Result.002 file - promoters60/1572796
caatat

SEQ ID NO: 120859 - DNA, 8 bp, Unknown
  misc_feature (1)..( 8): Result.002 file - promoters60/1572796
aaaaaaat

SEQ ID NO: 120860 - DNA, 8 bp, Unknown
  misc_feature (1)..( 8): Result.002 file - promoters60/1572796
aaaataat

SEQ ID NO: 120861 - DNA, 13 bp, Unknown
  misc_feature (1)..( 13): Result.002 file - promoters60/1573594
caacaatgtacaa

SEQ ID NO: 120862 - DNA, 13 bp, Unknown
  misc_feature (1)..( 13): Result.002 file - promoters60/1573594
caataatttacat

SEQ ID NO: 120863 - DNA, 13 bp, Unknown
  misc_feature (1)..( 13): Result.002 file - promoters60/1573594
ttacaatttacaa

SEQ ID NO: 120864 - DNA, 13 bp, Unknown
  misc_feature (1)..( 13): Result.002 file - promoters60/1573594
aaattttctacaa

SEQ ID NO: 120865 - DNA, 13 bp, Unknown
  misc_feature (1)..( 13): Result.002 file - promoters60/1573594
tgacaattttctt

SEQ ID NO: 120866 - DNA, 6 bp, Unknown
  misc_feature (1)..( 6): Result.002 file - promoters60/1573651
aatcgt

SEQ ID NO: 120867 - DNA, 6 bp, Unknown
  misc_feature (1)..( 6): Result.002 file - promoters60/1573651
aatcgt

SEQ ID NO: 120868 - DNA, 6 bp, Unknown
  misc_feature (1)..( 6): Result.002 file - promoters60/1573651
aatcgt

SEQ ID NO: 120869 - DNA, 9 bp, Unknown
  misc_feature (1)..( 9): Result.002 file - promoters60/1573651
taagattgg

SEQ ID NO: 120870 - DNA, 9 bp, Unknown
  misc_feature (1)..( 9): Result.002 file - promoters60/1573651
taatattgg

SEQ ID NO: 120871 - DNA, 7 bp, Unknown
  misc_feature (1)..( 7): Result.002 file - promoters60/1573651
ataaaaa

SEQ ID NO: 120872 - DNA, 7 bp, Unknown
  misc_feature (1)..( 7): Result.002 file - promoters60/1573651
ataaaaa

SEQ ID NO: 120873 - DNA, 7 bp, Unknown
  misc_feature (1)..( 7): Result.002 file - promoters60/1573651
agaagct

SEQ ID NO: 120874 - DNA, 7 bp, Unknown
  misc_feature (1)..( 7): Result.002 file - promoters60/1573651
agaagct

SEQ ID NO: 120875 - DNA, 15 bp, Unknown
  misc_feature (1)..( 15): Result.002 file - promoters60/1573651
ttaatatatattact

SEQ ID NO: 120876 - DNA, 15 bp, Unknown
  misc_feature (1)..( 15): Result.002 file - promoters60/1573651
ttaatatatattact

SEQ ID NO: 120877 - DNA, 6 bp, Unknown
  misc_feature (1)..( 6): Result.002 file - promoters60/1573651
ttttaa

SEQ ID NO: 120878 - DNA, 6 bp, Unknown
  misc_feature (1)..( 6): Result.002 file - promoters60/1573651
ttttaa

SEQ ID NO: 120879 - DNA, 7 bp, Unknown
  misc_feature (1)..( 7): Result.002 file - promoters60/1573651
actcaaa

SEQ ID NO: 120880 - DNA, 7 bp, Unknown
  misc_feature (1)..( 7): Result.002 file - promoters60/1573651
actcaaa

SEQ ID NO: 120881 - DNA, 7 bp, Unknown
  misc_feature (1)..( 7): Result.002 file - promoters60/1573651
tttggtt

SEQ ID NO: 120882 - DNA, 7 bp, Unknown
  misc_feature (1)..( 7): Result.002 file - promoters60/1573651
tttagtt

SEQ ID NO: 120883 - DNA, 9 bp, Unknown
  misc_feature (1)..( 9): Result.002 file - promoters60/1573651
agcccaata

SEQ ID NO: 120884 - DNA, 9 bp, Unknown
  misc_feature (1)..( 9): Result.002 file - promoters60/1573651
agcccaata

SEQ ID NO: 120885 - DNA, 6 bp, Unknown
  misc_feature (1)..( 6): Result.002 file - promoters60/1573651
agccca

SEQ ID NO: 120886 - DNA, 6 bp, Unknown
  misc_feature (1)..( 6): Result.002 file - promoters60/1573651
agccca

SEQ ID NO: 120887 - DNA, 8 bp, Unknown
  misc_feature (1)..( 8): Result.002 file - promoters60/1573651
tcatcatc

SEQ ID NO: 120888 - DNA, 8 bp, Unknown
  misc_feature (1)..( 8): Result.002 file - promoters60/1573651
tcatcatc

SEQ ID NO: 120889 - DNA, 8 bp, Unknown
  misc_feature (1)..( 8): Result.002 file - promoters60/1573651
aagtggta

SEQ ID NO: 120890 - DNA, 8 bp, Unknown
  misc_feature (1)..( 8): Result.002 file - promoters60/1573651
aagttgta

SEQ ID NO: 120891 - DNA, 7 bp, Unknown
  misc_feature (1)..( 7): Result.002 file - promoters60/1573651
gctcatt

SEQ ID NO: 120892 - DNA, 7 bp, Unknown
  misc_feature (1)..( 7): Result.002 file - promoters60/1573651
gctgatt

SEQ ID NO: 120893 - DNA, 7 bp, Unknown
  misc_feature (1)..( 7): Result.002 file - promoters60/1573713
aaatata

SEQ ID NO: 120894 - DNA, 7 bp, Unknown
  misc_feature (1)..( 7): Result.002 file - promoters60/1573713
aaacata

SEQ ID NO: 120895 - DNA, 7 bp, Unknown
  misc_feature (1)..( 7): Result.002 file - promoters60/1573713
atatata

SEQ ID NO: 120896 - DNA, 10 bp, Unknown
  misc_feature (1)..( 10): Result.002 file - promoters60/1573713
ataagcgaca

SEQ ID NO: 120897 - DNA, 10 bp, Unknown
  misc_feature (1)..( 10): Result.002 file - promoters60/1573713
ataaacgaca

SEQ ID NO: 120898 - DNA, 7 bp, Unknown
  misc_feature (1)..( 7): Result.002 file - promoters60/1573713
aatcgaa

SEQ ID NO: 120899 - DNA, 7 bp, Unknown
  misc_feature (1)..( 7): Result.002 file - promoters60/1573713
aatcgaa

SEQ ID NO: 120900 - DNA, 10 bp, Unknown
  misc_feature (1)..( 10): Result.002 file - promoters60/1573713
atttatttga

SEQ ID NO: 120901 - DNA, 10 bp, Unknown
  misc_feature (1)..( 10): Result.002 file - promoters60/1573713
ctttatatga

SEQ ID NO: 120902 - DNA, 10 bp, Unknown
  misc_feature (1)..( 10): Result.002 file - promoters60/1573713
attaattgta

SEQ ID NO: 120903 - DNA, 6 bp, Unknown
  misc_feature (1)..( 6): Result.002 file - promoters60/1573713
atttgt

SEQ ID NO: 120904 - DNA, 6 bp, Unknown
  misc_feature (1)..( 6): Result.002 file - promoters60/1573713
atttgt

SEQ ID NO: 120905 - DNA, 6 bp, Unknown
  misc_feature (1)..( 6): Result.002 file - promoters60/1573713
gctctg

SEQ ID NO: 120906 - DNA, 6 bp, Unknown
  misc_feature (1)..( 6): Result.002 file - promoters60/1573713
gctctg

SEQ ID NO: 120907 - DNA, 6 bp, Unknown
  misc_feature (1)..( 6): Result.002 file - promoters60/1573713
taataa

SEQ ID NO: 120908 - DNA, 6 bp, Unknown
  misc_feature (1)..( 6): Result.002 file - promoters60/1573713
taataa

SEQ ID NO: 120909 - DNA, 7 bp, Unknown
  misc_feature (1)..( 7): Result.002 file - promoters60/1573713
taagtta

SEQ ID NO: 120910 - DNA, 7 bp, Unknown
  misc_feature (1)..( 7): Result.002 file - promoters60/1573713
taattta

SEQ ID NO: 120911 - DNA, 7 bp, Unknown
  misc_feature (1)..( 7): Result.002 file - promoters60/1573713
atttatt

SEQ ID NO: 120912 - DNA, 7 bp, Unknown
  misc_feature (1)..( 7): Result.002 file - promoters60/1573713
attaatt

SEQ ID NO: 120913 - DNA, 10 bp, Unknown
  misc_feature (1)..( 10): Result.002 file - promoters60/1573713
tagagttatt

SEQ ID NO: 120914 - DNA, 10 bp, Unknown
  misc_feature (1)..( 10): Result.002 file - promoters60/1573713
attagtaatt

SEQ ID NO: 120915 - DNA, 10 bp, Unknown
  misc_feature (1)..( 10): Result.002 file - promoters60/1573713
attaataatt

SEQ ID NO: 120916 - DNA, 7 bp, Unknown
  misc_feature (1)..( 7): Result.002 file - promoters60/1573713
tgataaa

SEQ ID NO: 120917 - DNA, 7 bp, Unknown
  misc_feature (1)..( 7): Result.002 file - promoters60/1573713
tgaaaaa

SEQ ID NO: 120918 - DNA, 6 bp, Unknown
  misc_feature (1)..( 6): Result.002 file - promoters60/1573713
tatcaa

SEQ ID NO: 120919 - DNA, 6 bp, Unknown
  misc_feature (1)..( 6): Result.002 file - promoters60/1573713
tatcaa

SEQ ID NO: 120920 - DNA, 7 bp, Unknown
  misc_feature (1)..( 7): Result.002 file - promoters60/1573713
taatttt

SEQ ID NO: 120921 - DNA, 7 bp, Unknown
  misc_feature (1)..( 7): Result.002 file - promoters60/1573713
taatttt

SEQ ID NO: 120922 - DNA, 6 bp, Unknown
  misc_feature (1)..( 6): Result.002 file - promoters60/1573713
ttagaa

SEQ ID NO: 120923 - DNA, 6 bp, Unknown
  misc_feature (1)..( 6): Result.002 file - promoters60/1573713
ttagaa

SEQ ID NO: 120924 - DNA, 6 bp, Unknown
  misc_feature (1)..( 6): Result.002 file - promoters60/1573713
atattt

SEQ ID NO: 120925 - DNA, 6 bp, Unknown
  misc_feature (1)..( 6): Result.002 file - promoters60/1573713
atattt

SEQ ID NO: 120926 - DNA, 8 bp, Unknown
  misc_feature (1)..( 8): Result.002 file - promoters60/1573713
tagtagta

SEQ ID NO: 120927 - DNA, 8 bp, Unknown
  misc_feature (1)..( 8): Result.002 file - promoters60/1573713
tagaagta

SEQ ID NO: 120928 - DNA, 6 bp, Unknown
  misc_feature (1)..( 6): Result.002 file - promoters60/1573713
taatct

SEQ ID NO: 120929 - DNA, 6 bp, Unknown
  misc_feature (1)..( 6): Result.002 file - promoters60/1573713
taatct

SEQ ID NO: 120930 - DNA, 10 bp, Unknown
  misc_feature (1)..( 10): Result.002 file - promoters60/1573713
gaaatatata

SEQ ID NO: 120931 - DNA, 10 bp, Unknown
  misc_feature (1)..( 10): Result.002 file - promoters60/1573713
gaaatatata

SEQ ID NO: 120932 - DNA, 6 bp, Unknown
  misc_feature (1)..( 6): Result.002 file - promoters60/1573713
aaacat

SEQ ID NO: 120933 - DNA, 6 bp, Unknown
  misc_feature (1)..( 6): Result.002 file - promoters60/1573713
aaacat

SEQ ID NO: 120934 - DNA, 7 bp, Unknown
  misc_feature (1)..( 7): Result.002 file - promoters60/1573713
atatttt

SEQ ID NO: 120935 - DNA, 7 bp, Unknown
  misc_feature (1)..( 7): Result.002 file - promoters60/1573713
ataattt

SEQ ID NO: 120936 - DNA, 10 bp, Unknown
  misc_feature (1)..( 10): Result.002 file - promoters60/1573713
agatatattt

SEQ ID NO: 120937 - DNA, 10 bp, Unknown
  misc_feature (1)..( 10): Result.002 file - promoters60/1573713
agatattttt

SEQ ID NO: 120938 - DNA, 8 bp, Unknown
  misc_feature (1)..( 8): Result.002 file - promoters60/1573941
ctggcaat

SEQ ID NO: 120939 - DNA, 8 bp, Unknown
  misc_feature (1)..( 8): Result.002 file - promoters60/1573941
ctggtaat

SEQ ID NO: 120940 - DNA, 8 bp, Unknown
  misc_feature (1)..( 8): Result.002 file - promoters60/1573941
aaaagtag

SEQ ID NO: 120941 - DNA, 8 bp, Unknown
  misc_feature (1)..( 8): Result.002 file - promoters60/1573941
aaaaatag

SEQ ID NO: 120942 - DNA, 6 bp, Unknown
  misc_feature (1)..( 6): Result.002 file - promoters60/1573941
aaaaag

SEQ ID NO: 120943 - DNA, 6 bp, Unknown
  misc_feature (1)..( 6): Result.002 file - promoters60/1573941
aaaaag

SEQ ID NO: 120944 - DNA, 6 bp, Unknown
  misc_feature (1)..( 6): Result.002 file - promoters60/1573941
tgcatt

SEQ ID NO: 120945 - DNA, 6 bp, Unknown
  misc_feature (1)..( 6): Result.002 file - promoters60/1573941
tgcatt

SEQ ID NO: 120946 - DNA, 7 bp, Unknown
  misc_feature (1)..( 7): Result.002 file - promoters60/1573941
agcgttg

SEQ ID NO: 120947 - DNA, 7 bp, Unknown
  misc_feature (1)..( 7): Result.002 file - promoters60/1573941
agcgttg

SEQ ID NO: 120948 - DNA, 6 bp, Unknown
  misc_feature (1)..( 6): Result.002 file - promoters60/1573941
gaggat

SEQ ID NO: 120949 - DNA, 6 bp, Unknown
  misc_feature (1)..( 6): Result.002 file - promoters60/1573941
gaggat

SEQ ID NO: 120950 - DNA, 8 bp, Unknown
  misc_feature (1)..( 8): Result.002 file - promoters60/1573941
aaaagtgc

SEQ ID NO: 120951 - DNA, 8 bp, Unknown
  misc_feature (1)..( 8): Result.002 file - promoters60/1573941
aaaactgc

SEQ ID NO: 120952 - DNA, 6 bp, Unknown
  misc_feature (1)..( 6): Result.002 file - promoters60/1573941
aaacca

SEQ ID NO: 120953 - DNA, 6 bp, Unknown
  misc_feature (1)..( 6): Result.002 file - promoters60/1573941
aaacca

SEQ ID NO: 120954 - DNA, 7 bp, Unknown
  misc_feature (1)..( 7): Result.002 file - promoters60/1573945
cagaagt

SEQ ID NO: 120955 - DNA, 7 bp, Unknown
  misc_feature (1)..( 7): Result.002 file - promoters60/1573945
cagaaga

SEQ ID NO: 120956 - DNA, 7 bp, Unknown
  misc_feature (1)..( 7): Result.002 file - promoters60/1573945
gagaaga

SEQ ID NO: 120957 - DNA, 7 bp, Unknown
  misc_feature (1)..( 7): Result.002 file - promoters60/1573945
aatctct

SEQ ID NO: 120958 - DNA, 7 bp, Unknown
  misc_feature (1)..( 7): Result.002 file - promoters60/1573945
aatctct

SEQ ID NO: 120959 - DNA, 10 bp, Unknown
  misc_feature (1)..( 10): Result.002 file - promoters60/1573945
aaagatttct

SEQ ID NO: 120960 - DNA, 10 bp, Unknown
  misc_feature (1)..( 10): Result.002 file - promoters60/1573945
aaaggtttct

SEQ ID NO: 120961 - DNA, 6 bp, Unknown
  misc_feature (1)..( 6): Result.002 file - promoters60/1573945
actttg

SEQ ID NO: 120962 - DNA, 6 bp, Unknown
  misc_feature (1)..( 6): Result.002 file - promoters60/1573945
actttg

SEQ ID NO: 120963 - DNA, 6 bp, Unknown
  misc_feature (1)..( 6): Result.002 file - promoters60/1573945
tttatt

SEQ ID NO: 120964 - DNA, 6 bp, Unknown
  misc_feature (1)..( 6): Result.002 file - promoters60/1573945
tttatt

SEQ ID NO: 120965 - DNA, 8 bp, Unknown
  misc_feature (1)..( 8): Result.002 file - promoters60/1573945
tattgtaa

SEQ ID NO: 120966 - DNA, 8 bp, Unknown
  misc_feature (1)..( 8): Result.002 file - promoters60/1573945
tattgtaa

SEQ ID NO: 120967 - DNA, 10 bp, Unknown
  misc_feature (1)..( 10): Result.002 file - promoters60/1573945
tttaaagttt

SEQ ID NO: 120968 - DNA, 10 bp, Unknown
  misc_feature (1)..( 10): Result.002 file - promoters60/1573945
tgtaaaattt

SEQ ID NO: 120969 - DNA, 10 bp, Unknown
  misc_feature (1)..( 10): Result.002 file - promoters60/1573945
tttaaaagag

SEQ ID NO: 120970 - DNA, 6 bp, Unknown
  misc_feature (1)..( 6): Result.002 file - promoters60/1573945
gtatca

SEQ ID NO: 120971 - DNA, 6 bp, Unknown
  misc_feature (1)..( 6): Result.002 file - promoters60/1573945
gtatca

SEQ ID NO: 120972 - DNA, 6 bp, Unknown
  misc_feature (1)..( 6): Result.002 file - promoters60/1573945
tgagag

SEQ ID NO: 120973 - DNA, 6 bp, Unknown
  misc_feature (1)..( 6): Result.002 file - promoters60/1573945
tgagag

SEQ ID NO: 120974 - DNA, 6 bp, Unknown
  misc_feature (1)..( 6): Result.002 file - promoters60/1573945
tttatt

SEQ ID NO: 120975 - DNA, 6 bp, Unknown
  misc_feature (1)..( 6): Result.002 file - promoters60/1573945
tttatt

SEQ ID NO: 120976 - DNA, 7 bp, Unknown
  misc_feature (1)..( 7): Result.002 file - promoters60/1573945
cgaggag

SEQ ID NO: 120977 - DNA, 7 bp, Unknown
  misc_feature (1)..( 7): Result.002 file - promoters60/1573945
cgacgag

SEQ ID NO: 120978 - DNA, 6 bp, Unknown
  misc_feature (1)..( 6): Result.002 file - promoters60/1573945
tctagg

SEQ ID NO: 120979 - DNA, 6 bp, Unknown
  misc_feature (1)..( 6): Result.002 file - promoters60/1573945
tctagg

SEQ ID NO: 120980 - DNA, 7 bp, Unknown
  misc_feature (1)..( 7): Result.002 file - promoters60/1573945
aaagtta

SEQ ID NO: 120981 - DNA, 7 bp, Unknown
  misc_feature (1)..( 7): Result.002 file - promoters60/1573945
aaaatta

SEQ ID NO: 120982 - DNA, 7 bp, Unknown
  misc_feature (1)..( 7): Result.002 file - promoters60/1573945
taacccg

SEQ ID NO: 120983 - DNA, 7 bp, Unknown
  misc_feature (1)..( 7): Result.002 file - promoters60/1573945
taaaccg

SEQ ID NO: 120984 - DNA, 7 bp, Unknown
  misc_feature (1)..( 7): Result.002 file - promoters60/1574029
ttagcct

SEQ ID NO: 120985 - DNA, 7 bp, Unknown
  misc_feature (1)..( 7): Result.002 file - promoters60/1574029
ttaccct

SEQ ID NO: 120986 - DNA, 6 bp, Unknown
  misc_feature (1)..( 6): Result.002 file - promoters60/1574029
taaccg

SEQ ID NO: 120987 - DNA, 6 bp, Unknown
  misc_feature (1)..( 6): Result.002 file - promoters60/1574029
taaccg

SEQ ID NO: 120988 - DNA, 6 bp, Unknown
  misc_feature (1)..( 6): Result.002 file - promoters60/1574029
gttaaa

SEQ ID NO: 120989 - DNA, 6 bp, Unknown
  misc_feature (1)..( 6): Result.002 file - promoters60/1574029
gttaaa

SEQ ID NO: 120990 - DNA, 7 bp, Unknown
  misc_feature (1)..( 7): Result.002 file - promoters60/1574029
caaagtc

SEQ ID NO: 120991 - DNA, 7 bp, Unknown
  misc_feature (1)..( 7): Result.002 file - promoters60/1574029
caatgtc

SEQ ID NO: 120992 - DNA, 8 bp, Unknown
  misc_feature (1)..( 8): Result.002 file - promoters60/1574029
atattttc

SEQ ID NO: 120993 - DNA, 8 bp, Unknown
  misc_feature (1)..( 8): Result.002 file - promoters60/1574029
atatcttc

SEQ ID NO: 120994 - DNA, 6 bp, Unknown
  misc_feature (1)..( 6): Result.002 file - promoters60/1574029
gagata

SEQ ID NO: 120995 - DNA, 6 bp, Unknown
  misc_feature (1)..( 6): Result.002 file - promoters60/1574029
gagata

SEQ ID NO: 120996 - DNA, 7 bp, Unknown
  misc_feature (1)..( 7): Result.002 file - promoters60/1574029
atgtggt

SEQ ID NO: 120997 - DNA, 7 bp, Unknown
  misc_feature (1)..( 7): Result.002 file - promoters60/1574029
atgtgga

SEQ ID NO: 120998 - DNA, 7 bp, Unknown
  misc_feature (1)..( 7): Result.002 file - promoters60/1574029
atgagga

SEQ ID NO: 120999 - DNA, 7 bp, Unknown
  misc_feature (1)..( 7): Result.002 file - promoters60/1574029
agctaat

SEQ ID NO: 121000 - DNA, 7 bp, Unknown
  misc_feature (1)..( 7): Result.002 file - promoters60/1574029
agcaaat

SEQ ID NO: 121001 - DNA, 6 bp, Unknown
  misc_feature (1)..( 6): Result.002 file - promoters60/1574029
aatgct

SEQ ID NO: 121002 - DNA, 6 bp, Unknown
  misc_feature (1)..( 6): Result.002 file - promoters60/1574029
aatgct

SEQ ID NO: 121003 - DNA, 7 bp, Unknown
  misc_feature (1)..( 7): Result.002 file - promoters60/1574029
caatcta

SEQ ID NO: 121004 - DNA, 7 bp, Unknown
  misc_feature (1)..( 7): Result.002 file - promoters60/1574029
caatcta

SEQ ID NO: 121005 - DNA, 8 bp, Unknown
  misc_feature (1)..( 8): Result.002 file - promoters60/1574029
atttcaaa

SEQ ID NO: 121006 - DNA, 8 bp, Unknown
  misc_feature (1)..( 8): Result.002 file - promoters60/1574029
atttcaaa

SEQ ID NO: 121007 - DNA, 8 bp, Unknown
  misc_feature (1)..( 8): Result.002 file - promoters60/1574029
tttgggaa

SEQ ID NO: 121008 - DNA, 8 bp, Unknown
  misc_feature (1)..( 8): Result.002 file - promoters60/1574029
tttgcgaa

SEQ ID NO: 121009 - DNA, 10 bp, Unknown
  misc_feature (1)..( 10): Result.002 file - promoters60/1574029
ttcaagaaga

SEQ ID NO: 121010 - DNA, 10 bp, Unknown
  misc_feature (1)..( 10): Result.002 file - promoters60/1574029
ttcaagaaga

SEQ ID NO: 121011 - DNA, 6 bp, Unknown
  misc_feature (1)..( 6): Result.002 file - promoters60/1574029
cgttga

SEQ ID NO: 121012 - DNA, 6 bp, Unknown
  misc_feature (1)..( 6): Result.002 file - promoters60/1574029
cgttga

SEQ ID NO: 121013 - DNA, 9 bp, Unknown
  misc_feature (1)..( 9): Result.002 file - promoters60/1574029
aatcaagat

SEQ ID NO: 121014 - DNA, 9 bp, Unknown
  misc_feature (1)..( 9): Result.002 file - promoters60/1574029
aataaagat

SEQ ID NO: 121015 - DNA, 6 bp, Unknown
  misc_feature (1)..( 6): Result.002 file - promoters60/1574059
caagga

SEQ ID NO: 121016 - DNA, 6 bp, Unknown
  misc_feature (1)..( 6): Result.002 file - promoters60/1574059
caagga

SEQ ID NO: 121017 - DNA, 6 bp, Unknown
  misc_feature (1)..( 6): Result.002 file - promoters60/1574059
gtttca

SEQ ID NO: 121018 - DNA, 6 bp, Unknown
  misc_feature (1)..( 6): Result.002 file - promoters60/1574059
gtttca

SEQ ID NO: 121019 - DNA, 7 bp, Unknown
  misc_feature (1)..( 7): Result.002 file - promoters60/1574059
ttcatca

SEQ ID NO: 121020 - DNA, 7 bp, Unknown
  misc_feature (1)..( 7): Result.002 file - promoters60/1574059
ttcttca

SEQ ID NO: 121021 - DNA, 6 bp, Unknown
  misc_feature (1)..( 6): Result.002 file - promoters60/1574059
gtgtta

SEQ ID NO: 121022 - DNA, 6 bp, Unknown
  misc_feature (1)..( 6): Result.002 file - promoters60/1574059
gtgtta

SEQ ID NO: 121023 - DNA, 8 bp, Unknown
  misc_feature (1)..( 8): Result.002 file - promoters60/1574059
ttgtgatc

SEQ ID NO: 121024 - DNA, 8 bp, Unknown
  misc_feature (1)..( 8): Result.002 file - promoters60/1574059
ttgtaatc

SEQ ID NO: 121025 - DNA, 8 bp, Unknown
  misc_feature (1)..( 8): Result.002 file - promoters60/1574059
atgtagaa

SEQ ID NO: 121026 - DNA, 8 bp, Unknown
  misc_feature (1)..( 8): Result.002 file - promoters60/1574059
atgaagaa

SEQ ID NO: 121027 - DNA, 6 bp, Unknown
  misc_feature (1)..( 6): Result.002 file - promoters60/1574059
ttatgt

SEQ ID NO: 121028 - DNA, 6 bp, Unknown
  misc_feature (1)..( 6): Result.002 file - promoters60/1574059
ttatgt

SEQ ID NO: 121029 - DNA, 8 bp, Unknown
  misc_feature (1)..( 8): Result.002 file - promoters60/1574059
tttagttt

SEQ ID NO: 121030 - DNA, 8 bp, Unknown
  misc_feature (1)..( 8): Result.002 file - promoters60/1574059
tttatttt

SEQ ID NO: 121031 - DNA, 7 bp, Unknown
  misc_feature (1)..( 7): Result.002 file - promoters60/1574059
ctaaaac

SEQ ID NO: 121032 - DNA, 7 bp, Unknown
  misc_feature (1)..( 7): Result.002 file - promoters60/1574059
gtaaaac

SEQ ID NO: 121033 - DNA, 7 bp, Unknown
  misc_feature (1)..( 7): Result.002 file - promoters60/1574059
gtaaaac

SEQ ID NO: 121034 - DNA, 8 bp, Unknown
  misc_feature (1)..( 8): Result.002 file - promoters60/1574059
agacgaac

SEQ ID NO: 121035 - DNA, 8 bp, Unknown
  misc_feature (1)..( 8): Result.002 file - promoters60/1574059
agaggaac

SEQ ID NO: 121036 - DNA, 6 bp, Unknown
  misc_feature (1)..( 6): Result.002 file - promoters60/1574059
gaagaa

SEQ ID NO: 121037 - DNA, 6 bp, Unknown
  misc_feature (1)..( 6): Result.002 file - promoters60/1574059
gaagaa

SEQ ID NO: 121038 - DNA, 6 bp, Unknown
  misc_feature (1)..( 6): Result.002 file - promoters60/1574059
tggaga

SEQ ID NO: 121039 - DNA, 6 bp, Unknown
  misc_feature (1)..( 6): Result.002 file - promoters60/1574059
tggaga

SEQ ID NO: 121040 - DNA, 8 bp, Unknown
  misc_feature (1)..( 8): Result.002 file - promoters60/1574059
aatgcttt

SEQ ID NO: 121041 - DNA, 8 bp, Unknown
  misc_feature (1)..( 8): Result.002 file - promoters60/1574059
aatggttt

SEQ ID NO: 121042 - DNA, 7 bp, Unknown
  misc_feature (1)..( 7): Result.002 file - promoters60/1574059
atatttt

SEQ ID NO: 121043 - DNA, 7 bp, Unknown
  misc_feature (1)..( 7): Result.002 file - promoters60/1574059
atatttt

SEQ ID NO: 121044 - DNA, 7 bp, Unknown
  misc_feature (1)..( 7): Result.002 file - promoters60/1574059
aaataaa

SEQ ID NO: 121045 - DNA, 7 bp, Unknown
  misc_feature (1)..( 7): Result.002 file - promoters60/1574059
aaataaa

SEQ ID NO: 121046 - DNA, 6 bp, Unknown
  misc_feature (1)..( 6): Result.002 file - promoters60/1574059
caaagg

SEQ ID NO: 121047 - DNA, 6 bp, Unknown
  misc_feature (1)..( 6): Result.002 file - promoters60/1574059
caaagg

SEQ ID NO: 121048 - DNA, 7 bp, Unknown
  misc_feature (1)..( 7): Result.002 file - promoters60/1580171
aatcgta

SEQ ID NO: 121049 - DNA, 7 bp, Unknown
  misc_feature (1)..( 7): Result.002 file - promoters60/1580171
aatggta

SEQ ID NO: 121050 - DNA, 7 bp, Unknown
  misc_feature (1)..( 7): Result.002 file - promoters60/1580171
agagaaa

SEQ ID NO: 121051 - DNA, 7 bp, Unknown
  misc_feature (1)..( 7): Result.002 file - promoters60/1580171
agaaaaa

SEQ ID NO: 121052 - DNA, 7 bp, Unknown
  misc_feature (1)..( 7): Result.002 file - promoters60/1580171
attatct

SEQ ID NO: 121053 - DNA, 7 bp, Unknown
  misc_feature (1)..( 7): Result.002 file - promoters60/1580171
attttct

SEQ ID NO: 121054 - DNA, 6 bp, Unknown
  misc_feature (1)..( 6): Result.002 file - promoters60/1580171
atgaaa

SEQ ID NO: 121055 - DNA, 6 bp, Unknown
  misc_feature (1)..( 6): Result.002 file - promoters60/1580171
atgaaa

SEQ ID NO: 121056 - DNA, 8 bp, Unknown
  misc_feature (1)..( 8): Result.002 file - promoters60/1580171
atttgtaa

SEQ ID NO: 121057 - DNA, 8 bp, Unknown
  misc_feature (1)..( 8): Result.002 file - promoters60/1580171
attggtaa

SEQ ID NO: 121058 - DNA, 8 bp, Unknown
  misc_feature (1)..( 8): Result.002 file - promoters60/1580171
ttgacttt

SEQ ID NO: 121059 - DNA, 8 bp, Unknown
  misc_feature (1)..( 8): Result.002 file - promoters60/1580171
ttgaattt

SEQ ID NO: 121060 - DNA, 8 bp, Unknown
  misc_feature (1)..( 8): Result.002 file - promoters60/1580171
aactaaaa

SEQ ID NO: 121061 - DNA, 8 bp, Unknown
  misc_feature (1)..( 8): Result.002 file - promoters60/1580171
aactaaaa

SEQ ID NO: 121062 - DNA, 7 bp, Unknown
  misc_feature (1)..( 7): Result.002 file - promoters60/1580171
cttcttc

SEQ ID NO: 121063 - DNA, 7 bp, Unknown
  misc_feature (1)..( 7): Result.002 file - promoters60/1580171
cttcttc

SEQ ID NO: 121064 - DNA, 7 bp, Unknown
  misc_feature (1)..( 7): Result.002 file - promoters60/1580171
taaaaaa

SEQ ID NO: 121065 - DNA, 7 bp, Unknown
  misc_feature (1)..( 7): Result.002 file - promoters60/1580171
taaaaaa

SEQ ID NO: 121066 - DNA, 7 bp, Unknown
  misc_feature (1)..( 7): Result.002 file - promoters60/1580171
aaaattc

SEQ ID NO: 121067 - DNA, 7 bp, Unknown
  misc_feature (1)..( 7): Result.002 file - promoters60/1580171
aaaattc

SEQ ID NO: 121068 - DNA, 7 bp, Unknown
  misc_feature (1)..( 7): Result.002 file - promoters60/1580171
taaattc

SEQ ID NO: 121069 - DNA, 9 bp, Unknown
  misc_feature (1)..( 9): Result.002 file - promoters60/1580171
attagaaac

SEQ ID NO: 121070 - DNA, 9 bp, Unknown
  misc_feature (1)..( 9): Result.002 file - promoters60/1580171
tttataaac

SEQ ID NO: 121071 - DNA, 9 bp, Unknown
  misc_feature (1)..( 9): Result.002 file - promoters60/1580171
tttataatt

SEQ ID NO: 121072 - DNA, 6 bp, Unknown
  misc_feature (1)..( 6): Result.002 file - promoters60/1580171
atgcat

SEQ ID NO: 121073 - DNA, 6 bp, Unknown
  misc_feature (1)..( 6): Result.002 file - promoters60/1580171
atgcat

SEQ ID NO: 121074 - DNA, 8 bp, Unknown
  misc_feature (1)..( 8): Result.002 file - promoters60/1580171
aaattctt

SEQ ID NO: 121075 - DNA, 8 bp, Unknown
  misc_feature (1)..( 8): Result.002 file - promoters60/1580171
aaaatctt

SEQ ID NO: 121076 - DNA, 7 bp, Unknown
  misc_feature (1)..( 7): Result.002 file - promoters60/1580171
aagatgt

SEQ ID NO: 121077 - DNA, 7 bp, Unknown
  misc_feature (1)..( 7): Result.002 file - promoters60/1580171
aagatgt

SEQ ID NO: 121078 - DNA, 7 bp, Unknown
  misc_feature (1)..( 7): Result.002 file - promoters60/1580171
ttgaaga

SEQ ID NO: 121079 - DNA, 7 bp, Unknown
  misc_feature (1)..( 7): Result.002 file - promoters60/1580171
ttgtaga

SEQ ID NO: 121080 - DNA, 6 bp, Unknown
  misc_feature (1)..( 6): Result.002 file - promoters60/1580171
attttt

SEQ ID NO: 121081 - DNA, 6 bp, Unknown
  misc_feature (1)..( 6): Result.002 file - promoters60/1580171
attttt

SEQ ID NO: 121082 - DNA, 7 bp, Unknown
  misc_feature (1)..( 7): Result.002 file - promoters60/1580171
taagttt

SEQ ID NO: 121083 - DNA, 7 bp, Unknown
  misc_feature (1)..( 7): Result.002 file - promoters60/1580171
taaattt

SEQ ID NO: 121084 - DNA, 6 bp, Unknown
  misc_feature (1)..( 6): Result.002 file - promoters60/1580171
atgatt

SEQ ID NO: 121085 - DNA, 6 bp, Unknown
  misc_feature (1)..( 6): Result.002 file - promoters60/1580171
atgatt

SEQ ID NO: 121086 - DNA, 7 bp, Unknown
  misc_feature (1)..( 7): Result.002 file - promoters60/1580171
tttataa

SEQ ID NO: 121087 - DNA, 7 bp, Unknown
  misc_feature (1)..( 7): Result.002 file - promoters60/1580171
tttgtaa

SEQ ID NO: 121088 - DNA, 7 bp, Unknown
  misc_feature (1)..( 7): Result.002 file - promoters60/1580171
aaattta

SEQ ID NO: 121089 - DNA, 7 bp, Unknown
  misc_feature (1)..( 7): Result.002 file - promoters60/1580171
aaattta

SEQ ID NO: 121090 - DNA, 6 bp, Unknown
  misc_feature (1)..( 6): Result.002 file - promoters60/1580171
aaataa

SEQ ID NO: 121091 - DNA, 6 bp, Unknown
  misc_feature (1)..( 6): Result.002 file - promoters60/1580171
aaataa

SEQ ID NO: 121092 - DNA, 8 bp, Unknown
  misc_feature (1)..( 8): Result.002 file - promoters60/1580171
aaataaaa

SEQ ID NO: 121093 - DNA, 8 bp, Unknown
  misc_feature (1)..( 8): Result.002 file - promoters60/1580171
aaaaaaaa

SEQ ID NO: 121094 - DNA, 8 bp, Unknown
  misc_feature (1)..( 8): Result.002 file - promoters60/1580171
attatttt

SEQ ID NO: 121095 - DNA, 8 bp, Unknown
  misc_feature (1)..( 8): Result.002 file - promoters60/1580171
attttttt

SEQ ID NO: 121096 - DNA, 9 bp, Unknown
  misc_feature (1)..( 9): Result.002 file - promoters60/1580171
ttactattt

SEQ ID NO: 121097 - DNA, 9 bp, Unknown
  misc_feature (1)..( 9): Result.002 file - promoters60/1580171
ttaatattt

SEQ ID NO: 121098 - DNA, 9 bp, Unknown
  misc_feature (1)..( 9): Result.002 file - promoters60/1580500
aattttgac

SEQ ID NO: 121099 - DNA, 9 bp, Unknown
  misc_feature (1)..( 9): Result.002 file - promoters60/1580500
aatgttgat

SEQ ID NO: 121100 - DNA, 9 bp, Unknown
  misc_feature (1)..( 9): Result.002 file - promoters60/1580500
gattttgaa

SEQ ID NO: 121101 - DNA, 9 bp, Unknown
  misc_feature (1)..( 9): Result.002 file - promoters60/1580500
tattttaca

SEQ ID NO: 121102 - DNA, 9 bp, Unknown
  misc_feature (1)..( 9): Result.002 file - promoters60/1580500
atttttaca

SEQ ID NO: 121103 - DNA, 9 bp, Unknown
  misc_feature (1)..( 9): Result.002 file - promoters60/1580500
tatgttaac

SEQ ID NO: 121104 - DNA, 11 bp, Unknown
  misc_feature (1)..( 11): Result.002 file - promoters60/1580500
attgtaatcat

SEQ ID NO: 121105 - DNA, 11 bp, Unknown
  misc_feature (1)..( 11): Result.002 file - promoters60/1580500
atgttaaacat

SEQ ID NO: 121106 - DNA, 11 bp, Unknown
  misc_feature (1)..( 11): Result.002 file - promoters60/1580500
atggtaatctc

SEQ ID NO: 121107 - DNA, 11 bp, Unknown
  misc_feature (1)..( 11): Result.002 file - promoters60/1580500
ctgttaaacca

SEQ ID NO: 121108 - DNA, 11 bp, Unknown
  misc_feature (1)..( 11): Result.002 file - promoters60/1580500
ctgataattgt

SEQ ID NO: 121109 - DNA, 11 bp, Unknown
  misc_feature (1)..( 11): Result.002 file - promoters60/1580500
gagttgaacaa

SEQ ID NO: 121110 - DNA, 10 bp, Unknown
  misc_feature (1)..( 10): Result.002 file - promoters60/1580500
aattttaatc

SEQ ID NO: 121111 - DNA, 10 bp, Unknown
  misc_feature (1)..( 10): Result.002 file - promoters60/1580500
attttgaatg

SEQ ID NO: 121112 - DNA, 10 bp, Unknown
  misc_feature (1)..( 10): Result.002 file - promoters60/1580500
tattttacag

SEQ ID NO: 121113 - DNA, 10 bp, Unknown
  misc_feature (1)..( 10): Result.002 file - promoters60/1580500
tatttttaca

SEQ ID NO: 121114 - DNA, 10 bp, Unknown
  misc_feature (1)..( 10): Result.002 file - promoters60/1580500
gaagtgaatg

SEQ ID NO: 121115 - DNA, 10 bp, Unknown
  misc_feature (1)..( 10): Result.002 file - promoters60/1580500
tatgttaaca

SEQ ID NO: 121116 - DNA, 12 bp, Unknown
  misc_feature (1)..( 12): Result.002 file - promoters60/1580870
taattttaattt

SEQ ID NO: 121117 - DNA, 12 bp, Unknown
  misc_feature (1)..( 12): Result.002 file - promoters60/1580870
taatcttagaag

SEQ ID NO: 121118 - DNA, 12 bp, Unknown
  misc_feature (1)..( 12): Result.002 file - promoters60/1580870
tgattttcattt

SEQ ID NO: 121119 - DNA, 8 bp, Unknown
  misc_feature (1)..( 8): Result.002 file - promoters60/1580870
ttttcaaa

SEQ ID NO: 121120 - DNA, 8 bp, Unknown
  misc_feature (1)..( 8): Result.002 file - promoters60/1580870
atttaaaa

SEQ ID NO: 121121 - DNA, 8 bp, Unknown
  misc_feature (1)..( 8): Result.002 file - promoters60/1580870
atttaatg

SEQ ID NO: 121122 - DNA, 8 bp, Unknown
  misc_feature (1)..( 8): Result.002 file - promoters60/1580870
ctatttgg

SEQ ID NO: 121123 - DNA, 8 bp, Unknown
  misc_feature (1)..( 8): Result.002 file - promoters60/1580870
atatttgt

SEQ ID NO: 121124 - DNA, 8 bp, Unknown
  misc_feature (1)..( 8): Result.002 file - promoters60/1580870
atatatgt

SEQ ID NO: 121125 - DNA, 8 bp, Unknown
  misc_feature (1)..( 8): Result.002 file - promoters60/1580870
tttccaaa

SEQ ID NO: 121126 - DNA, 8 bp, Unknown
  misc_feature (1)..( 8): Result.002 file - promoters60/1580870
tttctaaa

SEQ ID NO: 121127 - DNA, 8 bp, Unknown
  misc_feature (1)..( 8): Result.002 file - promoters60/1580870
attctaac

SEQ ID NO: 121128 - DNA, 7 bp, Unknown
  misc_feature (1)..( 7): Result.002 file - promoters60/1580870
attaaat

SEQ ID NO: 121129 - DNA, 7 bp, Unknown
  misc_feature (1)..( 7): Result.002 file - promoters60/1580870
atttaat

SEQ ID NO: 121130 - DNA, 7 bp, Unknown
  misc_feature (1)..( 7): Result.002 file - promoters60/1580870
atttaaa

SEQ ID NO: 121131 - DNA, 9 bp, Unknown
  misc_feature (1)..( 9): Result.002 file - promoters60/1580870
tatctttaa

SEQ ID NO: 121132 - DNA, 9 bp, Unknown
  misc_feature (1)..( 9): Result.002 file - promoters60/1580870
tatgtttcc

SEQ ID NO: 121133 - DNA, 9 bp, Unknown
  misc_feature (1)..( 9): Result.002 file - promoters60/1580870
aatatttgt

SEQ ID NO: 121134 - DNA, 7 bp, Unknown
  misc_feature (1)..( 7): Result.002 file - promoters60/1580870
tgtatat

SEQ ID NO: 121135 - DNA, 7 bp, Unknown
  misc_feature (1)..( 7): Result.002 file - promoters60/1580870
agtatat

SEQ ID NO: 121136 - DNA, 7 bp, Unknown
  misc_feature (1)..( 7): Result.002 file - promoters60/1580870
tgtctat

SEQ ID NO: 121137 - DNA, 14 bp, Unknown
  misc_feature (1)..( 14): Result.002 file - promoters60/1580932
aaataaattaatta

SEQ ID NO: 121138 - DNA, 14 bp, Unknown
  misc_feature (1)..( 14): Result.002 file - promoters60/1580932
cacaaaactaaaaa

SEQ ID NO: 121139 - DNA, 14 bp, Unknown
  misc_feature (1)..( 14): Result.002 file - promoters60/1580932
cacgaaactactac

SEQ ID NO: 121140 - DNA, 14 bp, Unknown
  misc_feature (1)..( 14): Result.002 file - promoters60/1580932
aacccaactacaaa

SEQ ID NO: 121141 - DNA, 14 bp, Unknown
  misc_feature (1)..( 14): Result.002 file - promoters60/1580932
gacgatactaaaaa

SEQ ID NO: 121142 - DNA, 14 bp, Unknown
  misc_feature (1)..( 14): Result.002 file - promoters60/1580932
tgtaatattaaaat

SEQ ID NO: 121143 - DNA, 12 bp, Unknown
  misc_feature (1)..( 12): Result.002 file - promoters60/1580932
taattaaactgg

SEQ ID NO: 121144 - DNA, 12 bp, Unknown
  misc_feature (1)..( 12): Result.002 file - promoters60/1580932
taactaaattgg

SEQ ID NO: 121145 - DNA, 12 bp, Unknown
  misc_feature (1)..( 12): Result.002 file - promoters60/1580932
atattaaaataa

SEQ ID NO: 121146 - DNA, 12 bp, Unknown
  misc_feature (1)..( 12): Result.002 file - promoters60/1580932
ctgctgaattgg

SEQ ID NO: 121147 - DNA, 12 bp, Unknown
  misc_feature (1)..( 12): Result.002 file - promoters60/1580932
cttatgatttgc

SEQ ID NO: 121148 - DNA, 12 bp, Unknown
  misc_feature (1)..( 12): Result.002 file - promoters60/1580932
atactaaaaaca

SEQ ID NO: 121149 - DNA, 12 bp, Unknown
  misc_feature (1)..( 12): Result.002 file - promoters60/1580932
ataaatcgttag

SEQ ID NO: 121150 - DNA, 12 bp, Unknown
  misc_feature (1)..( 12): Result.002 file - promoters60/1580932
ccgaatcgatag

SEQ ID NO: 121151 - DNA, 12 bp, Unknown
  misc_feature (1)..( 12): Result.002 file - promoters60/1580932
gagaatcattaa

SEQ ID NO: 121152 - DNA, 12 bp, Unknown
  misc_feature (1)..( 12): Result.002 file - promoters60/1580932
gagcatcaacgt

SEQ ID NO: 121153 - DNA, 12 bp, Unknown
  misc_feature (1)..( 12): Result.002 file - promoters60/1580932
agaaatagatat

SEQ ID NO: 121154 - DNA, 12 bp, Unknown
  misc_feature (1)..( 12): Result.002 file - promoters60/1580932
cttcataaatca

SEQ ID NO: 121155 - DNA, 12 bp, Unknown
  misc_feature (1)..( 12): Result.002 file - promoters60/1580932
aaaaatcatgta

SEQ ID NO: 121156 - DNA, 7 bp, Unknown
  misc_feature (1)..( 7): Result.002 file - promoters60/1580983
aattttt

SEQ ID NO: 121157 - DNA, 7 bp, Unknown
  misc_feature (1)..( 7): Result.002 file - promoters60/1580983
tattttt

SEQ ID NO: 121158 - DNA, 7 bp, Unknown
  misc_feature (1)..( 7): Result.002 file - promoters60/1580983
aatttta

SEQ ID NO: 121159 - DNA, 6 bp, Unknown
  misc_feature (1)..( 6): Result.002 file - promoters60/1580983
tttact

SEQ ID NO: 121160 - DNA, 6 bp, Unknown
  misc_feature (1)..( 6): Result.002 file - promoters60/1580983
tttact

SEQ ID NO: 121161 - DNA, 7 bp, Unknown
  misc_feature (1)..( 7): Result.002 file - promoters60/1580983
cctcaga

SEQ ID NO: 121162 - DNA, 7 bp, Unknown
  misc_feature (1)..( 7): Result.002 file - promoters60/1580983
ccttaga

SEQ ID NO: 121163 - DNA, 8 bp, Unknown
  misc_feature (1)..( 8): Result.002 file - promoters60/1580983
aaaaaatc

SEQ ID NO: 121164 - DNA, 8 bp, Unknown
  misc_feature (1)..( 8): Result.002 file - promoters60/1580983
aaaatatc

SEQ ID NO: 121165 - DNA, 11 bp, Unknown
  misc_feature (1)..( 11): Result.002 file - promoters60/1580983
tcgatgaaatt

SEQ ID NO: 121166 - DNA, 11 bp, Unknown
  misc_feature (1)..( 11): Result.002 file - promoters60/1580983
taaatgagatt

SEQ ID NO: 121167 - DNA, 11 bp, Unknown
  misc_feature (1)..( 11): Result.002 file - promoters60/1580983
taaatgaggga

SEQ ID NO: 121168 - DNA, 7 bp, Unknown
  misc_feature (1)..( 7): Result.002 file - promoters60/1580983
gaaaggg

SEQ ID NO: 121169 - DNA, 7 bp, Unknown
  misc_feature (1)..( 7): Result.002 file - promoters60/1580983
gaaaggg

SEQ ID NO: 121170 - DNA, 7 bp, Unknown
  misc_feature (1)..( 7): Result.002 file - promoters60/1580983
atagaaa

SEQ ID NO: 121171 - DNA, 7 bp, Unknown
  misc_feature (1)..( 7): Result.002 file - promoters60/1580983
atacaaa

SEQ ID NO: 121172 - DNA, 6 bp, Unknown
  misc_feature (1)..( 6): Result.002 file - promoters60/1580983
agagaa

SEQ ID NO: 121173 - DNA, 6 bp, Unknown
  misc_feature (1)..( 6): Result.002 file - promoters60/1580983
agagaa

SEQ ID NO: 121174 - DNA, 6 bp, Unknown
  misc_feature (1)..( 6): Result.002 file - promoters60/1580983
taaaat

SEQ ID NO: 121175 - DNA, 6 bp, Unknown
  misc_feature (1)..( 6): Result.002 file - promoters60/1580983
taaaat

SEQ ID NO: 121176 - DNA, 7 bp, Unknown
  misc_feature (1)..( 7): Result.002 file - promoters60/1580983
attaatt

SEQ ID NO: 121177 - DNA, 7 bp, Unknown
  misc_feature (1)..( 7): Result.002 file - promoters60/1580983
atttatt

SEQ ID NO: 121178 - DNA, 6 bp, Unknown
  misc_feature (1)..( 6): Result.002 file - promoters60/1580983
aaaatc

SEQ ID NO: 121179 - DNA, 6 bp, Unknown
  misc_feature (1)..( 6): Result.002 file - promoters60/1580983
aaaatc

SEQ ID NO: 121180 - DNA, 10 bp, Unknown
  misc_feature (1)..( 10): Result.002 file - promoters60/1581038
atttttttca

SEQ ID NO: 121181 - DNA, 10 bp, Unknown
  misc_feature (1)..( 10): Result.002 file - promoters60/1581038
actttcttcc

SEQ ID NO: 121182 - DNA, 10 bp, Unknown
  misc_feature (1)..( 10): Result.002 file - promoters60/1581038
gtatttttcc

SEQ ID NO: 121183 - DNA, 10 bp, Unknown
  misc_feature (1)..( 10): Result.002 file - promoters60/1581038
attttattca

SEQ ID NO: 121184 - DNA, 8 bp, Unknown
  misc_feature (1)..( 8): Result.002 file - promoters60/1581038
atttaaca

SEQ ID NO: 121185 - DNA, 8 bp, Unknown
  misc_feature (1)..( 8): Result.002 file - promoters60/1581038
tttttaca

SEQ ID NO: 121186 - DNA, 8 bp, Unknown
  misc_feature (1)..( 8): Result.002 file - promoters60/1581038
atttaaaa

SEQ ID NO: 121187 - DNA, 8 bp, Unknown
  misc_feature (1)..( 8): Result.002 file - promoters60/1581038
gttataca

SEQ ID NO: 121188 - DNA, 8 bp, Unknown
  misc_feature (1)..( 8): Result.002 file - promoters60/1581038
tttttatc

SEQ ID NO: 121189 - DNA, 19 bp, Unknown
  misc_feature (1)..( 19): Result.002 file - promoters60/1581038
ttaacattgatataaaaaa

SEQ ID NO: 121190 - DNA, 19 bp, Unknown
  misc_feature (1)..( 19): Result.002 file - promoters60/1581038
tttgttgtattctaaaaag

SEQ ID NO: 121191 - DNA, 20 bp, Unknown
  misc_feature (1)..( 20): Result.002 file - promoters60/1581038
atttattttttataagaaaa

SEQ ID NO: 121192 - DNA, 20 bp, Unknown
  misc_feature (1)..( 20): Result.002 file - promoters60/1581038
atttactttctataatttaa

SEQ ID NO: 121193 - DNA, 20 bp, Unknown
  misc_feature (1)..( 20): Result.002 file - promoters60/1581038
tcccacggcttttaattttg

SEQ ID NO: 121194 - DNA, 15 bp, Unknown
  misc_feature (1)..( 15): Result.002 file - promoters60/1581038
atttctttttgtgaa

SEQ ID NO: 121195 - DNA, 15 bp, Unknown
  misc_feature (1)..( 15): Result.002 file - promoters60/1581038
tattctatttgctgg

SEQ ID NO: 121196 - DNA, 15 bp, Unknown
  misc_feature (1)..( 15): Result.002 file - promoters60/1581038
ttttaattttgtcta

SEQ ID NO: 121197 - DNA, 15 bp, Unknown
  misc_feature (1)..( 15): Result.002 file - promoters60/1581038
ctttctataatttaa

SEQ ID NO: 121198 - DNA, 15 bp, Unknown
  misc_feature (1)..( 15): Result.002 file - promoters60/1581038
atttattttttataa

SEQ ID NO: 121199 - DNA, 15 bp, Unknown
  misc_feature (1)..( 15): Result.002 file - promoters60/1581038
ctggctttttatcca

SEQ ID NO: 121200 - DNA, 8 bp, Unknown
  misc_feature (1)..( 8): Result.002 file - promoters60/1581038
tatttttc

SEQ ID NO: 121201 - DNA, 8 bp, Unknown
  misc_feature (1)..( 8): Result.002 file - promoters60/1581038
tatttttc

SEQ ID NO: 121202 - DNA, 8 bp, Unknown
  misc_feature (1)..( 8): Result.002 file - promoters60/1581038
catttttg

SEQ ID NO: 121203 - DNA, 8 bp, Unknown
  misc_feature (1)..( 8): Result.002 file - promoters60/1581038
cattttat

SEQ ID NO: 121204 - DNA, 10 bp, Unknown
  misc_feature (1)..( 10): Result.002 file - promoters60/1581038
aaatatttaa

SEQ ID NO: 121205 - DNA, 10 bp, Unknown
  misc_feature (1)..( 10): Result.002 file - promoters60/1581038
gaatattagt

SEQ ID NO: 121206 - DNA, 10 bp, Unknown
  misc_feature (1)..( 10): Result.002 file - promoters60/1581038
aaatctttca

SEQ ID NO: 121207 - DNA, 10 bp, Unknown
  misc_feature (1)..( 10): Result.002 file - promoters60/1581038
atatattagt

SEQ ID NO: 121208 - DNA, 10 bp, Unknown
  misc_feature (1)..( 10): Result.002 file - promoters60/1581038
catatataaa

SEQ ID NO: 121209 - DNA, 10 bp, Unknown
  misc_feature (1)..( 10): Result.002 file - promoters60/1581038
tatatataat

SEQ ID NO: 121210 - DNA, 10 bp, Unknown
  misc_feature (1)..( 10): Result.002 file - promoters60/1581038
gctttataaa

SEQ ID NO: 121211 - DNA, 10 bp, Unknown
  misc_feature (1)..( 10): Result.002 file - promoters60/1581038
tatttataac

SEQ ID NO: 121212 - DNA, 10 bp, Unknown
  misc_feature (1)..( 10): Result.002 file - promoters60/1581038
tttaattttt

SEQ ID NO: 121213 - DNA, 10 bp, Unknown
  misc_feature (1)..( 10): Result.002 file - promoters60/1581038
tttaattaaa

SEQ ID NO: 121214 - DNA, 10 bp, Unknown
  misc_feature (1)..( 10): Result.002 file - promoters60/1581038
ataaataact

SEQ ID NO: 121215 - DNA, 10 bp, Unknown
  misc_feature (1)..( 10): Result.002 file - promoters60/1581038
accaatgaat

SEQ ID NO: 121216 - DNA, 10 bp, Unknown
  misc_feature (1)..( 10): Result.002 file - promoters60/1581038
atgaatgaaa

SEQ ID NO: 121217 - DNA, 8 bp, Unknown
  misc_feature (1)..( 8): Result.002 file - promoters60/1581038
caattttt

SEQ ID NO: 121218 - DNA, 8 bp, Unknown
  misc_feature (1)..( 8): Result.002 file - promoters60/1581038
aaatttta

SEQ ID NO: 121219 - DNA, 8 bp, Unknown
  misc_feature (1)..( 8): Result.002 file - promoters60/1581038
aaatttat

SEQ ID NO: 121220 - DNA, 8 bp, Unknown
  misc_feature (1)..( 8): Result.002 file - promoters60/1581038
ttatttta

SEQ ID NO: 121221 - DNA, 8 bp, Unknown
  misc_feature (1)..( 8): Result.002 file - promoters60/1581038
tattttta

SEQ ID NO: 121222 - DNA, 8 bp, Unknown
  misc_feature (1)..( 8): Result.002 file - promoters60/1581038
tatttttt

SEQ ID NO: 121223 - DNA, 8 bp, Unknown
  misc_feature (1)..( 8): Result.002 file - promoters60/1581038
gcttttta

SEQ ID NO: 121224 - DNA, 9 bp, Unknown
  misc_feature (1)..( 9): Result.002 file - promoters60/1581038
catttattt

SEQ ID NO: 121225 - DNA, 10 bp, Unknown
  misc_feature (1)..( 10): Result.002 file - promoters60/1581038
agaaattata

SEQ ID NO: 121226 - DNA, 10 bp, Unknown
  misc_feature (1)..( 10): Result.002 file - promoters60/1581038
aaaaaatata

SEQ ID NO: 121227 - DNA, 10 bp, Unknown
  misc_feature (1)..( 10): Result.002 file - promoters60/1581038
taaaattaac

SEQ ID NO: 121228 - DNA, 10 bp, Unknown
  misc_feature (1)..( 10): Result.002 file - promoters60/1581038
aataaataac

SEQ ID NO: 121229 - DNA, 10 bp, Unknown
  misc_feature (1)..( 10): Result.002 file - promoters60/1581038
accaatgaat

SEQ ID NO: 121230 - DNA, 8 bp, Unknown
  misc_feature (1)..( 8): Result.002 file - promoters60/1581038
tctctctc

SEQ ID NO: 121231 - DNA, 8 bp, Unknown
  misc_feature (1)..( 8): Result.002 file - promoters60/1581038
tctctctt

SEQ ID NO: 121232 - DNA, 8 bp, Unknown
  misc_feature (1)..( 8): Result.002 file - promoters60/1581038
cctctctt

SEQ ID NO: 121233 - DNA, 8 bp, Unknown
  misc_feature (1)..( 8): Result.002 file - promoters60/1581038
tctcgctt

SEQ ID NO: 121234 - DNA, 7 bp, Unknown
  misc_feature (1)..( 7): Result.002 file - promoters60/1581038
ctctctg

SEQ ID NO: 121235 - DNA, 7 bp, Unknown
  misc_feature (1)..( 7): Result.002 file - promoters60/1581038
ctctctt

SEQ ID NO: 121236 - DNA, 7 bp, Unknown
  misc_feature (1)..( 7): Result.002 file - promoters60/1581038
ctctctt

SEQ ID NO: 121237 - DNA, 7 bp, Unknown
  misc_feature (1)..( 7): Result.002 file - promoters60/1581038
ctcgctt

SEQ ID NO: 121238 - DNA, 8 bp, Unknown
  misc_feature (1)..( 8): Result.002 file - promoters60/1581038
caaaattc

SEQ ID NO: 121239 - DNA, 8 bp, Unknown
  misc_feature (1)..( 8): Result.002 file - promoters60/1581038
caatattg

SEQ ID NO: 121240 - DNA, 8 bp, Unknown
  misc_feature (1)..( 8): Result.002 file - promoters60/1581038
taatattt

SEQ ID NO: 121241 - DNA, 8 bp, Unknown
  misc_feature (1)..( 8): Result.002 file - promoters60/1581038
aaatcttg

SEQ ID NO: 121242 - DNA, 13 bp, Unknown
  misc_feature (1)..( 13): Result.002 file - promoters60/1581038
ttttcttttttta

SEQ ID NO: 121243 - DNA, 13 bp, Unknown
  misc_feature (1)..( 13): Result.002 file - promoters60/1581038
cagaaatttatta

SEQ ID NO: 121244 - DNA, 13 bp, Unknown
  misc_feature (1)..( 13): Result.002 file - promoters60/1581038
ttttattttatta

SEQ ID NO: 121245 - DNA, 13 bp, Unknown
  misc_feature (1)..( 13): Result.002 file - promoters60/1581038
tcaaattttagat

SEQ ID NO: 121246 - DNA, 9 bp, Unknown
  misc_feature (1)..( 9): Result.002 file - promoters60/1581987
gtggctttg

SEQ ID NO: 121247 - DNA, 9 bp, Unknown
  misc_feature (1)..( 9): Result.002 file - promoters60/1581987
atgggtttg

SEQ ID NO: 121248 - DNA, 9 bp, Unknown
  misc_feature (1)..( 9): Result.002 file - promoters60/1581987
gtggctttg

SEQ ID NO: 121249 - DNA, 9 bp, Unknown
  misc_feature (1)..( 9): Result.002 file - promoters60/1581987
gtggctgca

SEQ ID NO: 121250 - DNA, 9 bp, Unknown
  misc_feature (1)..( 9): Result.002 file - promoters60/1581987
gtggctggt

SEQ ID NO: 121251 - DNA, 10 bp, Unknown
  misc_feature (1)..( 10): Result.002 file - promoters60/1581987
tttatgagaa

SEQ ID NO: 121252 - DNA, 10 bp, Unknown
  misc_feature (1)..( 10): Result.002 file - promoters60/1581987
tttatgaatt

SEQ ID NO: 121253 - DNA, 10 bp, Unknown
  misc_feature (1)..( 10): Result.002 file - promoters60/1581987
gttataaata

SEQ ID NO: 121254 - DNA, 10 bp, Unknown
  misc_feature (1)..( 10): Result.002 file - promoters60/1581987
tatatgaatt

SEQ ID NO: 121255 - DNA, 6 bp, Unknown
  misc_feature (1)..( 6): Result.002 file - promoters60/1582293
taacca

SEQ ID NO: 121256 - DNA, 6 bp, Unknown
  misc_feature (1)..( 6): Result.002 file - promoters60/1582293
taacca

SEQ ID NO: 121257 - DNA, 11 bp, Unknown
  misc_feature (1)..( 11): Result.002 file - promoters60/1582293
aaattacttac

SEQ ID NO: 121258 - DNA, 11 bp, Unknown
  misc_feature (1)..( 11): Result.002 file - promoters60/1582293
atattactata

SEQ ID NO: 121259 - DNA, 11 bp, Unknown
  misc_feature (1)..( 11): Result.002 file - promoters60/1582293
atagtacaata

SEQ ID NO: 121260 - DNA, 9 bp, Unknown
  misc_feature (1)..( 9): Result.002 file - promoters60/1582293
actaatgat

SEQ ID NO: 121261 - DNA, 9 bp, Unknown
  misc_feature (1)..( 9): Result.002 file - promoters60/1582293
tataatgat

SEQ ID NO: 121262 - DNA, 9 bp, Unknown
  misc_feature (1)..( 9): Result.002 file - promoters60/1582293
aataattac

SEQ ID NO: 121263 - DNA, 7 bp, Unknown
  misc_feature (1)..( 7): Result.002 file - promoters60/1582293
ggtttaa

SEQ ID NO: 121264 - DNA, 7 bp, Unknown
  misc_feature (1)..( 7): Result.002 file - promoters60/1582293
ggtttaa

SEQ ID NO: 121265 - DNA, 7 bp, Unknown
  misc_feature (1)..( 7): Result.002 file - promoters60/1582293
tttcttt

SEQ ID NO: 121266 - DNA, 7 bp, Unknown
  misc_feature (1)..( 7): Result.002 file - promoters60/1582293
ttttttt

SEQ ID NO: 121267 - DNA, 7 bp, Unknown
  misc_feature (1)..( 7): Result.002 file - promoters60/1582293
ccatttt

SEQ ID NO: 121268 - DNA, 7 bp, Unknown
  misc_feature (1)..( 7): Result.002 file - promoters60/1582293
ccatttt

SEQ ID NO: 121269 - DNA, 6 bp, Unknown
  misc_feature (1)..( 6): Result.002 file - promoters60/1582293
acataa

SEQ ID NO: 121270 - DNA, 6 bp, Unknown
  misc_feature (1)..( 6): Result.002 file - promoters60/1582293
acataa

SEQ ID NO: 121271 - DNA, 10 bp, Unknown
  misc_feature (1)..( 10): Result.002 file - promoters60/1582293
acatacatta

SEQ ID NO: 121272 - DNA, 10 bp, Unknown
  misc_feature (1)..( 10): Result.002 file - promoters60/1582293
atataaatta

SEQ ID NO: 121273 - DNA, 10 bp, Unknown
  misc_feature (1)..( 10): Result.002 file - promoters60/1582293
atatgaatca

SEQ ID NO: 121274 - DNA, 7 bp, Unknown
  misc_feature (1)..( 7): Result.002 file - promoters60/1582293
atattat

SEQ ID NO: 121275 - DNA, 7 bp, Unknown
  misc_feature (1)..( 7): Result.002 file - promoters60/1582293
atattat

SEQ ID NO: 121276 - DNA, 11 bp, Unknown
  misc_feature (1)..( 11): Result.002 file - promoters60/1582293
tagattttttt

SEQ ID NO: 121277 - DNA, 11 bp, Unknown
  misc_feature (1)..( 11): Result.002 file - promoters60/1582293
tagattttttt

SEQ ID NO: 121278 - DNA, 6 bp, Unknown
  misc_feature (1)..( 6): Result.002 file - promoters60/1582293
taaaaa

SEQ ID NO: 121279 - DNA, 6 bp, Unknown
  misc_feature (1)..( 6): Result.002 file - promoters60/1582293
taaaaa

SEQ ID NO: 121280 - DNA, 6 bp, Unknown
  misc_feature (1)..( 6): Result.002 file - promoters60/1582293
aaaaca

SEQ ID NO: 121281 - DNA, 6 bp, Unknown
  misc_feature (1)..( 6): Result.002 file - promoters60/1582293
aaaaca

SEQ ID NO: 121282 - DNA, 11 bp, Unknown
  misc_feature (1)..( 11): Result.002 file - promoters60/1582293
aaatggcccaa

SEQ ID NO: 121283 - DNA, 11 bp, Unknown
  misc_feature (1)..( 11): Result.002 file - promoters60/1582293
aaaaggcccaa

SEQ ID NO: 121284 - DNA, 6 bp, Unknown
  misc_feature (1)..( 6): Result.002 file - promoters60/1582293
atcaaa

SEQ ID NO: 121285 - DNA, 6 bp, Unknown
  misc_feature (1)..( 6): Result.002 file - promoters60/1582293
atcaaa

SEQ ID NO: 121286 - DNA, 6 bp, Unknown
  misc_feature (1)..( 6): Result.002 file - promoters60/1582293
tacaac

SEQ ID NO: 121287 - DNA, 6 bp, Unknown
  misc_feature (1)..( 6): Result.002 file - promoters60/1582293
tacaac

SEQ ID NO: 121288 - DNA, 7 bp, Unknown
  misc_feature (1)..( 7): Result.002 file - promoters60/1582293
taatatc

SEQ ID NO: 121289 - DNA, 7 bp, Unknown
  misc_feature (1)..( 7): Result.002 file - promoters60/1582293
taacatc

SEQ ID NO: 121290 - DNA, 8 bp, Unknown
  misc_feature (1)..( 8): Result.002 file - promoters60/1582293
atagcaca

SEQ ID NO: 121291 - DNA, 8 bp, Unknown
  misc_feature (1)..( 8): Result.002 file - promoters60/1582293
atagtaca

SEQ ID NO: 121292 - DNA, 8 bp, Unknown
  misc_feature (1)..( 8): Result.002 file - promoters60/1582293
atcaaata

SEQ ID NO: 121293 - DNA, 8 bp, Unknown
  misc_feature (1)..( 8): Result.002 file - promoters60/1582293
atcagata

SEQ ID NO: 121294 - DNA, 6 bp, Unknown
  misc_feature (1)..( 6): Result.002 file - promoters60/1582293
taaaaa

SEQ ID NO: 121295 - DNA, 6 bp, Unknown
  misc_feature (1)..( 6): Result.002 file - promoters60/1582293
taaaaa

SEQ ID NO: 121296 - DNA, 7 bp, Unknown
  misc_feature (1)..( 7): Result.002 file - promoters60/1582293
aaaatat

SEQ ID NO: 121297 - DNA, 7 bp, Unknown
  misc_feature (1)..( 7): Result.002 file - promoters60/1582293
aaaatat

SEQ ID NO: 121298 - DNA, 7 bp, Unknown
  misc_feature (1)..( 7): Result.002 file - promoters60/1582293
aaagaag

SEQ ID NO: 121299 - DNA, 7 bp, Unknown
  misc_feature (1)..( 7): Result.002 file - promoters60/1582293
aaaaaag

SEQ ID NO: 121300 - DNA, 8 bp, Unknown
  misc_feature (1)..( 8): Result.002 file - promoters60/1582293
aaatatag

SEQ ID NO: 121301 - DNA, 8 bp, Unknown
  misc_feature (1)..( 8): Result.002 file - promoters60/1582293
aaacatag

SEQ ID NO: 121302 - DNA, 9 bp, Unknown
  misc_feature (1)..( 9): Result.002 file - promoters60/1582322
tctatttat

SEQ ID NO: 121303 - DNA, 9 bp, Unknown
  misc_feature (1)..( 9): Result.002 file - promoters60/1582322
tctctttgt

SEQ ID NO: 121304 - DNA, 9 bp, Unknown
  misc_feature (1)..( 9): Result.002 file - promoters60/1582322
tttttttct

SEQ ID NO: 121305 - DNA, 6 bp, Unknown
  misc_feature (1)..( 6): Result.002 file - promoters60/1582322
gcacaa

SEQ ID NO: 121306 - DNA, 6 bp, Unknown
  misc_feature (1)..( 6): Result.002 file - promoters60/1582322
gcacaa

SEQ ID NO: 121307 - DNA, 7 bp, Unknown
  misc_feature (1)..( 7): Result.002 file - promoters60/1582322
tcataat

SEQ ID NO: 121308 - DNA, 7 bp, Unknown
  misc_feature (1)..( 7): Result.002 file - promoters60/1582322
tcagaat

SEQ ID NO: 121309 - DNA, 7 bp, Unknown
  misc_feature (1)..( 7): Result.002 file - promoters60/1582322
gaactta

SEQ ID NO: 121310 - DNA, 7 bp, Unknown
  misc_feature (1)..( 7): Result.002 file - promoters60/1582322
gaattta

SEQ ID NO: 121311 - DNA, 6 bp, Unknown
  misc_feature (1)..( 6): Result.002 file - promoters60/1582322
gttttg

SEQ ID NO: 121312 - DNA, 6 bp, Unknown
  misc_feature (1)..( 6): Result.002 file - promoters60/1582322
gttttg

SEQ ID NO: 121313 - DNA, 6 bp, Unknown
  misc_feature (1)..( 6): Result.002 file - promoters60/1582322
atctta

SEQ ID NO: 121314 - DNA, 6 bp, Unknown
  misc_feature (1)..( 6): Result.002 file - promoters60/1582322
atctta

SEQ ID NO: 121315 - DNA, 7 bp, Unknown
  misc_feature (1)..( 7): Result.002 file - promoters60/1582322
aattaaa

SEQ ID NO: 121316 - DNA, 7 bp, Unknown
  misc_feature (1)..( 7): Result.002 file - promoters60/1582322
aatcaaa

SEQ ID NO: 121317 - DNA, 7 bp, Unknown
  misc_feature (1)..( 7): Result.002 file - promoters60/1582322
ttccctt

SEQ ID NO: 121318 - DNA, 7 bp, Unknown
  misc_feature (1)..( 7): Result.002 file - promoters60/1582322
ttcgctt

SEQ ID NO: 121319 - DNA, 7 bp, Unknown
  misc_feature (1)..( 7): Result.002 file - promoters60/1582322
tttttta

SEQ ID NO: 121320 - DNA, 7 bp, Unknown
  misc_feature (1)..( 7): Result.002 file - promoters60/1582322
tttatta

SEQ ID NO: 121321 - DNA, 8 bp, Unknown
  misc_feature (1)..( 8): Result.002 file - promoters60/1582322
tttatcta

SEQ ID NO: 121322 - DNA, 8 bp, Unknown
  misc_feature (1)..( 8): Result.002 file - promoters60/1582322
tttttcta

SEQ ID NO: 121323 - DNA, 8 bp, Unknown
  misc_feature (1)..( 8): Result.002 file - promoters60/1582322
tttctctt

SEQ ID NO: 121324 - DNA, 6 bp, Unknown
  misc_feature (1)..( 6): Result.002 file - promoters60/1582322
attttt

SEQ ID NO: 121325 - DNA, 6 bp, Unknown
  misc_feature (1)..( 6): Result.002 file - promoters60/1582322
attttt

SEQ ID NO: 121326 - DNA, 8 bp, Unknown
  misc_feature (1)..( 8): Result.002 file - promoters60/1582322
aaagattt

SEQ ID NO: 121327 - DNA, 8 bp, Unknown
  misc_feature (1)..( 8): Result.002 file - promoters60/1582322
aaagattt

SEQ ID NO: 121328 - DNA, 8 bp, Unknown
  misc_feature (1)..( 8): Result.002 file - promoters60/1582322
ggtatttg

SEQ ID NO: 121329 - DNA, 8 bp, Unknown
  misc_feature (1)..( 8): Result.002 file - promoters60/1582322
ggtgtttg

SEQ ID NO: 121330 - DNA, 6 bp, Unknown
  misc_feature (1)..( 6): Result.002 file - promoters60/1582322
atgaat

SEQ ID NO: 121331 - DNA, 6 bp, Unknown
  misc_feature (1)..( 6): Result.002 file - promoters60/1582322
atgaat

SEQ ID NO: 121332 - DNA, 7 bp, Unknown
  misc_feature (1)..( 7): Result.002 file - promoters60/1582322
ttacaat

SEQ ID NO: 121333 - DNA, 7 bp, Unknown
  misc_feature (1)..( 7): Result.002 file - promoters60/1582322
ttataat

SEQ ID NO: 121334 - DNA, 8 bp, Unknown
  misc_feature (1)..( 8): Result.002 file - promoters60/1582322
aattataa

SEQ ID NO: 121335 - DNA, 8 bp, Unknown
  misc_feature (1)..( 8): Result.002 file - promoters60/1582322
aattttaa

SEQ ID NO: 121336 - DNA, 14 bp, Unknown
  misc_feature (1)..( 14): Result.002 file - promoters60/1582322
aatttctcccaaaa

SEQ ID NO: 121337 - DNA, 14 bp, Unknown
  misc_feature (1)..( 14): Result.002 file - promoters60/1582322
aatttctgccaaaa

SEQ ID NO: 121338 - DNA, 8 bp, Unknown
  misc_feature (1)..( 8): Result.002 file - promoters60/1582322
aatctata

SEQ ID NO: 121339 - DNA, 8 bp, Unknown
  misc_feature (1)..( 8): Result.002 file - promoters60/1582322
aatcaata

SEQ ID NO: 121340 - DNA, 6 bp, Unknown
  misc_feature (1)..( 6): Result.002 file - promoters60/1582322
ttttct

SEQ ID NO: 121341 - DNA, 6 bp, Unknown
  misc_feature (1)..( 6): Result.002 file - promoters60/1582322
ttttct

SEQ ID NO: 121342 - DNA, 8 bp, Unknown
  misc_feature (1)..( 8): Result.002 file - promoters60/1582322
gaagaaat

SEQ ID NO: 121343 - DNA, 8 bp, Unknown
  misc_feature (1)..( 8): Result.002 file - promoters60/1582322
gaagaaat

SEQ ID NO: 121344 - DNA, 7 bp, Unknown
  misc_feature (1)..( 7): Result.002 file - promoters60/1582322
aagtttc

SEQ ID NO: 121345 - DNA, 7 bp, Unknown
  misc_feature (1)..( 7): Result.002 file - promoters60/1582322
aagcttc

SEQ ID NO: 121346 - DNA, 7 bp, Unknown
  misc_feature (1)..( 7): Result.002 file - promoters60/1582576
tatgtag

SEQ ID NO: 121347 - DNA, 7 bp, Unknown
  misc_feature (1)..( 7): Result.002 file - promoters60/1582576
tatttag

SEQ ID NO: 121348 - DNA, 7 bp, Unknown
  misc_feature (1)..( 7): Result.002 file - promoters60/1582576
tatttaa

SEQ ID NO: 121349 - DNA, 10 bp, Unknown
  misc_feature (1)..( 10): Result.002 file - promoters60/1582576
aaaaatgtat

SEQ ID NO: 121350 - DNA, 10 bp, Unknown
  misc_feature (1)..( 10): Result.002 file - promoters60/1582576
taaaatatat

SEQ ID NO: 121351 - DNA, 11 bp, Unknown
  misc_feature (1)..( 11): Result.002 file - promoters60/1582576
aaataatatat

SEQ ID NO: 121352 - DNA, 7 bp, Unknown
  misc_feature (1)..( 7): Result.002 file - promoters60/1582576
taaataa

SEQ ID NO: 121353 - DNA, 7 bp, Unknown
  misc_feature (1)..( 7): Result.002 file - promoters60/1582576
aaaataa

SEQ ID NO: 121354 - DNA, 8 bp, Unknown
  misc_feature (1)..( 8): Result.002 file - promoters60/1582576
taaagtaa

SEQ ID NO: 121355 - DNA, 8 bp, Unknown
  misc_feature (1)..( 8): Result.002 file - promoters60/1582576
taactaat

SEQ ID NO: 121356 - DNA, 8 bp, Unknown
  misc_feature (1)..( 8): Result.002 file - promoters60/1582576
taattaat

SEQ ID NO: 121357 - DNA, 8 bp, Unknown
  misc_feature (1)..( 8): Result.002 file - promoters60/1582576
gaataaat

SEQ ID NO: 121358 - DNA, 7 bp, Unknown
  misc_feature (1)..( 7): Result.002 file - promoters60/1582576
aaataac

SEQ ID NO: 121359 - DNA, 7 bp, Unknown
  misc_feature (1)..( 7): Result.002 file - promoters60/1582576
aaataat

SEQ ID NO: 121360 - DNA, 7 bp, Unknown
  misc_feature (1)..( 7): Result.002 file - promoters60/1582576
taataat

SEQ ID NO: 121361 - DNA, 7 bp, Unknown
  misc_feature (1)..( 7): Result.002 file - promoters60/1582576
aataaat

SEQ ID NO: 121362 - DNA, 7 bp, Unknown
  misc_feature (1)..( 7): Result.002 file - promoters60/1582576
aataaaa

SEQ ID NO: 121363 - DNA, 7 bp, Unknown
  misc_feature (1)..( 7): Result.002 file - promoters60/1582576
aataaaa

SEQ ID NO: 121364 - DNA, 7 bp, Unknown
  misc_feature (1)..( 7): Result.002 file - promoters60/1582576
ttaaaat

SEQ ID NO: 121365 - DNA, 7 bp, Unknown
  misc_feature (1)..( 7): Result.002 file - promoters60/1582576
ctaaaat

SEQ ID NO: 121366 - DNA, 7 bp, Unknown
  misc_feature (1)..( 7): Result.002 file - promoters60/1582576
ctacaat

SEQ ID NO: 121367 - DNA, 7 bp, Unknown
  misc_feature (1)..( 7): Result.002 file - promoters60/1582576
aaaagac

SEQ ID NO: 121368 - DNA, 7 bp, Unknown
  misc_feature (1)..( 7): Result.002 file - promoters60/1582576
aaatgac

SEQ ID NO: 121369 - DNA, 7 bp, Unknown
  misc_feature (1)..( 7): Result.002 file - promoters60/1582576
aaaaact

SEQ ID NO: 121370 - DNA, 8 bp, Unknown
  misc_feature (1)..( 8): Result.002 file - promoters60/1582576
aaaataaa

SEQ ID NO: 121371 - DNA, 8 bp, Unknown
  misc_feature (1)..( 8): Result.002 file - promoters60/1582576
aaaacaaa

SEQ ID NO: 121372 - DNA, 8 bp, Unknown
  misc_feature (1)..( 8): Result.002 file - promoters60/1582576
aaagtaaa

SEQ ID NO: 121373 - DNA, 12 bp, Unknown
  misc_feature (1)..( 12): Result.002 file - promoters60/1582658
ttttttttgaat

SEQ ID NO: 121374 - DNA, 12 bp, Unknown
  misc_feature (1)..( 12): Result.002 file - promoters60/1582658
tttcttttgtcg

SEQ ID NO: 121375 - DNA, 12 bp, Unknown
  misc_feature (1)..( 12): Result.002 file - promoters60/1582658
cgaggtttggaa

SEQ ID NO: 121376 - DNA, 7 bp, Unknown
  misc_feature (1)..( 7): Result.002 file - promoters60/1582658
ttttaaa

SEQ ID NO: 121377 - DNA, 7 bp, Unknown
  misc_feature (1)..( 7): Result.002 file - promoters60/1582658
ttttaat

SEQ ID NO: 121378 - DNA, 7 bp, Unknown
  misc_feature (1)..( 7): Result.002 file - promoters60/1582658
tttcatc

SEQ ID NO: 121379 - DNA, 9 bp, Unknown
  misc_feature (1)..( 9): Result.002 file - promoters60/1582658
attttttag

SEQ ID NO: 121380 - DNA, 9 bp, Unknown
  misc_feature (1)..( 9): Result.002 file - promoters60/1582658
atttttaat

SEQ ID NO: 121381 - DNA, 9 bp, Unknown
  misc_feature (1)..( 9): Result.002 file - promoters60/1582658
attttatag

SEQ ID NO: 121382 - DNA, 7 bp, Unknown
  misc_feature (1)..( 7): Result.002 file - promoters60/1582658
gaacttt

SEQ ID NO: 121383 - DNA, 7 bp, Unknown
  misc_feature (1)..( 7): Result.002 file - promoters60/1582658
gaagttt

SEQ ID NO: 121384 - DNA, 7 bp, Unknown
  misc_feature (1)..( 7): Result.002 file - promoters60/1582658
taagttt

SEQ ID NO: 121385 - DNA, 8 bp, Unknown
  misc_feature (1)..( 8): Result.002 file - promoters60/1582658
gaatattt

SEQ ID NO: 121386 - DNA, 8 bp, Unknown
  misc_feature (1)..( 8): Result.002 file - promoters60/1582658
aaatgttt

SEQ ID NO: 121387 - DNA, 8 bp, Unknown
  misc_feature (1)..( 8): Result.002 file - promoters60/1582658
aaatgttg

SEQ ID NO: 121388 - DNA, 7 bp, Unknown
  misc_feature (1)..( 7): Result.002 file - promoters60/1582658
atcgttt

SEQ ID NO: 121389 - DNA, 7 bp, Unknown
  misc_feature (1)..( 7): Result.002 file - promoters60/1582658
atcattt

SEQ ID NO: 121390 - DNA, 7 bp, Unknown
  misc_feature (1)..( 7): Result.002 file - promoters60/1582658
ttcattt

SEQ ID NO: 121391 - DNA, 8 bp, Unknown
  misc_feature (1)..( 8): Result.002 file - promoters60/1582658
attgcatc

SEQ ID NO: 121392 - DNA, 8 bp, Unknown
  misc_feature (1)..( 8): Result.002 file - promoters60/1582658
atttcatc

SEQ ID NO: 121393 - DNA, 8 bp, Unknown
  misc_feature (1)..( 8): Result.002 file - promoters60/1582658
ttttaatc

SEQ ID NO: 121394 - DNA, 9 bp, Unknown
  misc_feature (1)..( 9): Result.002 file - promoters60/1583044
attaataca

SEQ ID NO: 121395 - DNA, 9 bp, Unknown
  misc_feature (1)..( 9): Result.002 file - promoters60/1583044
attcataat

SEQ ID NO: 121396 - DNA, 9 bp, Unknown
  misc_feature (1)..( 9): Result.002 file - promoters60/1583044
ggtcaaaat

SEQ ID NO: 121397 - DNA, 7 bp, Unknown
  misc_feature (1)..( 7): Result.002 file - promoters60/1595585
taggtct

SEQ ID NO: 121398 - DNA, 7 bp, Unknown
  misc_feature (1)..( 7): Result.002 file - promoters60/1595585
tagctct

SEQ ID NO: 121399 - DNA, 7 bp, Unknown
  misc_feature (1)..( 7): Result.002 file - promoters60/1595585
ttctaac

SEQ ID NO: 121400 - DNA, 7 bp, Unknown
  misc_feature (1)..( 7): Result.002 file - promoters60/1595585
ttctaaa

SEQ ID NO: 121401 - DNA, 8 bp, Unknown
  misc_feature (1)..( 8): Result.002 file - promoters60/1595585
gtcttaat

SEQ ID NO: 121402 - DNA, 6 bp, Unknown
  misc_feature (1)..( 6): Result.002 file - promoters60/1595585
aatgaa

SEQ ID NO: 121403 - DNA, 6 bp, Unknown
  misc_feature (1)..( 6): Result.002 file - promoters60/1595585
aatgaa

SEQ ID NO: 121404 - DNA, 6 bp, Unknown
  misc_feature (1)..( 6): Result.002 file - promoters60/1595585
aaactc

SEQ ID NO: 121405 - DNA, 6 bp, Unknown
  misc_feature (1)..( 6): Result.002 file - promoters60/1595585
aaactc

SEQ ID NO: 121406 - DNA, 6 bp, Unknown
  misc_feature (1)..( 6): Result.002 file - promoters60/1595585
aaaata

SEQ ID NO: 121407 - DNA, 6 bp, Unknown
  misc_feature (1)..( 6): Result.002 file - promoters60/1595585
aaaata

SEQ ID NO: 121408 - DNA, 7 bp, Unknown
  misc_feature (1)..( 7): Result.002 file - promoters60/1595585
ctaaatt

SEQ ID NO: 121409 - DNA, 7 bp, Unknown
  misc_feature (1)..( 7): Result.002 file - promoters60/1595585
ctatatt

SEQ ID NO: 121410 - DNA, 7 bp, Unknown
  misc_feature (1)..( 7): Result.002 file - promoters60/1595585
aaaaaat

SEQ ID NO: 121411 - DNA, 7 bp, Unknown
  misc_feature (1)..( 7): Result.002 file - promoters60/1595585
aaataat

SEQ ID NO: 121412 - DNA, 6 bp, Unknown
  misc_feature (1)..( 6): Result.002 file - promoters60/1595585
gacccg

SEQ ID NO: 121413 - DNA, 6 bp, Unknown
  misc_feature (1)..( 6): Result.002 file - promoters60/1595585
gacccg

SEQ ID NO: 121414 - DNA, 9 bp, Unknown
  misc_feature (1)..( 9): Result.002 file - promoters60/1595585
attttatcc

SEQ ID NO: 121415 - DNA, 9 bp, Unknown
  misc_feature (1)..( 9): Result.002 file - promoters60/1595585
attatatcc

SEQ ID NO: 121416 - DNA, 7 bp, Unknown
  misc_feature (1)..( 7): Result.002 file - promoters60/1595585
ctgctct

SEQ ID NO: 121417 - DNA, 7 bp, Unknown
  misc_feature (1)..( 7): Result.002 file - promoters60/1595585
ctgatct

SEQ ID NO: 121418 - DNA, 6 bp, Unknown
  misc_feature (1)..( 6): Result.002 file - promoters60/1595585
accact

SEQ ID NO: 121419 - DNA, 6 bp, Unknown
  misc_feature (1)..( 6): Result.002 file - promoters60/1595585
accact

SEQ ID NO: 121420 - DNA, 10 bp, Unknown
  misc_feature (1)..( 10): Result.002 file - promoters60/1595585
cacttggttt

SEQ ID NO: 121421 - DNA, 10 bp, Unknown
  misc_feature (1)..( 10): Result.002 file - promoters60/1595585
cactcggttt

SEQ ID NO: 121422 - DNA, 7 bp, Unknown
  misc_feature (1)..( 7): Result.002 file - promoters60/1595585
ttttcat

SEQ ID NO: 121423 - DNA, 7 bp, Unknown
  misc_feature (1)..( 7): Result.002 file - promoters60/1595585
ttttcat

SEQ ID NO: 121424 - DNA, 8 bp, Unknown
  misc_feature (1)..( 8): Result.002 file - promoters60/1595651
aaagaaat

SEQ ID NO: 121425 - DNA, 8 bp, Unknown
  misc_feature (1)..( 8): Result.002 file - promoters60/1595651
aaagaaat

SEQ ID NO: 121426 - DNA, 9 bp, Unknown
  misc_feature (1)..( 9): Result.002 file - promoters60/1595651
aatctccat

SEQ ID NO: 121427 - DNA, 9 bp, Unknown
  misc_feature (1)..( 9): Result.002 file - promoters60/1595651
aatatccat

SEQ ID NO: 121428 - DNA, 7 bp, Unknown
  misc_feature (1)..( 7): Result.002 file - promoters60/1595651
taacttg

SEQ ID NO: 121429 - DNA, 7 bp, Unknown
  misc_feature (1)..( 7): Result.002 file - promoters60/1595651
taatttg

SEQ ID NO: 121430 - DNA, 7 bp, Unknown
  misc_feature (1)..( 7): Result.002 file - promoters60/1595651
tcaaatt

SEQ ID NO: 121431 - DNA, 7 bp, Unknown
  misc_feature (1)..( 7): Result.002 file - promoters60/1595651
tcaaatt

SEQ ID NO: 121432 - DNA, 8 bp, Unknown
  misc_feature (1)..( 8): Result.002 file - promoters60/1595651
aacaaaaa

SEQ ID NO: 121433 - DNA, 8 bp, Unknown
  misc_feature (1)..( 8): Result.002 file - promoters60/1595651
aacaaaaa

SEQ ID NO: 121434 - DNA, 6 bp, Unknown
  misc_feature (1)..( 6): Result.002 file - promoters60/1595651
acattt

SEQ ID NO: 121435 - DNA, 6 bp, Unknown
  misc_feature (1)..( 6): Result.002 file - promoters60/1595651
acattt

SEQ ID NO: 121436 - DNA, 10 bp, Unknown
  misc_feature (1)..( 10): Result.002 file - promoters60/1595651
aagaaaacaa

SEQ ID NO: 121437 - DNA, 10 bp, Unknown
  misc_feature (1)..( 10): Result.002 file - promoters60/1595651
aagaaaacaa

SEQ ID NO: 121438 - DNA, 6 bp, Unknown
  misc_feature (1)..( 6): Result.002 file - promoters60/1595651
caaaaa

SEQ ID NO: 121439 - DNA, 6 bp, Unknown
  misc_feature (1)..( 6): Result.002 file - promoters60/1595651
caaaaa

SEQ ID NO: 121440 - DNA, 10 bp, Unknown
  misc_feature (1)..( 10): Result.002 file - promoters60/1595651
ctaaacgggc

SEQ ID NO: 121441 - DNA, 10 bp, Unknown
  misc_feature (1)..( 10): Result.002 file - promoters60/1595651
ctaaacgggc

SEQ ID NO: 121442 - DNA, 7 bp, Unknown
  misc_feature (1)..( 7): Result.002 file - promoters60/1595651
gtcatat

SEQ ID NO: 121443 - DNA, 7 bp, Unknown
  misc_feature (1)..( 7): Result.002 file - promoters60/1595651
gtcatat

SEQ ID NO: 121444 - DNA, 7 bp, Unknown
  misc_feature (1)..( 7): Result.002 file - promoters60/1595651
tccattg

SEQ ID NO: 121445 - DNA, 7 bp, Unknown
  misc_feature (1)..( 7): Result.002 file - promoters60/1595651
tccattg

SEQ ID NO: 121446 - DNA, 7 bp, Unknown
  misc_feature (1)..( 7): Result.002 file - promoters60/1595651
taattaa

SEQ ID NO: 121447 - DNA, 7 bp, Unknown
  misc_feature (1)..( 7): Result.002 file - promoters60/1595651
taactaa

SEQ ID NO: 121448 - DNA, 6 bp, Unknown
  misc_feature (1)..( 6): Result.002 file - promoters60/1595651
ttcaga

SEQ ID NO: 121449 - DNA, 6 bp, Unknown
  misc_feature (1)..( 6): Result.002 file - promoters60/1595651
ttcaga

SEQ ID NO: 121450 - DNA, 6 bp, Unknown
  misc_feature (1)..( 6): Result.002 file - promoters60/1595651
aaatgt

SEQ ID NO: 121451 - DNA, 6 bp, Unknown
  misc_feature (1)..( 6): Result.002 file - promoters60/1595651
aaatgt

SEQ ID NO: 121452 - DNA, 7 bp, Unknown
  misc_feature (1)..( 7): Result.002 file - promoters60/1595651
ttttaaa

SEQ ID NO: 121453 - DNA, 7 bp, Unknown
  misc_feature (1)..( 7): Result.002 file - promoters60/1595651
ttttaaa

SEQ ID NO: 121454 - DNA, 9 bp, Unknown
  misc_feature (1)..( 9): Result.002 file - promoters60/1595651
attgattgt

SEQ ID NO: 121455 - DNA, 9 bp, Unknown
  misc_feature (1)..( 9): Result.002 file - promoters60/1595651
attcattgt

SEQ ID NO: 121456 - DNA, 7 bp, Unknown
  misc_feature (1)..( 7): Result.002 file - promoters60/1595651
ttgagac

SEQ ID NO: 121457 - DNA, 7 bp, Unknown
  misc_feature (1)..( 7): Result.002 file - promoters60/1595651
ttgggac

SEQ ID NO: 121458 - DNA, 9 bp, Unknown
  misc_feature (1)..( 9): Result.002 file - promoters60/1595707
attttattt

SEQ ID NO: 121459 - DNA, 9 bp, Unknown
  misc_feature (1)..( 9): Result.002 file - promoters60/1595707
tttttattc

SEQ ID NO: 121460 - DNA, 9 bp, Unknown
  misc_feature (1)..( 9): Result.002 file - promoters60/1595707
attttgttt

SEQ ID NO: 121461 - DNA, 9 bp, Unknown
  misc_feature (1)..( 9): Result.002 file - promoters60/1595707
tttttattc

SEQ ID NO: 121462 - DNA, 10 bp, Unknown
  misc_feature (1)..( 10): Result.002 file - promoters60/1595707
atttggctct

SEQ ID NO: 121463 - DNA, 10 bp, Unknown
  misc_feature (1)..( 10): Result.002 file - promoters60/1595707
attgggccta

SEQ ID NO: 121464 - DNA, 10 bp, Unknown
  misc_feature (1)..( 10): Result.002 file - promoters60/1595707
gactggccct

SEQ ID NO: 121465 - DNA, 10 bp, Unknown
  misc_feature (1)..( 10): Result.002 file - promoters60/1595707
gactggccct

SEQ ID NO: 121466 - DNA, 11 bp, Unknown
  misc_feature (1)..( 11): Result.002 file - promoters60/1595707
atttgtttatt

SEQ ID NO: 121467 - DNA, 11 bp, Unknown
  misc_feature (1)..( 11): Result.002 file - promoters60/1595707
attagtttatc

SEQ ID NO: 121468 - DNA, 11 bp, Unknown
  misc_feature (1)..( 11): Result.002 file - promoters60/1595707
acgtgttaatt

SEQ ID NO: 121469 - DNA, 11 bp, Unknown
  misc_feature (1)..( 11): Result.002 file - promoters60/1595707
aactttttatt

SEQ ID NO: 121470 - DNA, 11 bp, Unknown
  misc_feature (1)..( 11): Result.002 file - promoters60/1595707
aatacaaatct

SEQ ID NO: 121471 - DNA, 11 bp, Unknown
  misc_feature (1)..( 11): Result.002 file - promoters60/1595707
aataccaatca

SEQ ID NO: 121472 - DNA, 11 bp, Unknown
  misc_feature (1)..( 11): Result.002 file - promoters60/1595707
cagcccagtca

SEQ ID NO: 121473 - DNA, 11 bp, Unknown
  misc_feature (1)..( 11): Result.002 file - promoters60/1595707
aatacaaatct

SEQ ID NO: 121474 - DNA, 12 bp, Unknown
  misc_feature (1)..( 12): Result.002 file - promoters60/1595741
ttttttaataag

SEQ ID NO: 121475 - DNA, 12 bp, Unknown
  misc_feature (1)..( 12): Result.002 file - promoters60/1595741
aatttcaataac

SEQ ID NO: 121476 - DNA, 12 bp, Unknown
  misc_feature (1)..( 12): Result.002 file - promoters60/1595741
atgtctaaaaag

SEQ ID NO: 121477 - DNA, 12 bp, Unknown
  misc_feature (1)..( 12): Result.002 file - promoters60/1595741
aatttcatttga

SEQ ID NO: 121478 - DNA, 12 bp, Unknown
  misc_feature (1)..( 12): Result.002 file - promoters60/1595741
tattttattgtt

SEQ ID NO: 121479 - DNA, 12 bp, Unknown
  misc_feature (1)..( 12): Result.002 file - promoters60/1595741
gctttcgttttg

SEQ ID NO: 121480 - DNA, 9 bp, Unknown
  misc_feature (1)..( 9): Result.002 file - promoters60/1595752
atcataatc

SEQ ID NO: 121481 - DNA, 9 bp, Unknown
  misc_feature (1)..( 9): Result.002 file - promoters60/1595752
atcagaatc

SEQ ID NO: 121482 - DNA, 9 bp, Unknown
  misc_feature (1)..( 9): Result.002 file - promoters60/1595752
aaatttctt

SEQ ID NO: 121483 - DNA, 9 bp, Unknown
  misc_feature (1)..( 9): Result.002 file - promoters60/1595752
gaatctctt

SEQ ID NO: 121484 - DNA, 10 bp, Unknown
  misc_feature (1)..( 10): Result.002 file - promoters60/1595752
taagtttgca

SEQ ID NO: 121485 - DNA, 9 bp, Unknown
  misc_feature (1)..( 9): Result.002 file - promoters60/1595752
ccaaacaat

SEQ ID NO: 121486 - DNA, 9 bp, Unknown
  misc_feature (1)..( 9): Result.002 file - promoters60/1595752
ccaaccaat

SEQ ID NO: 121487 - DNA, 7 bp, Unknown
  misc_feature (1)..( 7): Result.002 file - promoters60/1595752
agaacaa

SEQ ID NO: 121488 - DNA, 7 bp, Unknown
  misc_feature (1)..( 7): Result.002 file - promoters60/1595752
agagcaa

SEQ ID NO: 121489 - DNA, 7 bp, Unknown
  misc_feature (1)..( 7): Result.002 file - promoters60/1595752
aaccacc

SEQ ID NO: 121490 - DNA, 7 bp, Unknown
  misc_feature (1)..( 7): Result.002 file - promoters60/1595752
aacaacc

SEQ ID NO: 121491 - DNA, 7 bp, Unknown
  misc_feature (1)..( 7): Result.002 file - promoters60/1595752
aaccacc

SEQ ID NO: 121492 - DNA, 6 bp, Unknown
  misc_feature (1)..( 6): Result.002 file - promoters60/1595752
ataacc

SEQ ID NO: 121493 - DNA, 6 bp, Unknown
  misc_feature (1)..( 6): Result.002 file - promoters60/1595752
ataacc

SEQ ID NO: 121494 - DNA, 7 bp, Unknown
  misc_feature (1)..( 7): Result.002 file - promoters60/1595752
acctaat

SEQ ID NO: 121495 - DNA, 7 bp, Unknown
  misc_feature (1)..( 7): Result.002 file - promoters60/1595752
acctaat

SEQ ID NO: 121496 - DNA, 8 bp, Unknown
  misc_feature (1)..( 8): Result.002 file - promoters60/1595752
tatatata

SEQ ID NO: 121497 - DNA, 8 bp, Unknown
  misc_feature (1)..( 8): Result.002 file - promoters60/1595752
tataaata

SEQ ID NO: 121498 - DNA, 8 bp, Unknown
  misc_feature (1)..( 8): Result.002 file - promoters60/1595752
tatataaa

SEQ ID NO: 121499 - DNA, 7 bp, Unknown
  misc_feature (1)..( 7): Result.002 file - promoters60/1595752
aaaatca

SEQ ID NO: 121500 - DNA, 7 bp, Unknown
  misc_feature (1)..( 7): Result.002 file - promoters60/1595752
aaaatca

SEQ ID NO: 121501 - DNA, 8 bp, Unknown
  misc_feature (1)..( 8): Result.002 file - promoters60/1595752
atttacat

SEQ ID NO: 121502 - DNA, 8 bp, Unknown
  misc_feature (1)..( 8): Result.002 file - promoters60/1595752
attcacat

SEQ ID NO: 121503 - DNA, 6 bp, Unknown
  misc_feature (1)..( 6): Result.002 file - promoters60/1595752
atattt

SEQ ID NO: 121504 - DNA, 6 bp, Unknown
  misc_feature (1)..( 6): Result.002 file - promoters60/1595752
atattt

SEQ ID NO: 121505 - DNA, 7 bp, Unknown
  misc_feature (1)..( 7): Result.002 file - promoters60/1595752
ataattt

SEQ ID NO: 121506 - DNA, 7 bp, Unknown
  misc_feature (1)..( 7): Result.002 file - promoters60/1595752
tcataaa

SEQ ID NO: 121507 - DNA, 7 bp, Unknown
  misc_feature (1)..( 7): Result.002 file - promoters60/1595752
tcaaaaa

SEQ ID NO: 121508 - DNA, 6 bp, Unknown
  misc_feature (1)..( 6): Result.002 file - promoters60/1595752
attgct

SEQ ID NO: 121509 - DNA, 6 bp, Unknown
  misc_feature (1)..( 6): Result.002 file - promoters60/1595752
attgct

SEQ ID NO: 121510 - DNA, 8 bp, Unknown
  misc_feature (1)..( 8): Result.002 file - promoters60/1595752
acatctaa

SEQ ID NO: 121511 - DNA, 8 bp, Unknown
  misc_feature (1)..( 8): Result.002 file - promoters60/1595752
aaatctaa

SEQ ID NO: 121512 - DNA, 8 bp, Unknown
  misc_feature (1)..( 8): Result.002 file - promoters60/1595752
aaatctat

SEQ ID NO: 121513 - DNA, 7 bp, Unknown
  misc_feature (1)..( 7): Result.002 file - promoters60/1595752
atggtca

SEQ ID NO: 121514 - DNA, 7 bp, Unknown
  misc_feature (1)..( 7): Result.002 file - promoters60/1595752
atggtca

SEQ ID NO: 121515 - DNA, 8 bp, Unknown
  misc_feature (1)..( 8): Result.002 file - promoters60/1595752
agaacaat

SEQ ID NO: 121516 - DNA, 8 bp, Unknown
  misc_feature (1)..( 8): Result.002 file - promoters60/1595752
agaccaat

SEQ ID NO: 121517 - DNA, 6 bp, Unknown
  misc_feature (1)..( 6): Result.002 file - promoters60/1595752
tgcatt

SEQ ID NO: 121518 - DNA, 6 bp, Unknown
  misc_feature (1)..( 6): Result.002 file - promoters60/1595752
tgcatt

SEQ ID NO: 121519 - DNA, 6 bp, Unknown
  misc_feature (1)..( 6): Result.002 file - promoters60/1595752
tttatt

SEQ ID NO: 121520 - DNA, 6 bp, Unknown
  misc_feature (1)..( 6): Result.002 file - promoters60/1595752
tttatt

SEQ ID NO: 121521 - DNA, 7 bp, Unknown
  misc_feature (1)..( 7): Result.002 file - promoters60/1595752
attcaaa

SEQ ID NO: 121522 - DNA, 7 bp, Unknown
  misc_feature (1)..( 7): Result.002 file - promoters60/1595752
attgaaa

SEQ ID NO: 121523 - DNA, 6 bp, Unknown
  misc_feature (1)..( 6): Result.002 file - promoters60/1595752
caatca

SEQ ID NO: 121524 - DNA, 6 bp, Unknown
  misc_feature (1)..( 6): Result.002 file - promoters60/1595752
caatca

SEQ ID NO: 121525 - DNA, 8 bp, Unknown
  misc_feature (1)..( 8): Result.002 file - promoters60/1595752
ttgggttt

SEQ ID NO: 121526 - DNA, 8 bp, Unknown
  misc_feature (1)..( 8): Result.002 file - promoters60/1595752
ttgagttt

SEQ ID NO: 121527 - DNA, 9 bp, Unknown
  misc_feature (1)..( 9): Result.002 file - promoters60/1595752
accctccaa

SEQ ID NO: 121528 - DNA, 9 bp, Unknown
  misc_feature (1)..( 9): Result.002 file - promoters60/1595752
accctccaa

SEQ ID NO: 121529 - DNA, 11 bp, Unknown
  misc_feature (1)..( 11): Result.002 file - promoters60/1595752
aaagttagatg

SEQ ID NO: 121530 - DNA, 11 bp, Unknown
  misc_feature (1)..( 11): Result.002 file - promoters60/1595752
aaagttagatg

SEQ ID NO: 121531 - DNA, 7 bp, Unknown
  misc_feature (1)..( 7): Result.002 file - promoters60/1595752
gacaaaa

SEQ ID NO: 121532 - DNA, 7 bp, Unknown
  misc_feature (1)..( 7): Result.002 file - promoters60/1595752
gacaaaa

SEQ ID NO: 121533 - DNA, 6 bp, Unknown
  misc_feature (1)..( 6): Result.002 file - promoters60/1595752
aacact

SEQ ID NO: 121534 - DNA, 6 bp, Unknown
  misc_feature (1)..( 6): Result.002 file - promoters60/1595752
aacact

SEQ ID NO: 121535 - DNA, 11 bp, Unknown
  misc_feature (1)..( 11): Result.002 file - promoters60/1595772
attaatattta

SEQ ID NO: 121536 - DNA, 11 bp, Unknown
  misc_feature (1)..( 11): Result.002 file - promoters60/1595772
cgtaatgtttc

SEQ ID NO: 121537 - DNA, 11 bp, Unknown
  misc_feature (1)..( 11): Result.002 file - promoters60/1595772
aataaaattaa

SEQ ID NO: 121538 - DNA, 11 bp, Unknown
  misc_feature (1)..( 11): Result.002 file - promoters60/1595772
attaataatta

SEQ ID NO: 121539 - DNA, 7 bp, Unknown
  misc_feature (1)..( 7): Result.002 file - promoters60/1595772
aaatatc

SEQ ID NO: 121540 - DNA, 7 bp, Unknown
  misc_feature (1)..( 7): Result.002 file - promoters60/1595772
aaatata

SEQ ID NO: 121541 - DNA, 8 bp, Unknown
  misc_feature (1)..( 8): Result.002 file - promoters60/1595772
aaattata

SEQ ID NO: 121542 - DNA, 8 bp, Unknown
  misc_feature (1)..( 8): Result.002 file - promoters60/1595772
taaagatc

SEQ ID NO: 121543 - DNA, 12 bp, Unknown
  misc_feature (1)..( 12): Result.002 file - promoters60/1595772
agttaaaaaata

SEQ ID NO: 121544 - DNA, 12 bp, Unknown
  misc_feature (1)..( 12): Result.002 file - promoters60/1595772
gcagaaaaaata

SEQ ID NO: 121545 - DNA, 12 bp, Unknown
  misc_feature (1)..( 12): Result.002 file - promoters60/1595772
caataaaaaaaa

SEQ ID NO: 121546 - DNA, 12 bp, Unknown
  misc_feature (1)..( 12): Result.002 file - promoters60/1595772
aattaaagtcaa

SEQ ID NO: 121547 - DNA, 8 bp, Unknown
  misc_feature (1)..( 8): Result.002 file - promoters60/1595772
tttttatt

SEQ ID NO: 121548 - DNA, 8 bp, Unknown
  misc_feature (1)..( 8): Result.002 file - promoters60/1595772
attttatt

SEQ ID NO: 121549 - DNA, 8 bp, Unknown
  misc_feature (1)..( 8): Result.002 file - promoters60/1595772
tttttatt

SEQ ID NO: 121550 - DNA, 8 bp, Unknown
  misc_feature (1)..( 8): Result.002 file - promoters60/1595772
tttgtatc

SEQ ID NO: 121551 - DNA, 10 bp, Unknown
  misc_feature (1)..( 10): Result.002 file - promoters60/1595772
atattttcag

SEQ ID NO: 121552 - DNA, 10 bp, Unknown
  misc_feature (1)..( 10): Result.002 file - promoters60/1595772
atatttagtt

SEQ ID NO: 121553 - DNA, 10 bp, Unknown
  misc_feature (1)..( 10): Result.002 file - promoters60/1595772
ttatttaaaa

SEQ ID NO: 121554 - DNA, 10 bp, Unknown
  misc_feature (1)..( 10): Result.002 file - promoters60/1595772
aaattgaaaa

SEQ ID NO: 121555 - DNA, 11 bp, Unknown
  misc_feature (1)..( 11): Result.002 file - promoters60/1595772
gtttaaaaatt

SEQ ID NO: 121556 - DNA, 11 bp, Unknown
  misc_feature (1)..( 11): Result.002 file - promoters60/1595772
gtttaatttat

SEQ ID NO: 121557 - DNA, 11 bp, Unknown
  misc_feature (1)..( 11): Result.002 file - promoters60/1595772
gttaaaaaatt

SEQ ID NO: 121558 - DNA, 11 bp, Unknown
  misc_feature (1)..( 11): Result.002 file - promoters60/1595772
atttcattaag

SEQ ID NO: 121559 - DNA, 8 bp, Unknown
  misc_feature (1)..( 8): Result.002 file - promoters60/1595772
atagttta

SEQ ID NO: 121560 - DNA, 8 bp, Unknown
  misc_feature (1)..( 8): Result.002 file - promoters60/1595772
ataatttc

SEQ ID NO: 121561 - DNA, 8 bp, Unknown
  misc_feature (1)..( 8): Result.002 file - promoters60/1595772
gaaatttc

SEQ ID NO: 121562 - DNA, 9 bp, Unknown
  misc_feature (1)..( 9): Result.002 file - promoters60/1595772
agaacttta

SEQ ID NO: 121563 - DNA, 10 bp, Unknown
  misc_feature (1)..( 10): Result.002 file - promoters60/1595772
aaataaattt

SEQ ID NO: 121564 - DNA, 10 bp, Unknown
  misc_feature (1)..( 10): Result.002 file - promoters60/1595772
ttatatattc

SEQ ID NO: 121565 - DNA, 9 bp, Unknown
  misc_feature (1)..( 9): Result.002 file - promoters60/1595772
aataaaaaa

SEQ ID NO: 121566 - DNA, 9 bp, Unknown
  misc_feature (1)..( 9): Result.002 file - promoters60/1595772
aatacaaaa

SEQ ID NO: 121567 - DNA, 10 bp, Unknown
  misc_feature (1)..( 10): Result.002 file - promoters60/1595772
aattaaagtc

SEQ ID NO: 121568 - DNA, 9 bp, Unknown
  misc_feature (1)..( 9): Result.002 file - promoters60/1595772
ctaaaaatg

SEQ ID NO: 121569 - DNA, 9 bp, Unknown
  misc_feature (1)..( 9): Result.002 file - promoters60/1595772
ccaaaaatg

SEQ ID NO: 121570 - DNA, 9 bp, Unknown
  misc_feature (1)..( 9): Result.002 file - promoters60/1595772
ttaaaaaag

SEQ ID NO: 121571 - DNA, 9 bp, Unknown
  misc_feature (1)..( 9): Result.002 file - promoters60/1595772
ttaaaagtt

SEQ ID NO: 121572 - DNA, 11 bp, Unknown
  misc_feature (1)..( 11): Result.002 file - promoters60/1595772
ctttgaataaa

SEQ ID NO: 121573 - DNA, 11 bp, Unknown
  misc_feature (1)..( 11): Result.002 file - promoters60/1595772
atttaaataaa

SEQ ID NO: 121574 - DNA, 11 bp, Unknown
  misc_feature (1)..( 11): Result.002 file - promoters60/1595772
atttaaagaca

SEQ ID NO: 121575 - DNA, 11 bp, Unknown
  misc_feature (1)..( 11): Result.002 file - promoters60/1595772
gtttaaaacaa

SEQ ID NO: 121576 - DNA, 11 bp, Unknown
  misc_feature (1)..( 11): Result.002 file - promoters60/1595772
agaaaaacaaa

SEQ ID NO: 121577 - DNA, 10 bp, Unknown
  misc_feature (1)..( 10): Result.002 file - promoters60/1595772
ctcaacaaac

SEQ ID NO: 121578 - DNA, 10 bp, Unknown
  misc_feature (1)..( 10): Result.002 file - promoters60/1595772
aacaagaaaa

SEQ ID NO: 121579 - DNA, 10 bp, Unknown
  misc_feature (1)..( 10): Result.002 file - promoters60/1595772
aaaaacaaaa

SEQ ID NO: 121580 - DNA, 10 bp, Unknown
  misc_feature (1)..( 10): Result.002 file - promoters60/1595772
aaagacaaaa

SEQ ID NO: 121581 - DNA, 10 bp, Unknown
  misc_feature (1)..( 10): Result.002 file - promoters60/1595772
taaaacaaag

SEQ ID NO: 121582 - DNA, 10 bp, Unknown
  misc_feature (1)..( 10): Result.002 file - promoters60/1595772
caaacaaaaa

SEQ ID NO: 121583 - DNA, 10 bp, Unknown
  misc_feature (1)..( 10): Result.002 file - promoters60/1595772
aaaataaaaa

SEQ ID NO: 121584 - DNA, 10 bp, Unknown
  misc_feature (1)..( 10): Result.002 file - promoters60/1595772
aaaacaaaat

SEQ ID NO: 121585 - DNA, 10 bp, Unknown
  misc_feature (1)..( 10): Result.002 file - promoters60/1595772
aaaacaaagt

SEQ ID NO: 121586 - DNA, 11 bp, Unknown
  misc_feature (1)..( 11): Result.002 file - promoters60/1595772
ctaaattttaa

SEQ ID NO: 121587 - DNA, 11 bp, Unknown
  misc_feature (1)..( 11): Result.002 file - promoters60/1595772
aaaaattataa

SEQ ID NO: 121588 - DNA, 11 bp, Unknown
  misc_feature (1)..( 11): Result.002 file - promoters60/1595772
ataaattcatt

SEQ ID NO: 121589 - DNA, 11 bp, Unknown
  misc_feature (1)..( 11): Result.002 file - promoters60/1595772
ataaactcagt

SEQ ID NO: 121590 - DNA, 10 bp, Unknown
  misc_feature (1)..( 10): Result.002 file - promoters60/1595772
aataaaccaa

SEQ ID NO: 121591 - DNA, 10 bp, Unknown
  misc_feature (1)..( 10): Result.002 file - promoters60/1595772
tataaactaa

SEQ ID NO: 121592 - DNA, 10 bp, Unknown
  misc_feature (1)..( 10): Result.002 file - promoters60/1595772
aataaattca

SEQ ID NO: 121593 - DNA, 10 bp, Unknown
  misc_feature (1)..( 10): Result.002 file - promoters60/1595772
tataaactca

SEQ ID NO: 121594 - DNA, 7 bp, Unknown
  misc_feature (1)..( 7): Result.002 file - promoters60/1595772
aaaacaa

SEQ ID NO: 121595 - DNA, 7 bp, Unknown
  misc_feature (1)..( 7): Result.002 file - promoters60/1595772
taaacaa

SEQ ID NO: 121596 - DNA, 7 bp, Unknown
  misc_feature (1)..( 7): Result.002 file - promoters60/1595772
aaaacaa

SEQ ID NO: 121597 - DNA, 7 bp, Unknown
  misc_feature (1)..( 7): Result.002 file - promoters60/1595772
aaaacaa

SEQ ID NO: 121598 - DNA, 10 bp, Unknown
  misc_feature (1)..( 10): Result.002 file - promoters60/1595772
atataaataa

SEQ ID NO: 121599 - DNA, 10 bp, Unknown
  misc_feature (1)..( 10): Result.002 file - promoters60/1595772
ttataaatac

SEQ ID NO: 121600 - DNA, 10 bp, Unknown
  misc_feature (1)..( 10): Result.002 file - promoters60/1595772
atataagtgt

SEQ ID NO: 121601 - DNA, 10 bp, Unknown
  misc_feature (1)..( 10): Result.002 file - promoters60/1595772
ctatatataa

SEQ ID NO: 121602 - DNA, 7 bp, Unknown
  misc_feature (1)..( 7): Result.002 file - promoters60/1595829
tatttta

SEQ ID NO: 121603 - DNA, 7 bp, Unknown
  misc_feature (1)..( 7): Result.002 file - promoters60/1595829
tattttg

SEQ ID NO: 121604 - DNA, 7 bp, Unknown
  misc_feature (1)..( 7): Result.002 file - promoters60/1595829
aatttta

SEQ ID NO: 121605 - DNA, 9 bp, Unknown
  misc_feature (1)..( 9): Result.002 file - promoters60/1595829
atataaatt

SEQ ID NO: 121606 - DNA, 9 bp, Unknown
  misc_feature (1)..( 9): Result.002 file - promoters60/1595829
atatcaata

SEQ ID NO: 121607 - DNA, 9 bp, Unknown
  misc_feature (1)..( 9): Result.002 file - promoters60/1595829
taataaatt

SEQ ID NO: 121608 - DNA, 9 bp, Unknown
  misc_feature (1)..( 9): Result.002 file - promoters60/1662827
tttttttaa

SEQ ID NO: 121609 - DNA, 9 bp, Unknown
  misc_feature (1)..( 9): Result.002 file - promoters60/1662827
tttttttgg

SEQ ID NO: 121610 - DNA, 9 bp, Unknown
  misc_feature (1)..( 9): Result.002 file - promoters60/1662827
tttatttgt

SEQ ID NO: 121611 - DNA, 9 bp, Unknown
  misc_feature (1)..( 9): Result.002 file - promoters60/1662827
tatatctgt

SEQ ID NO: 121612 - DNA, 11 bp, Unknown
  misc_feature (1)..( 11): Result.002 file - promoters60/1662827
aaactatttaa

SEQ ID NO: 121613 - DNA, 11 bp, Unknown
  misc_feature (1)..( 11): Result.002 file - promoters60/1662827
cttctatataa

SEQ ID NO: 121614 - DNA, 11 bp, Unknown
  misc_feature (1)..( 11): Result.002 file - promoters60/1662827
tgactattatc

SEQ ID NO: 121615 - DNA, 11 bp, Unknown
  misc_feature (1)..( 11): Result.002 file - promoters60/1662827
tgattatcctt

SEQ ID NO: 121616 - DNA, 7 bp, Unknown
  misc_feature (1)..( 7): Result.002 file - promoters60/1662895
tgttggt

SEQ ID NO: 121617 - DNA, 7 bp, Unknown
  misc_feature (1)..( 7): Result.002 file - promoters60/1662895
tgttggt

SEQ ID NO: 121618 - DNA, 6 bp, Unknown
  misc_feature (1)..( 6): Result.002 file - promoters60/1662895
tcatgt

SEQ ID NO: 121619 - DNA, 6 bp, Unknown
  misc_feature (1)..( 6): Result.002 file - promoters60/1662895
tcatgt

SEQ ID NO: 121620 - DNA, 7 bp, Unknown
  misc_feature (1)..( 7): Result.002 file - promoters60/1662895
tttttca

SEQ ID NO: 121621 - DNA, 7 bp, Unknown
  misc_feature (1)..( 7): Result.002 file - promoters60/1662895
tttttca

SEQ ID NO: 121622 - DNA, 6 bp, Unknown
  misc_feature (1)..( 6): Result.002 file - promoters60/1662895
gttttt

SEQ ID NO: 121623 - DNA, 6 bp, Unknown
  misc_feature (1)..( 6): Result.002 file - promoters60/1662895
gttttt

SEQ ID NO: 121624 - DNA, 13 bp, Unknown
  misc_feature (1)..( 13): Result.002 file - promoters60/1662895
ctaaaaagtaatt

SEQ ID NO: 121625 - DNA, 13 bp, Unknown
  misc_feature (1)..( 13): Result.002 file - promoters60/1662895
ctaaaaagtaatt

SEQ ID NO: 121626 - DNA, 6 bp, Unknown
  misc_feature (1)..( 6): Result.002 file - promoters60/1662895
agaaaa

SEQ ID NO: 121627 - DNA, 6 bp, Unknown
  misc_feature (1)..( 6): Result.002 file - promoters60/1662895
agaaaa

SEQ ID NO: 121628 - DNA, 7 bp, Unknown
  misc_feature (1)..( 7): Result.002 file - promoters60/1662895
gtttcat

SEQ ID NO: 121629 - DNA, 7 bp, Unknown
  misc_feature (1)..( 7): Result.002 file - promoters60/1662895
gttacat

SEQ ID NO: 121630 - DNA, 7 bp, Unknown
  misc_feature (1)..( 7): Result.002 file - promoters60/1662895
tttcaga

SEQ ID NO: 121631 - DNA, 7 bp, Unknown
  misc_feature (1)..( 7): Result.002 file - promoters60/1662895
tttgaga

SEQ ID NO: 121632 - DNA, 6 bp, Unknown
  misc_feature (1)..( 6): Result.002 file - promoters60/1662895
gagaaa

SEQ ID NO: 121633 - DNA, 6 bp, Unknown
  misc_feature (1)..( 6): Result.002 file - promoters60/1662895
gagaaa

SEQ ID NO: 121634 - DNA, 7 bp, Unknown
  misc_feature (1)..( 7): Result.002 file - promoters60/1662895
tatgtaa

SEQ ID NO: 121635 - DNA, 7 bp, Unknown
  misc_feature (1)..( 7): Result.002 file - promoters60/1662895
tatataa

SEQ ID NO: 121636 - DNA, 7 bp, Unknown
  misc_feature (1)..( 7): Result.002 file - promoters60/1662895
taagagg

SEQ ID NO: 121637 - DNA, 7 bp, Unknown
  misc_feature (1)..( 7): Result.002 file - promoters60/1662895
taatagg

SEQ ID NO: 121638 - DNA, 6 bp, Unknown
  misc_feature (1)..( 6): Result.002 file - promoters60/1662895
gagatt

SEQ ID NO: 121639 - DNA, 6 bp, Unknown
  misc_feature (1)..( 6): Result.002 file - promoters60/1662895
gagatt

SEQ ID NO: 121640 - DNA, 11 bp, Unknown
  misc_feature (1)..( 11): Result.002 file - promoters60/1662895
aattgaagttt

SEQ ID NO: 121641 - DNA, 11 bp, Unknown
  misc_feature (1)..( 11): Result.002 file - promoters60/1662895
aattgaaattt

SEQ ID NO: 121642 - DNA, 14 bp, Unknown
  misc_feature (1)..( 14): Result.002 file - promoters60/1662917
tgcattagttcttc

SEQ ID NO: 121643 - DNA, 14 bp, Unknown
  misc_feature (1)..( 14): Result.002 file - promoters60/1662917
taaatttgttatgt

SEQ ID NO: 121644 - DNA, 14 bp, Unknown
  misc_feature (1)..( 14): Result.002 file - promoters60/1662917
gttattagttaacc

SEQ ID NO: 121645 - DNA, 14 bp, Unknown
  misc_feature (1)..( 14): Result.002 file - promoters60/1662917
taaattttttaaaa

SEQ ID NO: 121646 - DNA, 14 bp, Unknown
  misc_feature (1)..( 14): Result.002 file - promoters60/1662917
tataattgttaatc

SEQ ID NO: 121647 - DNA, 14 bp, Unknown
  misc_feature (1)..( 14): Result.002 file - promoters60/1662917
tatacgttttaaaa

SEQ ID NO: 121648 - DNA, 16 bp, Unknown
  misc_feature (1)..( 16): Result.002 file - promoters60/1662917
attcgaatttttcaat

SEQ ID NO: 121649 - DNA, 16 bp, Unknown
  misc_feature (1)..( 16): Result.002 file - promoters60/1662917
tttagtctattttaat

SEQ ID NO: 121650 - DNA, 16 bp, Unknown
  misc_feature (1)..( 16): Result.002 file - promoters60/1662917
atttgaaattttcata

SEQ ID NO: 121651 - DNA, 16 bp, Unknown
  misc_feature (1)..( 16): Result.002 file - promoters60/1662917
caatcccaattctaac

SEQ ID NO: 121652 - DNA, 16 bp, Unknown
  misc_feature (1)..( 16): Result.002 file - promoters60/1662917
gcgctaaacttttaaa

SEQ ID NO: 121653 - DNA, 13 bp, Unknown
  misc_feature (1)..( 13): Result.002 file - promoters60/1662917
ttttgaagaattt

SEQ ID NO: 121654 - DNA, 13 bp, Unknown
  misc_feature (1)..( 13): Result.002 file - promoters60/1662917
ttttgatgaatgt

SEQ ID NO: 121655 - DNA, 13 bp, Unknown
  misc_feature (1)..( 13): Result.002 file - promoters60/1662917
atttgctgaataa

SEQ ID NO: 121656 - DNA, 13 bp, Unknown
  misc_feature (1)..( 13): Result.002 file - promoters60/1662917
tttcgatgtataa

SEQ ID NO: 121657 - DNA, 13 bp, Unknown
  misc_feature (1)..( 13): Result.002 file - promoters60/1662917
cccttgtgaatgt

SEQ ID NO: 121658 - DNA, 19 bp, Unknown
  misc_feature (1)..( 19): Result.002 file - promoters60/1662917
ataaaaatgttagatagga

SEQ ID NO: 121659 - DNA, 19 bp, Unknown
  misc_feature (1)..( 19): Result.002 file - promoters60/1662917
tcataaattttaaaattat

SEQ ID NO: 121660 - DNA, 19 bp, Unknown
  misc_feature (1)..( 19): Result.002 file - promoters60/1662917
tgttaaatatgaatattac

SEQ ID NO: 121661 - DNA, 20 bp, Unknown
  misc_feature (1)..( 20): Result.002 file - promoters60/1662917
atgtaaattttgaaataatt

SEQ ID NO: 121662 - DNA, 20 bp, Unknown
  misc_feature (1)..( 20): Result.002 file - promoters60/1662917
ttttaaattttttaaaatat

SEQ ID NO: 121663 - DNA, 20 bp, Unknown
  misc_feature (1)..( 20): Result.002 file - promoters60/1662917
tgttaatcttttgattctaa

SEQ ID NO: 121664 - DNA, 8 bp, Unknown
  misc_feature (1)..( 8): Result.002 file - promoters60/1662917
cattaaag

SEQ ID NO: 121665 - DNA, 8 bp, Unknown
  misc_feature (1)..( 8): Result.002 file - promoters60/1662917
aattcaag

SEQ ID NO: 121666 - DNA, 8 bp, Unknown
  misc_feature (1)..( 8): Result.002 file - promoters60/1662917
cattaata

SEQ ID NO: 121667 - DNA, 8 bp, Unknown
  misc_feature (1)..( 8): Result.002 file - promoters60/1662917
gatttata

SEQ ID NO: 121668 - DNA, 10 bp, Unknown
  misc_feature (1)..( 10): Result.002 file - promoters60/1662917
cttatataaa

SEQ ID NO: 121669 - DNA, 10 bp, Unknown
  misc_feature (1)..( 10): Result.002 file - promoters60/1662917
tatatataat

SEQ ID NO: 121670 - DNA, 10 bp, Unknown
  misc_feature (1)..( 10): Result.002 file - promoters60/1662917
tataaataaa

SEQ ID NO: 121671 - DNA, 10 bp, Unknown
  misc_feature (1)..( 10): Result.002 file - promoters60/1662917
tgtatataaa

SEQ ID NO: 121672 - DNA, 10 bp, Unknown
  misc_feature (1)..( 10): Result.002 file - promoters60/1662917
tacctataaa

SEQ ID NO: 121673 - DNA, 10 bp, Unknown
  misc_feature (1)..( 10): Result.002 file - promoters60/1662917
tataaacaaa

SEQ ID NO: 121674 - DNA, 10 bp, Unknown
  misc_feature (1)..( 10): Result.002 file - promoters60/1662917
aataaccaaa

SEQ ID NO: 121675 - DNA, 10 bp, Unknown
  misc_feature (1)..( 10): Result.002 file - promoters60/1662917
tataaataaa

SEQ ID NO: 121676 - DNA, 10 bp, Unknown
  misc_feature (1)..( 10): Result.002 file - promoters60/1662917
tgtatataaa

SEQ ID NO: 121677 - DNA, 10 bp, Unknown
  misc_feature (1)..( 10): Result.002 file - promoters60/1662917
tataaatatc

SEQ ID NO: 121678 - DNA, 10 bp, Unknown
  misc_feature (1)..( 10): Result.002 file - promoters60/1662917
aaatttgtat

SEQ ID NO: 121679 - DNA, 10 bp, Unknown
  misc_feature (1)..( 10): Result.002 file - promoters60/1662917
gaatatgttt

SEQ ID NO: 121680 - DNA, 10 bp, Unknown
  misc_feature (1)..( 10): Result.002 file - promoters60/1662917
tagtatatac

SEQ ID NO: 121681 - DNA, 10 bp, Unknown
  misc_feature (1)..( 10): Result.002 file - promoters60/1662917
taatatgtac

SEQ ID NO: 121682 - DNA, 12 bp, Unknown
  misc_feature (1)..( 12): Result.002 file - promoters60/1662917
cttataattatg

SEQ ID NO: 121683 - DNA, 12 bp, Unknown
  misc_feature (1)..( 12): Result.002 file - promoters60/1662917
ataataataatg

SEQ ID NO: 121684 - DNA, 12 bp, Unknown
  misc_feature (1)..( 12): Result.002 file - promoters60/1662917
tttataagtata

SEQ ID NO: 121685 - DNA, 12 bp, Unknown
  misc_feature (1)..( 12): Result.002 file - promoters60/1662917
tttgtaacttca

SEQ ID NO: 121686 - DNA, 12 bp, Unknown
  misc_feature (1)..( 12): Result.002 file - promoters60/1662917
tttaaaagtaag

SEQ ID NO: 121687 - DNA, 12 bp, Unknown
  misc_feature (1)..( 12): Result.002 file - promoters60/1662917
gttattagttaa

SEQ ID NO: 121688 - DNA, 16 bp, Unknown
  misc_feature (1)..( 16): Result.002 file - promoters60/1662917
tgttagataggaaaaa

SEQ ID NO: 121689 - DNA, 16 bp, Unknown
  misc_feature (1)..( 16): Result.002 file - promoters60/1662917
atatggatagtaaaaa

SEQ ID NO: 121690 - DNA, 16 bp, Unknown
  misc_feature (1)..( 16): Result.002 file - promoters60/1662917
tgttaaatatgaatat

SEQ ID NO: 121691 - DNA, 16 bp, Unknown
  misc_feature (1)..( 16): Result.002 file - promoters60/1662917
tctaaaatattgttca

SEQ ID NO: 121692 - DNA, 10 bp, Unknown
  misc_feature (1)..( 10): Result.002 file - promoters60/1662917
gtaatgtaat

SEQ ID NO: 121693 - DNA, 10 bp, Unknown
  misc_feature (1)..( 10): Result.002 file - promoters60/1662917
tgaatgtata

SEQ ID NO: 121694 - DNA, 10 bp, Unknown
  misc_feature (1)..( 10): Result.002 file - promoters60/1662917
ataatgtaaa

SEQ ID NO: 121695 - DNA, 10 bp, Unknown
  misc_feature (1)..( 10): Result.002 file - promoters60/1662917
tcgatgtata

SEQ ID NO: 121696 - DNA, 10 bp, Unknown
  misc_feature (1)..( 10): Result.002 file - promoters60/1662917
tgaatgtcaa

SEQ ID NO: 121697 - DNA, 15 bp, Unknown
  misc_feature (1)..( 15): Result.002 file - promoters60/1662917
tatacgttttaaaag

SEQ ID NO: 121698 - DNA, 15 bp, Unknown
  misc_feature (1)..( 15): Result.002 file - promoters60/1662917
aacaatttttaaatt

SEQ ID NO: 121699 - DNA, 15 bp, Unknown
  misc_feature (1)..( 15): Result.002 file - promoters60/1662917
atatctttataagta

SEQ ID NO: 121700 - DNA, 15 bp, Unknown
  misc_feature (1)..( 15): Result.002 file - promoters60/1662917
ataactttatgttat

SEQ ID NO: 121701 - DNA, 8 bp, Unknown
  misc_feature (1)..( 8): Result.002 file - promoters60/1662917
aaaaatat

SEQ ID NO: 121702 - DNA, 8 bp, Unknown
  misc_feature (1)..( 8): Result.002 file - promoters60/1662917
aaatatac

SEQ ID NO: 121703 - DNA, 8 bp, Unknown
  misc_feature (1)..( 8): Result.002 file - promoters60/1662917
aaatgtca

SEQ ID NO: 121704 - DNA, 8 bp, Unknown
  misc_feature (1)..( 8): Result.002 file - promoters60/1662917
aaatgtta

SEQ ID NO: 121705 - DNA, 12 bp, Unknown
  misc_feature (1)..( 12): Result.002 file - promoters60/1662917
aaaaatatatac

SEQ ID NO: 121706 - DNA, 12 bp, Unknown
  misc_feature (1)..( 12): Result.002 file - promoters60/1662917
gatagtatatac

SEQ ID NO: 121707 - DNA, 12 bp, Unknown
  misc_feature (1)..( 12): Result.002 file - promoters60/1662917
tttaatatgtac

SEQ ID NO: 121708 - DNA, 12 bp, Unknown
  misc_feature (1)..( 12): Result.002 file - promoters60/1662917
tagaatatgttt

SEQ ID NO: 121709 - DNA, 9 bp, Unknown
  misc_feature (1)..( 9): Result.002 file - promoters60/1662917
aaaattatt

SEQ ID NO: 121710 - DNA, 9 bp, Unknown
  misc_feature (1)..( 9): Result.002 file - promoters60/1662917
taaaatatt

SEQ ID NO: 121711 - DNA, 9 bp, Unknown
  misc_feature (1)..( 9): Result.002 file - promoters60/1662917
taaaatata

SEQ ID NO: 121712 - DNA, 9 bp, Unknown
  misc_feature (1)..( 9): Result.002 file - promoters60/1662917
ttaaatatg

SEQ ID NO: 121713 - DNA, 7 bp, Unknown
  misc_feature (1)..( 7): Result.002 file - promoters60/1663024
tctctct

SEQ ID NO: 121714 - DNA, 7 bp, Unknown
  misc_feature (1)..( 7): Result.002 file - promoters60/1663024
tctttct

SEQ ID NO: 121715 - DNA, 9 bp, Unknown
  misc_feature (1)..( 9): Result.002 file - promoters60/1663024
gaaacccta

SEQ ID NO: 121716 - DNA, 9 bp, Unknown
  misc_feature (1)..( 9): Result.002 file - promoters60/1663024
gaagcccta

SEQ ID NO: 121717 - DNA, 6 bp, Unknown
  misc_feature (1)..( 6): Result.002 file - promoters60/1663024
atcgtc

SEQ ID NO: 121718 - DNA, 6 bp, Unknown
  misc_feature (1)..( 6): Result.002 file - promoters60/1663024
atcgtc

SEQ ID NO: 121719 - DNA, 7 bp, Unknown
  misc_feature (1)..( 7): Result.002 file - promoters60/1663024
gcttcca

SEQ ID NO: 121720 - DNA, 7 bp, Unknown
  misc_feature (1)..( 7): Result.002 file - promoters60/1663024
gctacca

SEQ ID NO: 121721 - DNA, 7 bp, Unknown
  misc_feature (1)..( 7): Result.002 file - promoters60/1663024
gttcatg

SEQ ID NO: 121722 - DNA, 7 bp, Unknown
  misc_feature (1)..( 7): Result.002 file - promoters60/1663024
gttgatg

SEQ ID NO: 121723 - DNA, 7 bp, Unknown
  misc_feature (1)..( 7): Result.002 file - promoters60/1663024
aagcatg

SEQ ID NO: 121724 - DNA, 7 bp, Unknown
  misc_feature (1)..( 7): Result.002 file - promoters60/1663024
aagtatg

SEQ ID NO: 121725 - DNA, 6 bp, Unknown
  misc_feature (1)..( 6): Result.002 file - promoters60/1663024
atgcgg

SEQ ID NO: 121726 - DNA, 6 bp, Unknown
  misc_feature (1)..( 6): Result.002 file - promoters60/1663024
atgcgg

SEQ ID NO: 121727 - DNA, 7 bp, Unknown
  misc_feature (1)..( 7): Result.002 file - promoters60/1663024
ggtatca

SEQ ID NO: 121728 - DNA, 7 bp, Unknown
  misc_feature (1)..( 7): Result.002 file - promoters60/1663024
ggtatca

SEQ ID NO: 121729 - DNA, 6 bp, Unknown
  misc_feature (1)..( 6): Result.002 file - promoters60/1663024
caagga

SEQ ID NO: 121730 - DNA, 6 bp, Unknown
  misc_feature (1)..( 6): Result.002 file - promoters60/1663024
caagga

SEQ ID NO: 121731 - DNA, 6 bp, Unknown
  misc_feature (1)..( 6): Result.002 file - promoters60/1663024
gtttcc

SEQ ID NO: 121732 - DNA, 6 bp, Unknown
  misc_feature (1)..( 6): Result.002 file - promoters60/1663024
gtttcc

SEQ ID NO: 121733 - DNA, 6 bp, Unknown
  misc_feature (1)..( 6): Result.002 file - promoters60/1663135
aacaaa

SEQ ID NO: 121734 - DNA, 6 bp, Unknown
  misc_feature (1)..( 6): Result.002 file - promoters60/1663135
aacaaa

SEQ ID NO: 121735 - DNA, 8 bp, Unknown
  misc_feature (1)..( 8): Result.002 file - promoters60/1663135
atactttc

SEQ ID NO: 121736 - DNA, 8 bp, Unknown
  misc_feature (1)..( 8): Result.002 file - promoters60/1663135
acactttc

SEQ ID NO: 121737 - DNA, 8 bp, Unknown
  misc_feature (1)..( 8): Result.002 file - promoters60/1663135
acattttc

SEQ ID NO: 121738 - DNA, 7 bp, Unknown
  misc_feature (1)..( 7): Result.002 file - promoters60/1663135
tttttaa

SEQ ID NO: 121739 - DNA, 7 bp, Unknown
  misc_feature (1)..( 7): Result.002 file - promoters60/1663135
tttttaa

SEQ ID NO: 121740 - DNA, 7 bp, Unknown
  misc_feature (1)..( 7): Result.002 file - promoters60/1663135
tttgtaa

SEQ ID NO: 121741 - DNA, 6 bp, Unknown
  misc_feature (1)..( 6): Result.002 file - promoters60/1663135
ttcttt

SEQ ID NO: 121742 - DNA, 6 bp, Unknown
  misc_feature (1)..( 6): Result.002 file - promoters60/1663135
ttcttt

SEQ ID NO: 121743 - DNA, 9 bp, Unknown
  misc_feature (1)..( 9): Result.002 file - promoters60/1663135
tataaaatt

SEQ ID NO: 121744 - DNA, 9 bp, Unknown
  misc_feature (1)..( 9): Result.002 file - promoters60/1663135
aataaaatt

SEQ ID NO: 121745 - DNA, 9 bp, Unknown
  misc_feature (1)..( 9): Result.002 file - promoters60/1663135
aataaatga

SEQ ID NO: 121746 - DNA, 6 bp, Unknown
  misc_feature (1)..( 6): Result.002 file - promoters60/1663135
taaata

SEQ ID NO: 121747 - DNA, 6 bp, Unknown
  misc_feature (1)..( 6): Result.002 file - promoters60/1663135
taaata

SEQ ID NO: 121748 - DNA, 10 bp, Unknown
  misc_feature (1)..( 10): Result.002 file - promoters60/1663135
caaaacaaaa

SEQ ID NO: 121749 - DNA, 10 bp, Unknown
  misc_feature (1)..( 10): Result.002 file - promoters60/1663135
caaaactagt

SEQ ID NO: 121750 - DNA, 10 bp, Unknown
  misc_feature (1)..( 10): Result.002 file - promoters60/1663135
aaaaagaaaa

SEQ ID NO: 121751 - DNA, 6 bp, Unknown
  misc_feature (1)..( 6): Result.002 file - promoters60/1663135
tgtttt

SEQ ID NO: 121752 - DNA, 6 bp, Unknown
  misc_feature (1)..( 6): Result.002 file - promoters60/1663135
tgtttt

SEQ ID NO: 121753 - DNA, 7 bp, Unknown
  misc_feature (1)..( 7): Result.002 file - promoters60/1663135
aacataa

SEQ ID NO: 121754 - DNA, 7 bp, Unknown
  misc_feature (1)..( 7): Result.002 file - promoters60/1663135
aacatag

SEQ ID NO: 121755 - DNA, 7 bp, Unknown
  misc_feature (1)..( 7): Result.002 file - promoters60/1663135
tacatag

SEQ ID NO: 121756 - DNA, 6 bp, Unknown
  misc_feature (1)..( 6): Result.002 file - promoters60/1663135
ttgtaa

SEQ ID NO: 121757 - DNA, 6 bp, Unknown
  misc_feature (1)..( 6): Result.002 file - promoters60/1663135
ttgtaa

SEQ ID NO: 121758 - DNA, 6 bp, Unknown
  misc_feature (1)..( 6): Result.002 file - promoters60/1663135
tttgga

SEQ ID NO: 121759 - DNA, 6 bp, Unknown
  misc_feature (1)..( 6): Result.002 file - promoters60/1663135
tttgga

SEQ ID NO: 121760 - DNA, 8 bp, Unknown
  misc_feature (1)..( 8): Result.002 file - promoters60/1663135
aatcaaat

SEQ ID NO: 121761 - DNA, 8 bp, Unknown
  misc_feature (1)..( 8): Result.002 file - promoters60/1663135
aataaaat

SEQ ID NO: 121762 - DNA, 6 bp, Unknown
  misc_feature (1)..( 6): Result.002 file - promoters60/1663135
tctctc

SEQ ID NO: 121763 - DNA, 6 bp, Unknown
  misc_feature (1)..( 6): Result.002 file - promoters60/1663135
tctctc

SEQ ID NO: 121764 - DNA, 6 bp, Unknown
  misc_feature (1)..( 6): Result.002 file - promoters60/1663135
tcagat

SEQ ID NO: 121765 - DNA, 6 bp, Unknown
  misc_feature (1)..( 6): Result.002 file - promoters60/1663135
tcagat

SEQ ID NO: 121766 - DNA, 7 bp, Unknown
  misc_feature (1)..( 7): Result.002 file - promoters60/1663135
tttttgt

SEQ ID NO: 121767 - DNA, 7 bp, Unknown
  misc_feature (1)..( 7): Result.002 file - promoters60/1663135
tttatgt

SEQ ID NO: 121768 - DNA, 7 bp, Unknown
  misc_feature (1)..( 7): Result.002 file - promoters60/1663135
tatgtat

SEQ ID NO: 121769 - DNA, 7 bp, Unknown
  misc_feature (1)..( 7): Result.002 file - promoters60/1663135
tatttat

SEQ ID NO: 121770 - DNA, 8 bp, Unknown
  misc_feature (1)..( 8): Result.002 file - promoters60/1663135
taacaccg

SEQ ID NO: 121771 - DNA, 8 bp, Unknown
  misc_feature (1)..( 8): Result.002 file - promoters60/1663135
taaaaccg

SEQ ID NO: 121772 - DNA, 12 bp, Unknown
  misc_feature (1)..( 12): Result.002 file - promoters60/1663168
ttcttttcatta

SEQ ID NO: 121773 - DNA, 12 bp, Unknown
  misc_feature (1)..( 12): Result.002 file - promoters60/1663168
gtctgttcgtct

SEQ ID NO: 121774 - DNA, 12 bp, Unknown
  misc_feature (1)..( 12): Result.002 file - promoters60/1663168
ttctttttgttc

SEQ ID NO: 121775 - DNA, 12 bp, Unknown
  misc_feature (1)..( 12): Result.002 file - promoters60/1663168
ccattttcaagt

SEQ ID NO: 121776 - DNA, 12 bp, Unknown
  misc_feature (1)..( 12): Result.002 file - promoters60/1663168
ttttgttggtct

SEQ ID NO: 121777 - DNA, 8 bp, Unknown
  misc_feature (1)..( 8): Result.002 file - promoters60/1663217
atgatata

SEQ ID NO: 121778 - DNA, 8 bp, Unknown
  misc_feature (1)..( 8): Result.002 file - promoters60/1663217
atgatata

SEQ ID NO: 121779 - DNA, 7 bp, Unknown
  misc_feature (1)..( 7): Result.002 file - promoters60/1663217
tataaaa

SEQ ID NO: 121780 - DNA, 7 bp, Unknown
  misc_feature (1)..( 7): Result.002 file - promoters60/1663217
tatgaaa

SEQ ID NO: 121781 - DNA, 6 bp, Unknown
  misc_feature (1)..( 6): Result.002 file - promoters60/1663217
tatgat

SEQ ID NO: 121782 - DNA, 6 bp, Unknown
  misc_feature (1)..( 6): Result.002 file - promoters60/1663217
tatgat

SEQ ID NO: 121783 - DNA, 14 bp, Unknown
  misc_feature (1)..( 14): Result.002 file - promoters60/1663217
tgacttttgtcatt

SEQ ID NO: 121784 - DNA, 14 bp, Unknown
  misc_feature (1)..( 14): Result.002 file - promoters60/1663217
tgattttcgtcatt

SEQ ID NO: 121785 - DNA, 6 bp, Unknown
  misc_feature (1)..( 6): Result.002 file - promoters60/1663217
attgta

SEQ ID NO: 121786 - DNA, 6 bp, Unknown
  misc_feature (1)..( 6): Result.002 file - promoters60/1663217
attgta

SEQ ID NO: 121787 - DNA, 7 bp, Unknown
  misc_feature (1)..( 7): Result.002 file - promoters60/1663217
aaattga

SEQ ID NO: 121788 - DNA, 7 bp, Unknown
  misc_feature (1)..( 7): Result.002 file - promoters60/1663217
aaagtga

SEQ ID NO: 121789 - DNA, 10 bp, Unknown
  misc_feature (1)..( 10): Result.002 file - promoters60/1663217
aaaccaatcc

SEQ ID NO: 121790 - DNA, 10 bp, Unknown
  misc_feature (1)..( 10): Result.002 file - promoters60/1663217
aaaccgatcc

SEQ ID NO: 121791 - DNA, 10 bp, Unknown
  misc_feature (1)..( 10): Result.002 file - promoters60/1663217
ataacaataa

SEQ ID NO: 121792 - DNA, 10 bp, Unknown
  misc_feature (1)..( 10): Result.002 file - promoters60/1663217
ataagaataa

SEQ ID NO: 121793 - DNA, 7 bp, Unknown
  misc_feature (1)..( 7): Result.002 file - promoters60/1663217
taagtaa

SEQ ID NO: 121794 - DNA, 7 bp, Unknown
  misc_feature (1)..( 7): Result.002 file - promoters60/1663217
taaataa

SEQ ID NO: 121795 - DNA, 7 bp, Unknown
  misc_feature (1)..( 7): Result.002 file - promoters60/1663217
tagaaac

SEQ ID NO: 121796 - DNA, 7 bp, Unknown
  misc_feature (1)..( 7): Result.002 file - promoters60/1663217
tagaaac

SEQ ID NO: 121797 - DNA, 6 bp, Unknown
  misc_feature (1)..( 6): Result.002 file - promoters60/1663217
ccaaat

SEQ ID NO: 121798 - DNA, 6 bp, Unknown
  misc_feature (1)..( 6): Result.002 file - promoters60/1663217
ccaaat

SEQ ID NO: 121799 - DNA, 7 bp, Unknown
  misc_feature (1)..( 7): Result.002 file - promoters60/1663217
tcataaa

SEQ ID NO: 121800 - DNA, 7 bp, Unknown
  misc_feature (1)..( 7): Result.002 file - promoters60/1663217
tcacaaa

SEQ ID NO: 121801 - DNA, 6 bp, Unknown
  misc_feature (1)..( 6): Result.002 file - promoters60/1663217
tcaaag

SEQ ID NO: 121802 - DNA, 6 bp, Unknown
  misc_feature (1)..( 6): Result.002 file - promoters60/1663217
tcaaag

SEQ ID NO: 121803 - DNA, 7 bp, Unknown
  misc_feature (1)..( 7): Result.002 file - promoters60/1663217
acgtgcc

SEQ ID NO: 121804 - DNA, 7 bp, Unknown
  misc_feature (1)..( 7): Result.002 file - promoters60/1663217
acgtgcc

SEQ ID NO: 121805 - DNA, 6 bp, Unknown
  misc_feature (1)..( 6): Result.002 file - promoters60/1663217
tcttct

SEQ ID NO: 121806 - DNA, 6 bp, Unknown
  misc_feature (1)..( 6): Result.002 file - promoters60/1663217
tcttct

SEQ ID NO: 121807 - DNA, 12 bp, Unknown
  misc_feature (1)..( 12): Result.002 file - promoters60/1663278
tatttaaaacgt

SEQ ID NO: 121808 - DNA, 12 bp, Unknown
  misc_feature (1)..( 12): Result.002 file - promoters60/1663278
tattgaaaaaga

SEQ ID NO: 121809 - DNA, 12 bp, Unknown
  misc_feature (1)..( 12): Result.002 file - promoters60/1663278
aattgaaacttt

SEQ ID NO: 121810 - DNA, 12 bp, Unknown
  misc_feature (1)..( 12): Result.002 file - promoters60/1663278
gagggaaagaga

SEQ ID NO: 121811 - DNA, 8 bp, Unknown
  misc_feature (1)..( 8): Result.002 file - promoters60/1663353
ttttgaaa

SEQ ID NO: 121812 - DNA, 8 bp, Unknown
  misc_feature (1)..( 8): Result.002 file - promoters60/1663353
ttttcaaa

SEQ ID NO: 121813 - DNA, 8 bp, Unknown
  misc_feature (1)..( 8): Result.002 file - promoters60/1663353
ttttgatg

SEQ ID NO: 121814 - DNA, 8 bp, Unknown
  misc_feature (1)..( 8): Result.002 file - promoters60/1663353
ttctaaac

SEQ ID NO: 121815 - DNA, 8 bp, Unknown
  misc_feature (1)..( 8): Result.002 file - promoters60/1663353
tatcattt

SEQ ID NO: 121816 - DNA, 8 bp, Unknown
  misc_feature (1)..( 8): Result.002 file - promoters60/1663353
aatctttt

SEQ ID NO: 121817 - DNA, 8 bp, Unknown
  misc_feature (1)..( 8): Result.002 file - promoters60/1663353
catcgttt

SEQ ID NO: 121818 - DNA, 8 bp, Unknown
  misc_feature (1)..( 8): Result.002 file - promoters60/1663353
catcgtcg

SEQ ID NO: 121819 - DNA, 9 bp, Unknown
  misc_feature (1)..( 9): Result.002 file - promoters60/1663353
tttttcttc

SEQ ID NO: 121820 - DNA, 9 bp, Unknown
  misc_feature (1)..( 9): Result.002 file - promoters60/1663353
tctttcttc

SEQ ID NO: 121821 - DNA, 9 bp, Unknown
  misc_feature (1)..( 9): Result.002 file - promoters60/1663353
tttttattc

SEQ ID NO: 121822 - DNA, 9 bp, Unknown
  misc_feature (1)..( 9): Result.002 file - promoters60/1663353
ccttacttg

SEQ ID NO: 121823 - DNA, 10 bp, Unknown
  misc_feature (1)..( 10): Result.002 file - promoters60/1663353
catgttttga

SEQ ID NO: 121824 - DNA, 10 bp, Unknown
  misc_feature (1)..( 10): Result.002 file - promoters60/1663353
tatgttctga

SEQ ID NO: 121825 - DNA, 10 bp, Unknown
  misc_feature (1)..( 10): Result.002 file - promoters60/1663353
agtgttttca

SEQ ID NO: 121826 - DNA, 10 bp, Unknown
  misc_feature (1)..( 10): Result.002 file - promoters60/1663353
tatgttgcaa

SEQ ID NO: 121827 - DNA, 8 bp, Unknown
  misc_feature (1)..( 8): Result.002 file - promoters60/1664727
tattgaaa

SEQ ID NO: 121828 - DNA, 8 bp, Unknown
  misc_feature (1)..( 8): Result.002 file - promoters60/1664727
tattaaaa

SEQ ID NO: 121829 - DNA, 8 bp, Unknown
  misc_feature (1)..( 8): Result.002 file - promoters60/1664727
aaagttga

SEQ ID NO: 121830 - DNA, 8 bp, Unknown
  misc_feature (1)..( 8): Result.002 file - promoters60/1664727
aaagttga

SEQ ID NO: 121831 - DNA, 8 bp, Unknown
  misc_feature (1)..( 8): Result.002 file - promoters60/1664727
caagtaaa

SEQ ID NO: 121832 - DNA, 8 bp, Unknown
  misc_feature (1)..( 8): Result.002 file - promoters60/1664727
aaagaaaa

SEQ ID NO: 121833 - DNA, 8 bp, Unknown
  misc_feature (1)..( 8): Result.002 file - promoters60/1664727
aaagaata

SEQ ID NO: 121834 - DNA, 8 bp, Unknown
  misc_feature (1)..( 8): Result.002 file - promoters60/1664727
aaatgaat

SEQ ID NO: 121835 - DNA, 8 bp, Unknown
  misc_feature (1)..( 8): Result.002 file - promoters60/1664727
aaataaat

SEQ ID NO: 121836 - DNA, 7 bp, Unknown
  misc_feature (1)..( 7): Result.002 file - promoters60/1664727
ataacaa

SEQ ID NO: 121837 - DNA, 7 bp, Unknown
  misc_feature (1)..( 7): Result.002 file - promoters60/1664727
ataccaa

SEQ ID NO: 121838 - DNA, 7 bp, Unknown
  misc_feature (1)..( 7): Result.002 file - promoters60/1664727
tgtattt

SEQ ID NO: 121839 - DNA, 7 bp, Unknown
  misc_feature (1)..( 7): Result.002 file - promoters60/1664727
tgttttt

SEQ ID NO: 121840 - DNA, 8 bp, Unknown
  misc_feature (1)..( 8): Result.002 file - promoters60/1664727
tggaaagg

SEQ ID NO: 121841 - DNA, 8 bp, Unknown
  misc_feature (1)..( 8): Result.002 file - promoters60/1664727
tggtaagg

SEQ ID NO: 121842 - DNA, 6 bp, Unknown
  misc_feature (1)..( 6): Result.002 file - promoters60/1664727
aaagtt

SEQ ID NO: 121843 - DNA, 6 bp, Unknown
  misc_feature (1)..( 6): Result.002 file - promoters60/1664727
aaagtt

SEQ ID NO: 121844 - DNA, 7 bp, Unknown
  misc_feature (1)..( 7): Result.002 file - promoters60/1664727
gtgaaaa

SEQ ID NO: 121845 - DNA, 7 bp, Unknown
  misc_feature (1)..( 7): Result.002 file - promoters60/1664727
gtggaaa

SEQ ID NO: 121846 - DNA, 8 bp, Unknown
  misc_feature (1)..( 8): Result.002 file - promoters60/1664727
caatgtaa

SEQ ID NO: 121847 - DNA, 8 bp, Unknown
  misc_feature (1)..( 8): Result.002 file - promoters60/1664727
caatttaa

SEQ ID NO: 121848 - DNA, 8 bp, Unknown
  misc_feature (1)..( 8): Result.002 file - promoters60/1664727
tttagctt

SEQ ID NO: 121849 - DNA, 8 bp, Unknown
  misc_feature (1)..( 8): Result.002 file - promoters60/1664727
tttatctt

SEQ ID NO: 121850 - DNA, 6 bp, Unknown
  misc_feature (1)..( 6): Result.002 file - promoters60/1664727
gaatta

SEQ ID NO: 121851 - DNA, 6 bp, Unknown
  misc_feature (1)..( 6): Result.002 file - promoters60/1664727
gaatta

SEQ ID NO: 121852 - DNA, 6 bp, Unknown
  misc_feature (1)..( 6): Result.002 file - promoters60/1664727
gcggaa

SEQ ID NO: 121853 - DNA, 6 bp, Unknown
  misc_feature (1)..( 6): Result.002 file - promoters60/1664727
gcggaa

SEQ ID NO: 121854 - DNA, 7 bp, Unknown
  misc_feature (1)..( 7): Result.002 file - promoters60/1664727
tattttc

SEQ ID NO: 121855 - DNA, 7 bp, Unknown
  misc_feature (1)..( 7): Result.002 file - promoters60/1664727
tatcttc

SEQ ID NO: 121856 - DNA, 6 bp, Unknown
  misc_feature (1)..( 6): Result.002 file - promoters60/1664727
tccttg

SEQ ID NO: 121857 - DNA, 6 bp, Unknown
  misc_feature (1)..( 6): Result.002 file - promoters60/1664727
tccttg

SEQ ID NO: 121858 - DNA, 7 bp, Unknown
  misc_feature (1)..( 7): Result.002 file - promoters60/1664727
gatatat

SEQ ID NO: 121859 - DNA, 7 bp, Unknown
  misc_feature (1)..( 7): Result.002 file - promoters60/1664727
gatgtat

SEQ ID NO: 121860 - DNA, 10 bp, Unknown
  misc_feature (1)..( 10): Result.002 file - promoters60/1664731
tttttagatt

SEQ ID NO: 121861 - DNA, 10 bp, Unknown
  misc_feature (1)..( 10): Result.002 file - promoters60/1664731
ggcttagatt

SEQ ID NO: 121862 - DNA, 10 bp, Unknown
  misc_feature (1)..( 10): Result.002 file - promoters60/1664731
ggctttgatg

SEQ ID NO: 121863 - DNA, 6 bp, Unknown
  misc_feature (1)..( 6): Result.002 file - promoters60/1664731
tttttt

SEQ ID NO: 121864 - DNA, 6 bp, Unknown
  misc_feature (1)..( 6): Result.002 file - promoters60/1664731
tttttt

SEQ ID NO: 121865 - DNA, 6 bp, Unknown
  misc_feature (1)..( 6): Result.002 file - promoters60/1664731
aaatat

SEQ ID NO: 121866 - DNA, 6 bp, Unknown
  misc_feature (1)..( 6): Result.002 file - promoters60/1664731
aaatat

SEQ ID NO: 121867 - DNA, 8 bp, Unknown
  misc_feature (1)..( 8): Result.002 file - promoters60/1664731
aaatctca

SEQ ID NO: 121868 - DNA, 8 bp, Unknown
  misc_feature (1)..( 8): Result.002 file - promoters60/1664731
aaatatca

SEQ ID NO: 121869 - DNA, 6 bp, Unknown
  misc_feature (1)..( 6): Result.002 file - promoters60/1664731
acacat

SEQ ID NO: 121870 - DNA, 6 bp, Unknown
  misc_feature (1)..( 6): Result.002 file - promoters60/1664731
acacat

SEQ ID NO: 121871 - DNA, 7 bp, Unknown
  misc_feature (1)..( 7): Result.002 file - promoters60/1664731
atgatta

SEQ ID NO: 121872 - DNA, 7 bp, Unknown
  misc_feature (1)..( 7): Result.002 file - promoters60/1664731
atgatta

SEQ ID NO: 121873 - DNA, 8 bp, Unknown
  misc_feature (1)..( 8): Result.002 file - promoters60/1664731
aatgggcc

SEQ ID NO: 121874 - DNA, 8 bp, Unknown
  misc_feature (1)..( 8): Result.002 file - promoters60/1664731
aatgggcc

SEQ ID NO: 121875 - DNA, 7 bp, Unknown
  misc_feature (1)..( 7): Result.002 file - promoters60/1664731
atgatat

SEQ ID NO: 121876 - DNA, 7 bp, Unknown
  misc_feature (1)..( 7): Result.002 file - promoters60/1664731
atgatat

SEQ ID NO: 121877 - DNA, 6 bp, Unknown
  misc_feature (1)..( 6): Result.002 file - promoters60/1664731
ttttaa

SEQ ID NO: 121878 - DNA, 6 bp, Unknown
  misc_feature (1)..( 6): Result.002 file - promoters60/1664731
ttttaa

SEQ ID NO: 121879 - DNA, 7 bp, Unknown
  misc_feature (1)..( 7): Result.002 file - promoters60/1664731
ttttaga

SEQ ID NO: 121880 - DNA, 7 bp, Unknown
  misc_feature (1)..( 7): Result.002 file - promoters60/1664731
tttgaga

SEQ ID NO: 121881 - DNA, 7 bp, Unknown
  misc_feature (1)..( 7): Result.002 file - promoters60/1664731
gtaaaat

SEQ ID NO: 121882 - DNA, 7 bp, Unknown
  misc_feature (1)..( 7): Result.002 file - promoters60/1664731
gtaaaat

SEQ ID NO: 121883 - DNA, 8 bp, Unknown
  misc_feature (1)..( 8): Result.002 file - promoters60/1664870
tttgattc

SEQ ID NO: 121884 - DNA, 8 bp, Unknown
  misc_feature (1)..( 8): Result.002 file - promoters60/1664870
attgattc

SEQ ID NO: 121885 - DNA, 8 bp, Unknown
  misc_feature (1)..( 8): Result.002 file - promoters60/1664870
tttgtttc

SEQ ID NO: 121886 - DNA, 7 bp, Unknown
  misc_feature (1)..( 7): Result.002 file - promoters60/1664870
tacaaat

SEQ ID NO: 121887 - DNA, 7 bp, Unknown
  misc_feature (1)..( 7): Result.002 file - promoters60/1664870
aacaaat

SEQ ID NO: 121888 - DNA, 7 bp, Unknown
  misc_feature (1)..( 7): Result.002 file - promoters60/1664870
aacaaac

SEQ ID NO: 121889 - DNA, 9 bp, Unknown
  misc_feature (1)..( 9): Result.002 file - promoters60/1664870
taagtaaaa

SEQ ID NO: 121890 - DNA, 9 bp, Unknown
  misc_feature (1)..( 9): Result.002 file - promoters60/1664870
taactaaaa

SEQ ID NO: 121891 - DNA, 9 bp, Unknown
  misc_feature (1)..( 9): Result.002 file - promoters60/1664870
taatgactt

SEQ ID NO: 121892 - DNA, 8 bp, Unknown
  misc_feature (1)..( 8): Result.002 file - promoters60/1664870
taaaaacc

SEQ ID NO: 121893 - DNA, 8 bp, Unknown
  misc_feature (1)..( 8): Result.002 file - promoters60/1664870
taataact

SEQ ID NO: 121894 - DNA, 8 bp, Unknown
  misc_feature (1)..( 8): Result.002 file - promoters60/1664870
taatgact

SEQ ID NO: 121895 - DNA, 14 bp, Unknown
  misc_feature (1)..( 14): Result.002 file - promoters60/1664931
aaagcaaaacacat

SEQ ID NO: 121896 - DNA, 14 bp, Unknown
  misc_feature (1)..( 14): Result.002 file - promoters60/1664931
tccacaaaacatcc

SEQ ID NO: 121897 - DNA, 14 bp, Unknown
  misc_feature (1)..( 14): Result.002 file - promoters60/1664931
tacataaaacaaaa

SEQ ID NO: 121898 - DNA, 14 bp, Unknown
  misc_feature (1)..( 14): Result.002 file - promoters60/1664931
tggagcaaataaat

SEQ ID NO: 121899 - DNA, 14 bp, Unknown
  misc_feature (1)..( 14): Result.002 file - promoters60/1664931
tccacgaaactact

SEQ ID NO: 121900 - DNA, 14 bp, Unknown
  misc_feature (1)..( 14): Result.002 file - promoters60/1664931
tccacgcccaaatc

SEQ ID NO: 121901 - DNA, 8 bp, Unknown
  misc_feature (1)..( 8): Result.002 file - promoters60/1665056
ttttttct

SEQ ID NO: 121902 - DNA, 8 bp, Unknown
  misc_feature (1)..( 8): Result.002 file - promoters60/1665056
aattttct

SEQ ID NO: 121903 - DNA, 8 bp, Unknown
  misc_feature (1)..( 8): Result.002 file - promoters60/1665056
aattttca

SEQ ID NO: 121904 - DNA, 12 bp, Unknown
  misc_feature (1)..( 12): Result.002 file - promoters60/1665056
cataaaattcaa

SEQ ID NO: 121905 - DNA, 12 bp, Unknown
  misc_feature (1)..( 12): Result.002 file - promoters60/1665056
tctaatattcaa

SEQ ID NO: 121906 - DNA, 12 bp, Unknown
  misc_feature (1)..( 12): Result.002 file - promoters60/1665056
tataaaaaattg

SEQ ID NO: 121907 - DNA, 12 bp, Unknown
  misc_feature (1)..( 12): Result.002 file - promoters60/1665056
tatcaaatgaca

SEQ ID NO: 121908 - DNA, 14 bp, Unknown
  misc_feature (1)..( 14): Result.002 file - promoters60/1665056
tggaaaaaaataac

SEQ ID NO: 121909 - DNA, 14 bp, Unknown
  misc_feature (1)..( 14): Result.002 file - promoters60/1665056
tacaaagaaataac

SEQ ID NO: 121910 - DNA, 14 bp, Unknown
  misc_feature (1)..( 14): Result.002 file - promoters60/1665056
ttataaaaaattga

SEQ ID NO: 121911 - DNA, 14 bp, Unknown
  misc_feature (1)..( 14): Result.002 file - promoters60/1665056
tatacaaaagcttc

SEQ ID NO: 121912 - DNA, 9 bp, Unknown
  misc_feature (1)..( 9): Result.002 file - promoters60/1665056
cttaagtca

SEQ ID NO: 121913 - DNA, 9 bp, Unknown
  misc_feature (1)..( 9): Result.002 file - promoters60/1665056
cttaattca

SEQ ID NO: 121914 - DNA, 9 bp, Unknown
  misc_feature (1)..( 9): Result.002 file - promoters60/1665056
attaattaa

SEQ ID NO: 121915 - DNA, 8 bp, Unknown
  misc_feature (1)..( 8): Result.002 file - promoters60/1665056
tttaccag

SEQ ID NO: 121916 - DNA, 8 bp, Unknown
  misc_feature (1)..( 8): Result.002 file - promoters60/1665056
tttgccag

SEQ ID NO: 121917 - DNA, 8 bp, Unknown
  misc_feature (1)..( 8): Result.002 file - promoters60/1665056
tttgtacg

SEQ ID NO: 121918 - DNA, 7 bp, Unknown
  misc_feature (1)..( 7): Result.002 file - promoters60/1665080
tttgtta

SEQ ID NO: 121919 - DNA, 7 bp, Unknown
  misc_feature (1)..( 7): Result.002 file - promoters60/1665080
tttgttt

SEQ ID NO: 121920 - DNA, 7 bp, Unknown
  misc_feature (1)..( 7): Result.002 file - promoters60/1665080
tttctta

SEQ ID NO: 121921 - DNA, 9 bp, Unknown
  misc_feature (1)..( 9): Result.002 file - promoters60/1665080
cttgatttg

SEQ ID NO: 121922 - DNA, 9 bp, Unknown
  misc_feature (1)..( 9): Result.002 file - promoters60/1665080
ctttatttg

SEQ ID NO: 121923 - DNA, 10 bp, Unknown
  misc_feature (1)..( 10): Result.002 file - promoters60/1665080
tccctttttt

SEQ ID NO: 121924 - DNA, 10 bp, Unknown
  misc_feature (1)..( 10): Result.002 file - promoters60/1665080
cttctttttt

SEQ ID NO: 121925 - DNA, 10 bp, Unknown
  misc_feature (1)..( 10): Result.002 file - promoters60/1665080
tcccttttgg

SEQ ID NO: 121926 - DNA, 7 bp, Unknown
  misc_feature (1)..( 7): Result.002 file - promoters60/1665080
aaggata

SEQ ID NO: 121927 - DNA, 7 bp, Unknown
  misc_feature (1)..( 7): Result.002 file - promoters60/1665080
aaggata

SEQ ID NO: 121928 - DNA, 9 bp, Unknown
  misc_feature (1)..( 9): Result.002 file - promoters60/1665080
agcaaaaaa

SEQ ID NO: 121929 - DNA, 9 bp, Unknown
  misc_feature (1)..( 9): Result.002 file - promoters60/1665080
agcagaaaa

SEQ ID NO: 121930 - DNA, 9 bp, Unknown
  misc_feature (1)..( 9): Result.002 file - promoters60/1665080
atgttcttt

SEQ ID NO: 121931 - DNA, 9 bp, Unknown
  misc_feature (1)..( 9): Result.002 file - promoters60/1665080
atgttattt

SEQ ID NO: 121932 - DNA, 6 bp, Unknown
  misc_feature (1)..( 6): Result.002 file - promoters60/1665080
tataca

SEQ ID NO: 121933 - DNA, 6 bp, Unknown
  misc_feature (1)..( 6): Result.002 file - promoters60/1665080
tataca

SEQ ID NO: 121934 - DNA, 9 bp, Unknown
  misc_feature (1)..( 9): Result.002 file - promoters60/1665080
attcaacta

SEQ ID NO: 121935 - DNA, 9 bp, Unknown
  misc_feature (1)..( 9): Result.002 file - promoters60/1665080
attaaacta

SEQ ID NO: 121936 - DNA, 9 bp, Unknown
  misc_feature (1)..( 9): Result.002 file - promoters60/1665080
tttaaacca

SEQ ID NO: 121937 - DNA, 6 bp, Unknown
  misc_feature (1)..( 6): Result.002 file - promoters60/1665080
tttttc

SEQ ID NO: 121938 - DNA, 6 bp, Unknown
  misc_feature (1)..( 6): Result.002 file - promoters60/1665080
tttttc

SEQ ID NO: 121939 - DNA, 6 bp, Unknown
  misc_feature (1)..( 6): Result.002 file - promoters60/1665080
ggaaca

SEQ ID NO: 121940 - DNA, 6 bp, Unknown
  misc_feature (1)..( 6): Result.002 file - promoters60/1665080
ggaaca

SEQ ID NO: 121941 - DNA, 10 bp, Unknown
  misc_feature (1)..( 10): Result.002 file - promoters60/1665080
gaacatgttc

SEQ ID NO: 121942 - DNA, 10 bp, Unknown
  misc_feature (1)..( 10): Result.002 file - promoters60/1665080
gaacatgttc

SEQ ID NO: 121943 - DNA, 9 bp, Unknown
  misc_feature (1)..( 9): Result.002 file - promoters60/1665080
aatatttat

SEQ ID NO: 121944 - DNA, 9 bp, Unknown
  misc_feature (1)..( 9): Result.002 file - promoters60/1665080
aatagttat

SEQ ID NO: 121945 - DNA, 9 bp, Unknown
  misc_feature (1)..( 9): Result.002 file - promoters60/1665080
tcttccaag

SEQ ID NO: 121946 - DNA, 9 bp, Unknown
  misc_feature (1)..( 9): Result.002 file - promoters60/1665080
tcttccaag

SEQ ID NO: 121947 - DNA, 7 bp, Unknown
  misc_feature (1)..( 7): Result.002 file - promoters60/1665080
tagataa

SEQ ID NO: 121948 - DNA, 7 bp, Unknown
  misc_feature (1)..( 7): Result.002 file - promoters60/1665080
taggtaa

SEQ ID NO: 121949 - DNA, 6 bp, Unknown
  misc_feature (1)..( 6): Result.002 file - promoters60/1665080
cttttt

SEQ ID NO: 121950 - DNA, 6 bp, Unknown
  misc_feature (1)..( 6): Result.002 file - promoters60/1665080
cttttt

SEQ ID NO: 121951 - DNA, 7 bp, Unknown
  misc_feature (1)..( 7): Result.002 file - promoters60/1665080
tacaaaa

SEQ ID NO: 121952 - DNA, 7 bp, Unknown
  misc_feature (1)..( 7): Result.002 file - promoters60/1665080
tacaaaa

SEQ ID NO: 121953 - DNA, 7 bp, Unknown
  misc_feature (1)..( 7): Result.002 file - promoters60/1665080
gcaaaaa

SEQ ID NO: 121954 - DNA, 7 bp, Unknown
  misc_feature (1)..( 7): Result.002 file - promoters60/1665080
gcaaaaa

SEQ ID NO: 121955 - DNA, 7 bp, Unknown
  misc_feature (1)..( 7): Result.002 file - promoters60/1665080
tttgttt

SEQ ID NO: 121956 - DNA, 7 bp, Unknown
  misc_feature (1)..( 7): Result.002 file - promoters60/1665080
tttgttt

SEQ ID NO: 121957 - DNA, 6 bp, Unknown
  misc_feature (1)..( 6): Result.002 file - promoters60/1665080
ttcttt

SEQ ID NO: 121958 - DNA, 6 bp, Unknown
  misc_feature (1)..( 6): Result.002 file - promoters60/1665080
ttcttt

SEQ ID NO: 121959 - DNA, 12 bp, Unknown
  misc_feature (1)..( 12): Result.002 file - promoters60/1665080
aaaaatatatat

SEQ ID NO: 121960 - DNA, 12 bp, Unknown
  misc_feature (1)..( 12): Result.002 file - promoters60/1665080
aaaaatatttat

SEQ ID NO: 121961 - DNA, 6 bp, Unknown
  misc_feature (1)..( 6): Result.002 file - promoters60/1665080
gggcct

SEQ ID NO: 121962 - DNA, 6 bp, Unknown
  misc_feature (1)..( 6): Result.002 file - promoters60/1665080
gggcct

SEQ ID NO: 121963 - DNA, 6 bp, Unknown
  misc_feature (1)..( 6): Result.002 file - promoters60/1665112
ttttat

SEQ ID NO: 121964 - DNA, 6 bp, Unknown
  misc_feature (1)..( 6): Result.002 file - promoters60/1665112
ttttat

SEQ ID NO: 121965 - DNA, 6 bp, Unknown
  misc_feature (1)..( 6): Result.002 file - promoters60/1665112
gtcatt

SEQ ID NO: 121966 - DNA, 6 bp, Unknown
  misc_feature (1)..( 6): Result.002 file - promoters60/1665112
gtcatt

SEQ ID NO: 121967 - DNA, 9 bp, Unknown
  misc_feature (1)..( 9): Result.002 file - promoters60/1665112
ttaaaaaca

SEQ ID NO: 121968 - DNA, 9 bp, Unknown
  misc_feature (1)..( 9): Result.002 file - promoters60/1665112
ttagaaaca

SEQ ID NO: 121969 - DNA, 7 bp, Unknown
  misc_feature (1)..( 7): Result.002 file - promoters60/1665112
aaagatt

SEQ ID NO: 121970 - DNA, 7 bp, Unknown
  misc_feature (1)..( 7): Result.002 file - promoters60/1665112
aaagatt

SEQ ID NO: 121971 - DNA, 6 bp, Unknown
  misc_feature (1)..( 6): Result.002 file - promoters60/1665112
tttaaa

SEQ ID NO: 121972 - DNA, 6 bp, Unknown
  misc_feature (1)..( 6): Result.002 file - promoters60/1665112
tttaaa

SEQ ID NO: 121973 - DNA, 6 bp, Unknown
  misc_feature (1)..( 6): Result.002 file - promoters60/1665112
ttttta

SEQ ID NO: 121974 - DNA, 6 bp, Unknown
  misc_feature (1)..( 6): Result.002 file - promoters60/1665112
ttttta

SEQ ID NO: 121975 - DNA, 7 bp, Unknown
  misc_feature (1)..( 7): Result.002 file - promoters60/1665112
aagtttt

SEQ ID NO: 121976 - DNA, 7 bp, Unknown
  misc_feature (1)..( 7): Result.002 file - promoters60/1665112
aagattt

SEQ ID NO: 121977 - DNA, 7 bp, Unknown
  misc_feature (1)..( 7): Result.002 file - promoters60/1665112
ataattt

SEQ ID NO: 121978 - DNA, 7 bp, Unknown
  misc_feature (1)..( 7): Result.002 file - promoters60/1665112
atatttt

SEQ ID NO: 121979 - DNA, 8 bp, Unknown
  misc_feature (1)..( 8): Result.002 file - promoters60/1665112
aaggaaag

SEQ ID NO: 121980 - DNA, 8 bp, Unknown
  misc_feature (1)..( 8): Result.002 file - promoters60/1665112
aaggtaag

SEQ ID NO: 121981 - DNA, 6 bp, Unknown
  misc_feature (1)..( 6): Result.002 file - promoters60/1665112
atttat

SEQ ID NO: 121982 - DNA, 6 bp, Unknown
  misc_feature (1)..( 6): Result.002 file - promoters60/1665112
atttat

SEQ ID NO: 121983 - DNA, 6 bp, Unknown
  misc_feature (1)..( 6): Result.002 file - promoters60/1665112
atgatc

SEQ ID NO: 121984 - DNA, 6 bp, Unknown
  misc_feature (1)..( 6): Result.002 file - promoters60/1665112
atgatc

SEQ ID NO: 121985 - DNA, 7 bp, Unknown
  misc_feature (1)..( 7): Result.002 file - promoters60/1665112
gttggag

SEQ ID NO: 121986 - DNA, 7 bp, Unknown
  misc_feature (1)..( 7): Result.002 file - promoters60/1665112
gttagag

SEQ ID NO: 121987 - DNA, 6 bp, Unknown
  misc_feature (1)..( 6): Result.002 file - promoters60/1665112
tcatat

SEQ ID NO: 121988 - DNA, 6 bp, Unknown
  misc_feature (1)..( 6): Result.002 file - promoters60/1665112
tcatat

SEQ ID NO: 121989 - DNA, 7 bp, Unknown
  misc_feature (1)..( 7): Result.002 file - promoters60/1665112
ttaggtg

SEQ ID NO: 121990 - DNA, 7 bp, Unknown
  misc_feature (1)..( 7): Result.002 file - promoters60/1665112
ttatgtg

SEQ ID NO: 121991 - DNA, 8 bp, Unknown
  misc_feature (1)..( 8): Result.002 file - promoters60/1665112
atatatac

SEQ ID NO: 121992 - DNA, 8 bp, Unknown
  misc_feature (1)..( 8): Result.002 file - promoters60/1665112
atacatac

SEQ ID NO: 121993 - DNA, 6 bp, Unknown
  misc_feature (1)..( 6): Result.002 file - promoters60/1665112
ttcaaa

SEQ ID NO: 121994 - DNA, 6 bp, Unknown
  misc_feature (1)..( 6): Result.002 file - promoters60/1665112
ttcaaa

SEQ ID NO: 121995 - DNA, 9 bp, Unknown
  misc_feature (1)..( 9): Result.002 file - promoters60/1673798
aaactaaaa

SEQ ID NO: 121996 - DNA, 9 bp, Unknown
  misc_feature (1)..( 9): Result.002 file - promoters60/1673798
aaaataaaa

SEQ ID NO: 121997 - DNA, 9 bp, Unknown
  misc_feature (1)..( 9): Result.002 file - promoters60/1673798
aaagtaaac

SEQ ID NO: 121998 - DNA, 9 bp, Unknown
  misc_feature (1)..( 9): Result.002 file - promoters60/1673798
gcaataaat

SEQ ID NO: 121999 - DNA, 9 bp, Unknown
  misc_feature (1)..( 9): Result.002 file - promoters60/1673798
aaacaaaat

SEQ ID NO: 122000 - DNA, 7 bp, Unknown
  misc_feature (1)..( 7): Result.002 file - promoters60/1673806
ttcttta

SEQ ID NO: 122001 - DNA, 7 bp, Unknown
  misc_feature (1)..( 7): Result.002 file - promoters60/1673806
ttcgtta

SEQ ID NO: 122002 - DNA, 7 bp, Unknown
  misc_feature (1)..( 7): Result.002 file - promoters60/1673806
ttttttt

SEQ ID NO: 122003 - DNA, 7 bp, Unknown
  misc_feature (1)..( 7): Result.002 file - promoters60/1673806
ctcgtta

SEQ ID NO: 122004 - DNA, 8 bp, Unknown
  misc_feature (1)..( 8): Result.002 file - promoters60/1673806
taaaaaat

SEQ ID NO: 122005 - DNA, 8 bp, Unknown
  misc_feature (1)..( 8): Result.002 file - promoters60/1673806
aaaataat

SEQ ID NO: 122006 - DNA, 8 bp, Unknown
  misc_feature (1)..( 8): Result.002 file - promoters60/1673806
taaagaat

SEQ ID NO: 122007 - DNA, 8 bp, Unknown
  misc_feature (1)..( 8): Result.002 file - promoters60/1673806
tgaaaaat

SEQ ID NO: 122008 - DNA, 11 bp, Unknown
  misc_feature (1)..( 11): Result.002 file - promoters60/1673806
cgacaattttg

SEQ ID NO: 122009 - DNA, 11 bp, Unknown
  misc_feature (1)..( 11): Result.002 file - promoters60/1673806
atacaattttg

SEQ ID NO: 122010 - DNA, 11 bp, Unknown
  misc_feature (1)..( 11): Result.002 file - promoters60/1673806
tgaaaatttta

SEQ ID NO: 122011 - DNA, 11 bp, Unknown
  misc_feature (1)..( 11): Result.002 file - promoters60/1673806
atagaatcctt

SEQ ID NO: 122012 - DNA, 11 bp, Unknown
  misc_feature (1)..( 11): Result.002 file - promoters60/1673806
aaataaattat

SEQ ID NO: 122013 - DNA, 11 bp, Unknown
  misc_feature (1)..( 11): Result.002 file - promoters60/1673806
acataatttat

SEQ ID NO: 122014 - DNA, 11 bp, Unknown
  misc_feature (1)..( 11): Result.002 file - promoters60/1673806
tcataattcga

SEQ ID NO: 122015 - DNA, 11 bp, Unknown
  misc_feature (1)..( 11): Result.002 file - promoters60/1673806
acattattgat

SEQ ID NO: 122016 - DNA, 8 bp, Unknown
  misc_feature (1)..( 8): Result.002 file - promoters60/1673826
ttctgatt

SEQ ID NO: 122017 - DNA, 8 bp, Unknown
  misc_feature (1)..( 8): Result.002 file - promoters60/1673826
ttctgatt

SEQ ID NO: 122018 - DNA, 8 bp, Unknown
  misc_feature (1)..( 8): Result.002 file - promoters60/1673826
atagattc

SEQ ID NO: 122019 - DNA, 8 bp, Unknown
  misc_feature (1)..( 8): Result.002 file - promoters60/1673826
ataggttc

SEQ ID NO: 122020 - DNA, 6 bp, Unknown
  misc_feature (1)..( 6): Result.002 file - promoters60/1673826
tttgta

SEQ ID NO: 122021 - DNA, 6 bp, Unknown
  misc_feature (1)..( 6): Result.002 file - promoters60/1673826
tttgta

SEQ ID NO: 122022 - DNA, 6 bp, Unknown
  misc_feature (1)..( 6): Result.002 file - promoters60/1673826
attatt

SEQ ID NO: 122023 - DNA, 6 bp, Unknown
  misc_feature (1)..( 6): Result.002 file - promoters60/1673826
attatt

SEQ ID NO: 122024 - DNA, 6 bp, Unknown
  misc_feature (1)..( 6): Result.002 file - promoters60/1673826
gtcaaa

SEQ ID NO: 122025 - DNA, 6 bp, Unknown
  misc_feature (1)..( 6): Result.002 file - promoters60/1673826
gtcaaa

SEQ ID NO: 122026 - DNA, 8 bp, Unknown
  misc_feature (1)..( 8): Result.002 file - promoters60/1673826
ttgaactt

SEQ ID NO: 122027 - DNA, 8 bp, Unknown
  misc_feature (1)..( 8): Result.002 file - promoters60/1673826
ttgaactt

SEQ ID NO: 122028 - DNA, 8 bp, Unknown
  misc_feature (1)..( 8): Result.002 file - promoters60/1673826
ttagtaat

SEQ ID NO: 122029 - DNA, 8 bp, Unknown
  misc_feature (1)..( 8): Result.002 file - promoters60/1673826
ttattaat

SEQ ID NO: 122030 - DNA, 7 bp, Unknown
  misc_feature (1)..( 7): Result.002 file - promoters60/1673826
tatataa

SEQ ID NO: 122031 - DNA, 7 bp, Unknown
  misc_feature (1)..( 7): Result.002 file - promoters60/1673826
tatttaa

SEQ ID NO: 122032 - DNA, 6 bp, Unknown
  misc_feature (1)..( 6): Result.002 file - promoters60/1673826
taaatt

SEQ ID NO: 122033 - DNA, 6 bp, Unknown
  misc_feature (1)..( 6): Result.002 file - promoters60/1673826
taaatt

SEQ ID NO: 122034 - DNA, 6 bp, Unknown
  misc_feature (1)..( 6): Result.002 file - promoters60/1673826
aaatat

SEQ ID NO: 122035 - DNA, 6 bp, Unknown
  misc_feature (1)..( 6): Result.002 file - promoters60/1673826
aaatat

SEQ ID NO: 122036 - DNA, 8 bp, Unknown
  misc_feature (1)..( 8): Result.002 file - promoters60/1673826
tataacaa

SEQ ID NO: 122037 - DNA, 8 bp, Unknown
  misc_feature (1)..( 8): Result.002 file - promoters60/1673826
tatcacaa

SEQ ID NO: 122038 - DNA, 7 bp, Unknown
  misc_feature (1)..( 7): Result.002 file - promoters60/1673826
aagtaat

SEQ ID NO: 122039 - DNA, 7 bp, Unknown
  misc_feature (1)..( 7): Result.002 file - promoters60/1673826
aagaaat

SEQ ID NO: 122040 - DNA, 6 bp, Unknown
  misc_feature (1)..( 6): Result.002 file - promoters60/1673826
attttt

SEQ ID NO: 122041 - DNA, 6 bp, Unknown
  misc_feature (1)..( 6): Result.002 file - promoters60/1673826
attttt

SEQ ID NO: 122042 - DNA, 7 bp, Unknown
  misc_feature (1)..( 7): Result.002 file - promoters60/1673826
aaagata

SEQ ID NO: 122043 - DNA, 7 bp, Unknown
  misc_feature (1)..( 7): Result.002 file - promoters60/1673826
aaaaata

SEQ ID NO: 122044 - DNA, 9 bp, Unknown
  misc_feature (1)..( 9): Result.002 file - promoters60/1673847
aaataaaat

SEQ ID NO: 122045 - DNA, 9 bp, Unknown
  misc_feature (1)..( 9): Result.002 file - promoters60/1673847
aaataaaat

SEQ ID NO: 122046 - DNA, 8 bp, Unknown
  misc_feature (1)..( 8): Result.002 file - promoters60/1673847
attaaaaa

SEQ ID NO: 122047 - DNA, 8 bp, Unknown
  misc_feature (1)..( 8): Result.002 file - promoters60/1673847
attgaaaa

SEQ ID NO: 122048 - DNA, 10 bp, Unknown
  misc_feature (1)..( 10): Result.002 file - promoters60/1673847
gtaataacac

SEQ ID NO: 122049 - DNA, 10 bp, Unknown
  misc_feature (1)..( 10): Result.002 file - promoters60/1673847
gtaatgacac

SEQ ID NO: 122050 - DNA, 6 bp, Unknown
  misc_feature (1)..( 6): Result.002 file - promoters60/1673847
taaaaa

SEQ ID NO: 122051 - DNA, 6 bp, Unknown
  misc_feature (1)..( 6): Result.002 file - promoters60/1673847
taaaaa

SEQ ID NO: 122052 - DNA, 6 bp, Unknown
  misc_feature (1)..( 6): Result.002 file - promoters60/1673847
gattaa

SEQ ID NO: 122053 - DNA, 6 bp, Unknown
  misc_feature (1)..( 6): Result.002 file - promoters60/1673847
gattaa

SEQ ID NO: 122054 - DNA, 7 bp, Unknown
  misc_feature (1)..( 7): Result.002 file - promoters60/1673847
aatataa

SEQ ID NO: 122055 - DNA, 7 bp, Unknown
  misc_feature (1)..( 7): Result.002 file - promoters60/1673847
aatttaa

SEQ ID NO: 122056 - DNA, 11 bp, Unknown
  misc_feature (1)..( 11): Result.002 file - promoters60/1673847
atacatcttta

SEQ ID NO: 122057 - DNA, 11 bp, Unknown
  misc_feature (1)..( 11): Result.002 file - promoters60/1673847
atagatcttat

SEQ ID NO: 122058 - DNA, 11 bp, Unknown
  misc_feature (1)..( 11): Result.002 file - promoters60/1673847
tctaatcttat

SEQ ID NO: 122059 - DNA, 7 bp, Unknown
  misc_feature (1)..( 7): Result.002 file - promoters60/1673847
ttcaata

SEQ ID NO: 122060 - DNA, 7 bp, Unknown
  misc_feature (1)..( 7): Result.002 file - promoters60/1673847
ttcaata

SEQ ID NO: 122061 - DNA, 8 bp, Unknown
  misc_feature (1)..( 8): Result.002 file - promoters60/1673847
atattttt

SEQ ID NO: 122062 - DNA, 8 bp, Unknown
  misc_feature (1)..( 8): Result.002 file - promoters60/1673847
atatgttt

SEQ ID NO: 122063 - DNA, 6 bp, Unknown
  misc_feature (1)..( 6): Result.002 file - promoters60/1673847
ctatct

SEQ ID NO: 122064 - DNA, 6 bp, Unknown
  misc_feature (1)..( 6): Result.002 file - promoters60/1673847
ctatct

SEQ ID NO: 122065 - DNA, 6 bp, Unknown
  misc_feature (1)..( 6): Result.002 file - promoters60/1673847
acttgt

SEQ ID NO: 122066 - DNA, 6 bp, Unknown
  misc_feature (1)..( 6): Result.002 file - promoters60/1673847
acttgt

SEQ ID NO: 122067 - DNA, 6 bp, Unknown
  misc_feature (1)..( 6): Result.002 file - promoters60/1673847
tataaa

SEQ ID NO: 122068 - DNA, 6 bp, Unknown
  misc_feature (1)..( 6): Result.002 file - promoters60/1673847
tataaa

SEQ ID NO: 122069 - DNA, 8 bp, Unknown
  misc_feature (1)..( 8): Result.002 file - promoters60/1673847
taaccttg

SEQ ID NO: 122070 - DNA, 8 bp, Unknown
  misc_feature (1)..( 8): Result.002 file - promoters60/1673847
taagcttg

SEQ ID NO: 122071 - DNA, 7 bp, Unknown
  misc_feature (1)..( 7): Result.002 file - promoters60/1673847
tttgtat

SEQ ID NO: 122072 - DNA, 7 bp, Unknown
  misc_feature (1)..( 7): Result.002 file - promoters60/1673847
tttgtat

SEQ ID NO: 122073 - DNA, 7 bp, Unknown
  misc_feature (1)..( 7): Result.002 file - promoters60/1673847
tctggtt

SEQ ID NO: 122074 - DNA, 7 bp, Unknown
  misc_feature (1)..( 7): Result.002 file - promoters60/1673847
tctggtt

SEQ ID NO: 122075 - DNA, 6 bp, Unknown
  misc_feature (1)..( 6): Result.002 file - promoters60/1673847
tttgag

SEQ ID NO: 122076 - DNA, 6 bp, Unknown
  misc_feature (1)..( 6): Result.002 file - promoters60/1673847
tttgag

SEQ ID NO: 122077 - DNA, 7 bp, Unknown
  misc_feature (1)..( 7): Result.002 file - promoters60/1673849
atagttt

SEQ ID NO: 122078 - DNA, 7 bp, Unknown
  misc_feature (1)..( 7): Result.002 file - promoters60/1673849
atatttt

SEQ ID NO: 122079 - DNA, 9 bp, Unknown
  misc_feature (1)..( 9): Result.002 file - promoters60/1673849
tcataaaaa

SEQ ID NO: 122080 - DNA, 9 bp, Unknown
  misc_feature (1)..( 9): Result.002 file - promoters60/1673849
tcatataaa

SEQ ID NO: 122081 - DNA, 7 bp, Unknown
  misc_feature (1)..( 7): Result.002 file - promoters60/1673849
aaaaatt

SEQ ID NO: 122082 - DNA, 7 bp, Unknown
  misc_feature (1)..( 7): Result.002 file - promoters60/1673849
aaacatt

SEQ ID NO: 122083 - DNA, 6 bp, Unknown
  misc_feature (1)..( 6): Result.002 file - promoters60/1673849
tatatt

SEQ ID NO: 122084 - DNA, 6 bp, Unknown
  misc_feature (1)..( 6): Result.002 file - promoters60/1673849
tatatt

SEQ ID NO: 122085 - DNA, 6 bp, Unknown
  misc_feature (1)..( 6): Result.002 file - promoters60/1673849
aaaatc

SEQ ID NO: 122086 - DNA, 6 bp, Unknown
  misc_feature (1)..( 6): Result.002 file - promoters60/1673849
aaaatc

SEQ ID NO: 122087 - DNA, 7 bp, Unknown
  misc_feature (1)..( 7): Result.002 file - promoters60/1673849
tgtctaa

SEQ ID NO: 122088 - DNA, 7 bp, Unknown
  misc_feature (1)..( 7): Result.002 file - promoters60/1673849
tgtataa

SEQ ID NO: 122089 - DNA, 6 bp, Unknown
  misc_feature (1)..( 6): Result.002 file - promoters60/1673849
acatca

SEQ ID NO: 122090 - DNA, 6 bp, Unknown
  misc_feature (1)..( 6): Result.002 file - promoters60/1673849
acatca

SEQ ID NO: 122091 - DNA, 9 bp, Unknown
  misc_feature (1)..( 9): Result.002 file - promoters60/1673849
tatataatt

SEQ ID NO: 122092 - DNA, 9 bp, Unknown
  misc_feature (1)..( 9): Result.002 file - promoters60/1673849
tatattatt

SEQ ID NO: 122093 - DNA, 9 bp, Unknown
  misc_feature (1)..( 9): Result.002 file - promoters60/1673849
tatcaaagg

SEQ ID NO: 122094 - DNA, 9 bp, Unknown
  misc_feature (1)..( 9): Result.002 file - promoters60/1673849
tattaaata

SEQ ID NO: 122095 - DNA, 9 bp, Unknown
  misc_feature (1)..( 9): Result.002 file - promoters60/1673849
aattacata

SEQ ID NO: 122096 - DNA, 7 bp, Unknown
  misc_feature (1)..( 7): Result.002 file - promoters60/1673849
aaaagtt

SEQ ID NO: 122097 - DNA, 7 bp, Unknown
  misc_feature (1)..( 7): Result.002 file - promoters60/1673849
aaaagtt

SEQ ID NO: 122098 - DNA, 6 bp, Unknown
  misc_feature (1)..( 6): Result.002 file - promoters60/1673849
ccacgt

SEQ ID NO: 122099 - DNA, 6 bp, Unknown
  misc_feature (1)..( 6): Result.002 file - promoters60/1673849
ccacgt

SEQ ID NO: 122100 - DNA, 6 bp, Unknown
  misc_feature (1)..( 6): Result.002 file - promoters60/1673849
tatatg

SEQ ID NO: 122101 - DNA, 6 bp, Unknown
  misc_feature (1)..( 6): Result.002 file - promoters60/1673849
tatatg

SEQ ID NO: 122102 - DNA, 6 bp, Unknown
  misc_feature (1)..( 6): Result.002 file - promoters60/1673849
tatttt

SEQ ID NO: 122103 - DNA, 6 bp, Unknown
  misc_feature (1)..( 6): Result.002 file - promoters60/1673849
tatttt

SEQ ID NO: 122104 - DNA, 6 bp, Unknown
  misc_feature (1)..( 6): Result.002 file - promoters60/1673849
aatcca

SEQ ID NO: 122105 - DNA, 6 bp, Unknown
  misc_feature (1)..( 6): Result.002 file - promoters60/1673849
aatcca

SEQ ID NO: 122106 - DNA, 7 bp, Unknown
  misc_feature (1)..( 7): Result.002 file - promoters60/1673849
gagtttt

SEQ ID NO: 122107 - DNA, 7 bp, Unknown
  misc_feature (1)..( 7): Result.002 file - promoters60/1673849
gagattt

SEQ ID NO: 122108 - DNA, 6 bp, Unknown
  misc_feature (1)..( 6): Result.002 file - promoters60/1673849
acaaaa

SEQ ID NO: 122109 - DNA, 6 bp, Unknown
  misc_feature (1)..( 6): Result.002 file - promoters60/1673849
acaaaa

SEQ ID NO: 122110 - DNA, 7 bp, Unknown
  misc_feature (1)..( 7): Result.002 file - promoters60/1673849
tttacgt

SEQ ID NO: 122111 - DNA, 7 bp, Unknown
  misc_feature (1)..( 7): Result.002 file - promoters60/1673849
ttttcgt

SEQ ID NO: 122112 - DNA, 8 bp, Unknown
  misc_feature (1)..( 8): Result.002 file - promoters60/1673849
tctcgttc

SEQ ID NO: 122113 - DNA, 8 bp, Unknown
  misc_feature (1)..( 8): Result.002 file - promoters60/1673849
tctctttc

SEQ ID NO: 122114 - DNA, 6 bp, Unknown
  misc_feature (1)..( 6): Result.002 file - promoters60/1673853
ttaaag

SEQ ID NO: 122115 - DNA, 6 bp, Unknown
  misc_feature (1)..( 6): Result.002 file - promoters60/1673853
ttaaag

SEQ ID NO: 122116 - DNA, 9 bp, Unknown
  misc_feature (1)..( 9): Result.002 file - promoters60/1673853
taatttggt

SEQ ID NO: 122117 - DNA, 9 bp, Unknown
  misc_feature (1)..( 9): Result.002 file - promoters60/1673853
taattgggt

SEQ ID NO: 122118 - DNA, 8 bp, Unknown
  misc_feature (1)..( 8): Result.002 file - promoters60/1673853
tattcatt

SEQ ID NO: 122119 - DNA, 8 bp, Unknown
  misc_feature (1)..( 8): Result.002 file - promoters60/1673853
tattaatt

SEQ ID NO: 122120 - DNA, 10 bp, Unknown
  misc_feature (1)..( 10): Result.002 file - promoters60/1673853
actatatata

SEQ ID NO: 122121 - DNA, 10 bp, Unknown
  misc_feature (1)..( 10): Result.002 file - promoters60/1673853
aatatatata

SEQ ID NO: 122122 - DNA, 10 bp, Unknown
  misc_feature (1)..( 10): Result.002 file - promoters60/1673853
actatataaa

SEQ ID NO: 122123 - DNA, 8 bp, Unknown
  misc_feature (1)..( 8): Result.002 file - promoters60/1673853
gaaaaaag

SEQ ID NO: 122124 - DNA, 8 bp, Unknown
  misc_feature (1)..( 8): Result.002 file - promoters60/1673853
gaacaaac

SEQ ID NO: 122125 - DNA, 8 bp, Unknown
  misc_feature (1)..( 8): Result.002 file - promoters60/1673853
aaacgaac

SEQ ID NO: 122126 - DNA, 7 bp, Unknown
  misc_feature (1)..( 7): Result.002 file - promoters60/1673853
gaagatt

SEQ ID NO: 122127 - DNA, 7 bp, Unknown
  misc_feature (1)..( 7): Result.002 file - promoters60/1673853
gaatatt

SEQ ID NO: 122128 - DNA, 7 bp, Unknown
  misc_feature (1)..( 7): Result.002 file - promoters60/1673853
taacaag

SEQ ID NO: 122129 - DNA, 7 bp, Unknown
  misc_feature (1)..( 7): Result.002 file - promoters60/1673853
taacaag

SEQ ID NO: 122130 - DNA, 8 bp, Unknown
  misc_feature (1)..( 8): Result.002 file - promoters60/1673853
aataagac

SEQ ID NO: 122131 - DNA, 8 bp, Unknown
  misc_feature (1)..( 8): Result.002 file - promoters60/1673853
aattagac

SEQ ID NO: 122132 - DNA, 6 bp, Unknown
  misc_feature (1)..( 6): Result.002 file - promoters60/1673853
tttgaa

SEQ ID NO: 122133 - DNA, 6 bp, Unknown
  misc_feature (1)..( 6): Result.002 file - promoters60/1673853
tttgaa

SEQ ID NO: 122134 - DNA, 6 bp, Unknown
  misc_feature (1)..( 6): Result.002 file - promoters60/1673853
ttcaaa

SEQ ID NO: 122135 - DNA, 6 bp, Unknown
  misc_feature (1)..( 6): Result.002 file - promoters60/1673853
ttcaaa

SEQ ID NO: 122136 - DNA, 6 bp, Unknown
  misc_feature (1)..( 6): Result.002 file - promoters60/1673853
aaaata

SEQ ID NO: 122137 - DNA, 6 bp, Unknown
  misc_feature (1)..( 6): Result.002 file - promoters60/1673853
aaaata

SEQ ID NO: 122138 - DNA, 7 bp, Unknown
  misc_feature (1)..( 7): Result.002 file - promoters60/1673853
aaacgaa

SEQ ID NO: 122139 - DNA, 7 bp, Unknown
  misc_feature (1)..( 7): Result.002 file - promoters60/1673853
aaatgaa

SEQ ID NO: 122140 - DNA, 7 bp, Unknown
  misc_feature (1)..( 7): Result.002 file - promoters60/1673853
ttaaata

SEQ ID NO: 122141 - DNA, 7 bp, Unknown
  misc_feature (1)..( 7): Result.002 file - promoters60/1673853
ttagata

SEQ ID NO: 122142 - DNA, 6 bp, Unknown
  misc_feature (1)..( 6): Result.002 file - promoters60/1673853
taaaaa

SEQ ID NO: 122143 - DNA, 6 bp, Unknown
  misc_feature (1)..( 6): Result.002 file - promoters60/1673853
taaaaa

SEQ ID NO: 122144 - DNA, 7 bp, Unknown
  misc_feature (1)..( 7): Result.002 file - promoters60/1673853
ggttaga

SEQ ID NO: 122145 - DNA, 7 bp, Unknown
  misc_feature (1)..( 7): Result.002 file - promoters60/1673853
ggtgaga

SEQ ID NO: 122146 - DNA, 6 bp, Unknown
  misc_feature (1)..( 6): Result.002 file - promoters60/1673853
gagaaa

SEQ ID NO: 122147 - DNA, 6 bp, Unknown
  misc_feature (1)..( 6): Result.002 file - promoters60/1673853
gagaaa

SEQ ID NO: 122148 - DNA, 7 bp, Unknown
  misc_feature (1)..( 7): Result.002 file - promoters60/1710026
cggcttg

SEQ ID NO: 122149 - DNA, 7 bp, Unknown
  misc_feature (1)..( 7): Result.002 file - promoters60/1710026
cggtttg

SEQ ID NO: 122150 - DNA, 7 bp, Unknown
  misc_feature (1)..( 7): Result.002 file - promoters60/1710026
cggcttg

SEQ ID NO: 122151 - DNA, 7 bp, Unknown
  misc_feature (1)..( 7): Result.002 file - promoters60/1710026
aatcgga

SEQ ID NO: 122152 - DNA, 7 bp, Unknown
  misc_feature (1)..( 7): Result.002 file - promoters60/1710026
aattgga

SEQ ID NO: 122153 - DNA, 7 bp, Unknown
  misc_feature (1)..( 7): Result.002 file - promoters60/1710026
aatcgga

SEQ ID NO: 122154 - DNA, 14 bp, Unknown
  misc_feature (1)..( 14): Result.002 file - promoters60/1710026
tctggggaatcggc

SEQ ID NO: 122155 - DNA, 14 bp, Unknown
  misc_feature (1)..( 14): Result.002 file - promoters60/1710026
tctgggaaatcgga

SEQ ID NO: 122156 - DNA, 14 bp, Unknown
  misc_feature (1)..( 14): Result.002 file - promoters60/1710026
cgtttggaattgga

SEQ ID NO: 122157 - DNA, 14 bp, Unknown
  misc_feature (1)..( 14): Result.002 file - promoters60/1710026
atgcggaaattaaa

SEQ ID NO: 122158 - DNA, 6 bp, Unknown
  misc_feature (1)..( 6): Result.002 file - promoters60/1710026
tttcaa

SEQ ID NO: 122159 - DNA, 6 bp, Unknown
  misc_feature (1)..( 6): Result.002 file - promoters60/1710026
tttcaa

SEQ ID NO: 122160 - DNA, 6 bp, Unknown
  misc_feature (1)..( 6): Result.002 file - promoters60/1710026
tttcaa

SEQ ID NO: 122161 - DNA, 6 bp, Unknown
  misc_feature (1)..( 6): Result.002 file - promoters60/1710026
ggaaat

SEQ ID NO: 122162 - DNA, 6 bp, Unknown
  misc_feature (1)..( 6): Result.002 file - promoters60/1710026
ggaaat

SEQ ID NO: 122163 - DNA, 6 bp, Unknown
  misc_feature (1)..( 6): Result.002 file - promoters60/1710026
ggaaat

SEQ ID NO: 122164 - DNA, 9 bp, Unknown
  misc_feature (1)..( 9): Result.002 file - promoters60/1710026
atttgaatc

SEQ ID NO: 122165 - DNA, 9 bp, Unknown
  misc_feature (1)..( 9): Result.002 file - promoters60/1710026
atttcaatc

SEQ ID NO: 122166 - DNA, 9 bp, Unknown
  misc_feature (1)..( 9): Result.002 file - promoters60/1710026
gtttcaaat

SEQ ID NO: 122167 - DNA, 11 bp, Unknown
  misc_feature (1)..( 11): Result.002 file - promoters60/1711228
aaccaaaaatc

SEQ ID NO: 122168 - DNA, 11 bp, Unknown
  misc_feature (1)..( 11): Result.002 file - promoters60/1711228
aactaaagtaa

SEQ ID NO: 122169 - DNA, 11 bp, Unknown
  misc_feature (1)..( 11): Result.002 file - promoters60/1711228
aactaaaagag

SEQ ID NO: 122170 - DNA, 12 bp, Unknown
  misc_feature (1)..( 12): Result.002 file - promoters60/1711228
caacaaaaacaa

SEQ ID NO: 122171 - DNA, 12 bp, Unknown
  misc_feature (1)..( 12): Result.002 file - promoters60/1711228
gacataaatttt

SEQ ID NO: 122172 - DNA, 12 bp, Unknown
  misc_feature (1)..( 12): Result.002 file - promoters60/1711228
gatgtaaatgag

SEQ ID NO: 122173 - DNA, 13 bp, Unknown
  misc_feature (1)..( 13): Result.002 file - promoters60/1711228
atgaagaagaaga

SEQ ID NO: 122174 - DNA, 13 bp, Unknown
  misc_feature (1)..( 13): Result.002 file - promoters60/1711228
accaagaagaaaa

SEQ ID NO: 122175 - DNA, 13 bp, Unknown
  misc_feature (1)..( 13): Result.002 file - promoters60/1711228
aaaaagaagacaa

SEQ ID NO: 122176 - DNA, 13 bp, Unknown
  misc_feature (1)..( 13): Result.002 file - promoters60/1711228
agaaacaagaaaa

SEQ ID NO: 122177 - DNA, 13 bp, Unknown
  misc_feature (1)..( 13): Result.002 file - promoters60/1711228
cttaagaaatctt

SEQ ID NO: 122178 - DNA, 13 bp, Unknown
  misc_feature (1)..( 13): Result.002 file - promoters60/1711228
cttaacaaaactt

SEQ ID NO: 122179 - DNA, 12 bp, Unknown
  misc_feature (1)..( 12): Result.002 file - promoters60/1711318
tattttgacgat

SEQ ID NO: 122180 - DNA, 12 bp, Unknown
  misc_feature (1)..( 12): Result.002 file - promoters60/1711318
tgttttgactaa

SEQ ID NO: 122181 - DNA, 12 bp, Unknown
  misc_feature (1)..( 12): Result.002 file - promoters60/1711318
tatgttgttaaa

SEQ ID NO: 122182 - DNA, 12 bp, Unknown
  misc_feature (1)..( 12): Result.002 file - promoters60/1711318
tttattgaataa

SEQ ID NO: 122183 - DNA, 12 bp, Unknown
  misc_feature (1)..( 12): Result.002 file - promoters60/1711318
taaattgaatgt

SEQ ID NO: 122184 - DNA, 12 bp, Unknown
  misc_feature (1)..( 12): Result.002 file - promoters60/1711318
caaattgatttt

SEQ ID NO: 122185 - DNA, 12 bp, Unknown
  misc_feature (1)..( 12): Result.002 file - promoters60/1711318
ctaattgaacct

SEQ ID NO: 122186 - DNA, 13 bp, Unknown
  misc_feature (1)..( 13): Result.002 file - promoters60/1711318
tagcatatccttt

SEQ ID NO: 122187 - DNA, 13 bp, Unknown
  misc_feature (1)..( 13): Result.002 file - promoters60/1711318
tagcttattaaag

SEQ ID NO: 122188 - DNA, 13 bp, Unknown
  misc_feature (1)..( 13): Result.002 file - promoters60/1711318
atgcatataacca

SEQ ID NO: 122189 - DNA, 13 bp, Unknown
  misc_feature (1)..( 13): Result.002 file - promoters60/1711318
taacatgtaacta

SEQ ID NO: 122190 - DNA, 13 bp, Unknown
  misc_feature (1)..( 13): Result.002 file - promoters60/1711318
aatctttttaaag

SEQ ID NO: 122191 - DNA, 13 bp, Unknown
  misc_feature (1)..( 13): Result.002 file - promoters60/1711318
tattatttcaaat

SEQ ID NO: 122192 - DNA, 14 bp, Unknown
  misc_feature (1)..( 14): Result.002 file - promoters60/1711318
gacgattaaaaatc

SEQ ID NO: 122193 - DNA, 14 bp, Unknown
  misc_feature (1)..( 14): Result.002 file - promoters60/1711318
agaaaataaaaaag

SEQ ID NO: 122194 - DNA, 14 bp, Unknown
  misc_feature (1)..( 14): Result.002 file - promoters60/1711318
tgcagctaataata

SEQ ID NO: 122195 - DNA, 14 bp, Unknown
  misc_feature (1)..( 14): Result.002 file - promoters60/1711318
agacaatgaaactc

SEQ ID NO: 122196 - DNA, 14 bp, Unknown
  misc_feature (1)..( 14): Result.002 file - promoters60/1711318
tgattaagaaaata

SEQ ID NO: 122197 - DNA, 14 bp, Unknown
  misc_feature (1)..( 14): Result.002 file - promoters60/1711318
atttttagcaaata

SEQ ID NO: 122198 - DNA, 10 bp, Unknown
  misc_feature (1)..( 10): Result.002 file - promoters60/1711318
cataagagag

SEQ ID NO: 122199 - DNA, 10 bp, Unknown
  misc_feature (1)..( 10): Result.002 file - promoters60/1711318
aataatagaa

SEQ ID NO: 122200 - DNA, 10 bp, Unknown
  misc_feature (1)..( 10): Result.002 file - promoters60/1711318
aatcatatgg

SEQ ID NO: 122201 - DNA, 10 bp, Unknown
  misc_feature (1)..( 10): Result.002 file - promoters60/1711318
agtcatattc

SEQ ID NO: 122202 - DNA, 10 bp, Unknown
  misc_feature (1)..( 10): Result.002 file - promoters60/1711318
agttatattg

SEQ ID NO: 122203 - DNA, 10 bp, Unknown
  misc_feature (1)..( 10): Result.002 file - promoters60/1711318
caatatattg

SEQ ID NO: 122204 - DNA, 11 bp, Unknown
  misc_feature (1)..( 11): Result.002 file - promoters60/1711318
tctgaaaattt

SEQ ID NO: 122205 - DNA, 11 bp, Unknown
  misc_feature (1)..( 11): Result.002 file - promoters60/1711318
gaaaaaaattg

SEQ ID NO: 122206 - DNA, 11 bp, Unknown
  misc_feature (1)..( 11): Result.002 file - promoters60/1711318
aaaataaattg

SEQ ID NO: 122207 - DNA, 11 bp, Unknown
  misc_feature (1)..( 11): Result.002 file - promoters60/1711318
aatttaaattt

SEQ ID NO: 122208 - DNA, 11 bp, Unknown
  misc_feature (1)..( 11): Result.002 file - promoters60/1711318
aaaaaaaatta

SEQ ID NO: 122209 - DNA, 11 bp, Unknown
  misc_feature (1)..( 11): Result.002 file - promoters60/1711318
tcaaaacattg

SEQ ID NO: 122210 - DNA, 16 bp, Unknown
  misc_feature (1)..( 16): Result.002 file - promoters60/1711586
ctgaaattttaggaaa

SEQ ID NO: 122211 - DNA, 16 bp, Unknown
  misc_feature (1)..( 16): Result.002 file - promoters60/1711586
aaaaaattataggaaa

SEQ ID NO: 122212 - DNA, 16 bp, Unknown
  misc_feature (1)..( 16): Result.002 file - promoters60/1711586
aaaaaattgagataaa

SEQ ID NO: 122213 - DNA, 7 bp, Unknown
  misc_feature (1)..( 7): Result.002 file - promoters60/1711586
ttacaat

SEQ ID NO: 122214 - DNA, 7 bp, Unknown
  misc_feature (1)..( 7): Result.002 file - promoters60/1711586
ctacaat

SEQ ID NO: 122215 - DNA, 7 bp, Unknown
  misc_feature (1)..( 7): Result.002 file - promoters60/1711586
ttacaaa

SEQ ID NO: 122216 - DNA, 7 bp, Unknown
  misc_feature (1)..( 7): Result.002 file - promoters60/1711586
catgtat

SEQ ID NO: 122217 - DNA, 7 bp, Unknown
  misc_feature (1)..( 7): Result.002 file - promoters60/1711586
catctat

SEQ ID NO: 122218 - DNA, 7 bp, Unknown
  misc_feature (1)..( 7): Result.002 file - promoters60/1711586
tatgtat

SEQ ID NO: 122219 - DNA, 10 bp, Unknown
  misc_feature (1)..( 10): Result.002 file - promoters60/1711586
gatatatcaa

SEQ ID NO: 122220 - DNA, 10 bp, Unknown
  misc_feature (1)..( 10): Result.002 file - promoters60/1711586
gatatagcaa

SEQ ID NO: 122221 - DNA, 10 bp, Unknown
  misc_feature (1)..( 10): Result.002 file - promoters60/1711586
tatattgcaa

SEQ ID NO: 122222 - DNA, 9 bp, Unknown
  misc_feature (1)..( 9): Result.002 file - promoters60/1711586
aacaaaatc

SEQ ID NO: 122223 - DNA, 9 bp, Unknown
  misc_feature (1)..( 9): Result.002 file - promoters60/1711586
aacataatc

SEQ ID NO: 122224 - DNA, 9 bp, Unknown
  misc_feature (1)..( 9): Result.002 file - promoters60/1711586
ttcataatc

SEQ ID NO: 122225 - DNA, 11 bp, Unknown
  misc_feature (1)..( 11): Result.002 file - promoters60/1711586
ttttgtagatt

SEQ ID NO: 122226 - DNA, 11 bp, Unknown
  misc_feature (1)..( 11): Result.002 file - promoters60/1711586
cattgtaggtc

SEQ ID NO: 122227 - DNA, 11 bp, Unknown
  misc_feature (1)..( 11): Result.002 file - promoters60/1711586
ttttgtggatt

SEQ ID NO: 122228 - DNA, 8 bp, Unknown
  misc_feature (1)..( 8): Result.002 file - promoters60/1711586
ttatatat

SEQ ID NO: 122229 - DNA, 8 bp, Unknown
  misc_feature (1)..( 8): Result.002 file - promoters60/1711586
gtatataa

SEQ ID NO: 122230 - DNA, 8 bp, Unknown
  misc_feature (1)..( 8): Result.002 file - promoters60/1711586
ttatgtat

SEQ ID NO: 122231 - DNA, 10 bp, Unknown
  misc_feature (1)..( 10): Result.002 file - promoters60/1711586
ataaaaagaa

SEQ ID NO: 122232 - DNA, 10 bp, Unknown
  misc_feature (1)..( 10): Result.002 file - promoters60/1711586
ataaaaacaa

SEQ ID NO: 122233 - DNA, 10 bp, Unknown
  misc_feature (1)..( 10): Result.002 file - promoters60/1711586
caaaaatcaa

SEQ ID NO: 122234 - DNA, 7 bp, Unknown
  misc_feature (1)..( 7): Result.002 file - promoters60/1711586
gaaacaa

SEQ ID NO: 122235 - DNA, 7 bp, Unknown
  misc_feature (1)..( 7): Result.002 file - promoters60/1711586
aaaacaa

SEQ ID NO: 122236 - DNA, 8 bp, Unknown
  misc_feature (1)..( 8): Result.002 file - promoters60/1711586
aaaatcaa

SEQ ID NO: 122237 - DNA, 6 bp, Unknown
  misc_feature (1)..( 6): Result.002 file - promoters60/1711630
ttttgt

SEQ ID NO: 122238 - DNA, 6 bp, Unknown
  misc_feature (1)..( 6): Result.002 file - promoters60/1711630
ttttgt

SEQ ID NO: 122239 - DNA, 10 bp, Unknown
  misc_feature (1)..( 10): Result.002 file - promoters60/1711630
tttccaagta

SEQ ID NO: 122240 - DNA, 10 bp, Unknown
  misc_feature (1)..( 10): Result.002 file - promoters60/1711630
ttttcaagta

SEQ ID NO: 122241 - DNA, 9 bp, Unknown
  misc_feature (1)..( 9): Result.002 file - promoters60/1711630
tccaatttc

SEQ ID NO: 122242 - DNA, 9 bp, Unknown
  misc_feature (1)..( 9): Result.002 file - promoters60/1711630
tccattttc

SEQ ID NO: 122243 - DNA, 6 bp, Unknown
  misc_feature (1)..( 6): Result.002 file - promoters60/1711630
tgttta

SEQ ID NO: 122244 - DNA, 6 bp, Unknown
  misc_feature (1)..( 6): Result.002 file - promoters60/1711630
tgttta

SEQ ID NO: 122245 - DNA, 7 bp, Unknown
  misc_feature (1)..( 7): Result.002 file - promoters60/1711630
ctatctt

SEQ ID NO: 122246 - DNA, 7 bp, Unknown
  misc_feature (1)..( 7): Result.002 file - promoters60/1711630
ctatctt

SEQ ID NO: 122247 - DNA, 9 bp, Unknown
  misc_feature (1)..( 9): Result.002 file - promoters60/1711630
tcttctttt

SEQ ID NO: 122248 - DNA, 9 bp, Unknown
  misc_feature (1)..( 9): Result.003 file - promoters60/1711630
tcttatttt

SEQ ID NO: 122249 - DNA, 7 bp, Unknown
  misc_feature (1)..( 7): Result.003 file - promoters60/1711630
actgatt

SEQ ID NO: 122250 - DNA, 7 bp, Unknown
  misc_feature (1)..( 7): Result.003 file - promoters60/1711630
actgatt

SEQ ID NO: 122251 - DNA, 6 bp, Unknown
  misc_feature (1)..( 6): Result.003 file - promoters60/1711630
cattga

SEQ ID NO: 122252 - DNA, 6 bp, Unknown
  misc_feature (1)..( 6): Result.003 file - promoters60/1711630
cattga

SEQ ID NO: 122253 - DNA, 6 bp, Unknown
  misc_feature (1)..( 6): Result.003 file - promoters60/1711630
tattat

SEQ ID NO: 122254 - DNA, 6 bp, Unknown
  misc_feature (1)..( 6): Result.003 file - promoters60/1711630
tattat

SEQ ID NO: 122255 - DNA, 6 bp, Unknown
  misc_feature (1)..( 6): Result.003 file - promoters60/1711630
ctttta

SEQ ID NO: 122256 - DNA, 6 bp, Unknown
  misc_feature (1)..( 6): Result.003 file - promoters60/1711630
ctttta

SEQ ID NO: 122257 - DNA, 6 bp, Unknown
  misc_feature (1)..( 6): Result.003 file - promoters60/1711630
tgtttt

SEQ ID NO: 122258 - DNA, 6 bp, Unknown
  misc_feature (1)..( 6): Result.003 file - promoters60/1711630
tgtttt

SEQ ID NO: 122259 - DNA, 8 bp, Unknown
  misc_feature (1)..( 8): Result.003 file - promoters60/1711630
cttcgaat

SEQ ID NO: 122260 - DNA, 8 bp, Unknown
  misc_feature (1)..( 8): Result.003 file - promoters60/1711630
cttagaat

SEQ ID NO: 122261 - DNA, 6 bp, Unknown
  misc_feature (1)..( 6): Result.003 file - promoters60/1711630
cttgga

SEQ ID NO: 122262 - DNA, 6 bp, Unknown
  misc_feature (1)..( 6): Result.003 file - promoters60/1711630
cttgga

SEQ ID NO: 122263 - DNA, 6 bp, Unknown
  misc_feature (1)..( 6): Result.003 file - promoters60/1711630
cttttc

SEQ ID NO: 122264 - DNA, 6 bp, Unknown
  misc_feature (1)..( 6): Result.003 file - promoters60/1711630
cttttc

SEQ ID NO: 122265 - DNA, 6 bp, Unknown
  misc_feature (1)..( 6): Result.003 file - promoters60/1711630
ttttaa

SEQ ID NO: 122266 - DNA, 6 bp, Unknown
  misc_feature (1)..( 6): Result.003 file - promoters60/1711630
ttttaa

SEQ ID NO: 122267 - DNA, 7 bp, Unknown
  misc_feature (1)..( 7): Result.003 file - promoters60/1711630
tttcttt

SEQ ID NO: 122268 - DNA, 7 bp, Unknown
  misc_feature (1)..( 7): Result.003 file - promoters60/1711630
ttttttt

SEQ ID NO: 122269 - DNA, 7 bp, Unknown
  misc_feature (1)..( 7): Result.003 file - promoters60/1711630
cataatc

SEQ ID NO: 122270 - DNA, 7 bp, Unknown
  misc_feature (1)..( 7): Result.003 file - promoters60/1711630
cattatc

SEQ ID NO: 122271 - DNA, 7 bp, Unknown
  misc_feature (1)..( 7): Result.003 file - promoters60/1711630
ttaatct

SEQ ID NO: 122272 - DNA, 7 bp, Unknown
  misc_feature (1)..( 7): Result.003 file - promoters60/1711630
ttaatct

SEQ ID NO: 122273 - DNA, 8 bp, Unknown
  misc_feature (1)..( 8): Result.003 file - promoters60/1711630
gaaactgt

SEQ ID NO: 122274 - DNA, 8 bp, Unknown
  misc_feature (1)..( 8): Result.003 file - promoters60/1711630
gaatctgt

SEQ ID NO: 122275 - DNA, 6 bp, Unknown
  misc_feature (1)..( 6): Result.003 file - promoters60/1711630
agtgat

SEQ ID NO: 122276 - DNA, 6 bp, Unknown
  misc_feature (1)..( 6): Result.003 file - promoters60/1711630
agtgat

SEQ ID NO: 122277 - DNA, 6 bp, Unknown
  misc_feature (1)..( 6): Result.003 file - promoters60/1711630
ctatag

SEQ ID NO: 122278 - DNA, 6 bp, Unknown
  misc_feature (1)..( 6): Result.003 file - promoters60/1711630
ctatag

SEQ ID NO: 122279 - DNA, 8 bp, Unknown
  misc_feature (1)..( 8): Result.003 file - promoters60/1712150
aaagaata

SEQ ID NO: 122280 - DNA, 8 bp, Unknown
  misc_feature (1)..( 8): Result.003 file - promoters60/1712150
aaaaaata

SEQ ID NO: 122281 - DNA, 8 bp, Unknown
  misc_feature (1)..( 8): Result.003 file - promoters60/1712150
taaaaatt

SEQ ID NO: 122282 - DNA, 9 bp, Unknown
  misc_feature (1)..( 9): Result.003 file - promoters60/1712150
acaagcatt

SEQ ID NO: 122283 - DNA, 9 bp, Unknown
  misc_feature (1)..( 9): Result.003 file - promoters60/1712150
acacgcaag

SEQ ID NO: 122284 - DNA, 9 bp, Unknown
  misc_feature (1)..( 9): Result.003 file - promoters60/1712150
tgacgtaag

SEQ ID NO: 122285 - DNA, 7 bp, Unknown
  misc_feature (1)..( 7): Result.003 file - promoters60/1712150
tcaatca

SEQ ID NO: 122286 - DNA, 7 bp, Unknown
  misc_feature (1)..( 7): Result.003 file - promoters60/1712150
tcattca

SEQ ID NO: 122287 - DNA, 7 bp, Unknown
  misc_feature (1)..( 7): Result.003 file - promoters60/1712150
tcattcg

SEQ ID NO: 122288 - DNA, 11 bp, Unknown
  misc_feature (1)..( 11): Result.003 file - promoters60/1712150
aaatttaatct

SEQ ID NO: 122289 - DNA, 11 bp, Unknown
  misc_feature (1)..( 11): Result.003 file - promoters60/1712150
aaatttattct

SEQ ID NO: 122290 - DNA, 11 bp, Unknown
  misc_feature (1)..( 11): Result.003 file - promoters60/1712150
gcttttatttt

SEQ ID NO: 122291 - DNA, 7 bp, Unknown
  misc_feature (1)..( 7): Result.003 file - promoters60/1712150
gaaaaca

SEQ ID NO: 122292 - DNA, 7 bp, Unknown
  misc_feature (1)..( 7): Result.003 file - promoters60/1712150
aaaaaca

SEQ ID NO: 122293 - DNA, 7 bp, Unknown
  misc_feature (1)..( 7): Result.003 file - promoters60/1712150
aaaaacc

SEQ ID NO: 122294 - DNA, 8 bp, Unknown
  misc_feature (1)..( 8): Result.003 file - promoters60/1712150
aagaaaat

SEQ ID NO: 122295 - DNA, 8 bp, Unknown
  misc_feature (1)..( 8): Result.003 file - promoters60/1712150
gagagaat

SEQ ID NO: 122296 - DNA, 8 bp, Unknown
  misc_feature (1)..( 8): Result.003 file - promoters60/1712150
aagaaaaa

SEQ ID NO: 122297 - DNA, 7 bp, Unknown
  misc_feature (1)..( 7): Result.003 file - promoters60/1712174
aaatcta

SEQ ID NO: 122298 - DNA, 7 bp, Unknown
  misc_feature (1)..( 7): Result.003 file - promoters60/1712174
gaatcta

SEQ ID NO: 122299 - DNA, 7 bp, Unknown
  misc_feature (1)..( 7): Result.003 file - promoters60/1712174
gaatctc

SEQ ID NO: 122300 - DNA, 7 bp, Unknown
  misc_feature (1)..( 7): Result.003 file - promoters60/1712174
ttttatc

SEQ ID NO: 122301 - DNA, 7 bp, Unknown
  misc_feature (1)..( 7): Result.003 file - promoters60/1712174
ttttatc

SEQ ID NO: 122302 - DNA, 7 bp, Unknown
  misc_feature (1)..( 7): Result.003 file - promoters60/1712174
atttatc

SEQ ID NO: 122303 - DNA, 8 bp, Unknown
  misc_feature (1)..( 8): Result.003 file - promoters60/1712174
actatttg

SEQ ID NO: 122304 - DNA, 8 bp, Unknown
  misc_feature (1)..( 8): Result.003 file - promoters60/1712174
attatttg

SEQ ID NO: 122305 - DNA, 8 bp, Unknown
  misc_feature (1)..( 8): Result.003 file - promoters60/1712174
attgtttt

SEQ ID NO: 122306 - DNA, 9 bp, Unknown
  misc_feature (1)..( 9): Result.003 file - promoters60/1712174
ctcaaaaaa

SEQ ID NO: 122307 - DNA, 9 bp, Unknown
  misc_feature (1)..( 9): Result.003 file - promoters60/1712174
gtcaaaaaa

SEQ ID NO: 122308 - DNA, 9 bp, Unknown
  misc_feature (1)..( 9): Result.003 file - promoters60/1712174
gtcaaatcc

SEQ ID NO: 122309 - DNA, 9 bp, Unknown
  misc_feature (1)..( 9): Result.003 file - promoters60/1713765
taaactaca

SEQ ID NO: 122310 - DNA, 9 bp, Unknown
  misc_feature (1)..( 9): Result.003 file - promoters60/1713765
aaaattact

SEQ ID NO: 122311 - DNA, 9 bp, Unknown
  misc_feature (1)..( 9): Result.003 file - promoters60/1713765
caaacaatt

SEQ ID NO: 122312 - DNA, 9 bp, Unknown
  misc_feature (1)..( 9): Result.003 file - promoters60/1713765
agaaagaaa

SEQ ID NO: 122313 - DNA, 9 bp, Unknown
  misc_feature (1)..( 9): Result.003 file - promoters60/1713765
agagagaat

SEQ ID NO: 122314 - DNA, 9 bp, Unknown
  misc_feature (1)..( 9): Result.003 file - promoters60/1713765
tcggagaat

SEQ ID NO: 122315 - DNA, 7 bp, Unknown
  misc_feature (1)..( 7): Result.003 file - promoters60/1713765
ttgcata

SEQ ID NO: 122316 - DNA, 7 bp, Unknown
  misc_feature (1)..( 7): Result.003 file - promoters60/1713765
ttgaata

SEQ ID NO: 122317 - DNA, 7 bp, Unknown
  misc_feature (1)..( 7): Result.003 file - promoters60/1713765
ttgaatc

SEQ ID NO: 122318 - DNA, 10 bp, Unknown
  misc_feature (1)..( 10): Result.003 file - promoters60/1713780
ttaaacatta

SEQ ID NO: 122319 - DNA, 10 bp, Unknown
  misc_feature (1)..( 10): Result.003 file - promoters60/1713780
caaaacataa

SEQ ID NO: 122320 - DNA, 10 bp, Unknown
  misc_feature (1)..( 10): Result.003 file - promoters60/1713780
caaaaaataa

SEQ ID NO: 122321 - DNA, 10 bp, Unknown
  misc_feature (1)..( 10): Result.003 file - promoters60/1713780
caaaatatat

SEQ ID NO: 122322 - DNA, 7 bp, Unknown
  misc_feature (1)..( 7): Result.003 file - promoters60/1713780
aaaatag

SEQ ID NO: 122323 - DNA, 7 bp, Unknown
  misc_feature (1)..( 7): Result.003 file - promoters60/1713780
aaaatat

SEQ ID NO: 122324 - DNA, 7 bp, Unknown
  misc_feature (1)..( 7): Result.003 file - promoters60/1713780
aaattat

SEQ ID NO: 122325 - DNA, 7 bp, Unknown
  misc_feature (1)..( 7): Result.003 file - promoters60/1713780
tatccgt

SEQ ID NO: 122326 - DNA, 7 bp, Unknown
  misc_feature (1)..( 7): Result.003 file - promoters60/1713780
tattcgt

SEQ ID NO: 122327 - DNA, 7 bp, Unknown
  misc_feature (1)..( 7): Result.003 file - promoters60/1713780
tattcgg

SEQ ID NO: 122328 - DNA, 11 bp, Unknown
  misc_feature (1)..( 11): Result.003 file - promoters60/1713804
ccatagattca

SEQ ID NO: 122329 - DNA, 11 bp, Unknown
  misc_feature (1)..( 11): Result.003 file - promoters60/1713804
taaaagaatca

SEQ ID NO: 122330 - DNA, 11 bp, Unknown
  misc_feature (1)..( 11): Result.003 file - promoters60/1713804
taaaaaaatta

SEQ ID NO: 122331 - DNA, 10 bp, Unknown
  misc_feature (1)..( 10): Result.003 file - promoters60/1713804
aactgacata

SEQ ID NO: 122332 - DNA, 10 bp, Unknown
  misc_feature (1)..( 10): Result.003 file - promoters60/1713804
aactgagttt

SEQ ID NO: 122333 - DNA, 10 bp, Unknown
  misc_feature (1)..( 10): Result.003 file - promoters60/1713804
cactgatttt

SEQ ID NO: 122334 - DNA, 7 bp, Unknown
  misc_feature (1)..( 7): Result.003 file - promoters60/1713804
ttagatc

SEQ ID NO: 122335 - DNA, 7 bp, Unknown
  misc_feature (1)..( 7): Result.003 file - promoters60/1713804
ttatatc

SEQ ID NO: 122336 - DNA, 7 bp, Unknown
  misc_feature (1)..( 7): Result.003 file - promoters60/1713804
ttatatc

SEQ ID NO: 122337 - DNA, 6 bp, Unknown
  misc_feature (1)..( 6): Result.003 file - promoters60/1713811
aaaaag

SEQ ID NO: 122338 - DNA, 6 bp, Unknown
  misc_feature (1)..( 6): Result.003 file - promoters60/1713811
aaaaag

SEQ ID NO: 122339 - DNA, 8 bp, Unknown
  misc_feature (1)..( 8): Result.003 file - promoters60/1713811
gattaaaa

SEQ ID NO: 122340 - DNA, 8 bp, Unknown
  misc_feature (1)..( 8): Result.003 file - promoters60/1713811
gatgaaaa

SEQ ID NO: 122341 - DNA, 7 bp, Unknown
  misc_feature (1)..( 7): Result.003 file - promoters60/1713811
aatgtat

SEQ ID NO: 122342 - DNA, 7 bp, Unknown
  misc_feature (1)..( 7): Result.003 file - promoters60/1713811
aatgtat

SEQ ID NO: 122343 - DNA, 6 bp, Unknown
  misc_feature (1)..( 6): Result.003 file - promoters60/1713811
tcgtgt

SEQ ID NO: 122344 - DNA, 6 bp, Unknown
  misc_feature (1)..( 6): Result.003 file - promoters60/1713811
tcgtgt

SEQ ID NO: 122345 - DNA, 6 bp, Unknown
  misc_feature (1)..( 6): Result.003 file - promoters60/1713811
ttttct

SEQ ID NO: 122346 - DNA, 6 bp, Unknown
  misc_feature (1)..( 6): Result.003 file - promoters60/1713811
ttttct

SEQ ID NO: 122347 - DNA, 7 bp, Unknown
  misc_feature (1)..( 7): Result.003 file - promoters60/1713811
gaatttg

SEQ ID NO: 122348 - DNA, 7 bp, Unknown
  misc_feature (1)..( 7): Result.003 file - promoters60/1713811
gaatttg

SEQ ID NO: 122349 - DNA, 6 bp, Unknown
  misc_feature (1)..( 6): Result.003 file - promoters60/1713811
ttctct

SEQ ID NO: 122350 - DNA, 6 bp, Unknown
  misc_feature (1)..( 6): Result.003 file - promoters60/1713811
ttctct

SEQ ID NO: 122351 - DNA, 6 bp, Unknown
  misc_feature (1)..( 6): Result.003 file - promoters60/1713811
tatttt

SEQ ID NO: 122352 - DNA, 6 bp, Unknown
  misc_feature (1)..( 6): Result.003 file - promoters60/1713811
tatttt

SEQ ID NO: 122353 - DNA, 7 bp, Unknown
  misc_feature (1)..( 7): Result.003 file - promoters60/1713811
ttttaat

SEQ ID NO: 122354 - DNA, 7 bp, Unknown
  misc_feature (1)..( 7): Result.003 file - promoters60/1713811
ttttaat

SEQ ID NO: 122355 - DNA, 7 bp, Unknown
  misc_feature (1)..( 7): Result.003 file - promoters60/1713811
taattga

SEQ ID NO: 122356 - DNA, 7 bp, Unknown
  misc_feature (1)..( 7): Result.003 file - promoters60/1713811
taagtga

SEQ ID NO: 122357 - DNA, 6 bp, Unknown
  misc_feature (1)..( 6): Result.003 file - promoters60/1713811
catcat

SEQ ID NO: 122358 - DNA, 6 bp, Unknown
  misc_feature (1)..( 6): Result.003 file - promoters60/1713811
catcat

SEQ ID NO: 122359 - DNA, 6 bp, Unknown
  misc_feature (1)..( 6): Result.003 file - promoters60/1713811
tcatat

SEQ ID NO: 122360 - DNA, 6 bp, Unknown
  misc_feature (1)..( 6): Result.003 file - promoters60/1713811
tcatat

SEQ ID NO: 122361 - DNA, 7 bp, Unknown
  misc_feature (1)..( 7): Result.003 file - promoters60/1713811
ttaggtg

SEQ ID NO: 122362 - DNA, 7 bp, Unknown
  misc_feature (1)..( 7): Result.003 file - promoters60/1713811
ttatgtg

SEQ ID NO: 122363 - DNA, 8 bp, Unknown
  misc_feature (1)..( 8): Result.003 file - promoters60/1713811
atatatac

SEQ ID NO: 122364 - DNA, 8 bp, Unknown
  misc_feature (1)..( 8): Result.003 file - promoters60/1713811
atacatac

SEQ ID NO: 122365 - DNA, 6 bp, Unknown
  misc_feature (1)..( 6): Result.003 file - promoters60/1713811
ttcaaa

SEQ ID NO: 122366 - DNA, 6 bp, Unknown
  misc_feature (1)..( 6): Result.003 file - promoters60/1713811
ttcaaa

SEQ ID NO: 122367 - DNA, 7 bp, Unknown
  misc_feature (1)..( 7): Result.003 file - promoters60/1713842
tatttat

SEQ ID NO: 122368 - DNA, 7 bp, Unknown
  misc_feature (1)..( 7): Result.003 file - promoters60/1713842
tatttaa

SEQ ID NO: 122369 - DNA, 7 bp, Unknown
  misc_feature (1)..( 7): Result.003 file - promoters60/1713842
aattttt

SEQ ID NO: 122370 - DNA, 8 bp, Unknown
  misc_feature (1)..( 8): Result.003 file - promoters60/1713842
caaaccca

SEQ ID NO: 122371 - DNA, 8 bp, Unknown
  misc_feature (1)..( 8): Result.003 file - promoters60/1713842
caaacctg

SEQ ID NO: 122372 - DNA, 8 bp, Unknown
  misc_feature (1)..( 8): Result.003 file - promoters60/1713842
gaaagctg

SEQ ID NO: 122373 - DNA, 8 bp, Unknown
  misc_feature (1)..( 8): Result.003 file - promoters60/1713842
agagacat

SEQ ID NO: 122374 - DNA, 8 bp, Unknown
  misc_feature (1)..( 8): Result.003 file - promoters60/1713842
agatacag

SEQ ID NO: 122375 - DNA, 8 bp, Unknown
  misc_feature (1)..( 8): Result.003 file - promoters60/1713842
cgatccag

SEQ ID NO: 122376 - DNA, 9 bp, Unknown
  misc_feature (1)..( 9): Result.003 file - promoters60/1713842
tttaaagct

SEQ ID NO: 122377 - DNA, 9 bp, Unknown
  misc_feature (1)..( 9): Result.003 file - promoters60/1713842
tttcaagtt

SEQ ID NO: 122378 - DNA, 9 bp, Unknown
  misc_feature (1)..( 9): Result.003 file - promoters60/1713842
tctcacgtt

SEQ ID NO: 122379 - DNA, 10 bp, Unknown
  misc_feature (1)..( 10): Result.003 file - promoters60/1713895
tagattttct

SEQ ID NO: 122380 - DNA, 10 bp, Unknown
  misc_feature (1)..( 10): Result.003 file - promoters60/1713895
gtcattatct

SEQ ID NO: 122381 - DNA, 10 bp, Unknown
  misc_feature (1)..( 10): Result.003 file - promoters60/1713895
gagattttaa

SEQ ID NO: 122382 - DNA, 10 bp, Unknown
  misc_feature (1)..( 10): Result.003 file - promoters60/1713895
gtcatcatcc

SEQ ID NO: 122383 - DNA, 9 bp, Unknown
  misc_feature (1)..( 9): Result.003 file - promoters60/1713895
aaagcccat

SEQ ID NO: 122384 - DNA, 9 bp, Unknown
  misc_feature (1)..( 9): Result.003 file - promoters60/1713895
taggcccat

SEQ ID NO: 122385 - DNA, 9 bp, Unknown
  misc_feature (1)..( 9): Result.003 file - promoters60/1713895
aaagcccat

SEQ ID NO: 122386 - DNA, 11 bp, Unknown
  misc_feature (1)..( 11): Result.003 file - promoters60/1713895
gtttacttgct

SEQ ID NO: 122387 - DNA, 11 bp, Unknown
  misc_feature (1)..( 11): Result.003 file - promoters60/1713895
atttatttgtg

SEQ ID NO: 122388 - DNA, 11 bp, Unknown
  misc_feature (1)..( 11): Result.003 file - promoters60/1713895
atttattagtg

SEQ ID NO: 122389 - DNA, 11 bp, Unknown
  misc_feature (1)..( 11): Result.003 file - promoters60/1713895
atttttttctg

SEQ ID NO: 122390 - DNA, 8 bp, Unknown
  misc_feature (1)..( 8): Result.003 file - promoters60/1713895
tagtacta

SEQ ID NO: 122391 - DNA, 8 bp, Unknown
  misc_feature (1)..( 8): Result.003 file - promoters60/1713895
atgtacta

SEQ ID NO: 122392 - DNA, 8 bp, Unknown
  misc_feature (1)..( 8): Result.003 file - promoters60/1713895
atgaactc

SEQ ID NO: 122393 - DNA, 6 bp, Unknown
  misc_feature (1)..( 6): Result.003 file - promoters60/1713895
tcaaaa

SEQ ID NO: 122394 - DNA, 6 bp, Unknown
  misc_feature (1)..( 6): Result.003 file - promoters60/1713895
tcaaaa

SEQ ID NO: 122395 - DNA, 6 bp, Unknown
  misc_feature (1)..( 6): Result.003 file - promoters60/1713895
tcaaaa

SEQ ID NO: 122396 - DNA, 8 bp, Unknown
  misc_feature (1)..( 8): Result.003 file - promoters60/1713895
atattttc

SEQ ID NO: 122397 - DNA, 8 bp, Unknown
  misc_feature (1)..( 8): Result.003 file - promoters60/1713895
atatcttc

SEQ ID NO: 122398 - DNA, 8 bp, Unknown
  misc_feature (1)..( 8): Result.003 file - promoters60/1713895
ttattttc

SEQ ID NO: 122399 - DNA, 11 bp, Unknown
  misc_feature (1)..( 11): Result.003 file - promoters60/1714694
gttcaattttt

SEQ ID NO: 122400 - DNA, 11 bp, Unknown
  misc_feature (1)..( 11): Result.003 file - promoters60/1714694
tatcatttttt

SEQ ID NO: 122401 - DNA, 11 bp, Unknown
  misc_feature (1)..( 11): Result.003 file - promoters60/1714694
tatgattaagc

SEQ ID NO: 122402 - DNA, 8 bp, Unknown
  misc_feature (1)..( 8): Result.003 file - promoters60/1714694
ttgtattt

SEQ ID NO: 122403 - DNA, 8 bp, Unknown
  misc_feature (1)..( 8): Result.003 file - promoters60/1714694
ttgtatat

SEQ ID NO: 122404 - DNA, 8 bp, Unknown
  misc_feature (1)..( 8): Result.003 file - promoters60/1714694
atgtctat

SEQ ID NO: 122405 - DNA, 7 bp, Unknown
  misc_feature (1)..( 7): Result.003 file - promoters60/1714694
attgctt

SEQ ID NO: 122406 - DNA, 7 bp, Unknown
  misc_feature (1)..( 7): Result.003 file - promoters60/1714694
tttgctt

SEQ ID NO: 122407 - DNA, 7 bp, Unknown
  misc_feature (1)..( 7): Result.003 file - promoters60/1714694
tttactt

SEQ ID NO: 122408 - DNA, 7 bp, Unknown
  misc_feature (1)..( 7): Result.003 file - promoters60/1714772
aaacaaa

SEQ ID NO: 122409 - DNA, 7 bp, Unknown
  misc_feature (1)..( 7): Result.003 file - promoters60/1714772
aaagaaa

SEQ ID NO: 122410 - DNA, 7 bp, Unknown
  misc_feature (1)..( 7): Result.003 file - promoters60/1714772
aaacaaa

SEQ ID NO: 122411 - DNA, 11 bp, Unknown
  misc_feature (1)..( 11): Result.003 file - promoters60/1714772
taaagaaaaag

SEQ ID NO: 122412 - DNA, 11 bp, Unknown
  misc_feature (1)..( 11): Result.003 file - promoters60/1714772
aaaataaatga

SEQ ID NO: 122413 - DNA, 11 bp, Unknown
  misc_feature (1)..( 11): Result.003 file - promoters60/1714772
taaataaaaag

SEQ ID NO: 122414 - DNA, 8 bp, Unknown
  misc_feature (1)..( 8): Result.003 file - promoters60/1714772
aaaaagaa

SEQ ID NO: 122415 - DNA, 8 bp, Unknown
  misc_feature (1)..( 8): Result.003 file - promoters60/1714772
taaatgaa

SEQ ID NO: 122416 - DNA, 8 bp, Unknown
  misc_feature (1)..( 8): Result.003 file - promoters60/1714772
aaaaagtt

SEQ ID NO: 122417 - DNA, 8 bp, Unknown
  misc_feature (1)..( 8): Result.003 file - promoters60/1714772
aaacaaaa

SEQ ID NO: 122418 - DNA, 8 bp, Unknown
  misc_feature (1)..( 8): Result.003 file - promoters60/1714772
tcacaaaa

SEQ ID NO: 122419 - DNA, 8 bp, Unknown
  misc_feature (1)..( 8): Result.003 file - promoters60/1714772
aaataaaa

SEQ ID NO: 122420 - DNA, 9 bp, Unknown
  misc_feature (1)..( 9): Result.003 file - promoters60/1714772
aaattaagt

SEQ ID NO: 122421 - DNA, 9 bp, Unknown
  misc_feature (1)..( 9): Result.003 file - promoters60/1714772
aaagtaaag

SEQ ID NO: 122422 - DNA, 9 bp, Unknown
  misc_feature (1)..( 9): Result.003 file - promoters60/1714772
aaagaaaag

SEQ ID NO: 122423 - DNA, 9 bp, Unknown
  misc_feature (1)..( 9): Result.003 file - promoters60/1714772
gtttgtaaa

SEQ ID NO: 122424 - DNA, 9 bp, Unknown
  misc_feature (1)..( 9): Result.003 file - promoters60/1714772
ttttttaaa

SEQ ID NO: 122425 - DNA, 9 bp, Unknown
  misc_feature (1)..( 9): Result.003 file - promoters60/1714772
atttgttat

SEQ ID NO: 122426 - DNA, 10 bp, Unknown
  misc_feature (1)..( 10): Result.003 file - promoters60/1714772
atattttctt

SEQ ID NO: 122427 - DNA, 10 bp, Unknown
  misc_feature (1)..( 10): Result.003 file - promoters60/1714772
atatttttta

SEQ ID NO: 122428 - DNA, 10 bp, Unknown
  misc_feature (1)..( 10): Result.003 file - promoters60/1714772
caatttgtta

SEQ ID NO: 122429 - DNA, 7 bp, Unknown
  misc_feature (1)..( 7): Result.003 file - promoters60/1714831
aaacgcc

SEQ ID NO: 122430 - DNA, 7 bp, Unknown
  misc_feature (1)..( 7): Result.003 file - promoters60/1714831
aaacgca

SEQ ID NO: 122431 - DNA, 7 bp, Unknown
  misc_feature (1)..( 7): Result.003 file - promoters60/1714831
aaatgca

SEQ ID NO: 122432 - DNA, 8 bp, Unknown
  misc_feature (1)..( 8): Result.003 file - promoters60/1714831
aaattgcg

SEQ ID NO: 122433 - DNA, 12 bp, Unknown
  misc_feature (1)..( 12): Result.003 file - promoters60/1714865
gaaaaaaaaaaa

SEQ ID NO: 122434 - DNA, 12 bp, Unknown
  misc_feature (1)..( 12): Result.003 file - promoters60/1714865
gaaaaaaaaaaa

SEQ ID NO: 122435 - DNA, 12 bp, Unknown
  misc_feature (1)..( 12): Result.003 file - promoters60/1714865
gaaatacaaaaa

SEQ ID NO: 122436 - DNA, 13 bp, Unknown
  misc_feature (1)..( 13): Result.003 file - promoters60/1714865
taaaaatcaaaac

SEQ ID NO: 122437 - DNA, 11 bp, Unknown
  misc_feature (1)..( 11): Result.003 file - promoters60/1714865
atttattatgt

SEQ ID NO: 122438 - DNA, 11 bp, Unknown
  misc_feature (1)..( 11): Result.003 file - promoters60/1714865
acatattatgt

SEQ ID NO: 122439 - DNA, 11 bp, Unknown
  misc_feature (1)..( 11): Result.003 file - promoters60/1714865
atttgttaaaa

SEQ ID NO: 122440 - DNA, 8 bp, Unknown
  misc_feature (1)..( 8): Result.003 file - promoters60/1714865
tgaacaaa

SEQ ID NO: 122441 - DNA, 8 bp, Unknown
  misc_feature (1)..( 8): Result.003 file - promoters60/1714865
agaataaa

SEQ ID NO: 122442 - DNA, 9 bp, Unknown
  misc_feature (1)..( 9): Result.003 file - promoters60/1714865
tgaaaataa

SEQ ID NO: 122443 - DNA, 11 bp, Unknown
  misc_feature (1)..( 11): Result.003 file - promoters60/1714865
tgaaaaaaaaa

SEQ ID NO: 122444 - DNA, 11 bp, Unknown
  misc_feature (1)..( 11): Result.003 file - promoters60/1714865
ataaaataaaa

SEQ ID NO: 122445 - DNA, 11 bp, Unknown
  misc_feature (1)..( 11): Result.003 file - promoters60/1714865
ttcaaataaat

SEQ ID NO: 122446 - DNA, 11 bp, Unknown
  misc_feature (1)..( 11): Result.003 file - promoters60/1714865
ataaaataagt

SEQ ID NO: 122447 - DNA, 10 bp, Unknown
  misc_feature (1)..( 10): Result.003 file - promoters60/1714865
taaaacgagt

SEQ ID NO: 122448 - DNA, 10 bp, Unknown
  misc_feature (1)..( 10): Result.003 file - promoters60/1714865
aaaaaagagt

SEQ ID NO: 122449 - DNA, 10 bp, Unknown
  misc_feature (1)..( 10): Result.003 file - promoters60/1714865
aaaaaagaaa

SEQ ID NO: 122450 - DNA, 8 bp, Unknown
  misc_feature (1)..( 8): Result.003 file - promoters60/1714865
ataaataa

SEQ ID NO: 122451 - DNA, 8 bp, Unknown
  misc_feature (1)..( 8): Result.003 file - promoters60/1714865
ataaataa

SEQ ID NO: 122452 - DNA, 8 bp, Unknown
  misc_feature (1)..( 8): Result.003 file - promoters60/1714865
ataaaaaa

SEQ ID NO: 122453 - DNA, 8 bp, Unknown
  misc_feature (1)..( 8): Result.003 file - promoters60/1714865
ataaatgc

SEQ ID NO: 122454 - DNA, 9 bp, Unknown
  misc_feature (1)..( 9): Result.003 file - promoters60/1714865
gaaataccc

SEQ ID NO: 122455 - DNA, 9 bp, Unknown
  misc_feature (1)..( 9): Result.003 file - promoters60/1714865
gaaatacaa

SEQ ID NO: 122456 - DNA, 9 bp, Unknown
  misc_feature (1)..( 9): Result.003 file - promoters60/1714865
aaaattcaa

SEQ ID NO: 122457 - DNA, 8 bp, Unknown
  misc_feature (1)..( 8): Result.003 file - promoters60/1714865
aaaccaat

SEQ ID NO: 122458 - DNA, 8 bp, Unknown
  misc_feature (1)..( 8): Result.003 file - promoters60/1714865
aaacaaat

SEQ ID NO: 122459 - DNA, 8 bp, Unknown
  misc_feature (1)..( 8): Result.003 file - promoters60/1714865
taacaaac

SEQ ID NO: 122460 - DNA, 11 bp, Unknown
  misc_feature (1)..( 11): Result.003 file - promoters60/1714865
aatgtttattt

SEQ ID NO: 122461 - DNA, 11 bp, Unknown
  misc_feature (1)..( 11): Result.003 file - promoters60/1714865
aaatattattt

SEQ ID NO: 122462 - DNA, 11 bp, Unknown
  misc_feature (1)..( 11): Result.003 file - promoters60/1714865
aaataatatta

SEQ ID NO: 122463 - DNA, 9 bp, Unknown
  misc_feature (1)..( 9): Result.003 file - promoters60/1714865
taaataaat

SEQ ID NO: 122464 - DNA, 9 bp, Unknown
  misc_feature (1)..( 9): Result.003 file - promoters60/1714865
taaatacaa

SEQ ID NO: 122465 - DNA, 9 bp, Unknown
  misc_feature (1)..( 9): Result.003 file - promoters60/1714865
aaaatgcaa

SEQ ID NO: 122466 - DNA, 9 bp, Unknown
  misc_feature (1)..( 9): Result.003 file - promoters60/1714865
ataaatttt

SEQ ID NO: 122467 - DNA, 9 bp, Unknown
  misc_feature (1)..( 9): Result.003 file - promoters60/1714865
aaaaatttg

SEQ ID NO: 122468 - DNA, 9 bp, Unknown
  misc_feature (1)..( 9): Result.003 file - promoters60/1714865
aaaaatgca

SEQ ID NO: 122469 - DNA, 9 bp, Unknown
  misc_feature (1)..( 9): Result.003 file - promoters60/1714865
aaaaatcaa

SEQ ID NO: 122470 - DNA, 10 bp, Unknown
  misc_feature (1)..( 10): Result.003 file - promoters60/1714865
caaaacaaaa

SEQ ID NO: 122471 - DNA, 10 bp, Unknown
  misc_feature (1)..( 10): Result.003 file - promoters60/1714865
caaaaaaaaa

SEQ ID NO: 122472 - DNA, 11 bp, Unknown
  misc_feature (1)..( 11): Result.003 file - promoters60/1714865
taatattaaaa

SEQ ID NO: 122473 - DNA, 8 bp, Unknown
  misc_feature (1)..( 8): Result.003 file - promoters60/1714865
agaaaaat

SEQ ID NO: 122474 - DNA, 8 bp, Unknown
  misc_feature (1)..( 8): Result.003 file - promoters60/1714865
agaaaaat

SEQ ID NO: 122475 - DNA, 8 bp, Unknown
  misc_feature (1)..( 8): Result.003 file - promoters60/1714865
acaaaaat

SEQ ID NO: 122476 - DNA, 8 bp, Unknown
  misc_feature (1)..( 8): Result.003 file - promoters60/1714865
ttataatt

SEQ ID NO: 122477 - DNA, 8 bp, Unknown
  misc_feature (1)..( 8): Result.003 file - promoters60/1714865
tgataatt

SEQ ID NO: 122478 - DNA, 8 bp, Unknown
  misc_feature (1)..( 8): Result.003 file - promoters60/1714865
ttaaaatc

SEQ ID NO: 122479 - DNA, 8 bp, Unknown
  misc_feature (1)..( 8): Result.003 file - promoters60/1714912
aaccaaaa

SEQ ID NO: 122480 - DNA, 8 bp, Unknown
  misc_feature (1)..( 8): Result.003 file - promoters60/1714912
aacaaaaa

SEQ ID NO: 122481 - DNA, 6 bp, Unknown
  misc_feature (1)..( 6): Result.003 file - promoters60/1714912
aaaaga

SEQ ID NO: 122482 - DNA, 6 bp, Unknown
  misc_feature (1)..( 6): Result.003 file - promoters60/1714912
aaaaga

SEQ ID NO: 122483 - DNA, 6 bp, Unknown
  misc_feature (1)..( 6): Result.003 file - promoters60/1714912
gtatag

SEQ ID NO: 122484 - DNA, 6 bp, Unknown
  misc_feature (1)..( 6): Result.003 file - promoters60/1714912
gtatag

SEQ ID NO: 122485 - DNA, 11 bp, Unknown
  misc_feature (1)..( 11): Result.003 file - promoters60/1714912
aaaaagaaaaa

SEQ ID NO: 122486 - DNA, 11 bp, Unknown
  misc_feature (1)..( 11): Result.003 file - promoters60/1714912
aagaagaaaag

SEQ ID NO: 122487 - DNA, 11 bp, Unknown
  misc_feature (1)..( 11): Result.003 file - promoters60/1714912
aaaaataaaaa

SEQ ID NO: 122488 - DNA, 7 bp, Unknown
  misc_feature (1)..( 7): Result.003 file - promoters60/1714912
agaaaaa

SEQ ID NO: 122489 - DNA, 7 bp, Unknown
  misc_feature (1)..( 7): Result.003 file - promoters60/1714912
agagaaa

SEQ ID NO: 122490 - DNA, 8 bp, Unknown
  misc_feature (1)..( 8): Result.003 file - promoters60/1714912
ataaattc

SEQ ID NO: 122491 - DNA, 8 bp, Unknown
  misc_feature (1)..( 8): Result.003 file - promoters60/1714912
atagattc

SEQ ID NO: 122492 - DNA, 6 bp, Unknown
  misc_feature (1)..( 6): Result.003 file - promoters60/1714912
gtttga

SEQ ID NO: 122493 - DNA, 6 bp, Unknown
  misc_feature (1)..( 6): Result.003 file - promoters60/1714912
gtttga

SEQ ID NO: 122494 - DNA, 9 bp, Unknown
  misc_feature (1)..( 9): Result.003 file - promoters60/1714912
gaaacaaac

SEQ ID NO: 122495 - DNA, 9 bp, Unknown
  misc_feature (1)..( 9): Result.003 file - promoters60/1714912
gaaccaaac

SEQ ID NO: 122496 - DNA, 6 bp, Unknown
  misc_feature (1)..( 6): Result.003 file - promoters60/1714912
ttgtgg

SEQ ID NO: 122497 - DNA, 6 bp, Unknown
  misc_feature (1)..( 6): Result.003 file - promoters60/1714912
ttgtgg

SEQ ID NO: 122498 - DNA, 10 bp, Unknown
  misc_feature (1)..( 10): Result.003 file - promoters60/1714912
ggtccctctt

SEQ ID NO: 122499 - DNA, 10 bp, Unknown
  misc_feature (1)..( 10): Result.003 file - promoters60/1714912
ggtccatctt

SEQ ID NO: 122500 - DNA, 6 bp, Unknown
  misc_feature (1)..( 6): Result.003 file - promoters60/1714912
aaaaaa

SEQ ID NO: 122501 - DNA, 6 bp, Unknown
  misc_feature (1)..( 6): Result.003 file - promoters60/1714912
aaaaaa

SEQ ID NO: 122502 - DNA, 9 bp, Unknown
  misc_feature (1)..( 9): Result.003 file - promoters60/1714912
ttaaataaa

SEQ ID NO: 122503 - DNA, 9 bp, Unknown
  misc_feature (1)..( 9): Result.003 file - promoters60/1714912
ttaaaaaaa

SEQ ID NO: 122504 - DNA, 6 bp, Unknown
  misc_feature (1)..( 6): Result.003 file - promoters60/1714912
caaaaa

SEQ ID NO: 122505 - DNA, 6 bp, Unknown
  misc_feature (1)..( 6): Result.003 file - promoters60/1714912
caaaaa

SEQ ID NO: 122506 - DNA, 6 bp, Unknown
  misc_feature (1)..( 6): Result.003 file - promoters60/1714912
aaaaga

SEQ ID NO: 122507 - DNA, 6 bp, Unknown
  misc_feature (1)..( 6): Result.003 file - promoters60/1714912
aaaaga

SEQ ID NO: 122508 - DNA, 7 bp, Unknown
  misc_feature (1)..( 7): Result.003 file - promoters60/1714912
tgataca

SEQ ID NO: 122509 - DNA, 7 bp, Unknown
  misc_feature (1)..( 7): Result.003 file - promoters60/1714912
tgataca

SEQ ID NO: 122510 - DNA, 15 bp, Unknown
  misc_feature (1)..( 15): Result.003 file - promoters60/1714912
accaatcagaattgt

SEQ ID NO: 122511 - DNA, 15 bp, Unknown
  misc_feature (1)..( 15): Result.003 file - promoters60/1714912
accaatcagatttgt

SEQ ID NO: 122512 - DNA, 7 bp, Unknown
  misc_feature (1)..( 7): Result.003 file - promoters60/1714912
tctagtg

SEQ ID NO: 122513 - DNA, 7 bp, Unknown
  misc_feature (1)..( 7): Result.003 file - promoters60/1714912
tctcgtg

SEQ ID NO: 122514 - DNA, 6 bp, Unknown
  misc_feature (1)..( 6): Result.003 file - promoters60/1714912
ttaaag

SEQ ID NO: 122515 - DNA, 6 bp, Unknown
  misc_feature (1)..( 6): Result.003 file - promoters60/1714912
ttaaag

SEQ ID NO: 122516 - DNA, 6 bp, Unknown
  misc_feature (1)..( 6): Result.003 file - promoters60/1714912
gtggta

SEQ ID NO: 122517 - DNA, 6 bp, Unknown
  misc_feature (1)..( 6): Result.003 file - promoters60/1714912
gtggta

SEQ ID NO: 122518 - DNA, 10 bp, Unknown
  misc_feature (1)..( 10): Result.003 file - promoters60/1714974
ttgaatttag

SEQ ID NO: 122519 - DNA, 10 bp, Unknown
  misc_feature (1)..( 10): Result.003 file - promoters60/1714974
ttgtatttat

SEQ ID NO: 122520 - DNA, 10 bp, Unknown
  misc_feature (1)..( 10): Result.003 file - promoters60/1714974
gtggatttat

SEQ ID NO: 122521 - DNA, 7 bp, Unknown
  misc_feature (1)..( 7): Result.003 file - promoters60/1714974
caatcaa

SEQ ID NO: 122522 - DNA, 7 bp, Unknown
  misc_feature (1)..( 7): Result.003 file - promoters60/1714974
caaacaa

SEQ ID NO: 122523 - DNA, 6 bp, Unknown
  misc_feature (1)..( 6): Result.003 file - promoters60/1714974
cttcac

SEQ ID NO: 122524 - DNA, 6 bp, Unknown
  misc_feature (1)..( 6): Result.003 file - promoters60/1714974
cttcac

SEQ ID NO: 122525 - DNA, 8 bp, Unknown
  misc_feature (1)..( 8): Result.003 file - promoters60/1714974
ataacgtt

SEQ ID NO: 122526 - DNA, 8 bp, Unknown
  misc_feature (1)..( 8): Result.003 file - promoters60/1714974
ataaggtt

SEQ ID NO: 122527 - DNA, 8 bp, Unknown
  misc_feature (1)..( 8): Result.003 file - promoters60/1714974
atatgtag

SEQ ID NO: 122528 - DNA, 8 bp, Unknown
  misc_feature (1)..( 8): Result.003 file - promoters60/1714974
atatttag

SEQ ID NO: 122529 - DNA, 8 bp, Unknown
  misc_feature (1)..( 8): Result.003 file - promoters60/1714974
cgactcaa

SEQ ID NO: 122530 - DNA, 8 bp, Unknown
  misc_feature (1)..( 8): Result.003 file - promoters60/1714974
cgacccaa

SEQ ID NO: 122531 - DNA, 6 bp, Unknown
  misc_feature (1)..( 6): Result.003 file - promoters60/1714974
ggtcta

SEQ ID NO: 122532 - DNA, 6 bp, Unknown
  misc_feature (1)..( 6): Result.003 file - promoters60/1714974
ggtcta

SEQ ID NO: 122533 - DNA, 7 bp, Unknown
  misc_feature (1)..( 7): Result.003 file - promoters60/1714974
gaagaat

SEQ ID NO: 122534 - DNA, 7 bp, Unknown
  misc_feature (1)..( 7): Result.003 file - promoters60/1714974
gaataat

SEQ ID NO: 122535 - DNA, 9 bp, Unknown
  misc_feature (1)..( 9): Result.003 file - promoters60/1714974
ttcttcttc

SEQ ID NO: 122536 - DNA, 9 bp, Unknown
  misc_feature (1)..( 9): Result.003 file - promoters60/1714974
ttctttttc

SEQ ID NO: 122537 - DNA, 7 bp, Unknown
  misc_feature (1)..( 7): Result.003 file - promoters60/1714974
cttttgt

SEQ ID NO: 122538 - DNA, 7 bp, Unknown
  misc_feature (1)..( 7): Result.003 file - promoters60/1714974
cttttgt

SEQ ID NO: 122539 - DNA, 6 bp, Unknown
  misc_feature (1)..( 6): Result.003 file - promoters60/1714974
tacttt

SEQ ID NO: 122540 - DNA, 6 bp, Unknown
  misc_feature (1)..( 6): Result.003 file - promoters60/1714974
tacttt

SEQ ID NO: 122541 - DNA, 9 bp, Unknown
  misc_feature (1)..( 9): Result.003 file - promoters60/1714974
aaacgaaat

SEQ ID NO: 122542 - DNA, 9 bp, Unknown
  misc_feature (1)..( 9): Result.003 file - promoters60/1714974
aaaccaaat

SEQ ID NO: 122543 - DNA, 7 bp, Unknown
  misc_feature (1)..( 7): Result.003 file - promoters60/1714974
tattaaa

SEQ ID NO: 122544 - DNA, 7 bp, Unknown
  misc_feature (1)..( 7): Result.003 file - promoters60/1714974
tataaaa

SEQ ID NO: 122545 - DNA, 6 bp, Unknown
  misc_feature (1)..( 6): Result.003 file - promoters60/1714974
tttgag

SEQ ID NO: 122546 - DNA, 6 bp, Unknown
  misc_feature (1)..( 6): Result.003 file - promoters60/1714974
tttgag

SEQ ID NO: 122547 - DNA, 6 bp, Unknown
  misc_feature (1)..( 6): Result.003 file - promoters60/1714974
aaaaac

SEQ ID NO: 122548 - DNA, 6 bp, Unknown
  misc_feature (1)..( 6): Result.003 file - promoters60/1714974
aaaaac

SEQ ID NO: 122549 - DNA, 11 bp, Unknown
  misc_feature (1)..( 11): Result.003 file - promoters60/1714974
aaaaaatgatt

SEQ ID NO: 122550 - DNA, 11 bp, Unknown
  misc_feature (1)..( 11): Result.003 file - promoters60/1714974
aaaaaatcatt

SEQ ID NO: 122551 - DNA, 9 bp, Unknown
  misc_feature (1)..( 9): Result.003 file - promoters60/1714989
gaaaatatt

SEQ ID NO: 122552 - DNA, 9 bp, Unknown
  misc_feature (1)..( 9): Result.003 file - promoters60/1714989
aaaaataag

SEQ ID NO: 122553 - DNA, 9 bp, Unknown
  misc_feature (1)..( 9): Result.003 file - promoters60/1714989
aaaaattaa

SEQ ID NO: 122554 - DNA, 9 bp, Unknown
  misc_feature (1)..( 9): Result.003 file - promoters60/1714989
aaaaatcgt

SEQ ID NO: 122555 - DNA, 9 bp, Unknown
  misc_feature (1)..( 9): Result.003 file - promoters60/1714989
aaacatatt

SEQ ID NO: 122556 - DNA, 9 bp, Unknown
  misc_feature (1)..( 9): Result.003 file - promoters60/1714989
taaaatttc

SEQ ID NO: 122557 - DNA, 9 bp, Unknown
  misc_feature (1)..( 9): Result.003 file - promoters60/1714989
taaacttaa

SEQ ID NO: 122558 - DNA, 9 bp, Unknown
  misc_feature (1)..( 9): Result.003 file - promoters60/1714989
caaaattga

SEQ ID NO: 122559 - DNA, 11 bp, Unknown
  misc_feature (1)..( 11): Result.003 file - promoters60/1714989
aaaataaataa

SEQ ID NO: 122560 - DNA, 11 bp, Unknown
  misc_feature (1)..( 11): Result.003 file - promoters60/1714989
ttaataaagct

SEQ ID NO: 122561 - DNA, 11 bp, Unknown
  misc_feature (1)..( 11): Result.003 file - promoters60/1714989
aaaattaatat

SEQ ID NO: 122562 - DNA, 11 bp, Unknown
  misc_feature (1)..( 11): Result.003 file - promoters60/1714989
gaaagaaagag

SEQ ID NO: 122563 - DNA, 11 bp, Unknown
  misc_feature (1)..( 11): Result.003 file - promoters60/1714989
gagataatatt

SEQ ID NO: 122564 - DNA, 11 bp, Unknown
  misc_feature (1)..( 11): Result.003 file - promoters60/1714989
attataaaata

SEQ ID NO: 122565 - DNA, 11 bp, Unknown
  misc_feature (1)..( 11): Result.003 file - promoters60/1714989
tgaaaaacaaa

SEQ ID NO: 122566 - DNA, 11 bp, Unknown
  misc_feature (1)..( 11): Result.003 file - promoters60/1714989
gggaaaaaaaa

SEQ ID NO: 122567 - DNA, 11 bp, Unknown
  misc_feature (1)..( 11): Result.003 file - promoters60/1714989
ctataaataaa

SEQ ID NO: 122568 - DNA, 11 bp, Unknown
  misc_feature (1)..( 11): Result.003 file - promoters60/1714989
agtcaaacaaa

SEQ ID NO: 122569 - DNA, 11 bp, Unknown
  misc_feature (1)..( 11): Result.003 file - promoters60/1714989
ttttaaaaaaa

SEQ ID NO: 122570 - DNA, 11 bp, Unknown
  misc_feature (1)..( 11): Result.003 file - promoters60/1714989
cacaaaaaaaa

SEQ ID NO: 122571 - DNA, 11 bp, Unknown
  misc_feature (1)..( 11): Result.003 file - promoters60/1714989
ttagaaacaga

SEQ ID NO: 122572 - DNA, 10 bp, Unknown
  misc_feature (1)..( 10): Result.003 file - promoters60/1714989
tacaaaacta

SEQ ID NO: 122573 - DNA, 10 bp, Unknown
  misc_feature (1)..( 10): Result.003 file - promoters60/1714989
tacaaaaaaa

SEQ ID NO: 122574 - DNA, 10 bp, Unknown
  misc_feature (1)..( 10): Result.003 file - promoters60/1714989
cccaaaaata

SEQ ID NO: 122575 - DNA, 10 bp, Unknown
  misc_feature (1)..( 10): Result.003 file - promoters60/1714989
tcctaaaatc

SEQ ID NO: 122576 - DNA, 10 bp, Unknown
  misc_feature (1)..( 10): Result.003 file - promoters60/1714989
ctaaaaaatc

SEQ ID NO: 122577 - DNA, 10 bp, Unknown
  misc_feature (1)..( 10): Result.003 file - promoters60/1714989
aataaacata

SEQ ID NO: 122578 - DNA, 10 bp, Unknown
  misc_feature (1)..( 10): Result.003 file - promoters60/1714989
cccaaaattg

SEQ ID NO: 122579 - DNA, 13 bp, Unknown
  misc_feature (1)..( 13): Result.003 file - promoters60/1714989
aataaataaaagc

SEQ ID NO: 122580 - DNA, 13 bp, Unknown
  misc_feature (1)..( 13): Result.003 file - promoters60/1714989
aaacaataaaatt

SEQ ID NO: 122581 - DNA, 13 bp, Unknown
  misc_feature (1)..( 13): Result.003 file - promoters60/1714989
gagaaagaaagag

SEQ ID NO: 122582 - DNA, 13 bp, Unknown
  misc_feature (1)..( 13): Result.003 file - promoters60/1714989
acattataaaata

SEQ ID NO: 122583 - DNA, 13 bp, Unknown
  misc_feature (1)..( 13): Result.003 file - promoters60/1714989
aaacagtaaaacc

SEQ ID NO: 122584 - DNA, 13 bp, Unknown
  misc_feature (1)..( 13): Result.003 file - promoters60/1714989
aggagataatatt

SEQ ID NO: 122585 - DNA, 9 bp, Unknown
  misc_feature (1)..( 9): Result.003 file - promoters60/1714989
taagattag

SEQ ID NO: 122586 - DNA, 9 bp, Unknown
  misc_feature (1)..( 9): Result.003 file - promoters60/1714989
taaaatttc

SEQ ID NO: 122587 - DNA, 9 bp, Unknown
  misc_feature (1)..( 9): Result.003 file - promoters60/1714989
taaaattcc

SEQ ID NO: 122588 - DNA, 9 bp, Unknown
  misc_feature (1)..( 9): Result.003 file - promoters60/1714989
aaaaattaa

SEQ ID NO: 122589 - DNA, 10 bp, Unknown
  misc_feature (1)..( 10): Result.003 file - promoters60/1714989
taacaattct

SEQ ID NO: 122590 - DNA, 11 bp, Unknown
  misc_feature (1)..( 11): Result.003 file - promoters60/1714989
gataaacttaa

SEQ ID NO: 122591 - DNA, 11 bp, Unknown
  misc_feature (1)..( 11): Result.003 file - promoters60/1714989
cccaaaattga

SEQ ID NO: 122592 - DNA, 6 bp, Unknown
  misc_feature (1)..( 6): Result.003 file - promoters60/1715220
tttttt

SEQ ID NO: 122593 - DNA, 6 bp, Unknown
  misc_feature (1)..( 6): Result.003 file - promoters60/1715220
tttttt

SEQ ID NO: 122594 - DNA, 6 bp, Unknown
  misc_feature (1)..( 6): Result.003 file - promoters60/1715220
caataa

SEQ ID NO: 122595 - DNA, 6 bp, Unknown
  misc_feature (1)..( 6): Result.003 file - promoters60/1715220
caataa

SEQ ID NO: 122596 - DNA, 6 bp, Unknown
  misc_feature (1)..( 6): Result.003 file - promoters60/1715220
tttaat

SEQ ID NO: 122597 - DNA, 6 bp, Unknown
  misc_feature (1)..( 6): Result.003 file - promoters60/1715220
tttaat

SEQ ID NO: 122598 - DNA, 7 bp, Unknown
  misc_feature (1)..( 7): Result.003 file - promoters60/1715220
aaatata

SEQ ID NO: 122599 - DNA, 7 bp, Unknown
  misc_feature (1)..( 7): Result.003 file - promoters60/1715220
aaaaata

SEQ ID NO: 122600 - DNA, 7 bp, Unknown
  misc_feature (1)..( 7): Result.003 file - promoters60/1715220
cttaaga

SEQ ID NO: 122601 - DNA, 7 bp, Unknown
  misc_feature (1)..( 7): Result.003 file - promoters60/1715220
ctttaga

SEQ ID NO: 122602 - DNA, 6 bp, Unknown
  misc_feature (1)..( 6): Result.003 file - promoters60/1715220
tcagag

SEQ ID NO: 122603 - DNA, 6 bp, Unknown
  misc_feature (1)..( 6): Result.003 file - promoters60/1715220
tcagag

SEQ ID NO: 122604 - DNA, 6 bp, Unknown
  misc_feature (1)..( 6): Result.003 file - promoters60/1715220
tcttgg

SEQ ID NO: 122605 - DNA, 6 bp, Unknown
  misc_feature (1)..( 6): Result.003 file - promoters60/1715220
tcttgg

SEQ ID NO: 122606 - DNA, 7 bp, Unknown
  misc_feature (1)..( 7): Result.003 file - promoters60/1715220
gttattg

SEQ ID NO: 122607 - DNA, 7 bp, Unknown
  misc_feature (1)..( 7): Result.003 file - promoters60/1715220
gttgttg

SEQ ID NO: 122608 - DNA, 7 bp, Unknown
  misc_feature (1)..( 7): Result.003 file - promoters60/1715220
cgtgttc

SEQ ID NO: 122609 - DNA, 7 bp, Unknown
  misc_feature (1)..( 7): Result.003 file - promoters60/1715220
cgttttc

SEQ ID NO: 122610 - DNA, 6 bp, Unknown
  misc_feature (1)..( 6): Result.003 file - promoters60/1715220
tgttgt

SEQ ID NO: 122611 - DNA, 6 bp, Unknown
  misc_feature (1)..( 6): Result.003 file - promoters60/1715220
tgttgt

SEQ ID NO: 122612 - DNA, 8 bp, Unknown
  misc_feature (1)..( 8): Result.003 file - promoters60/1715220
ttcttctg

SEQ ID NO: 122613 - DNA, 8 bp, Unknown
  misc_feature (1)..( 8): Result.003 file - promoters60/1715220
ttctgctg

SEQ ID NO: 122614 - DNA, 6 bp, Unknown
  misc_feature (1)..( 6): Result.003 file - promoters60/1715220
accaaa

SEQ ID NO: 122615 - DNA, 6 bp, Unknown
  misc_feature (1)..( 6): Result.003 file - promoters60/1715220
accaaa

SEQ ID NO: 122616 - DNA, 6 bp, Unknown
  misc_feature (1)..( 6): Result.003 file - promoters60/1715220
agttgt

SEQ ID NO: 122617 - DNA, 6 bp, Unknown
  misc_feature (1)..( 6): Result.003 file - promoters60/1715220
agttgt

SEQ ID NO: 122618 - DNA, 6 bp, Unknown
  misc_feature (1)..( 6): Result.003 file - promoters60/1715220
cttcct

SEQ ID NO: 122619 - DNA, 6 bp, Unknown
  misc_feature (1)..( 6): Result.003 file - promoters60/1715220
cttcct

SEQ ID NO: 122620 - DNA, 6 bp, Unknown
  misc_feature (1)..( 6): Result.003 file - promoters60/1715220
ctgtca

SEQ ID NO: 122621 - DNA, 6 bp, Unknown
  misc_feature (1)..( 6): Result.003 file - promoters60/1715220
ctgtca

SEQ ID NO: 122622 - DNA, 6 bp, Unknown
  misc_feature (1)..( 6): Result.003 file - promoters60/1715220
atttta

SEQ ID NO: 122623 - DNA, 6 bp, Unknown
  misc_feature (1)..( 6): Result.003 file - promoters60/1715220
atttta

SEQ ID NO: 122624 - DNA, 10 bp, Unknown
  misc_feature (1)..( 10): Result.003 file - promoters60/1715347
acattgtaac

SEQ ID NO: 122625 - DNA, 10 bp, Unknown
  misc_feature (1)..( 10): Result.003 file - promoters60/1715347
acattggtta

SEQ ID NO: 122626 - DNA, 10 bp, Unknown
  misc_feature (1)..( 10): Result.003 file - promoters60/1715347
ccattgtgtg

SEQ ID NO: 122627 - DNA, 10 bp, Unknown
  misc_feature (1)..( 10): Result.003 file - promoters60/1715347
gcattgtttc

SEQ ID NO: 122628 - DNA, 10 bp, Unknown
  misc_feature (1)..( 10): Result.003 file - promoters60/1715347
agattctttt

SEQ ID NO: 122629 - DNA, 10 bp, Unknown
  misc_feature (1)..( 10): Result.003 file - promoters60/1715347
ttattctttt

SEQ ID NO: 122630 - DNA, 9 bp, Unknown
  misc_feature (1)..( 9): Result.003 file - promoters60/1715347
cattgtaac

SEQ ID NO: 122631 - DNA, 9 bp, Unknown
  misc_feature (1)..( 9): Result.003 file - promoters60/1715347
aattctaac

SEQ ID NO: 122632 - DNA, 9 bp, Unknown
  misc_feature (1)..( 9): Result.003 file - promoters60/1715347
cattgtgtg

SEQ ID NO: 122633 - DNA, 9 bp, Unknown
  misc_feature (1)..( 9): Result.003 file - promoters60/1715347
cattgtttc

SEQ ID NO: 122634 - DNA, 9 bp, Unknown
  misc_feature (1)..( 9): Result.003 file - promoters60/1715347
gattctttt

SEQ ID NO: 122635 - DNA, 9 bp, Unknown
  misc_feature (1)..( 9): Result.003 file - promoters60/1715347
tattctttt

SEQ ID NO: 122636 - DNA, 10 bp, Unknown
  misc_feature (1)..( 10): Result.003 file - promoters60/1715347
agaatctcga

SEQ ID NO: 122637 - DNA, 10 bp, Unknown
  misc_feature (1)..( 10): Result.003 file - promoters60/1715347
tgaagctctc

SEQ ID NO: 122638 - DNA, 10 bp, Unknown
  misc_feature (1)..( 10): Result.003 file - promoters60/1715347
acaatatcga

SEQ ID NO: 122639 - DNA, 10 bp, Unknown
  misc_feature (1)..( 10): Result.003 file - promoters60/1715347
tgaagcaact

SEQ ID NO: 122640 - DNA, 10 bp, Unknown
  misc_feature (1)..( 10): Result.003 file - promoters60/1715347
ttacactatt

SEQ ID NO: 122641 - DNA, 10 bp, Unknown
  misc_feature (1)..( 10): Result.003 file - promoters60/1715347
cgacagtata

SEQ ID NO: 122642 - DNA, 11 bp, Unknown
  misc_feature (1)..( 11): Result.003 file - promoters60/1715388
attgggccttt

SEQ ID NO: 122643 - DNA, 11 bp, Unknown
  misc_feature (1)..( 11): Result.003 file - promoters60/1715388
aatgggccttt

SEQ ID NO: 122644 - DNA, 11 bp, Unknown
  misc_feature (1)..( 11): Result.003 file - promoters60/1715388
aattggcgcag

SEQ ID NO: 122645 - DNA, 8 bp, Unknown
  misc_feature (1)..( 8): Result.003 file - promoters60/1715388
aaatcaga

SEQ ID NO: 122646 - DNA, 8 bp, Unknown
  misc_feature (1)..( 8): Result.003 file - promoters60/1715388
aaatcaag

SEQ ID NO: 122647 - DNA, 8 bp, Unknown
  misc_feature (1)..( 8): Result.003 file - promoters60/1715388
taattaag

SEQ ID NO: 122648 - DNA, 10 bp, Unknown
  misc_feature (1)..( 10): Result.003 file - promoters60/1715388
ttgttcttat

SEQ ID NO: 122649 - DNA, 10 bp, Unknown
  misc_feature (1)..( 10): Result.003 file - promoters60/1715388
ttgttattaa

SEQ ID NO: 122650 - DNA, 10 bp, Unknown
  misc_feature (1)..( 10): Result.003 file - promoters60/1715388
ggtttactaa

SEQ ID NO: 122651 - DNA, 9 bp, Unknown
  misc_feature (1)..( 9): Result.003 file - promoters60/1715388
tttctgttc

SEQ ID NO: 122652 - DNA, 9 bp, Unknown
  misc_feature (1)..( 9): Result.003 file - promoters60/1715388
tttatgttc

SEQ ID NO: 122653 - DNA, 9 bp, Unknown
  misc_feature (1)..( 9): Result.003 file - promoters60/1715388
ctactgttc

SEQ ID NO: 122654 - DNA, 6 bp, Unknown
  misc_feature (1)..( 6): Result.003 file - promoters60/1715478
aagaaa

SEQ ID NO: 122655 - DNA, 6 bp, Unknown
  misc_feature (1)..( 6): Result.003 file - promoters60/1715478
aagaaa

SEQ ID NO: 122656 - DNA, 7 bp, Unknown
  misc_feature (1)..( 7): Result.003 file - promoters60/1715478
agaaagt

SEQ ID NO: 122657 - DNA, 7 bp, Unknown
  misc_feature (1)..( 7): Result.003 file - promoters60/1715478
agatagt

SEQ ID NO: 122658 - DNA, 6 bp, Unknown
  misc_feature (1)..( 6): Result.003 file - promoters60/1715478
aaatgc

SEQ ID NO: 122659 - DNA, 6 bp, Unknown
  misc_feature (1)..( 6): Result.003 file - promoters60/1715478
aaatgc

SEQ ID NO: 122660 - DNA, 9 bp, Unknown
  misc_feature (1)..( 9): Result.003 file - promoters60/1715478
ctttataat

SEQ ID NO: 122661 - DNA, 9 bp, Unknown
  misc_feature (1)..( 9): Result.003 file - promoters60/1715478
cattaaaat

SEQ ID NO: 122662 - DNA, 10 bp, Unknown
  misc_feature (1)..( 10): Result.003 file - promoters60/1715478
acttcataga

SEQ ID NO: 122663 - DNA, 9 bp, Unknown
  misc_feature (1)..( 9): Result.003 file - promoters60/1715478
tactccatt

SEQ ID NO: 122664 - DNA, 9 bp, Unknown
  misc_feature (1)..( 9): Result.003 file - promoters60/1715478
tactcaatt

SEQ ID NO: 122665 - DNA, 8 bp, Unknown
  misc_feature (1)..( 8): Result.003 file - promoters60/1715478
ggtgtgat

SEQ ID NO: 122666 - DNA, 8 bp, Unknown
  misc_feature (1)..( 8): Result.003 file - promoters60/1715478
ggtgggat

SEQ ID NO: 122667 - DNA, 6 bp, Unknown
  misc_feature (1)..( 6): Result.003 file - promoters60/1715478
tggaaa

SEQ ID NO: 122668 - DNA, 6 bp, Unknown
  misc_feature (1)..( 6): Result.003 file - promoters60/1715478
tggaaa

SEQ ID NO: 122669 - DNA, 8 bp, Unknown
  misc_feature (1)..( 8): Result.003 file - promoters60/1715478
caacacca

SEQ ID NO: 122670 - DNA, 8 bp, Unknown
  misc_feature (1)..( 8): Result.003 file - promoters60/1715478
caactcca

SEQ ID NO: 122671 - DNA, 7 bp, Unknown
  misc_feature (1)..( 7): Result.003 file - promoters60/1715478
ttacttg

SEQ ID NO: 122672 - DNA, 7 bp, Unknown
  misc_feature (1)..( 7): Result.003 file - promoters60/1715478
ttaattg

SEQ ID NO: 122673 - DNA, 7 bp, Unknown
  misc_feature (1)..( 7): Result.003 file - promoters60/1715478
catttcc

SEQ ID NO: 122674 - DNA, 7 bp, Unknown
  misc_feature (1)..( 7): Result.003 file - promoters60/1715478
catatcc

SEQ ID NO: 122675 - DNA, 7 bp, Unknown
  misc_feature (1)..( 7): Result.003 file - promoters60/1715478
ttatgtc

SEQ ID NO: 122676 - DNA, 7 bp, Unknown
  misc_feature (1)..( 7): Result.003 file - promoters60/1715478
ttatgtc

SEQ ID NO: 122677 - DNA, 10 bp, Unknown
  misc_feature (1)..( 10): Result.003 file - promoters60/1715478
ttttactaac

SEQ ID NO: 122678 - DNA, 10 bp, Unknown
  misc_feature (1)..( 10): Result.003 file - promoters60/1715478
ttttaataac

SEQ ID NO: 122679 - DNA, 7 bp, Unknown
  misc_feature (1)..( 7): Result.003 file - promoters60/1715478
attggta

SEQ ID NO: 122680 - DNA, 7 bp, Unknown
  misc_feature (1)..( 7): Result.003 file - promoters60/1715478
attagta

SEQ ID NO: 122681 - DNA, 7 bp, Unknown
  misc_feature (1)..( 7): Result.003 file - promoters60/1715478
gattcag

SEQ ID NO: 122682 - DNA, 7 bp, Unknown
  misc_feature (1)..( 7): Result.003 file - promoters60/1715478
gattcag

SEQ ID NO: 122683 - DNA, 7 bp, Unknown
  misc_feature (1)..( 7): Result.003 file - promoters60/1715478
gatggat

SEQ ID NO: 122684 - DNA, 7 bp, Unknown
  misc_feature (1)..( 7): Result.003 file - promoters60/1715478
gatcgat

SEQ ID NO: 122685 - DNA, 9 bp, Unknown
  misc_feature (1)..( 9): Result.003 file - promoters60/1715482
caattcaca

SEQ ID NO: 122686 - DNA, 9 bp, Unknown
  misc_feature (1)..( 9): Result.003 file - promoters60/1715482
taattcaaa

SEQ ID NO: 122687 - DNA, 9 bp, Unknown
  misc_feature (1)..( 9): Result.003 file - promoters60/1715482
taactcatg

SEQ ID NO: 122688 - DNA, 9 bp, Unknown
  misc_feature (1)..( 9): Result.003 file - promoters60/1715482
aaattaaaa

SEQ ID NO: 122689 - DNA, 9 bp, Unknown
  misc_feature (1)..( 9): Result.003 file - promoters60/1715482
aaaacaact

SEQ ID NO: 122690 - DNA, 9 bp, Unknown
  misc_feature (1)..( 9): Result.003 file - promoters60/1715482
caaataact

SEQ ID NO: 122691 - DNA, 9 bp, Unknown
  misc_feature (1)..( 9): Result.003 file - promoters60/1715482
aaaacagta

SEQ ID NO: 122692 - DNA, 9 bp, Unknown
  misc_feature (1)..( 9): Result.003 file - promoters60/1715482
gaaacaatc

SEQ ID NO: 122693 - DNA, 6 bp, Unknown
  misc_feature (1)..( 6): Result.003 file - promoters60/1715510
atgatt

SEQ ID NO: 122694 - DNA, 6 bp, Unknown
  misc_feature (1)..( 6): Result.003 file - promoters60/1715510
atgatt

SEQ ID NO: 122695 - DNA, 6 bp, Unknown
  misc_feature (1)..( 6): Result.003 file - promoters60/1715510
aaaaga

SEQ ID NO: 122696 - DNA, 6 bp, Unknown
  misc_feature (1)..( 6): Result.003 file - promoters60/1715510
aaaaga

SEQ ID NO: 122697 - DNA, 7 bp, Unknown
  misc_feature (1)..( 7): Result.003 file - promoters60/1715510
aaatatt

SEQ ID NO: 122698 - DNA, 7 bp, Unknown
  misc_feature (1)..( 7): Result.003 file - promoters60/1715510
aaatatt

SEQ ID NO: 122699 - DNA, 8 bp, Unknown
  misc_feature (1)..( 8): Result.003 file - promoters60/1715510
attcaatt

SEQ ID NO: 122700 - DNA, 8 bp, Unknown
  misc_feature (1)..( 8): Result.003 file - promoters60/1715510
atttaatt

SEQ ID NO: 122701 - DNA, 7 bp, Unknown
  misc_feature (1)..( 7): Result.003 file - promoters60/1715510
tcatttt

SEQ ID NO: 122702 - DNA, 7 bp, Unknown
  misc_feature (1)..( 7): Result.003 file - promoters60/1715510
tcaattt

SEQ ID NO: 122703 - DNA, 7 bp, Unknown
  misc_feature (1)..( 7): Result.003 file - promoters60/1715510
tttgttt

SEQ ID NO: 122704 - DNA, 7 bp, Unknown
  misc_feature (1)..( 7): Result.003 file - promoters60/1715510
tttattt

SEQ ID NO: 122705 - DNA, 6 bp, Unknown
  misc_feature (1)..( 6): Result.003 file - promoters60/1715510
agtaaa

SEQ ID NO: 122706 - DNA, 6 bp, Unknown
  misc_feature (1)..( 6): Result.003 file - promoters60/1715510
agtaaa

SEQ ID NO: 122707 - DNA, 6 bp, Unknown
  misc_feature (1)..( 6): Result.003 file - promoters60/1715510
acaaaa

SEQ ID NO: 122708 - DNA, 6 bp, Unknown
  misc_feature (1)..( 6): Result.003 file - promoters60/1715510
acaaaa

SEQ ID NO: 122709 - DNA, 9 bp, Unknown
  misc_feature (1)..( 9): Result.003 file - promoters60/1715510
aattacaca

SEQ ID NO: 122710 - DNA, 9 bp, Unknown
  misc_feature (1)..( 9): Result.003 file - promoters60/1715510
aattataca

SEQ ID NO: 122711 - DNA, 7 bp, Unknown
  misc_feature (1)..( 7): Result.003 file - promoters60/1715510
aaagtaa

SEQ ID NO: 122712 - DNA, 7 bp, Unknown
  misc_feature (1)..( 7): Result.003 file - promoters60/1715510
aaactaa

SEQ ID NO: 122713 - DNA, 7 bp, Unknown
  misc_feature (1)..( 7): Result.003 file - promoters60/1715510
attatga

SEQ ID NO: 122714 - DNA, 7 bp, Unknown
  misc_feature (1)..( 7): Result.003 file - promoters60/1715510
attttga

SEQ ID NO: 122715 - DNA, 8 bp, Unknown
  misc_feature (1)..( 8): Result.003 file - promoters60/1715510
tttgtatt

SEQ ID NO: 122716 - DNA, 8 bp, Unknown
  misc_feature (1)..( 8): Result.003 file - promoters60/1715510
tttggatt

SEQ ID NO: 122717 - DNA, 8 bp, Unknown
  misc_feature (1)..( 8): Result.003 file - promoters60/1715510
gactacct

SEQ ID NO: 122718 - DNA, 8 bp, Unknown
  misc_feature (1)..( 8): Result.003 file - promoters60/1715510
gactgcct

SEQ ID NO: 122719 - DNA, 6 bp, Unknown
  misc_feature (1)..( 6): Result.003 file - promoters60/1715510
atccaa

SEQ ID NO: 122720 - DNA, 6 bp, Unknown
  misc_feature (1)..( 6): Result.003 file - promoters60/1715510
atccaa

SEQ ID NO: 122721 - DNA, 7 bp, Unknown
  misc_feature (1)..( 7): Result.003 file - promoters60/1715510
ttctcgt

SEQ ID NO: 122722 - DNA, 7 bp, Unknown
  misc_feature (1)..( 7): Result.003 file - promoters60/1715510
ttcacgt

SEQ ID NO: 122723 - DNA, 6 bp, Unknown
  misc_feature (1)..( 6): Result.003 file - promoters60/1715510
atttga

SEQ ID NO: 122724 - DNA, 6 bp, Unknown
  misc_feature (1)..( 6): Result.003 file - promoters60/1715510
atttga

SEQ ID NO: 122725 - DNA, 6 bp, Unknown
  misc_feature (1)..( 6): Result.003 file - promoters60/1715516
agaata

SEQ ID NO: 122726 - DNA, 6 bp, Unknown
  misc_feature (1)..( 6): Result.003 file - promoters60/1715516
agaata

SEQ ID NO: 122727 - DNA, 7 bp, Unknown
  misc_feature (1)..( 7): Result.003 file - promoters60/1715516
atatttt

SEQ ID NO: 122728 - DNA, 7 bp, Unknown
  misc_feature (1)..( 7): Result.003 file - promoters60/1715516
ttatttt

SEQ ID NO: 122729 - DNA, 7 bp, Unknown
  misc_feature (1)..( 7): Result.003 file - promoters60/1715516
ttatttc

SEQ ID NO: 122730 - DNA, 6 bp, Unknown
  misc_feature (1)..( 6): Result.003 file - promoters60/1715516
taacaa

SEQ ID NO: 122731 - DNA, 6 bp, Unknown
  misc_feature (1)..( 6): Result.003 file - promoters60/1715516
taacaa

SEQ ID NO: 122732 - DNA, 8 bp, Unknown
  misc_feature (1)..( 8): Result.003 file - promoters60/1715516
atttaata

SEQ ID NO: 122733 - DNA, 8 bp, Unknown
  misc_feature (1)..( 8): Result.003 file - promoters60/1715516
atttaaaa

SEQ ID NO: 122734 - DNA, 8 bp, Unknown
  misc_feature (1)..( 8): Result.003 file - promoters60/1715516
attaaaaa

SEQ ID NO: 122735 - DNA, 6 bp, Unknown
  misc_feature (1)..( 6): Result.003 file - promoters60/1715516
taatta

SEQ ID NO: 122736 - DNA, 6 bp, Unknown
  misc_feature (1)..( 6): Result.003 file - promoters60/1715516
taatta

SEQ ID NO: 122737 - DNA, 6 bp, Unknown
  misc_feature (1)..( 6): Result.003 file - promoters60/1715516
ccatga

SEQ ID NO: 122738 - DNA, 6 bp, Unknown
  misc_feature (1)..( 6): Result.003 file - promoters60/1715516
ccatga

SEQ ID NO: 122739 - DNA, 7 bp, Unknown
  misc_feature (1)..( 7): Result.003 file - promoters60/1715516
gataata

SEQ ID NO: 122740 - DNA, 7 bp, Unknown
  misc_feature (1)..( 7): Result.003 file - promoters60/1715516
gatgata

SEQ ID NO: 122741 - DNA, 7 bp, Unknown
  misc_feature (1)..( 7): Result.003 file - promoters60/1715516
ttacaaa

SEQ ID NO: 122742 - DNA, 7 bp, Unknown
  misc_feature (1)..( 7): Result.003 file - promoters60/1715516
ttaaaaa

SEQ ID NO: 122743 - DNA, 8 bp, Unknown
  misc_feature (1)..( 8): Result.003 file - promoters60/1715516
taattaaa

SEQ ID NO: 122744 - DNA, 8 bp, Unknown
  misc_feature (1)..( 8): Result.003 file - promoters60/1715516
taatgaaa

SEQ ID NO: 122745 - DNA, 6 bp, Unknown
  misc_feature (1)..( 6): Result.003 file - promoters60/1715516
aaacaa

SEQ ID NO: 122746 - DNA, 6 bp, Unknown
  misc_feature (1)..( 6): Result.003 file - promoters60/1715516
aaacaa

SEQ ID NO: 122747 - DNA, 12 bp, Unknown
  misc_feature (1)..( 12): Result.003 file - promoters60/1715516
ctcctataaatt

SEQ ID NO: 122748 - DNA, 12 bp, Unknown
  misc_feature (1)..( 12): Result.003 file - promoters60/1715516
ttcctatatatc

SEQ ID NO: 122749 - DNA, 12 bp, Unknown
  misc_feature (1)..( 12): Result.003 file - promoters60/1715516
ctcttatatatt

SEQ ID NO: 122750 - DNA, 6 bp, Unknown
  misc_feature (1)..( 6): Result.003 file - promoters60/1715516
ttttta

SEQ ID NO: 122751 - DNA, 6 bp, Unknown
  misc_feature (1)..( 6): Result.003 file - promoters60/1715516
ttttta

SEQ ID NO: 122752 - DNA, 7 bp, Unknown
  misc_feature (1)..( 7): Result.003 file - promoters60/1715516
atatatt

SEQ ID NO: 122753 - DNA, 7 bp, Unknown
  misc_feature (1)..( 7): Result.003 file - promoters60/1715516
atagatt

SEQ ID NO: 122754 - DNA, 7 bp, Unknown
  misc_feature (1)..( 7): Result.003 file - promoters60/1715516
atttcca

SEQ ID NO: 122755 - DNA, 7 bp, Unknown
  misc_feature (1)..( 7): Result.003 file - promoters60/1715516
attacca

SEQ ID NO: 122756 - DNA, 10 bp, Unknown
  misc_feature (1)..( 10): Result.003 file - promoters60/1715516
aagatatatg

SEQ ID NO: 122757 - DNA, 10 bp, Unknown
  misc_feature (1)..( 10): Result.003 file - promoters60/1715516
aagaaatatg

SEQ ID NO: 122758 - DNA, 7 bp, Unknown
  misc_feature (1)..( 7): Result.003 file - promoters60/1715516
atatgaa

SEQ ID NO: 122759 - DNA, 7 bp, Unknown
  misc_feature (1)..( 7): Result.003 file - promoters60/1715516
ataggaa

SEQ ID NO: 122760 - DNA, 7 bp, Unknown
  misc_feature (1)..( 7): Result.003 file - promoters60/1715516
aaaacaa

SEQ ID NO: 122761 - DNA, 7 bp, Unknown
  misc_feature (1)..( 7): Result.003 file - promoters60/1715516
aaagcaa

SEQ ID NO: 122762 - DNA, 12 bp, Unknown
  misc_feature (1)..( 12): Result.003 file - promoters60/1715516
aaaagaagaaag

SEQ ID NO: 122763 - DNA, 12 bp, Unknown
  misc_feature (1)..( 12): Result.003 file - promoters60/1715516
aaacgaagaaag

SEQ ID NO: 122764 - DNA, 7 bp, Unknown
  misc_feature (1)..( 7): Result.003 file - promoters60/1715516
agcccat

SEQ ID NO: 122765 - DNA, 7 bp, Unknown
  misc_feature (1)..( 7): Result.003 file - promoters60/1715516
agcacat

SEQ ID NO: 122766 - DNA, 7 bp, Unknown
  misc_feature (1)..( 7): Result.003 file - promoters60/1715516
tatttct

SEQ ID NO: 122767 - DNA, 7 bp, Unknown
  misc_feature (1)..( 7): Result.003 file - promoters60/1715516
tatatct

SEQ ID NO: 122768 - DNA, 10 bp, Unknown
  misc_feature (1)..( 10): Result.003 file - promoters60/1715516
atattttaac

SEQ ID NO: 122769 - DNA, 10 bp, Unknown
  misc_feature (1)..( 10): Result.003 file - promoters60/1715516
atagtttaac

SEQ ID NO: 122770 - DNA, 7 bp, Unknown
  misc_feature (1)..( 7): Result.003 file - promoters60/1715516
aaggaaa

SEQ ID NO: 122771 - DNA, 7 bp, Unknown
  misc_feature (1)..( 7): Result.003 file - promoters60/1715516
aagtaaa

SEQ ID NO: 122772 - DNA, 8 bp, Unknown
  misc_feature (1)..( 8): Result.003 file - promoters60/1715516
aactattt

SEQ ID NO: 122773 - DNA, 8 bp, Unknown
  misc_feature (1)..( 8): Result.003 file - promoters60/1715516
aacttttt

SEQ ID NO: 122774 - DNA, 6 bp, Unknown
  misc_feature (1)..( 6): Result.003 file - promoters60/1715516
aatatg

SEQ ID NO: 122775 - DNA, 6 bp, Unknown
  misc_feature (1)..( 6): Result.003 file - promoters60/1715516
aatatg

SEQ ID NO: 122776 - DNA, 6 bp, Unknown
  misc_feature (1)..( 6): Result.003 file - promoters60/1715516
ttaggc

SEQ ID NO: 122777 - DNA, 6 bp, Unknown
  misc_feature (1)..( 6): Result.003 file - promoters60/1715516
ttaggc

SEQ ID NO: 122778 - DNA, 11 bp, Unknown
  misc_feature (1)..( 11): Result.003 file - promoters60/1715535
aaaaatattcg

SEQ ID NO: 122779 - DNA, 11 bp, Unknown
  misc_feature (1)..( 11): Result.003 file - promoters60/1715535
taaactattta

SEQ ID NO: 122780 - DNA, 11 bp, Unknown
  misc_feature (1)..( 11): Result.003 file - promoters60/1715535
gcaaattttca

SEQ ID NO: 122781 - DNA, 11 bp, Unknown
  misc_feature (1)..( 11): Result.003 file - promoters60/1715535
aaaaatacatg

SEQ ID NO: 122782 - DNA, 11 bp, Unknown
  misc_feature (1)..( 11): Result.003 file - promoters60/1715535
gtggattttct

SEQ ID NO: 122783 - DNA, 11 bp, Unknown
  misc_feature (1)..( 11): Result.003 file - promoters60/1715535
gaaaatttcac

SEQ ID NO: 122784 - DNA, 11 bp, Unknown
  misc_feature (1)..( 11): Result.003 file - promoters60/1715535
caaaatttcac

SEQ ID NO: 122785 - DNA, 19 bp, Unknown
  misc_feature (1)..( 19): Result.003 file - promoters60/1715535
tttttctcttaacaattat

SEQ ID NO: 122786 - DNA, 19 bp, Unknown
  misc_feature (1)..( 19): Result.003 file - promoters60/1715535
gtagactcttagcaaaact

SEQ ID NO: 122787 - DNA, 19 bp, Unknown
  misc_feature (1)..( 19): Result.003 file - promoters60/1715535
aaatacccagaacaatgat

SEQ ID NO: 122788 - DNA, 19 bp, Unknown
  misc_feature (1)..( 19): Result.003 file - promoters60/1715535
tgaatttaaaaacaagtat

SEQ ID NO: 122789 - DNA, 19 bp, Unknown
  misc_feature (1)..( 19): Result.003 file - promoters60/1715535
gtaaacttttaaatagaaa

SEQ ID NO: 122790 - DNA, 19 bp, Unknown
  misc_feature (1)..( 19): Result.003 file - promoters60/1715535
agaaaatctgaaaaattca

SEQ ID NO: 122791 - DNA, 13 bp, Unknown
  misc_feature (1)..( 13): Result.003 file - promoters60/1715535
tgtaattatattc

SEQ ID NO: 122792 - DNA, 13 bp, Unknown
  misc_feature (1)..( 13): Result.003 file - promoters60/1715535
aaaaattatataa

SEQ ID NO: 122793 - DNA, 13 bp, Unknown
  misc_feature (1)..( 13): Result.003 file - promoters60/1715535
ctcgtgtattttc

SEQ ID NO: 122794 - DNA, 13 bp, Unknown
  misc_feature (1)..( 13): Result.003 file - promoters60/1715535
aacaattatgttt

SEQ ID NO: 122795 - DNA, 13 bp, Unknown
  misc_feature (1)..( 13): Result.003 file - promoters60/1715535
accaataataaaa

SEQ ID NO: 122796 - DNA, 13 bp, Unknown
  misc_feature (1)..( 13): Result.003 file - promoters60/1715535
aacgattaaatgt

SEQ ID NO: 122797 - DNA, 11 bp, Unknown
  misc_feature (1)..( 11): Result.003 file - promoters60/1715595
ggtctcatata

SEQ ID NO: 122798 - DNA, 11 bp, Unknown
  misc_feature (1)..( 11): Result.003 file - promoters60/1715595
ggtctcacata

SEQ ID NO: 122799 - DNA, 11 bp, Unknown
  misc_feature (1)..( 11): Result.003 file - promoters60/1715595
atacacacata

SEQ ID NO: 122800 - DNA, 9 bp, Unknown
  misc_feature (1)..( 9): Result.003 file - promoters60/1715595
ctcaggcct

SEQ ID NO: 122801 - DNA, 9 bp, Unknown
  misc_feature (1)..( 9): Result.003 file - promoters60/1715595
ctccggcga

SEQ ID NO: 122802 - DNA, 9 bp, Unknown
  misc_feature (1)..( 9): Result.003 file - promoters60/1715595
taccgacga

SEQ ID NO: 122803 - DNA, 7 bp, Unknown
  misc_feature (1)..( 7): Result.003 file - promoters60/1715615
tataatg

SEQ ID NO: 122804 - DNA, 7 bp, Unknown
  misc_feature (1)..( 7): Result.003 file - promoters60/1715615
tatcatg

SEQ ID NO: 122805 - DNA, 6 bp, Unknown
  misc_feature (1)..( 6): Result.003 file - promoters60/1715615
ttgttt

SEQ ID NO: 122806 - DNA, 6 bp, Unknown
  misc_feature (1)..( 6): Result.003 file - promoters60/1715615
ttgttt

SEQ ID NO: 122807 - DNA, 6 bp, Unknown
  misc_feature (1)..( 6): Result.003 file - promoters60/1715615
aatcag

SEQ ID NO: 122808 - DNA, 6 bp, Unknown
  misc_feature (1)..( 6): Result.003 file - promoters60/1715615
aatcag

SEQ ID NO: 122809 - DNA, 6 bp, Unknown
  misc_feature (1)..( 6): Result.003 file - promoters60/1715615
taagga

SEQ ID NO: 122810 - DNA, 6 bp, Unknown
  misc_feature (1)..( 6): Result.003 file - promoters60/1715615
taagga

SEQ ID NO: 122811 - DNA, 8 bp, Unknown
  misc_feature (1)..( 8): Result.003 file - promoters60/1715615
actgttcc

SEQ ID NO: 122812 - DNA, 8 bp, Unknown
  misc_feature (1)..( 8): Result.003 file - promoters60/1715615
tctgttcc

SEQ ID NO: 122813 - DNA, 8 bp, Unknown
  misc_feature (1)..( 8): Result.003 file - promoters60/1715615
tctgttaa

SEQ ID NO: 122814 - DNA, 6 bp, Unknown
  misc_feature (1)..( 6): Result.003 file - promoters60/1715615
taaaga

SEQ ID NO: 122815 - DNA, 6 bp, Unknown
  misc_feature (1)..( 6): Result.003 file - promoters60/1715615
taaaga

SEQ ID NO: 122816 - DNA, 7 bp, Unknown
  misc_feature (1)..( 7): Result.003 file - promoters60/1715615
atctaag

SEQ ID NO: 122817 - DNA, 7 bp, Unknown
  misc_feature (1)..( 7): Result.003 file - promoters60/1715615
atcgaag

SEQ ID NO: 122818 - DNA, 7 bp, Unknown
  misc_feature (1)..( 7): Result.003 file - promoters60/1715615
aattctc

SEQ ID NO: 122819 - DNA, 7 bp, Unknown
  misc_feature (1)..( 7): Result.003 file - promoters60/1715615
aatgctc

SEQ ID NO: 122820 - DNA, 9 bp, Unknown
  misc_feature (1)..( 9): Result.003 file - promoters60/1715615
atgtgcatt

SEQ ID NO: 122821 - DNA, 9 bp, Unknown
  misc_feature (1)..( 9): Result.003 file - promoters60/1715615
atgtccatt

SEQ ID NO: 122822 - DNA, 8 bp, Unknown
  misc_feature (1)..( 8): Result.003 file - promoters60/1715615
ttttgttt

SEQ ID NO: 122823 - DNA, 8 bp, Unknown
  misc_feature (1)..( 8): Result.003 file - promoters60/1715615
ttttcttt

SEQ ID NO: 122824 - DNA, 7 bp, Unknown
  misc_feature (1)..( 7): Result.003 file - promoters60/1715615
atctctt

SEQ ID NO: 122825 - DNA, 7 bp, Unknown
  misc_feature (1)..( 7): Result.003 file - promoters60/1715615
atctctt

SEQ ID NO: 122826 - DNA, 8 bp, Unknown
  misc_feature (1)..( 8): Result.003 file - promoters60/1715615
tcaacttt

SEQ ID NO: 122827 - DNA, 8 bp, Unknown
  misc_feature (1)..( 8): Result.003 file - promoters60/1715615
tcatcttt

SEQ ID NO: 122828 - DNA, 7 bp, Unknown
  misc_feature (1)..( 7): Result.003 file - promoters60/1715615
gaaacaa

SEQ ID NO: 122829 - DNA, 7 bp, Unknown
  misc_feature (1)..( 7): Result.003 file - promoters60/1715615
gaagcaa

SEQ ID NO: 122830 - DNA, 11 bp, Unknown
  misc_feature (1)..( 11): Result.003 file - promoters60/1715810
ttaatttaaag

SEQ ID NO: 122831 - DNA, 11 bp, Unknown
  misc_feature (1)..( 11): Result.003 file - promoters60/1715810
ttaaattaaaa

SEQ ID NO: 122832 - DNA, 11 bp, Unknown
  misc_feature (1)..( 11): Result.003 file - promoters60/1715810
gaaaataaaat

SEQ ID NO: 122833 - DNA, 11 bp, Unknown
  misc_feature (1)..( 11): Result.003 file - promoters60/1715810
ggaaatgaaat

SEQ ID NO: 122834 - DNA, 7 bp, Unknown
  misc_feature (1)..( 7): Result.003 file - promoters60/1715810
aaatttt

SEQ ID NO: 122835 - DNA, 7 bp, Unknown
  misc_feature (1)..( 7): Result.003 file - promoters60/1715810
gaatttt

SEQ ID NO: 122836 - DNA, 7 bp, Unknown
  misc_feature (1)..( 7): Result.003 file - promoters60/1715810
gaattta

SEQ ID NO: 122837 - DNA, 8 bp, Unknown
  misc_feature (1)..( 8): Result.003 file - promoters60/1715810
gtttcttt

SEQ ID NO: 122838 - DNA, 8 bp, Unknown
  misc_feature (1)..( 8): Result.003 file - promoters60/1715810
ttttctta

SEQ ID NO: 122839 - DNA, 8 bp, Unknown
  misc_feature (1)..( 8): Result.003 file - promoters60/1715810
gtttattt

SEQ ID NO: 122840 - DNA, 10 bp, Unknown
  misc_feature (1)..( 10): Result.003 file - promoters60/1715810
aaaaatcaag

SEQ ID NO: 122841 - DNA, 10 bp, Unknown
  misc_feature (1)..( 10): Result.003 file - promoters60/1715810
aaaaaacaaa

SEQ ID NO: 122842 - DNA, 10 bp, Unknown
  misc_feature (1)..( 10): Result.003 file - promoters60/1715810
caaaatcaag

SEQ ID NO: 122843 - DNA, 12 bp, Unknown
  misc_feature (1)..( 12): Result.003 file - promoters60/1715810
aaaagactaaaa

SEQ ID NO: 122844 - DNA, 12 bp, Unknown
  misc_feature (1)..( 12): Result.003 file - promoters60/1715810
aaaagagtaaaa

SEQ ID NO: 122845 - DNA, 12 bp, Unknown
  misc_feature (1)..( 12): Result.003 file - promoters60/1715810
aaaaaacttaga

SEQ ID NO: 122846 - DNA, 11 bp, Unknown
  misc_feature (1)..( 11): Result.003 file - promoters60/1715810
aaaaagacatc

SEQ ID NO: 122847 - DNA, 11 bp, Unknown
  misc_feature (1)..( 11): Result.003 file - promoters60/1715810
aaaaagaaaag

SEQ ID NO: 122848 - DNA, 11 bp, Unknown
  misc_feature (1)..( 11): Result.003 file - promoters60/1715810
ttaaagtaaag

SEQ ID NO: 122849 - DNA, 6 bp, Unknown
  misc_feature (1)..( 6): Result.003 file - promoters60/1715810
taaatt

SEQ ID NO: 122850 - DNA, 6 bp, Unknown
  misc_feature (1)..( 6): Result.003 file - promoters60/1715810
taaatt

SEQ ID NO: 122851 - DNA, 6 bp, Unknown
  misc_feature (1)..( 6): Result.003 file - promoters60/1715810
taaatt

SEQ ID NO: 122852 - DNA, 8 bp, Unknown
  misc_feature (1)..( 8): Result.003 file - promoters60/1715810
acctaaac

SEQ ID NO: 122853 - DNA, 8 bp, Unknown
  misc_feature (1)..( 8): Result.003 file - promoters60/1715810
aactaaac

SEQ ID NO: 122854 - DNA, 8 bp, Unknown
  misc_feature (1)..( 8): Result.003 file - promoters60/1715810
aactaaaa

SEQ ID NO: 122855 - DNA, 9 bp, Unknown
  misc_feature (1)..( 9): Result.003 file - promoters60/1715810
ttaaataat

SEQ ID NO: 122856 - DNA, 9 bp, Unknown
  misc_feature (1)..( 9): Result.003 file - promoters60/1715810
ttaactaaa

SEQ ID NO: 122857 - DNA, 9 bp, Unknown
  misc_feature (1)..( 9): Result.003 file - promoters60/1715810
aaaactaaa

SEQ ID NO: 122858 - DNA, 10 bp, Unknown
  misc_feature (1)..( 10): Result.003 file - promoters60/1716040
aagtttaaaa

SEQ ID NO: 122859 - DNA, 9 bp, Unknown
  misc_feature (1)..( 9): Result.003 file - promoters60/1716040
tttttaaat

SEQ ID NO: 122860 - DNA, 10 bp, Unknown
  misc_feature (1)..( 10): Result.003 file - promoters60/1716040
gttattaaag

SEQ ID NO: 122861 - DNA, 10 bp, Unknown
  misc_feature (1)..( 10): Result.003 file - promoters60/1716040
aaaaaacttt

SEQ ID NO: 122862 - DNA, 10 bp, Unknown
  misc_feature (1)..( 10): Result.003 file - promoters60/1716040
ttgcaacttt

SEQ ID NO: 122863 - DNA, 10 bp, Unknown
  misc_feature (1)..( 10): Result.003 file - promoters60/1716040
ttgcaccttt

SEQ ID NO: 122864 - DNA, 9 bp, Unknown
  misc_feature (1)..( 9): Result.003 file - promoters60/1716040
tttcttatt

SEQ ID NO: 122865 - DNA, 9 bp, Unknown
  misc_feature (1)..( 9): Result.003 file - promoters60/1716040
aatctaatt

SEQ ID NO: 122866 - DNA, 9 bp, Unknown
  misc_feature (1)..( 9): Result.003 file - promoters60/1716040
ttttttaat

SEQ ID NO: 122867 - DNA, 8 bp, Unknown
  misc_feature (1)..( 8): Result.003 file - promoters60/1716040
tattattt

SEQ ID NO: 122868 - DNA, 8 bp, Unknown
  misc_feature (1)..( 8): Result.003 file - promoters60/1716040
gattcttt

SEQ ID NO: 122869 - DNA, 8 bp, Unknown
  misc_feature (1)..( 8): Result.003 file - promoters60/1716040
gattctct

SEQ ID NO: 122870 - DNA, 8 bp, Unknown
  misc_feature (1)..( 8): Result.003 file - promoters60/1716040
atttcagg

SEQ ID NO: 122871 - DNA, 8 bp, Unknown
  misc_feature (1)..( 8): Result.003 file - promoters60/1716040
atttcatg

SEQ ID NO: 122872 - DNA, 8 bp, Unknown
  misc_feature (1)..( 8): Result.003 file - promoters60/1716040
attacatg

SEQ ID NO: 122873 - DNA, 7 bp, Unknown
  misc_feature (1)..( 7): Result.003 file - promoters60/1716040
ttggttc

SEQ ID NO: 122874 - DNA, 7 bp, Unknown
  misc_feature (1)..( 7): Result.003 file - promoters60/1716040
atggttc

SEQ ID NO: 122875 - DNA, 7 bp, Unknown
  misc_feature (1)..( 7): Result.003 file - promoters60/1716040
atggttt

SEQ ID NO: 122876 - DNA, 9 bp, Unknown
  misc_feature (1)..( 9): Result.003 file - promoters60/1806998
tataaagaa

SEQ ID NO: 122877 - DNA, 9 bp, Unknown
  misc_feature (1)..( 9): Result.003 file - promoters60/1806998
tatgaaggt

SEQ ID NO: 122878 - DNA, 9 bp, Unknown
  misc_feature (1)..( 9): Result.003 file - promoters60/1806998
aataacgaa

SEQ ID NO: 122879 - DNA, 10 bp, Unknown
  misc_feature (1)..( 10): Result.003 file - promoters60/1806998
aactcaaaaa

SEQ ID NO: 122880 - DNA, 10 bp, Unknown
  misc_feature (1)..( 10): Result.003 file - promoters60/1806998
aacacaaagt

SEQ ID NO: 122881 - DNA, 10 bp, Unknown
  misc_feature (1)..( 10): Result.003 file - promoters60/1806998
ataacaaagt

SEQ ID NO: 122882 - DNA, 8 bp, Unknown
  misc_feature (1)..( 8): Result.003 file - promoters60/1807067
ttttcaaa

SEQ ID NO: 122883 - DNA, 8 bp, Unknown
  misc_feature (1)..( 8): Result.003 file - promoters60/1807067
ttttgaaa

SEQ ID NO: 122884 - DNA, 8 bp, Unknown
  misc_feature (1)..( 8): Result.003 file - promoters60/1807067
atttaaaa

SEQ ID NO: 122885 - DNA, 10 bp, Unknown
  misc_feature (1)..( 10): Result.003 file - promoters60/1807067
caacttattt

SEQ ID NO: 122886 - DNA, 10 bp, Unknown
  misc_feature (1)..( 10): Result.003 file - promoters60/1807067
taacttattg

SEQ ID NO: 122887 - DNA, 10 bp, Unknown
  misc_feature (1)..( 10): Result.003 file - promoters60/1807067
caactaattt

SEQ ID NO: 122888 - DNA, 8 bp, Unknown
  misc_feature (1)..( 8): Result.003 file - promoters60/1807067
aatatttt

SEQ ID NO: 122889 - DNA, 8 bp, Unknown
  misc_feature (1)..( 8): Result.003 file - promoters60/1807067
gttatttt

SEQ ID NO: 122890 - DNA, 8 bp, Unknown
  misc_feature (1)..( 8): Result.003 file - promoters60/1807067
aatatttt

SEQ ID NO: 122891 - DNA, 13 bp, Unknown
  misc_feature (1)..( 13): Result.003 file - promoters60/1807067
attatattaacat

SEQ ID NO: 122892 - DNA, 13 bp, Unknown
  misc_feature (1)..( 13): Result.003 file - promoters60/1807067
attttatcaatgg

SEQ ID NO: 122893 - DNA, 13 bp, Unknown
  misc_feature (1)..( 13): Result.003 file - promoters60/1807067
tgtatatgaacat

SEQ ID NO: 122894 - DNA, 9 bp, Unknown
  misc_feature (1)..( 9): Result.003 file - promoters60/1807067
atgatcaaa

SEQ ID NO: 122895 - DNA, 9 bp, Unknown
  misc_feature (1)..( 9): Result.003 file - promoters60/1807067
atgttcata

SEQ ID NO: 122896 - DNA, 9 bp, Unknown
  misc_feature (1)..( 9): Result.003 file - promoters60/1807067
aagataaaa

SEQ ID NO: 122897 - DNA, 8 bp, Unknown
  misc_feature (1)..( 8): Result.003 file - promoters60/1807067
ttaaaaca

SEQ ID NO: 122898 - DNA, 8 bp, Unknown
  misc_feature (1)..( 8): Result.003 file - promoters60/1807067
ttaaaaca

SEQ ID NO: 122899 - DNA, 8 bp, Unknown
  misc_feature (1)..( 8): Result.003 file - promoters60/1807067
ataaaaca

SEQ ID NO: 122900 - DNA, 10 bp, Unknown
  misc_feature (1)..( 10): Result.003 file - promoters60/1807067
ttgatcaaca

SEQ ID NO: 122901 - DNA, 10 bp, Unknown
  misc_feature (1)..( 10): Result.003 file - promoters60/1807067
ttgataaacg

SEQ ID NO: 122902 - DNA, 10 bp, Unknown
  misc_feature (1)..( 10): Result.003 file - promoters60/1807067
ggtatccaca

SEQ ID NO: 122903 - DNA, 9 bp, Unknown
  misc_feature (1)..( 9): Result.003 file - promoters60/1807067
atgtattat

SEQ ID NO: 122904 - DNA, 9 bp, Unknown
  misc_feature (1)..( 9): Result.003 file - promoters60/1807067
atgaattag

SEQ ID NO: 122905 - DNA, 9 bp, Unknown
  misc_feature (1)..( 9): Result.003 file - promoters60/1807067
gtgtaatat

SEQ ID NO: 122906 - DNA, 10 bp, Unknown
  misc_feature (1)..( 10): Result.003 file - promoters60/1807067
atatcaataa

SEQ ID NO: 122907 - DNA, 10 bp, Unknown
  misc_feature (1)..( 10): Result.003 file - promoters60/1807067
atataaataa

SEQ ID NO: 122908 - DNA, 10 bp, Unknown
  misc_feature (1)..( 10): Result.003 file - promoters60/1807067
atataaagaa

SEQ ID NO: 122909 - DNA, 7 bp, Unknown
  misc_feature (1)..( 7): Result.003 file - promoters60/1807067
aattttt

SEQ ID NO: 122910 - DNA, 7 bp, Unknown
  misc_feature (1)..( 7): Result.003 file - promoters60/1807067
aatattt

SEQ ID NO: 122911 - DNA, 6 bp, Unknown
  misc_feature (1)..( 6): Result.003 file - promoters60/1807067
atattt

SEQ ID NO: 122912 - DNA, 10 bp, Unknown
  misc_feature (1)..( 10): Result.003 file - promoters60/1807067
cacatatata

SEQ ID NO: 122913 - DNA, 10 bp, Unknown
  misc_feature (1)..( 10): Result.003 file - promoters60/1807067
tttatatata

SEQ ID NO: 122914 - DNA, 10 bp, Unknown
  misc_feature (1)..( 10): Result.003 file - promoters60/1807067
tctttaaata

SEQ ID NO: 122915 - DNA, 8 bp, Unknown
  misc_feature (1)..( 8): Result.003 file - promoters60/1807067
tatataaa

SEQ ID NO: 122916 - DNA, 8 bp, Unknown
  misc_feature (1)..( 8): Result.003 file - promoters60/1807067
tatttaaa

SEQ ID NO: 122917 - DNA, 8 bp, Unknown
  misc_feature (1)..( 8): Result.003 file - promoters60/1807067
tctttaaa

SEQ ID NO: 122918 - DNA, 8 bp, Unknown
  misc_feature (1)..( 8): Result.003 file - promoters60/1807067
acatgtat

SEQ ID NO: 122919 - DNA, 8 bp, Unknown
  misc_feature (1)..( 8): Result.003 file - promoters60/1807067
acatgtta

SEQ ID NO: 122920 - DNA, 8 bp, Unknown
  misc_feature (1)..( 8): Result.003 file - promoters60/1807067
tcatatta

SEQ ID NO: 122921 - DNA, 9 bp, Unknown
  misc_feature (1)..( 9): Result.003 file - promoters60/1807244
tgtcctaat

SEQ ID NO: 122922 - DNA, 9 bp, Unknown
  misc_feature (1)..( 9): Result.003 file - promoters60/1807244
tgtcttaac

SEQ ID NO: 122923 - DNA, 9 bp, Unknown
  misc_feature (1)..( 9): Result.003 file - promoters60/1807244
cgtccgaat

SEQ ID NO: 122924 - DNA, 6 bp, Unknown
  misc_feature (1)..( 6): Result.003 file - promoters60/1807244
gagaga

SEQ ID NO: 122925 - DNA, 6 bp, Unknown
  misc_feature (1)..( 6): Result.003 file - promoters60/1807244
gagaga

SEQ ID NO: 122926 - DNA, 8 bp, Unknown
  misc_feature (1)..( 8): Result.003 file - promoters60/1807244
gaattagg

SEQ ID NO: 122927 - DNA, 8 bp, Unknown
  misc_feature (1)..( 8): Result.003 file - promoters60/1807244
gaagtagg

SEQ ID NO: 122928 - DNA, 6 bp, Unknown
  misc_feature (1)..( 6): Result.003 file - promoters60/1807244
aagcta

SEQ ID NO: 122929 - DNA, 6 bp, Unknown
  misc_feature (1)..( 6): Result.003 file - promoters60/1807244
aagcta

SEQ ID NO: 122930 - DNA, 7 bp, Unknown
  misc_feature (1)..( 7): Result.003 file - promoters60/1807244
catacta

SEQ ID NO: 122931 - DNA, 7 bp, Unknown
  misc_feature (1)..( 7): Result.003 file - promoters60/1807244
catacta

SEQ ID NO: 122932 - DNA, 7 bp, Unknown
  misc_feature (1)..( 7): Result.003 file - promoters60/1807244
aaagcag

SEQ ID NO: 122933 - DNA, 7 bp, Unknown
  misc_feature (1)..( 7): Result.003 file - promoters60/1807244
aaaacag

SEQ ID NO: 122934 - DNA, 6 bp, Unknown
  misc_feature (1)..( 6): Result.003 file - promoters60/1807244
gtggga

SEQ ID NO: 122935 - DNA, 6 bp, Unknown
  misc_feature (1)..( 6): Result.003 file - promoters60/1807244
gtggga

SEQ ID NO: 122936 - DNA, 6 bp, Unknown
  misc_feature (1)..( 6): Result.003 file - promoters60/1807244
ttcttg

SEQ ID NO: 122937 - DNA, 6 bp, Unknown
  misc_feature (1)..( 6): Result.003 file - promoters60/1807244
ttcttg

SEQ ID NO: 122938 - DNA, 6 bp, Unknown
  misc_feature (1)..( 6): Result.003 file - promoters60/1807244
attaaa

SEQ ID NO: 122939 - DNA, 6 bp, Unknown
  misc_feature (1)..( 6): Result.003 file - promoters60/1807244
attaaa

SEQ ID NO: 122940 - DNA, 7 bp, Unknown
  misc_feature (1)..( 7): Result.003 file - promoters60/1807244
aacctcc

SEQ ID NO: 122941 - DNA, 7 bp, Unknown
  misc_feature (1)..( 7): Result.003 file - promoters60/1807244
aacgtcc

SEQ ID NO: 122942 - DNA, 9 bp, Unknown
  misc_feature (1)..( 9): Result.003 file - promoters60/1807244
aagatcgaa

SEQ ID NO: 122943 - DNA, 9 bp, Unknown
  misc_feature (1)..( 9): Result.003 file - promoters60/1807244
aagttcgaa

SEQ ID NO: 122944 - DNA, 7 bp, Unknown
  misc_feature (1)..( 7): Result.003 file - promoters60/1807244
atgcagc

SEQ ID NO: 122945 - DNA, 7 bp, Unknown
  misc_feature (1)..( 7): Result.003 file - promoters60/1807244
atggagc

SEQ ID NO: 122946 - DNA, 6 bp, Unknown
  misc_feature (1)..( 6): Result.003 file - promoters60/1807244
tcacat

SEQ ID NO: 122947 - DNA, 6 bp, Unknown
  misc_feature (1)..( 6): Result.003 file - promoters60/1807244
tcacat

SEQ ID NO: 122948 - DNA, 6 bp, Unknown
  misc_feature (1)..( 6): Result.003 file - promoters60/1807244
aaacat

SEQ ID NO: 122949 - DNA, 6 bp, Unknown
  misc_feature (1)..( 6): Result.003 file - promoters60/1807244
aaacat

SEQ ID NO: 122950 - DNA, 8 bp, Unknown
  misc_feature (1)..( 8): Result.003 file - promoters60/1807415
ctttttct

SEQ ID NO: 122951 - DNA, 8 bp, Unknown
  misc_feature (1)..( 8): Result.003 file - promoters60/1807415
ctttgtct

SEQ ID NO: 122952 - DNA, 8 bp, Unknown
  misc_feature (1)..( 8): Result.003 file - promoters60/1807415
gtttgtcc

SEQ ID NO: 122953 - DNA, 8 bp, Unknown
  misc_feature (1)..( 8): Result.003 file - promoters60/1807415
tttctctc

SEQ ID NO: 122954 - DNA, 8 bp, Unknown
  misc_feature (1)..( 8): Result.003 file - promoters60/1807415
tttctctc

SEQ ID NO: 122955 - DNA, 8 bp, Unknown
  misc_feature (1)..( 8): Result.003 file - promoters60/1807415
attctctg

SEQ ID NO: 122956 - DNA, 7 bp, Unknown
  misc_feature (1)..( 7): Result.003 file - promoters60/1807415
caaataa

SEQ ID NO: 122957 - DNA, 7 bp, Unknown
  misc_feature (1)..( 7): Result.003 file - promoters60/1807415
caaataa

SEQ ID NO: 122958 - DNA, 7 bp, Unknown
  misc_feature (1)..( 7): Result.003 file - promoters60/1807415
taaataa

SEQ ID NO: 122959 - DNA, 7 bp, Unknown
  misc_feature (1)..( 7): Result.003 file - promoters60/1807415
atcttta

SEQ ID NO: 122960 - DNA, 7 bp, Unknown
  misc_feature (1)..( 7): Result.003 file - promoters60/1807415
ttcttta

SEQ ID NO: 122961 - DNA, 7 bp, Unknown
  misc_feature (1)..( 7): Result.003 file - promoters60/1807415
atttttt

SEQ ID NO: 122962 - DNA, 7 bp, Unknown
  misc_feature (1)..( 7): Result.003 file - promoters60/1807415
atttttc

SEQ ID NO: 122963 - DNA, 10 bp, Unknown
  misc_feature (1)..( 10): Result.003 file - promoters60/1807415
catttaatat

SEQ ID NO: 122964 - DNA, 10 bp, Unknown
  misc_feature (1)..( 10): Result.003 file - promoters60/1807415
cattaaataa

SEQ ID NO: 122965 - DNA, 10 bp, Unknown
  misc_feature (1)..( 10): Result.003 file - promoters60/1807415
taccaaataa

SEQ ID NO: 122966 - DNA, 9 bp, Unknown
  misc_feature (1)..( 9): Result.003 file - promoters60/1807736
atttttata

SEQ ID NO: 122967 - DNA, 9 bp, Unknown
  misc_feature (1)..( 9): Result.003 file - promoters60/1807736
atttgtata

SEQ ID NO: 122968 - DNA, 9 bp, Unknown
  misc_feature (1)..( 9): Result.003 file - promoters60/1807736
cattgtatc

SEQ ID NO: 122969 - DNA, 18 bp, Unknown
  misc_feature (1)..( 18): Result.003 file - promoters60/1807771
cagtatatcattcttttg

SEQ ID NO: 122970 - DNA, 18 bp, Unknown
  misc_feature (1)..( 18): Result.003 file - promoters60/1807771
atgtatttcactcttttt

SEQ ID NO: 122971 - DNA, 18 bp, Unknown
  misc_feature (1)..( 18): Result.003 file - promoters60/1807771
atggattgtcatgtgttg

SEQ ID NO: 122972 - DNA, 18 bp, Unknown
  misc_feature (1)..( 18): Result.003 file - promoters60/1807771
atatttttcactaattca

SEQ ID NO: 122973 - DNA, 18 bp, Unknown
  misc_feature (1)..( 18): Result.003 file - promoters60/1807771
ttgatatatgtccttttt

SEQ ID NO: 122974 - DNA, 18 bp, Unknown
  misc_feature (1)..( 18): Result.003 file - promoters60/1807771
cttattttcaaaaaaatt

SEQ ID NO: 122975 - DNA, 12 bp, Unknown
  misc_feature (1)..( 12): Result.003 file - promoters60/1807771
tgattaaattga

SEQ ID NO: 122976 - DNA, 12 bp, Unknown
  misc_feature (1)..( 12): Result.003 file - promoters60/1807771
tgatttaataaa

SEQ ID NO: 122977 - DNA, 12 bp, Unknown
  misc_feature (1)..( 12): Result.003 file - promoters60/1807771
aacataaattgt

SEQ ID NO: 122978 - DNA, 12 bp, Unknown
  misc_feature (1)..( 12): Result.003 file - promoters60/1807771
aaaataaataca

SEQ ID NO: 122979 - DNA, 12 bp, Unknown
  misc_feature (1)..( 12): Result.003 file - promoters60/1807771
agaataaaaaca

SEQ ID NO: 122980 - DNA, 12 bp, Unknown
  misc_feature (1)..( 12): Result.003 file - promoters60/1807771
agaataaatatc

SEQ ID NO: 122981 - DNA, 7 bp, Unknown
  misc_feature (1)..( 7): Result.003 file - promoters60/1807774
aaagttt

SEQ ID NO: 122982 - DNA, 7 bp, Unknown
  misc_feature (1)..( 7): Result.003 file - promoters60/1807774
aaatttt

SEQ ID NO: 122983 - DNA, 7 bp, Unknown
  misc_feature (1)..( 7): Result.003 file - promoters60/1807774
aaattta

SEQ ID NO: 122984 - DNA, 8 bp, Unknown
  misc_feature (1)..( 8): Result.003 file - promoters60/1807774
atatcaac

SEQ ID NO: 122985 - DNA, 8 bp, Unknown
  misc_feature (1)..( 8): Result.003 file - promoters60/1807774
ataccaac

SEQ ID NO: 122986 - DNA, 8 bp, Unknown
  misc_feature (1)..( 8): Result.003 file - promoters60/1807774
ttacaaac

SEQ ID NO: 122987 - DNA, 10 bp, Unknown
  misc_feature (1)..( 10): Result.003 file - promoters60/1807774
ttttggaaat

SEQ ID NO: 122988 - DNA, 10 bp, Unknown
  misc_feature (1)..( 10): Result.003 file - promoters60/1807774
ttttcgaaag

SEQ ID NO: 122989 - DNA, 10 bp, Unknown
  misc_feature (1)..( 10): Result.003 file - promoters60/1807774
ccaaggaaat

SEQ ID NO: 122990 - DNA, 8 bp, Unknown
  misc_feature (1)..( 8): Result.003 file - promoters60/1807774
cactgttc

SEQ ID NO: 122991 - DNA, 8 bp, Unknown
  misc_feature (1)..( 8): Result.003 file - promoters60/1807774
cactgttt

SEQ ID NO: 122992 - DNA, 8 bp, Unknown
  misc_feature (1)..( 8): Result.003 file - promoters60/1807774
tactattt

SEQ ID NO: 122993 - DNA, 10 bp, Unknown
  misc_feature (1)..( 10): Result.003 file - promoters60/1807774
taaaaagctc

SEQ ID NO: 122994 - DNA, 10 bp, Unknown
  misc_feature (1)..( 10): Result.003 file - promoters60/1807774
taaaaaatat

SEQ ID NO: 122995 - DNA, 10 bp, Unknown
  misc_feature (1)..( 10): Result.003 file - promoters60/1807774
taaaaatttt

SEQ ID NO: 122996 - DNA, 10 bp, Unknown
  misc_feature (1)..( 10): Result.003 file - promoters60/1807774
taacaatttt

SEQ ID NO: 122997 - DNA, 8 bp, Unknown
  misc_feature (1)..( 8): Result.003 file - promoters60/1807774
atttgttt

SEQ ID NO: 122998 - DNA, 8 bp, Unknown
  misc_feature (1)..( 8): Result.003 file - promoters60/1807774
atttattt

SEQ ID NO: 122999 - DNA, 8 bp, Unknown
  misc_feature (1)..( 8): Result.003 file - promoters60/1807774
attaattg

SEQ ID NO: 123000 - DNA, 11 bp, Unknown
  misc_feature (1)..( 11): Result.003 file - promoters60/1807774
taacaattttt

SEQ ID NO: 123001 - DNA, 11 bp, Unknown
  misc_feature (1)..( 11): Result.003 file - promoters60/1807774
catttattttt

SEQ ID NO: 123002 - DNA, 11 bp, Unknown
  misc_feature (1)..( 11): Result.003 file - promoters60/1807774
taaaaatttta

SEQ ID NO: 123003 - DNA, 8 bp, Unknown
  misc_feature (1)..( 8): Result.003 file - promoters60/1807774
tataaata

SEQ ID NO: 123004 - DNA, 8 bp, Unknown
  misc_feature (1)..( 8): Result.003 file - promoters60/1807774
tatatata

SEQ ID NO: 123005 - DNA, 8 bp, Unknown
  misc_feature (1)..( 8): Result.003 file - promoters60/1807774
tataaaac

SEQ ID NO: 123006 - DNA, 10 bp, Unknown
  misc_feature (1)..( 10): Result.003 file - promoters60/1808111
ataaagaaag

SEQ ID NO: 123007 - DNA, 10 bp, Unknown
  misc_feature (1)..( 10): Result.003 file - promoters60/1808111
ttaaaaaaaa

SEQ ID NO: 123008 - DNA, 10 bp, Unknown
  misc_feature (1)..( 10): Result.003 file - promoters60/1808111
aaaaaaaaaa

SEQ ID NO: 123009 - DNA, 10 bp, Unknown
  misc_feature (1)..( 10): Result.003 file - promoters60/1808111
caaaacaaaa

SEQ ID NO: 123010 - DNA, 10 bp, Unknown
  misc_feature (1)..( 10): Result.003 file - promoters60/1808111
ttaaaaaagg

SEQ ID NO: 123011 - DNA, 11 bp, Unknown
  misc_feature (1)..( 11): Result.003 file - promoters60/1808111
acaaagggata

SEQ ID NO: 123012 - DNA, 11 bp, Unknown
  misc_feature (1)..( 11): Result.003 file - promoters60/1808111
ataaatggaaa

SEQ ID NO: 123013 - DNA, 11 bp, Unknown
  misc_feature (1)..( 11): Result.003 file - promoters60/1808111
atatatgtgat

SEQ ID NO: 123014 - DNA, 11 bp, Unknown
  misc_feature (1)..( 11): Result.003 file - promoters60/1808111
caaaatggaaa

SEQ ID NO: 123015 - DNA, 34 bp, Unknown; identical to SEQ ID NO: 76977
  misc_feature (1)..( 34): Result.003 file - promoters60/1808111

SEQ ID NO: 123016 - DNA, 34 bp, Unknown; identical to SEQ ID NO: 104971
  misc_feature (1)..( 34): Result.003 file - promoters60/1808111

SEQ ID NO: 123017 - DNA, 34 bp, Unknown; identical to SEQ ID NO: 104972
  misc_feature (1)..( 34): Result.003 file - promoters60/1808111

SEQ ID NO: 123018 - DNA, 34 bp, Unknown; identical to SEQ ID NO: 76979
  misc_feature (1)..( 34): Result.003 file - promoters60/1808111

SEQ ID NO: 123019 - DNA, 8 bp, Unknown
  misc_feature (1)..( 8): Result.003 file - promoters60/1808137
tgtttaaa

SEQ ID NO: 123020 - DNA, 8 bp, Unknown
  misc_feature (1)..( 8): Result.003 file - promoters60/1808137
tgtgtaaa

SEQ ID NO: 123021 - DNA, 8 bp, Unknown
  misc_feature (1)..( 8): Result.003 file - promoters60/1808137
acgtgatg

SEQ ID NO: 123022 - DNA, 8 bp, Unknown
  misc_feature (1)..( 8): Result.003 file - promoters60/1808137
acgttatg

SEQ ID NO: 123023 - DNA, 6 bp, Unknown
  misc_feature (1)..( 6): Result.003 file - promoters60/1808137
atgggc

SEQ ID NO: 123024 - DNA, 6 bp, Unknown
  misc_feature (1)..( 6): Result.003 file - promoters60/1808137
atgggc

SEQ ID NO: 123025 - DNA, 6 bp, Unknown
  misc_feature (1)..( 6): Result.003 file - promoters60/1808137
ccaata

SEQ ID NO: 123026 - DNA, 6 bp, Unknown
  misc_feature (1)..( 6): Result.003 file - promoters60/1808137
ccaata

SEQ ID NO: 123027 - DNA, 10 bp, Unknown
  misc_feature (1)..( 10): Result.003 file - promoters60/1808137
ggtttatttt

SEQ ID NO: 123028 - DNA, 10 bp, Unknown
  misc_feature (1)..( 10): Result.003 file - promoters60/1808137
ggtttattca

SEQ ID NO: 123029 - DNA, 10 bp, Unknown
  misc_feature (1)..( 10): Result.003 file - promoters60/1808137
attttatttt

SEQ ID NO: 123030 - DNA, 6 bp, Unknown
  misc_feature (1)..( 6): Result.003 file - promoters60/1808137
gatgtt

SEQ ID NO: 123031 - DNA, 6 bp, Unknown
  misc_feature (1)..( 6): Result.003 file - promoters60/1808137
gatgtt

SEQ ID NO: 123032 - DNA, 7 bp, Unknown
  misc_feature (1)..( 7): Result.003 file - promoters60/1808137
tttaatt

SEQ ID NO: 123033 - DNA, 7 bp, Unknown
  misc_feature (1)..( 7): Result.003 file - promoters60/1808137
tttgatt

SEQ ID NO: 123034 - DNA, 6 bp, Unknown
  misc_feature (1)..( 6): Result.003 file - promoters60/1808137
ttaaga

SEQ ID NO: 123035 - DNA, 6 bp, Unknown
  misc_feature (1)..( 6): Result.003 file - promoters60/1808137
ttaaga

SEQ ID NO: 123036 - DNA, 6 bp, Unknown
  misc_feature (1)..( 6): Result.003 file - promoters60/1808137
gaaaag

SEQ ID NO: 123037 - DNA, 6 bp, Unknown
  misc_feature (1)..( 6): Result.003 file - promoters60/1808137
gaaaag

SEQ ID NO: 123038 - DNA, 7 bp, Unknown
  misc_feature (1)..( 7): Result.003 file - promoters60/1808137
atggtaa

SEQ ID NO: 123039 - DNA, 7 bp, Unknown
  misc_feature (1)..( 7): Result.003 file - promoters60/1808137
atgataa

SEQ ID NO: 123040 - DNA, 7 bp, Unknown
  misc_feature (1)..( 7): Result.003 file - promoters60/1808137
aacctgt

SEQ ID NO: 123041 - DNA, 7 bp, Unknown
  misc_feature (1)..( 7): Result.003 file - promoters60/1808137
aacttgt

SEQ ID NO: 123042 - DNA, 8 bp, Unknown
  misc_feature (1)..( 8): Result.003 file - promoters60/1808137
ttggatat

SEQ ID NO: 123043 - DNA, 8 bp, Unknown
  misc_feature (1)..( 8): Result.003 file - promoters60/1808137
ttgcatat

SEQ ID NO: 123044 - DNA, 8 bp, Unknown
  misc_feature (1)..( 8): Result.003 file - promoters60/1808137
tgttatgc

SEQ ID NO: 123045 - DNA, 8 bp, Unknown
  misc_feature (1)..( 8): Result.003 file - promoters60/1808137
tgttttgc

SEQ ID NO: 123046 - DNA, 7 bp, Unknown
  misc_feature (1)..( 7): Result.003 file - promoters60/1808137
ttgctaa

SEQ ID NO: 123047 - DNA, 7 bp, Unknown
  misc_feature (1)..( 7): Result.003 file - promoters60/1808137
ttgttaa

SEQ ID NO: 123048 - DNA, 6 bp, Unknown
  misc_feature (1)..( 6): Result.003 file - promoters60/1808137
ttcctt

SEQ ID NO: 123049 - DNA, 6 bp, Unknown
  misc_feature (1)..( 6): Result.003 file - promoters60/1808137
ttcctt

SEQ ID NO: 123050 - DNA, 6 bp, Unknown
  misc_feature (1)..( 6): Result.003 file - promoters60/1808137
aagaga

SEQ ID NO: 123051 - DNA, 6 bp, Unknown
  misc_feature (1)..( 6): Result.003 file - promoters60/1808137
aagaga

SEQ ID NO: 123052 - DNA, 7 bp, Unknown
  misc_feature (1)..( 7): Result.003 file - promoters60/1808137
aaggaag

SEQ ID NO: 123053 - DNA, 7 bp, Unknown
  misc_feature (1)..( 7): Result.003 file - promoters60/1808137
aagaaag

SEQ ID NO: 123054 - DNA, 13 bp, Unknown
  misc_feature (1)..( 13): Result.003 file - promoters60/1808156
atggtttgtttat

SEQ ID NO: 123055 - DNA, 13 bp, Unknown
  misc_feature (1)..( 13): Result.003 file - promoters60/1808156
cctagatgtgtat

SEQ ID NO: 123056 - DNA, 13 bp, Unknown
  misc_feature (1)..( 13): Result.003 file - promoters60/1808156
atggtctgttttc

SEQ ID NO: 123057 - DNA, 13 bp, Unknown
  misc_feature (1)..( 13): Result.003 file - promoters60/1808156
cgtttctcttttt

SEQ ID NO: 123058 - DNA, 10 bp, Unknown
  misc_feature (1)..( 10): Result.003 file - promoters60/1808156
aaaatttgaa

SEQ ID NO: 123059 - DNA, 10 bp, Unknown
  misc_feature (1)..( 10): Result.003 file - promoters60/1808156
aaactttgat

SEQ ID NO: 123060 - DNA, 10 bp, Unknown
  misc_feature (1)..( 10): Result.003 file - promoters60/1808156
acaatgtgaa

SEQ ID NO: 123061 - DNA, 10 bp, Unknown
  misc_feature (1)..( 10): Result.003 file - promoters60/1808156
gcaatatgat

SEQ ID NO: 123062 - DNA, 11 bp, Unknown
  misc_feature (1)..( 11): Result.003 file - promoters60/1808172
ccttgagttta

SEQ ID NO: 123063 - DNA, 11 bp, Unknown
  misc_feature (1)..( 11): Result.003 file - promoters60/1808172
ttttgactttt

SEQ ID NO: 123064 - DNA, 11 bp, Unknown
  misc_feature (1)..( 11): Result.003 file - promoters60/1808172
tgttgaatttt

SEQ ID NO: 123065 - DNA, 11 bp, Unknown
  misc_feature (1)..( 11): Result.003 file - promoters60/1808172
tgttgaatttt

SEQ ID NO: 123066 - DNA, 11 bp, Unknown
  misc_feature (1)..( 11): Result.003 file - promoters60/1808172
cgttggcttct

SEQ ID NO: 123067 - DNA, 11 bp, Unknown
  misc_feature (1)..( 11): Result.003 file - promoters60/1808172
attctaatttt

SEQ ID NO: 123068 - DNA, 11 bp, Unknown
  misc_feature (1)..( 11): Result.003 file - promoters60/1808172
agttaactttg

SEQ ID NO: 123069 - DNA, 11 bp, Unknown
  misc_feature (1)..( 11): Result.003 file - promoters60/1808172
agtcaacttgt

SEQ ID NO: 123070 - DNA, 10 bp, Unknown
  misc_feature (1)..( 10): Result.003 file - promoters60/1808172
aaaaacaaac

SEQ ID NO: 123071 - DNA, 10 bp, Unknown
  misc_feature (1)..( 10): Result.003 file - promoters60/1808172
cggaacaaaa

SEQ ID NO: 123072 - DNA, 10 bp, Unknown
  misc_feature (1)..( 10): Result.003 file - promoters60/1808172
tttaaaaaaa

SEQ ID NO: 123073 - DNA, 10 bp, Unknown
  misc_feature (1)..( 10): Result.003 file - promoters60/1808172
tcaaacaaat

SEQ ID NO: 123074 - DNA, 10 bp, Unknown
  misc_feature (1)..( 10): Result.003 file - promoters60/1808172
tataagaaaa

SEQ ID NO: 123075 - DNA, 10 bp, Unknown
  misc_feature (1)..( 10): Result.003 file - promoters60/1808172
tatgagaaat

SEQ ID NO: 123076 - DNA, 12 bp, Unknown
  misc_feature (1)..( 12): Result.003 file - promoters60/1808172
aatgaaaaacaa

SEQ ID NO: 123077 - DNA, 12 bp, Unknown
  misc_feature (1)..( 12): Result.003 file - promoters60/1808172
aatgaaattcat

SEQ ID NO: 123078 - DNA, 13 bp, Unknown
  misc_feature (1)..( 13): Result.003 file - promoters60/1808172
tatgagaaatcat

SEQ ID NO: 123079 - DNA, 13 bp, Unknown
  misc_feature (1)..( 13): Result.003 file - promoters60/1808172
aatgatattcgta

SEQ ID NO: 123080 - DNA, 13 bp, Unknown
  misc_feature (1)..( 13): Result.003 file - promoters60/1808172
aatgttatttttt

SEQ ID NO: 123081 - DNA, 13 bp, Unknown
  misc_feature (1)..( 13): Result.003 file - promoters60/1808172
tctgttatctttt

SEQ ID NO: 123082 - DNA, 13 bp, Unknown
  misc_feature (1)..( 13): Result.003 file - promoters60/1808172
ctatttatttcct

SEQ ID NO: 123083 - DNA, 14 bp, Unknown
  misc_feature (1)..( 14): Result.003 file - promoters60/1808172
atattattagtagg

SEQ ID NO: 123084 - DNA, 14 bp, Unknown
  misc_feature (1)..( 14): Result.003 file - promoters60/1808172
atataattattttg

SEQ ID NO: 123085 - DNA, 14 bp, Unknown
  misc_feature (1)..( 14): Result.003 file - promoters60/1808172
ttattatattgaga

SEQ ID NO: 123086 - DNA, 14 bp, Unknown
  misc_feature (1)..( 14): Result.003 file - promoters60/1808172
ccttaattaccgat

SEQ ID NO: 123087 - DNA, 14 bp, Unknown
  misc_feature (1)..( 14): Result.003 file - promoters60/1808172
gattaattcttttc

SEQ ID NO: 123088 - DNA, 14 bp, Unknown
  misc_feature (1)..( 14): Result.003 file - promoters60/1808172
ttttaatgattttg

SEQ ID NO: 123089 - DNA, 14 bp, Unknown
  misc_feature (1)..( 14): Result.003 file - promoters60/1808172
attctatttcctta

SEQ ID NO: 123090 - DNA, 13 bp, Unknown
  misc_feature (1)..( 13): Result.003 file - promoters60/1808172
cgttaatttttga

SEQ ID NO: 123091 - DNA, 13 bp, Unknown
  misc_feature (1)..( 13): Result.003 file - promoters60/1808172
ttctaattttcta

SEQ ID NO: 123092 - DNA, 13 bp, Unknown
  misc_feature (1)..( 13): Result.003 file - promoters60/1808172
gttgaattttgga

SEQ ID NO: 123093 - DNA, 13 bp, Unknown
  misc_feature (1)..( 13): Result.003 file - promoters60/1808172
gttgaattttttt

SEQ ID NO: 123094 - DNA, 13 bp, Unknown
  misc_feature (1)..( 13): Result.003 file - promoters60/1808172
agttaactttgta

SEQ ID NO: 123095 - DNA, 13 bp, Unknown
  misc_feature (1)..( 13): Result.003 file - promoters60/1808172
tcatcacttggta

SEQ ID NO: 123096 - DNA, 13 bp, Unknown
  misc_feature (1)..( 13): Result.003 file - promoters60/1808172
agtcaacttgtac

SEQ ID NO: 123097 - DNA, 6 bp, Unknown
  misc_feature (1)..( 6): Result.003 file - promoters60/1808572
aattct

SEQ ID NO: 123098 - DNA, 6 bp, Unknown
  misc_feature (1)..( 6): Result.003 file - promoters60/1808572
aattct

SEQ ID NO: 123099 - DNA, 11 bp, Unknown
  misc_feature (1)..( 11): Result.003 file - promoters60/1808572
actaattaata

SEQ ID NO: 123100 - DNA, 11 bp, Unknown
  misc_feature (1)..( 11): Result.003 file - promoters60/1808572
actaatttgta

SEQ ID NO: 123101 - DNA, 11 bp, Unknown
  misc_feature (1)..( 11): Result.003 file - promoters60/1808572
aataattagta

SEQ ID NO: 123102 - DNA, 8 bp, Unknown
  misc_feature (1)..( 8): Result.003 file - promoters60/1808572
aaaaatac

SEQ ID NO: 123103 - DNA, 8 bp, Unknown
  misc_feature (1)..( 8): Result.003 file - promoters60/1808572
aaaaatac

SEQ ID NO: 123104 - DNA, 8 bp, Unknown
  misc_feature (1)..( 8): Result.003 file - promoters60/1808572
ataaatta

SEQ ID NO: 123105 - DNA, 8 bp, Unknown
  misc_feature (1)..( 8): Result.003 file - promoters60/1808572
gtaaatta

SEQ ID NO: 123106 - DNA, 8 bp, Unknown
  misc_feature (1)..( 8): Result.003 file - promoters60/1808572
gtaaataa

SEQ ID NO: 123107 - DNA, 7 bp, Unknown
  misc_feature (1)..( 7): Result.003 file - promoters60/1808572
aaaaaaa

SEQ ID NO: 123108 - DNA, 7 bp, Unknown
  misc_feature (1)..( 7): Result.003 file - promoters60/1808572
aaaaaaa

SEQ ID NO: 123109 - DNA, 7 bp, Unknown
  misc_feature (1)..( 7): Result.003 file - promoters60/1808572
aaaaaac

SEQ ID NO: 123110 - DNA, 7 bp, Unknown
  misc_feature (1)..( 7): Result.003 file - promoters60/1808572
tgaacca

SEQ ID NO: 123111 - DNA, 7 bp, Unknown
  misc_feature (1)..( 7): Result.003 file - promoters60/1808572
tgaccca

SEQ ID NO: 123112 - DNA, 6 bp, Unknown
  misc_feature (1)..( 6): Result.003 file - promoters60/1808572
gatttg

SEQ ID NO: 123113 - DNA, 6 bp, Unknown
  misc_feature (1)..( 6): Result.003 file - promoters60/1808572
gatttg

SEQ ID NO: 123114 - DNA, 9 bp, Unknown
  misc_feature (1)..( 9): Result.003 file - promoters60/1808572
ttattttat

SEQ ID NO: 123115 - DNA, 9 bp, Unknown
  misc_feature (1)..( 9): Result.003 file - promoters60/1808572
ttaatttat

SEQ ID NO: 123116 - DNA, 9 bp, Unknown
  misc_feature (1)..( 9): Result.003 file - promoters60/1808572
tttttttga

SEQ ID NO: 123117 - DNA, 9 bp, Unknown
  misc_feature (1)..( 9): Result.003 file - promoters60/1808572
aacatcttg

SEQ ID NO: 123118 - DNA, 9 bp, Unknown
  misc_feature (1)..( 9): Result.003 file - promoters60/1808572
aacattttg

SEQ ID NO: 123119 - DNA, 8 bp, Unknown
  misc_feature (1)..( 8): Result.003 file - promoters60/1808572
taataaag

SEQ ID NO: 123120 - DNA, 8 bp, Unknown
  misc_feature (1)..( 8): Result.003 file - promoters60/1808572
atataaag

SEQ ID NO: 123121 - DNA, 8 bp, Unknown
  misc_feature (1)..( 8): Result.003 file - promoters60/1808572
atataaat

SEQ ID NO: 123122 - DNA, 7 bp, Unknown
  misc_feature (1)..( 7): Result.003 file - promoters60/1808572
tttgagt

SEQ ID NO: 123123 - DNA, 7 bp, Unknown
  misc_feature (1)..( 7): Result.003 file - promoters60/1808572
tttaagt

SEQ ID NO: 123124 - DNA, 6 bp, Unknown
  misc_feature (1)..( 6): Result.003 file - promoters60/1808572
taatag

SEQ ID NO: 123125 - DNA, 6 bp, Unknown
  misc_feature (1)..( 6): Result.003 file - promoters60/1808572
taatag

SEQ ID NO: 123126 - DNA, 7 bp, Unknown
  misc_feature (1)..( 7): Result.003 file - promoters60/1808572
actgaaa

SEQ ID NO: 123127 - DNA, 7 bp, Unknown
  misc_feature (1)..( 7): Result.003 file - promoters60/1808572
actcaaa

SEQ ID NO: 123128 - DNA, 8 bp, Unknown
  misc_feature (1)..( 8): Result.003 file - promoters60/1808572
actatcat

SEQ ID NO: 123129 - DNA, 8 bp, Unknown
  misc_feature (1)..( 8): Result.003 file - promoters60/1808572
actatcat

SEQ ID NO: 123130 - DNA, 6 bp, Unknown
  misc_feature (1)..( 6): Result.003 file - promoters60/1808572
atttca

SEQ ID NO: 123131 - DNA, 6 bp, Unknown
  misc_feature (1)..( 6): Result.003 file - promoters60/1808572
atttca

SEQ ID NO: 123132 - DNA, 6 bp, Unknown
  misc_feature (1)..( 6): Result.003 file - promoters60/1808572
ttttag

SEQ ID NO: 123133 - DNA, 6 bp, Unknown
  misc_feature (1)..( 6): Result.003 file - promoters60/1808572
ttttag

SEQ ID NO: 123134 - DNA, 6 bp, Unknown
  misc_feature (1)..( 6): Result.003 file - promoters60/1808572
cataat

SEQ ID NO: 123135 - DNA, 6 bp, Unknown
  misc_feature (1)..( 6): Result.003 file - promoters60/1808572
cataat

SEQ ID NO: 123136 - DNA, 8 bp, Unknown
  misc_feature (1)..( 8): Result.003 file - promoters60/1808572
agcgtggg

SEQ ID NO: 123137 - DNA, 8 bp, Unknown
  misc_feature (1)..( 8): Result.003 file - promoters60/1808572
agcgcggg

SEQ ID NO: 123138 - DNA, 7 bp, Unknown
  misc_feature (1)..( 7): Result.003 file - promoters60/1808572
aaattaa

SEQ ID NO: 123139 - DNA, 7 bp, Unknown
  misc_feature (1)..( 7): Result.003 file - promoters60/1808572
aaactaa

SEQ ID NO: 123140 - DNA, 7 bp, Unknown
  misc_feature (1)..( 7): Result.003 file - promoters60/1808572
aaagaat

SEQ ID NO: 123141 - DNA, 7 bp, Unknown
  misc_feature (1)..( 7): Result.003 file - promoters60/1808572
aaataat

SEQ ID NO: 123142 - DNA, 8 bp, Unknown
  misc_feature (1)..( 8): Result.003 file - promoters60/1808572
taatgcaa

SEQ ID NO: 123143 - DNA, 8 bp, Unknown
  misc_feature (1)..( 8): Result.003 file - promoters60/1808572
taatgcaa

SEQ ID NO: 123144 - DNA, 6 bp, Unknown
  misc_feature (1)..( 6): Result.003 file - promoters60/1808572
aattaa

SEQ ID NO: 123145 - DNA, 6 bp, Unknown
  misc_feature (1)..( 6): Result.003 file - promoters60/1808572
aattaa

SEQ ID NO: 123146 - DNA, 7 bp, Unknown
  misc_feature (1)..( 7): Result.003 file - promoters60/1808696
taacgtt

SEQ ID NO: 123147 - DNA, 7 bp, Unknown
  misc_feature (1)..( 7): Result.003 file - promoters60/1808696
taaggtt

SEQ ID NO: 123148 - DNA, 7 bp, Unknown
  misc_feature (1)..( 7): Result.003 file - promoters60/1808696
taaagtt

SEQ ID NO: 123149 - DNA, 15 bp, Unknown
  misc_feature (1)..( 15): Result.003 file - promoters60/1808696
aaaagcatacaaata

SEQ ID NO: 123150 - DNA, 15 bp, Unknown
  misc_feature (1)..( 15): Result.003 file - promoters60/1808696
aaaagaatagcttct

SEQ ID NO: 123151 - DNA, 15 bp, Unknown
  misc_feature (1)..( 15): Result.003 file - promoters60/1808696
gaaggcatacagata

SEQ ID NO: 123152 - DNA, 16 bp, Unknown
  misc_feature (1)..( 16): Result.003 file - promoters60/1808696
gatagatataatggag

SEQ ID NO: 123153 - DNA, 8 bp, Unknown
  misc_feature (1)..( 8): Result.003 file - promoters60/1808696
ctattatt

SEQ ID NO: 123154 - DNA, 8 bp, Unknown
  misc_feature (1)..( 8): Result.003 file - promoters60/1808696
ctagtata

SEQ ID NO: 123155 - DNA, 8 bp, Unknown
  misc_feature (1)..( 8): Result.003 file - promoters60/1808696
aaattatt

SEQ ID NO: 123156 - DNA, 8 bp, Unknown
  misc_feature (1)..( 8): Result.003 file - promoters60/1808696
ctattact

SEQ ID NO: 123157 - DNA, 9 bp, Unknown
  misc_feature (1)..( 9): Result.003 file - promoters60/1808696
aaatagtta

SEQ ID NO: 123158 - DNA, 9 bp, Unknown
  misc_feature (1)..( 9): Result.003 file - promoters60/1808696
taattgttt

SEQ ID NO: 123159 - DNA, 9 bp, Unknown
  misc_feature (1)..( 9): Result.003 file - promoters60/1808696
aaatattta

SEQ ID NO: 123160 - DNA, 9 bp, Unknown
  misc_feature (1)..( 9): Result.003 file - promoters60/1808696
atattgttt

SEQ ID NO: 123161 - DNA, 8 bp, Unknown
  misc_feature (1)..( 8): Result.003 file - promoters60/1808696
acgttatt

SEQ ID NO: 123162 - DNA, 8 bp, Unknown
  misc_feature (1)..( 8): Result.003 file - promoters60/1808696
tggttatt

SEQ ID NO: 123163 - DNA, 8 bp, Unknown
  misc_feature (1)..( 8): Result.003 file - promoters60/1808696
tgggtata

SEQ ID NO: 123164 - DNA, 7 bp, Unknown
  misc_feature (1)..( 7): Result.003 file - promoters60/1808696
tacgtaa

SEQ ID NO: 123165 - DNA, 7 bp, Unknown
  misc_feature (1)..( 7): Result.003 file - promoters60/1808696
tacataa

SEQ ID NO: 123166 - DNA, 7 bp, Unknown
  misc_feature (1)..( 7): Result.003 file - promoters60/1808696
cacataa

SEQ ID NO: 123167 - DNA, 7 bp, Unknown
  misc_feature (1)..( 7): Result.003 file - promoters60/1808696
ggttcta

SEQ ID NO: 123168 - DNA, 7 bp, Unknown
  misc_feature (1)..( 7): Result.003 file - promoters60/1808696
tgttcta

SEQ ID NO: 123169 - DNA, 7 bp, Unknown
  misc_feature (1)..( 7): Result.003 file - promoters60/1808696
tgttctt

SEQ ID NO: 123170 - DNA, 9 bp, Unknown
  misc_feature (1)..( 9): Result.003 file - promoters60/1809157
aaatattaa

SEQ ID NO: 123171 - DNA, 9 bp, Unknown
  misc_feature (1)..( 9): Result.003 file - promoters60/1809157
aaataataa

SEQ ID NO: 123172 - DNA, 10 bp, Unknown
  misc_feature (1)..( 10): Result.003 file - promoters60/1809157
aaactatccc

SEQ ID NO: 123173 - DNA, 11 bp, Unknown
  misc_feature (1)..( 11): Result.003 file - promoters60/1809157
tagataagtaa

SEQ ID NO: 123174 - DNA, 11 bp, Unknown
  misc_feature (1)..( 11): Result.003 file - promoters60/1809157
gagaaaagtct

SEQ ID NO: 123175 - DNA, 11 bp, Unknown
  misc_feature (1)..( 11): Result.003 file - promoters60/1809157
caactatacat

SEQ ID NO: 123176 - DNA, 10 bp, Unknown
  misc_feature (1)..( 10): Result.003 file - promoters60/1809222
aaaagatagc

SEQ ID NO: 123177 - DNA, 10 bp, Unknown
  misc_feature (1)..( 10): Result.003 file - promoters60/1809222
gaaatatata

SEQ ID NO: 123178 - DNA, 10 bp, Unknown
  misc_feature (1)..( 10): Result.003 file - promoters60/1809222
gaaatagatt

SEQ ID NO: 123179 - DNA, 10 bp, Unknown
  misc_feature (1)..( 10): Result.003 file - promoters60/1809222
ttagtagatt

SEQ ID NO: 123180 - DNA, 10 bp, Unknown
  misc_feature (1)..( 10): Result.003 file - promoters60/1809222
ttaatttatt

SEQ ID NO: 123181 - DNA, 10 bp, Unknown
  misc_feature (1)..( 10): Result.003 file - promoters60/1809222
tgattacttt

SEQ ID NO: 123182 - DNA, 11 bp, Unknown
  misc_feature (1)..( 11): Result.003 file - promoters60/1809233
taaaatttcgc

SEQ ID NO: 123183 - DNA, 11 bp, Unknown
  misc_feature (1)..( 11): Result.003 file - promoters60/1809233
taatattaaga

SEQ ID NO: 123184 - DNA, 11 bp, Unknown
  misc_feature (1)..( 11): Result.003 file - promoters60/1809233
agaaattgcgc

SEQ ID NO: 123185 - DNA, 11 bp, Unknown
  misc_feature (1)..( 11): Result.003 file - promoters60/1809233
taatcttagaa

SEQ ID NO: 123186 - DNA, 11 bp, Unknown
  misc_feature (1)..( 11): Result.003 file - promoters60/1809233
ctgaattgcaa

SEQ ID NO: 123187 - DNA, 12 bp, Unknown
  misc_feature (1)..( 12): Result.003 file - promoters60/1809233
tatcatataagt

SEQ ID NO: 123188 - DNA, 12 bp, Unknown
  misc_feature (1)..( 12): Result.003 file - promoters60/1809233
ttctatataact

SEQ ID NO: 123189 - DNA, 12 bp, Unknown
  misc_feature (1)..( 12): Result.003 file - promoters60/1809233
tactgtattagt

SEQ ID NO: 123190 - DNA, 12 bp, Unknown
  misc_feature (1)..( 12): Result.003 file - promoters60/1809233
tactgttttaga

SEQ ID NO: 123191 - DNA, 11 bp, Unknown
  misc_feature (1)..( 11): Result.003 file - promoters60/1809233
aaacataaatt

SEQ ID NO: 123192 - DNA, 11 bp, Unknown
  misc_feature (1)..( 11): Result.003 file - promoters60/1809233
aaaaataaata

SEQ ID NO: 123193 - DNA, 11 bp, Unknown
  misc_feature (1)..( 11): Result.003 file - promoters60/1809233
gacaatagata

SEQ ID NO: 123194 - DNA, 11 bp, Unknown
  misc_feature (1)..( 11): Result.003 file - promoters60/1809233
attaataaaaa

SEQ ID NO: 123195 - DNA, 9 bp, Unknown
  misc_feature (1)..( 9): Result.003 file - promoters60/1809233
gttaggtat

SEQ ID NO: 123196 - DNA, 9 bp, Unknown
  misc_feature (1)..( 9): Result.003 file - promoters60/1809233
aatagatat

SEQ ID NO: 123197 - DNA, 9 bp, Unknown
  misc_feature (1)..( 9): Result.003 file - promoters60/1809233
aataaataa

SEQ ID NO: 123198 - DNA, 9 bp, Unknown
  misc_feature (1)..( 9): Result.003 file - promoters60/1809233
aataaaaac

SEQ ID NO: 123199 - DNA, 6 bp, Unknown
  misc_feature (1)..( 6): Result.003 file - promoters60/1809243
agtgtt

SEQ ID NO: 123200 - DNA, 6 bp, Unknown
  misc_feature (1)..( 6): Result.003 file - promoters60/1809243
agtgtt

SEQ ID NO: 123201 - DNA, 6 bp, Unknown
  misc_feature (1)..( 6): Result.003 file - promoters60/1809243
aataaa

SEQ ID NO: 123202 - DNA, 6 bp, Unknown
  misc_feature (1)..( 6): Result.003 file - promoters60/1809243
aataaa

SEQ ID NO: 123203 - DNA, 10 bp, Unknown
  misc_feature (1)..( 10): Result.003 file - promoters60/1809243
aaattaattt

SEQ ID NO: 123204 - DNA, 10 bp, Unknown
  misc_feature (1)..( 10): Result.003 file - promoters60/1809243
aaattagaac

SEQ ID NO: 123205 - DNA, 10 bp, Unknown
  misc_feature (1)..( 10): Result.003 file - promoters60/1809243
taattaattt

SEQ ID NO: 123206 - DNA, 6 bp, Unknown
  misc_feature (1)..( 6): Result.003 file - promoters60/1809243
caagtc

SEQ ID NO: 123207 - DNA, 6 bp, Unknown
  misc_feature (1)..( 6): Result.003 file - promoters60/1809243
caagtc

SEQ ID NO: 123208 - DNA, 7 bp, Unknown
  misc_feature (1)..( 7): Result.003 file - promoters60/1809243
taatctt

SEQ ID NO: 123209 - DNA, 7 bp, Unknown
  misc_feature (1)..( 7): Result.003 file - promoters60/1809243
taatctt

SEQ ID NO: 123210 - DNA, 6 bp, Unknown
  misc_feature (1)..( 6): Result.003 file - promoters60/1809243
acacgt

SEQ ID NO: 123211 - DNA, 6 bp, Unknown
  misc_feature (1)..( 6): Result.003 file - promoters60/1809243
acacgt

SEQ ID NO: 123212 - DNA, 6 bp, Unknown
  misc_feature (1)..( 6): Result.003 file - promoters60/1809243
ttaacc

SEQ ID NO: 123213 - DNA, 6 bp, Unknown
  misc_feature (1)..( 6): Result.003 file - promoters60/1809243
ttaacc

SEQ ID NO: 123214 - DNA, 7 bp, Unknown
  misc_feature (1)..( 7): Result.003 file - promoters60/1809243
caatttt

SEQ ID NO: 123215 - DNA, 7 bp, Unknown
  misc_feature (1)..( 7): Result.003 file - promoters60/1809243
caaattt

SEQ ID NO: 123216 - DNA, 7 bp, Unknown
  misc_feature (1)..( 7): Result.003 file - promoters60/1809243
ttttgaa

SEQ ID NO: 123217 - DNA, 7 bp, Unknown
  misc_feature (1)..( 7): Result.003 file - promoters60/1809243
tttggaa

SEQ ID NO: 123218 - DNA, 7 bp, Unknown
  misc_feature (1)..( 7): Result.003 file - promoters60/1809243
attaatt

SEQ ID NO: 123219 - DNA, 7 bp, Unknown
  misc_feature (1)..( 7): Result.003 file - promoters60/1809243
attaatt

SEQ ID NO: 123220 - DNA, 6 bp, Unknown
  misc_feature (1)..( 6): Result.003 file - promoters60/1809243
ttaaaa

SEQ ID NO: 123221 - DNA, 6 bp, Unknown
  misc_feature (1)..( 6): Result.003 file - promoters60/1809243
ttaaaa

SEQ ID NO: 123222 - DNA, 8 bp, Unknown
  misc_feature (1)..( 8): Result.003 file - promoters60/1809243
attgttcc

SEQ ID NO: 123223 - DNA, 8 bp, Unknown
  misc_feature (1)..( 8): Result.003 file - promoters60/1809243
atttttcc

SEQ ID NO: 123224 - DNA, 7 bp, Unknown
  misc_feature (1)..( 7): Result.003 file - promoters60/1809243
agagaaa

SEQ ID NO: 123225 - DNA, 7 bp, Unknown
  misc_feature (1)..( 7): Result.003 file - promoters60/1809243
agaaaaa

SEQ ID NO: 123226 - DNA, 8 bp, Unknown
  misc_feature (1)..( 8): Result.003 file - promoters60/1809243
aaagacaa

SEQ ID NO: 123227 - DNA, 8 bp, Unknown
  misc_feature (1)..( 8): Result.003 file - promoters60/1809243
aaaaacaa

SEQ ID NO: 123228 - DNA, 6 bp, Unknown
  misc_feature (1)..( 6): Result.003 file - promoters60/1809243
agttgg

SEQ ID NO: 123229 - DNA, 6 bp, Unknown
  misc_feature (1)..( 6): Result.003 file - promoters60/1809243
agttgg

SEQ ID NO: 123230 - DNA, 6 bp, Unknown
  misc_feature (1)..( 6): Result.003 file - promoters60/1809243
tttccc

SEQ ID NO: 123231 - DNA, 6 bp, Unknown
  misc_feature (1)..( 6): Result.003 file - promoters60/1809243
tttccc

SEQ ID NO: 123232 - DNA, 10 bp, Unknown
  misc_feature (1)..( 10): Result.003 file - promoters60/1809253
aattacaaaa

SEQ ID NO: 123233 - DNA, 10 bp, Unknown
  misc_feature (1)..( 10): Result.003 file - promoters60/1809253
aataacaata

SEQ ID NO: 123234 - DNA, 10 bp, Unknown
  misc_feature (1)..( 10): Result.003 file - promoters60/1809253
ttttagaaaa

SEQ ID NO: 123235 - DNA, 6 bp, Unknown
  misc_feature (1)..( 6): Result.003 file - promoters60/1809253
aaaaat

SEQ ID NO: 123236 - DNA, 6 bp, Unknown
  misc_feature (1)..( 6): Result.003 file - promoters60/1809253
aaaaat

SEQ ID NO: 123237 - DNA, 11 bp, Unknown
  misc_feature (1)..( 11): Result.003 file - promoters60/1809253
aataaaagcaa

SEQ ID NO: 123238 - DNA, 11 bp, Unknown
  misc_feature (1)..( 11): Result.003 file - promoters60/1809253
aataaaaacaa

SEQ ID NO: 123239 - DNA, 7 bp, Unknown
  misc_feature (1)..( 7): Result.003 file - promoters60/1809253
acagaaa

SEQ ID NO: 123240 - DNA, 7 bp, Unknown
  misc_feature (1)..( 7): Result.003 file - promoters60/1809253
acaaaaa

SEQ ID NO: 123241 - DNA, 7 bp, Unknown
  misc_feature (1)..( 7): Result.003 file - promoters60/1809253
aaccaac

SEQ ID NO: 123242 - DNA, 7 bp, Unknown
  misc_feature (1)..( 7): Result.003 file - promoters60/1809253
aaccaac

SEQ ID NO: 123243 - DNA, 6 bp, Unknown
  misc_feature (1)..( 6): Result.003 file - promoters60/1809253
aaaata

SEQ ID NO: 123244 - DNA, 6 bp, Unknown
  misc_feature (1)..( 6): Result.003 file - promoters60/1809253
aaaata

SEQ ID NO: 123245 - DNA, 7 bp, Unknown
  misc_feature (1)..( 7): Result.003 file - promoters60/1809253
atatata

SEQ ID NO: 123246 - DNA, 7 bp, Unknown
  misc_feature (1)..( 7): Result.003 file - promoters60/1809253
atatatt

SEQ ID NO: 123247 - DNA, 7 bp, Unknown
  misc_feature (1)..( 7): Result.003 file - promoters60/1809253
ataaata

SEQ ID NO: 123248 - DNA, 8 bp, Unknown
  misc_feature (1)..( 8): Result.003 file - promoters60/1809253
caaaatct

SEQ ID NO: 123249 - DNA, 8 bp, Unknown
  misc_feature (1)..( 8): Result.003 file - promoters60/1809253
caacatct

SEQ ID NO: 123250 - DNA, 7 bp, Unknown
  misc_feature (1)..( 7): Result.003 file - promoters60/1809253
aaatgtc

SEQ ID NO: 123251 - DNA, 7 bp, Unknown
  misc_feature (1)..( 7): Result.003 file - promoters60/1809253
aaaagtc

SEQ ID NO: 123252 - DNA, 6 bp, Unknown
  misc_feature (1)..( 6): Result.003 file - promoters60/1809253
atgtca

SEQ ID NO: 123253 - DNA, 6 bp, Unknown
  misc_feature (1)..( 6): Result.003 file - promoters60/1809253
atgtca

SEQ ID NO: 123254 - DNA, 11 bp, Unknown
  misc_feature (1)..( 11): Result.003 file - promoters60/1809253
tatgtttccaa

SEQ ID NO: 123255 - DNA, 11 bp, Unknown
  misc_feature (1)..( 11): Result.003 file - promoters60/1809253
tatgtttacaa

SEQ ID NO: 123256 - DNA, 8 bp, Unknown
  misc_feature (1)..( 8): Result.003 file - promoters60/1809253
tgtttgta

SEQ ID NO: 123257 - DNA, 8 bp, Unknown
  misc_feature (1)..( 8): Result.003 file - promoters60/1809253
tgtctgta

SEQ ID NO: 123258 - DNA, 7 bp, Unknown
  misc_feature (1)..( 7): Result.003 file - promoters60/1809253
attcttt

SEQ ID NO: 123259 - DNA, 7 bp, Unknown
  misc_feature (1)..( 7): Result.003 file - promoters60/1809253
attattt

SEQ ID NO: 123260 - DNA, 6 bp, Unknown
  misc_feature (1)..( 6): Result.003 file - promoters60/1809253
tcgttt

SEQ ID NO: 123261 - DNA, 6 bp, Unknown
  misc_feature (1)..( 6): Result.003 file - promoters60/1809253
tcgttt

SEQ ID NO: 123262 - DNA, 8 bp, Unknown
  misc_feature (1)..( 8): Result.003 file - promoters60/1809253
gtttactt

SEQ ID NO: 123263 - DNA, 8 bp, Unknown
  misc_feature (1)..( 8): Result.003 file - promoters60/1809253
gttgactt

SEQ ID NO: 123264 - DNA, 6 bp, Unknown
  misc_feature (1)..( 6): Result.003 file - promoters60/1809253
tttcaa

SEQ ID NO: 123265 - DNA, 6 bp, Unknown
  misc_feature (1)..( 6): Result.003 file - promoters60/1809253
tttcaa

SEQ ID NO: 123266 - DNA, 6 bp, Unknown
  misc_feature (1)..( 6): Result.003 file - promoters60/1809253
tctttc

SEQ ID NO: 123267 - DNA, 6 bp, Unknown
  misc_feature (1)..( 6): Result.003 file - promoters60/1809253
tctttc

SEQ ID NO: 123268 - DNA, 9 bp, Unknown
  misc_feature (1)..( 9): Result.003 file - promoters60/1809253
caaaaaaac

SEQ ID NO: 123269 - DNA, 9 bp, Unknown
  misc_feature (1)..( 9): Result.003 file - promoters60/1809253
caaaataac

SEQ ID NO: 123270 - DNA, 6 bp, Unknown
  misc_feature (1)..( 6): Result.003 file - promoters60/1809253
aacaaa

SEQ ID NO: 123271 - DNA, 6 bp, Unknown
  misc_feature (1)..( 6): Result.003 file - promoters60/1809253
aacaaa

SEQ ID NO: 123272 - DNA, 11 bp, Unknown
  misc_feature (1)..( 11): Result.003 file - promoters60/1830195
caaggaaagaa

SEQ ID NO: 123273 - DNA, 11 bp, Unknown
  misc_feature (1)..( 11): Result.003 file - promoters60/1830195
caaagaatttt

SEQ ID NO: 123274 - DNA, 11 bp, Unknown
  misc_feature (1)..( 11): Result.003 file - promoters60/1830195
caatgaactct

SEQ ID NO: 123275 - DNA, 11 bp, Unknown
  misc_feature (1)..( 11): Result.003 file - promoters60/1830195
taaagaaaaag

SEQ ID NO: 123276 - DNA, 11 bp, Unknown
  misc_feature (1)..( 11): Result.003 file - promoters60/1830195
atatgaaccat

SEQ ID NO: 123277 - DNA, 11 bp, Unknown
  misc_feature (1)..( 11): Result.003 file - promoters60/1830195
ctcagaataag

SEQ ID NO: 123278 - DNA, 9 bp, Unknown
  misc_feature (1)..( 9): Result.003 file - promoters60/1923743
cggcggttc

SEQ ID NO: 123279 - DNA, 9 bp, Unknown
  misc_feature (1)..( 9): Result.003 file - promoters60/1923743
cggcgtttc

SEQ ID NO: 123280 - DNA, 7 bp, Unknown
  misc_feature (1)..( 7): Result.003 file - promoters60/1923743
ttcgaaa

SEQ ID NO: 123281 - DNA, 7 bp, Unknown
  misc_feature (1)..( 7): Result.003 file - promoters60/1923743
ttcaaaa

SEQ ID NO: 123282 - DNA, 9 bp, Unknown
  misc_feature (1)..( 9): Result.003 file - promoters60/1923743
acactaaaa

SEQ ID NO: 123283 - DNA, 9 bp, Unknown
  misc_feature (1)..( 9): Result.003 file - promoters60/1923743
acaataatt

SEQ ID NO: 123284 - DNA, 9 bp, Unknown
  misc_feature (1)..( 9): Result.003 file - promoters60/1923743
aaactaaaa

SEQ ID NO: 123285 - DNA, 6 bp, Unknown
  misc_feature (1)..( 6): Result.003 file - promoters60/1923743
tctaac

SEQ ID NO: 123286 - DNA, 6 bp, Unknown
  misc_feature (1)..( 6): Result.003 file - promoters60/1923743
tctaac

SEQ ID NO: 123287 - DNA, 7 bp, Unknown
  misc_feature (1)..( 7): Result.003 file - promoters60/1923743
gattttt

SEQ ID NO: 123288 - DNA, 7 bp, Unknown
  misc_feature (1)..( 7): Result.003 file - promoters60/1923743
gattttt

SEQ ID NO: 123289 - DNA, 6 bp, Unknown
  misc_feature (1)..( 6): Result.003 file - promoters60/1923743
taaaca

SEQ ID NO: 123290 - DNA, 6 bp, Unknown
  misc_feature (1)..( 6): Result.003 file - promoters60/1923743
taaaca

SEQ ID NO: 123291 - DNA, 7 bp, Unknown
  misc_feature (1)..( 7): Result.003 file - promoters60/1923743
gatgacg

SEQ ID NO: 123292 - DNA, 7 bp, Unknown
  misc_feature (1)..( 7): Result.003 file - promoters60/1923743
gataacg

SEQ ID NO: 123293 - DNA, 9 bp, Unknown
  misc_feature (1)..( 9): Result.003 file - promoters60/1923743
cggttcgtt

SEQ ID NO: 123294 - DNA, 9 bp, Unknown
  misc_feature (1)..( 9): Result.003 file - promoters60/1923743
atgtttgtt

SEQ ID NO: 123295 - DNA, 9 bp, Unknown
  misc_feature (1)..( 9): Result.003 file - promoters60/1923743
atggttgtg

SEQ ID NO: 123296 - DNA, 8 bp, Unknown
  misc_feature (1)..( 8): Result.003 file - promoters60/1923743
tgttcaaa

SEQ ID NO: 123297 - DNA, 8 bp, Unknown
  misc_feature (1)..( 8): Result.003 file - promoters60/1923743
tgtttaaa

SEQ ID NO: 123298 - DNA, 7 bp, Unknown
  misc_feature (1)..( 7): Result.003 file - promoters60/1923743
aaggagt

SEQ ID NO: 123299 - DNA, 7 bp, Unknown
  misc_feature (1)..( 7): Result.003 file - promoters60/1923743
aagaagt

SEQ ID NO: 123300 - DNA, 6 bp, Unknown
  misc_feature (1)..( 6): Result.003 file - promoters60/1923743
ctaaaa

SEQ ID NO: 123301 - DNA, 6 bp, Unknown
  misc_feature (1)..( 6): Result.003 file - promoters60/1923743
ctaaaa

SEQ ID NO: 123302 - DNA, 7 bp, Unknown
  misc_feature (1)..( 7): Result.003 file - promoters60/1923743
aggagtt

SEQ ID NO: 123303 - DNA, 7 bp, Unknown
  misc_feature (1)..( 7): Result.003 file - promoters60/1923743
aggtgtt

SEQ ID NO: 123304 - DNA, 6 bp, Unknown
  misc_feature (1)..( 6): Result.003 file - promoters60/1923743
aacaaa

SEQ ID NO: 123305 - DNA, 6 bp, Unknown
  misc_feature (1)..( 6): Result.003 file - promoters60/1923743
aacaaa

SEQ ID NO: 123306 - DNA, 7 bp, Unknown
  misc_feature (1)..( 7): Result.003 file - promoters60/1923743
atccaat

SEQ ID NO: 123307 - DNA, 7 bp, Unknown
  misc_feature (1)..( 7): Result.003 file - promoters60/1923743
atccaat

SEQ ID NO: 123308 - DNA, 6 bp, Unknown
  misc_feature (1)..( 6): Result.003 file - promoters60/1923743
tattct

SEQ ID NO: 123309 - DNA, 6 bp, Unknown
  misc_feature (1)..( 6): Result.003 file - promoters60/1923743
tattct

SEQ ID NO: 123310 - DNA, 8 bp, Unknown
  misc_feature (1)..( 8): Result.003 file - promoters60/1923743
taatttaa

SEQ ID NO: 123311 - DNA, 8 bp, Unknown
  misc_feature (1)..( 8): Result.003 file - promoters60/1923743
taatgtaa

SEQ ID NO: 123312 - DNA, 9 bp, Unknown
  misc_feature (1)..( 9): Result.003 file - promoters60/1923743
taatgtact

SEQ ID NO: 123313 - DNA, 9 bp, Unknown
  misc_feature (1)..( 9): Result.003 file - promoters60/1923743
taatgcact

SEQ ID NO: 123314 - DNA, 6 bp, Unknown
  misc_feature (1)..( 6): Result.003 file - promoters60/1923743
actatt

SEQ ID NO: 123315 - DNA, 6 bp, Unknown
  misc_feature (1)..( 6): Result.003 file - promoters60/1923743
actatt

SEQ ID NO: 123316 - DNA, 7 bp, Unknown
  misc_feature (1)..( 7): Result.003 file - promoters60/1923743
cgactat

SEQ ID NO: 123317 - DNA, 7 bp, Unknown
  misc_feature (1)..( 7): Result.003 file - promoters60/1923743
cgagtat

SEQ ID NO: 123318 - DNA, 7 bp, Unknown
  misc_feature (1)..( 7): Result.003 file - promoters60/1923750
attgaaa

SEQ ID NO: 123319 - DNA, 7 bp, Unknown
  misc_feature (1)..( 7): Result.003 file - promoters60/1923750
attaaaa

SEQ ID NO: 123320 - DNA, 6 bp, Unknown
  misc_feature (1)..( 6): Result.003 file - promoters60/1923750
tattta

SEQ ID NO: 123321 - DNA, 6 bp, Unknown
  misc_feature (1)..( 6): Result.003 file - promoters60/1923750
tattta

SEQ ID NO: 123322 - DNA, 7 bp, Unknown
  misc_feature (1)..( 7): Result.003 file - promoters60/1923750
gatattc

SEQ ID NO: 123323 - DNA, 7 bp, Unknown
  misc_feature (1)..( 7): Result.003 file - promoters60/1923750
gatcttc

SEQ ID NO: 123324 - DNA, 6 bp, Unknown
  misc_feature (1)..( 6): Result.003 file - promoters60/1923750
aaaaca

SEQ ID NO: 123325 - DNA, 6 bp, Unknown
  misc_feature (1)..( 6): Result.003 file - promoters60/1923750
aaaaca

SEQ ID NO: 123326 - DNA, 10 bp, Unknown
  misc_feature (1)..( 10): Result.003 file - promoters60/1923750
agaaaacaaa

SEQ ID NO: 123327 - DNA, 10 bp, Unknown
  misc_feature (1)..( 10): Result.003 file - promoters60/1923750
agaaaaaaaa

SEQ ID NO: 123328 - DNA, 6 bp, Unknown
  misc_feature (1)..( 6): Result.003 file - promoters60/1923750
ataata

SEQ ID NO: 123329 - DNA, 6 bp, Unknown
  misc_feature (1)..( 6): Result.003 file - promoters60/1923750
ataata

SEQ ID NO: 123330 - DNA, 7 bp, Unknown
  misc_feature (1)..( 7): Result.003 file - promoters60/1923750
aaacaca

SEQ ID NO: 123331 - DNA, 7 bp, Unknown
  misc_feature (1)..( 7): Result.003 file - promoters60/1923750
aaataca

SEQ ID NO: 123332 - DNA, 7 bp, Unknown
  misc_feature (1)..( 7): Result.003 file - promoters60/1923750
actttag

SEQ ID NO: 123333 - DNA, 7 bp, Unknown
  misc_feature (1)..( 7): Result.003 file - promoters60/1923750
actatag

SEQ ID NO: 123334 - DNA, 6 bp, Unknown
  misc_feature (1)..( 6): Result.003 file - promoters60/1923750
actata

SEQ ID NO: 123335 - DNA, 6 bp, Unknown
  misc_feature (1)..( 6): Result.003 file - promoters60/1923750
actata

SEQ ID NO: 123336 - DNA, 7 bp, Unknown
  misc_feature (1)..( 7): Result.003 file - promoters60/1923750
acattta

SEQ ID NO: 123337 - DNA, 7 bp, Unknown
  misc_feature (1)..( 7): Result.003 file - promoters60/1923750
acagtta

SEQ ID NO: 123338 - DNA, 6 bp, Unknown
  misc_feature (1)..( 6): Result.003 file - promoters60/1923750
ttaatc

SEQ ID NO: 123339 - DNA, 6 bp, Unknown
  misc_feature (1)..( 6): Result.003 file - promoters60/1923750
ttaatc

SEQ ID NO: 123340 - DNA, 8 bp, Unknown
  misc_feature (1)..( 8): Result.003 file - promoters60/1923750
taccaaaa

SEQ ID NO: 123341 - DNA, 8 bp, Unknown
  misc_feature (1)..( 8): Result.003 file - promoters60/1923750
tacaaaaa

SEQ ID NO: 123342 - DNA, 6 bp, Unknown
  misc_feature (1)..( 6): Result.003 file - promoters60/1923750
aattat

SEQ ID NO: 123343 - DNA, 6 bp, Unknown
  misc_feature (1)..( 6): Result.003 file - promoters60/1923750
aattat

SEQ ID NO: 123344 - DNA, 7 bp, Unknown
  misc_feature (1)..( 7): Result.003 file - promoters60/1923750
taatcac

SEQ ID NO: 123345 - DNA, 7 bp, Unknown
  misc_feature (1)..( 7): Result.003 file - promoters60/1923750
taaacac

SEQ ID NO: 123346 - DNA, 6 bp, Unknown
  misc_feature (1)..( 6): Result.003 file - promoters60/1923750
caaaac

SEQ ID NO: 123347 - DNA, 6 bp, Unknown
  misc_feature (1)..( 6): Result.003 file - promoters60/1923750
caaaac

SEQ ID NO: 123348 - DNA, 8 bp, Unknown
  misc_feature (1)..( 8): Result.003 file - promoters60/1923750
tactattt

SEQ ID NO: 123349 - DNA, 8 bp, Unknown
  misc_feature (1)..( 8): Result.003 file - promoters60/1923750
tacaattt

SEQ ID NO: 123350 - DNA, 9 bp, Unknown
  misc_feature (1)..( 9): Result.003 file - promoters60/1923750
cagcttttt

SEQ ID NO: 123351 - DNA, 9 bp, Unknown
  misc_feature (1)..( 9): Result.003 file - promoters60/1923750
cagtttttt

SEQ ID NO: 123352 - DNA, 6 bp, Unknown
  misc_feature (1)..( 6): Result.003 file - promoters60/1923750
acaact

SEQ ID NO: 123353 - DNA, 6 bp, Unknown
  misc_feature (1)..( 6): Result.003 file - promoters60/1923750
acaact

SEQ ID NO: 123354 - DNA, 7 bp, Unknown
  misc_feature (1)..( 7): Result.003 file - promoters60/1923750
tttctaa

SEQ ID NO: 123355 - DNA, 7 bp, Unknown
  misc_feature (1)..( 7): Result.003 file - promoters60/1923750
tttctaa

SEQ ID NO: 123356 - DNA, 6 bp, Unknown
  misc_feature (1)..( 6): Result.003 file - promoters60/1923750
ctccaa

SEQ ID NO: 123357 - DNA, 6 bp, Unknown
  misc_feature (1)..( 6): Result.003 file - promoters60/1923750
ctccaa

SEQ ID NO: 123358 - DNA, 7 bp, Unknown
  misc_feature (1)..( 7): Result.003 file - promoters60/1923750
tactatt

SEQ ID NO: 123359 - DNA, 7 bp, Unknown
  misc_feature (1)..( 7): Result.003 file - promoters60/1923750
tacaatt

SEQ ID NO: 123360 - DNA, 7 bp, Unknown
  misc_feature (1)..( 7): Result.003 file - promoters60/1923750
acataaa

SEQ ID NO: 123361 - DNA, 7 bp, Unknown
  misc_feature (1)..( 7): Result.003 file - promoters60/1923750
acataaa

SEQ ID NO: 123362 - DNA, 7 bp, Unknown
  misc_feature (1)..( 7): Result.003 file - promoters60/1923750
aaatttt

SEQ ID NO: 123363 - DNA, 7 bp, Unknown
  misc_feature (1)..( 7): Result.003 file - promoters60/1923750
aaacttt

SEQ ID NO: 123364 - DNA, 6 bp, Unknown
  misc_feature (1)..( 6): Result.003 file - promoters60/1923750
taaata

SEQ ID NO: 123365 - DNA, 6 bp, Unknown
  misc_feature (1)..( 6): Result.003 file - promoters60/1923750
taaata

SEQ ID NO: 123366 - DNA, 10 bp, Unknown
  misc_feature (1)..( 10): Result.003 file - promoters60/1957018
taattttgat

SEQ ID NO: 123367 - DNA, 10 bp, Unknown
  misc_feature (1)..( 10): Result.003 file - promoters60/1957018
aaattttcgt

SEQ ID NO: 123368 - DNA, 10 bp, Unknown
  misc_feature (1)..( 10): Result.003 file - promoters60/1957018
taatttgatt

SEQ ID NO: 123369 - DNA, 10 bp, Unknown
  misc_feature (1)..( 10): Result.003 file - promoters60/1957018
taatttgggg

SEQ ID NO: 123370 - DNA, 10 bp, Unknown
  misc_feature (1)..( 10): Result.003 file - promoters60/1957018
taattttgat

SEQ ID NO: 123371 - DNA, 10 bp, Unknown
  misc_feature (1)..( 10): Result.003 file - promoters60/1957018
caattcgatt

SEQ ID NO: 123372 - DNA, 20 bp, Unknown
  misc_feature (1)..( 20): Result.003 file - promoters60/1957018
aagaaaaaaagaaaagaaag

SEQ ID NO: 123373 - DNA, 20 bp, Unknown
  misc_feature (1)..( 20): Result.003 file - promoters60/1957018
tttagatttagataagtaaa

SEQ ID NO: 123374 - DNA, 20 bp, Unknown
  misc_feature (1)..( 20): Result.003 file - promoters60/1957018
tattgaaaaagaaaaagaaa

SEQ ID NO: 123375 - DNA, 20 bp, Unknown
  misc_feature (1)..( 20): Result.003 file - promoters60/1957018
aaacaaaaaaaataaacaaa

SEQ ID NO: 123376 - DNA, 20 bp, Unknown
  misc_feature (1)..( 20): Result.003 file - promoters60/1957018
gtgtgtggcggataagcaaa

SEQ ID NO: 123377 - DNA, 20 bp, Unknown
  misc_feature (1)..( 20): Result.003 file - promoters60/1957018
tgggttgttatatattgcaa

SEQ ID NO: 123378 - DNA, 8 bp, Unknown
  misc_feature (1)..( 8): Result.003 file - promoters60/1957018
attatcag

SEQ ID NO: 123379 - DNA, 8 bp, Unknown
  misc_feature (1)..( 8): Result.003 file - promoters60/1957018
attttcaa

SEQ ID NO: 123380 - DNA, 8 bp, Unknown
  misc_feature (1)..( 8): Result.003 file - promoters60/1957018
attatcat

SEQ ID NO: 123381 - DNA, 8 bp, Unknown
  misc_feature (1)..( 8): Result.003 file - promoters60/1957018
attctcag

SEQ ID NO: 123382 - DNA, 8 bp, Unknown
  misc_feature (1)..( 8): Result.003 file - promoters60/1957018
attatcag

SEQ ID NO: 123383 - DNA, 8 bp, Unknown
  misc_feature (1)..( 8): Result.003 file - promoters60/1957018
attaacat

SEQ ID NO: 123384 - DNA, 9 bp, Unknown
  misc_feature (1)..( 9): Result.003 file - promoters60/1957018
agattctag

SEQ ID NO: 123385 - DNA, 9 bp, Unknown
  misc_feature (1)..( 9): Result.003 file - promoters60/1957018
ggattctta

SEQ ID NO: 123386 - DNA, 9 bp, Unknown
  misc_feature (1)..( 9): Result.003 file - promoters60/1957018
agattcaat

SEQ ID NO: 123387 - DNA, 9 bp, Unknown
  misc_feature (1)..( 9): Result.003 file - promoters60/1957018
atattttta

SEQ ID NO: 123388 - DNA, 9 bp, Unknown
  misc_feature (1)..( 9): Result.003 file - promoters60/1957018
ggatgcttt

SEQ ID NO: 123389 - DNA, 9 bp, Unknown
  misc_feature (1)..( 9): Result.003 file - promoters60/1957018
agattctag

SEQ ID NO: 123390 - DNA, 10 bp, Unknown
  misc_feature (1)..( 10): Result.003 file - promoters60/1957018
tatttttaaa

SEQ ID NO: 123391 - DNA, 10 bp, Unknown
  misc_feature (1)..( 10): Result.003 file - promoters60/1957018
gctttttaac

SEQ ID NO: 123392 - DNA, 10 bp, Unknown
  misc_feature (1)..( 10): Result.003 file - promoters60/1957018
gattcttact

SEQ ID NO: 123393 - DNA, 10 bp, Unknown
  misc_feature (1)..( 10): Result.003 file - promoters60/1957018
cttgtttaac

SEQ ID NO: 123394 - DNA, 10 bp, Unknown
  misc_feature (1)..( 10): Result.003 file - promoters60/1957018
gattctagaa

SEQ ID NO: 123395 - DNA, 10 bp, Unknown
  misc_feature (1)..( 10): Result.003 file - promoters60/1957018
gattcttttc

SEQ ID NO: 123396 - DNA, 12 bp, Unknown
  misc_feature (1)..( 12): Result.003 file - promoters60/1957212
ctaaaagacaga

SEQ ID NO: 123397 - DNA, 12 bp, Unknown
  misc_feature (1)..( 12): Result.003 file - promoters60/1957212
taaaacgacatg

SEQ ID NO: 123398 - DNA, 12 bp, Unknown
  misc_feature (1)..( 12): Result.003 file - promoters60/1957212
tttggagacaga

SEQ ID NO: 123399 - DNA, 12 bp, Unknown
  misc_feature (1)..( 12): Result.003 file - promoters60/1957212
gaaaaagaaaaa

SEQ ID NO: 123400 - DNA, 12 bp, Unknown
  misc_feature (1)..( 12): Result.003 file - promoters60/1957212
ggaaacatatcc

SEQ ID NO: 123401 - DNA, 9 bp, Unknown
  misc_feature (1)..( 9): Result.003 file - promoters60/1957296
aatgtagtt

SEQ ID NO: 123402 - DNA, 9 bp, Unknown
  misc_feature (1)..( 9): Result.003 file - promoters60/1957296
aatgttgtt

SEQ ID NO: 123403 - DNA, 10 bp, Unknown
  misc_feature (1)..( 10): Result.003 file - promoters60/1957296
tcttctactt

SEQ ID NO: 123404 - DNA, 10 bp, Unknown
  misc_feature (1)..( 10): Result.003 file - promoters60/1957296
tctactactt

SEQ ID NO: 123405 - DNA, 6 bp, Unknown
  misc_feature (1)..( 6): Result.003 file - promoters60/1957296
aagaaa

SEQ ID NO: 123406 - DNA, 6 bp, Unknown
  misc_feature (1)..( 6): Result.003 file - promoters60/1957296
aagaaa

SEQ ID NO: 123407 - DNA, 6 bp, Unknown
  misc_feature (1)..( 6): Result.003 file - promoters60/1957296
aattga

SEQ ID NO: 123408 - DNA, 6 bp, Unknown
  misc_feature (1)..( 6): Result.003 file - promoters60/1957296
aattga

SEQ ID NO: 123409 - DNA, 7 bp, Unknown
  misc_feature (1)..( 7): Result.003 file - promoters60/1957296
gaaaatt

SEQ ID NO: 123410 - DNA, 7 bp, Unknown
  misc_feature (1)..( 7): Result.003 file - promoters60/1957296
gaaaatt

SEQ ID NO: 123411 - DNA, 6 bp, Unknown
  misc_feature (1)..( 6): Result.003 file - promoters60/1957296
tgtctt

SEQ ID NO: 123412 - DNA, 6 bp, Unknown
  misc_feature (1)..( 6): Result.003 file - promoters60/1957296
tgtctt

SEQ ID NO: 123413 - DNA, 8 bp, Unknown
  misc_feature (1)..( 8): Result.003 file - promoters60/1957296
atcagtgt

SEQ ID NO: 123414 - DNA, 8 bp, Unknown
  misc_feature (1)..( 8): Result.003 file - promoters60/1957296
atcaatgt

SEQ ID NO: 123415 - DNA, 7 bp, Unknown
  misc_feature (1)..( 7): Result.003 file - promoters60/1957296
aatttat

SEQ ID NO: 123416 - DNA, 7 bp, Unknown
  misc_feature (1)..( 7): Result.003 file - promoters60/1957296
aatttat

SEQ ID NO: 123417 - DNA, 6 bp, Unknown
  misc_feature (1)..( 6): Result.003 file - promoters60/1957296
agaaca

SEQ ID NO: 123418 - DNA, 6 bp, Unknown
  misc_feature (1)..( 6): Result.003 file - promoters60/1957296
agaaca

SEQ ID NO: 123419 - DNA, 6 bp, Unknown
  misc_feature (1)..( 6): Result.003 file - promoters60/1957296
gatcaa

SEQ ID NO: 123420 - DNA, 6 bp, Unknown
  misc_feature (1)..( 6): Result.003 file - promoters60/1957296
gatcaa

SEQ ID NO: 123421 - DNA, 6 bp, Unknown
  misc_feature (1)..( 6): Result.003 file - promoters60/1957296
ttaaaa

SEQ ID NO: 123422 - DNA, 6 bp, Unknown
  misc_feature (1)..( 6): Result.003 file - promoters60/1957296
ttaaaa

SEQ ID NO: 123423 - DNA, 6 bp, Unknown
  misc_feature (1)..( 6): Result.003 file - promoters60/1957296
aaaatt

SEQ ID NO: 123424 - DNA, 6 bp, Unknown
  misc_feature (1)..( 6): Result.003 file - promoters60/1957296
aaaatt

SEQ ID NO: 123425 - DNA, 8 bp, Unknown
  misc_feature (1)..( 8): Result.003 file - promoters60/1957296
aattaatt

SEQ ID NO: 123426 - DNA, 8 bp, Unknown
  misc_feature (1)..( 8): Result.003 file - promoters60/1957296
aatcaatt

SEQ ID NO: 123427 - DNA, 7 bp, Unknown
  misc_feature (1)..( 7): Result.003 file - promoters60/1957296
attaaat

SEQ ID NO: 123428 - DNA, 7 bp, Unknown
  misc_feature (1)..( 7): Result.003 file - promoters60/1957296
attaaat

SEQ ID NO: 123429 - DNA, 6 bp, Unknown
  misc_feature (1)..( 6): Result.003 file - promoters60/1957296
tataca

SEQ ID NO: 123430 - DNA, 6 bp, Unknown
  misc_feature (1)..( 6): Result.003 file - promoters60/1957296
tataca

SEQ ID NO: 123431 - DNA, 7 bp, Unknown
  misc_feature (1)..( 7): Result.003 file - promoters60/1957303
aaagcga

SEQ ID NO: 123432 - DNA, 7 bp, Unknown
  misc_feature (1)..( 7): Result.003 file - promoters60/1957303
aaaccga

SEQ ID NO: 123433 - DNA, 7 bp, Unknown
  misc_feature (1)..( 7): Result.003 file - promoters60/1957303
aaaacga

SEQ ID NO: 123434 - DNA, 10 bp, Unknown
  misc_feature (1)..( 10): Result.003 file - promoters60/1957303
gaagaaaaaa

SEQ ID NO: 123435 - DNA, 10 bp, Unknown
  misc_feature (1)..( 10): Result.003 file - promoters60/1957303
gaacaaaacc

SEQ ID NO: 123436 - DNA, 10 bp, Unknown
  misc_feature (1)..( 10): Result.003 file - promoters60/1957303
gaaaaaaaaa

SEQ ID NO: 123437 - DNA, 8 bp, Unknown
  misc_feature (1)..( 8): Result.003 file - promoters60/1957303
aaacgact

SEQ ID NO: 123438 - DNA, 8 bp, Unknown
  misc_feature (1)..( 8): Result.003 file - promoters60/1957303
aaacgaaa

SEQ ID NO: 123439 - DNA, 8 bp, Unknown
  misc_feature (1)..( 8): Result.003 file - promoters60/1957303
aaaagaaa

SEQ ID NO: 123440 - DNA, 8 bp, Unknown
  misc_feature (1)..( 8): Result.003 file - promoters60/1957303
ttagaaag

SEQ ID NO: 123441 - DNA, 8 bp, Unknown
  misc_feature (1)..( 8): Result.003 file - promoters60/1957303
gaagaaag

SEQ ID NO: 123442 - DNA, 8 bp, Unknown
  misc_feature (1)..( 8): Result.003 file - promoters60/1957303
gaagaaaa

SEQ ID NO: 123443 - DNA, 14 bp, Unknown
  misc_feature (1)..( 14): Result.003 file - promoters60/1957303
ttataaaaattgaa

SEQ ID NO: 123444 - DNA, 14 bp, Unknown
  misc_feature (1)..( 14): Result.003 file - promoters60/1957303
agaagcaaatcgaa

SEQ ID NO: 123445 - DNA, 14 bp, Unknown
  misc_feature (1)..( 14): Result.003 file - promoters60/1957303
agaagaaaatcccg

SEQ ID NO: 123446 - DNA, 8 bp, Unknown
  misc_feature (1)..( 8): Result.003 file - promoters60/1957303
ctttaaaa

SEQ ID NO: 123447 - DNA, 8 bp, Unknown
  misc_feature (1)..( 8): Result.003 file - promoters60/1957303
ttttaaag

SEQ ID NO: 123448 - DNA, 8 bp, Unknown
  misc_feature (1)..( 8): Result.003 file - promoters60/1957303
atttgaag

SEQ ID NO: 123449 - DNA, 8 bp, Unknown
  misc_feature (1)..( 8): Result.003 file - promoters60/1957303
ccaaatct

SEQ ID NO: 123450 - DNA, 8 bp, Unknown
  misc_feature (1)..( 8): Result.003 file - promoters60/1957303
ccaaatct

SEQ ID NO: 123451 - DNA, 8 bp, Unknown
  misc_feature (1)..( 8): Result.003 file - promoters60/1957303
gcaaatcg

SEQ ID NO: 123452 - DNA, 8 bp, Unknown
  misc_feature (1)..( 8): Result.003 file - promoters60/1959878
tgtttaaa

SEQ ID NO: 123453 - DNA, 8 bp, Unknown
  misc_feature (1)..( 8): Result.003 file - promoters60/1959878
tgtgtaaa

SEQ ID NO: 123454 - DNA, 8 bp, Unknown
  misc_feature (1)..( 8): Result.003 file - promoters60/1959878
acgtgatg

SEQ ID NO: 123455 - DNA, 8 bp, Unknown
  misc_feature (1)..( 8): Result.003 file - promoters60/1959878
acgttatg

SEQ ID NO: 123456 - DNA, 6 bp, Unknown
  misc_feature (1)..( 6): Result.003 file - promoters60/1959878
atgggc

SEQ ID NO: 123457 - DNA, 6 bp, Unknown
  misc_feature (1)..( 6): Result.003 file - promoters60/1959878
atgggc

SEQ ID NO: 123458 - DNA, 6 bp, Unknown
  misc_feature (1)..( 6): Result.003 file - promoters60/1959878
ccaata

SEQ ID NO: 123459 - DNA, 6 bp, Unknown
  misc_feature (1)..( 6): Result.003 file - promoters60/1959878
ccaata

SEQ ID NO: 123460 - DNA, 10 bp, Unknown
  misc_feature (1)..( 10): Result.003 file - promoters60/1959878
ggtttatttt

SEQ ID NO: 123461 - DNA, 10 bp, Unknown
  misc_feature (1)..( 10): Result.003 file - promoters60/1959878
ggtttattca

SEQ ID NO: 123462 - DNA, 10 bp, Unknown
  misc_feature (1)..( 10): Result.003 file - promoters60/1959878
attttatttt

SEQ ID NO: 123463 - DNA, 6 bp, Unknown
  misc_feature (1)..( 6): Result.003 file - promoters60/1959878
gatgtt

SEQ ID NO: 123464 - DNA, 6 bp, Unknown
  misc_feature (1)..( 6): Result.003 file - promoters60/1959878
gatgtt

SEQ ID NO: 123465 - DNA, 7 bp, Unknown
  misc_feature (1)..( 7): Result.003 file - promoters60/1959878
tttaatt

SEQ ID NO: 123466 - DNA, 7 bp, Unknown
  misc_feature (1)..( 7): Result.003 file - promoters60/1959878
tttgatt

SEQ ID NO: 123467 - DNA, 6 bp, Unknown
  misc_feature (1)..( 6): Result.003 file - promoters60/1959878
ttaaga

SEQ ID NO: 123468 - DNA, 6 bp, Unknown
  misc_feature (1)..( 6): Result.003 file - promoters60/1959878
ttaaga

SEQ ID NO: 123469 - DNA, 6 bp, Unknown
  misc_feature (1)..( 6): Result.003 file - promoters60/1959878
gaaaag

SEQ ID NO: 123470 - DNA, 6 bp, Unknown
  misc_feature (1)..( 6): Result.003 file - promoters60/1959878
gaaaag

SEQ ID NO: 123471 - DNA, 7 bp, Unknown
  misc_feature (1)..( 7): Result.003 file - promoters60/1959878
atggtaa

SEQ ID NO: 123472 - DNA, 7 bp, Unknown
  misc_feature (1)..( 7): Result.003 file - promoters60/1959878
atgataa

SEQ ID NO: 123473 - DNA, 7 bp, Unknown
  misc_feature (1)..( 7): Result.003 file - promoters60/1959878
aacctgt

SEQ ID NO: 123474 - DNA, 7 bp, Unknown
  misc_feature (1)..( 7): Result.003 file - promoters60/1959878
aacttgt

SEQ ID NO: 123475 - DNA, 8 bp, Unknown
  misc_feature (1)..( 8): Result.003 file - promoters60/1959878
ttggatat

SEQ ID NO: 123476 - DNA, 8 bp, Unknown
  misc_feature (1)..( 8): Result.003 file - promoters60/1959878
ttgcatat

SEQ ID NO: 123477 - DNA, 8 bp, Unknown
  misc_feature (1)..( 8): Result.003 file - promoters60/1959878
tgttatgc

SEQ ID NO: 123478 - DNA, 8 bp, Unknown
  misc_feature (1)..( 8): Result.003 file - promoters60/1959878
tgttttgc

SEQ ID NO: 123479 - DNA, 7 bp, Unknown
  misc_feature (1)..( 7): Result.003 file - promoters60/1959878
ttgctaa

SEQ ID NO: 123480 - DNA, 7 bp, Unknown
  misc_feature (1)..( 7): Result.003 file - promoters60/1959878
ttgttaa

SEQ ID NO: 123481 - DNA, 6 bp, Unknown
  misc_feature (1)..( 6): Result.003 file - promoters60/1959878
ttcctt

SEQ ID NO: 123482 - DNA, 6 bp, Unknown
  misc_feature (1)..( 6): Result.003 file - promoters60/1959878
ttcctt

SEQ ID NO: 123483 - DNA, 6 bp, Unknown
  misc_feature (1)..( 6): Result.003 file - promoters60/1959878
aagaga

SEQ ID NO: 123484 - DNA, 6 bp, Unknown
  misc_feature (1)..( 6): Result.003 file - promoters60/1959878
aagaga

SEQ ID NO: 123485 - DNA, 7 bp, Unknown
  misc_feature (1)..( 7): Result.003 file - promoters60/1959878
aaggaag

SEQ ID NO: 123486 - DNA, 7 bp, Unknown
  misc_feature (1)..( 7): Result.003 file - promoters60/1959878
aagaaag

SEQ ID NO: 123487 - DNA, 7 bp, Unknown
  misc_feature (1)..( 7): Result.003 file - promoters60/1959904
tttgtgt

SEQ ID NO: 123488 - DNA, 7 bp, Unknown
  misc_feature (1)..( 7): Result.003 file - promoters60/1959904
tttttgt

SEQ ID NO: 123489 - DNA, 10 bp, Unknown
  misc_feature (1)..( 10): Result.003 file - promoters60/1959904
tttgcctttt

SEQ ID NO: 123490 - DNA, 10 bp, Unknown
  misc_feature (1)..( 10): Result.003 file - promoters60/1959904
tttacctttt

SEQ ID NO: 123491 - DNA, 6 bp, Unknown
  misc_feature (1)..( 6): Result.003 file - promoters60/1959904
caaatt

SEQ ID NO: 123492 - DNA, 6 bp, Unknown
  misc_feature (1)..( 6): Result.003 file - promoters60/1959904
caaatt

SEQ ID NO: 123493 - DNA, 7 bp, Unknown
  misc_feature (1)..( 7): Result.003 file - promoters60/1959904
ttagtca

SEQ ID NO: 123494 - DNA, 7 bp, Unknown
  misc_feature (1)..( 7): Result.003 file - promoters60/1959904
ttattca

SEQ ID NO: 123495 - DNA, 6 bp, Unknown
  misc_feature (1)..( 6): Result.003 file - promoters60/1959904
ttgatg

SEQ ID NO: 123496 - DNA, 6 bp, Unknown
  misc_feature (1)..( 6): Result.003 file - promoters60/1959904
ttgatg

SEQ ID NO: 123497 - DNA, 8 bp, Unknown
  misc_feature (1)..( 8): Result.003 file - promoters60/1959904
atatggcc

SEQ ID NO: 123498 - DNA, 8 bp, Unknown
  misc_feature (1)..( 8): Result.003 file - promoters60/1959904
ataaggcc

SEQ ID NO: 123499 - DNA, 8 bp, Unknown
  misc_feature (1)..( 8): Result.003 file - promoters60/1959904
atcatcaa

SEQ ID NO: 123500 - DNA, 8 bp, Unknown
  misc_feature (1)..( 8): Result.003 file - promoters60/1959904
atcatcaa

SEQ ID NO: 123501 - DNA, 7 bp, Unknown
  misc_feature (1)..( 7): Result.003 file - promoters60/1959904
tcttttt

SEQ ID NO: 123502 - DNA, 7 bp, Unknown
  misc_feature (1)..( 7): Result.003 file - promoters60/1959904
tctgttt

SEQ ID NO: 123503 - DNA, 6 bp, Unknown
  misc_feature (1)..( 6): Result.003 file - promoters60/1959904
tttgtt

SEQ ID NO: 123504 - DNA, 6 bp, Unknown
  misc_feature (1)..( 6): Result.003 file - promoters60/1959904
tttgtt

SEQ ID NO: 123505 - DNA, 6 bp, Unknown
  misc_feature (1)..( 6): Result.003 file - promoters60/1959904
attgtt

SEQ ID NO: 123506 - DNA, 6 bp, Unknown
  misc_feature (1)..( 6): Result.003 file - promoters60/1959904
attgtt

SEQ ID NO: 123507 - DNA, 7 bp, Unknown
  misc_feature (1)..( 7): Result.003 file - promoters60/1959904
ttttgtt

SEQ ID NO: 123508 - DNA, 7 bp, Unknown
  misc_feature (1)..( 7): Result.003 file - promoters60/1959904
ttttgtt

SEQ ID NO: 123509 - DNA, 8 bp, Unknown
  misc_feature (1)..( 8): Result.003 file - promoters60/1959904
ataatctt

SEQ ID NO: 123510 - DNA, 8 bp, Unknown
  misc_feature (1)..( 8): Result.003 file - promoters60/1959904
ataatctt

SEQ ID NO: 123511 - DNA, 8 bp, Unknown
  misc_feature (1)..( 8): Result.003 file - promoters60/1959904
tgtttaaa

SEQ ID NO: 123512 - DNA, 8 bp, Unknown
  misc_feature (1)..( 8): Result.003 file - promoters60/1959904
tgtgtaaa

SEQ ID NO: 123513 - DNA, 8 bp, Unknown
  misc_feature (1)..( 8): Result.003 file - promoters60/1959904
acgtgatg

SEQ ID NO: 123514 - DNA, 8 bp, Unknown
  misc_feature (1)..( 8): Result.003 file - promoters60/1959904
acgttatg

SEQ ID NO: 123515 - DNA, 6 bp, Unknown
  misc_feature (1)..( 6): Result.003 file - promoters60/1959904
atgggc

SEQ ID NO: 123516 - DNA, 6 bp, Unknown
  misc_feature (1)..( 6): Result.003 file - promoters60/1959904
atgggc

SEQ ID NO: 123517 - DNA, 6 bp, Unknown
  misc_feature (1)..( 6): Result.003 file - promoters60/1959904
ccaata

SEQ ID NO: 123518 - DNA, 6 bp, Unknown
  misc_feature (1)..( 6): Result.003 file - promoters60/1959904
ccaata

SEQ ID NO: 123519 - DNA, 8 bp, Unknown
  misc_feature (1)..( 8): Result.003 file - promoters60/1959904
ggtttatt

SEQ ID NO: 123520 - DNA, 8 bp, Unknown
  misc_feature (1)..( 8): Result.003 file - promoters60/1959904
ggtttatt

SEQ ID NO: 123521 - DNA, 7 bp, Unknown
  misc_feature (1)..( 7): Result.003 file - promoters60/1959965
tatctta

SEQ ID NO: 123522 - DNA, 7 bp, Unknown
  misc_feature (1)..( 7): Result.003 file - promoters60/1959965
tatgtta

SEQ ID NO: 123523 - DNA, 9 bp, Unknown
  misc_feature (1)..( 9): Result.003 file - promoters60/1959965
atattattt

SEQ ID NO: 123524 - DNA, 9 bp, Unknown
  misc_feature (1)..( 9): Result.003 file - promoters60/1959965
atataattt

SEQ ID NO: 123525 - DNA, 13 bp, Unknown
  misc_feature (1)..( 13): Result.003 file - promoters60/1959965
tttatacatataa

SEQ ID NO: 123526 - DNA, 13 bp, Unknown
  misc_feature (1)..( 13): Result.003 file - promoters60/1959965
aaacttcatctaa

SEQ ID NO: 123527 - DNA, 13 bp, Unknown
  misc_feature (1)..( 13): Result.003 file - promoters60/1959965
aaagttcatctgt

SEQ ID NO: 123528 - DNA, 6 bp, Unknown
  misc_feature (1)..( 6): Result.003 file - promoters60/1959965
tttcat

SEQ ID NO: 123529 - DNA, 6 bp, Unknown
  misc_feature (1)..( 6): Result.003 file - promoters60/1959965
tttcat

SEQ ID NO: 123530 - DNA, 7 bp, Unknown
  misc_feature (1)..( 7): Result.003 file - promoters60/1959965
agaaaaa

SEQ ID NO: 123531 - DNA, 7 bp, Unknown
  misc_feature (1)..( 7): Result.003 file - promoters60/1959965
agaaaaa

SEQ ID NO: 123532 - DNA, 7 bp, Unknown
  misc_feature (1)..( 7): Result.003 file - promoters60/1959965
ccatttt

SEQ ID NO: 123533 - DNA, 7 bp, Unknown
  misc_feature (1)..( 7): Result.003 file - promoters60/1959965
acatttt

SEQ ID NO: 123534 - DNA, 7 bp, Unknown
  misc_feature (1)..( 7): Result.003 file - promoters60/1959965
ccatttg

SEQ ID NO: 123535 - DNA, 8 bp, Unknown
  misc_feature (1)..( 8): Result.003 file - promoters60/1959965
ttatatat

SEQ ID NO: 123536 - DNA, 8 bp, Unknown
  misc_feature (1)..( 8): Result.003 file - promoters60/1959965
ttaaatat

SEQ ID NO: 123537 - DNA, 6 bp, Unknown
  misc_feature (1)..( 6): Result.003 file - promoters60/1959965
atgaat

SEQ ID NO: 123538 - DNA, 6 bp, Unknown
  misc_feature (1)..( 6): Result.003 file - promoters60/1959965
atgaat

SEQ ID NO: 123539 - DNA, 8 bp, Unknown
  misc_feature (1)..( 8): Result.003 file - promoters60/1959965
ttttcatt

SEQ ID NO: 123540 - DNA, 8 bp, Unknown
  misc_feature (1)..( 8): Result.003 file - promoters60/1959965
ttttcatt

SEQ ID NO: 123541 - DNA, 7 bp, Unknown
  misc_feature (1)..( 7): Result.003 file - promoters60/1959965
ttaggag

SEQ ID NO: 123542 - DNA, 7 bp, Unknown
  misc_feature (1)..( 7): Result.003 file - promoters60/1959965
ttaggag

SEQ ID NO: 123543 - DNA, 7 bp, Unknown
  misc_feature (1)..( 7): Result.003 file - promoters60/1959965
tgatacc

SEQ ID NO: 123544 - DNA, 7 bp, Unknown
  misc_feature (1)..( 7): Result.003 file - promoters60/1959965
tgaaacc

SEQ ID NO: 123545 - DNA, 7 bp, Unknown
  misc_feature (1)..( 7): Result.003 file - promoters60/1959965
tttactc

SEQ ID NO: 123546 - DNA, 7 bp, Unknown
  misc_feature (1)..( 7): Result.003 file - promoters60/1959965
ttttctc

SEQ ID NO: 123547 - DNA, 7 bp, Unknown
  misc_feature (1)..( 7): Result.003 file - promoters60/1959965
tcctttt

SEQ ID NO: 123548 - DNA, 7 bp, Unknown
  misc_feature (1)..( 7): Result.003 file - promoters60/1959965
tcctttt

SEQ ID NO: 123549 - DNA, 6 bp, Unknown
  misc_feature (1)..( 6): Result.003 file - promoters60/1959965
attttt

SEQ ID NO: 123550 - DNA, 6 bp, Unknown
  misc_feature (1)..( 6): Result.003 file - promoters60/1959965
attttt

SEQ ID NO: 123551 - DNA, 6 bp, Unknown
  misc_feature (1)..( 6): Result.003 file - promoters60/1959965
agagat

SEQ ID NO: 123552 - DNA, 6 bp, Unknown
  misc_feature (1)..( 6): Result.003 file - promoters60/1959965
agagat

SEQ ID NO: 123553 - DNA, 7 bp, Unknown
  misc_feature (1)..( 7): Result.003 file - promoters60/1959965
tattgtt

SEQ ID NO: 123554 - DNA, 7 bp, Unknown
  misc_feature (1)..( 7): Result.003 file - promoters60/1959965
tatagtt

SEQ ID NO: 123555 - DNA, 7 bp, Unknown
  misc_feature (1)..( 7): Result.003 file - promoters60/1959965
tatatgt

SEQ ID NO: 123556 - DNA, 7 bp, Unknown
  misc_feature (1)..( 7): Result.003 file - promoters60/1959965
tatgtgt

SEQ ID NO: 123557 - DNA, 7 bp, Unknown
  misc_feature (1)..( 7): Result.003 file - promoters60/1959965
taagatt

SEQ ID NO: 123558 - DNA, 7 bp, Unknown
  misc_feature (1)..( 7): Result.003 file - promoters60/1959965
taagatt

SEQ ID NO: 123559 - DNA, 7 bp, Unknown
  misc_feature (1)..( 7): Result.003 file - promoters60/1959965
tggttat

SEQ ID NO: 123560 - DNA, 7 bp, Unknown
  misc_feature (1)..( 7): Result.003 file - promoters60/1959965
tggatat

SEQ ID NO: 123561 - DNA, 8 bp, Unknown
  misc_feature (1)..( 8): Result.003 file - promoters60/1959965
attgtttt

SEQ ID NO: 123562 - DNA, 8 bp, Unknown
  misc_feature (1)..( 8): Result.003 file - promoters60/1959965
attttttt

SEQ ID NO: 123563 - DNA, 8 bp, Unknown
  misc_feature (1)..( 8): Result.003 file - promoters60/1959977
taagtaac

SEQ ID NO: 123564 - DNA, 8 bp, Unknown
  misc_feature (1)..( 8): Result.003 file - promoters60/1959977
gaagtaac

SEQ ID NO: 123565 - DNA, 8 bp, Unknown
  misc_feature (1)..( 8): Result.003 file - promoters60/1959977
gaagaaac

SEQ ID NO: 123566 - DNA, 8 bp, Unknown
  misc_feature (1)..( 8): Result.003 file - promoters60/1959977
caagaaaa

SEQ ID NO: 123567 - DNA, 8 bp, Unknown
  misc_feature (1)..( 8): Result.003 file - promoters60/1959977
aaagaaaa

SEQ ID NO: 123568 - DNA, 13 bp, Unknown
  misc_feature (1)..( 13): Result.003 file - promoters60/1974282
tagatacagattg

SEQ ID NO: 123569 - DNA, 13 bp, Unknown
  misc_feature (1)..( 13): Result.003 file - promoters60/1974282
atttcacaaattc

SEQ ID NO: 123570 - DNA, 13 bp, Unknown
  misc_feature (1)..( 13): Result.003 file - promoters60/1974282
gaagataagattg

SEQ ID NO: 123571 - DNA, 13 bp, Unknown
  misc_feature (1)..( 13): Result.003 file - promoters60/1974282
atttcaaaaatac

SEQ ID NO: 123572 - DNA, 13 bp, Unknown
  misc_feature (1)..( 13): Result.003 file - promoters60/1974282
gcttcaaacaaaa

SEQ ID NO: 123573 - DNA, 7 bp, Unknown
  misc_feature (1)..( 7): Result.003 file - promoters60/1974282
ttttaaa

SEQ ID NO: 123574 - DNA, 7 bp, Unknown
  misc_feature (1)..( 7): Result.003 file - promoters60/1974282
tttcaaa

SEQ ID NO: 123575 - DNA, 7 bp, Unknown
  misc_feature (1)..( 7): Result.003 file - promoters60/1974282
ttttaaa

SEQ ID NO: 123576 - DNA, 7 bp, Unknown
  misc_feature (1)..( 7): Result.003 file - promoters60/1974282
gttcaaa

SEQ ID NO: 123577 - DNA, 10 bp, Unknown
  misc_feature (1)..( 10): Result.003 file - promoters60/1974282
ttttgtgttt

SEQ ID NO: 123578 - DNA, 10 bp, Unknown
  misc_feature (1)..( 10): Result.003 file - promoters60/1974282
ttttatgttt

SEQ ID NO: 123579 - DNA, 10 bp, Unknown
  misc_feature (1)..( 10): Result.003 file - promoters60/1974282
ttttgggttc

SEQ ID NO: 123580 - DNA, 10 bp, Unknown
  misc_feature (1)..( 10): Result.003 file - promoters60/1974282
ttttatcaaa

SEQ ID NO: 123581 - DNA, 10 bp, Unknown
  misc_feature (1)..( 10): Result.003 file - promoters60/1974282
ccacaaaaca

SEQ ID NO: 123582 - DNA, 10 bp, Unknown
  misc_feature (1)..( 10): Result.003 file - promoters60/1974282
tatcaaaacc

SEQ ID NO: 123583 - DNA, 10 bp, Unknown
  misc_feature (1)..( 10): Result.003 file - promoters60/1974282
attcaaaatt

SEQ ID NO: 123584 - DNA, 10 bp, Unknown
  misc_feature (1)..( 10): Result.003 file - promoters60/1974282
attcaacatt

SEQ ID NO: 123585 - DNA, 10 bp, Unknown
  misc_feature (1)..( 10): Result.003 file - promoters60/1974282
aatttttgcg

SEQ ID NO: 123586 - DNA, 10 bp, Unknown
  misc_feature (1)..( 10): Result.003 file - promoters60/1974282
cctttttgta

SEQ ID NO: 123587 - DNA, 10 bp, Unknown
  misc_feature (1)..( 10): Result.003 file - promoters60/1974282
aattttatat

SEQ ID NO: 123588 - DNA, 10 bp, Unknown
  misc_feature (1)..( 10): Result.003 file - promoters60/1974282
ccttttcgta

SEQ ID NO: 123589 - DNA, 9 bp, Unknown
  misc_feature (1)..( 9): Result.003 file - promoters60/1974501
aaataattt

SEQ ID NO: 123590 - DNA, 9 bp, Unknown
  misc_feature (1)..( 9): Result.003 file - promoters60/1974501
ttatatttt

SEQ ID NO: 123591 - DNA, 9 bp, Unknown
  misc_feature (1)..( 9): Result.003 file - promoters60/1974501
aaaaaattt

SEQ ID NO: 123592 - DNA, 8 bp, Unknown
  misc_feature (1)..( 8): Result.003 file - promoters60/1974501
caaataat

SEQ ID NO: 123593 - DNA, 8 bp, Unknown
  misc_feature (1)..( 8): Result.003 file - promoters60/1974501
caaataat

SEQ ID NO: 123594 - DNA, 8 bp, Unknown
  misc_feature (1)..( 8): Result.003 file - promoters60/1974501
aaaagaat

SEQ ID NO: 123595 - DNA, 11 bp, Unknown
  misc_feature (1)..( 11): Result.003 file - promoters60/1974501
tcacgaataga

SEQ ID NO: 123596 - DNA, 11 bp, Unknown
  misc_feature (1)..( 11): Result.003 file - promoters60/1974501
tcacaaataca

SEQ ID NO: 123597 - DNA, 11 bp, Unknown
  misc_feature (1)..( 11): Result.003 file - promoters60/1974501
atacaaacaca

SEQ ID NO: 123598 - DNA, 7 bp, Unknown
  misc_feature (1)..( 7): Result.003 file - promoters60/1974501
actatag

SEQ ID NO: 123599 - DNA, 7 bp, Unknown
  misc_feature (1)..( 7): Result.003 file - promoters60/1974501
actataa

SEQ ID NO: 123600 - DNA, 7 bp, Unknown
  misc_feature (1)..( 7): Result.003 file - promoters60/1974501
actgtag

SEQ ID NO: 123601 - DNA, 15 bp, Unknown
  misc_feature (1)..( 15): Result.003 file - promoters60/1974501
tgaaatcatttatta

SEQ ID NO: 123602 - DNA, 15 bp, Unknown
  misc_feature (1)..( 15): Result.003 file - promoters60/1974501
aatacaaatttattg

SEQ ID NO: 123603 - DNA, 15 bp, Unknown
  misc_feature (1)..( 15): Result.003 file - promoters60/1974501
aatataaatgtattg

SEQ ID NO: 123604 - DNA, 10 bp, Unknown
  misc_feature (1)..( 10): Result.003 file - promoters60/1974501
atgtatttgt

SEQ ID NO: 123605 - DNA, 10 bp, Unknown
  misc_feature (1)..( 10): Result.003 file - promoters60/1974501
agatatttgt

SEQ ID NO: 123606 - DNA, 10 bp, Unknown
  misc_feature (1)..( 10): Result.003 file - promoters60/1974501
atgtctttcc

SEQ ID NO: 123607 - DNA, 7 bp, Unknown
  misc_feature (1)..( 7): Result.003 file - promoters60/1975887
cttatta

SEQ ID NO: 123608 - DNA, 7 bp, Unknown
  misc_feature (1)..( 7): Result.003 file - promoters60/1975887
cttattg

SEQ ID NO: 123609 - DNA, 7 bp, Unknown
  misc_feature (1)..( 7): Result.003 file - promoters60/1975887
tttattg

SEQ ID NO: 123610 - DNA, 7 bp, Unknown
  misc_feature (1)..( 7): Result.003 file - promoters60/1975887
tttattt

SEQ ID NO: 123611 - DNA, 9 bp, Unknown
  misc_feature (1)..( 9): Result.003 file - promoters60/1975887
atgaattgc

SEQ ID NO: 123612 - DNA, 9 bp, Unknown
  misc_feature (1)..( 9): Result.003 file - promoters60/1975887
tttaattgc

SEQ ID NO: 123613 - DNA, 9 bp, Unknown
  misc_feature (1)..( 9): Result.003 file - promoters60/1975887
ttttattgt

SEQ ID NO: 123614 - DNA, 9 bp, Unknown
  misc_feature (1)..( 9): Result.003 file - promoters60/1975887
tgtaattgt

SEQ ID NO: 123615 - DNA, 9 bp, Unknown
  misc_feature (1)..( 9): Result.003 file - promoters60/1975887
attgtaatt

SEQ ID NO: 123616 - DNA, 9 bp, Unknown
  misc_feature (1)..( 9): Result.003 file - promoters60/1975887
actgtaatc

SEQ ID NO: 123617 - DNA, 9 bp, Unknown
  misc_feature (1)..( 9): Result.003 file - promoters60/1975887
attgtaaca

SEQ ID NO: 123618 - DNA, 9 bp, Unknown
  misc_feature (1)..( 9): Result.003 file - promoters60/1975887
attgtaatt

SEQ ID NO: 123619 - DNA, 8 bp, Unknown
  misc_feature (1)..( 8): Result.003 file - promoters60/1975887
tatgtgtt

SEQ ID NO: 123620 - DNA, 8 bp, Unknown
  misc_feature (1)..( 8): Result.003 file - promoters60/1975887
aatgggtt

SEQ ID NO: 123621 - DNA, 8 bp, Unknown
  misc_feature (1)..( 8): Result.003 file - promoters60/1975887
tatttgtt

SEQ ID NO: 123622 - DNA, 11 bp, Unknown
  misc_feature (1)..( 11): Result.003 file - promoters60/1975887
gtatttgtaaa

SEQ ID NO: 123623 - DNA, 11 bp, Unknown
  misc_feature (1)..( 11): Result.003 file - promoters60/1975887
tttattgtaac

SEQ ID NO: 123624 - DNA, 11 bp, Unknown
  misc_feature (1)..( 11): Result.003 file - promoters60/1975887
gtaattgtaaa

SEQ ID NO: 123625 - DNA, 11 bp, Unknown
  misc_feature (1)..( 11): Result.003 file - promoters60/1975887
ttaattgctta

SEQ ID NO: 123626 - DNA, 11 bp, Unknown
  misc_feature (1)..( 11): Result.003 file - promoters60/1975887
tatagtattga

SEQ ID NO: 123627 - DNA, 11 bp, Unknown
  misc_feature (1)..( 11): Result.003 file - promoters60/1975887
taaagttttga

SEQ ID NO: 123628 - DNA, 11 bp, Unknown
  misc_feature (1)..( 11): Result.003 file - promoters60/1975887
taaaatttggt

SEQ ID NO: 123629 - DNA, 8 bp, Unknown
  misc_feature (1)..( 8): Result.003 file - promoters60/1975887
tatcaaaa

SEQ ID NO: 123630 - DNA, 8 bp, Unknown
  misc_feature (1)..( 8): Result.003 file - promoters60/1975887
tatgaaaa

SEQ ID NO: 123631 - DNA, 8 bp, Unknown
  misc_feature (1)..( 8): Result.003 file - promoters60/1975887
aatgaaac

SEQ ID NO: 123632 - DNA, 7 bp, Unknown
  misc_feature (1)..( 7): Result.003 file - promoters60/1975887
gtatcaa

SEQ ID NO: 123633 - DNA, 7 bp, Unknown
  misc_feature (1)..( 7): Result.003 file - promoters60/1975887
gtatcac

SEQ ID NO: 123634 - DNA, 7 bp, Unknown
  misc_feature (1)..( 7): Result.003 file - promoters60/1975887
gtatcaa

SEQ ID NO: 123635 - DNA, 9 bp, Unknown
  misc_feature (1)..( 9): Result.003 file - promoters60/1975887
agaaagaaa

SEQ ID NO: 123636 - DNA, 9 bp, Unknown
  misc_feature (1)..( 9): Result.003 file - promoters60/1975887
agacagaag

SEQ ID NO: 123637 - DNA, 9 bp, Unknown
  misc_feature (1)..( 9): Result.003 file - promoters60/1975887
gcccagaag

SEQ ID NO: 123638 - DNA, 10 bp, Unknown
  misc_feature (1)..( 10): Result.003 file - promoters60/1975887
aaaggtcatt

SEQ ID NO: 123639 - DNA, 10 bp, Unknown
  misc_feature (1)..( 10): Result.003 file - promoters60/1975887
aaaggtttct

SEQ ID NO: 123640 - DNA, 10 bp, Unknown
  misc_feature (1)..( 10): Result.003 file - promoters60/1975887
aaagatttct

SEQ ID NO: 123641 - DNA, 6 bp, Unknown
  misc_feature (1)..( 6): Result.003 file - promoters60/1975895
atataa

SEQ ID NO: 123642 - DNA, 6 bp, Unknown
  misc_feature (1)..( 6): Result.003 file - promoters60/1975895
atataa

SEQ ID NO: 123643 - DNA, 6 bp, Unknown
  misc_feature (1)..( 6): Result.003 file - promoters60/1975895
catgat

SEQ ID NO: 123644 - DNA, 6 bp, Unknown
  misc_feature (1)..( 6): Result.003 file - promoters60/1975895
catgat

SEQ ID NO: 123645 - DNA, 6 bp, Unknown
  misc_feature (1)..( 6): Result.003 file - promoters60/1975895
actata

SEQ ID NO: 123646 - DNA, 6 bp, Unknown
  misc_feature (1)..( 6): Result.003 file - promoters60/1975895
actata

SEQ ID NO: 123647 - DNA, 7 bp, Unknown
  misc_feature (1)..( 7): Result.003 file - promoters60/1975895
attcacg

SEQ ID NO: 123648 - DNA, 7 bp, Unknown
  misc_feature (1)..( 7): Result.003 file - promoters60/1975895
attcacg

SEQ ID NO: 123649 - DNA, 9 bp, Unknown
  misc_feature (1)..( 9): Result.003 file - promoters60/1975895
aaaattaaa

SEQ ID NO: 123650 - DNA, 9 bp, Unknown
  misc_feature (1)..( 9): Result.003 file - promoters60/1975895
aaaaataaa

SEQ ID NO: 123651 - DNA, 6 bp, Unknown
  misc_feature (1)..( 6): Result.003 file - promoters60/1975895
acgaat

SEQ ID NO: 123652 - DNA, 6 bp, Unknown
  misc_feature (1)..( 6): Result.003 file - promoters60/1975895
acgaat

SEQ ID NO: 123653 - DNA, 8 bp, Unknown
  misc_feature (1)..( 8): Result.003 file - promoters60/1975895
atgtacaa

SEQ ID NO: 123654 - DNA, 8 bp, Unknown
  misc_feature (1)..( 8): Result.003 file - promoters60/1975895
atgtgcaa

SEQ ID NO: 123655 - DNA, 7 bp, Unknown
  misc_feature (1)..( 7): Result.003 file - promoters60/1975895
acaagaa

SEQ ID NO: 123656 - DNA, 7 bp, Unknown
  misc_feature (1)..( 7): Result.003 file - promoters60/1975895
acaagaa

SEQ ID NO: 123657 - DNA, 6 bp, Unknown
  misc_feature (1)..( 6): Result.003 file - promoters60/1975895
taattt

SEQ ID NO: 123658 - DNA, 6 bp, Unknown
  misc_feature (1)..( 6): Result.003 file - promoters60/1975895
taattt

SEQ ID NO: 123659 - DNA, 10 bp, Unknown
  misc_feature (1)..( 10): Result.003 file - promoters60/1975895
ataaaagctt

SEQ ID NO: 123660 - DNA, 10 bp, Unknown
  misc_feature (1)..( 10): Result.003 file - promoters60/1975895
ataaaggctt

SEQ ID NO: 123661 - DNA, 8 bp, Unknown
  misc_feature (1)..( 8): Result.003 file - promoters60/1975895
catcgtct

SEQ ID NO: 123662 - DNA, 8 bp, Unknown
  misc_feature (1)..( 8): Result.003 file - promoters60/1975895
catcttct

SEQ ID NO: 123663 - DNA, 6 bp, Unknown
  misc_feature (1)..( 6): Result.003 file - promoters60/1975895
tctaac

SEQ ID NO: 123664 - DNA, 6 bp, Unknown
  misc_feature (1)..( 6): Result.003 file - promoters60/1975895
tctaac

SEQ ID NO: 123665 - DNA, 9 bp, Unknown
  misc_feature (1)..( 9): Result.003 file - promoters60/1975895
ttttccgct

SEQ ID NO: 123666 - DNA, 9 bp, Unknown
  misc_feature (1)..( 9): Result.003 file - promoters60/1975895
ttttcagct

SEQ ID NO: 123667 - DNA, 15 bp, Unknown
  misc_feature (1)..( 15): Result.003 file - promoters60/1975923
acacaaaaatacatt

SEQ ID NO: 123668 - DNA, 15 bp, Unknown
  misc_feature (1)..( 15): Result.003 file - promoters60/1975923
aaccaataatggccc

SEQ ID NO: 123669 - DNA, 15 bp, Unknown
  misc_feature (1)..( 15): Result.003 file - promoters60/1975923
acacacaaagtccct

SEQ ID NO: 123670 - DNA, 15 bp, Unknown
  misc_feature (1)..( 15): Result.003 file - promoters60/1975923
atacaaaaaaggcgg

SEQ ID NO: 123671 - DNA, 15 bp, Unknown
  misc_feature (1)..( 15): Result.003 file - promoters60/1975923
ggtaaaagatacaac

SEQ ID NO: 123672 - DNA, 15 bp, Unknown
  misc_feature (1)..( 15): Result.003 file - promoters60/1975923
ttaaaataattctta

SEQ ID NO: 123673 - DNA, 15 bp, Unknown
  misc_feature (1)..( 15): Result.003 file - promoters60/1975923
agcacgagatgcaaa

SEQ ID NO: 123674 - DNA, 11 bp, Unknown
  misc_feature (1)..( 11): Result.003 file - promoters60/1975923
tatttaaacgt

SEQ ID NO: 123675 - DNA, 11 bp, Unknown
  misc_feature (1)..( 11): Result.003 file - promoters60/1975923
tatttaaaaat

SEQ ID NO: 123676 - DNA, 11 bp, Unknown
  misc_feature (1)..( 11): Result.003 file - promoters60/1975923
gattaaaacta

SEQ ID NO: 123677 - DNA, 11 bp, Unknown
  misc_feature (1)..( 11): Result.003 file - promoters60/1975923
ggtttaaaaag

SEQ ID NO: 123678 - DNA, 12 bp, Unknown
  misc_feature (1)..( 12): Result.003 file - promoters60/1975923
aatttataaatg

SEQ ID NO: 123679 - DNA, 12 bp, Unknown
  misc_feature (1)..( 12): Result.003 file - promoters60/1975923
aggataaaatta

SEQ ID NO: 123680 - DNA, 12 bp, Unknown
  misc_feature (1)..( 12): Result.003 file - promoters60/1975923
cttttttaatga

SEQ ID NO: 123681 - DNA, 10 bp, Unknown
  misc_feature (1)..( 10): Result.003 file - promoters60/1975923
ttaataaaat

SEQ ID NO: 123682 - DNA, 10 bp, Unknown
  misc_feature (1)..( 10): Result.003 file - promoters60/1975923
tttataaaaa

SEQ ID NO: 123683 - DNA, 10 bp, Unknown
  misc_feature (1)..( 10): Result.003 file - promoters60/1975923
ttaataaaaa

SEQ ID NO: 123684 - DNA, 10 bp, Unknown
  misc_feature (1)..( 10): Result.003 file - promoters60/1975923
ttaatacaat

SEQ ID NO: 123685 - DNA, 10 bp, Unknown
  misc_feature (1)..( 10): Result.003 file - promoters60/1975923
aaaataaatt

SEQ ID NO: 123686 - DNA, 10 bp, Unknown
  misc_feature (1)..( 10): Result.003 file - promoters60/1975923
tcaatacaag

SEQ ID NO: 123687 - DNA, 11 bp, Unknown
  misc_feature (1)..( 11): Result.003 file - promoters60/1975923
ttaattcaatt

SEQ ID NO: 123688 - DNA, 11 bp, Unknown
  misc_feature (1)..( 11): Result.003 file - promoters60/1975923
caaatttaatt

SEQ ID NO: 123689 - DNA, 11 bp, Unknown
  misc_feature (1)..( 11): Result.003 file - promoters60/1975923
aaaattatttt

SEQ ID NO: 123690 - DNA, 11 bp, Unknown
  misc_feature (1)..( 11): Result.003 file - promoters60/1975923
ccaatataaag

SEQ ID NO: 123691 - DNA, 11 bp, Unknown
  misc_feature (1)..( 11): Result.003 file - promoters60/1975923
gaaattaaagg

SEQ ID NO: 123692 - DNA, 11 bp, Unknown
  misc_feature (1)..( 11): Result.003 file - promoters60/1975923
taaactaattt

SEQ ID NO: 123693 - DNA, 10 bp, Unknown
  misc_feature (1)..( 10): Result.003 file - promoters60/1975923
aaagttatag

SEQ ID NO: 123694 - DNA, 10 bp, Unknown
  misc_feature (1)..( 10): Result.003 file - promoters60/1975923
aaatttataa

SEQ ID NO: 123695 - DNA, 10 bp, Unknown
  misc_feature (1)..( 10): Result.003 file - promoters60/1975923
aaaattagtg

SEQ ID NO: 123696 - DNA, 10 bp, Unknown
  misc_feature (1)..( 10): Result.003 file - promoters60/1975923
taatttaaaa

SEQ ID NO: 123697 - DNA, 10 bp, Unknown
  misc_feature (1)..( 10): Result.003 file - promoters60/1975923
acttttttaa

SEQ ID NO: 123698 - DNA, 10 bp, Unknown
  misc_feature (1)..( 10): Result.003 file - promoters60/1975923
gagtttcaat

SEQ ID NO: 123699 - DNA, 18 bp, Unknown
  misc_feature (1)..( 18): Result.003 file - promoters60/1975940
taataacatcaataaact

SEQ ID NO: 123700 - DNA, 18 bp, Unknown
  misc_feature (1)..( 18): Result.003 file - promoters60/1975940
ctaaaacaccaaaaccaa

SEQ ID NO: 123701 - DNA, 18 bp, Unknown
  misc_feature (1)..( 18): Result.003 file - promoters60/1975940
taaaaacattaataagta

SEQ ID NO: 123702 - DNA, 18 bp, Unknown
  misc_feature (1)..( 18): Result.003 file - promoters60/1975940
aaaataaaccaaagtaaa

SEQ ID NO: 123703 - DNA, 18 bp, Unknown
  misc_feature (1)..( 18): Result.003 file - promoters60/1975940
gatccgaaccaaattgat

SEQ ID NO: 123704 - DNA, 19 bp, Unknown
  misc_feature (1)..( 19): Result.003 file - promoters60/1975940
ataacaaatacaaacttta

SEQ ID NO: 123705 - DNA, 14 bp, Unknown
  misc_feature (1)..( 14): Result.003 file - promoters60/1975940
agattttttatttt

SEQ ID NO: 123706 - DNA, 14 bp, Unknown
  misc_feature (1)..( 14): Result.003 file - promoters60/1975940
agaatttttgtaga

SEQ ID NO: 123707 - DNA, 14 bp, Unknown
  misc_feature (1)..( 14): Result.003 file - promoters60/1975940
tgattttgactatg

SEQ ID NO: 123708 - DNA, 14 bp, Unknown
  misc_feature (1)..( 14): Result.003 file - promoters60/1975940
aaattttttaattt

SEQ ID NO: 123709 - DNA, 14 bp, Unknown
  misc_feature (1)..( 14): Result.003 file - promoters60/1975940
agaattagttaatg

SEQ ID NO: 123710 - DNA, 14 bp, Unknown
  misc_feature (1)..( 14): Result.003 file - promoters60/1975940
atattttgcataga

SEQ ID NO: 123711 - DNA, 10 bp, Unknown
  misc_feature (1)..( 10): Result.003 file - promoters60/1975940
aattttattt

SEQ ID NO: 123712 - DNA, 10 bp, Unknown
  misc_feature (1)..( 10): Result.003 file - promoters60/1975940
ctttttattt

SEQ ID NO: 123713 - DNA, 10 bp, Unknown
  misc_feature (1)..( 10): Result.003 file - promoters60/1975940
catttgattg

SEQ ID NO: 123714 - DNA, 10 bp, Unknown
  misc_feature (1)..( 10): Result.003 file - promoters60/1975940
agaattattt

SEQ ID NO: 123715 - DNA, 10 bp, Unknown
  misc_feature (1)..( 10): Result.003 file - promoters60/1975940
aatcttaata

SEQ ID NO: 123716 - DNA, 10 bp, Unknown
  misc_feature (1)..( 10): Result.003 file - promoters60/1975940
tggttggttg

SEQ ID NO: 123717 - DNA, 12 bp, Unknown
  misc_feature (1)..( 12): Result.003 file - promoters60/1975956
tagatttattaa

SEQ ID NO: 123718 - DNA, 12 bp, Unknown
  misc_feature (1)..( 12): Result.003 file - promoters60/1975956
tagaattactaa

SEQ ID NO: 123719 - DNA, 7 bp, Unknown
  misc_feature (1)..( 7): Result.003 file - promoters60/1975956
taataat

SEQ ID NO: 123720 - DNA, 7 bp, Unknown
  misc_feature (1)..( 7): Result.003 file - promoters60/1975956
taataat

SEQ ID NO: 123721 - DNA, 6 bp, Unknown
  misc_feature (1)..( 6): Result.003 file - promoters60/1975956
aatttt

SEQ ID NO: 123722 - DNA, 6 bp, Unknown
  misc_feature (1)..( 6): Result.003 file - promoters60/1975956
aatttt

SEQ ID NO: 123723 - DNA, 14 bp, Unknown
  misc_feature (1)..( 14): Result.003 file - promoters60/1975956
ttgaatcaatattt

SEQ ID NO: 123724 - DNA, 14 bp, Unknown
  misc_feature (1)..( 14): Result.003 file - promoters60/1975956
atatatatatattt

SEQ ID NO: 123725 - DNA, 14 bp, Unknown
  misc_feature (1)..( 14): Result.003 file - promoters60/1975956
ttgattcaaaattc

SEQ ID NO: 123726 - DNA, 7 bp, Unknown
  misc_feature (1)..( 7): Result.003 file - promoters60/1975956
tatccaa

SEQ ID NO: 123727 - DNA, 7 bp, Unknown
  misc_feature (1)..( 7): Result.003 file - promoters60/1975956
tatacaa

SEQ ID NO: 123728 - DNA, 11 bp, Unknown
  misc_feature (1)..( 11): Result.003 file - promoters60/1975956
ttttctacaat

SEQ ID NO: 123729 - DNA, 11 bp, Unknown
  misc_feature (1)..( 11): Result.003 file - promoters60/1975956
ttttctaaaat

SEQ ID NO: 123730 - DNA, 7 bp, Unknown
  misc_feature (1)..( 7): Result.003 file - promoters60/1975956
tataatt

SEQ ID NO: 123731 - DNA, 7 bp, Unknown
  misc_feature (1)..( 7): Result.003 file - promoters60/1975956
tatgatt

SEQ ID NO: 123732 - DNA, 8 bp, Unknown
  misc_feature (1)..( 8): Result.003 file - promoters60/1975956
ctaaaaaa

SEQ ID NO: 123733 - DNA, 8 bp, Unknown
  misc_feature (1)..( 8): Result.003 file - promoters60/1975956
tgaaaaaa

SEQ ID NO: 123734 - DNA, 8 bp, Unknown
  misc_feature (1)..( 8): Result.003 file - promoters60/1975956
tgagaaag

SEQ ID NO: 123735 - DNA, 9 bp, Unknown
  misc_feature (1)..( 9): Result.003 file - promoters60/1975956
taaatttct

SEQ ID NO: 123736 - DNA, 9 bp, Unknown
  misc_feature (1)..( 9): Result.003 file - promoters60/1975956
taactttca

SEQ ID NO: 123737 - DNA, 9 bp, Unknown
  misc_feature (1)..( 9): Result.003 file - promoters60/1975956
ggtatttct

SEQ ID NO: 123738 - DNA, 7 bp, Unknown
  misc_feature (1)..( 7): Result.003 file - promoters60/1975956
aagagaa

SEQ ID NO: 123739 - DNA, 7 bp, Unknown
  misc_feature (1)..( 7): Result.003 file - promoters60/1975956
aagtgaa

SEQ ID NO: 123740 - DNA, 8 bp, Unknown
  misc_feature (1)..( 8): Result.003 file - promoters60/1975956
atggcttg

SEQ ID NO: 123741 - DNA, 8 bp, Unknown
  misc_feature (1)..( 8): Result.003 file - promoters60/1975956
atgggttg

SEQ ID NO: 123742 - DNA, 7 bp, Unknown
  misc_feature (1)..( 7): Result.003 file - promoters60/1975956
tggattt

SEQ ID NO: 123743 - DNA, 7 bp, Unknown
  misc_feature (1)..( 7): Result.003 file - promoters60/1975956
tggattt

SEQ ID NO: 123744 - DNA, 6 bp, Unknown
  misc_feature (1)..( 6): Result.003 file - promoters60/1975956
aagatt

SEQ ID NO: 123745 - DNA, 6 bp, Unknown
  misc_feature (1)..( 6): Result.003 file - promoters60/1975956
aagatt

SEQ ID NO: 123746 - DNA, 6 bp, Unknown
  misc_feature (1)..( 6): Result.003 file - promoters60/1975956
ttggtt

SEQ ID NO: 123747 - DNA, 6 bp, Unknown
  misc_feature (1)..( 6): Result.003 file - promoters60/1975956
ttggtt

SEQ ID NO: 123748 - DNA, 6 bp, Unknown
  misc_feature (1)..( 6): Result.003 file - promoters60/1975956
ttaacc

SEQ ID NO: 123749 - DNA, 6 bp, Unknown
  misc_feature (1)..( 6): Result.003 file - promoters60/1975956
ttaacc

SEQ ID NO: 123750 - DNA, 7 bp, Unknown
  misc_feature (1)..( 7): Result.003 file - promoters60/1975956
ctcactc

SEQ ID NO: 123751 - DNA, 7 bp, Unknown
  misc_feature (1)..( 7): Result.003 file - promoters60/1975956
ctcgctc

SEQ ID NO: 123752 - DNA, 6 bp, Unknown
  misc_feature (1)..( 6): Result.003 file - promoters60/1975956
ataatt

SEQ ID NO: 123753 - DNA, 6 bp, Unknown
  misc_feature (1)..( 6): Result.003 file - promoters60/1975956
ataatt

SEQ ID NO: 123754 - DNA, 8 bp, Unknown
  misc_feature (1)..( 8): Result.003 file - promoters60/1975956
gaaatata

SEQ ID NO: 123755 - DNA, 8 bp, Unknown
  misc_feature (1)..( 8): Result.003 file - promoters60/1975956
gaactata

SEQ ID NO: 123756 - DNA, 6 bp, Unknown
  misc_feature (1)..( 6): Result.003 file - promoters60/1975956
ttatcc

SEQ ID NO: 123757 - DNA, 6 bp, Unknown
  misc_feature (1)..( 6): Result.003 file - promoters60/1975956
ttatcc

SEQ ID NO: 123758 - DNA, 6 bp, Unknown
  misc_feature (1)..( 6): Result.003 file - promoters60/1975956
atttaa

SEQ ID NO: 123759 - DNA, 6 bp, Unknown
  misc_feature (1)..( 6): Result.003 file - promoters60/1975956
atttaa

SEQ ID NO: 123760 - DNA, 9 bp, Unknown
  misc_feature (1)..( 9): Result.003 file - promoters60/1976000
aaaacacga

SEQ ID NO: 123761 - DNA, 9 bp, Unknown
  misc_feature (1)..( 9): Result.003 file - promoters60/1976000
aaaacaatt

SEQ ID NO: 123762 - DNA, 9 bp, Unknown
  misc_feature (1)..( 9): Result.003 file - promoters60/1976000
caaacgatt

SEQ ID NO: 123763 - DNA, 7 bp, Unknown
  misc_feature (1)..( 7): Result.003 file - promoters60/1976000
aaacata

SEQ ID NO: 123764 - DNA, 7 bp, Unknown
  misc_feature (1)..( 7): Result.003 file - promoters60/1976000
aaaaata

SEQ ID NO: 123765 - DNA, 6 bp, Unknown
  misc_feature (1)..( 6): Result.003 file - promoters60/1976000
tgacaa

SEQ ID NO: 123766 - DNA, 6 bp, Unknown
  misc_feature (1)..( 6): Result.003 file - promoters60/1976000
tgacaa

SEQ ID NO: 123767 - DNA, 7 bp, Unknown
  misc_feature (1)..( 7): Result.003 file - promoters60/1976000
attacaa

SEQ ID NO: 123768 - DNA, 7 bp, Unknown
  misc_feature (1)..( 7): Result.003 file - promoters60/1976000
attgcaa

SEQ ID NO: 123769 - DNA, 6 bp, Unknown
  misc_feature (1)..( 6): Result.003 file - promoters60/1976000
taatta

SEQ ID NO: 123770 - DNA, 6 bp, Unknown
  misc_feature (1)..( 6): Result.003 file - promoters60/1976000
taatta

SEQ ID NO: 123771 - DNA, 7 bp, Unknown
  misc_feature (1)..( 7): Result.003 file - promoters60/1976000
tcttctg

SEQ ID NO: 123772 - DNA, 7 bp, Unknown
  misc_feature (1)..( 7): Result.003 file - promoters60/1976000
tctactg

SEQ ID NO: 123773 - DNA, 6 bp, Unknown
  misc_feature (1)..( 6): Result.003 file - promoters60/1976000
aaattg

SEQ ID NO: 123774 - DNA, 6 bp, Unknown
  misc_feature (1)..( 6): Result.003 file - promoters60/1976000
aaattg

SEQ ID NO: 123775 - DNA, 6 bp, Unknown
  misc_feature (1)..( 6): Result.003 file - promoters60/1976000
ccctat

SEQ ID NO: 123776 - DNA, 6 bp, Unknown
  misc_feature (1)..( 6): Result.003 file - promoters60/1976000
ccctat

SEQ ID NO: 123777 - DNA, 7 bp, Unknown
  misc_feature (1)..( 7): Result.003 file - promoters60/1976000
ctaaaat

SEQ ID NO: 123778 - DNA, 7 bp, Unknown
  misc_feature (1)..( 7): Result.003 file - promoters60/1976000
ctacaat

SEQ ID NO: 123779 - DNA, 7 bp, Unknown
  misc_feature (1)..( 7): Result.003 file - promoters60/1976000
ttttgtt

SEQ ID NO: 123780 - DNA, 7 bp, Unknown
  misc_feature (1)..( 7): Result.003 file - promoters60/1976000
ttttgtt

SEQ ID NO: 123781 - DNA, 7 bp, Unknown
  misc_feature (1)..( 7): Result.003 file - promoters60/1976000
ttagtaa

SEQ ID NO: 123782 - DNA, 7 bp, Unknown
  misc_feature (1)..( 7): Result.003 file - promoters60/1976000
ttattaa

SEQ ID NO: 123783 - DNA, 7 bp, Unknown
  misc_feature (1)..( 7): Result.003 file - promoters60/1976000
tcttttc

SEQ ID NO: 123784 - DNA, 7 bp, Unknown
  misc_feature (1)..( 7): Result.003 file - promoters60/1976000
tctgttc

SEQ ID NO: 123785 - DNA, 6 bp, Unknown
  misc_feature (1)..( 6): Result.003 file - promoters60/1976000
aataat

SEQ ID NO: 123786 - DNA, 6 bp, Unknown
  misc_feature (1)..( 6): Result.003 file - promoters60/1976000
aataat

SEQ ID NO: 123787 - DNA, 7 bp, Unknown
  misc_feature (1)..( 7): Result.003 file - promoters60/1976008
gaaaaaa

SEQ ID NO: 123788 - DNA, 7 bp, Unknown
  misc_feature (1)..( 7): Result.003 file - promoters60/1976008
caaaaaa

SEQ ID NO: 123789 - DNA, 7 bp, Unknown
  misc_feature (1)..( 7): Result.003 file - promoters60/1976008
caaaaac

SEQ ID NO: 123790 - DNA, 8 bp, Unknown
  misc_feature (1)..( 8): Result.003 file - promoters60/1976008
cggagaaa

SEQ ID NO: 123791 - DNA, 8 bp, Unknown
  misc_feature (1)..( 8): Result.003 file - promoters60/1976008
cggagaat

SEQ ID NO: 123792 - DNA, 8 bp, Unknown
  misc_feature (1)..( 8): Result.003 file - promoters60/1976008
ttgagaat

SEQ ID NO: 123793 - DNA, 8 bp, Unknown
  misc_feature (1)..( 8): Result.003 file - promoters60/1976008
gatcagat

SEQ ID NO: 123794 - DNA, 8 bp, Unknown
  misc_feature (1)..( 8): Result.003 file - promoters60/1976008
aatcagaa

SEQ ID NO: 123795 - DNA, 8 bp, Unknown
  misc_feature (1)..( 8): Result.003 file - promoters60/1976008
aatccgaa

SEQ ID NO: 123796 - DNA, 11 bp, Unknown
  misc_feature (1)..( 11): Result.003 file - promoters60/1976008
ttctgatgtga

SEQ ID NO: 123797 - DNA, 11 bp, Unknown
  misc_feature (1)..( 11): Result.003 file - promoters60/1976008
ttcagatctca

SEQ ID NO: 123798 - DNA, 11 bp, Unknown
  misc_feature (1)..( 11): Result.003 file - promoters60/1976008
cacagagctca

SEQ ID NO: 123799 - DNA, 7 bp, Unknown
  misc_feature (1)..( 7): Result.003 file - promoters60/1976008
aaaaaac

SEQ ID NO: 123800 - DNA, 7 bp, Unknown
  misc_feature (1)..( 7): Result.003 file - promoters60/1976008
caaaaac

SEQ ID NO: 123801 - DNA, 7 bp, Unknown
  misc_feature (1)..( 7): Result.003 file - promoters60/1976008
caaaaaa

SEQ ID NO: 123802 - DNA, 9 bp, Unknown
  misc_feature (1)..( 9): Result.003 file - promoters60/1976008
ctatccaat

SEQ ID NO: 123803 - DNA, 9 bp, Unknown
  misc_feature (1)..( 9): Result.003 file - promoters60/1976008
atatcaaat

SEQ ID NO: 123804 - DNA, 9 bp, Unknown
  misc_feature (1)..( 9): Result.003 file - promoters60/1976008
atatcactc

SEQ ID NO: 123805 - DNA, 10 bp, Unknown
  misc_feature (1)..( 10): Result.003 file - promoters60/1976008
tggaaaaaaa

SEQ ID NO: 123806 - DNA, 10 bp, Unknown
  misc_feature (1)..( 10): Result.003 file - promoters60/1976008
tggaaaattt

SEQ ID NO: 123807 - DNA, 10 bp, Unknown
  misc_feature (1)..( 10): Result.003 file - promoters60/1976008
ctgaacattt

SEQ ID NO: 123808 - DNA, 13 bp, Unknown
  misc_feature (1)..( 13): Result.003 file - promoters60/1976019
gttataaaagtgg

SEQ ID NO: 123809 - DNA, 13 bp, Unknown
  misc_feature (1)..( 13): Result.003 file - promoters60/1976019
acgaaaaaagttt

SEQ ID NO: 123810 - DNA, 13 bp, Unknown
  misc_feature (1)..( 13): Result.003 file - promoters60/1976019
cactaaaaaggtt

SEQ ID NO: 123811 - DNA, 13 bp, Unknown
  misc_feature (1)..( 13): Result.003 file - promoters60/1976019
aaaaaaaaagtca

SEQ ID NO: 123812 - DNA, 13 bp, Unknown
  misc_feature (1)..( 13): Result.003 file - promoters60/1976019
ctactaaaatcaa

SEQ ID NO: 123813 - DNA, 13 bp, Unknown
  misc_feature (1)..( 13): Result.003 file - promoters60/1976019
tgctaaaaatcct

SEQ ID NO: 123814 - DNA, 12 bp, Unknown
  misc_feature (1)..( 12): Result.003 file - promoters60/1976019
tatataaaaaag

SEQ ID NO: 123815 - DNA, 12 bp, Unknown
  misc_feature (1)..( 12): Result.003 file - promoters60/1976019
aggataaaatta

SEQ ID NO: 123816 - DNA, 13 bp, Unknown
  misc_feature (1)..( 13): Result.003 file - promoters60/1976019
acaataacaaaca

SEQ ID NO: 123817 - DNA, 13 bp, Unknown
  misc_feature (1)..( 13): Result.003 file - promoters60/1976019
attatcaaaattg

SEQ ID NO: 123818 - DNA, 13 bp, Unknown
  misc_feature (1)..( 13): Result.003 file - promoters60/1976019
agaataaaaacag

SEQ ID NO: 123819 - DNA, 13 bp, Unknown
  misc_feature (1)..( 13): Result.003 file - promoters60/1976019
agaataaatccgt

SEQ ID NO: 123820 - DNA, 13 bp, Unknown
  misc_feature (1)..( 13): Result.003 file - promoters60/1976019
agccgaacacaca

SEQ ID NO: 123821 - DNA, 9 bp, Unknown
  misc_feature (1)..( 9): Result.003 file - promoters60/1976019
gattctgaa

SEQ ID NO: 123822 - DNA, 9 bp, Unknown
  misc_feature (1)..( 9): Result.003 file - promoters60/1976019
acttcagaa

SEQ ID NO: 123823 - DNA, 9 bp, Unknown
  misc_feature (1)..( 9): Result.003 file - promoters60/1976019
gattctgca

SEQ ID NO: 123824 - DNA, 9 bp, Unknown
  misc_feature (1)..( 9): Result.003 file - promoters60/1976019
aagtcagaa

SEQ ID NO: 123825 - DNA, 9 bp, Unknown
  misc_feature (1)..( 9): Result.003 file - promoters60/1976019
ccttgagat

SEQ ID NO: 123826 - DNA, 10 bp, Unknown
  misc_feature (1)..( 10): Result.003 file - promoters60/1976019
attccatgat

SEQ ID NO: 123827 - DNA, 10 bp, Unknown
  misc_feature (1)..( 10): Result.003 file - promoters60/1976078
ataaaaaagc

SEQ ID NO: 123828 - DNA, 10 bp, Unknown
  misc_feature (1)..( 10): Result.003 file - promoters60/1976078
ttaaaaagaa

SEQ ID NO: 123829 - DNA, 10 bp, Unknown
  misc_feature (1)..( 10): Result.003 file - promoters60/1976078
ataaaaacag

SEQ ID NO: 123830 - DNA, 10 bp, Unknown
  misc_feature (1)..( 10): Result.003 file - promoters60/1976078
agaaaaacag

SEQ ID NO: 123831 - DNA, 10 bp, Unknown
  misc_feature (1)..( 10): Result.003 file - promoters60/1976078
agaaaaaaat

SEQ ID NO: 123832 - DNA, 10 bp, Unknown
  misc_feature (1)..( 10): Result.003 file - promoters60/1976078
ttaaaaaata

SEQ ID NO: 123833 - DNA, 6 bp, Unknown
  misc_feature (1)..( 6): Result.003 file - promoters60/1976158
aataat

SEQ ID NO: 123834 - DNA, 6 bp, Unknown
  misc_feature (1)..( 6): Result.003 file - promoters60/1976158
aataat

SEQ ID NO: 123835 - DNA, 7 bp, Unknown
  misc_feature (1)..( 7): Result.003 file - promoters60/1976158
tacatat

SEQ ID NO: 123836 - DNA, 7 bp, Unknown
  misc_feature (1)..( 7): Result.003 file - promoters60/1976158
tacttat

SEQ ID NO: 123837 - DNA, 12 bp, Unknown
  misc_feature (1)..( 12): Result.003 file - promoters60/1976158
tacatatctact

SEQ ID NO: 123838 - DNA, 12 bp, Unknown
  misc_feature (1)..( 12): Result.003 file - promoters60/1976158
aatttatttact

SEQ ID NO: 123839 - DNA, 12 bp, Unknown
  misc_feature (1)..( 12): Result.003 file - promoters60/1976158
aattgatttctt

SEQ ID NO: 123840 - DNA, 6 bp, Unknown
  misc_feature (1)..( 6): Result.003 file - promoters60/1976158
atgatt

SEQ ID NO: 123841 - DNA, 6 bp, Unknown
  misc_feature (1)..( 6): Result.003 file - promoters60/1976158
atgatt

SEQ ID NO: 123842 - DNA, 7 bp, Unknown
  misc_feature (1)..( 7): Result.003 file - promoters60/1976158
tgtaatt

SEQ ID NO: 123843 - DNA, 7 bp, Unknown
  misc_feature (1)..( 7): Result.003 file - promoters60/1976158
tgtaatt

SEQ ID NO: 123844 - DNA, 6 bp, Unknown
  misc_feature (1)..( 6): Result.003 file - promoters60/1976158
gagata

SEQ ID NO: 123845 - DNA, 6 bp, Unknown
  misc_feature (1)..( 6): Result.003 file - promoters60/1976158
gagata

SEQ ID NO: 123846 - DNA, 6 bp, Unknown
  misc_feature (1)..( 6): Result.003 file - promoters60/1976158
caacaa

SEQ ID NO: 123847 - DNA, 6 bp, Unknown
  misc_feature (1)..( 6): Result.003 file - promoters60/1976158
caacaa

SEQ ID NO: 123848 - DNA, 10 bp, Unknown
  misc_feature (1)..( 10): Result.003 file - promoters60/1976158
tgactcaaaa

SEQ ID NO: 123849 - DNA, 10 bp, Unknown
  misc_feature (1)..( 10): Result.003 file - promoters60/1976158
ttagtcaaaa

SEQ ID NO: 123850 - DNA, 10 bp, Unknown
  misc_feature (1)..( 10): Result.003 file - promoters60/1976158
ttaatcaaac

SEQ ID NO: 123851 - DNA, 6 bp, Unknown
  misc_feature (1)..( 6): Result.003 file - promoters60/1976158
tcaatt

SEQ ID NO: 123852 - DNA, 6 bp, Unknown
  misc_feature (1)..( 6): Result.003 file - promoters60/1976158
tcaatt

SEQ ID NO: 123853 - DNA, 10 bp, Unknown
  misc_feature (1)..( 10): Result.003 file - promoters60/1976158
aatatacata

SEQ ID NO: 123854 - DNA, 10 bp, Unknown
  misc_feature (1)..( 10): Result.003 file - promoters60/1976158
aatatacttt

SEQ ID NO: 123855 - DNA, 10 bp, Unknown
  misc_feature (1)..( 10): Result.003 file - promoters60/1976158
attataattt

SEQ ID NO: 123856 - DNA, 8 bp, Unknown
  misc_feature (1)..( 8): Result.003 file - promoters60/1976158
tcatgttt

SEQ ID NO: 123857 - DNA, 8 bp, Unknown
  misc_feature (1)..( 8): Result.003 file - promoters60/1976158
tcaagttt

SEQ ID NO: 123858 - DNA, 6 bp, Unknown
  misc_feature (1)..( 6): Result.003 file - promoters60/1976158
tttaca

SEQ ID NO: 123859 - DNA, 6 bp, Unknown
  misc_feature (1)..( 6): Result.003 file - promoters60/1976158
tttaca

SEQ ID NO: 123860 - DNA, 7 bp, Unknown
  misc_feature (1)..( 7): Result.003 file - promoters60/1976158
aacgaca

SEQ ID NO: 123861 - DNA, 7 bp, Unknown
  misc_feature (1)..( 7): Result.003 file - promoters60/1976158
aacaaca

SEQ ID NO: 123862 - DNA, 8 bp, Unknown
  misc_feature (1)..( 8): Result.003 file - promoters60/1976158
caaactat

SEQ ID NO: 123863 - DNA, 8 bp, Unknown
  misc_feature (1)..( 8): Result.003 file - promoters60/1976158
aaaattat

SEQ ID NO: 123864 - DNA, 8 bp, Unknown
  misc_feature (1)..( 8): Result.003 file - promoters60/1976158
aaaattcg

SEQ ID NO: 123865 - DNA, 6 bp, Unknown
  misc_feature (1)..( 6): Result.003 file - promoters60/1976158
ttttgt

SEQ ID NO: 123866 - DNA, 6 bp, Unknown
  misc_feature (1)..( 6): Result.003 file - promoters60/1976158
ttttgt

SEQ ID NO: 123867 - DNA, 7 bp, Unknown
  misc_feature (1)..( 7): Result.003 file - promoters60/1976158
ttataat

SEQ ID NO: 123868 - DNA, 7 bp, Unknown
  misc_feature (1)..( 7): Result.003 file - promoters60/1976158
ttagaat

SEQ ID NO: 123869 - DNA, 7 bp, Unknown
  misc_feature (1)..( 7): Result.003 file - promoters60/1976158
tttttta

SEQ ID NO: 123870 - DNA, 7 bp, Unknown
  misc_feature (1)..( 7): Result.003 file - promoters60/1976158
tttctta

SEQ ID NO: 123871 - DNA, 7 bp, Unknown
  misc_feature (1)..( 7): Result.003 file - promoters60/1976158
taatcaa

SEQ ID NO: 123872 - DNA, 7 bp, Unknown
  misc_feature (1)..( 7): Result.003 file - promoters60/1976158
taatcaa

SEQ ID NO: 123873 - DNA, 8 bp, Unknown
  misc_feature (1)..( 8): Result.003 file - promoters60/1976158
agaaaaaa

SEQ ID NO: 123874 - DNA, 8 bp, Unknown
  misc_feature (1)..( 8): Result.003 file - promoters60/1976158
agaaaaaa

SEQ ID NO: 123875 - DNA, 11 bp, Unknown
  misc_feature (1)..( 11): Result.003 file - promoters60/1976158
caattttctat

SEQ ID NO: 123876 - DNA, 11 bp, Unknown
  misc_feature (1)..( 11): Result.003 file - promoters60/1976158
caattttgtat

SEQ ID NO: 123877 - DNA, 6 bp, Unknown
  misc_feature (1)..( 6): Result.003 file - promoters60/1976158
gaaaca

SEQ ID NO: 123878 - DNA, 6 bp, Unknown
  misc_feature (1)..( 6): Result.003 file - promoters60/1976158
gaaaca

SEQ ID NO: 123879 - DNA, 6 bp, Unknown
  misc_feature (1)..( 6): Result.003 file - promoters60/1976158
aataaa

SEQ ID NO: 123880 - DNA, 6 bp, Unknown
  misc_feature (1)..( 6): Result.003 file - promoters60/1976158
aataaa

SEQ ID NO: 123881 - DNA, 8 bp, Unknown
  misc_feature (1)..( 8): Result.003 file - promoters60/1976158
aaagaaaa

SEQ ID NO: 123882 - DNA, 8 bp, Unknown
  misc_feature (1)..( 8): Result.003 file - promoters60/1976158
aaagaaaa

SEQ ID NO: 123883 - DNA, 7 bp, Unknown
  misc_feature (1)..( 7): Result.003 file - promoters60/1976158
aaaatca

SEQ ID NO: 123884 - DNA, 7 bp, Unknown
  misc_feature (1)..( 7): Result.003 file - promoters60/1976158
aaattca

SEQ ID NO: 123885 - DNA, 6 bp, Unknown
  misc_feature (1)..( 6): Result.003 file - promoters60/1976158
taaata

SEQ ID NO: 123886 - DNA, 6 bp, Unknown
  misc_feature (1)..( 6): Result.003 file - promoters60/1976158
taaata

SEQ ID NO: 123887 - DNA, 10 bp, Unknown
  misc_feature (1)..( 10): Result.003 file - promoters60/1976170
agagatcctt

SEQ ID NO: 123888 - DNA, 10 bp, Unknown
  misc_feature (1)..( 10): Result.003 file - promoters60/1976170
agagatactt

SEQ ID NO: 123889 - DNA, 6 bp, Unknown
  misc_feature (1)..( 6): Result.003 file - promoters60/1976170
tttaac

SEQ ID NO: 123890 - DNA, 6 bp, Unknown
  misc_feature (1)..( 6): Result.003 file - promoters60/1976170
tttaac

SEQ ID NO: 123891 - DNA, 6 bp, Unknown
  misc_feature (1)..( 6): Result.003 file - promoters60/1976170
aatata

SEQ ID NO: 123892 - DNA, 6 bp, Unknown
  misc_feature (1)..( 6): Result.003 file - promoters60/1976170
aatata

SEQ ID NO: 123893 - DNA, 6 bp, Unknown
  misc_feature (1)..( 6): Result.003 file - promoters60/1976170
ggaaaa

SEQ ID NO: 123894 - DNA, 6 bp, Unknown
  misc_feature (1)..( 6): Result.003 file - promoters60/1976170
ggaaaa

SEQ ID NO: 123895 - DNA, 7 bp, Unknown
  misc_feature (1)..( 7): Result.003 file - promoters60/1976170
gacaagg

SEQ ID NO: 123896 - DNA, 7 bp, Unknown
  misc_feature (1)..( 7): Result.003 file - promoters60/1976170
gaccagg

SEQ ID NO: 123897 - DNA, 8 bp, Unknown
  misc_feature (1)..( 8): Result.003 file - promoters60/1976170
tttttctt

SEQ ID NO: 123898 - DNA, 8 bp, Unknown
  misc_feature (1)..( 8): Result.003 file - promoters60/1976170
ttttactt

SEQ ID NO: 123899 - DNA, 9 bp, Unknown
  misc_feature (1)..( 9): Result.003 file - promoters60/1976170
aatatgtaa

SEQ ID NO: 123900 - DNA, 9 bp, Unknown
  misc_feature (1)..( 9): Result.003 file - promoters60/1976170
aatatgtaa

SEQ ID NO: 123901 - DNA, 9 bp, Unknown
  misc_feature (1)..( 9): Result.003 file - promoters60/1976170
aaacaaaaa

SEQ ID NO: 123902 - DNA, 9 bp, Unknown
  misc_feature (1)..( 9): Result.003 file - promoters60/1976170
aaacataaa

SEQ ID NO: 123903 - DNA, 12 bp, Unknown
  misc_feature (1)..( 12): Result.003 file - promoters60/1976174
gggcttaatacc

SEQ ID NO: 123904 - DNA, 12 bp, Unknown
  misc_feature (1)..( 12): Result.003 file - promoters60/1976174
tgatttaataaa

SEQ ID NO: 123905 - DNA, 12 bp, Unknown
  misc_feature (1)..( 12): Result.003 file - promoters60/1976174
atgattaaattg

SEQ ID NO: 123906 - DNA, 12 bp, Unknown
  misc_feature (1)..( 12): Result.003 file - promoters60/1976174
atgatgaaatat

SEQ ID NO: 123907 - DNA, 12 bp, Unknown
  misc_feature (1)..( 12): Result.003 file - promoters60/1976174
caacataaattg

SEQ ID NO: 123908 - DNA, 12 bp, Unknown
  misc_feature (1)..( 12): Result.003 file - promoters60/1976174
aagattaaacaa

SEQ ID NO: 123909 - DNA, 12 bp, Unknown
  misc_feature (1)..( 12): Result.003 file - promoters60/1976174
taaaataaatac

SEQ ID NO: 123910 - DNA, 10 bp, Unknown
  misc_feature (1)..( 10): Result.003 file - promoters60/1976226
gaaaatatat

SEQ ID NO: 123911 - DNA, 10 bp, Unknown
  misc_feature (1)..( 10): Result.003 file - promoters60/1976226
aaaagtatta

SEQ ID NO: 123912 - DNA, 10 bp, Unknown
  misc_feature (1)..( 10): Result.003 file - promoters60/1976226
aaaattatat

SEQ ID NO: 123913 - DNA, 10 bp, Unknown
  misc_feature (1)..( 10): Result.003 file - promoters60/1976226
gaagataaga

SEQ ID NO: 123914 - DNA, 14 bp, Unknown
  misc_feature (1)..( 14): Result.003 file - promoters60/1976333
gaaaggtttttgtt

SEQ ID NO: 123915 - DNA, 14 bp, Unknown
  misc_feature (1)..( 14): Result.003 file - promoters60/1976333
aatcggtgtttcac

SEQ ID NO: 123916 - DNA, 14 bp, Unknown
  misc_feature (1)..( 14): Result.003 file - promoters60/1976333
taaaagtttgatat

SEQ ID NO: 123917 - DNA, 14 bp, Unknown
  misc_feature (1)..( 14): Result.003 file - promoters60/1976333
ataaaatttcacaa

SEQ ID NO: 123918 - DNA, 14 bp, Unknown
  misc_feature (1)..( 14): Result.003 file - promoters60/1976333
taaaagtttgttat

SEQ ID NO: 123919 - DNA, 20 bp, Unknown
  misc_feature (1)..( 20): Result.003 file - promoters60/1976333
gtgatcaagattcaatattt

SEQ ID NO: 123920 - DNA, 20 bp, Unknown
  misc_feature (1)..( 20): Result.003 file - promoters60/1976333
atgatcacaagaactaaact

SEQ ID NO: 123921 - DNA, 20 bp, Unknown
  misc_feature (1)..( 20): Result.003 file - promoters60/1976333
tcgataaagagtcaaaattt

SEQ ID NO: 123922 - DNA, 20 bp, Unknown
  misc_feature (1)..( 20): Result.003 file - promoters60/1976333
aaaaaaaattctagtcttga

SEQ ID NO: 123923 - DNA, 20 bp, Unknown
  misc_feature (1)..( 20): Result.003 file - promoters60/1976333
aaatgaaatttccggagcag

SEQ ID NO: 123924 - DNA, 20 bp, Unknown
  misc_feature (1)..( 20): Result.003 file - promoters60/1976333
agactcaattaaaataaagg

SEQ ID NO: 123925 - DNA, 18 bp, Unknown
  misc_feature (1)..( 18): Result.003 file - promoters60/1976333
gatcaagattcaatattt

SEQ ID NO: 123926 - DNA, 18 bp, Unknown
  misc_feature (1)..( 18): Result.003 file - promoters60/1976333
acgttagactcaattaaa

SEQ ID NO: 123927 - DNA, 18 bp, Unknown
  misc_feature (1)..( 18): Result.003 file - promoters60/1976333
gataaagagtcaaaattt

SEQ ID NO: 123928 - DNA, 18 bp, Unknown
  misc_feature (1)..( 18): Result.003 file - promoters60/1976333
atttaagattatataaat

SEQ ID NO: 123929 - DNA, 18 bp, Unknown
  misc_feature (1)..( 18): Result.003 file - promoters60/1976333
aaaaaaaattctagtctt

SEQ ID NO: 123930 - DNA, 8 bp, Unknown
  misc_feature (1)..( 8): Result.003 file - promoters60/1976333
taaactct

SEQ ID NO: 123931 - DNA, 8 bp, Unknown
  misc_feature (1)..( 8): Result.003 file - promoters60/1976333
aaaattct

SEQ ID NO: 123932 - DNA, 8 bp, Unknown
  misc_feature (1)..( 8): Result.003 file - promoters60/1976333
aaaatttc

SEQ ID NO: 123933 - DNA, 8 bp, Unknown
  misc_feature (1)..( 8): Result.003 file - promoters60/1976333
gaaatttc

SEQ ID NO: 123934 - DNA, 8 bp, Unknown
  misc_feature (1)..( 8): Result.003 file - promoters60/1976333
caaattta

SEQ ID NO: 123935 - DNA, 9 bp, Unknown
  misc_feature (1)..( 9): Result.003 file - promoters60/1976336
ctacgaaaa

SEQ ID NO: 123936 - DNA, 9 bp, Unknown
  misc_feature (1)..( 9): Result.003 file - promoters60/1976336
aaacgaaat

SEQ ID NO: 123937 - DNA, 9 bp, Unknown
  misc_feature (1)..( 9): Result.003 file - promoters60/1976336
ctactaaat

SEQ ID NO: 123938 - DNA, 9 bp, Unknown
  misc_feature (1)..( 9): Result.003 file - promoters60/1976336
atactaaaa

SEQ ID NO: 123939 - DNA, 9 bp, Unknown
  misc_feature (1)..( 9): Result.003 file - promoters60/1976336
tcacgaaat

SEQ ID NO: 123940 - DNA, 9 bp, Unknown
  misc_feature (1)..( 9): Result.003 file - promoters60/1976336
agactaaaa

SEQ ID NO: 123941 - DNA, 10 bp, Unknown
  misc_feature (1)..( 10): Result.003 file - promoters60/1976336
agacttaaaa

SEQ ID NO: 123942 - DNA, 10 bp, Unknown
  misc_feature (1)..( 10): Result.003 file - promoters60/1976336
cacatagtga

SEQ ID NO: 123943 - DNA, 10 bp, Unknown
  misc_feature (1)..( 10): Result.003 file - promoters60/1976336
gacagagtta

SEQ ID NO: 123944 - DNA, 10 bp, Unknown
  misc_feature (1)..( 10): Result.003 file - promoters60/1976336
cacaaagtat

SEQ ID NO: 123945 - DNA, 10 bp, Unknown
  misc_feature (1)..( 10): Result.003 file - promoters60/1976336
aacaaaaact

SEQ ID NO: 123946 - DNA, 10 bp, Unknown
  misc_feature (1)..( 10): Result.003 file - promoters60/1976336
aacaaattgt

SEQ ID NO: 123947 - DNA, 10 bp, Unknown
  misc_feature (1)..( 10): Result.003 file - promoters60/1976336
cacaaagact

SEQ ID NO: 123948 - DNA, 10 bp, Unknown
  misc_feature (1)..( 10): Result.003 file - promoters60/1976336
tccacaaaac

SEQ ID NO: 123949 - DNA, 10 bp, Unknown
  misc_feature (1)..( 10): Result.003 file - promoters60/1976336
tacacaaagt

SEQ ID NO: 123950 - DNA, 10 bp, Unknown
  misc_feature (1)..( 10): Result.003 file - promoters60/1976336
tccataaagc

SEQ ID NO: 123951 - DNA, 10 bp, Unknown
  misc_feature (1)..( 10): Result.003 file - promoters60/1976336
ctcacaaaga

SEQ ID NO: 123952 - DNA, 10 bp, Unknown
  misc_feature (1)..( 10): Result.003 file - promoters60/1976336
gagacagagt

SEQ ID NO: 123953 - DNA, 10 bp, Unknown
  misc_feature (1)..( 10): Result.003 file - promoters60/1976336
taaacaaaaa

SEQ ID NO: 123954 - DNA, 13 bp, Unknown
  misc_feature (1)..( 13): Result.003 file - promoters60/1976354
atagtaaaaaaaa

SEQ ID NO: 123955 - DNA, 13 bp, Unknown
  misc_feature (1)..( 13): Result.003 file - promoters60/1976354
actctaaaaaaaa

SEQ ID NO: 123956 - DNA, 13 bp, Unknown
  misc_feature (1)..( 13): Result.003 file - promoters60/1976354
atagtgaaaattg

SEQ ID NO: 123957 - DNA, 13 bp, Unknown
  misc_feature (1)..( 13): Result.003 file - promoters60/1976354
caattaaataaat

SEQ ID NO: 123958 - DNA, 13 bp, Unknown
  misc_feature (1)..( 13): Result.003 file - promoters60/1976354
agaagaaaaaaat

SEQ ID NO: 123959 - DNA, 13 bp, Unknown
  misc_feature (1)..( 13): Result.003 file - promoters60/1976354
taacagaataaaa

SEQ ID NO: 123960 - DNA, 10 bp, Unknown
  misc_feature (1)..( 10): Result.003 file - promoters60/1976354
gtcacaaaat

SEQ ID NO: 123961 - DNA, 10 bp, Unknown
  misc_feature (1)..( 10): Result.003 file - promoters60/1976354
ttcaaaaaaa

SEQ ID NO: 123962 - DNA, 10 bp, Unknown
  misc_feature (1)..( 10): Result.003 file - promoters60/1976354
ttcataaaat

SEQ ID NO: 123963 - DNA, 10 bp, Unknown
  misc_feature (1)..( 10): Result.003 file - promoters60/1976354
gtcacaagac

SEQ ID NO: 123964 - DNA, 10 bp, Unknown
  misc_feature (1)..( 10): Result.003 file - promoters60/1976354
atgaaaaaat

SEQ ID NO: 123965 - DNA, 10 bp, Unknown
  misc_feature (1)..( 10): Result.003 file - promoters60/1976354
cacataaata

SEQ ID NO: 123966 - DNA, 11 bp, Unknown
  misc_feature (1)..( 11): Result.003 file - promoters60/1976354
tcacaaaattt

SEQ ID NO: 123967 - DNA, 11 bp, Unknown
  misc_feature (1)..( 11): Result.003 file - promoters60/1976354
caaaaaaattg

SEQ ID NO: 123968 - DNA, 11 bp, Unknown
  misc_feature (1)..( 11): Result.003 file - promoters60/1976354
tcataaaatac

SEQ ID NO: 123969 - DNA, 11 bp, Unknown
  misc_feature (1)..( 11): Result.003 file - promoters60/1976354
cttcaaaatta

SEQ ID NO: 123970 - DNA, 11 bp, Unknown
  misc_feature (1)..( 11): Result.003 file - promoters60/1976354
tgaaaaaatag

SEQ ID NO: 123971 - DNA, 11 bp, Unknown
  misc_feature (1)..( 11): Result.003 file - promoters60/1976354
acataaataca

SEQ ID NO: 123972 - DNA, 11 bp, Unknown
  misc_feature (1)..( 11): Result.003 file - promoters60/1976354
aaccaaaatcc

SEQ ID NO: 123973 - DNA, 9 bp, Unknown
  misc_feature (1)..( 9): Result.003 file - promoters60/1976354
ataaaaata

SEQ ID NO: 123974 - DNA, 9 bp, Unknown
  misc_feature (1)..( 9): Result.003 file - promoters60/1976354
ttaataata

SEQ ID NO: 123975 - DNA, 9 bp, Unknown
  misc_feature (1)..( 9): Result.003 file - promoters60/1976354
ctaaaaatc

SEQ ID NO: 123976 - DNA, 9 bp, Unknown
  misc_feature (1)..( 9): Result.003 file - promoters60/1976354
ctaaaagaa

SEQ ID NO: 123977 - DNA, 9 bp, Unknown
  misc_feature (1)..( 9): Result.003 file - promoters60/1976354
aaaattata

SEQ ID NO: 123978 - DNA, 10 bp, Unknown
  misc_feature (1)..( 10): Result.003 file - promoters60/1976354
caaacttatc

SEQ ID NO: 123979 - DNA, 14 bp, Unknown
  misc_feature (1)..( 14): Result.003 file - promoters60/1976354
aagttatagtaaaa

SEQ ID NO: 123980 - DNA, 14 bp, Unknown
  misc_feature (1)..( 14): Result.003 file - promoters60/1976354
aagttttagcaaat

SEQ ID NO: 123981 - DNA, 14 bp, Unknown
  misc_feature (1)..( 14): Result.003 file - promoters60/1976354
gattttttgcatca

SEQ ID NO: 123982 - DNA, 14 bp, Unknown
  misc_feature (1)..( 14): Result.003 file - promoters60/1976354
tcttcgaagcaaat

SEQ ID NO: 123983 - DNA, 14 bp, Unknown
  misc_feature (1)..( 14): Result.003 file - promoters60/1976354
tttgattagtaaaa

SEQ ID NO: 123984 - DNA, 14 bp, Unknown
  misc_feature (1)..( 14): Result.003 file - promoters60/1976354
tgagattactaaca

SEQ ID NO: 123985 - DNA, 9 bp, Unknown
  misc_feature (1)..( 9): Result.003 file - promoters60/1976354
aaaaaaatc

SEQ ID NO: 123986 - DNA, 9 bp, Unknown
  misc_feature (1)..( 9): Result.003 file - promoters60/1976354
tacaaaatc

SEQ ID NO: 123987 - DNA, 9 bp, Unknown
  misc_feature (1)..( 9): Result.003 file - promoters60/1976354
aaaaaaatt

SEQ ID NO: 123988 - DNA, 9 bp, Unknown
  misc_feature (1)..( 9): Result.003 file - promoters60/1976354
gataaaatt

SEQ ID NO: 123989 - DNA, 9 bp, Unknown
  misc_feature (1)..( 9): Result.003 file - promoters60/1976354
gtgaaaatt

SEQ ID NO: 123990 - DNA, 9 bp, Unknown
  misc_feature (1)..( 9): Result.003 file - promoters60/1976354
cacagaatc

SEQ ID NO: 123991 - DNA, 9 bp, Unknown
  misc_feature (1)..( 9): Result.003 file - promoters60/1976354
aacagaata

SEQ ID NO: 123992 - DNA, 13 bp, Unknown
  misc_feature (1)..( 13): Result.003 file - promoters60/1976354
tttggttcctttc

SEQ ID NO: 123993 - DNA, 13 bp, Unknown
  misc_feature (1)..( 13): Result.003 file - promoters60/1976354
gttggttagttta

SEQ ID NO: 123994 - DNA, 13 bp, Unknown
  misc_feature (1)..( 13): Result.003 file - promoters60/1976354
tttgattagtaaa

SEQ ID NO: 123995 - DNA, 13 bp, Unknown
  misc_feature (1)..( 13): Result.003 file - promoters60/1976354
aagttttagcaaa

SEQ ID NO: 123996 - DNA, 13 bp, Unknown
  misc_feature (1)..( 13): Result.003 file - promoters60/1976354
tgagattactaac

SEQ ID NO: 123997 - DNA, 13 bp, Unknown
  misc_feature (1)..( 13): Result.003 file - promoters60/1976354
tttaattctcagc

SEQ ID NO: 123998 - DNA, 14 bp, Unknown
  misc_feature (1)..( 14): Result.003 file - promoters60/1976381
cctcaaaaaagctg

SEQ ID NO: 123999 - DNA, 14 bp, Unknown
  misc_feature (1)..( 14): Result.003 file - promoters60/1976381
tttttaaaaaggga

SEQ ID NO: 124000 - DNA, 14 bp, Unknown
  misc_feature (1)..( 14): Result.003 file - promoters60/1976381
ctcatgaaaagctt

SEQ ID NO: 124001 - DNA, 14 bp, Unknown
  misc_feature (1)..( 14): Result.003 file - promoters60/1976381
atacaaaaaaggcg

SEQ ID NO: 124002 - DNA, 14 bp, Unknown
  misc_feature (1)..( 14): Result.003 file - promoters60/1976381
ttttagaaattaca

SEQ ID NO: 124003 - DNA, 14 bp, Unknown
  misc_feature (1)..( 14): Result.003 file - promoters60/1976381
attgataaaagctt

SEQ ID NO: 124004 - DNA, 11 bp, Unknown
  misc_feature (1)..( 11): Result.003 file - promoters60/1976381
cacataaacat

SEQ ID NO: 124005 - DNA, 11 bp, Unknown
  misc_feature (1)..( 11): Result.003 file - promoters60/1976381
ttcataaatca

SEQ ID NO: 124006 - DNA, 11 bp, Unknown
  misc_feature (1)..( 11): Result.003 file - promoters60/1976381
tgcattaacaa

SEQ ID NO: 124007 - DNA, 11 bp, Unknown
  misc_feature (1)..( 11): Result.003 file - promoters60/1976381
ttcttaaaaga

SEQ ID NO: 124008 - DNA, 11 bp, Unknown
  misc_feature (1)..( 11): Result.003 file - promoters60/1976381
agcttaaagtt

SEQ ID NO: 124009 - DNA, 11 bp, Unknown
  misc_feature (1)..( 11): Result.003 file - promoters60/1976381
ttaattgacaa

SEQ ID NO: 124010 - DNA, 11 bp, Unknown
  misc_feature (1)..( 11): Result.003 file - promoters60/1976381
agcagtaacgg

SEQ ID NO: 124011 - DNA, 7 bp, Unknown
  misc_feature (1)..( 7): Result.003 file - promoters60/1976419
attggtt

SEQ ID NO: 124012 - DNA, 7 bp, Unknown
  misc_feature (1)..( 7): Result.003 file - promoters60/1976419
attagtt

SEQ ID NO: 124013 - DNA, 8 bp, Unknown
  misc_feature (1)..( 8): Result.003 file - promoters60/1976419
tataaaaa

SEQ ID NO: 124014 - DNA, 8 bp, Unknown
  misc_feature (1)..( 8): Result.003 file - promoters60/1976419
tatagaaa

SEQ ID NO: 124015 - DNA, 7 bp, Unknown
  misc_feature (1)..( 7): Result.003 file - promoters60/1976419
agacatt

SEQ ID NO: 124016 - DNA, 7 bp, Unknown
  misc_feature (1)..( 7): Result.003 file - promoters60/1976419
agatatt

SEQ ID NO: 124017 - DNA, 6 bp, Unknown
  misc_feature (1)..( 6): Result.003 file - promoters60/1976419
actttt

SEQ ID NO: 124018 - DNA, 6 bp, Unknown
  misc_feature (1)..( 6): Result.003 file - promoters60/1976419
actttt

SEQ ID NO: 124019 - DNA, 7 bp, Unknown
  misc_feature (1)..( 7): Result.003 file - promoters60/1976419
acacgat

SEQ ID NO: 124020 - DNA, 7 bp, Unknown
  misc_feature (1)..( 7): Result.003 file - promoters60/1976419
acaggat

SEQ ID NO: 124021 - DNA, 6 bp, Unknown
  misc_feature (1)..( 6): Result.003 file - promoters60/1976419
cgaaaa

SEQ ID NO: 124022 - DNA, 6 bp, Unknown
  misc_feature (1)..( 6): Result.003 file - promoters60/1976419
cgaaaa

SEQ ID NO: 124023 - DNA, 9 bp, Unknown
  misc_feature (1)..( 9): Result.003 file - promoters60/1976419
ccaaaagta

SEQ ID NO: 124024 - DNA, 9 bp, Unknown
  misc_feature (1)..( 9): Result.003 file - promoters60/1976419
ccaacagta

SEQ ID NO: 124025 - DNA, 8 bp, Unknown
  misc_feature (1)..( 8): Result.003 file - promoters60/1976419
tcctacct

SEQ ID NO: 124026 - DNA, 8 bp, Unknown
  misc_feature (1)..( 8): Result.003 file - promoters60/1976419
tcctgcct

SEQ ID NO: 124027 - DNA, 8 bp, Unknown
  misc_feature (1)..( 8): Result.003 file - promoters60/1976419
atatttta

SEQ ID NO: 124028 - DNA, 8 bp, Unknown
  misc_feature (1)..( 8): Result.003 file - promoters60/1976419
atatatta

SEQ ID NO: 124029 - DNA, 6 bp, Unknown
  misc_feature (1)..( 6): Result.003 file - promoters60/1976419
tttata

SEQ ID NO: 124030 - DNA, 6 bp, Unknown
  misc_feature (1)..( 6): Result.003 file - promoters60/1976419
tttata

SEQ ID NO: 124031 - DNA, 7 bp, Unknown
  misc_feature (1)..( 7): Result.003 file - promoters60/1976419
aatgcac

SEQ ID NO: 124032 - DNA, 7 bp, Unknown
  misc_feature (1)..( 7): Result.003 file - promoters60/1976419
aatacac

SEQ ID NO: 124033 - DNA, 7 bp, Unknown
  misc_feature (1)..( 7): Result.003 file - promoters60/1976419
tacgtaa

SEQ ID NO: 124034 - DNA, 7 bp, Unknown
  misc_feature (1)..( 7): Result.003 file - promoters60/1976419
tacctaa

SEQ ID NO: 124035 - DNA, 8 bp, Unknown
  misc_feature (1)..( 8): Result.003 file - promoters60/1976419
tgatgtaa

SEQ ID NO: 124036 - DNA, 8 bp, Unknown
  misc_feature (1)..( 8): Result.003 file - promoters60/1976419
tgaagtaa

SEQ ID NO: 124037 - DNA, 8 bp, Unknown
  misc_feature (1)..( 8): Result.003 file - promoters60/1976419
ggttgatt

SEQ ID NO: 124038 - DNA, 8 bp, Unknown
  misc_feature (1)..( 8): Result.003 file - promoters60/1976419
ggttcatt

SEQ ID NO: 124039 - DNA, 6 bp, Unknown
  misc_feature (1)..( 6): Result.003 file - promoters60/1976419
agaata

SEQ ID NO: 124040 - DNA, 6 bp, Unknown
  misc_feature (1)..( 6): Result.003 file - promoters60/1976419
agaata

SEQ ID NO: 124041 - DNA, 6 bp, Unknown
  misc_feature (1)..( 6): Result.003 file - promoters60/1976419
gctatg

SEQ ID NO: 124042 - DNA, 6 bp, Unknown
  misc_feature (1)..( 6): Result.003 file - promoters60/1976419
gctatg

SEQ ID NO: 124043 - DNA, 6 bp, Unknown
  misc_feature (1)..( 6): Result.003 file - promoters60/1976419
tgatcc

SEQ ID NO: 124044 - DNA, 6 bp, Unknown
  misc_feature (1)..( 6): Result.003 file - promoters60/1976419
tgatcc

SEQ ID NO: 124045 - DNA, 10 bp, Unknown
  misc_feature (1)..( 10): Result.003 file - promoters60/1976457
aggataaacc

SEQ ID NO: 124046 - DNA, 10 bp, Unknown
  misc_feature (1)..( 10): Result.003 file - promoters60/1976457
ataataaact

SEQ ID NO: 124047 - DNA, 10 bp, Unknown
  misc_feature (1)..( 10): Result.003 file - promoters60/1976457
atactaaaag

SEQ ID NO: 124048 - DNA, 10 bp, Unknown
  misc_feature (1)..( 10): Result.003 file - promoters60/1976457
taaataaaat

SEQ ID NO: 124049 - DNA, 10 bp, Unknown
  misc_feature (1)..( 10): Result.003 file - promoters60/1976457
tcaaaaaaaa

SEQ ID NO: 124050 - DNA, 10 bp, Unknown
  misc_feature (1)..( 10): Result.003 file - promoters60/1976457
aaacaaaaca

SEQ ID NO: 124051 - DNA, 11 bp, Unknown
  misc_feature (1)..( 11): Result.003 file - promoters60/1976457
taaacttttca

SEQ ID NO: 124052 - DNA, 11 bp, Unknown
  misc_feature (1)..( 11): Result.003 file - promoters60/1976457
aaaagtttttg

SEQ ID NO: 124053 - DNA, 11 bp, Unknown
  misc_feature (1)..( 11): Result.003 file - promoters60/1976457
caaagttgtag

SEQ ID NO: 124054 - DNA, 11 bp, Unknown
  misc_feature (1)..( 11): Result.003 file - promoters60/1976457
caaaattgaag

SEQ ID NO: 124055 - DNA, 11 bp, Unknown
  misc_feature (1)..( 11): Result.003 file - promoters60/1976457
tttagttttgt

SEQ ID NO: 124056 - DNA, 11 bp, Unknown
  misc_feature (1)..( 11): Result.003 file - promoters60/1976457
gaaaatagttt

SEQ ID NO: 124057 - DNA, 12 bp, Unknown
  misc_feature (1)..( 12): Result.003 file - promoters60/1976457
taataaaatatt

SEQ ID NO: 124058 - DNA, 12 bp, Unknown
  misc_feature (1)..( 12): Result.003 file - promoters60/1976457
caaaaaaatatt

SEQ ID NO: 124059 - DNA, 12 bp, Unknown
  misc_feature (1)..( 12): Result.003 file - promoters60/1976457
taaaaaaatata

SEQ ID NO: 124060 - DNA, 12 bp, Unknown
  misc_feature (1)..( 12): Result.003 file - promoters60/1976457
tgatgaaatatt

SEQ ID NO: 124061 - DNA, 12 bp, Unknown
  misc_feature (1)..( 12): Result.003 file - promoters60/1976457
aataaaaatatt

SEQ ID NO: 124062 - DNA, 12 bp, Unknown
  misc_feature (1)..( 12): Result.003 file - promoters60/1976457
aaaaaaaaaagg

SEQ ID NO: 124063 - DNA, 13 bp, Unknown
  misc_feature (1)..( 13): Result.003 file - promoters60/1976457
ggttttgagaaaa

SEQ ID NO: 124064 - DNA, 13 bp, Unknown
  misc_feature (1)..( 13): Result.003 file - promoters60/1976457
cagtttgagaata

SEQ ID NO: 124065 - DNA, 13 bp, Unknown
  misc_feature (1)..( 13): Result.003 file - promoters60/1976457
ctttttgatatga

SEQ ID NO: 124066 - DNA, 13 bp, Unknown
  misc_feature (1)..( 13): Result.003 file - promoters60/1976457
tcatatgaaaaaa

SEQ ID NO: 124067 - DNA, 13 bp, Unknown
  misc_feature (1)..( 13): Result.003 file - promoters60/1976457
taattttatatat

SEQ ID NO: 124068 - DNA, 13 bp, Unknown
  misc_feature (1)..( 13): Result.003 file - promoters60/1976457
taattctataaca

SEQ ID NO: 124069 - DNA, 9 bp, Unknown
  misc_feature (1)..( 9): Result.003 file - promoters60/1976457
ataataaac

SEQ ID NO: 124070 - DNA, 9 bp, Unknown
  misc_feature (1)..( 9): Result.003 file - promoters60/1976457
gtaataata

SEQ ID NO: 124071 - DNA, 9 bp, Unknown
  misc_feature (1)..( 9): Result.003 file - promoters60/1976457
atactaaaa

SEQ ID NO: 124072 - DNA, 9 bp, Unknown
  misc_feature (1)..( 9): Result.003 file - promoters60/1976457
taaataaaa

SEQ ID NO: 124073 - DNA, 9 bp, Unknown
  misc_feature (1)..( 9): Result.003 file - promoters60/1976457
ataataatg

SEQ ID NO: 124074 - DNA, 9 bp, Unknown
  misc_feature (1)..( 9): Result.003 file - promoters60/1976457
aaaacaaaa

SEQ ID NO: 124075 - DNA, 9 bp, Unknown
  misc_feature (1)..( 9): Result.003 file - promoters60/1976457
aaatcgtta

SEQ ID NO: 124076 - DNA, 9 bp, Unknown
  misc_feature (1)..( 9): Result.003 file - promoters60/1976457
gaatcatta

SEQ ID NO: 124077 - DNA, 9 bp, Unknown
  misc_feature (1)..( 9): Result.003 file - promoters60/1976457
aaaccgtat

SEQ ID NO: 124078 - DNA, 9 bp, Unknown
  misc_feature (1)..( 9): Result.003 file - promoters60/1976457
ccatcctta

SEQ ID NO: 124079 - DNA, 9 bp, Unknown
  misc_feature (1)..( 9): Result.003 file - promoters60/1976457
caatcataa

SEQ ID NO: 124080 - DNA, 9 bp, Unknown
  misc_feature (1)..( 9): Result.003 file - promoters60/1976457
aaattattt

SEQ ID NO: 124081 - DNA, 9 bp, Unknown
  misc_feature (1)..( 9): Result.003 file - promoters60/1976504
aaagaacct

SEQ ID NO: 124082 - DNA, 9 bp, Unknown
  misc_feature (1)..( 9): Result.003 file - promoters60/1976504
ctagatcct

SEQ ID NO: 124083 - DNA, 9 bp, Unknown
  misc_feature (1)..( 9): Result.003 file - promoters60/1976504
aaataactg

SEQ ID NO: 124084 - DNA, 9 bp, Unknown
  misc_feature (1)..( 9): Result.003 file - promoters60/1976504
aaagaacga

SEQ ID NO: 124085 - DNA, 9 bp, Unknown
  misc_feature (1)..( 9): Result.003 file - promoters60/1976504
tcataactt

SEQ ID NO: 124086 - DNA, 9 bp, Unknown
  misc_feature (1)..( 9): Result.003 file - promoters60/1976504
aaataacaa

SEQ ID NO: 124087 - DNA, 9 bp, Unknown
  misc_feature (1)..( 9): Result.003 file - promoters60/1976504
aaataaaaa

SEQ ID NO: 124088 - DNA, 9 bp, Unknown
  misc_feature (1)..( 9): Result.003 file - promoters60/1976511
ccttctcta

SEQ ID NO: 124089 - DNA, 9 bp, Unknown
  misc_feature (1)..( 9): Result.003 file - promoters60/1976511
ttttctctt

SEQ ID NO: 124090 - DNA, 9 bp, Unknown
  misc_feature (1)..( 9): Result.003 file - promoters60/1976511
tcttctctt

SEQ ID NO: 124091 - DNA, 9 bp, Unknown
  misc_feature (1)..( 9): Result.003 file - promoters60/1976511
aattctcta

SEQ ID NO: 124092 - DNA, 10 bp, Unknown
  misc_feature (1)..( 10): Result.003 file - promoters60/1976511
tcttcttctg

SEQ ID NO: 124093 - DNA, 11 bp, Unknown
  misc_feature (1)..( 11): Result.003 file - promoters60/1976511
attttgatttg

SEQ ID NO: 124094 - DNA, 11 bp, Unknown
  misc_feature (1)..( 11): Result.003 file - promoters60/1976511
attttgattaa

SEQ ID NO: 124095 - DNA, 11 bp, Unknown
  misc_feature (1)..( 11): Result.003 file - promoters60/1976511
ttactgattaa

SEQ ID NO: 124096 - DNA, 11 bp, Unknown
  misc_feature (1)..( 11): Result.003 file - promoters60/1976511
gttttgactag

SEQ ID NO: 124097 - DNA, 11 bp, Unknown
  misc_feature (1)..( 11): Result.003 file - promoters60/1976511
cctttgaccag

SEQ ID NO: 124098 - DNA, 6 bp, Unknown
  misc_feature (1)..( 6): Result.003 file - promoters60/1976550
tagcct

SEQ ID NO: 124099 - DNA, 6 bp, Unknown
  misc_feature (1)..( 6): Result.003 file - promoters60/1976550
tagcct

SEQ ID NO: 124100 - DNA, 7 bp, Unknown
  misc_feature (1)..( 7): Result.003 file - promoters60/1976550
ttagttg

SEQ ID NO: 124101 - DNA, 7 bp, Unknown
  misc_feature (1)..( 7): Result.003 file - promoters60/1976550
ttatttg

SEQ ID NO: 124102 - DNA, 8 bp, Unknown
  misc_feature (1)..( 8): Result.003 file - promoters60/1976550
aaattaaa

SEQ ID NO: 124103 - DNA, 8 bp, Unknown
  misc_feature (1)..( 8): Result.003 file - promoters60/1976550
aaataaaa

SEQ ID NO: 124104 - DNA, 7 bp, Unknown
  misc_feature (1)..( 7): Result.003 file - promoters60/1976550
tgtaaaa

SEQ ID NO: 124105 - DNA, 7 bp, Unknown
  misc_feature (1)..( 7): Result.003 file - promoters60/1976550
tgtaaaa

SEQ ID NO: 124106 - DNA, 6 bp, Unknown
  misc_feature (1)..( 6): Result.003 file - promoters60/1976550
aaaatt

SEQ ID NO: 124107 - DNA, 6 bp, Unknown
  misc_feature (1)..( 6): Result.003 file - promoters60/1976550
aaaatt

SEQ ID NO: 124108 - DNA, 7 bp, Unknown
  misc_feature (1)..( 7): Result.003 file - promoters60/1976550
tcctaat

SEQ ID NO: 124109 - DNA, 7 bp, Unknown
  misc_feature (1)..( 7): Result.003 file - promoters60/1976550
tcccaat

SEQ ID NO: 124110 - DNA, 7 bp, Unknown
  misc_feature (1)..( 7): Result.003 file - promoters60/1976550
aaattca

SEQ ID NO: 124111 - DNA, 7 bp, Unknown
  misc_feature (1)..( 7): Result.003 file - promoters60/1976550
aaaatca

SEQ ID NO: 124112 - DNA, 8 bp, Unknown
  misc_feature (1)..( 8): Result.003 file - promoters60/1976550
ttgtttaa

SEQ ID NO: 124113 - DNA, 8 bp, Unknown
  misc_feature (1)..( 8): Result.003 file - promoters60/1976550
ttgcttaa

SEQ ID NO: 124114 - DNA, 9 bp, Unknown
  misc_feature (1)..( 9): Result.003 file - promoters60/1976550
ttaaatttt

SEQ ID NO: 124115 - DNA, 9 bp, Unknown
  misc_feature (1)..( 9): Result.003 file - promoters60/1976550
ttaaaattt

SEQ ID NO: 124116 - DNA, 6 bp, Unknown
  misc_feature (1)..( 6): Result.003 file - promoters60/1976550
aaagtc

SEQ ID NO: 124117 - DNA, 6 bp, Unknown
  misc_feature (1)..( 6): Result.003 file - promoters60/1976550
aaagtc

SEQ ID NO: 124118 - DNA, 7 bp, Unknown
  misc_feature (1)..( 7): Result.003 file - promoters60/1976550
gataaaa

SEQ ID NO: 124119 - DNA, 7 bp, Unknown
  misc_feature (1)..( 7): Result.003 file - promoters60/1976550
gatcaaa

SEQ ID NO: 124120 - DNA, 7 bp, Unknown
  misc_feature (1)..( 7): Result.003 file - promoters60/1976550
tttttgt

SEQ ID NO: 124121 - DNA, 7 bp, Unknown
  misc_feature (1)..( 7): Result.003 file - promoters60/1976550
tttttgt

SEQ ID NO: 124122 - DNA, 10 bp, Unknown
  misc_feature (1)..( 10): Result.003 file - promoters60/1976550
taatttgata

SEQ ID NO: 124123 - DNA, 10 bp, Unknown
  misc_feature (1)..( 10): Result.003 file - promoters60/1976550
taatctgatc

SEQ ID NO: 124124 - DNA, 10 bp, Unknown
  misc_feature (1)..( 10): Result.003 file - promoters60/1976550
caatcttatc

SEQ ID NO: 124125 - DNA, 7 bp, Unknown
  misc_feature (1)..( 7): Result.003 file - promoters60/1976550
gtttgca

SEQ ID NO: 124126 - DNA, 7 bp, Unknown
  misc_feature (1)..( 7): Result.003 file - promoters60/1976550
gtttgca

SEQ ID NO: 124127 - DNA, 9 bp, Unknown
  misc_feature (1)..( 9): Result.003 file - promoters60/1976550
taagcaaaa

SEQ ID NO: 124128 - DNA, 9 bp, Unknown
  misc_feature (1)..( 9): Result.003 file - promoters60/1976550
taagtaaaa

SEQ ID NO: 124129 - DNA, 6 bp, Unknown
  misc_feature (1)..( 6): Result.003 file - promoters60/1976550
ctaaaa

SEQ ID NO: 124130 - DNA, 6 bp, Unknown
  misc_feature (1)..( 6): Result.003 file - promoters60/1976550
ctaaaa

SEQ ID NO: 124131 - DNA, 9 bp, Unknown
  misc_feature (1)..( 9): Result.003 file - promoters60/1976550
attgattta

SEQ ID NO: 124132 - DNA, 9 bp, Unknown
  misc_feature (1)..( 9): Result.003 file - promoters60/1976550
atttattta

SEQ ID NO: 124133 - DNA, 7 bp, Unknown
  misc_feature (1)..( 7): Result.003 file - promoters60/1976550
tgataaa

SEQ ID NO: 124134 - DNA, 7 bp, Unknown
  misc_feature (1)..( 7): Result.003 file - promoters60/1976550
tgataaa

SEQ ID NO: 124135 - DNA, 7 bp, Unknown
  misc_feature (1)..( 7): Result.003 file - promoters60/1977519
taaaaat

SEQ ID NO: 124136 - DNA, 7 bp, Unknown
  misc_feature (1)..( 7): Result.003 file - promoters60/1977519
taataat

SEQ ID NO: 124137 - DNA, 8 bp, Unknown
  misc_feature (1)..( 8): Result.003 file - promoters60/1977519
tatttttg

SEQ ID NO: 124138 - DNA, 8 bp, Unknown
  misc_feature (1)..( 8): Result.003 file - promoters60/1977519
tattgttg

SEQ ID NO: 124139 - DNA, 10 bp, Unknown
  misc_feature (1)..( 10): Result.003 file - promoters60/1977519
ttgagtcaat

SEQ ID NO: 124140 - DNA, 10 bp, Unknown
  misc_feature (1)..( 10): Result.003 file - promoters60/1977519
ttgaatcaat

SEQ ID NO: 124141 - DNA, 10 bp, Unknown
  misc_feature (1)..( 10): Result.003 file - promoters60/1977519
ttgattcaaa

SEQ ID NO: 124142 - DNA, 9 bp, Unknown
  misc_feature (1)..( 9): Result.003 file - promoters60/1977519
gattttgtt

SEQ ID NO: 124143 - DNA, 9 bp, Unknown
  misc_feature (1)..( 9): Result.003 file - promoters60/1977519
gatttggtt

SEQ ID NO: 124144 - DNA, 9 bp, Unknown
  misc_feature (1)..( 9): Result.003 file - promoters60/1977519
gtcttggtt

SEQ ID NO: 124145 - DNA, 6 bp, Unknown
  misc_feature (1)..( 6): Result.003 file - promoters60/1977519
agagaa

SEQ ID NO: 124146 - DNA, 6 bp, Unknown
  misc_feature (1)..( 6): Result.003 file - promoters60/1977519
agagaa

SEQ ID NO: 124147 - DNA, 6 bp, Unknown
  misc_feature (1)..( 6): Result.003 file - promoters60/1977519
aattat

SEQ ID NO: 124148 - DNA, 6 bp, Unknown
  misc_feature (1)..( 6): Result.003 file - promoters60/1977519
aattat

SEQ ID NO: 124149 - DNA, 6 bp, Unknown
  misc_feature (1)..( 6): Result.003 file - promoters60/1977519
taaatt

SEQ ID NO: 124150 - DNA, 6 bp, Unknown
  misc_feature (1)..( 6): Result.003 file - promoters60/1977519
taaatt

SEQ ID NO: 124151 - DNA, 7 bp, Unknown
  misc_feature (1)..( 7): Result.003 file - promoters60/1977519
cctacaa

SEQ ID NO: 124152 - DNA, 7 bp, Unknown
  misc_feature (1)..( 7): Result.003 file - promoters60/1977519
cctacaa

SEQ ID NO: 124153 - DNA, 6 bp, Unknown
  misc_feature (1)..( 6): Result.003 file - promoters60/1977519
aaccta

SEQ ID NO: 124154 - DNA, 6 bp, Unknown
  misc_feature (1)..( 6): Result.003 file - promoters60/1977519
aaccta

SEQ ID NO: 124155 - DNA, 6 bp, Unknown
  misc_feature (1)..( 6): Result.003 file - promoters60/1977519
attttg

SEQ ID NO: 124156 - DNA, 6 bp, Unknown
  misc_feature (1)..( 6): Result.003 file - promoters60/1977519
attttg

SEQ ID NO: 124157 - DNA, 6 bp, Unknown
  misc_feature (1)..( 6): Result.003 file - promoters60/1977519
tgatat

SEQ ID NO: 124158 - DNA, 6 bp, Unknown
  misc_feature (1)..( 6): Result.003 file - promoters60/1977519
tgatat

SEQ ID NO: 124159 - DNA, 7 bp, Unknown
  misc_feature (1)..( 7): Result.003 file - promoters60/1977519
tggattt

SEQ ID NO: 124160 - DNA, 7 bp, Unknown
  misc_feature (1)..( 7): Result.003 file - promoters60/1977519
tggattt

SEQ ID NO: 124161 - DNA, 6 bp, Unknown
  misc_feature (1)..( 6): Result.003 file - promoters60/1977519
aagatt

SEQ ID NO: 124162 - DNA, 6 bp, Unknown
  misc_feature (1)..( 6): Result.003 file - promoters60/1977519
aagatt

SEQ ID NO: 124163 - DNA, 6 bp, Unknown
  misc_feature (1)..( 6): Result.003 file - promoters60/1977519
ttaacc

SEQ ID NO: 124164 - DNA, 6 bp, Unknown
  misc_feature (1)..( 6): Result.003 file - promoters60/1977519
ttaacc

SEQ ID NO: 124165 - DNA, 7 bp, Unknown
  misc_feature (1)..( 7): Result.003 file - promoters60/1977519
ctcactc

SEQ ID NO: 124166 - DNA, 7 bp, Unknown
  misc_feature (1)..( 7): Result.003 file - promoters60/1977519
ctcgctc

SEQ ID NO: 124167 - DNA, 6 bp, Unknown
  misc_feature (1)..( 6): Result.003 file - promoters60/1977519
atttct

SEQ ID NO: 124168 - DNA, 6 bp, Unknown
  misc_feature (1)..( 6): Result.003 file - promoters60/1977519
atttct

SEQ ID NO: 124169 - DNA, 10 bp, Unknown
  misc_feature (1)..( 10): Result.003 file - promoters60/1977533
aaaaatattc

SEQ ID NO: 124170 - DNA, 10 bp, Unknown
  misc_feature (1)..( 10): Result.003 file - promoters60/1977533
aaacatagac

SEQ ID NO: 124171 - DNA, 10 bp, Unknown
  misc_feature (1)..( 10): Result.003 file - promoters60/1977533
taaattattc

SEQ ID NO: 124172 - DNA, 10 bp, Unknown
  misc_feature (1)..( 10): Result.003 file - promoters60/1977533
aaaaacaaag

SEQ ID NO: 124173 - DNA, 10 bp, Unknown
  misc_feature (1)..( 10): Result.003 file - promoters60/1977533
gaaatcatca

SEQ ID NO: 124174 - DNA, 14 bp, Unknown
  misc_feature (1)..( 14): Result.003 file - promoters60/1977533
tttattctgatatt

SEQ ID NO: 124175 - DNA, 14 bp, Unknown
  misc_feature (1)..( 14): Result.003 file - promoters60/1977533
tgtattctctctca

SEQ ID NO: 124176 - DNA, 14 bp, Unknown
  misc_feature (1)..( 14): Result.003 file - promoters60/1977533
tggattttgaaatt

SEQ ID NO: 124177 - DNA, 14 bp, Unknown
  misc_feature (1)..( 14): Result.003 file - promoters60/1977533
ttttttctactgaa

SEQ ID NO: 124178 - DNA, 14 bp, Unknown
  misc_feature (1)..( 14): Result.003 file - promoters60/1977533
ttgattttgcctcg

SEQ ID NO: 124179 - DNA, 8 bp, Unknown
  misc_feature (1)..( 8): Result.003 file - promoters60/1977533
tgatttat

SEQ ID NO: 124180 - DNA, 8 bp, Unknown
  misc_feature (1)..( 8): Result.003 file - promoters60/1977533
tgattttg

SEQ ID NO: 124181 - DNA, 8 bp, Unknown
  misc_feature (1)..( 8): Result.003 file - promoters60/1977533
ggattttg

SEQ ID NO: 124182 - DNA, 8 bp, Unknown
  misc_feature (1)..( 8): Result.003 file - promoters60/1977533
gaattttg

SEQ ID NO: 124183 - DNA, 8 bp, Unknown
  misc_feature (1)..( 8): Result.003 file - promoters60/1977533
gaagtttg

SEQ ID NO: 124184 - DNA, 8 bp, Unknown
  misc_feature (1)..( 8): Result.003 file - promoters60/1977533
ttaacaga

SEQ ID NO: 124185 - DNA, 8 bp, Unknown
  misc_feature (1)..( 8): Result.003 file - promoters60/1977533
ttaacaac

SEQ ID NO: 124186 - DNA, 8 bp, Unknown
  misc_feature (1)..( 8): Result.003 file - promoters60/1977533
ttaacaac

SEQ ID NO: 124187 - DNA, 8 bp, Unknown
  misc_feature (1)..( 8): Result.003 file - promoters60/1977533
gtaataga

SEQ ID NO: 124188 - DNA, 8 bp, Unknown
  misc_feature (1)..( 8): Result.003 file - promoters60/1977533
gtaataaa

SEQ ID NO: 124189 - DNA, 10 bp, Unknown
  misc_feature (1)..( 10): Result.003 file - promoters60/1977537
tttcactctt

SEQ ID NO: 124190 - DNA, 10 bp, Unknown
  misc_feature (1)..( 10): Result.003 file - promoters60/1977537
tttctctctt

SEQ ID NO: 124191 - DNA, 10 bp, Unknown
  misc_feature (1)..( 10): Result.003 file - promoters60/1977537
cctctctcaa

SEQ ID NO: 124192 - DNA, 7 bp, Unknown
  misc_feature (1)..( 7): Result.003 file - promoters60/1977537
aaatatt

SEQ ID NO: 124193 - DNA, 7 bp, Unknown
  misc_feature (1)..( 7): Result.003 file - promoters60/1977537
aaatatt

SEQ ID NO: 124194 - DNA, 12 bp, Unknown
  misc_feature (1)..( 12): Result.003 file - promoters60/1977537
taaatattgggc

SEQ ID NO: 124195 - DNA, 12 bp, Unknown
  misc_feature (1)..( 12): Result.003 file - promoters60/1977537
taaacattcata

SEQ ID NO: 124196 - DNA, 12 bp, Unknown
  misc_feature (1)..( 12): Result.003 file - promoters60/1977537
agaatattcggc

SEQ ID NO: 124197 - DNA, 7 bp, Unknown
  misc_feature (1)..( 7): Result.003 file - promoters60/1977537
tttgcca

SEQ ID NO: 124198 - DNA, 7 bp, Unknown
  misc_feature (1)..( 7): Result.003 file - promoters60/1977537
tttccca

SEQ ID NO: 124199 - DNA, 7 bp, Unknown
  misc_feature (1)..( 7): Result.003 file - promoters60/1977537
gcaaatt

SEQ ID NO: 124200 - DNA, 7 bp, Unknown
  misc_feature (1)..( 7): Result.003 file - promoters60/1977537
gcatatt

SEQ ID NO: 124201 - DNA, 6 bp, Unknown
  misc_feature (1)..( 6): Result.003 file - promoters60/1977537
tttgat

SEQ ID NO: 124202 - DNA, 6 bp, Unknown
  misc_feature (1)..( 6): Result.003 file - promoters60/1977537
tttgat

SEQ ID NO: 124203 - DNA, 8 bp, Unknown
  misc_feature (1)..( 8): Result.003 file - promoters60/1977537
tttttatc

SEQ ID NO: 124204 - DNA, 8 bp, Unknown
  misc_feature (1)..( 8): Result.003 file - promoters60/1977537
ttttcatc

SEQ ID NO: 124205 - DNA, 8 bp, Unknown
  misc_feature (1)..( 8): Result.003 file - promoters60/1977537
tttccatt

SEQ ID NO: 124206 - DNA, 9 bp, Unknown
  misc_feature (1)..( 9): Result.003 file - promoters60/1977537
tattttttt

SEQ ID NO: 124207 - DNA, 9 bp, Unknown
  misc_feature (1)..( 9): Result.003 file - promoters60/1977537
gattttttt

SEQ ID NO: 124208 - DNA, 9 bp, Unknown
  misc_feature (1)..( 9): Result.003 file - promoters60/1977537
gattttgag

SEQ ID NO: 124209 - DNA, 6 bp, Unknown
  misc_feature (1)..( 6): Result.003 file - promoters60/1977537
tgttat

SEQ ID NO: 124210 - DNA, 6 bp, Unknown
  misc_feature (1)..( 6): Result.003 file - promoters60/1977537
tgttat

SEQ ID NO: 124211 - DNA, 8 bp, Unknown
  misc_feature (1)..( 8): Result.003 file - promoters60/1977537
tgtttgtt

SEQ ID NO: 124212 - DNA, 8 bp, Unknown
  misc_feature (1)..( 8): Result.003 file - promoters60/1977537
tgtatgtt

SEQ ID NO: 124213 - DNA, 6 bp, Unknown
  misc_feature (1)..( 6): Result.003 file - promoters60/1977537
ctctta

SEQ ID NO: 124214 - DNA, 6 bp, Unknown
  misc_feature (1)..( 6): Result.003 file - promoters60/1977537
ctctta

SEQ ID NO: 124215 - DNA, 6 bp, Unknown
  misc_feature (1)..( 6): Result.003 file - promoters60/1977537
atttaa

SEQ ID NO: 124216 - DNA, 6 bp, Unknown
  misc_feature (1)..( 6): Result.003 file - promoters60/1977537
atttaa

SEQ ID NO: 124217 - DNA, 6 bp, Unknown
  misc_feature (1)..( 6): Result.003 file - promoters60/1977537
aaattt

SEQ ID NO: 124218 - DNA, 6 bp, Unknown
  misc_feature (1)..( 6): Result.003 file - promoters60/1977537
aaattt

SEQ ID NO: 124219 - DNA, 7 bp, Unknown
  misc_feature (1)..( 7): Result.003 file - promoters60/1977537
attgggc

SEQ ID NO: 124220 - DNA, 7 bp, Unknown
  misc_feature (1)..( 7): Result.003 file - promoters60/1977537
atttggc

SEQ ID NO: 124221 - DNA, 6 bp, Unknown
  misc_feature (1)..( 6): Result.003 file - promoters60/1977537
gattga

SEQ ID NO: 124222 - DNA, 6 bp, Unknown
  misc_feature (1)..( 6): Result.003 file - promoters60/1977537
gattga

SEQ ID NO: 124223 - DNA, 7 bp, Unknown
  misc_feature (1)..( 7): Result.003 file - promoters60/1977537
taattta

SEQ ID NO: 124224 - DNA, 7 bp, Unknown
  misc_feature (1)..( 7): Result.003 file - promoters60/1977537
taactta

SEQ ID NO: 124225 - DNA, 7 bp, Unknown
  misc_feature (1)..( 7): Result.003 file - promoters60/1985373
aaatttc

SEQ ID NO: 124226 - DNA, 7 bp, Unknown
  misc_feature (1)..( 7): Result.003 file - promoters60/1985373
aaagttc

SEQ ID NO: 124227 - DNA, 8 bp, Unknown
  misc_feature (1)..( 8): Result.003 file - promoters60/1985373
cttttttt

SEQ ID NO: 124228 - DNA, 8 bp, Unknown
  misc_feature (1)..( 8): Result.003 file - promoters60/1985373
ctttttta

SEQ ID NO: 124229 - DNA, 8 bp, Unknown
  misc_feature (1)..( 8): Result.003 file - promoters60/1985373
attttttt

SEQ ID NO: 124230 - DNA, 11 bp, Unknown
  misc_feature (1)..( 11): Result.003 file - promoters60/1985373
ttaaaaacctt

SEQ ID NO: 124231 - DNA, 11 bp, Unknown
  misc_feature (1)..( 11): Result.003 file - promoters60/1985373
ttataaagtat

SEQ ID NO: 124232 - DNA, 11 bp, Unknown
  misc_feature (1)..( 11): Result.003 file - promoters60/1985373
taatacagtat

SEQ ID NO: 124233 - DNA, 14 bp, Unknown
  misc_feature (1)..( 14): Result.003 file - promoters60/1985373
atgtttaatttaca

SEQ ID NO: 124234 - DNA, 14 bp, Unknown
  misc_feature (1)..( 14): Result.003 file - promoters60/1985373
atatataatttaca

SEQ ID NO: 124235 - DNA, 14 bp, Unknown
  misc_feature (1)..( 14): Result.003 file - promoters60/1985373
tatgcttatttttc

SEQ ID NO: 124236 - DNA, 12 bp, Unknown
  misc_feature (1)..( 12): Result.003 file - promoters60/1985373
aattcaatttat

SEQ ID NO: 124237 - DNA, 12 bp, Unknown
  misc_feature (1)..( 12): Result.003 file - promoters60/1985373
aatacaacttat

SEQ ID NO: 124238 - DNA, 6 bp, Unknown
  misc_feature (1)..( 6): Result.003 file - promoters60/1985373
ttatat

SEQ ID NO: 124239 - DNA, 6 bp, Unknown
  misc_feature (1)..( 6): Result.003 file - promoters60/1985373
ttatat

SEQ ID NO: 124240 - DNA, 7 bp, Unknown
  misc_feature (1)..( 7): Result.003 file - promoters60/1985373
gtttgtt

SEQ ID NO: 124241 - DNA, 7 bp, Unknown
  misc_feature (1)..( 7): Result.003 file - promoters60/1985373
gttcgtt

SEQ ID NO: 124242 - DNA, 9 bp, Unknown
  misc_feature (1)..( 9): Result.003 file - promoters60/1985373
ttgaaatac

SEQ ID NO: 124243 - DNA, 9 bp, Unknown
  misc_feature (1)..( 9): Result.003 file - promoters60/1985373
tagaaataa

SEQ ID NO: 124244 - DNA, 9 bp, Unknown
  misc_feature (1)..( 9): Result.003 file - promoters60/1985373
ttgacatac

SEQ ID NO: 124245 - DNA, 6 bp, Unknown
  misc_feature (1)..( 6): Result.003 file - promoters60/1985373
tatggc

SEQ ID NO: 124246 - DNA, 6 bp, Unknown
  misc_feature (1)..( 6): Result.003 file - promoters60/1985373
tatggc

SEQ ID NO: 124247 - DNA, 7 bp, Unknown
  misc_feature (1)..( 7): Result.003 file - promoters60/1985373
acctaaa

SEQ ID NO: 124248 - DNA, 7 bp, Unknown
  misc_feature (1)..( 7): Result.003 file - promoters60/1985373
acccaaa

SEQ ID NO: 124249 - DNA, 6 bp, Unknown
  misc_feature (1)..( 6): Result.003 file - promoters60/1985373
tctaaa

SEQ ID NO: 124250 - DNA, 6 bp, Unknown
  misc_feature (1)..( 6): Result.003 file - promoters60/1985373
tctaaa

SEQ ID NO: 124251 - DNA, 6 bp, Unknown
  misc_feature (1)..( 6): Result.003 file - promoters60/1985373
aaactt

SEQ ID NO: 124252 - DNA, 6 bp, Unknown
  misc_feature (1)..( 6): Result.003 file - promoters60/1985373
aaactt

SEQ ID NO: 124253 - DNA, 6 bp, Unknown
  misc_feature (1)..( 6): Result.003 file - promoters60/1985373
ttcaaa

SEQ ID NO: 124254 - DNA, 6 bp, Unknown
  misc_feature (1)..( 6): Result.003 file - promoters60/1985373
ttcaaa

SEQ ID NO: 124255 - DNA, 6 bp, Unknown
  misc_feature (1)..( 6): Result.003 file - promoters60/1985373
ttcatt

SEQ ID NO: 124256 - DNA, 6 bp, Unknown
  misc_feature (1)..( 6): Result.003 file - promoters60/1985373
ttcatt

SEQ ID NO: 124257 - DNA, 6 bp, Unknown
  misc_feature (1)..( 6): Result.003 file - promoters60/1985373
aataat

SEQ ID NO: 124258 - DNA, 6 bp, Unknown
  misc_feature (1)..( 6): Result.003 file - promoters60/1985373
aataat

SEQ ID NO: 124259 - DNA, 8 bp, Unknown
  misc_feature (1)..( 8): Result.003 file - promoters60/1985373
tgttgaaa

SEQ ID NO: 124260 - DNA, 8 bp, Unknown
  misc_feature (1)..( 8): Result.003 file - promoters60/1985373
tgtcgaaa

SEQ ID NO: 124261 - DNA, 6 bp, Unknown
  misc_feature (1)..( 6): Result.003 file - promoters60/1985373
aaaagt

SEQ ID NO: 124262 - DNA, 6 bp, Unknown
  misc_feature (1)..( 6): Result.003 file - promoters60/1985373
aaaagt

SEQ ID NO: 124263 - DNA, 8 bp, Unknown
  misc_feature (1)..( 8): Result.003 file - promoters60/1985373
aaaacaat

SEQ ID NO: 124264 - DNA, 8 bp, Unknown
  misc_feature (1)..( 8): Result.003 file - promoters60/1985373
aaaaaaat

SEQ ID NO: 124265 - DNA, 6 bp, Unknown
  misc_feature (1)..( 6): Result.003 file - promoters60/1985373
aattat

SEQ ID NO: 124266 - DNA, 6 bp, Unknown
  misc_feature (1)..( 6): Result.003 file - promoters60/1985373
aattat

SEQ ID NO: 124267 - DNA, 6 bp, Unknown
  misc_feature (1)..( 6): Result.003 file - promoters60/1985373
aaaatt

SEQ ID NO: 124268 - DNA, 6 bp, Unknown
  misc_feature (1)..( 6): Result.003 file - promoters60/1985373
aaaatt

SEQ ID NO: 124269 - DNA, 6 bp, Unknown
  misc_feature (1)..( 6): Result.003 file - promoters60/1985373
attata

SEQ ID NO: 124270 - DNA, 6 bp, Unknown
  misc_feature (1)..( 6): Result.003 file - promoters60/1985373
attata

SEQ ID NO: 124271 - DNA, 6 bp, Unknown
  misc_feature (1)..( 6): Result.003 file - promoters60/1985373
aaacaa

SEQ ID NO: 124272 - DNA, 6 bp, Unknown
  misc_feature (1)..( 6): Result.003 file - promoters60/1985373
aaacaa

SEQ ID NO: 124273 - DNA, 6 bp, Unknown
  misc_feature (1)..( 6): Result.003 file - promoters60/1985373
aattga

SEQ ID NO: 124274 - DNA, 6 bp, Unknown
  misc_feature (1)..( 6): Result.003 file - promoters60/1985373
aattga

SEQ ID NO: 124275 - DNA, 9 bp, Unknown
  misc_feature (1)..( 9): Result.003 file - promoters60/1985373
atttttttg

SEQ ID NO: 124276 - DNA, 9 bp, Unknown
  misc_feature (1)..( 9): Result.003 file - promoters60/1985373
attcttttg

SEQ ID NO: 124277 - DNA, 7 bp, Unknown
  misc_feature (1)..( 7): Result.003 file - promoters60/1985373
ttttctt

SEQ ID NO: 124278 - DNA, 7 bp, Unknown
  misc_feature (1)..( 7): Result.003 file - promoters60/1985373
tttgctt

SEQ ID NO: 124279 - DNA, 6 bp, Unknown
  misc_feature (1)..( 6): Result.003 file - promoters60/1985373
tattgg

SEQ ID NO: 124280 - DNA, 6 bp, Unknown
  misc_feature (1)..( 6): Result.003 file - promoters60/1985373
tattgg

SEQ ID NO: 124281 - DNA, 9 bp, Unknown
  misc_feature (1)..( 9): Result.003 file - promoters60/1985373
ataaaaaga

SEQ ID NO: 124282 - DNA, 9 bp, Unknown
  misc_feature (1)..( 9): Result.003 file - promoters60/1985373
atagaaaga

SEQ ID NO: 124283 - DNA, 8 bp, Unknown
  misc_feature (1)..( 8): Result.003 file - promoters60/1985590
gtttatat

SEQ ID NO: 124284 - DNA, 8 bp, Unknown
  misc_feature (1)..( 8): Result.003 file - promoters60/1985590
ttttctat

SEQ ID NO: 124285 - DNA, 8 bp, Unknown
  misc_feature (1)..( 8): Result.003 file - promoters60/1985590
gttcataa

SEQ ID NO: 124286 - DNA, 8 bp, Unknown
  misc_feature (1)..( 8): Result.003 file - promoters60/1985590
caattcat

SEQ ID NO: 124287 - DNA, 8 bp, Unknown
  misc_feature (1)..( 8): Result.003 file - promoters60/1985590
caaatcaa

SEQ ID NO: 124288 - DNA, 8 bp, Unknown
  misc_feature (1)..( 8): Result.003 file - promoters60/1985590
gaattaaa

SEQ ID NO: 124289 - DNA, 7 bp, Unknown
  misc_feature (1)..( 7): Result.003 file - promoters60/1985590
gtatata

SEQ ID NO: 124290 - DNA, 7 bp, Unknown
  misc_feature (1)..( 7): Result.003 file - promoters60/1985590
gtaaata

SEQ ID NO: 124291 - DNA, 7 bp, Unknown
  misc_feature (1)..( 7): Result.003 file - promoters60/1985590
ttaaata

SEQ ID NO: 124292 - DNA, 11 bp, Unknown
  misc_feature (1)..( 11): Result.003 file - promoters60/1985590
tttaaatacgt

SEQ ID NO: 124293 - DNA, 11 bp, Unknown
  misc_feature (1)..( 11): Result.003 file - promoters60/1985590
tttcaatatga

SEQ ID NO: 124294 - DNA, 11 bp, Unknown
  misc_feature (1)..( 11): Result.003 file - promoters60/1985590
aagaaagacgt

SEQ ID NO: 124295 - DNA, 9 bp, Unknown
  misc_feature (1)..( 9): Result.003 file - promoters60/1985590
gaaaataaa

SEQ ID NO: 124296 - DNA, 9 bp, Unknown
  misc_feature (1)..( 9): Result.003 file - promoters60/1985590
aaaactaat

SEQ ID NO: 124297 - DNA, 9 bp, Unknown
  misc_feature (1)..( 9): Result.003 file - promoters60/1985590
gaaaattta

SEQ ID NO: 124298 - DNA, 9 bp, Unknown
  misc_feature (1)..( 9): Result.003 file - promoters60/1985590
caaaataaa

SEQ ID NO: 124299 - DNA, 12 bp, Unknown
  misc_feature (1)..( 12): Result.003 file - promoters60/1985590
gaacacatgaag

SEQ ID NO: 124300 - DNA, 12 bp, Unknown
  misc_feature (1)..( 12): Result.003 file - promoters60/1985590
aaacacaactgt

SEQ ID NO: 124301 - DNA, 12 bp, Unknown
  misc_feature (1)..( 12): Result.003 file - promoters60/1985590
taacaaatacaa

SEQ ID NO: 124302 - DNA, 11 bp, Unknown
  misc_feature (1)..( 11): Result.003 file - promoters60/1985590
ttttaaattat

SEQ ID NO: 124303 - DNA, 11 bp, Unknown
  misc_feature (1)..( 11): Result.003 file - promoters60/1985590
tttttaattat

SEQ ID NO: 124304 - DNA, 11 bp, Unknown
  misc_feature (1)..( 11): Result.003 file - promoters60/1985590
tctttaattag

SEQ ID NO: 124305 - DNA, 7 bp, Unknown
  misc_feature (1)..( 7): Result.003 file - promoters60/1985590
ttcataa

SEQ ID NO: 124306 - DNA, 7 bp, Unknown
  misc_feature (1)..( 7): Result.003 file - promoters60/1985590
atcataa

SEQ ID NO: 124307 - DNA, 7 bp, Unknown
  misc_feature (1)..( 7): Result.003 file - promoters60/1985590
ttcatat

SEQ ID NO: 124308 - DNA, 11 bp, Unknown
  misc_feature (1)..( 11): Result.003 file - promoters60/1985590
ataatattagt

SEQ ID NO: 124309 - DNA, 11 bp, Unknown
  misc_feature (1)..( 11): Result.003 file - promoters60/1985590
ttcatatgagt

SEQ ID NO: 124310 - DNA, 11 bp, Unknown
  misc_feature (1)..( 11): Result.003 file - promoters60/1985590
ttcatatgaaa

SEQ ID NO: 124311 - DNA, 11 bp, Unknown
  misc_feature (1)..( 11): Result.003 file - promoters60/1985590
ctagaagaaaa

SEQ ID NO: 124312 - DNA, 11 bp, Unknown
  misc_feature (1)..( 11): Result.003 file - promoters60/1985590
acagaggaaaa

SEQ ID NO: 124313 - DNA, 11 bp, Unknown
  misc_feature (1)..( 11): Result.003 file - promoters60/1985590
gaagaagaaag

SEQ ID NO: 124314 - DNA, 7 bp, Unknown
  misc_feature (1)..( 7): Result.003 file - promoters60/1985590
ttatgtg

SEQ ID NO: 124315 - DNA, 7 bp, Unknown
  misc_feature (1)..( 7): Result.003 file - promoters60/1985590
ttatgtt

SEQ ID NO: 124316 - DNA, 7 bp, Unknown
  misc_feature (1)..( 7): Result.003 file - promoters60/1985590
gtatgtt

SEQ ID NO: 124317 - DNA, 6 bp, Unknown
  misc_feature (1)..( 6): Result.003 file - promoters60/1985621
ggattt

SEQ ID NO: 124318 - DNA, 6 bp, Unknown
  misc_feature (1)..( 6): Result.003 file - promoters60/1985621
ggattt

SEQ ID NO: 124319 - DNA, 7 bp, Unknown
  misc_feature (1)..( 7): Result.003 file - promoters60/1985621
gagagga

SEQ ID NO: 124320 - DNA, 7 bp, Unknown
  misc_feature (1)..( 7): Result.003 file - promoters60/1985621
gagagga

SEQ ID NO: 124321 - DNA, 6 bp, Unknown
  misc_feature (1)..( 6): Result.003 file - promoters60/1985621
ttttct

SEQ ID NO: 124322 - DNA, 6 bp, Unknown
  misc_feature (1)..( 6): Result.003 file - promoters60/1985621
ttttct

SEQ ID NO: 124323 - DNA, 10 bp, Unknown
  misc_feature (1)..( 10): Result.003 file - promoters60/1985621
tacatatatg

SEQ ID NO: 124324 - DNA, 10 bp, Unknown
  misc_feature (1)..( 10): Result.003 file - promoters60/1985621
tacataaatg

SEQ ID NO: 124325 - DNA, 7 bp, Unknown
  misc_feature (1)..( 7): Result.003 file - promoters60/1985621
aaagtaa

SEQ ID NO: 124326 - DNA, 7 bp, Unknown
  misc_feature (1)..( 7): Result.003 file - promoters60/1985621
aaaataa

SEQ ID NO: 124327 - DNA, 7 bp, Unknown
  misc_feature (1)..( 7): Result.003 file - promoters60/1985621
aaactaa

SEQ ID NO: 124328 - DNA, 12 bp, Unknown
  misc_feature (1)..( 12): Result.003 file - promoters60/1985621
aataaaaccaaa

SEQ ID NO: 124329 - DNA, 12 bp, Unknown
  misc_feature (1)..( 12): Result.003 file - promoters60/1985621
aatcaaacgaaa

SEQ ID NO: 124330 - DNA, 8 bp, Unknown
  misc_feature (1)..( 8): Result.003 file - promoters60/1985621
ctacttct

SEQ ID NO: 124331 - DNA, 8 bp, Unknown
  misc_feature (1)..( 8): Result.003 file - promoters60/1985621
ctatttct

SEQ ID NO: 124332 - DNA, 7 bp, Unknown
  misc_feature (1)..( 7): Result.003 file - promoters60/1985621
aactcgt

SEQ ID NO: 124333 - DNA, 7 bp, Unknown
  misc_feature (1)..( 7): Result.003 file - promoters60/1985621
aacccgt

SEQ ID NO: 124334 - DNA, 6 bp, Unknown
  misc_feature (1)..( 6): Result.003 file - promoters60/1985621
cattta

SEQ ID NO: 124335 - DNA, 6 bp, Unknown
  misc_feature (1)..( 6): Result.003 file - promoters60/1985621
cattta

SEQ ID NO: 124336 - DNA, 6 bp, Unknown
  misc_feature (1)..( 6): Result.003 file - promoters60/1985621
ctaata

SEQ ID NO: 124337 - DNA, 6 bp, Unknown
  misc_feature (1)..( 6): Result.003 file - promoters60/1985621
ctaata

SEQ ID NO: 124338 - DNA, 6 bp, Unknown
  misc_feature (1)..( 6): Result.003 file - promoters60/1985621
atttaa

SEQ ID NO: 124339 - DNA, 6 bp, Unknown
  misc_feature (1)..( 6): Result.003 file - promoters60/1985621
atttaa

SEQ ID NO: 124340 - DNA, 8 bp, Unknown
  misc_feature (1)..( 8): Result.003 file - promoters60/1985621
gaagtaac

SEQ ID NO: 124341 - DNA, 8 bp, Unknown
  misc_feature (1)..( 8): Result.003 file - promoters60/1985621
gaagaaac

SEQ ID NO: 124342 - DNA, 6 bp, Unknown
  misc_feature (1)..( 6): Result.003 file - promoters60/1985621
gaggtt

SEQ ID NO: 124343 - DNA, 6 bp, Unknown
  misc_feature (1)..( 6): Result.003 file - promoters60/1985621
gaggtt

SEQ ID NO: 124344 - DNA, 6 bp, Unknown
  misc_feature (1)..( 6): Result.003 file - promoters60/1985621
tagtgt

SEQ ID NO: 124345 - DNA, 6 bp, Unknown
  misc_feature (1)..( 6): Result.003 file - promoters60/1985621
tagtgt

SEQ ID NO: 124346 - DNA, 7 bp, Unknown
  misc_feature (1)..( 7): Result.003 file - promoters60/1985621
tttaaac

SEQ ID NO: 124347 - DNA, 7 bp, Unknown
  misc_feature (1)..( 7): Result.003 file - promoters60/1985621
tttaaac

SEQ ID NO: 124348 - DNA, 7 bp, Unknown
  misc_feature (1)..( 7): Result.003 file - promoters60/1989445
taaaatg

SEQ ID NO: 124349 - DNA, 7 bp, Unknown
  misc_feature (1)..( 7): Result.003 file - promoters60/1989445
taaaata

SEQ ID NO: 124350 - DNA, 7 bp, Unknown
  misc_feature (1)..( 7): Result.003 file - promoters60/1989445
caaaata

SEQ ID NO: 124351 - DNA, 7 bp, Unknown
  misc_feature (1)..( 7): Result.003 file - promoters60/1989445
caaaata

SEQ ID NO: 124352 - DNA, 14 bp, Unknown
  misc_feature (1)..( 14): Result.003 file - promoters60/1989445
tttttattttattt

SEQ ID NO: 124353 - DNA, 14 bp, Unknown
  misc_feature (1)..( 14): Result.003 file - promoters60/1989445
catttctttgtaag

SEQ ID NO: 124354 - DNA, 14 bp, Unknown
  misc_feature (1)..( 14): Result.003 file - promoters60/1989445
attttattttattt

SEQ ID NO: 124355 - DNA, 14 bp, Unknown
  misc_feature (1)..( 14): Result.003 file - promoters60/1989445
catctctgatagat

SEQ ID NO: 124356 - DNA, 11 bp, Unknown
  misc_feature (1)..( 11): Result.003 file - promoters60/1989445
ataaattaatg

SEQ ID NO: 124357 - DNA, 11 bp, Unknown
  misc_feature (1)..( 11): Result.003 file - promoters60/1989445
atatattaatg

SEQ ID NO: 124358 - DNA, 11 bp, Unknown
  misc_feature (1)..( 11): Result.003 file - promoters60/1989445
ataaatgagag

SEQ ID NO: 124359 - DNA, 11 bp, Unknown
  misc_feature (1)..( 11): Result.003 file - promoters60/1989445
atatatatgta

SEQ ID NO: 124360 - DNA, 13 bp, Unknown
  misc_feature (1)..( 13): Result.003 file - promoters60/1989445
attttcagaaatt

SEQ ID NO: 124361 - DNA, 13 bp, Unknown
  misc_feature (1)..( 13): Result.003 file - promoters60/1989445
aacgcatgaaatt

SEQ ID NO: 124362 - DNA, 13 bp, Unknown
  misc_feature (1)..( 13): Result.003 file - promoters60/1989445
attctcagaaatg

SEQ ID NO: 124363 - DNA, 13 bp, Unknown
  misc_feature (1)..( 13): Result.003 file - promoters60/1989445
cgtctcagctcat

SEQ ID NO: 124364 - DNA, 12 bp, Unknown
  misc_feature (1)..( 12): Result.003 file - promoters60/2025006
tttaaaataaat

SEQ ID NO: 124365 - DNA, 12 bp, Unknown
  misc_feature (1)..( 12): Result.003 file - promoters60/2025006
tttaaaaaaaaa

SEQ ID NO: 124366 - DNA, 12 bp, Unknown
  misc_feature (1)..( 12): Result.003 file - promoters60/2025006
aatctgataaat

SEQ ID NO: 124367 - DNA, 12 bp, Unknown
  misc_feature (1)..( 12): Result.003 file - promoters60/2025006
aacaccataaat

SEQ ID NO: 124368 - DNA, 9 bp, Unknown
  misc_feature (1)..( 9): Result.003 file - promoters60/2025006
ataaacaat

SEQ ID NO: 124369 - DNA, 9 bp, Unknown
  misc_feature (1)..( 9): Result.003 file - promoters60/2025006
ataaactca

SEQ ID NO: 124370 - DNA, 9 bp, Unknown
  misc_feature (1)..( 9): Result.003 file - promoters60/2025006
atatacaca

SEQ ID NO: 124371 - DNA, 7 bp, Unknown
  misc_feature (1)..( 7): Result.003 file - promoters60/2025006
aatcata

SEQ ID NO: 124372 - DNA, 7 bp, Unknown
  misc_feature (1)..( 7): Result.003 file - promoters60/2025006
aattata

SEQ ID NO: 124373 - DNA, 7 bp, Unknown
  misc_feature (1)..( 7): Result.003 file - promoters60/2025006
aatcata

SEQ ID NO: 124374 - DNA, 7 bp, Unknown
  misc_feature (1)..( 7): Result.003 file - promoters60/2025006
gtttgaa

SEQ ID NO: 124375 - DNA, 7 bp, Unknown
  misc_feature (1)..( 7): Result.003 file - promoters60/2025006
atttgaa

SEQ ID NO: 124376 - DNA, 7 bp, Unknown
  misc_feature (1)..( 7): Result.003 file - promoters60/2025006
gttcgaa

SEQ ID NO: 124377 - DNA, 13 bp, Unknown
  misc_feature (1)..( 13): Result.003 file - promoters60/2025006
aatagagaaaacg

SEQ ID NO: 124378 - DNA, 13 bp, Unknown
  misc_feature (1)..( 13): Result.003 file - promoters60/2025006
aatagaaaaaacg

SEQ ID NO: 124379 - DNA, 13 bp, Unknown
  misc_feature (1)..( 13): Result.003 file - promoters60/2025006
aaaggaaaaagcc

SEQ ID NO: 124380 - DNA, 9 bp, Unknown
  misc_feature (1)..( 9): Result.003 file - promoters60/2025006
tctataaaa

SEQ ID NO: 124381 - DNA, 9 bp, Unknown
  misc_feature (1)..( 9): Result.003 file - promoters60/2025006
taaataaaa

SEQ ID NO: 124382 - DNA, 9 bp, Unknown
  misc_feature (1)..( 9): Result.003 file - promoters60/2025006
taaataaat

SEQ ID NO: 124383 - DNA, 9 bp, Unknown
  misc_feature (1)..( 9): Result.003 file - promoters60/2025006
ccaatcata

SEQ ID NO: 124384 - DNA, 9 bp, Unknown
  misc_feature (1)..( 9): Result.003 file - promoters60/2025006
taaataata

SEQ ID NO: 124385 - DNA, 9 bp, Unknown
  misc_feature (1)..( 9): Result.003 file - promoters60/2025006
taaaaaatt

SEQ ID NO: 124386 - DNA, 7 bp, Unknown
  misc_feature (1)..( 7): Result.003 file - promoters60/2025006
gtaaatg

SEQ ID NO: 124387 - DNA, 7 bp, Unknown
  misc_feature (1)..( 7): Result.003 file - promoters60/2025006
gtaaata

SEQ ID NO: 124388 - DNA, 7 bp, Unknown
  misc_feature (1)..( 7): Result.003 file - promoters60/2025006
ataaatg

SEQ ID NO: 124389 - DNA, 16 bp, Unknown
  misc_feature (1)..( 16): Result.003 file - promoters60/2025006
tttaactagtttaata

SEQ ID NO: 124390 - DNA, 16 bp, Unknown
  misc_feature (1)..( 16): Result.003 file - promoters60/2025006
tttgactatttttata

SEQ ID NO: 124391 - DNA, 16 bp, Unknown
  misc_feature (1)..( 16): Result.003 file - promoters60/2025006
tacgggttttttaatt

SEQ ID NO: 124392 - DNA, 8 bp, Unknown
  misc_feature (1)..( 8): Result.003 file - promoters60/2025006
acccaaac

SEQ ID NO: 124393 - DNA, 8 bp, Unknown
  misc_feature (1)..( 8): Result.003 file - promoters60/2025006
accaaaat

SEQ ID NO: 124394 - DNA, 8 bp, Unknown
  misc_feature (1)..( 8): Result.003 file - promoters60/2025006
cacaaaat

SEQ ID NO: 124395 - DNA, 7 bp, Unknown
  misc_feature (1)..( 7): Result.003 file - promoters60/2025133
gggtttt

SEQ ID NO: 124396 - DNA, 7 bp, Unknown
  misc_feature (1)..( 7): Result.003 file - promoters60/2025133
gggattt

SEQ ID NO: 124397 - DNA, 10 bp, Unknown
  misc_feature (1)..( 10): Result.003 file - promoters60/2025133
aaaaaaaaaa

SEQ ID NO: 124398 - DNA, 10 bp, Unknown
  misc_feature (1)..( 10): Result.003 file - promoters60/2025133
aaaaaaaaaa

SEQ ID NO: 124399 - DNA, 7 bp, Unknown
  misc_feature (1)..( 7): Result.003 file - promoters60/2025133
gttgaaa

SEQ ID NO: 124400 - DNA, 7 bp, Unknown
  misc_feature (1)..( 7): Result.003 file - promoters60/2025133
gttcaaa

SEQ ID NO: 124401 - DNA, 6 bp, Unknown
  misc_feature (1)..( 6): Result.003 file - promoters60/2025133
aaaaag

SEQ ID NO: 124402 - DNA, 6 bp, Unknown
  misc_feature (1)..( 6): Result.003 file - promoters60/2025133
aaaaag

SEQ ID NO: 124403 - DNA, 6 bp, Unknown
  misc_feature (1)..( 6): Result.003 file - promoters60/2025133
gcagaa

SEQ ID NO: 124404 - DNA, 6 bp, Unknown
  misc_feature (1)..( 6): Result.003 file - promoters60/2025133
gcagaa

SEQ ID NO: 124405 - DNA, 7 bp, Unknown
  misc_feature (1)..( 7): Result.003 file - promoters60/2025133
tgaatag

SEQ ID NO: 124406 - DNA, 7 bp, Unknown
  misc_feature (1)..( 7): Result.003 file - promoters60/2025133
tgaatag

SEQ ID NO: 124407 - DNA, 7 bp, Unknown
  misc_feature (1)..( 7): Result.003 file - promoters60/2025133
aacgaat

SEQ ID NO: 124408 - DNA, 7 bp, Unknown
  misc_feature (1)..( 7): Result.003 file - promoters60/2025133
aacaaat

SEQ ID NO: 124409 - DNA, 7 bp, Unknown
  misc_feature (1)..( 7): Result.003 file - promoters60/2025133
caaacgt

SEQ ID NO: 124410 - DNA, 7 bp, Unknown
  misc_feature (1)..( 7): Result.003 file - promoters60/2025133
caaccgt

SEQ ID NO: 124411 - DNA, 8 bp, Unknown
  misc_feature (1)..( 8): Result.003 file - promoters60/2025133
ctggagag

SEQ ID NO: 124412 - DNA, 8 bp, Unknown
  misc_feature (1)..( 8): Result.003 file - promoters60/2025133
ctgtagag

SEQ ID NO: 124413 - DNA, 6 bp, Unknown
  misc_feature (1)..( 6): Result.003 file - promoters60/2025133
ttaata

SEQ ID NO: 124414 - DNA, 6 bp, Unknown
  misc_feature (1)..( 6): Result.003 file - promoters60/2025133
ttaata

SEQ ID NO: 124415 - DNA, 6 bp, Unknown
  misc_feature (1)..( 6): Result.003 file - promoters60/2025133
ttaata

SEQ ID NO: 124416 - DNA, 6 bp, Unknown
  misc_feature (1)..( 6): Result.003 file - promoters60/2025133
ttaata

SEQ ID NO: 124417 - DNA, 7 bp, Unknown
  misc_feature (1)..( 7): Result.003 file - promoters60/2025133
tttgaag

SEQ ID NO: 124418 - DNA, 7 bp, Unknown
  misc_feature (1)..( 7): Result.003 file - promoters60/2025133
tttcaag

SEQ ID NO: 124419 - DNA, 8 bp, Unknown
  misc_feature (1)..( 8): Result.003 file - promoters60/2025133
gtttcata

SEQ ID NO: 124420 - DNA, 8 bp, Unknown
  misc_feature (1)..( 8): Result.003 file - promoters60/2025133
gtttaata

SEQ ID NO: 124421 - DNA, 6 bp, Unknown
  misc_feature (1)..( 6): Result.003 file - promoters60/2025133
accaat

SEQ ID NO: 124422 - DNA, 6 bp, Unknown
  misc_feature (1)..( 6): Result.003 file - promoters60/2025133
accaat

SEQ ID NO: 124423 - DNA, 7 bp, Unknown
  misc_feature (1)..( 7): Result.003 file - promoters60/2025133
tctgaac

SEQ ID NO: 124424 - DNA, 7 bp, Unknown
  misc_feature (1)..( 7): Result.003 file - promoters60/2025133
tcttaac

SEQ ID NO: 124425 - DNA, 7 bp, Unknown
  misc_feature (1)..( 7): Result.003 file - promoters60/2025133
tatttta

SEQ ID NO: 124426 - DNA, 7 bp, Unknown
  misc_feature (1)..( 7): Result.003 file - promoters60/2025133
tatttta

SEQ ID NO: 124427 - DNA, 6 bp, Unknown
  misc_feature (1)..( 6): Result.003 file - promoters60/2025133
aaattt

SEQ ID NO: 124428 - DNA, 6 bp, Unknown
  misc_feature (1)..( 6): Result.003 file - promoters60/2025133
aaattt

SEQ ID NO: 124429 - DNA, 8 bp, Unknown
  misc_feature (1)..( 8): Result.003 file - promoters60/2025133
gtgtagaa

SEQ ID NO: 124430 - DNA, 8 bp, Unknown
  misc_feature (1)..( 8): Result.003 file - promoters60/2025133
gtgtagaa

SEQ ID NO: 124431 - DNA, 6 bp, Unknown
  misc_feature (1)..( 6): Result.003 file - promoters60/2025133
aaaata

SEQ ID NO: 124432 - DNA, 6 bp, Unknown
  misc_feature (1)..( 6): Result.003 file - promoters60/2025133
aaaata

SEQ ID NO: 124433 - DNA, 8 bp, Unknown
  misc_feature (1)..( 8): Result.003 file - promoters60/2025133
ttattaac

SEQ ID NO: 124434 - DNA, 8 bp, Unknown
  misc_feature (1)..( 8): Result.003 file - promoters60/2025133
ttattaac

SEQ ID NO: 124435 - DNA, 12 bp, Unknown
  misc_feature (1)..( 12): Result.003 file - promoters60/2025468
cttttgtatttg

SEQ ID NO: 124436 - DNA, 12 bp, Unknown
  misc_feature (1)..( 12): Result.003 file - promoters60/2025468
catttgtacaaa

SEQ ID NO: 124437 - DNA, 12 bp, Unknown
  misc_feature (1)..( 12): Result.003 file - promoters60/2025468
attttgtttttg

SEQ ID NO: 124438 - DNA, 12 bp, Unknown
  misc_feature (1)..( 12): Result.003 file - promoters60/2025468
attttggtgttt

SEQ ID NO: 124439 - DNA, 8 bp, Unknown
  misc_feature (1)..( 8): Result.003 file - promoters60/2025468
tttgttaa

SEQ ID NO: 124440 - DNA, 8 bp, Unknown
  misc_feature (1)..( 8): Result.003 file - promoters60/2025468
tttgtttg

SEQ ID NO: 124441 - DNA, 9 bp, Unknown
  misc_feature (1)..( 9): Result.003 file - promoters60/2025468
tttagttcc

SEQ ID NO: 124442 - DNA, 9 bp, Unknown
  misc_feature (1)..( 9): Result.003 file - promoters60/2025468
ttgacttgt

SEQ ID NO: 124443 - DNA, 6 bp, Unknown
  misc_feature (1)..( 6): Result.003 file - promoters60/2025592
gaagtt

SEQ ID NO: 124444 - DNA, 6 bp, Unknown
  misc_feature (1)..( 6): Result.003 file - promoters60/2025592
gaagtt

SEQ ID NO: 124445 - DNA, 6 bp, Unknown
  misc_feature (1)..( 6): Result.003 file - promoters60/2025592
atatta

SEQ ID NO: 124446 - DNA, 6 bp, Unknown
  misc_feature (1)..( 6): Result.003 file - promoters60/2025592
atatta

SEQ ID NO: 124447 - DNA, 7 bp, Unknown
  misc_feature (1)..( 7): Result.003 file - promoters60/2025592
aatgcat

SEQ ID NO: 124448 - DNA, 7 bp, Unknown
  misc_feature (1)..( 7): Result.003 file - promoters60/2025592
aatacat

SEQ ID NO: 124449 - DNA, 7 bp, Unknown
  misc_feature (1)..( 7): Result.003 file - promoters60/2025592
atgaata

SEQ ID NO: 124450 - DNA, 7 bp, Unknown
  misc_feature (1)..( 7): Result.003 file - promoters60/2025592
atgtata

SEQ ID NO: 124451 - DNA, 9 bp, Unknown
  misc_feature (1)..( 9): Result.003 file - promoters60/2025592
tgtctaaaa

SEQ ID NO: 124452 - DNA, 9 bp, Unknown
  misc_feature (1)..( 9): Result.003 file - promoters60/2025592
tgtttaaaa

SEQ ID NO: 124453 - DNA, 8 bp, Unknown
  misc_feature (1)..( 8): Result.003 file - promoters60/2025592
aaaataaa

SEQ ID NO: 124454 - DNA, 8 bp, Unknown
  misc_feature (1)..( 8): Result.003 file - promoters60/2025592
caaacaaa

SEQ ID NO: 124455 - DNA, 8 bp, Unknown
  misc_feature (1)..( 8): Result.003 file - promoters60/2025592
ataataaa

SEQ ID NO: 124456 - DNA, 7 bp, Unknown
  misc_feature (1)..( 7): Result.003 file - promoters60/2025592
tttaaaa

SEQ ID NO: 124457 - DNA, 7 bp, Unknown
  misc_feature (1)..( 7): Result.003 file - promoters60/2025592
tttcaaa

SEQ ID NO: 124458 - DNA, 7 bp, Unknown
  misc_feature (1)..( 7): Result.003 file - promoters60/2025592
gttttga

SEQ ID NO: 124459 - DNA, 7 bp, Unknown
  misc_feature (1)..( 7): Result.003 file - promoters60/2025592
gttgtga

SEQ ID NO: 124460 - DNA, 7 bp, Unknown
  misc_feature (1)..( 7): Result.003 file - promoters60/2025592
atttttt

SEQ ID NO: 124461 - DNA, 7 bp, Unknown
  misc_feature (1)..( 7): Result.003 file - promoters60/2025592
atttttt

SEQ ID NO: 124462 - DNA, 6 bp, Unknown
  misc_feature (1)..( 6): Result.003 file - promoters60/2025592
tttgat

SEQ ID NO: 124463 - DNA, 6 bp, Unknown
  misc_feature (1)..( 6): Result.003 file - promoters60/2025592
tttgat

SEQ ID NO: 124464 - DNA, 12 bp, Unknown
  misc_feature (1)..( 12): Result.003 file - promoters60/2025592
tcagtaatgttt

SEQ ID NO: 124465 - DNA, 12 bp, Unknown
  misc_feature (1)..( 12): Result.003 file - promoters60/2025592
caattaatattt

SEQ ID NO: 124466 - DNA, 12 bp, Unknown
  misc_feature (1)..( 12): Result.003 file - promoters60/2025592
caaataatattc

SEQ ID NO: 124467 - DNA, 8 bp, Unknown
  misc_feature (1)..( 8): Result.003 file - promoters60/2025592
attctaat

SEQ ID NO: 124468 - DNA, 8 bp, Unknown
  misc_feature (1)..( 8): Result.003 file - promoters60/2025592
attataat

SEQ ID NO: 124469 - DNA, 6 bp, Unknown
  misc_feature (1)..( 6): Result.003 file - promoters60/2025592
ttaatg

SEQ ID NO: 124470 - DNA, 6 bp, Unknown
  misc_feature (1)..( 6): Result.003 file - promoters60/2025592
ttaatg

SEQ ID NO: 124471 - DNA, 6 bp, Unknown
  misc_feature (1)..( 6): Result.003 file - promoters60/2025592
catttc

SEQ ID NO: 124472 - DNA, 6 bp, Unknown
  misc_feature (1)..( 6): Result.003 file - promoters60/2025592
catttc

SEQ ID NO: 124473 - DNA, 8 bp, Unknown
  misc_feature (1)..( 8): Result.003 file - promoters60/2025592
aaacacaa

SEQ ID NO: 124474 - DNA, 8 bp, Unknown
  misc_feature (1)..( 8): Result.003 file - promoters60/2025592
aaagacaa

SEQ ID NO: 124475 - DNA, 7 bp, Unknown
  misc_feature (1)..( 7): Result.003 file - promoters60/2025592
acaaagc

SEQ ID NO: 124476 - DNA, 7 bp, Unknown
  misc_feature (1)..( 7): Result.003 file - promoters60/2025592
acaaagc

SEQ ID NO: 124477 - DNA, 7 bp, Unknown
  misc_feature (1)..( 7): Result.003 file - promoters60/2025592
tgtggtt

SEQ ID NO: 124478 - DNA, 7 bp, Unknown
  misc_feature (1)..( 7): Result.003 file - promoters60/2025592
tgtagtt

SEQ ID NO: 124479 - DNA, 6 bp, Unknown
  misc_feature (1)..( 6): Result.003 file - promoters60/2025592
cgtaaa

SEQ ID NO: 124480 - DNA, 6 bp, Unknown
  misc_feature (1)..( 6): Result.003 file - promoters60/2025592
cgtaaa

SEQ ID NO: 124481 - DNA, 8 bp, Unknown
  misc_feature (1)..( 8): Result.003 file - promoters60/2025592
taaatcaa

SEQ ID NO: 124482 - DNA, 8 bp, Unknown
  misc_feature (1)..( 8): Result.003 file - promoters60/2025592
taaaacaa

SEQ ID NO: 124483 - DNA, 6 bp, Unknown
  misc_feature (1)..( 6): Result.003 file - promoters60/2025592
atattt

SEQ ID NO: 124484 - DNA, 6 bp, Unknown
  misc_feature (1)..( 6): Result.003 file - promoters60/2025592
atattt

SEQ ID NO: 124485 - DNA, 6 bp, Unknown
  misc_feature (1)..( 6): Result.003 file - promoters60/2025592
ttgtat

SEQ ID NO: 124486 - DNA, 6 bp, Unknown
  misc_feature (1)..( 6): Result.003 file - promoters60/2025592
ttgtat

SEQ ID NO: 124487 - DNA, 9 bp, Unknown
  misc_feature (1)..( 9): Result.003 file - promoters60/2025627
cttttgttc

SEQ ID NO: 124488 - DNA, 9 bp, Unknown
  misc_feature (1)..( 9): Result.003 file - promoters60/2025627
atttttttc

SEQ ID NO: 124489 - DNA, 9 bp, Unknown
  misc_feature (1)..( 9): Result.003 file - promoters60/2025627
atttattta

SEQ ID NO: 124490 - DNA, 7 bp, Unknown
  misc_feature (1)..( 7): Result.003 file - promoters60/2025627
ttataat

SEQ ID NO: 124491 - DNA, 7 bp, Unknown
  misc_feature (1)..( 7): Result.003 file - promoters60/2025627
ttagaat

SEQ ID NO: 124492 - DNA, 8 bp, Unknown
  misc_feature (1)..( 8): Result.003 file - promoters60/2025627
tttcttat

SEQ ID NO: 124493 - DNA, 8 bp, Unknown
  misc_feature (1)..( 8): Result.003 file - promoters60/2025627
tttattat

SEQ ID NO: 124494 - DNA, 9 bp, Unknown
  misc_feature (1)..( 9): Result.003 file - promoters60/2025627
aataataaa

SEQ ID NO: 124495 - DNA, 9 bp, Unknown
  misc_feature (1)..( 9): Result.003 file - promoters60/2025627
attaaaaaa

SEQ ID NO: 124496 - DNA, 9 bp, Unknown
  misc_feature (1)..( 9): Result.003 file - promoters60/2025627
attagaaat

SEQ ID NO: 124497 - DNA, 7 bp, Unknown
  misc_feature (1)..( 7): Result.003 file - promoters60/2025627
atcatgc

SEQ ID NO: 124498 - DNA, 7 bp, Unknown
  misc_feature (1)..( 7): Result.003 file - promoters60/2025627
atcatgc

SEQ ID NO: 124499 - DNA, 6 bp, Unknown
  misc_feature (1)..( 6): Result.003 file - promoters60/2025627
tcacat

SEQ ID NO: 124500 - DNA, 6 bp, Unknown
  misc_feature (1)..( 6): Result.003 file - promoters60/2025627
tcacat

SEQ ID NO: 124501 - DNA, 7 bp, Unknown
  misc_feature (1)..( 7): Result.003 file - promoters60/2025627
aagtaaa

SEQ ID NO: 124502 - DNA, 7 bp, Unknown
  misc_feature (1)..( 7): Result.003 file - promoters60/2025627
aagtaaa

SEQ ID NO: 124503 - DNA, 8 bp, Unknown
  misc_feature (1)..( 8): Result.003 file - promoters60/2025627
ttttcttt

SEQ ID NO: 124504 - DNA, 8 bp, Unknown
  misc_feature (1)..( 8): Result.003 file - promoters60/2025627
atttattt

SEQ ID NO: 124505 - DNA, 8 bp, Unknown
  misc_feature (1)..( 8): Result.003 file - promoters60/2025627
attttttt

SEQ ID NO: 124506 - DNA, 6 bp, Unknown
  misc_feature (1)..( 6): Result.003 file - promoters60/2025627
ttttac

SEQ ID NO: 124507 - DNA, 6 bp, Unknown
  misc_feature (1)..( 6): Result.003 file - promoters60/2025627
ttttac

SEQ ID NO: 124508 - DNA, 10 bp, Unknown
  misc_feature (1)..( 10): Result.003 file - promoters60/2025627
taattttttt

SEQ ID NO: 124509 - DNA, 10 bp, Unknown
  misc_feature (1)..( 10): Result.003 file - promoters60/2025627
taatattttt

SEQ ID NO: 124510 - DNA, 10 bp, Unknown
  misc_feature (1)..( 10): Result.003 file - promoters60/2025627
gaatattacg

SEQ ID NO: 124511 - DNA, 8 bp, Unknown
  misc_feature (1)..( 8): Result.003 file - promoters60/2025627
attcactt

SEQ ID NO: 124512 - DNA, 8 bp, Unknown
  misc_feature (1)..( 8): Result.003 file - promoters60/2025627
atttactt

SEQ ID NO: 124513 - DNA, 7 bp, Unknown
  misc_feature (1)..( 7): Result.003 file - promoters60/2025627
aaataat

SEQ ID NO: 124514 - DNA, 7 bp, Unknown
  misc_feature (1)..( 7): Result.003 file - promoters60/2025627
aaacaat

SEQ ID NO: 124515 - DNA, 9 bp, Unknown
  misc_feature (1)..( 9): Result.003 file - promoters60/2025627
tttatctaa

SEQ ID NO: 124516 - DNA, 9 bp, Unknown
  misc_feature (1)..( 9): Result.003 file - promoters60/2025627
tttttctaa

SEQ ID NO: 124517 - DNA, 8 bp, Unknown
  misc_feature (1)..( 8): Result.003 file - promoters60/2025627
taattcat

SEQ ID NO: 124518 - DNA, 8 bp, Unknown
  misc_feature (1)..( 8): Result.003 file - promoters60/2025627
taattcat

SEQ ID NO: 124519 - DNA, 7 bp, Unknown
  misc_feature (1)..( 7): Result.003 file - promoters60/2025627
aatttct

SEQ ID NO: 124520 - DNA, 7 bp, Unknown
  misc_feature (1)..( 7): Result.003 file - promoters60/2025627
aatctct

SEQ ID NO: 124521 - DNA, 8 bp, Unknown
  misc_feature (1)..( 8): Result.003 file - promoters60/2025627
tcttttca

SEQ ID NO: 124522 - DNA, 8 bp, Unknown
  misc_feature (1)..( 8): Result.003 file - promoters60/2025627
tcttttca

SEQ ID NO: 124523 - DNA, 6 bp, Unknown
  misc_feature (1)..( 6): Result.003 file - promoters60/2025627
tttcag

SEQ ID NO: 124524 - DNA, 6 bp, Unknown
  misc_feature (1)..( 6): Result.003 file - promoters60/2025627
tttcag

SEQ ID NO: 124525 - DNA, 7 bp, Unknown
  misc_feature (1)..( 7): Result.003 file - promoters60/2025627
aaatatt

SEQ ID NO: 124526 - DNA, 7 bp, Unknown
  misc_feature (1)..( 7): Result.003 file - promoters60/2025627
aaatatt

SEQ ID NO: 124527 - DNA, 11 bp, Unknown
  misc_feature (1)..( 11): Result.003 file - promoters60/2025627
tactgttttag

SEQ ID NO: 124528 - DNA, 11 bp, Unknown
  misc_feature (1)..( 11): Result.003 file - promoters60/2025627
tactgtattag

SEQ ID NO: 124529 - DNA, 6 bp, Unknown
  misc_feature (1)..( 6): Result.003 file - promoters60/2025627
tataat

SEQ ID NO: 124530 - DNA, 6 bp, Unknown
  misc_feature (1)..( 6): Result.003 file - promoters60/2025627
tataat

SEQ ID NO: 124531 - DNA, 8 bp, Unknown
  misc_feature (1)..( 8): Result.003 file - promoters60/2025627
taatatta

SEQ ID NO: 124532 - DNA, 8 bp, Unknown
  misc_feature (1)..( 8): Result.003 file - promoters60/2025627
taatctta

SEQ ID NO: 124533 - DNA, 7 bp, Unknown
  misc_feature (1)..( 7): Result.003 file - promoters60/2026537
ttttgta

SEQ ID NO: 124534 - DNA, 7 bp, Unknown
  misc_feature (1)..( 7): Result.003 file - promoters60/2026537
tttggta

SEQ ID NO: 124535 - DNA, 6 bp, Unknown
  misc_feature (1)..( 6): Result.003 file - promoters60/2026537
acaaat

SEQ ID NO: 124536 - DNA, 6 bp, Unknown
  misc_feature (1)..( 6): Result.003 file - promoters60/2026537
acaaat

SEQ ID NO: 124537 - DNA, 7 bp, Unknown
  misc_feature (1)..( 7): Result.003 file - promoters60/2026537
tggcatt

SEQ ID NO: 124538 - DNA, 7 bp, Unknown
  misc_feature (1)..( 7): Result.003 file - promoters60/2026537
tggaatt

SEQ ID NO: 124539 - DNA, 6 bp, Unknown
  misc_feature (1)..( 6): Result.003 file - promoters60/2026537
ttcggt

SEQ ID NO: 124540 - DNA, 6 bp, Unknown
  misc_feature (1)..( 6): Result.003 file - promoters60/2026537
ttcggt

SEQ ID NO: 124541 - DNA, 8 bp, Unknown
  misc_feature (1)..( 8): Result.003 file - promoters60/2026537
aggacgat

SEQ ID NO: 124542 - DNA, 8 bp, Unknown
  misc_feature (1)..( 8): Result.003 file - promoters60/2026537
aggtcgat

SEQ ID NO: 124543 - DNA, 11 bp, Unknown
  misc_feature (1)..( 11): Result.003 file - promoters60/2026771
aaattgtaatt

SEQ ID NO: 124544 - DNA, 11 bp, Unknown
  misc_feature (1)..( 11): Result.003 file - promoters60/2026771
acattataaaa

SEQ ID NO: 124545 - DNA, 11 bp, Unknown
  misc_feature (1)..( 11): Result.003 file - promoters60/2026771
ttgttgttatt

SEQ ID NO: 124546 - DNA, 11 bp, Unknown
  misc_feature (1)..( 11): Result.003 file - promoters60/2026771
taattgtataa

SEQ ID NO: 124547 - DNA, 11 bp, Unknown
  misc_feature (1)..( 11): Result.003 file - promoters60/2026771
aaaatgtaaat

SEQ ID NO: 124548 - DNA, 11 bp, Unknown
  misc_feature (1)..( 11): Result.003 file - promoters60/2026771
tttttataatc

SEQ ID NO: 124549 - DNA, 12 bp, Unknown
  misc_feature (1)..( 12): Result.003 file - promoters60/2026771
cataaaaaatat

SEQ ID NO: 124550 - DNA, 12 bp, Unknown
  misc_feature (1)..( 12): Result.003 file - promoters60/2026771
tttaaaaaaaga

SEQ ID NO: 124551 - DNA, 12 bp, Unknown
  misc_feature (1)..( 12): Result.003 file - promoters60/2026771
tctaaaaagtta

SEQ ID NO: 124552 - DNA, 12 bp, Unknown
  misc_feature (1)..( 12): Result.003 file - promoters60/2026771
attagaaacaga

SEQ ID NO: 124553 - DNA, 12 bp, Unknown
  misc_feature (1)..( 12): Result.003 file - promoters60/2026771
tttataaacaag

SEQ ID NO: 124554 - DNA, 12 bp, Unknown
  misc_feature (1)..( 12): Result.003 file - promoters60/2026771
attacaaatatg

SEQ ID NO: 124555 - DNA, 17 bp, Unknown
  misc_feature (1)..( 17): Result.003 file - promoters60/2026771
gaggggttaaattggtt

SEQ ID NO: 124556 - DNA, 17 bp, Unknown
  misc_feature (1)..( 17): Result.003 file - promoters60/2026771
ataacccaaaattgacc

SEQ ID NO: 124557 - DNA, 17 bp, Unknown
  misc_feature (1)..( 17): Result.003 file - promoters60/2026771
aaatcgtaaaattccca

SEQ ID NO: 124558 - DNA, 17 bp, Unknown
  misc_feature (1)..( 17): Result.003 file - promoters60/2026771
aaatcgtaaaatttttg

SEQ ID NO: 124559 - DNA, 17 bp, Unknown
  misc_feature (1)..( 17): Result.003 file - promoters60/2026771
ttcaaattaaatcatat

SEQ ID NO: 124560 - DNA, 17 bp, Unknown
  misc_feature (1)..( 17): Result.003 file - promoters60/2026771
tcttctatgtatttaat

SEQ ID NO: 124561 - DNA, 12 bp, Unknown
  misc_feature (1)..( 12): Result.003 file - promoters60/2026771
aattttgtaaat

SEQ ID NO: 124562 - DNA, 12 bp, Unknown
  misc_feature (1)..( 12): Result.003 file - promoters60/2026771
ctttttataatc

SEQ ID NO: 124563 - DNA, 12 bp, Unknown
  misc_feature (1)..( 12): Result.003 file - promoters60/2026771
aattttgtttca

SEQ ID NO: 124564 - DNA, 12 bp, Unknown
  misc_feature (1)..( 12): Result.003 file - promoters60/2026771
caaaatgtaaat

SEQ ID NO: 124565 - DNA, 12 bp, Unknown
  misc_feature (1)..( 12): Result.003 file - promoters60/2026771
ggtttggtttct

SEQ ID NO: 124566 - DNA, 12 bp, Unknown
  misc_feature (1)..( 12): Result.003 file - promoters60/2026771
gacattataaaa

SEQ ID NO: 124567 - DNA, 12 bp, Unknown
  misc_feature (1)..( 12): Result.003 file - promoters60/2026771
aaattttgtaaa

SEQ ID NO: 124568 - DNA, 12 bp, Unknown
  misc_feature (1)..( 12): Result.003 file - promoters60/2026771
aaatttattgtt

SEQ ID NO: 124569 - DNA, 12 bp, Unknown
  misc_feature (1)..( 12): Result.003 file - promoters60/2026771
taattttgtttc

SEQ ID NO: 124570 - DNA, 12 bp, Unknown
  misc_feature (1)..( 12): Result.003 file - promoters60/2026771
gggtttggtttc

SEQ ID NO: 124571 - DNA, 12 bp, Unknown
  misc_feature (1)..( 12): Result.003 file - promoters60/2026771
ctatttatttcc

SEQ ID NO: 124572 - DNA, 12 bp, Unknown
  misc_feature (1)..( 12): Result.003 file - promoters60/2026771
taatttcaaaat

SEQ ID NO: 124573 - DNA, 8 bp, Unknown
  misc_feature (1)..( 8): Result.003 file - promoters60/2027233
atcaattt

SEQ ID NO: 124574 - DNA, 8 bp, Unknown
  misc_feature (1)..( 8): Result.003 file - promoters60/2027233
atcaatcc

SEQ ID NO: 124575 - DNA, 8 bp, Unknown
  misc_feature (1)..( 8): Result.003 file - promoters60/2027233
ttcaatcc

SEQ ID NO: 124576 - DNA, 8 bp, Unknown
  misc_feature (1)..( 8): Result.003 file - promoters60/2027233
ttcaatag

SEQ ID NO: 124577 - DNA, 8 bp, Unknown
  misc_feature (1)..( 8): Result.003 file - promoters60/2027233
ttcaataa

SEQ ID NO: 124578 - DNA, 8 bp, Unknown
  misc_feature (1)..( 8): Result.003 file - promoters60/2027233
ttcaatcc

SEQ ID NO: 124579 - DNA, 8 bp, Unknown
  misc_feature (1)..( 8): Result.003 file - promoters60/2027233
ttcaatag

SEQ ID NO: 124580 - DNA, 8 bp, Unknown
  misc_feature (1)..( 8): Result.003 file - promoters60/2027233
atcaatcc

SEQ ID NO: 124581 - DNA, 13 bp, Unknown
  misc_feature (1)..( 13): Result.003 file - promoters60/2027233
aagtatttgatat

SEQ ID NO: 124582 - DNA, 13 bp, Unknown
  misc_feature (1)..( 13): Result.003 file - promoters60/2027233
tgagattggattt

SEQ ID NO: 124583 - DNA, 13 bp, Unknown
  misc_feature (1)..( 13): Result.003 file - promoters60/2027233
tttgatttgattt

SEQ ID NO: 124584 - DNA, 13 bp, Unknown
  misc_feature (1)..( 13): Result.003 file - promoters60/2027233
tgaaattagatcg

SEQ ID NO: 124585 - DNA, 17 bp, Unknown
  misc_feature (1)..( 17): Result.003 file - promoters60/2027233
gacaagtttttatgttt

SEQ ID NO: 124586 - DNA, 17 bp, Unknown
  misc_feature (1)..( 17): Result.003 file - promoters60/2027233
tgaaagtctttttgttt

SEQ ID NO: 124587 - DNA, 17 bp, Unknown
  misc_feature (1)..( 17): Result.003 file - promoters60/2027233
gacaagtttcctctacc

SEQ ID NO: 124588 - DNA, 17 bp, Unknown
  misc_feature (1)..( 17): Result.003 file - promoters60/2027233
ccgatgtgtaggatcgg

SEQ ID NO: 124589 - DNA, 6 bp, Unknown
  misc_feature (1)..( 6): Result.003 file - promoters60/2027253
aataag

SEQ ID NO: 124590 - DNA, 6 bp, Unknown
  misc_feature (1)..( 6): Result.003 file - promoters60/2027253
aataag

SEQ ID NO: 124591 - DNA, 9 bp, Unknown
  misc_feature (1)..( 9): Result.003 file - promoters60/2027253
aaaataaat

SEQ ID NO: 124592 - DNA, 9 bp, Unknown
  misc_feature (1)..( 9): Result.003 file - promoters60/2027253
aaaatgaat

SEQ ID NO: 124593 - DNA, 9 bp, Unknown
  misc_feature (1)..( 9): Result.003 file - promoters60/2027253
aaaaaaaag

SEQ ID NO: 124594 - DNA, 6 bp, Unknown
  misc_feature (1)..( 6): Result.003 file - promoters60/2027253
taattg

SEQ ID NO: 124595 - DNA, 6 bp, Unknown
  misc_feature (1)..( 6): Result.003 file - promoters60/2027253
taattg

SEQ ID NO: 124596 - DNA, 6 bp, Unknown
  misc_feature (1)..( 6): Result.003 file - promoters60/2027253
aaccgt

SEQ ID NO: 124597 - DNA, 6 bp, Unknown
  misc_feature (1)..( 6): Result.003 file - promoters60/2027253
aaccgt

SEQ ID NO: 124598 - DNA, 8 bp, Unknown
  misc_feature (1)..( 8): Result.003 file - promoters60/2027253
ttttaaat

SEQ ID NO: 124599 - DNA, 8 bp, Unknown
  misc_feature (1)..( 8): Result.003 file - promoters60/2027253
tttaaaat

SEQ ID NO: 124600 - DNA, 8 bp, Unknown
  misc_feature (1)..( 8): Result.003 file - promoters60/2027253
tcagttaa

SEQ ID NO: 124601 - DNA, 8 bp, Unknown
  misc_feature (1)..( 8): Result.003 file - promoters60/2027253
tcaattaa

SEQ ID NO: 124602 - DNA, 6 bp, Unknown
  misc_feature (1)..( 6): Result.003 file - promoters60/2027253
tcatgt

SEQ ID NO: 124603 - DNA, 6 bp, Unknown
  misc_feature (1)..( 6): Result.003 file - promoters60/2027253
tcatgt

SEQ ID NO: 124604 - DNA, 8 bp, Unknown
  misc_feature (1)..( 8): Result.003 file - promoters60/2027253
taaacgca

SEQ ID NO: 124605 - DNA, 8 bp, Unknown
  misc_feature (1)..( 8): Result.003 file - promoters60/2027253
taaaagca

SEQ ID NO: 124606 - DNA, 7 bp, Unknown
  misc_feature (1)..( 7): Result.003 file - promoters60/2027253
catttta

SEQ ID NO: 124607 - DNA, 7 bp, Unknown
  misc_feature (1)..( 7): Result.003 file - promoters60/2027253
catatta

SEQ ID NO: 124608 - DNA, 6 bp, Unknown
  misc_feature (1)..( 6): Result.003 file - promoters60/2027253
gataag

SEQ ID NO: 124609 - DNA, 6 bp, Unknown
  misc_feature (1)..( 6): Result.003 file - promoters60/2027253
gataag

SEQ ID NO: 124610 - DNA, 6 bp, Unknown
  misc_feature (1)..( 6): Result.003 file - promoters60/2027253
actaaa

SEQ ID NO: 124611 - DNA, 6 bp, Unknown
  misc_feature (1)..( 6): Result.003 file - promoters60/2027253
actaaa

SEQ ID NO: 124612 - DNA, 8 bp, Unknown
  misc_feature (1)..( 8): Result.003 file - promoters60/2027253
tttttaac

SEQ ID NO: 124613 - DNA, 8 bp, Unknown
  misc_feature (1)..( 8): Result.003 file - promoters60/2027253
tttctaac

SEQ ID NO: 124614 - DNA, 6 bp, Unknown
  misc_feature (1)..( 6): Result.003 file - promoters60/2027253
atacaa

SEQ ID NO: 124615 - DNA, 6 bp, Unknown
  misc_feature (1)..( 6): Result.003 file - promoters60/2027253
atacaa

SEQ ID NO: 124616 - DNA, 6 bp, Unknown
  misc_feature (1)..( 6): Result.003 file - promoters60/2027253
tatata

SEQ ID NO: 124617 - DNA, 6 bp, Unknown
  misc_feature (1)..( 6): Result.003 file - promoters60/2027253
tatata

SEQ ID NO: 124618 - DNA, 6 bp, Unknown
  misc_feature (1)..( 6): Result.003 file - promoters60/2027268
ttaaca

SEQ ID NO: 124619 - DNA, 6 bp, Unknown
  misc_feature (1)..( 6): Result.003 file - promoters60/2027268
ttaaca

SEQ ID NO: 124620 - DNA, 7 bp, Unknown
  misc_feature (1)..( 7): Result.003 file - promoters60/2027268
caatttt

SEQ ID NO: 124621 - DNA, 7 bp, Unknown
  misc_feature (1)..( 7): Result.003 file - promoters60/2027268
caatttt

SEQ ID NO: 124622 - DNA, 11 bp, Unknown
  misc_feature (1)..( 11): Result.003 file - promoters60/2027268
ttttgctaaaa

SEQ ID NO: 124623 - DNA, 11 bp, Unknown
  misc_feature (1)..( 11): Result.003 file - promoters60/2027268
tttttctaaaa

SEQ ID NO: 124624 - DNA, 11 bp, Unknown
  misc_feature (1)..( 11): Result.003 file - promoters60/2027268
atctgctaatg

SEQ ID NO: 124625 - DNA, 8 bp, Unknown
  misc_feature (1)..( 8): Result.003 file - promoters60/2027268
agattact

SEQ ID NO: 124626 - DNA, 8 bp, Unknown
  misc_feature (1)..( 8): Result.003 file - promoters60/2027268
agattact

SEQ ID NO: 124627 - DNA, 7 bp, Unknown
  misc_feature (1)..( 7): Result.003 file - promoters60/2027268
tttgatt

SEQ ID NO: 124628 - DNA, 7 bp, Unknown
  misc_feature (1)..( 7): Result.003 file - promoters60/2027268
tttgatt

SEQ ID NO: 124629 - DNA, 7 bp, Unknown
  misc_feature (1)..( 7): Result.003 file - promoters60/2027268
taaaaga

SEQ ID NO: 124630 - DNA, 7 bp, Unknown
  misc_feature (1)..( 7): Result.003 file - promoters60/2027268
taaaaga

SEQ ID NO: 124631 - DNA, 10 bp, Unknown
  misc_feature (1)..( 10): Result.003 file - promoters60/2027268
aacagaataa

SEQ ID NO: 124632 - DNA, 10 bp, Unknown
  misc_feature (1)..( 10): Result.003 file - promoters60/2027268
aacagagtaa

SEQ ID NO: 124633 - DNA, 8 bp, Unknown
  misc_feature (1)..( 8): Result.003 file - promoters60/2027268
ccggatcg

SEQ ID NO: 124634 - DNA, 8 bp, Unknown
  misc_feature (1)..( 8): Result.003 file - promoters60/2027268
ccggttcg

SEQ ID NO: 124635 - DNA, 8 bp, Unknown
  misc_feature (1)..( 8): Result.003 file - promoters60/2027268
accctaga

SEQ ID NO: 124636 - DNA, 8 bp, Unknown
  misc_feature (1)..( 8): Result.003 file - promoters60/2027268
accgtaga

SEQ ID NO: 124637 - DNA, 7 bp, Unknown
  misc_feature (1)..( 7): Result.003 file - promoters60/2027268
agagaca

SEQ ID NO: 124638 - DNA, 7 bp, Unknown
  misc_feature (1)..( 7): Result.003 file - promoters60/2027268
agataca

SEQ ID NO: 124639 - DNA, 6 bp, Unknown
  misc_feature (1)..( 6): Result.003 file - promoters60/2027268
attata

SEQ ID NO: 124640 - DNA, 6 bp, Unknown
  misc_feature (1)..( 6): Result.003 file - promoters60/2027268
attata

SEQ ID NO: 124641 - DNA, 7 bp, Unknown
  misc_feature (1)..( 7): Result.003 file - promoters60/2027268
tttaaag

SEQ ID NO: 124642 - DNA, 7 bp, Unknown
  misc_feature (1)..( 7): Result.003 file - promoters60/2027268
tttcaag

SEQ ID NO: 124643 - DNA, 13 bp, Unknown
  misc_feature (1)..( 13): Result.003 file - promoters60/2027268
ttgaatcaatatt

SEQ ID NO: 124644 - DNA, 13 bp, Unknown
  misc_feature (1)..( 13): Result.003 file - promoters60/2027268
ttgattcaaaatt

SEQ ID NO: 124645 - DNA, 7 bp, Unknown
  misc_feature (1)..( 7): Result.003 file - promoters60/2027268
tggattt

SEQ ID NO: 124646 - DNA, 7 bp, Unknown
  misc_feature (1)..( 7): Result.003 file - promoters60/2027268
tggattt

SEQ ID NO: 124647 - DNA, 6 bp, Unknown
  misc_feature (1)..( 6): Result.003 file - promoters60/2027268
aagatt

SEQ ID NO: 124648 - DNA, 6 bp, Unknown
  misc_feature (1)..( 6): Result.003 file - promoters60/2027268
aagatt

SEQ ID NO: 124649 - DNA, 6 bp, Unknown
  misc_feature (1)..( 6): Result.003 file - promoters60/2027268
ttggtt

SEQ ID NO: 124650 - DNA, 6 bp, Unknown
  misc_feature (1)..( 6): Result.003 file - promoters60/2027268
ttggtt

SEQ ID NO: 124651 - DNA, 6 bp, Unknown
  misc_feature (1)..( 6): Result.003 file - promoters60/2027268
ttaacc

SEQ ID NO: 124652 - DNA, 6 bp, Unknown
  misc_feature (1)..( 6): Result.003 file - promoters60/2027268
ttaacc

SEQ ID NO: 124653 - DNA, 7 bp, Unknown
  misc_feature (1)..( 7): Result.003 file - promoters60/2027268
ctcactc

SEQ ID NO: 124654 - DNA, 7 bp, Unknown
  misc_feature (1)..( 7): Result.003 file - promoters60/2027268
ctcgctc

SEQ ID NO: 124655 - DNA, 6 bp, Unknown
  misc_feature (1)..( 6): Result.003 file - promoters60/2027268
atttct

SEQ ID NO: 124656 - DNA, 6 bp, Unknown
  misc_feature (1)..( 6): Result.003 file - promoters60/2027268
atttct

SEQ ID NO: 124657 - DNA, 7 bp, Unknown
  misc_feature (1)..( 7): Result.003 file - promoters60/2028945
ttgaaat

SEQ ID NO: 124658 - DNA, 7 bp, Unknown
  misc_feature (1)..( 7): Result.003 file - promoters60/2028945
ttgaaat

SEQ ID NO: 124659 - DNA, 7 bp, Unknown
  misc_feature (1)..( 7): Result.003 file - promoters60/2028945
ctgaaat

SEQ ID NO: 124660 - DNA, 13 bp, Unknown
  misc_feature (1)..( 13): Result.003 file - promoters60/2028945
taaaaatttaaat

SEQ ID NO: 124661 - DNA, 13 bp, Unknown
  misc_feature (1)..( 13): Result.003 file - promoters60/2028945
taaatatttaaat

SEQ ID NO: 124662 - DNA, 13 bp, Unknown
  misc_feature (1)..( 13): Result.003 file - promoters60/2028945
agcagttttaaaa

SEQ ID NO: 124663 - DNA, 6 bp, Unknown
  misc_feature (1)..( 6): Result.003 file - promoters60/2028945
cataaa

SEQ ID NO: 124664 - DNA, 6 bp, Unknown
  misc_feature (1)..( 6): Result.003 file - promoters60/2028945
cataaa

SEQ ID NO: 124665 - DNA, 7 bp, Unknown
  misc_feature (1)..( 7): Result.003 file - promoters60/2028945
cattaaa

SEQ ID NO: 124666 - DNA, 7 bp, Unknown
  misc_feature (1)..( 7): Result.003 file - promoters60/2028945
atgaata

SEQ ID NO: 124667 - DNA, 7 bp, Unknown
  misc_feature (1)..( 7): Result.003 file - promoters60/2028945
atgcata

SEQ ID NO: 124668 - DNA, 8 bp, Unknown
  misc_feature (1)..( 8): Result.003 file - promoters60/2028945
tatgaaaa

SEQ ID NO: 124669 - DNA, 8 bp, Unknown
  misc_feature (1)..( 8): Result.003 file - promoters60/2028945
tatgaaaa

SEQ ID NO: 124670 - DNA, 7 bp, Unknown
  misc_feature (1)..( 7): Result.003 file - promoters60/2028945
atactat

SEQ ID NO: 124671 - DNA, 7 bp, Unknown
  misc_feature (1)..( 7): Result.003 file - promoters60/2028945
atagtat

SEQ ID NO: 124672 - DNA, 9 bp, Unknown
  misc_feature (1)..( 9): Result.003 file - promoters60/2028945
aacatttat

SEQ ID NO: 124673 - DNA, 9 bp, Unknown
  misc_feature (1)..( 9): Result.003 file - promoters60/2028945
aacatttat

SEQ ID NO: 124674 - DNA, 8 bp, Unknown
  misc_feature (1)..( 8): Result.003 file - promoters60/2028945
tttaattt

SEQ ID NO: 124675 - DNA, 8 bp, Unknown
  misc_feature (1)..( 8): Result.003 file - promoters60/2028945
attatttt

SEQ ID NO: 124676 - DNA, 8 bp, Unknown
  misc_feature (1)..( 8): Result.003 file - promoters60/2028945
tttaattt

SEQ ID NO: 124677 - DNA, 8 bp, Unknown
  misc_feature (1)..( 8): Result.003 file - promoters60/2028945
ttaatgca

SEQ ID NO: 124678 - DNA, 8 bp, Unknown
  misc_feature (1)..( 8): Result.003 file - promoters60/2028945
ttaaagca

SEQ ID NO: 124679 - DNA, 6 bp, Unknown
  misc_feature (1)..( 6): Result.003 file - promoters60/2028945
gttaaa

SEQ ID NO: 124680 - DNA, 6 bp, Unknown
  misc_feature (1)..( 6): Result.003 file - promoters60/2028945
gttaaa

SEQ ID NO: 124681 - DNA, 8 bp, Unknown
  misc_feature (1)..( 8): Result.003 file - promoters60/2028945
ttttgttt

SEQ ID NO: 124682 - DNA, 8 bp, Unknown
  misc_feature (1)..( 8): Result.003 file - promoters60/2028945
ttttattt

SEQ ID NO: 124683 - DNA, 8 bp, Unknown
  misc_feature (1)..( 8): Result.003 file - promoters60/2028945
ctctcaat

SEQ ID NO: 124684 - DNA, 8 bp, Unknown
  misc_feature (1)..( 8): Result.003 file - promoters60/2028945
atcttaat

SEQ ID NO: 124685 - DNA, 8 bp, Unknown
  misc_feature (1)..( 8): Result.003 file - promoters60/2028945
atcataat

SEQ ID NO: 124686 - DNA, 6 bp, Unknown
  misc_feature (1)..( 6): Result.003 file - promoters60/2028945
tttttc

SEQ ID NO: 124687 - DNA, 6 bp, Unknown
  misc_feature (1)..( 6): Result.003 file - promoters60/2028945
tttttc

SEQ ID NO: 124688 - DNA, 6 bp, Unknown
  misc_feature (1)..( 6): Result.003 file - promoters60/2028945
ttaatt

SEQ ID NO: 124689 - DNA, 6 bp, Unknown
  misc_feature (1)..( 6): Result.003 file - promoters60/2028945
ttaatt

SEQ ID NO: 124690 - DNA, 8 bp, Unknown
  misc_feature (1)..( 8): Result.003 file - promoters60/2028945
aaaaatta

SEQ ID NO: 124691 - DNA, 8 bp, Unknown
  misc_feature (1)..( 8): Result.003 file - promoters60/2028945
aaacatta

SEQ ID NO: 124692 - DNA, 8 bp, Unknown
  misc_feature (1)..( 8): Result.003 file - promoters60/2028945
gaacttta

SEQ ID NO: 124693 - DNA, 6 bp, Unknown
  misc_feature (1)..( 6): Result.003 file - promoters60/2028945
atcact

SEQ ID NO: 124694 - DNA, 6 bp, Unknown
  misc_feature (1)..( 6): Result.003 file - promoters60/2028945
atcact

SEQ ID NO: 124695 - DNA, 8 bp, Unknown
  misc_feature (1)..( 8): Result.003 file - promoters60/2028945
aaaatttt

SEQ ID NO: 124696 - DNA, 8 bp, Unknown
  misc_feature (1)..( 8): Result.003 file - promoters60/2028945
aaaacttt

SEQ ID NO: 124697 - DNA, 7 bp, Unknown
  misc_feature (1)..( 7): Result.003 file - promoters60/2028945
tttttaa

SEQ ID NO: 124698 - DNA, 7 bp, Unknown
  misc_feature (1)..( 7): Result.003 file - promoters60/2028945
tttataa

SEQ ID NO: 124699 - DNA, 6 bp, Unknown
  misc_feature (1)..( 6): Result.003 file - promoters60/2028945
taacac

SEQ ID NO: 124700 - DNA, 6 bp, Unknown
  misc_feature (1)..( 6): Result.003 file - promoters60/2028945
taacac

SEQ ID NO: 124701 - DNA, 6 bp, Unknown
  misc_feature (1)..( 6): Result.003 file - promoters60/2028945
accaat

SEQ ID NO: 124702 - DNA, 6 bp, Unknown
  misc_feature (1)..( 6): Result.003 file - promoters60/2028945
accaat

SEQ ID NO: 124703 - DNA, 8 bp, Unknown
  misc_feature (1)..( 8): Result.003 file - promoters60/2028985
ttttggaa

SEQ ID NO: 124704 - DNA, 8 bp, Unknown
  misc_feature (1)..( 8): Result.003 file - promoters60/2028985
ttttagaa

SEQ ID NO: 124705 - DNA, 6 bp, Unknown
  misc_feature (1)..( 6): Result.003 file - promoters60/2028985
tttaat

SEQ ID NO: 124706 - DNA, 6 bp, Unknown
  misc_feature (1)..( 6): Result.003 file - promoters60/2028985
tttaat

SEQ ID NO: 124707 - DNA, 7 bp, Unknown
  misc_feature (1)..( 7): Result.003 file - promoters60/2028985
tgaattc

SEQ ID NO: 124708 - DNA, 7 bp, Unknown
  misc_feature (1)..( 7): Result.003 file - promoters60/2028985
tgatttc

SEQ ID NO: 124709 - DNA, 10 bp, Unknown
  misc_feature (1)..( 10): Result.003 file - promoters60/2028985
gtttagtgaa

SEQ ID NO: 124710 - DNA, 10 bp, Unknown
  misc_feature (1)..( 10): Result.003 file - promoters60/2028985
gttttgtgaa

SEQ ID NO: 124711 - DNA, 6 bp, Unknown
  misc_feature (1)..( 6): Result.003 file - promoters60/2028985
aagtaa

SEQ ID NO: 124712 - DNA, 6 bp, Unknown
  misc_feature (1)..( 6): Result.003 file - promoters60/2028985
aagtaa

SEQ ID NO: 124713 - DNA, 7 bp, Unknown
  misc_feature (1)..( 7): Result.003 file - promoters60/2028985
taacaag

SEQ ID NO: 124714 - DNA, 7 bp, Unknown
  misc_feature (1)..( 7): Result.003 file - promoters60/2028985
taaaaag

SEQ ID NO: 124715 - DNA, 11 bp, Unknown
  misc_feature (1)..( 11): Result.003 file - promoters60/2028985
tgatgaattga

SEQ ID NO: 124716 - DNA, 11 bp, Unknown
  misc_feature (1)..( 11): Result.003 file - promoters60/2028985
tgatgacttga

SEQ ID NO: 124717 - DNA, 7 bp, Unknown
  misc_feature (1)..( 7): Result.003 file - promoters60/2028985
gtgaatg

SEQ ID NO: 124718 - DNA, 7 bp, Unknown
  misc_feature (1)..( 7): Result.003 file - promoters60/2028985
gtggatg

SEQ ID NO: 124719 - DNA, 6 bp, Unknown
  misc_feature (1)..( 6): Result.003 file - promoters60/2028985
tctttg

SEQ ID NO: 124720 - DNA, 6 bp, Unknown
  misc_feature (1)..( 6): Result.003 file - promoters60/2028985
tctttg

SEQ ID NO: 124721 - DNA, 6 bp, Unknown
  misc_feature (1)..( 6): Result.003 file - promoters60/2028985
taatgt

SEQ ID NO: 124722 - DNA, 6 bp, Unknown
  misc_feature (1)..( 6): Result.003 file - promoters60/2028985
taatgt

SEQ ID NO: 124723 - DNA, 6 bp, Unknown
  misc_feature (1)..( 6): Result.003 file - promoters60/2028985
tataat

SEQ ID NO: 124724 - DNA, 6 bp, Unknown
  misc_feature (1)..( 6): Result.003 file - promoters60/2028985
tataat

SEQ ID NO: 124725 - DNA, 8 bp, Unknown
  misc_feature (1)..( 8): Result.003 file - promoters60/2028985
caaaccgt

SEQ ID NO: 124726 - DNA, 8 bp, Unknown
  misc_feature (1)..( 8): Result.003 file - promoters60/2028985
caaaccgt

SEQ ID NO: 124727 - DNA, 8 bp, Unknown
  misc_feature (1)..( 8): Result.003 file - promoters60/2028985
aacatagt

SEQ ID NO: 124728 - DNA, 8 bp, Unknown
  misc_feature (1)..( 8): Result.003 file - promoters60/2028985
aacatagt

SEQ ID NO: 124729 - DNA, 8 bp, Unknown
  misc_feature (1)..( 8): Result.003 file - promoters60/2028985
tcaaaaaa

SEQ ID NO: 124730 - DNA, 8 bp, Unknown
  misc_feature (1)..( 8): Result.003 file - promoters60/2028985
tcaaaaaa

SEQ ID NO: 124731 - DNA, 7 bp, Unknown
  misc_feature (1)..( 7): Result.003 file - promoters60/2028985
agtgcgg

SEQ ID NO: 124732 - DNA, 7 bp, Unknown
  misc_feature (1)..( 7): Result.003 file - promoters60/2028985
agttcgg

SEQ ID NO: 124733 - DNA, 9 bp, Unknown
  misc_feature (1)..( 9): Result.003 file - promoters60/2028993
attgctgca

SEQ ID NO: 124734 - DNA, 9 bp, Unknown
  misc_feature (1)..( 9): Result.003 file - promoters60/2028993
attactgca

SEQ ID NO: 124735 - DNA, 11 bp, Unknown
  misc_feature (1)..( 11): Result.003 file - promoters60/2028993
ttcttaaatgg

SEQ ID NO: 124736 - DNA, 11 bp, Unknown
  misc_feature (1)..( 11): Result.003 file - promoters60/2028993
ttcttacatgg

SEQ ID NO: 124737 - DNA, 8 bp, Unknown
  misc_feature (1)..( 8): Result.003 file - promoters60/2028993
gtcagaaa

SEQ ID NO: 124738 - DNA, 8 bp, Unknown
  misc_feature (1)..( 8): Result.003 file - promoters60/2028993
gtcataaa

SEQ ID NO: 124739 - DNA, 9 bp, Unknown
  misc_feature (1)..( 9): Result.003 file - promoters60/2028993
attaaccaa

SEQ ID NO: 124740 - DNA, 9 bp, Unknown
  misc_feature (1)..( 9): Result.003 file - promoters60/2028993
attcacctc

SEQ ID NO: 124741 - DNA, 9 bp, Unknown
  misc_feature (1)..( 9): Result.003 file - promoters60/2028993
cttaaccaa

SEQ ID NO: 124742 - DNA, 13 bp, Unknown
  misc_feature (1)..( 13): Result.003 file - promoters60/2028993
ttactaaaattac

SEQ ID NO: 124743 - DNA, 13 bp, Unknown
  misc_feature (1)..( 13): Result.003 file - promoters60/2028993
ttactaaaatata

SEQ ID NO: 124744 - DNA, 13 bp, Unknown
  misc_feature (1)..( 13): Result.003 file - promoters60/2028993
aaatagaaattta

SEQ ID NO: 124745 - DNA, 7 bp, Unknown
  misc_feature (1)..( 7): Result.003 file - promoters60/2028993
attataa

SEQ ID NO: 124746 - DNA, 7 bp, Unknown
  misc_feature (1)..( 7): Result.003 file - promoters60/2028993
attataa

SEQ ID NO: 124747 - DNA, 6 bp, Unknown
  misc_feature (1)..( 6): Result.003 file - promoters60/2028993
cactat

SEQ ID NO: 124748 - DNA, 6 bp, Unknown
  misc_feature (1)..( 6): Result.003 file - promoters60/2028993
cactat

SEQ ID NO: 124749 - DNA, 7 bp, Unknown
  misc_feature (1)..( 7): Result.003 file - promoters60/2028993
taaaaat

SEQ ID NO: 124750 - DNA, 7 bp, Unknown
  misc_feature (1)..( 7): Result.003 file - promoters60/2028993
taataat

SEQ ID NO: 124751 - DNA, 7 bp, Unknown
  misc_feature (1)..( 7): Result.003 file - promoters60/2028993
taagttg

SEQ ID NO: 124752 - DNA, 7 bp, Unknown
  misc_feature (1)..( 7): Result.003 file - promoters60/2028993
taatttg

SEQ ID NO: 124753 - DNA, 8 bp, Unknown
  misc_feature (1)..( 8): Result.003 file - promoters60/2028993
ataaacca

SEQ ID NO: 124754 - DNA, 8 bp, Unknown
  misc_feature (1)..( 8): Result.003 file - promoters60/2028993
atatacca

SEQ ID NO: 124755 - DNA, 7 bp, Unknown
  misc_feature (1)..( 7): Result.003 file - promoters60/2028993
aaattta

SEQ ID NO: 124756 - DNA, 7 bp, Unknown
  misc_feature (1)..( 7): Result.003 file - promoters60/2028993
aaaatta

SEQ ID NO: 124757 - DNA, 6 bp, Unknown
  misc_feature (1)..( 6): Result.003 file - promoters60/2028993
aataag

SEQ ID NO: 124758 - DNA, 6 bp, Unknown
  misc_feature (1)..( 6): Result.003 file - promoters60/2028993
aataag

SEQ ID NO: 124759 - DNA, 7 bp, Unknown
  misc_feature (1)..( 7): Result.003 file - promoters60/2028993
taacaac

SEQ ID NO: 124760 - DNA, 7 bp, Unknown
  misc_feature (1)..( 7): Result.003 file - promoters60/2028993
taaaaac

SEQ ID NO: 124761 - DNA, 8 bp, Unknown
  misc_feature (1)..( 8): Result.003 file - promoters60/2028993
tgataata

SEQ ID NO: 124762 - DNA, 8 bp, Unknown
  misc_feature (1)..( 8): Result.003 file - promoters60/2028993
tgaaaata

SEQ ID NO: 124763 - DNA, 6 bp, Unknown
  misc_feature (1)..( 6): Result.003 file - promoters60/2028993
aagcaa

SEQ ID NO: 124764 - DNA, 6 bp, Unknown
  misc_feature (1)..( 6): Result.003 file - promoters60/2028993
aagcaa

SEQ ID NO: 124765 - DNA, 10 bp, Unknown
  misc_feature (1)..( 10): Result.003 file - promoters60/2028993
ccacaaaaaa

SEQ ID NO: 124766 - DNA, 10 bp, Unknown
  misc_feature (1)..( 10): Result.003 file - promoters60/2028993
ccaaaaaaaa

SEQ ID NO: 124767 - DNA, 10 bp, Unknown
  misc_feature (1)..( 10): Result.003 file - promoters60/2028993
tgtaatgctt

SEQ ID NO: 124768 - DNA, 10 bp, Unknown
  misc_feature (1)..( 10): Result.003 file - promoters60/2028993
tgtaattctt

SEQ ID NO: 124769 - DNA, 6 bp, Unknown
  misc_feature (1)..( 6): Result.003 file - promoters60/2028993
taatta

SEQ ID NO: 124770 - DNA, 6 bp, Unknown
  misc_feature (1)..( 6): Result.003 file - promoters60/2028993
taatta

SEQ ID NO: 124771 - DNA, 7 bp, Unknown
  misc_feature (1)..( 7): Result.003 file - promoters60/2028997
attttgt

SEQ ID NO: 124772 - DNA, 7 bp, Unknown
  misc_feature (1)..( 7): Result.003 file - promoters60/2028997
attctgt

SEQ ID NO: 124773 - DNA, 7 bp, Unknown
  misc_feature (1)..( 7): Result.003 file - promoters60/2028997
cttctat

SEQ ID NO: 124774 - DNA, 7 bp, Unknown
  misc_feature (1)..( 7): Result.003 file - promoters60/2028997
cttgtat

SEQ ID NO: 124775 - DNA, 7 bp, Unknown
  misc_feature (1)..( 7): Result.003 file - promoters60/2028997
tttcatt

SEQ ID NO: 124776 - DNA, 7 bp, Unknown
  misc_feature (1)..( 7): Result.003 file - promoters60/2028997
tttgatt

SEQ ID NO: 124777 - DNA, 7 bp, Unknown
  misc_feature (1)..( 7): Result.003 file - promoters60/2028997
gtatctt

SEQ ID NO: 124778 - DNA, 7 bp, Unknown
  misc_feature (1)..( 7): Result.003 file - promoters60/2028997
gtatctt

SEQ ID NO: 124779 - DNA, 6 bp, Unknown
  misc_feature (1)..( 6): Result.003 file - promoters60/2028997
catcat

SEQ ID NO: 124780 - DNA, 6 bp, Unknown
  misc_feature (1)..( 6): Result.003 file - promoters60/2028997
catcat

SEQ ID NO: 124781 - DNA, 6 bp, Unknown
  misc_feature (1)..( 6): Result.003 file - promoters60/2028997
aagaaa

SEQ ID NO: 124782 - DNA, 6 bp, Unknown
  misc_feature (1)..( 6): Result.003 file - promoters60/2028997
aagaaa

SEQ ID NO: 124783 - DNA, 7 bp, Unknown
  misc_feature (1)..( 7): Result.003 file - promoters60/2028997
aaagaaa

SEQ ID NO: 124784 - DNA, 7 bp, Unknown
  misc_feature (1)..( 7): Result.003 file - promoters60/2028997
aaagaaa

SEQ ID NO: 124785 - DNA, 9 bp, Unknown
  misc_feature (1)..( 9): Result.003 file - promoters60/2028997
ctcggtgat

SEQ ID NO: 124786 - DNA, 9 bp, Unknown
  misc_feature (1)..( 9): Result.003 file - promoters60/2028997
ctcagtgat

SEQ ID NO: 124787 - DNA, 7 bp, Unknown
  misc_feature (1)..( 7): Result.003 file - promoters60/2028997
gttcttt

SEQ ID NO: 124788 - DNA, 7 bp, Unknown
  misc_feature (1)..( 7): Result.003 file - promoters60/2028997
gtttttt

SEQ ID NO: 124789 - DNA, 7 bp, Unknown
  misc_feature (1)..( 7): Result.003 file - promoters60/2028997
attggaa

SEQ ID NO: 124790 - DNA, 7 bp, Unknown
  misc_feature (1)..( 7): Result.003 file - promoters60/2028997
attggaa

SEQ ID NO: 124791 - DNA, 6 bp, Unknown
  misc_feature (1)..( 6): Result.003 file - promoters60/2028997
aaggta

SEQ ID NO: 124792 - DNA, 6 bp, Unknown
  misc_feature (1)..( 6): Result.003 file - promoters60/2028997
aaggta

SEQ ID NO: 124793 - DNA, 8 bp, Unknown
  misc_feature (1)..( 8): Result.003 file - promoters60/2029009
acttaaaa

SEQ ID NO: 124794 - DNA, 8 bp, Unknown
  misc_feature (1)..( 8): Result.003 file - promoters60/2029009
ttttaaaa

SEQ ID NO: 124795 - DNA, 8 bp, Unknown
  misc_feature (1)..( 8): Result.003 file - promoters60/2029009
actgaaat

SEQ ID NO: 124796 - DNA, 9 bp, Unknown
  misc_feature (1)..( 9): Result.003 file - promoters60/2029009
tatactttt

SEQ ID NO: 124797 - DNA, 9 bp, Unknown
  misc_feature (1)..( 9): Result.003 file - promoters60/2029009
tattctttt

SEQ ID NO: 124798 - DNA, 7 bp, Unknown
  misc_feature (1)..( 7): Result.003 file - promoters60/2029009
acattaa

SEQ ID NO: 124799 - DNA, 7 bp, Unknown
  misc_feature (1)..( 7): Result.003 file - promoters60/2029009
acattaa

SEQ ID NO: 124800 - DNA, 7 bp, Unknown
  misc_feature (1)..( 7): Result.003 file - promoters60/2029009
attttgg

SEQ ID NO: 124801 - DNA, 7 bp, Unknown
  misc_feature (1)..( 7): Result.003 file - promoters60/2029009
attttgg

SEQ ID NO: 124802 - DNA, 7 bp, Unknown
  misc_feature (1)..( 7): Result.003 file - promoters60/2029009
aagaaaa

SEQ ID NO: 124803 - DNA, 7 bp, Unknown
  misc_feature (1)..( 7): Result.003 file - promoters60/2029009
aagaaaa

SEQ ID NO: 124804 - DNA, 7 bp, Unknown
  misc_feature (1)..( 7): Result.003 file - promoters60/2029009
aatcaaa

SEQ ID NO: 124805 - DNA, 7 bp, Unknown
  misc_feature (1)..( 7): Result.003 file - promoters60/2029009
aataaaa

SEQ ID NO: 124806 - DNA, 6 bp, Unknown
  misc_feature (1)..( 6): Result.003 file - promoters60/2029009
aaaaat

SEQ ID NO: 124807 - DNA, 6 bp, Unknown
  misc_feature (1)..( 6): Result.003 file - promoters60/2029009
aaaaat

SEQ ID NO: 124808 - DNA, 7 bp, Unknown
  misc_feature (1)..( 7): Result.003 file - promoters60/2029009
tttatcc

SEQ ID NO: 124809 - DNA, 7 bp, Unknown
  misc_feature (1)..( 7): Result.003 file - promoters60/2029009
tttgtcc

SEQ ID NO: 124810 - DNA, 6 bp, Unknown
  misc_feature (1)..( 6): Result.003 file - promoters60/2029009
ttagaa

SEQ ID NO: 124811 - DNA, 6 bp, Unknown
  misc_feature (1)..( 6): Result.003 file - promoters60/2029009
ttagaa

SEQ ID NO: 124812 - DNA, 6 bp, Unknown
  misc_feature (1)..( 6): Result.003 file - promoters60/2029009
ttaaca

SEQ ID NO: 124813 - DNA, 6 bp, Unknown
  misc_feature (1)..( 6): Result.003 file - promoters60/2029009
ttaaca

SEQ ID NO: 124814 - DNA, 6 bp, Unknown
  misc_feature (1)..( 6): Result.003 file - promoters60/2029009
taaaac

SEQ ID NO: 124815 - DNA, 6 bp, Unknown
  misc_feature (1)..( 6): Result.003 file - promoters60/2029009
taaaac

SEQ ID NO: 124816 - DNA, 6 bp, Unknown
  misc_feature (1)..( 6): Result.003 file - promoters60/2029009
tcaact

SEQ ID NO: 124817 - DNA, 6 bp, Unknown
  misc_feature (1)..( 6): Result.003 file - promoters60/2029009
tcaact

SEQ ID NO: 124818 - DNA, 6 bp, Unknown
  misc_feature (1)..( 6): Result.003 file - promoters60/2029009
aaaaaa

SEQ ID NO: 124819 - DNA, 6 bp, Unknown
  misc_feature (1)..( 6): Result.003 file - promoters60/2029009
aaaaaa

SEQ ID NO: 124820 - DNA, 6 bp, Unknown
  misc_feature (1)..( 6): Result.003 file - promoters60/2029009
aaaaat

SEQ ID NO: 124821 - DNA, 6 bp, Unknown
  misc_feature (1)..( 6): Result.003 file - promoters60/2029009
aaaaat

SEQ ID NO: 124822 - DNA, 6 bp, Unknown
  misc_feature (1)..( 6): Result.003 file - promoters60/2029009
aatgaa

SEQ ID NO: 124823 - DNA, 6 bp, Unknown
  misc_feature (1)..( 6): Result.003 file - promoters60/2029009
aatgaa

SEQ ID NO: 124824 - DNA, 8 bp, Unknown
  misc_feature (1)..( 8): Result.003 file - promoters60/2029009
gaatacga

SEQ ID NO: 124825 - DNA, 8 bp, Unknown
  misc_feature (1)..( 8): Result.003 file - promoters60/2029009
gaatccga

SEQ ID NO: 124826 - DNA, 6 bp, Unknown
  misc_feature (1)..( 6): Result.003 file - promoters60/2029009
aacata

SEQ ID NO: 124827 - DNA, 6 bp, Unknown
  misc_feature (1)..( 6): Result.003 file - promoters60/2029009
aacata

SEQ ID NO: 124828 - DNA, 6 bp, Unknown
  misc_feature (1)..( 6): Result.003 file - promoters60/2029009
cttgat

SEQ ID NO: 124829 - DNA, 6 bp, Unknown
  misc_feature (1)..( 6): Result.003 file - promoters60/2029009
cttgat

SEQ ID NO: 124830 - DNA, 7 bp, Unknown
  misc_feature (1)..( 7): Result.003 file - promoters60/2029009
agggtta

SEQ ID NO: 124831 - DNA, 7 bp, Unknown
  misc_feature (1)..( 7): Result.003 file - promoters60/2029009
aggatta

SEQ ID NO: 124832 - DNA, 9 bp, Unknown
  misc_feature (1)..( 9): Result.003 file - promoters60/2029016
ttaaaatca

SEQ ID NO: 124833 - DNA, 9 bp, Unknown
  misc_feature (1)..( 9): Result.003 file - promoters60/2029016
agtaaatca

SEQ ID NO: 124834 - DNA, 9 bp, Unknown
  misc_feature (1)..( 9): Result.003 file - promoters60/2029016
aataaattg

SEQ ID NO: 124835 - DNA, 7 bp, Unknown
  misc_feature (1)..( 7): Result.003 file - promoters60/2029016
ttgtaaa

SEQ ID NO: 124836 - DNA, 7 bp, Unknown
  misc_feature (1)..( 7): Result.003 file - promoters60/2029016
ttgtaat

SEQ ID NO: 124837 - DNA, 7 bp, Unknown
  misc_feature (1)..( 7): Result.003 file - promoters60/2029016
ttggaaa

SEQ ID NO: 124838 - DNA, 10 bp, Unknown
  misc_feature (1)..( 10): Result.003 file - promoters60/2029016
tcatgttgtg

SEQ ID NO: 124839 - DNA, 10 bp, Unknown
  misc_feature (1)..( 10): Result.003 file - promoters60/2029016
tcaagttaaa

SEQ ID NO: 124840 - DNA, 10 bp, Unknown
  misc_feature (1)..( 10): Result.003 file - promoters60/2029016
aaaagtgaaa

SEQ ID NO: 124841 - DNA, 8 bp, Unknown
  misc_feature (1)..( 8): Result.003 file - promoters60/2029016
atagtttg

SEQ ID NO: 124842 - DNA, 8 bp, Unknown
  misc_feature (1)..( 8): Result.003 file - promoters60/2029016
ttagtttt

SEQ ID NO: 124843 - DNA, 8 bp, Unknown
  misc_feature (1)..( 8): Result.003 file - promoters60/2029016
ttattttt

SEQ ID NO: 124844 - DNA, 11 bp, Unknown
  misc_feature (1)..( 11): Result.003 file - promoters60/2029016
tatctaataaa

SEQ ID NO: 124845 - DNA, 11 bp, Unknown
  misc_feature (1)..( 11): Result.003 file - promoters60/2029016
caaataataaa

SEQ ID NO: 124846 - DNA, 11 bp, Unknown
  misc_feature (1)..( 11): Result.003 file - promoters60/2029016
caattaagaaa

SEQ ID NO: 124847 - DNA, 8 bp, Unknown
  misc_feature (1)..( 8): Result.003 file - promoters60/2029016
aaaaatct

SEQ ID NO: 124848 - DNA, 8 bp, Unknown
  misc_feature (1)..( 8): Result.003 file - promoters60/2029016
aaagatca

SEQ ID NO: 124849 - DNA, 8 bp, Unknown
  misc_feature (1)..( 8): Result.003 file - promoters60/2029016
ttagatca

SEQ ID NO: 124850 - DNA, 11 bp, Unknown
  misc_feature (1)..( 11): Result.003 file - promoters60/2029031
gaaagttcatc

SEQ ID NO: 124851 - DNA, 11 bp, Unknown
  misc_feature (1)..( 11): Result.003 file - promoters60/2029031
caaagttgtag

SEQ ID NO: 124852 - DNA, 11 bp, Unknown
  misc_feature (1)..( 11): Result.003 file - promoters60/2029031
aaaagtttttg

SEQ ID NO: 124853 - DNA, 11 bp, Unknown
  misc_feature (1)..( 11): Result.003 file - promoters60/2029031
caaaattgaag

SEQ ID NO: 124854 - DNA, 11 bp, Unknown
  misc_feature (1)..( 11): Result.003 file - promoters60/2029031
gaaaatagttt

SEQ ID NO: 124855 - DNA, 11 bp, Unknown
  misc_feature (1)..( 11): Result.003 file - promoters60/2029031
tttagttttgt

SEQ ID NO: 124856 - DNA, 12 bp, Unknown
  misc_feature (1)..( 12): Result.003 file - promoters60/2029033
cggctttttcta

SEQ ID NO: 124857 - DNA, 12 bp, Unknown
  misc_feature (1)..( 12): Result.003 file - promoters60/2029033
gattctttccta

SEQ ID NO: 124858 - DNA, 12 bp, Unknown
  misc_feature (1)..( 12): Result.003 file - promoters60/2029033
atttatttcctt

SEQ ID NO: 124859 - DNA, 12 bp, Unknown
  misc_feature (1)..( 12): Result.003 file - promoters60/2029033
atttatttactt

SEQ ID NO: 124860 - DNA, 13 bp, Unknown
  misc_feature (1)..( 13): Result.003 file - promoters60/2029033
gattattcattta

SEQ ID NO: 124861 - DNA, 13 bp, Unknown
  misc_feature (1)..( 13): Result.003 file - promoters60/2029033
gatttttcattaa

SEQ ID NO: 124862 - DNA, 13 bp, Unknown
  misc_feature (1)..( 13): Result.003 file - promoters60/2029033
cgttcttcttttg

SEQ ID NO: 124863 - DNA, 13 bp, Unknown
  misc_feature (1)..( 13): Result.003 file - promoters60/2029033
ataatttaattaa

SEQ ID NO: 124864 - DNA, 7 bp, Unknown
  misc_feature (1)..( 7): Result.003 file - promoters60/2029033
tctctat

SEQ ID NO: 124865 - DNA, 7 bp, Unknown
  misc_feature (1)..( 7): Result.003 file - promoters60/2029033
tctttat

SEQ ID NO: 124866 - DNA, 7 bp, Unknown
  misc_feature (1)..( 7): Result.003 file - promoters60/2029033
tttttct

SEQ ID NO: 124867 - DNA, 7 bp, Unknown
  misc_feature (1)..( 7): Result.003 file - promoters60/2029033
tctctat

SEQ ID NO: 124868 - DNA, 6 bp, Unknown
  misc_feature (1)..( 6): Result.003 file - promoters60/2029049
tttagg

SEQ ID NO: 124869 - DNA, 6 bp, Unknown
  misc_feature (1)..( 6): Result.003 file - promoters60/2029049
tttagg

SEQ ID NO: 124870 - DNA, 6 bp, Unknown
  misc_feature (1)..( 6): Result.003 file - promoters60/2029049
taaaac

SEQ ID NO: 124871 - DNA, 6 bp, Unknown
  misc_feature (1)..( 6): Result.003 file - promoters60/2029049
taaaac

SEQ ID NO: 124872 - DNA, 7 bp, Unknown
  misc_feature (1)..( 7): Result.003 file - promoters60/2029049
aaaatta

SEQ ID NO: 124873 - DNA, 7 bp, Unknown
  misc_feature (1)..( 7): Result.003 file - promoters60/2029049
aaattta

SEQ ID NO: 124874 - DNA, 10 bp, Unknown
  misc_feature (1)..( 10): Result.003 file - promoters60/2029049
aaaaaataaa

SEQ ID NO: 124875 - DNA, 10 bp, Unknown
  misc_feature (1)..( 10): Result.003 file - promoters60/2029049
aaaaaaaaaa

SEQ ID NO: 124876 - DNA, 7 bp, Unknown
  misc_feature (1)..( 7): Result.003 file - promoters60/2029049
gggggac

SEQ ID NO: 124877 - DNA, 7 bp, Unknown
  misc_feature (1)..( 7): Result.003 file - promoters60/2029049
gggtgac

SEQ ID NO: 124878 - DNA, 9 bp, Unknown
  misc_feature (1)..( 9): Result.003 file - promoters60/2029049
gagattttt

SEQ ID NO: 124879 - DNA, 9 bp, Unknown
  misc_feature (1)..( 9): Result.003 file - promoters60/2029049
gagatattt

SEQ ID NO: 124880 - DNA, 6 bp, Unknown
  misc_feature (1)..( 6): Result.003 file - promoters60/2029049
attgtg

SEQ ID NO: 124881 - DNA, 6 bp, Unknown
  misc_feature (1)..( 6): Result.003 file - promoters60/2029049
attgtg

SEQ ID NO: 124882 - DNA, 6 bp, Unknown
  misc_feature (1)..( 6): Result.003 file - promoters60/2029049
ttgttt

SEQ ID NO: 124883 - DNA, 6 bp, Unknown
  misc_feature (1)..( 6): Result.003 file - promoters60/2029049
ttgttt

SEQ ID NO: 124884 - DNA, 9 bp, Unknown
  misc_feature (1)..( 9): Result.003 file - promoters60/2029049
tatcggttt

SEQ ID NO: 124885 - DNA, 9 bp, Unknown
  misc_feature (1)..( 9): Result.003 file - promoters60/2029049
tatcgcttt

SEQ ID NO: 124886 - DNA, 9 bp, Unknown
  misc_feature (1)..( 9): Result.003 file - promoters60/2029049
tttcgtata

SEQ ID NO: 124887 - DNA, 9 bp, Unknown
  misc_feature (1)..( 9): Result.003 file - promoters60/2029049
tttcctata

SEQ ID NO: 124888 - DNA, 7 bp, Unknown
  misc_feature (1)..( 7): Result.003 file - promoters60/2029049
ctttcaa

SEQ ID NO: 124889 - DNA, 7 bp, Unknown
  misc_feature (1)..( 7): Result.003 file - promoters60/2029049
ctttcaa

SEQ ID NO: 124890 - DNA, 6 bp, Unknown
  misc_feature (1)..( 6): Result.003 file - promoters60/2029049
caattt

SEQ ID NO: 124891 - DNA, 6 bp, Unknown
  misc_feature (1)..( 6): Result.003 file - promoters60/2029049
caattt

SEQ ID NO: 124892 - DNA, 14 bp, Unknown
  misc_feature (1)..( 14): Result.003 file - promoters60/2029075
aggaaatgaaaaat

SEQ ID NO: 124893 - DNA, 14 bp, Unknown
  misc_feature (1)..( 14): Result.003 file - promoters60/2029075
caaaaaagaaatta

SEQ ID NO: 124894 - DNA, 14 bp, Unknown
  misc_feature (1)..( 14): Result.003 file - promoters60/2029075
tcaaaatcaaattt

SEQ ID NO: 124895 - DNA, 14 bp, Unknown
  misc_feature (1)..( 14): Result.003 file - promoters60/2029075
aaaaaataaaaaat

SEQ ID NO: 124896 - DNA, 14 bp, Unknown
  misc_feature (1)..( 14): Result.003 file - promoters60/2029075
caaaaatgaataat

SEQ ID NO: 124897 - DNA, 14 bp, Unknown
  misc_feature (1)..( 14): Result.003 file - promoters60/2029075
caacaatcagtcaa

SEQ ID NO: 124898 - DNA, 11 bp, Unknown
  misc_feature (1)..( 11): Result.003 file - promoters60/2029075
attttaatctc

SEQ ID NO: 124899 - DNA, 11 bp, Unknown
  misc_feature (1)..( 11): Result.003 file - promoters60/2029075
tttttattcta

SEQ ID NO: 124900 - DNA, 11 bp, Unknown
  misc_feature (1)..( 11): Result.003 file - promoters60/2029075
attttacagtt

SEQ ID NO: 124901 - DNA, 11 bp, Unknown
  misc_feature (1)..( 11): Result.003 file - promoters60/2029075
gttgtattcta

SEQ ID NO: 124902 - DNA, 11 bp, Unknown
  misc_feature (1)..( 11): Result.003 file - promoters60/2029075
caattaatctc

SEQ ID NO: 124903 - DNA, 11 bp, Unknown
  misc_feature (1)..( 11): Result.003 file - promoters60/2029075
tatgtaatttg

SEQ ID NO: 124904 - DNA, 10 bp, Unknown
  misc_feature (1)..( 10): Result.003 file - promoters60/2029075
caaaaaagaa

SEQ ID NO: 124905 - DNA, 10 bp, Unknown
  misc_feature (1)..( 10): Result.003 file - promoters60/2029075
taaaaaactc

SEQ ID NO: 124906 - DNA, 10 bp, Unknown
  misc_feature (1)..( 10): Result.003 file - promoters60/2029075
caaaaatgaa

SEQ ID NO: 124907 - DNA, 10 bp, Unknown
  misc_feature (1)..( 10): Result.003 file - promoters60/2029075
gaaaaaaaat

SEQ ID NO: 124908 - DNA, 10 bp, Unknown
  misc_feature (1)..( 10): Result.003 file - promoters60/2029075
caacaatcag

SEQ ID NO: 124909 - DNA, 10 bp, Unknown
  misc_feature (1)..( 10): Result.003 file - promoters60/2029075
gaaacactta

SEQ ID NO: 124910 - DNA, 9 bp, Unknown
  misc_feature (1)..( 9): Result.003 file - promoters60/2029079
tatataata

SEQ ID NO: 124911 - DNA, 9 bp, Unknown
  misc_feature (1)..( 9): Result.003 file - promoters60/2029079
tataaaata

SEQ ID NO: 124912 - DNA, 9 bp, Unknown
  misc_feature (1)..( 9): Result.003 file - promoters60/2029079
tatttaatt

SEQ ID NO: 124913 - DNA, 9 bp, Unknown
  misc_feature (1)..( 9): Result.003 file - promoters60/2029079
tatgaaaca

SEQ ID NO: 124914 - DNA, 10 bp, Unknown
  misc_feature (1)..( 10): Result.003 file - promoters60/2029079
gctaacaaat

SEQ ID NO: 124915 - DNA, 10 bp, Unknown
  misc_feature (1)..( 10): Result.003 file - promoters60/2029079
tttaagaaag

SEQ ID NO: 124916 - DNA, 10 bp, Unknown
  misc_feature (1)..( 10): Result.003 file - promoters60/2029079
tcgaagaaag

SEQ ID NO: 124917 - DNA, 10 bp, Unknown
  misc_feature (1)..( 10): Result.003 file - promoters60/2029079
tcgaagaagg

SEQ ID NO: 124918 - DNA, 19 bp, Unknown
  misc_feature (1)..( 19): Result.003 file - promoters60/2029087
aacaaactacaaaagttta

SEQ ID NO: 124919 - DNA, 13 bp, Unknown
  misc_feature (1)..( 13): Result.003 file - promoters60/2029087
cagaaaatgtttt

SEQ ID NO: 124920 - DNA, 19 bp, Unknown
  misc_feature (1)..( 19): Result.003 file - promoters60/2029087
agtttagggaaaatggatc

SEQ ID NO: 124921 - DNA, 19 bp, Unknown
  misc_feature (1)..( 19): Result.003 file - promoters60/2029087
ccaacacattcaatatttt

SEQ ID NO: 124922 - DNA, 15 bp, Unknown
  misc_feature (1)..( 15): Result.003 file - promoters60/2029087
atcactgatccaaca

SEQ ID NO: 124923 - DNA, 15 bp, Unknown
  misc_feature (1)..( 15): Result.003 file - promoters60/2029087
atcactgatccaaca

SEQ ID NO: 124924 - DNA, 15 bp, Unknown
  misc_feature (1)..( 15): Result.003 file - promoters60/2029087
atcactgatccaaca

SEQ ID NO: 124925 - DNA, 7 bp, Unknown
  misc_feature (1)..( 7): Result.003 file - promoters60/2029087
aattatc

SEQ ID NO: 124926 - DNA, 7 bp, Unknown
  misc_feature (1)..( 7): Result.003 file - promoters60/2029087
cattatc

SEQ ID NO: 124927 - DNA, 7 bp, Unknown
  misc_feature (1)..( 7): Result.003 file - promoters60/2029087
cattata

SEQ ID NO: 124928 - DNA, 7 bp, Unknown
  misc_feature (1)..( 7): Result.003 file - promoters60/2029087
aattatc

SEQ ID NO: 124929 - DNA, 6 bp, Unknown
  misc_feature (1)..( 6): Result.003 file - promoters60/2056926
tgggtt

SEQ ID NO: 124930 - DNA, 6 bp, Unknown
  misc_feature (1)..( 6): Result.003 file - promoters60/2056926
tgggtt

SEQ ID NO: 124931 - DNA, 7 bp, Unknown
  misc_feature (1)..( 7): Result.003 file - promoters60/2056926
tcaaaaa

SEQ ID NO: 124932 - DNA, 7 bp, Unknown
  misc_feature (1)..( 7): Result.003 file - promoters60/2056926
tcataaa

SEQ ID NO: 124933 - DNA, 8 bp, Unknown
  misc_feature (1)..( 8): Result.003 file - promoters60/2056926
agaacaat

SEQ ID NO: 124934 - DNA, 8 bp, Unknown
  misc_feature (1)..( 8): Result.003 file - promoters60/2056926
agaataat

SEQ ID NO: 124935 - DNA, 6 bp, Unknown
  misc_feature (1)..( 6): Result.003 file - promoters60/2056926
acgaaa

SEQ ID NO: 124936 - DNA, 6 bp, Unknown
  misc_feature (1)..( 6): Result.003 file - promoters60/2056926
acgaaa

SEQ ID NO: 124937 - DNA, 8 bp, Unknown
  misc_feature (1)..( 8): Result.003 file - promoters60/2056926
aataaaat

SEQ ID NO: 124938 - DNA, 8 bp, Unknown
  misc_feature (1)..( 8): Result.003 file - promoters60/2056926
aataaaag

SEQ ID NO: 124939 - DNA, 8 bp, Unknown
  misc_feature (1)..( 8): Result.003 file - promoters60/2056926
aatacaag

SEQ ID NO: 124940 - DNA, 8 bp, Unknown
  misc_feature (1)..( 8): Result.003 file - promoters60/2056926
aaaggtct

SEQ ID NO: 124941 - DNA, 8 bp, Unknown
  misc_feature (1)..( 8): Result.003 file - promoters60/2056926
aaagatct

SEQ ID NO: 124942 - DNA, 7 bp, Unknown
  misc_feature (1)..( 7): Result.003 file - promoters60/2056926
agatttg

SEQ ID NO: 124943 - DNA, 7 bp, Unknown
  misc_feature (1)..( 7): Result.003 file - promoters60/2056926
agatttg

SEQ ID NO: 124944 - DNA, 7 bp, Unknown
  misc_feature (1)..( 7): Result.003 file - promoters60/2056926
gttttca

SEQ ID NO: 124945 - DNA, 7 bp, Unknown
  misc_feature (1)..( 7): Result.003 file - promoters60/2056926
gttctca

SEQ ID NO: 124946 - DNA, 7 bp, Unknown
  misc_feature (1)..( 7): Result.003 file - promoters60/2056926
ataagac

SEQ ID NO: 124947 - DNA, 7 bp, Unknown
  misc_feature (1)..( 7): Result.003 file - promoters60/2056926
atatgac

SEQ ID NO: 124948 - DNA, 7 bp, Unknown
  misc_feature (1)..( 7): Result.003 file - promoters60/2056926
aatcata

SEQ ID NO: 124949 - DNA, 7 bp, Unknown
  misc_feature (1)..( 7): Result.003 file - promoters60/2056926
aataata

SEQ ID NO: 124950 - DNA, 9 bp, Unknown
  misc_feature (1)..( 9): Result.003 file - promoters60/2056926
aaagaaaat

SEQ ID NO: 124951 - DNA, 9 bp, Unknown
  misc_feature (1)..( 9): Result.003 file - promoters60/2056926
aaagaaaat

SEQ ID NO: 124952 - DNA, 11 bp, Unknown
  misc_feature (1)..( 11): Result.003 file - promoters60/2056926
attattctctg

SEQ ID NO: 124953 - DNA, 11 bp, Unknown
  misc_feature (1)..( 11): Result.003 file - promoters60/2056926
attcttcgctg

SEQ ID NO: 124954 - DNA, 7 bp, Unknown
  misc_feature (1)..( 7): Result.003 file - promoters60/2056926
gtctaga

SEQ ID NO: 124955 - DNA, 7 bp, Unknown
  misc_feature (1)..( 7): Result.003 file - promoters60/2056926
gtcaaga

SEQ ID NO: 124956 - DNA, 7 bp, Unknown
  misc_feature (1)..( 7): Result.003 file - promoters60/2056926
cttatat

SEQ ID NO: 124957 - DNA, 7 bp, Unknown
  misc_feature (1)..( 7): Result.003 file - promoters60/2056926
cttttat

SEQ ID NO: 124958 - DNA, 12 bp, Unknown
  misc_feature (1)..( 12): Result.003 file - promoters60/2056926
taactttttagt

SEQ ID NO: 124959 - DNA, 12 bp, Unknown
  misc_feature (1)..( 12): Result.003 file - promoters60/2056926
taacttttgagt

SEQ ID NO: 124960 - DNA, 7 bp, Unknown
  misc_feature (1)..( 7): Result.003 file - promoters60/2056926
tctacac

SEQ ID NO: 124961 - DNA, 7 bp, Unknown
  misc_feature (1)..( 7): Result.003 file - promoters60/2056926
tcttcac

SEQ ID NO: 124962 - DNA, 6 bp, Unknown
  misc_feature (1)..( 6): Result.003 file - promoters60/2056926
acttgt

SEQ ID NO: 124963 - DNA, 6 bp, Unknown
  misc_feature (1)..( 6): Result.003 file - promoters60/2056926
acttgt

SEQ ID NO: 124964 - DNA, 12 bp, Unknown
  misc_feature (1)..( 12): Result.003 file - promoters60/2104991
taaattataata

SEQ ID NO: 124965 - DNA, 14 bp, Unknown
  misc_feature (1)..( 14): Result.003 file - promoters60/2104991
ctaaaattagcagt

SEQ ID NO: 124966 - DNA, 14 bp, Unknown
  misc_feature (1)..( 14): Result.003 file - promoters60/2104991
ttttaattatattg

SEQ ID NO: 124967 - DNA, 14 bp, Unknown
  misc_feature (1)..( 14): Result.003 file - promoters60/2104991
ttttctttatcttg

SEQ ID NO: 124968 - DNA, 14 bp, Unknown
  misc_feature (1)..( 14): Result.003 file - promoters60/2104991
attaaattttggta

SEQ ID NO: 124969 - DNA, 14 bp, Unknown
  misc_feature (1)..( 14): Result.003 file - promoters60/2104991
cgaaaatgttgggt

SEQ ID NO: 124970 - DNA, 12 bp, Unknown
  misc_feature (1)..( 12): Result.003 file - promoters60/2104991
atttcacaaatt

SEQ ID NO: 124971 - DNA, 12 bp, Unknown
  misc_feature (1)..( 12): Result.003 file - promoters60/2104991
atttcaaaaata

SEQ ID NO: 124972 - DNA, 12 bp, Unknown
  misc_feature (1)..( 12): Result.003 file - promoters60/2104991
gtatcataaagc

SEQ ID NO: 124973 - DNA, 12 bp, Unknown
  misc_feature (1)..( 12): Result.003 file - promoters60/2104991
gcttcaaacaaa

SEQ ID NO: 124974 - DNA, 12 bp, Unknown
  misc_feature (1)..( 12): Result.003 file - promoters60/2104991
gtaacaaaaaag

SEQ ID NO: 124975 - DNA, 12 bp, Unknown
  misc_feature (1)..( 12): Result.003 file - promoters60/2104991
aattaagaaaaa

SEQ ID NO: 124976 - DNA, 14 bp, Unknown
  misc_feature (1)..( 14): Result.003 file - promoters60/2104991
tacttttttttttt

SEQ ID NO: 124977 - DNA, 14 bp, Unknown
  misc_feature (1)..( 14): Result.003 file - promoters60/2104991
tactttttagtgat

SEQ ID NO: 124978 - DNA, 14 bp, Unknown
  misc_feature (1)..( 14): Result.003 file - promoters60/2104991
ctctttttttgttt

SEQ ID NO: 124979 - DNA, 14 bp, Unknown
  misc_feature (1)..( 14): Result.003 file - promoters60/2104991
aacttgttaaatct

SEQ ID NO: 124980 - DNA, 14 bp, Unknown
  misc_feature (1)..( 14): Result.003 file - promoters60/2104991
tacatttagataaa

SEQ ID NO: 124981 - DNA, 14 bp, Unknown
  misc_feature (1)..( 14): Result.003 file - promoters60/2104991
tagtttttgatttt

SEQ ID NO: 124982 - DNA, 7 bp, Unknown
  misc_feature (1)..( 7): Result.003 file - promoters60/2105109
tttatat

SEQ ID NO: 124983 - DNA, 7 bp, Unknown
  misc_feature (1)..( 7): Result.003 file - promoters60/2105109
tttatat

SEQ ID NO: 124984 - DNA, 7 bp, Unknown
  misc_feature (1)..( 7): Result.003 file - promoters60/2105109
attatat

SEQ ID NO: 124985 - DNA, 7 bp, Unknown
  misc_feature (1)..( 7): Result.003 file - promoters60/2105109
tttgtat

SEQ ID NO: 124986 - DNA, 9 bp, Unknown
  misc_feature (1)..( 9): Result.003 file - promoters60/2105109
tattagtcc

SEQ ID NO: 124987 - DNA, 9 bp, Unknown
  misc_feature (1)..( 9): Result.003 file - promoters60/2105109
tatcagtat

SEQ ID NO: 124988 - DNA, 9 bp, Unknown
  misc_feature (1)..( 9): Result.003 file - promoters60/2105109
tattagtat

SEQ ID NO: 124989 - DNA, 9 bp, Unknown
  misc_feature (1)..( 9): Result.003 file - promoters60/2105109
gattagttt

SEQ ID NO: 124990 - DNA, 28 bp, Unknown
  misc_feature (1)..( 28): Result.003 file - promoters60/2105109
gttaaagcccaagaagtaacaataaaga

SEQ ID NO: 124991 - DNA, 28 bp, Unknown
  misc_feature (1)..( 28): Result.003 file - promoters60/2105109
ccgaaaacccgacccgagtcatgtttct

SEQ ID NO: 124992 - DNA, 28 bp, Unknown
  misc_feature (1)..( 28): Result.003 file - promoters60/2105109
tttaaggcccaataagtaacaataaaga

SEQ ID NO: 124993 - DNA, 28 bp, Unknown
  misc_feature (1)..( 28): Result.003 file - promoters60/2105109
aataaaaaccctcactcttccaatttga

SEQ ID NO: 124994 - DNA, 10 bp, Unknown
  misc_feature (1)..( 10): Result.003 file - promoters60/2105109
ataaagccca

SEQ ID NO: 124995 - DNA, 10 bp, Unknown
  misc_feature (1)..( 10): Result.003 file - promoters60/2105109
aataagccca

SEQ ID NO: 124996 - DNA, 10 bp, Unknown
  misc_feature (1)..( 10): Result.003 file - promoters60/2105109
cctaaggcca

SEQ ID NO: 124997 - DNA, 10 bp, Unknown
  misc_feature (1)..( 10): Result.003 file - promoters60/2105109
cctaagccca

SEQ ID NO: 124998 - DNA, 17 bp, Unknown
  misc_feature (1)..( 17): Result.003 file - promoters60/2105109
ttttacctttttaccag

SEQ ID NO: 124999 - DNA, 17 bp, Unknown
  misc_feature (1)..( 17): Result.003 file - promoters60/2105109
gactcccttattatgtc

SEQ ID NO: 125000 - DNA, 17 bp, Unknown
  misc_feature (1)..( 17): Result.003 file - promoters60/2105109
tttgacctttttgtcct

SEQ ID NO: 125001 - DNA, 17 bp, Unknown
  misc_feature (1)..( 17): Result.003 file - promoters60/2105109
gtacgtagtatgatgtc

SEQ ID NO: 125002 - DNA, 8 bp, Unknown
  misc_feature (1)..( 8): Result.003 file - promoters60/2105109
caataaag

SEQ ID NO: 125003 - DNA, 8 bp, Unknown
  misc_feature (1)..( 8): Result.003 file - promoters60/2105109
aaataaaa

SEQ ID NO: 125004 - DNA, 8 bp, Unknown
  misc_feature (1)..( 8): Result.003 file - promoters60/2105109
atataaat

SEQ ID NO: 125005 - DNA, 8 bp, Unknown
  misc_feature (1)..( 8): Result.003 file - promoters60/2105109
atataaaa

SEQ ID NO: 125006 - DNA, 8 bp, Unknown
  misc_feature (1)..( 8): Result.003 file - promoters60/2105109
caataaag

SEQ ID NO: 125007 - DNA, 8 bp, Unknown
  misc_feature (1)..( 8): Result.003 file - promoters60/2105109
tatatata

SEQ ID NO: 125008 - DNA, 8 bp, Unknown
  misc_feature (1)..( 8): Result.003 file - promoters60/2105109
tatataaa

SEQ ID NO: 125009 - DNA, 8 bp, Unknown
  misc_feature (1)..( 8): Result.003 file - promoters60/2105109
gatataaa

SEQ ID NO: 125010 - DNA, 8 bp, Unknown
  misc_feature (1)..( 8): Result.003 file - promoters60/2105109
aataaaaa

SEQ ID NO: 125011 - DNA, 8 bp, Unknown
  misc_feature (1)..( 8): Result.003 file - promoters60/2105109
aataaaga

SEQ ID NO: 125012 - DNA, 8 bp, Unknown
  misc_feature (1)..( 8): Result.003 file - promoters60/2105109
gatatggc

SEQ ID NO: 125013 - DNA, 8 bp, Unknown
  misc_feature (1)..( 8): Result.003 file - promoters60/2105109
gatttggt

SEQ ID NO: 125014 - DNA, 8 bp, Unknown
  misc_feature (1)..( 8): Result.003 file - promoters60/2105109
tattgggt

SEQ ID NO: 125015 - DNA, 8 bp, Unknown
  misc_feature (1)..( 8): Result.003 file - promoters60/2105109
tgtttggt

SEQ ID NO: 125016 - DNA, 6 bp, Unknown
  misc_feature (1)..( 6): Result.003 file - promoters60/2105141
aacaaa

SEQ ID NO: 125017 - DNA, 6 bp, Unknown
  misc_feature (1)..( 6): Result.003 file - promoters60/2105141
aacaaa

SEQ ID NO: 125018 - DNA, 7 bp, Unknown
  misc_feature (1)..( 7): Result.003 file - promoters60/2105141
tttttat

SEQ ID NO: 125019 - DNA, 7 bp, Unknown
  misc_feature (1)..( 7): Result.003 file - promoters60/2105141
tttttat

SEQ ID NO: 125020 - DNA, 8 bp, Unknown
  misc_feature (1)..( 8): Result.003 file - promoters60/2105141
tttatttt

SEQ ID NO: 125021 - DNA, 8 bp, Unknown
  misc_feature (1)..( 8): Result.003 file - promoters60/2105141
catatttt

SEQ ID NO: 125022 - DNA, 8 bp, Unknown
  misc_feature (1)..( 8): Result.003 file - promoters60/2105141
catattta

SEQ ID NO: 125023 - DNA, 7 bp, Unknown
  misc_feature (1)..( 7): Result.003 file - promoters60/2105141
taaataa

SEQ ID NO: 125024 - DNA, 7 bp, Unknown
  misc_feature (1)..( 7): Result.003 file - promoters60/2105141
taaataa

SEQ ID NO: 125025 - DNA, 8 bp, Unknown
  misc_feature (1)..( 8): Result.003 file - promoters60/2105141
ttttgaat

SEQ ID NO: 125026 - DNA, 8 bp, Unknown
  misc_feature (1)..( 8): Result.003 file - promoters60/2105141
ttttcaat

SEQ ID NO: 125027 - DNA, 7 bp, Unknown
  misc_feature (1)..( 7): Result.003 file - promoters60/2105141
taaatta

SEQ ID NO: 125028 - DNA, 7 bp, Unknown
  misc_feature (1)..( 7): Result.003 file - promoters60/2105141
taactta

SEQ ID NO: 125029 - DNA, 6 bp, Unknown
  misc_feature (1)..( 6): Result.003 file - promoters60/2105141
aacaca

SEQ ID NO: 125030 - DNA, 6 bp, Unknown
  misc_feature (1)..( 6): Result.003 file - promoters60/2105141
aacaca

SEQ ID NO: 125031 - DNA, 7 bp, Unknown
  misc_feature (1)..( 7): Result.003 file - promoters60/2105141
ataaaaa

SEQ ID NO: 125032 - DNA, 7 bp, Unknown
  misc_feature (1)..( 7): Result.003 file - promoters60/2105141
atataaa

SEQ ID NO: 125033 - DNA, 8 bp, Unknown
  misc_feature (1)..( 8): Result.003 file - promoters60/2105141
atgtttat

SEQ ID NO: 125034 - DNA, 8 bp, Unknown
  misc_feature (1)..( 8): Result.003 file - promoters60/2105141
atgtttat

SEQ ID NO: 125035 - DNA, 9 bp, Unknown
  misc_feature (1)..( 9): Result.003 file - promoters60/2105141
cacaaatca

SEQ ID NO: 125036 - DNA, 9 bp, Unknown
  misc_feature (1)..( 9): Result.003 file - promoters60/2105141
cactaatca

SEQ ID NO: 125037 - DNA, 7 bp, Unknown
  misc_feature (1)..( 7): Result.003 file - promoters60/2105141
aaaaccc

SEQ ID NO: 125038 - DNA, 7 bp, Unknown
  misc_feature (1)..( 7): Result.003 file - promoters60/2105141
aaatccc

SEQ ID NO: 125039 - DNA, 7 bp, Unknown
  misc_feature (1)..( 7): Result.003 file - promoters60/2105141
acctttt

SEQ ID NO: 125040 - DNA, 7 bp, Unknown
  misc_feature (1)..( 7): Result.003 file - promoters60/2105141
acccttt

SEQ ID NO: 125041 - DNA, 8 bp, Unknown
  misc_feature (1)..( 8): Result.003 file - promoters60/2105141
gtggtaaa

SEQ ID NO: 125042 - DNA, 8 bp, Unknown
  misc_feature (1)..( 8): Result.003 file - promoters60/2105141
gtgctaaa

SEQ ID NO: 125043 - DNA, 8 bp, Unknown
  misc_feature (1)..( 8): Result.003 file - promoters60/2105141
atgctaat

SEQ ID NO: 125044 - DNA, 6 bp, Unknown
  misc_feature (1)..( 6): Result.003 file - promoters60/2105141
aagaat

SEQ ID NO: 125045 - DNA, 6 bp, Unknown
  misc_feature (1)..( 6): Result.003 file - promoters60/2105141
aagaat

SEQ ID NO: 125046 - DNA, 8 bp, Unknown
  misc_feature (1)..( 8): Result.003 file - promoters60/2105141
aaaacaaa

SEQ ID NO: 125047 - DNA, 8 bp, Unknown
  misc_feature (1)..( 8): Result.003 file - promoters60/2105141
aaatcaaa

SEQ ID NO: 125048 - DNA, 6 bp, Unknown
  misc_feature (1)..( 6): Result.003 file - promoters60/2105141
gttttc

SEQ ID NO: 125049 - DNA, 6 bp, Unknown
  misc_feature (1)..( 6): Result.003 file - promoters60/2105141
gttttc

SEQ ID NO: 125050 - DNA, 7 bp, Unknown
  misc_feature (1)..( 7): Result.003 file - promoters60/2105141
ttattta

SEQ ID NO: 125051 - DNA, 7 bp, Unknown
  misc_feature (1)..( 7): Result.003 file - promoters60/2105141
ttattta

SEQ ID NO: 125052 - DNA, 6 bp, Unknown
  misc_feature (1)..( 6): Result.003 file - promoters60/2105141
cacaag

SEQ ID NO: 125053 - DNA, 6 bp, Unknown
  misc_feature (1)..( 6): Result.003 file - promoters60/2105141
cacaag

SEQ ID NO: 125054 - DNA, 6 bp, Unknown
  misc_feature (1)..( 6): Result.003 file - promoters60/2105141
tggcat

SEQ ID NO: 125055 - DNA, 6 bp, Unknown
  misc_feature (1)..( 6): Result.003 file - promoters60/2105141
tggcat

SEQ ID NO: 125056 - DNA, 9 bp, Unknown
  misc_feature (1)..( 9): Result.003 file - promoters60/2105398
caacaaagt

SEQ ID NO: 125057 - DNA, 9 bp, Unknown
  misc_feature (1)..( 9): Result.003 file - promoters60/2105398
aaacaaacg

SEQ ID NO: 125058 - DNA, 9 bp, Unknown
  misc_feature (1)..( 9): Result.003 file - promoters60/2105398
gaaaaaaaa

SEQ ID NO: 125059 - DNA, 9 bp, Unknown
  misc_feature (1)..( 9): Result.003 file - promoters60/2105398
taaaaaaag

SEQ ID NO: 125060 - DNA, 9 bp, Unknown
  misc_feature (1)..( 9): Result.003 file - promoters60/2105398
taaaaaata

SEQ ID NO: 125061 - DNA, 9 bp, Unknown
  misc_feature (1)..( 9): Result.003 file - promoters60/2105398
caaaaataa

SEQ ID NO: 125062 - DNA, 14 bp, Unknown
  misc_feature (1)..( 14): Result.003 file - promoters60/2105398
attgcatttttaaa

SEQ ID NO: 125063 - DNA, 14 bp, Unknown
  misc_feature (1)..( 14): Result.003 file - promoters60/2105398
atttcatatgtttc

SEQ ID NO: 125064 - DNA, 14 bp, Unknown
  misc_feature (1)..( 14): Result.003 file - promoters60/2105398
tttgaattttccta

SEQ ID NO: 125065 - DNA, 14 bp, Unknown
  misc_feature (1)..( 14): Result.003 file - promoters60/2105398
ccttcataaaatct

SEQ ID NO: 125066 - DNA, 14 bp, Unknown
  misc_feature (1)..( 14): Result.003 file - promoters60/2105398
attgcatttagtca

SEQ ID NO: 125067 - DNA, 14 bp, Unknown
  misc_feature (1)..( 14): Result.003 file - promoters60/2105398
agaaaatttaccta

SEQ ID NO: 125068 - DNA, 13 bp, Unknown
  misc_feature (1)..( 13): Result.003 file - promoters60/2105398
aattttggcaaat

SEQ ID NO: 125069 - DNA, 13 bp, Unknown
  misc_feature (1)..( 13): Result.003 file - promoters60/2105398
aattttgtaaatt

SEQ ID NO: 125070 - DNA, 13 bp, Unknown
  misc_feature (1)..( 13): Result.003 file - promoters60/2105398
ctttttataatca

SEQ ID NO: 125071 - DNA, 13 bp, Unknown
  misc_feature (1)..( 13): Result.003 file - promoters60/2105398
ttttttgtatcca

SEQ ID NO: 125072 - DNA, 13 bp, Unknown
  misc_feature (1)..( 13): Result.003 file - promoters60/2105398
tattttttaaatt

SEQ ID NO: 125073 - DNA, 13 bp, Unknown
  misc_feature (1)..( 13): Result.003 file - promoters60/2105398
gacattataaaat

SEQ ID NO: 125074 - DNA, 9 bp, Unknown
  misc_feature (1)..( 9): Result.003 file - promoters60/2105398
tttgatagg

SEQ ID NO: 125075 - DNA, 9 bp, Unknown
  misc_feature (1)..( 9): Result.003 file - promoters60/2105398
tttaataca

SEQ ID NO: 125076 - DNA, 10 bp, Unknown
  misc_feature (1)..( 10): Result.003 file - promoters60/2105398
tttagatgga

SEQ ID NO: 125077 - DNA, 10 bp, Unknown
  misc_feature (1)..( 10): Result.003 file - promoters60/2105398
tttagataaa

SEQ ID NO: 125078 - DNA, 10 bp, Unknown
  misc_feature (1)..( 10): Result.003 file - promoters60/2105398
tttagatatg

SEQ ID NO: 125079 - DNA, 10 bp, Unknown
  misc_feature (1)..( 10): Result.003 file - promoters60/2105398
caaagacaaa

SEQ ID NO: 125080 - DNA, 12 bp, Unknown
  misc_feature (1)..( 12): Result.003 file - promoters60/2105398
tggttagaattt

SEQ ID NO: 125081 - DNA, 12 bp, Unknown
  misc_feature (1)..( 12): Result.003 file - promoters60/2105398
tttttataatca

SEQ ID NO: 125082 - DNA, 12 bp, Unknown
  misc_feature (1)..( 12): Result.003 file - promoters60/2105398
attttgtaaatt

SEQ ID NO: 125083 - DNA, 12 bp, Unknown
  misc_feature (1)..( 12): Result.003 file - promoters60/2105398
tttttgtatcca

SEQ ID NO: 125084 - DNA, 12 bp, Unknown
  misc_feature (1)..( 12): Result.003 file - promoters60/2105398
attttttaaatt

SEQ ID NO: 125085 - DNA, 12 bp, Unknown
  misc_feature (1)..( 12): Result.003 file - promoters60/2105398
acattataaaat

SEQ ID NO: 125086 - DNA, 8 bp, Unknown
  misc_feature (1)..( 8): Result.003 file - promoters60/2105398
gtttgatt

SEQ ID NO: 125087 - DNA, 8 bp, Unknown
  misc_feature (1)..( 8): Result.003 file - promoters60/2105398
tttttatt

SEQ ID NO: 125088 - DNA, 8 bp, Unknown
  misc_feature (1)..( 8): Result.003 file - promoters60/2105398
gatttatt

SEQ ID NO: 125089 - DNA, 8 bp, Unknown
  misc_feature (1)..( 8): Result.003 file - promoters60/2105398
attttttt

SEQ ID NO: 125090 - DNA, 8 bp, Unknown
  misc_feature (1)..( 8): Result.003 file - promoters60/2105398
atttttac

SEQ ID NO: 125091 - DNA, 8 bp, Unknown
  misc_feature (1)..( 8): Result.003 file - promoters60/2105398
attgttta

SEQ ID NO: 125092 - DNA, 16 bp, Unknown
  misc_feature (1)..( 16): Result.003 file - promoters60/2105514
caatgggctgggccta

SEQ ID NO: 125093 - DNA, 16 bp, Unknown
  misc_feature (1)..( 16): Result.003 file - promoters60/2105514
aaataggcccaacaaa

SEQ ID NO: 125094 - DNA, 16 bp, Unknown
  misc_feature (1)..( 16): Result.003 file - promoters60/2105514
tgttgggcttttaatg

SEQ ID NO: 125095 - DNA, 16 bp, Unknown
  misc_feature (1)..( 16): Result.003 file - promoters60/2105514
aaaaaggcccattata

SEQ ID NO: 125096 - DNA, 16 bp, Unknown
  misc_feature (1)..( 16): Result.003 file - promoters60/2105514
aataaagcccattata

SEQ ID NO: 125097 - DNA, 16 bp, Unknown
  misc_feature (1)..( 16): Result.003 file - promoters60/2105514
ctaaaggcccaataac

SEQ ID NO: 125098 - DNA, 8 bp, Unknown
  misc_feature (1)..( 8): Result.003 file - promoters60/2105518
ggtgatgg

SEQ ID NO: 125099 - DNA, 8 bp, Unknown
  misc_feature (1)..( 8): Result.003 file - promoters60/2105518
ggttatgt

SEQ ID NO: 125100 - DNA, 8 bp, Unknown
  misc_feature (1)..( 8): Result.003 file - promoters60/2105518
ggttattt

SEQ ID NO: 125101 - DNA, 8 bp, Unknown
  misc_feature (1)..( 8): Result.003 file - promoters60/2105518
ggttttgt

SEQ ID NO: 125102 - DNA, 18 bp, Unknown
  misc_feature (1)..( 18): Result.003 file - promoters60/2105518
ttataccaaaattaaatg

SEQ ID NO: 125103 - DNA, 18 bp, Unknown
  misc_feature (1)..( 18): Result.003 file - promoters60/2105518
ctttactaaaatgaaatg

SEQ ID NO: 125104 - DNA, 18 bp, Unknown
  misc_feature (1)..( 18): Result.003 file - promoters60/2105518
tataataataataaaaaa

SEQ ID NO: 125105 - DNA, 18 bp, Unknown
  misc_feature (1)..( 18): Result.003 file - promoters60/2105518
ctttaccaaatatgcaaa

SEQ ID NO: 125106 - DNA, 9 bp, Unknown
  misc_feature (1)..( 9): Result.003 file - promoters60/2105533
ctaaaaaga

SEQ ID NO: 125107 - DNA, 9 bp, Unknown
  misc_feature (1)..( 9): Result.003 file - promoters60/2105533
ctaaagaga

SEQ ID NO: 125108 - DNA, 10 bp, Unknown
  misc_feature (1)..( 10): Result.003 file - promoters60/2105533
gtggactatt

SEQ ID NO: 125109 - DNA, 10 bp, Unknown
  misc_feature (1)..( 10): Result.003 file - promoters60/2105533
gtggactatt

SEQ ID NO: 125110 - DNA, 8 bp, Unknown
  misc_feature (1)..( 8): Result.003 file - promoters60/2105533
attgatag

SEQ ID NO: 125111 - DNA, 8 bp, Unknown
  misc_feature (1)..( 8): Result.003 file - promoters60/2105533
attgttag

SEQ ID NO: 125112 - DNA, 6 bp, Unknown
  misc_feature (1)..( 6): Result.003 file - promoters60/2105533
gttact

SEQ ID NO: 125113 - DNA, 6 bp, Unknown
  misc_feature (1)..( 6): Result.003 file - promoters60/2105533
gttact

SEQ ID NO: 125114 - DNA, 6 bp, Unknown
  misc_feature (1)..( 6): Result.003 file - promoters60/2105533
tttaac

SEQ ID NO: 125115 - DNA, 6 bp, Unknown
  misc_feature (1)..( 6): Result.003 file - promoters60/2105533
tttaac

SEQ ID NO: 125116 - DNA, 6 bp, Unknown
  misc_feature (1)..( 6): Result.003 file - promoters60/2105533
agtaaa

SEQ ID NO: 125117 - DNA, 6 bp, Unknown
  misc_feature (1)..( 6): Result.003 file - promoters60/2105533
agtaaa

SEQ ID NO: 125118 - DNA, 7 bp, Unknown
  misc_feature (1)..( 7): Result.003 file - promoters60/2105533
gattaaa

SEQ ID NO: 125119 - DNA, 7 bp, Unknown
  misc_feature (1)..( 7): Result.003 file - promoters60/2105533
gatgaaa

SEQ ID NO: 125120 - DNA, 7 bp, Unknown
  misc_feature (1)..( 7): Result.003 file - promoters60/2105533
gattaat

SEQ ID NO: 125121 - DNA, 9 bp, Unknown
  misc_feature (1)..( 9): Result.003 file - promoters60/2105533
aagacgttg

SEQ ID NO: 125122 - DNA, 9 bp, Unknown
  misc_feature (1)..( 9): Result.003 file - promoters60/2105533
aagaagtta

SEQ ID NO: 125123 - DNA, 9 bp, Unknown
  misc_feature (1)..( 9): Result.003 file - promoters60/2105533
ttgaattta

SEQ ID NO: 125124 - DNA, 8 bp, Unknown
  misc_feature (1)..( 8): Result.003 file - promoters60/2105533
aagttgtt

SEQ ID NO: 125125 - DNA, 8 bp, Unknown
  misc_feature (1)..( 8): Result.003 file - promoters60/2105533
aagctgtt

SEQ ID NO: 125126 - DNA, 8 bp, Unknown
  misc_feature (1)..( 8): Result.003 file - promoters60/2105533
tgtttaga

SEQ ID NO: 125127 - DNA, 8 bp, Unknown
  misc_feature (1)..( 8): Result.003 file - promoters60/2105533
tgttcaga

SEQ ID NO: 125128 - DNA, 6 bp, Unknown
  misc_feature (1)..( 6): Result.003 file - promoters60/2105533
ctcacc

SEQ ID NO: 125129 - DNA, 6 bp, Unknown
  misc_feature (1)..( 6): Result.003 file - promoters60/2105533
ctcacc

SEQ ID NO: 125130 - DNA, 6 bp, Unknown
  misc_feature (1)..( 6): Result.003 file - promoters60/2105533
acacgt

SEQ ID NO: 125131 - DNA, 6 bp, Unknown
  misc_feature (1)..( 6): Result.003 file - promoters60/2105533
acacgt

SEQ ID NO: 125132 - DNA, 6 bp, Unknown
  misc_feature (1)..( 6): Result.003 file - promoters60/2105533
ttaacc

SEQ ID NO: 125133 - DNA, 6 bp, Unknown
  misc_feature (1)..( 6): Result.003 file - promoters60/2105533
ttaacc

SEQ ID NO: 125134 - DNA, 7 bp, Unknown
  misc_feature (1)..( 7): Result.003 file - promoters60/2105533
caatttt

SEQ ID NO: 125135 - DNA, 7 bp, Unknown
  misc_feature (1)..( 7): Result.003 file - promoters60/2105533
caaattt

SEQ ID NO: 125136 - DNA, 8 bp, Unknown
  misc_feature (1)..( 8): Result.003 file - promoters60/2105533
ttttgaat

SEQ ID NO: 125137 - DNA, 8 bp, Unknown
  misc_feature (1)..( 8): Result.003 file - promoters60/2105533
tttggaaa

SEQ ID NO: 125138 - DNA, 8 bp, Unknown
  misc_feature (1)..( 8): Result.003 file - promoters60/2105533
ggtggaaa

SEQ ID NO: 125139 - DNA, 7 bp, Unknown
  misc_feature (1)..( 7): Result.003 file - promoters60/2105533
attaatt

SEQ ID NO: 125140 - DNA, 7 bp, Unknown
  misc_feature (1)..( 7): Result.003 file - promoters60/2105533
attaatt

SEQ ID NO: 125141 - DNA, 7 bp, Unknown
  misc_feature (1)..( 7): Result.003 file - promoters60/2105533
cttctgt

SEQ ID NO: 125142 - DNA, 7 bp, Unknown
  misc_feature (1)..( 7): Result.003 file - promoters60/2105533
cttatgt

SEQ ID NO: 125143 - DNA, 11 bp, Unknown
  misc_feature (1)..( 11): Result.003 file - promoters60/2105535
tcaaagaaaga

SEQ ID NO: 125144 - DNA, 11 bp, Unknown
  misc_feature (1)..( 11): Result.003 file - promoters60/2105535
tcaaacaaatc

SEQ ID NO: 125145 - DNA, 11 bp, Unknown
  misc_feature (1)..( 11): Result.003 file - promoters60/2105535
ccaaagaaagg

SEQ ID NO: 125146 - DNA, 11 bp, Unknown
  misc_feature (1)..( 11): Result.003 file - promoters60/2105535
acaaggaaaga

SEQ ID NO: 125147 - DNA, 11 bp, Unknown
  misc_feature (1)..( 11): Result.003 file - promoters60/2105535
acaacgaataa

SEQ ID NO: 125148 - DNA, 11 bp, Unknown
  misc_feature (1)..( 11): Result.003 file - promoters60/2105535
tcaaataaatt

SEQ ID NO: 125149 - DNA, 11 bp, Unknown
  misc_feature (1)..( 11): Result.003 file - promoters60/2105535
gacaatacatt

SEQ ID NO: 125150 - DNA, 11 bp, Unknown
  misc_feature (1)..( 11): Result.003 file - promoters60/2105912
tccagaaataa

SEQ ID NO: 125151 - DNA, 11 bp, Unknown
  misc_feature (1)..( 11): Result.003 file - promoters60/2105912
gttagaaataa

SEQ ID NO: 125152 - DNA, 11 bp, Unknown
  misc_feature (1)..( 11): Result.003 file - promoters60/2105912
accacaaaaca

SEQ ID NO: 125153 - DNA, 11 bp, Unknown
  misc_feature (1)..( 11): Result.003 file - promoters60/2105912
gttaaaaacta

SEQ ID NO: 125154 - DNA, 7 bp, Unknown
  misc_feature (1)..( 7): Result.003 file - promoters60/2105912
acagata

SEQ ID NO: 125155 - DNA, 7 bp, Unknown
  misc_feature (1)..( 7): Result.003 file - promoters60/2105912
gcagata

SEQ ID NO: 125156 - DNA, 7 bp, Unknown
  misc_feature (1)..( 7): Result.003 file - promoters60/2105912
acatata

SEQ ID NO: 125157 - DNA, 10 bp, Unknown
  misc_feature (1)..( 10): Result.003 file - promoters60/2105912
agatttgtta

SEQ ID NO: 125158 - DNA, 10 bp, Unknown
  misc_feature (1)..( 10): Result.003 file - promoters60/2105912
ctatttgtta

SEQ ID NO: 125159 - DNA, 10 bp, Unknown
  misc_feature (1)..( 10): Result.003 file - promoters60/2105912
agatttttta

SEQ ID NO: 125160 - DNA, 8 bp, Unknown
  misc_feature (1)..( 8): Result.003 file - promoters60/2105912
taacggtt

SEQ ID NO: 125161 - DNA, 8 bp, Unknown
  misc_feature (1)..( 8): Result.003 file - promoters60/2105912
aaacagtt

SEQ ID NO: 125162 - DNA, 8 bp, Unknown
  misc_feature (1)..( 8): Result.003 file - promoters60/2105912
aaacagag

SEQ ID NO: 125163 - DNA, 8 bp, Unknown
  misc_feature (1)..( 8): Result.003 file - promoters60/2105912
aaaaagag

SEQ ID NO: 125164 - DNA, 11 bp, Unknown
  misc_feature (1)..( 11): Result.003 file - promoters60/2105912
aaggagtgaca

SEQ ID NO: 125165 - DNA, 11 bp, Unknown
  misc_feature (1)..( 11): Result.003 file - promoters60/2105912
aaggaatgata

SEQ ID NO: 125166 - DNA, 11 bp, Unknown
  misc_feature (1)..( 11): Result.003 file - promoters60/2105912
acctaataata

SEQ ID NO: 125167 - DNA, 8 bp, Unknown
  misc_feature (1)..( 8): Result.003 file - promoters60/2105912
aaaaggag

SEQ ID NO: 125168 - DNA, 8 bp, Unknown
  misc_feature (1)..( 8): Result.003 file - promoters60/2105912
aaaaagag

SEQ ID NO: 125169 - DNA, 8 bp, Unknown
  misc_feature (1)..( 8): Result.003 file - promoters60/2105912
aaacagag

SEQ ID NO: 125170 - DNA, 7 bp, Unknown
  misc_feature (1)..( 7): Result.003 file - promoters60/2105912
ataattt

SEQ ID NO: 125171 - DNA, 7 bp, Unknown
  misc_feature (1)..( 7): Result.003 file - promoters60/2105912
ttaattt

SEQ ID NO: 125172 - DNA, 7 bp, Unknown
  misc_feature (1)..( 7): Result.003 file - promoters60/2105912
ttaatta

SEQ ID NO: 125173 - DNA, 8 bp, Unknown
  misc_feature (1)..( 8): Result.003 file - promoters60/2105912
ataaaaat

SEQ ID NO: 125174 - DNA, 8 bp, Unknown
  misc_feature (1)..( 8): Result.003 file - promoters60/2105912
ataaaaac

SEQ ID NO: 125175 - DNA, 8 bp, Unknown
  misc_feature (1)..( 8): Result.003 file - promoters60/2105912
acaaaaac

SEQ ID NO: 125176 - DNA, 8 bp, Unknown
  misc_feature (1)..( 8): Result.003 file - promoters60/2105912
aaacgaat

SEQ ID NO: 125177 - DNA, 8 bp, Unknown
  misc_feature (1)..( 8): Result.003 file - promoters60/2105912
aaactaat

SEQ ID NO: 125178 - DNA, 8 bp, Unknown
  misc_feature (1)..( 8): Result.003 file - promoters60/2105912
aaaagaaa

SEQ ID NO: 125179 - DNA, 9 bp, Unknown
  misc_feature (1)..( 9): Result.003 file - promoters60/2105912
gaaacagag

SEQ ID NO: 125180 - DNA, 9 bp, Unknown
  misc_feature (1)..( 9): Result.003 file - promoters60/2105912
gaatcagga

SEQ ID NO: 125181 - DNA, 9 bp, Unknown
  misc_feature (1)..( 9): Result.003 file - promoters60/2105912
aaaaaagag

SEQ ID NO: 125182 - DNA, 8 bp, Unknown
  misc_feature (1)..( 8): Result.003 file - promoters60/2105912
aatcatat

SEQ ID NO: 125183 - DNA, 8 bp, Unknown
  misc_feature (1)..( 8): Result.003 file - promoters60/2105912
aataatac

SEQ ID NO: 125184 - DNA, 8 bp, Unknown
  misc_feature (1)..( 8): Result.003 file - promoters60/2105912
acttataa

SEQ ID NO: 125185 - DNA, 6 bp, Unknown
  misc_feature (1)..( 6): Result.003 file - promoters60/2106027
gaaatt

SEQ ID NO: 125186 - DNA, 6 bp, Unknown
  misc_feature (1)..( 6): Result.003 file - promoters60/2106027
gaaatt

SEQ ID NO: 125187 - DNA, 8 bp, Unknown
  misc_feature (1)..( 8): Result.003 file - promoters60/2106027
gaagtgga

SEQ ID NO: 125188 - DNA, 8 bp, Unknown
  misc_feature (1)..( 8): Result.003 file - promoters60/2106027
gaagagga

SEQ ID NO: 125189 - DNA, 6 bp, Unknown
  misc_feature (1)..( 6): Result.003 file - promoters60/2106027
ataatc

SEQ ID NO: 125190 - DNA, 6 bp, Unknown
  misc_feature (1)..( 6): Result.003 file - promoters60/2106027
ataatc

SEQ ID NO: 125191 - DNA, 9 bp, Unknown
  misc_feature (1)..( 9): Result.003 file - promoters60/2106027
aaatattgt

SEQ ID NO: 125192 - DNA, 9 bp, Unknown
  misc_feature (1)..( 9): Result.003 file - promoters60/2106027
aaagattgt

SEQ ID NO: 125193 - DNA, 8 bp, Unknown
  misc_feature (1)..( 8): Result.003 file - promoters60/2106027
atatcttc

SEQ ID NO: 125194 - DNA, 8 bp, Unknown
  misc_feature (1)..( 8): Result.003 file - promoters60/2106027
atatcttc

SEQ ID NO: 125195 - DNA, 7 bp, Unknown
  misc_feature (1)..( 7): Result.003 file - promoters60/2106027
aggagat

SEQ ID NO: 125196 - DNA, 7 bp, Unknown
  misc_feature (1)..( 7): Result.003 file - promoters60/2106027
aggcgat

SEQ ID NO: 125197 - DNA, 7 bp, Unknown
  misc_feature (1)..( 7): Result.003 file - promoters60/2106027
attttca

SEQ ID NO: 125198 - DNA, 7 bp, Unknown
  misc_feature (1)..( 7): Result.003 file - promoters60/2106027
attctca

SEQ ID NO: 125199 - DNA, 8 bp, Unknown
  misc_feature (1)..( 8): Result.003 file - promoters60/2106027
tggaatcc

SEQ ID NO: 125200 - DNA, 8 bp, Unknown
  misc_feature (1)..( 8): Result.003 file - promoters60/2106027
tggtatcc

SEQ ID NO: 125201 - DNA, 7 bp, Unknown
  misc_feature (1)..( 7): Result.003 file - promoters60/2106027
atcatgc

SEQ ID NO: 125202 - DNA, 7 bp, Unknown
  misc_feature (1)..( 7): Result.003 file - promoters60/2106027
atcctgc

SEQ ID NO: 125203 - DNA, 9 bp, Unknown
  misc_feature (1)..( 9): Result.003 file - promoters60/2106076
aatatcaaa

SEQ ID NO: 125204 - DNA, 9 bp, Unknown
  misc_feature (1)..( 9): Result.003 file - promoters60/2106076
aagatcaaa

SEQ ID NO: 125205 - DNA, 9 bp, Unknown
  misc_feature (1)..( 9): Result.003 file - promoters60/2106076
aagaccaac

SEQ ID NO: 125206 - DNA, 6 bp, Unknown
  misc_feature (1)..( 6): Result.003 file - promoters60/2106109
tataat

SEQ ID NO: 125207 - DNA, 6 bp, Unknown
  misc_feature (1)..( 6): Result.003 file - promoters60/2106109
tataat

SEQ ID NO: 125208 - DNA, 6 bp, Unknown
  misc_feature (1)..( 6): Result.003 file - promoters60/2106109
ccacca

SEQ ID NO: 125209 - DNA, 6 bp, Unknown
  misc_feature (1)..( 6): Result.003 file - promoters60/2106109
ccacca

SEQ ID NO: 125210 - DNA, 9 bp, Unknown
  misc_feature (1)..( 9): Result.003 file - promoters60/2106109
gtatatatt

SEQ ID NO: 125211 - DNA, 9 bp, Unknown
  misc_feature (1)..( 9): Result.003 file - promoters60/2106109
gtagatatt

SEQ ID NO: 125212 - DNA, 6 bp, Unknown
  misc_feature (1)..( 6): Result.003 file - promoters60/2106109
aacatt

SEQ ID NO: 125213 - DNA, 6 bp, Unknown
  misc_feature (1)..( 6): Result.003 file - promoters60/2106109
aacatt

SEQ ID NO: 125214 - DNA, 7 bp, Unknown
  misc_feature (1)..( 7): Result.003 file - promoters60/2106109
ttgatga

SEQ ID NO: 125215 - DNA, 7 bp, Unknown
  misc_feature (1)..( 7): Result.003 file - promoters60/2106109
ttgatga

SEQ ID NO: 125216 - DNA, 8 bp, Unknown
  misc_feature (1)..( 8): Result.003 file - promoters60/2106109
ttagtcaa

SEQ ID NO: 125217 - DNA, 8 bp, Unknown
  misc_feature (1)..( 8): Result.003 file - promoters60/2106109
ttaatcaa

SEQ ID NO: 125218 - DNA, 8 bp, Unknown
  misc_feature (1)..( 8): Result.003 file - promoters60/2106109
aaaaggta

SEQ ID NO: 125219 - DNA, 8 bp, Unknown
  misc_feature (1)..( 8): Result.003 file - promoters60/2106109
aaatggtt

SEQ ID NO: 125220 - DNA, 8 bp, Unknown
  misc_feature (1)..( 8): Result.003 file - promoters60/2106109
taattgtt

SEQ ID NO: 125221 - DNA, 7 bp, Unknown
  misc_feature (1)..( 7): Result.003 file - promoters60/2106109
aatctct

SEQ ID NO: 125222 - DNA, 7 bp, Unknown
  misc_feature (1)..( 7): Result.003 file - promoters60/2106109
aatctct

SEQ ID NO: 125223 - DNA, 6 bp, Unknown
  misc_feature (1)..( 6): Result.003 file - promoters60/2106109
caaatt

SEQ ID NO: 125224 - DNA, 6 bp, Unknown
  misc_feature (1)..( 6): Result.003 file - promoters60/2106109
caaatt

SEQ ID NO: 125225 - DNA, 9 bp, Unknown
  misc_feature (1)..( 9): Result.003 file - promoters60/2106109
aatcataaa

SEQ ID NO: 125226 - DNA, 9 bp, Unknown
  misc_feature (1)..( 9): Result.003 file - promoters60/2106109
aatcaaaaa

SEQ ID NO: 125227 - DNA, 8 bp, Unknown
  misc_feature (1)..( 8): Result.003 file - promoters60/2106109
tatagtaa

SEQ ID NO: 125228 - DNA, 8 bp, Unknown
  misc_feature (1)..( 8): Result.003 file - promoters60/2106109
tattgtaa

SEQ ID NO: 125229 - DNA, 8 bp, Unknown
  misc_feature (1)..( 8): Result.003 file - promoters60/2106109
attgtttt

SEQ ID NO: 125230 - DNA, 8 bp, Unknown
  misc_feature (1)..( 8): Result.003 file - promoters60/2106109
attttttt

SEQ ID NO: 125231 - DNA, 8 bp, Unknown
  misc_feature (1)..( 8): Result.003 file - promoters60/2106109
atttttat

SEQ ID NO: 125232 - DNA, 6 bp, Unknown
  misc_feature (1)..( 6): Result.003 file - promoters60/2106109
tttgtt

SEQ ID NO: 125233 - DNA, 6 bp, Unknown
  misc_feature (1)..( 6): Result.003 file - promoters60/2106109
tttgtt

SEQ ID NO: 125234 - DNA, 6 bp, Unknown
  misc_feature (1)..( 6): Result.003 file - promoters60/2106109
tataac

SEQ ID NO: 125235 - DNA, 6 bp, Unknown
  misc_feature (1)..( 6): Result.003 file - promoters60/2106109
tataac

SEQ ID NO: 125236 - DNA, 8 bp, Unknown
  misc_feature (1)..( 8): Result.003 file - promoters60/2106109
gaagaaag

SEQ ID NO: 125237 - DNA, 8 bp, Unknown
  misc_feature (1)..( 8): Result.003 file - promoters60/2106109
gaacaaag

SEQ ID NO: 125238 - DNA, 8 bp, Unknown
  misc_feature (1)..( 8): Result.003 file - promoters60/2106109
tttaaatg

SEQ ID NO: 125239 - DNA, 8 bp, Unknown
  misc_feature (1)..( 8): Result.003 file - promoters60/2106109
tttatatg

SEQ ID NO: 125240 - DNA, 7 bp, Unknown
  misc_feature (1)..( 7): Result.003 file - promoters60/2106109
ccaaaca

SEQ ID NO: 125241 - DNA, 7 bp, Unknown
  misc_feature (1)..( 7): Result.003 file - promoters60/2106109
ccataca

SEQ ID NO: 125242 - DNA, 8 bp, Unknown
  misc_feature (1)..( 8): Result.003 file - promoters60/2106109
tacaaaaa

SEQ ID NO: 125243 - DNA, 8 bp, Unknown
  misc_feature (1)..( 8): Result.003 file - promoters60/2106109
tacaaaaa

SEQ ID NO: 125244 - DNA, 8 bp, Unknown
  misc_feature (1)..( 8): Result.003 file - promoters60/2106109
aaaaaaag

SEQ ID NO: 125245 - DNA, 8 bp, Unknown
  misc_feature (1)..( 8): Result.003 file - promoters60/2106109
aaacaaag

SEQ ID NO: 125246 - DNA, 8 bp, Unknown
  misc_feature (1)..( 8): Result.003 file - promoters60/2106109
aaccacct

SEQ ID NO: 125247 - DNA, 8 bp, Unknown
  misc_feature (1)..( 8): Result.003 file - promoters60/2106109
aacaacct

SEQ ID NO: 125248 - DNA, 7 bp, Unknown
  misc_feature (1)..( 7): Result.003 file - promoters60/2106659
tcttcat

SEQ ID NO: 125249 - DNA, 7 bp, Unknown
  misc_feature (1)..( 7): Result.003 file - promoters60/2106659
tcttcat

SEQ ID NO: 125250 - DNA, 6 bp, Unknown
  misc_feature (1)..( 6): Result.003 file - promoters60/2106659
taaaac

SEQ ID NO: 125251 - DNA, 6 bp, Unknown
  misc_feature (1)..( 6): Result.003 file - promoters60/2106659
taaaac

SEQ ID NO: 125252 - DNA, 7 bp, Unknown
  misc_feature (1)..( 7): Result.003 file - promoters60/2106659
tattctc

SEQ ID NO: 125253 - DNA, 7 bp, Unknown
  misc_feature (1)..( 7): Result.003 file - promoters60/2106659
tatcctc

SEQ ID NO: 125254 - DNA, 6 bp, Unknown
  misc_feature (1)..( 6): Result.003 file - promoters60/2106659
atttat

SEQ ID NO: 125255 - DNA, 6 bp, Unknown
  misc_feature (1)..( 6): Result.003 file - promoters60/2106659
atttat

SEQ ID NO: 125256 - DNA, 6 bp, Unknown
  misc_feature (1)..( 6): Result.003 file - promoters60/2106659
aaaacc

SEQ ID NO: 125257 - DNA, 6 bp, Unknown
  misc_feature (1)..( 6): Result.003 file - promoters60/2106659
aaaacc

SEQ ID NO: 125258 - DNA, 7 bp, Unknown
  misc_feature (1)..( 7): Result.003 file - promoters60/2106659
tcctaaa

SEQ ID NO: 125259 - DNA, 7 bp, Unknown
  misc_feature (1)..( 7): Result.003 file - promoters60/2106659
tccgaaa

SEQ ID NO: 125260 - DNA, 9 bp, Unknown
  misc_feature (1)..( 9): Result.003 file - promoters60/2106659
gttatatcg

SEQ ID NO: 125261 - DNA, 9 bp, Unknown
  misc_feature (1)..( 9): Result.003 file - promoters60/2106659
gttagatcg

SEQ ID NO: 125262 - DNA, 6 bp, Unknown
  misc_feature (1)..( 6): Result.003 file - promoters60/2106659
aaatct

SEQ ID NO: 125263 - DNA, 6 bp, Unknown
  misc_feature (1)..( 6): Result.003 file - promoters60/2106659
aaatct

SEQ ID NO: 125264 - DNA, 7 bp, Unknown
  misc_feature (1)..( 7): Result.003 file - promoters60/2106659
atgtttg

SEQ ID NO: 125265 - DNA, 7 bp, Unknown
  misc_feature (1)..( 7): Result.003 file - promoters60/2106659
atggttg

SEQ ID NO: 125266 - DNA, 6 bp, Unknown
  misc_feature (1)..( 6): Result.003 file - promoters60/2106659
tttgtt

SEQ ID NO: 125267 - DNA, 6 bp, Unknown
  misc_feature (1)..( 6): Result.003 file - promoters60/2106659
tttgtt

SEQ ID NO: 125268 - DNA, 8 bp, Unknown
  misc_feature (1)..( 8): Result.003 file - promoters60/2106659
ttatcaag

SEQ ID NO: 125269 - DNA, 8 bp, Unknown
  misc_feature (1)..( 8): Result.003 file - promoters60/2106659
ttattaag

SEQ ID NO: 125270 - DNA, 6 bp, Unknown
  misc_feature (1)..( 6): Result.003 file - promoters60/2106659
ttatct

SEQ ID NO: 125271 - DNA, 6 bp, Unknown
  misc_feature (1)..( 6): Result.003 file - promoters60/2106659
ttatct

SEQ ID NO: 125272 - DNA, 6 bp, Unknown
  misc_feature (1)..( 6): Result.003 file - promoters60/2106659
agtaaa

SEQ ID NO: 125273 - DNA, 6 bp, Unknown
  misc_feature (1)..( 6): Result.003 file - promoters60/2106659
agtaaa

SEQ ID NO: 125274 - DNA, 7 bp, Unknown
  misc_feature (1)..( 7): Result.003 file - promoters60/2106659
aatcggg

SEQ ID NO: 125275 - DNA, 7 bp, Unknown
  misc_feature (1)..( 7): Result.003 file - promoters60/2106659
aattggg

SEQ ID NO: 125276 - DNA, 8 bp, Unknown
  misc_feature (1)..( 8): Result.003 file - promoters60/2106659
gaaagaaa

SEQ ID NO: 125277 - DNA, 8 bp, Unknown
  misc_feature (1)..( 8): Result.003 file - promoters60/2106659
gaaacaaa

SEQ ID NO: 125278 - DNA, 10 bp, Unknown
  misc_feature (1)..( 10): Result.003 file - promoters60/2106659
ggaaaagaaa

SEQ ID NO: 125279 - DNA, 10 bp, Unknown
  misc_feature (1)..( 10): Result.003 file - promoters60/2106659
ggaaatgaaa

SEQ ID NO: 125280 - DNA, 7 bp, Unknown
  misc_feature (1)..( 7): Result.003 file - promoters60/2106659
cccacta

SEQ ID NO: 125281 - DNA, 7 bp, Unknown
  misc_feature (1)..( 7): Result.003 file - promoters60/2106659
cccacta

SEQ ID NO: 125282 - DNA, 9 bp, Unknown
  misc_feature (1)..( 9): Result.003 file - promoters60/2106659
aaagaaaag

SEQ ID NO: 125283 - DNA, 9 bp, Unknown
  misc_feature (1)..( 9): Result.003 file - promoters60/2106659
aaagtaaag

SEQ ID NO: 125284 - DNA, 7 bp, Unknown
  misc_feature (1)..( 7): Result.003 file - promoters60/2106659
gtatata

SEQ ID NO: 125285 - DNA, 7 bp, Unknown
  misc_feature (1)..( 7): Result.003 file - promoters60/2106659
gtatata

SEQ ID NO: 125286 - DNA, 9 bp, Unknown
  misc_feature (1)..( 9): Result.003 file - promoters60/2106682
tgagctgtt

SEQ ID NO: 125287 - DNA, 9 bp, Unknown
  misc_feature (1)..( 9): Result.003 file - promoters60/2106682
tgatctgtt

SEQ ID NO: 125288 - DNA, 8 bp, Unknown
  misc_feature (1)..( 8): Result.003 file - promoters60/2106682
attacttc

SEQ ID NO: 125289 - DNA, 8 bp, Unknown
  misc_feature (1)..( 8): Result.003 file - promoters60/2106682
atttcttc

SEQ ID NO: 125290 - DNA, 7 bp, Unknown
  misc_feature (1)..( 7): Result.003 file - promoters60/2106682
agcaaat

SEQ ID NO: 125291 - DNA, 7 bp, Unknown
  misc_feature (1)..( 7): Result.003 file - promoters60/2106682
agctaat

SEQ ID NO: 125292 - DNA, 9 bp, Unknown
  misc_feature (1)..( 9): Result.003 file - promoters60/2106682
aaataagct

SEQ ID NO: 125293 - DNA, 9 bp, Unknown
  misc_feature (1)..( 9): Result.003 file - promoters60/2106682
aaaaaagct

SEQ ID NO: 125294 - DNA, 7 bp, Unknown
  misc_feature (1)..( 7): Result.003 file - promoters60/2106682
taaaggg

SEQ ID NO: 125295 - DNA, 7 bp, Unknown
  misc_feature (1)..( 7): Result.003 file - promoters60/2106682
taaaggg

SEQ ID NO: 125296 - DNA, 6 bp, Unknown
  misc_feature (1)..( 6): Result.003 file - promoters60/2106682
tgtctc

SEQ ID NO: 125297 - DNA, 6 bp, Unknown
  misc_feature (1)..( 6): Result.003 file - promoters60/2106682
tgtctc

SEQ ID NO: 125298 - DNA, 6 bp, Unknown
  misc_feature (1)..( 6): Result.003 file - promoters60/2106682
cctctg

SEQ ID NO: 125299 - DNA, 6 bp, Unknown
  misc_feature (1)..( 6): Result.003 file - promoters60/2106682
cctctg

SEQ ID NO: 125300 - DNA, 7 bp, Unknown
  misc_feature (1)..( 7): Result.003 file - promoters60/2106682
gtgacat

SEQ ID NO: 125301 - DNA, 7 bp, Unknown
  misc_feature (1)..( 7): Result.003 file - promoters60/2106682
gtgacat

SEQ ID NO: 125302 - DNA, 7 bp, Unknown
  misc_feature (1)..( 7): Result.003 file - promoters60/2106682
taacaat

SEQ ID NO: 125303 - DNA, 7 bp, Unknown
  misc_feature (1)..( 7): Result.003 file - promoters60/2106682
taataat

SEQ ID NO: 125304 - DNA, 6 bp, Unknown
  misc_feature (1)..( 6): Result.003 file - promoters60/2106682
tgtttc

SEQ ID NO: 125305 - DNA, 6 bp, Unknown
  misc_feature (1)..( 6): Result.003 file - promoters60/2106682
tgtttc

SEQ ID NO: 125306 - DNA, 6 bp, Unknown
  misc_feature (1)..( 6): Result.003 file - promoters60/2106682
ggtccc

SEQ ID NO: 125307 - DNA, 6 bp, Unknown
  misc_feature (1)..( 6): Result.003 file - promoters60/2106682
ggtccc

SEQ ID NO: 125308 - DNA, 6 bp, Unknown
  misc_feature (1)..( 6): Result.003 file - promoters60/2106682
tattat

SEQ ID NO: 125309 - DNA, 6 bp, Unknown
  misc_feature (1)..( 6): Result.003 file - promoters60/2106682
tattat

SEQ ID NO: 125310 - DNA, 7 bp, Unknown
  misc_feature (1)..( 7): Result.003 file - promoters60/2106682
tacatat

SEQ ID NO: 125311 - DNA, 7 bp, Unknown
  misc_feature (1)..( 7): Result.003 file - promoters60/2106682
tacttat

SEQ ID NO: 125312 - DNA, 6 bp, Unknown
  misc_feature (1)..( 6): Result.003 file - promoters60/2106682
attctt

SEQ ID NO: 125313 - DNA, 6 bp, Unknown
  misc_feature (1)..( 6): Result.003 file - promoters60/2106682
attctt

SEQ ID NO: 125314 - DNA, 10 bp, Unknown
  misc_feature (1)..( 10): Result.003 file - promoters60/2106682
taataaaaat

SEQ ID NO: 125315 - DNA, 10 bp, Unknown
  misc_feature (1)..( 10): Result.003 file - promoters60/2106682
taataataat

SEQ ID NO: 125316 - DNA, 8 bp, Unknown
  misc_feature (1)..( 8): Result.003 file - promoters60/2106682
caaaacta

SEQ ID NO: 125317 - DNA, 8 bp, Unknown
  misc_feature (1)..( 8): Result.003 file - promoters60/2106682
caaaacta

SEQ ID NO: 125318 - DNA, 6 bp, Unknown
  misc_feature (1)..( 6): Result.003 file - promoters60/2106682
aacttc

SEQ ID NO: 125319 - DNA, 6 bp, Unknown
  misc_feature (1)..( 6): Result.003 file - promoters60/2106682
aacttc

SEQ ID NO: 125320 - DNA, 7 bp, Unknown
  misc_feature (1)..( 7): Result.003 file - promoters60/2106682
tcaaggt

SEQ ID NO: 125321 - DNA, 7 bp, Unknown
  misc_feature (1)..( 7): Result.003 file - promoters60/2106682
tcaaggt

SEQ ID NO: 125322 - DNA, 7 bp, Unknown
  misc_feature (1)..( 7): Result.003 file - promoters60/2106682
attttga

SEQ ID NO: 125323 - DNA, 7 bp, Unknown
  misc_feature (1)..( 7): Result.003 file - promoters60/2106682
attatga

SEQ ID NO: 125324 - DNA, 9 bp, Unknown
  misc_feature (1)..( 9): Result.003 file - promoters60/2107016
cttgttatt

SEQ ID NO: 125325 - DNA, 9 bp, Unknown
  misc_feature (1)..( 9): Result.003 file - promoters60/2107016
ctttttatt

SEQ ID NO: 125326 - DNA, 9 bp, Unknown
  misc_feature (1)..( 9): Result.003 file - promoters60/2107016
ggtttgatt

SEQ ID NO: 125327 - DNA, 9 bp, Unknown
  misc_feature (1)..( 9): Result.003 file - promoters60/2107016
ctcaaaaaa

SEQ ID NO: 125328 - DNA, 9 bp, Unknown
  misc_feature (1)..( 9): Result.003 file - promoters60/2107016
gtcaaaaaa

SEQ ID NO: 125329 - DNA, 9 bp, Unknown
  misc_feature (1)..( 9): Result.003 file - promoters60/2107016
gtcaaatcc

SEQ ID NO: 125330 - DNA, 10 bp, Unknown
  misc_feature (1)..( 10): Result.003 file - promoters60/2107065
ggaaaacaga

SEQ ID NO: 125331 - DNA, 10 bp, Unknown
  misc_feature (1)..( 10): Result.003 file - promoters60/2107065
acaaaacatc

SEQ ID NO: 125332 - DNA, 10 bp, Unknown
  misc_feature (1)..( 10): Result.003 file - promoters60/2107065
ggaaaacgaa

SEQ ID NO: 125333 - DNA, 10 bp, Unknown
  misc_feature (1)..( 10): Result.003 file - promoters60/2107065
ataaaacaaa

SEQ ID NO: 125334 - DNA, 10 bp, Unknown
  misc_feature (1)..( 10): Result.003 file - promoters60/2107065
agaatacaat

SEQ ID NO: 125335 - DNA, 10 bp, Unknown
  misc_feature (1)..( 10): Result.003 file - promoters60/2107065
tacaaatatc

SEQ ID NO: 125336 - DNA, 14 bp, Unknown
  misc_feature (1)..( 14): Result.003 file - promoters60/2107065
aaattgggcccaat

SEQ ID NO: 125337 - DNA, 14 bp, Unknown
  misc_feature (1)..( 14): Result.003 file - promoters60/2107065
taattgggcttttt

SEQ ID NO: 125338 - DNA, 14 bp, Unknown
  misc_feature (1)..( 14): Result.003 file - promoters60/2107065
tgattggggttaca

SEQ ID NO: 125339 - DNA, 14 bp, Unknown
  misc_feature (1)..( 14): Result.003 file - promoters60/2107065
gaattggaaatagg

SEQ ID NO: 125340 - DNA, 14 bp, Unknown
  misc_feature (1)..( 14): Result.003 file - promoters60/2107065
ttaatgggccgaat

SEQ ID NO: 125341 - DNA, 15 bp, Unknown
  misc_feature (1)..( 15): Result.003 file - promoters60/2107065
tgattgtggtaaaaa

SEQ ID NO: 125342 - DNA, 10 bp, Unknown
  misc_feature (1)..( 10): Result.003 file - promoters60/2107065
ccattatata

SEQ ID NO: 125343 - DNA, 10 bp, Unknown
  misc_feature (1)..( 10): Result.003 file - promoters60/2107065
actttatata

SEQ ID NO: 125344 - DNA, 10 bp, Unknown
  misc_feature (1)..( 10): Result.003 file - promoters60/2107065
ccactataaa

SEQ ID NO: 125345 - DNA, 10 bp, Unknown
  misc_feature (1)..( 10): Result.003 file - promoters60/2107065
cctttataaa

SEQ ID NO: 125346 - DNA, 10 bp, Unknown
  misc_feature (1)..( 10): Result.003 file - promoters60/2107065
aacctatatt

SEQ ID NO: 125347 - DNA, 10 bp, Unknown
  misc_feature (1)..( 10): Result.003 file - promoters60/2107065
acactatata

SEQ ID NO: 125348 - DNA, 9 bp, Unknown
  misc_feature (1)..( 9): Result.003 file - promoters60/2107065
caagggaag

SEQ ID NO: 125349 - DNA, 9 bp, Unknown
  misc_feature (1)..( 9): Result.003 file - promoters60/2107065
gaagggaaa

SEQ ID NO: 125350 - DNA, 9 bp, Unknown
  misc_feature (1)..( 9): Result.003 file - promoters60/2107065
caaggaaag

SEQ ID NO: 125351 - DNA, 9 bp, Unknown
  misc_feature (1)..( 9): Result.003 file - promoters60/2107065
taagaaaat

SEQ ID NO: 125352 - DNA, 9 bp, Unknown
  misc_feature (1)..( 9): Result.003 file - promoters60/2107065
caaagaaag

SEQ ID NO: 125353 - DNA, 9 bp, Unknown
  misc_feature (1)..( 9): Result.003 file - promoters60/2107065
caagtaaaa

SEQ ID NO: 125354 - DNA, 12 bp, Unknown
  misc_feature (1)..( 12): Result.003 file - promoters60/2107065
aaacataagaaa

SEQ ID NO: 125355 - DNA, 12 bp, Unknown
  misc_feature (1)..( 12): Result.003 file - promoters60/2107065
aaacacaagaag

SEQ ID NO: 125356 - DNA, 12 bp, Unknown
  misc_feature (1)..( 12): Result.003 file - promoters60/2107065
aaaccaaagaaa

SEQ ID NO: 125357 - DNA, 13 bp, Unknown
  misc_feature (1)..( 13): Result.003 file - promoters60/2107065
ttgtacaaggaaa

SEQ ID NO: 125358 - DNA, 13 bp, Unknown
  misc_feature (1)..( 13): Result.003 file - promoters60/2107065
cctatcaaacaaa

SEQ ID NO: 125359 - DNA, 12 bp, Unknown
  misc_feature (1)..( 12): Result.003 file - promoters60/2107065
gaacaaaaaaaa

SEQ ID NO: 125360 - DNA, 7 bp, Unknown
  misc_feature (1)..( 7): Result.003 file - promoters60/2107069
aagctgt

SEQ ID NO: 125361 - DNA, 7 bp, Unknown
  misc_feature (1)..( 7): Result.003 file - promoters60/2107069
aaggtgt

SEQ ID NO: 125362 - DNA, 7 bp, Unknown
  misc_feature (1)..( 7): Result.003 file - promoters60/2107069
gctaatg

SEQ ID NO: 125363 - DNA, 7 bp, Unknown
  misc_feature (1)..( 7): Result.003 file - promoters60/2107069
gctgatg

SEQ ID NO: 125364 - DNA, 6 bp, Unknown
  misc_feature (1)..( 6): Result.003 file - promoters60/2107069
ttgatt

SEQ ID NO: 125365 - DNA, 6 bp, Unknown
  misc_feature (1)..( 6): Result.003 file - promoters60/2107069
ttgatt

SEQ ID NO: 125366 - DNA, 6 bp, Unknown
  misc_feature (1)..( 6): Result.003 file - promoters60/2107069
gattct

SEQ ID NO: 125367 - DNA, 6 bp, Unknown
  misc_feature (1)..( 6): Result.003 file - promoters60/2107069
gattct

SEQ ID NO: 125368 - DNA, 7 bp, Unknown
  misc_feature (1)..( 7): Result.003 file - promoters60/2107069
gaactcc

SEQ ID NO: 125369 - DNA, 7 bp, Unknown
  misc_feature (1)..( 7): Result.003 file - promoters60/2107069
gaaatcc

SEQ ID NO: 125370 - DNA, 7 bp, Unknown
  misc_feature (1)..( 7): Result.003 file - promoters60/2107069
atgcaaa

SEQ ID NO: 125371 - DNA, 7 bp, Unknown
  misc_feature (1)..( 7): Result.003 file - promoters60/2107069
atggaaa

SEQ ID NO: 125372 - DNA, 6 bp, Unknown
  misc_feature (1)..( 6): Result.003 file - promoters60/2107069
ccattg

SEQ ID NO: 125373 - DNA, 6 bp, Unknown
  misc_feature (1)..( 6): Result.003 file - promoters60/2107069
ccattg

SEQ ID NO: 125374 - DNA, 7 bp, Unknown
  misc_feature (1)..( 7): Result.003 file - promoters60/2107069
ctttgaa

SEQ ID NO: 125375 - DNA, 7 bp, Unknown
  misc_feature (1)..( 7): Result.003 file - promoters60/2107069
cttcgaa

SEQ ID NO: 125376 - DNA, 6 bp, Unknown
  misc_feature (1)..( 6): Result.003 file - promoters60/2107069
gttgga

SEQ ID NO: 125377 - DNA, 6 bp, Unknown
  misc_feature (1)..( 6): Result.003 file - promoters60/2107069
gttgga

SEQ ID NO: 125378 - DNA, 8 bp, Unknown
  misc_feature (1)..( 8): Result.003 file - promoters60/2107069
tgatatct

SEQ ID NO: 125379 - DNA, 8 bp, Unknown
  misc_feature (1)..( 8): Result.003 file - promoters60/2107069
tgaaatct

SEQ ID NO: 125380 - DNA, 6 bp, Unknown
  misc_feature (1)..( 6): Result.003 file - promoters60/2107069
tacaac

SEQ ID NO: 125381 - DNA, 6 bp, Unknown
  misc_feature (1)..( 6): Result.003 file - promoters60/2107069
tacaac

SEQ ID NO: 125382 - DNA, 7 bp, Unknown
  misc_feature (1)..( 7): Result.003 file - promoters60/2107069
attcgac

SEQ ID NO: 125383 - DNA, 7 bp, Unknown
  misc_feature (1)..( 7): Result.003 file - promoters60/2107069
attcgac

SEQ ID NO: 125384 - DNA, 6 bp, Unknown
  misc_feature (1)..( 6): Result.003 file - promoters60/2107069
caaaac

SEQ ID NO: 125385 - DNA, 6 bp, Unknown
  misc_feature (1)..( 6): Result.003 file - promoters60/2107069
caaaac

SEQ ID NO: 125386 - DNA, 6 bp, Unknown
  misc_feature (1)..( 6): Result.003 file - promoters60/2107069
taccca

SEQ ID NO: 125387 - DNA, 6 bp, Unknown
  misc_feature (1)..( 6): Result.003 file - promoters60/2107069
taccca

SEQ ID NO: 125388 - DNA, 6 bp, Unknown
  misc_feature (1)..( 6): Result.003 file - promoters60/2107069
ggaaaa

SEQ ID NO: 125389 - DNA, 6 bp, Unknown
  misc_feature (1)..( 6): Result.003 file - promoters60/2107069
ggaaaa

SEQ ID NO: 125390 - DNA, 6 bp, Unknown
  misc_feature (1)..( 6): Result.003 file - promoters60/2107069
gatggt

SEQ ID NO: 125391 - DNA, 6 bp, Unknown
  misc_feature (1)..( 6): Result.003 file - promoters60/2107069
gatggt

SEQ ID NO: 125392 - DNA, 7 bp, Unknown
  misc_feature (1)..( 7): Result.003 file - promoters60/2107069
tctgttg

SEQ ID NO: 125393 - DNA, 7 bp, Unknown
  misc_feature (1)..( 7): Result.003 file - promoters60/2107069
tctcttg

SEQ ID NO: 125394 - DNA, 7 bp, Unknown
  misc_feature (1)..( 7): Result.003 file - promoters60/2107069
tttactc

SEQ ID NO: 125395 - DNA, 7 bp, Unknown
  misc_feature (1)..( 7): Result.003 file - promoters60/2107069
tttgctc

SEQ ID NO: 125396 - DNA, 7 bp, Unknown
  misc_feature (1)..( 7): Result.003 file - promoters60/2107069
ctgaaac

SEQ ID NO: 125397 - DNA, 7 bp, Unknown
  misc_feature (1)..( 7): Result.003 file - promoters60/2107069
ctgcaac

SEQ ID NO: 125398 - DNA, 12 bp, Unknown
  misc_feature (1)..( 12): Result.003 file - promoters60/2113269
ttcacttagtac

SEQ ID NO: 125399 - DNA, 12 bp, Unknown
  misc_feature (1)..( 12): Result.003 file - promoters60/2113269
atggtttattac

SEQ ID NO: 125400 - DNA, 12 bp, Unknown
  misc_feature (1)..( 12): Result.003 file - promoters60/2113269
ctttttttttaa

SEQ ID NO: 125401 - DNA, 12 bp, Unknown
  misc_feature (1)..( 12): Result.003 file - promoters60/2113269
aacatttttttc

SEQ ID NO: 125402 - DNA, 12 bp, Unknown
  misc_feature (1)..( 12): Result.003 file - promoters60/2113269
attggcttttaa

SEQ ID NO: 125403 - DNA, 10 bp, Unknown
  misc_feature (1)..( 10): Result.003 file - promoters60/2113269
aaactttttc

SEQ ID NO: 125404 - DNA, 10 bp, Unknown
  misc_feature (1)..( 10): Result.003 file - promoters60/2113269
ttacttttta

SEQ ID NO: 125405 - DNA, 10 bp, Unknown
  misc_feature (1)..( 10): Result.003 file - promoters60/2113269
aaactttttt

SEQ ID NO: 125406 - DNA, 10 bp, Unknown
  misc_feature (1)..( 10): Result.003 file - promoters60/2113269
catttttttc

SEQ ID NO: 125407 - DNA, 10 bp, Unknown
  misc_feature (1)..( 10): Result.003 file - promoters60/2113269
aaacttttga

SEQ ID NO: 125408 - DNA, 9 bp, Unknown
  misc_feature (1)..( 9): Result.003 file - promoters60/2113269
atataaaaa

SEQ ID NO: 125409 - DNA, 9 bp, Unknown
  misc_feature (1)..( 9): Result.003 file - promoters60/2113269
aaataaaaa

SEQ ID NO: 125410 - DNA, 10 bp, Unknown
  misc_feature (1)..( 10): Result.003 file - promoters60/2113269
ttttaacaaa

SEQ ID NO: 125411 - DNA, 10 bp, Unknown
  misc_feature (1)..( 10): Result.003 file - promoters60/2113269
gattataaac

SEQ ID NO: 125412 - DNA, 10 bp, Unknown
  misc_feature (1)..( 10): Result.003 file - promoters60/2113269
ttttaacatc

SEQ ID NO: 125413 - DNA, 9 bp, Unknown
  misc_feature (1)..( 9): Result.003 file - promoters60/2113269
gtaattttt

SEQ ID NO: 125414 - DNA, 9 bp, Unknown
  misc_feature (1)..( 9): Result.003 file - promoters60/2113269
ataactttg

SEQ ID NO: 125415 - DNA, 9 bp, Unknown
  misc_feature (1)..( 9): Result.003 file - promoters60/2113269
agtattttt

SEQ ID NO: 125416 - DNA, 9 bp, Unknown
  misc_feature (1)..( 9): Result.003 file - promoters60/2113269
gtattttaa

SEQ ID NO: 125417 - DNA, 15 bp, Unknown
  misc_feature (1)..( 15): Result.003 file - promoters60/2113269
cactcatcttcatat

SEQ ID NO: 125418 - DNA, 15 bp, Unknown
  misc_feature (1)..( 15): Result.003 file - promoters60/2113269
ttcctttctttataa

SEQ ID NO: 125419 - DNA, 15 bp, Unknown
  misc_feature (1)..( 15): Result.003 file - promoters60/2113269
taaatatctacatat

SEQ ID NO: 125420 - DNA, 15 bp, Unknown
  misc_feature (1)..( 15): Result.003 file - promoters60/2113269
ttcctttctttatat

SEQ ID NO: 125421 - DNA, 15 bp, Unknown
  misc_feature (1)..( 15): Result.003 file - promoters60/2113269
ccacctactatataa

SEQ ID NO: 125422 - DNA, 10 bp, Unknown
  misc_feature (1)..( 10): Result.003 file - promoters60/2113269
atataaataa

SEQ ID NO: 125423 - DNA, 10 bp, Unknown
  misc_feature (1)..( 10): Result.003 file - promoters60/2113269
ttataaataa

SEQ ID NO: 125424 - DNA, 10 bp, Unknown
  misc_feature (1)..( 10): Result.003 file - promoters60/2113269
atataaactc

SEQ ID NO: 125425 - DNA, 10 bp, Unknown
  misc_feature (1)..( 10): Result.003 file - promoters60/2113269
atctacatat

SEQ ID NO: 125426 - DNA, 10 bp, Unknown
  misc_feature (1)..( 10): Result.003 file - promoters60/2113269
ttatatagcc

SEQ ID NO: 125427 - DNA, 8 bp, Unknown
  misc_feature (1)..( 8): Result.003 file - promoters60/2113269
tgcataat

SEQ ID NO: 125428 - DNA, 8 bp, Unknown
  misc_feature (1)..( 8): Result.003 file - promoters60/2113269
agcataag

SEQ ID NO: 125429 - DNA, 8 bp, Unknown
  misc_feature (1)..( 8): Result.003 file - promoters60/2113269
tgcatatg

SEQ ID NO: 125430 - DNA, 8 bp, Unknown
  misc_feature (1)..( 8): Result.003 file - promoters60/2113269
tccataat

SEQ ID NO: 125431 - DNA, 10 bp, Unknown
  misc_feature (1)..( 10): Result.003 file - promoters60/2113269
cgaatctctt

SEQ ID NO: 125432 - DNA, 10 bp, Unknown
  misc_feature (1)..( 10): Result.003 file - promoters60/2113269
ggaatctctt

SEQ ID NO: 125433 - DNA, 10 bp, Unknown
  misc_feature (1)..( 10): Result.003 file - promoters60/2113269
tgaatctaag

SEQ ID NO: 125434 - DNA, 10 bp, Unknown
  misc_feature (1)..( 10): Result.003 file - promoters60/2113269
tgaacctacg

SEQ ID NO: 125435 - DNA, 10 bp, Unknown
  misc_feature (1)..( 10): Result.003 file - promoters60/2113269
ttatttaaaa

SEQ ID NO: 125436 - DNA, 10 bp, Unknown
  misc_feature (1)..( 10): Result.003 file - promoters60/2113269
acttttaaag

SEQ ID NO: 125437 - DNA, 10 bp, Unknown
  misc_feature (1)..( 10): Result.003 file - promoters60/2113269
tattttaaac

SEQ ID NO: 125438 - DNA, 10 bp, Unknown
  misc_feature (1)..( 10): Result.003 file - promoters60/2113269
ataattaaag

SEQ ID NO: 125439 - DNA, 12 bp, Unknown
  misc_feature (1)..( 12): Result.003 file - promoters60/2113269
agtgtttcatat

SEQ ID NO: 125440 - DNA, 12 bp, Unknown
  misc_feature (1)..( 12): Result.003 file - promoters60/2113269
agtttttgatat

SEQ ID NO: 125441 - DNA, 12 bp, Unknown
  misc_feature (1)..( 12): Result.003 file - promoters60/2113269
gccgtttgataa

SEQ ID NO: 125442 - DNA, 12 bp, Unknown
  misc_feature (1)..( 12): Result.003 file - promoters60/2113269
tcattttgacat

SEQ ID NO: 125443 - DNA, 12 bp, Unknown
  misc_feature (1)..( 12): Result.003 file - promoters60/2113269
aacttttgagag

SEQ ID NO: 125444 - DNA, 9 bp, Unknown
  misc_feature (1)..( 9): Result.003 file - promoters60/2113269
ttttcaatt

SEQ ID NO: 125445 - DNA, 9 bp, Unknown
  misc_feature (1)..( 9): Result.003 file - promoters60/2113269
gtttcaaca

SEQ ID NO: 125446 - DNA, 10 bp, Unknown
  misc_feature (1)..( 10): Result.003 file - promoters60/2113269
attgtcaaag

SEQ ID NO: 125447 - DNA, 10 bp, Unknown
  misc_feature (1)..( 10): Result.003 file - promoters60/2113269
actttaaaca

SEQ ID NO: 125448 - DNA, 8 bp, Unknown
  misc_feature (1)..( 8): Result.003 file - promoters60/2113269
ttttaaaa

SEQ ID NO: 125449 - DNA, 8 bp, Unknown
  misc_feature (1)..( 8): Result.003 file - promoters60/2113269
ttttaaca

SEQ ID NO: 125450 - DNA, 8 bp, Unknown
  misc_feature (1)..( 8): Result.003 file - promoters60/2113269
ttttaaag

SEQ ID NO: 125451 - DNA, 8 bp, Unknown
  misc_feature (1)..( 8): Result.003 file - promoters60/2113269
ttttaaca

SEQ ID NO: 125452 - DNA, 9 bp, Unknown
  misc_feature (1)..( 9): Result.003 file - promoters60/2113299
ttttgcata

SEQ ID NO: 125453 - DNA, 9 bp, Unknown
  misc_feature (1)..( 9): Result.003 file - promoters60/2113299
tgttgcata

SEQ ID NO: 125454 - DNA, 9 bp, Unknown
  misc_feature (1)..( 9): Result.003 file - promoters60/2113299
tgtcgcata

SEQ ID NO: 125455 - DNA, 6 bp, Unknown
  misc_feature (1)..( 6): Result.003 file - promoters60/2113299
tatttc

SEQ ID NO: 125456 - DNA, 6 bp, Unknown
  misc_feature (1)..( 6): Result.003 file - promoters60/2113299
tatttc

SEQ ID NO: 125457 - DNA, 7 bp, Unknown
  misc_feature (1)..( 7): Result.003 file - promoters60/2113299
cggcggt

SEQ ID NO: 125458 - DNA, 7 bp, Unknown
  misc_feature (1)..( 7): Result.003 file - promoters60/2113299
cggtggt

SEQ ID NO: 125459 - DNA, 8 bp, Unknown
  misc_feature (1)..( 8): Result.003 file - promoters60/2113299
taaagtca

SEQ ID NO: 125460 - DNA, 8 bp, Unknown
  misc_feature (1)..( 8): Result.003 file - promoters60/2113299
taaaatca

SEQ ID NO: 125461 - DNA, 8 bp, Unknown
  misc_feature (1)..( 8): Result.003 file - promoters60/2113299
gtgtttaa

SEQ ID NO: 125462 - DNA, 8 bp, Unknown
  misc_feature (1)..( 8): Result.003 file - promoters60/2113299
gtggttaa

SEQ ID NO: 125463 - DNA, 8 bp, Unknown
  misc_feature (1)..( 8): Result.003 file - promoters60/2113299
atattttc

SEQ ID NO: 125464 - DNA, 8 bp, Unknown
  misc_feature (1)..( 8): Result.003 file - promoters60/2113299
ataatttc

SEQ ID NO: 125465 - DNA, 7 bp, Unknown
  misc_feature (1)..( 7): Result.003 file - promoters60/2113299
aaccctt

SEQ ID NO: 125466 - DNA, 7 bp, Unknown
  misc_feature (1)..( 7): Result.003 file - promoters60/2113299
aacactt

SEQ ID NO: 125467 - DNA, 7 bp, Unknown
  misc_feature (1)..( 7): Result.003 file - promoters60/2113299
tataaat

SEQ ID NO: 125468 - DNA, 7 bp, Unknown
  misc_feature (1)..( 7): Result.003 file - promoters60/2113299
tataaat

SEQ ID NO: 125469 - DNA, 9 bp, Unknown
  misc_feature (1)..( 9): Result.003 file - promoters60/2113299
caaaaataa

SEQ ID NO: 125470 - DNA, 9 bp, Unknown
  misc_feature (1)..( 9): Result.003 file - promoters60/2113299
caaaaataa

SEQ ID NO: 125471 - DNA, 8 bp, Unknown
  misc_feature (1)..( 8): Result.003 file - promoters60/2113299
aacagtaa

SEQ ID NO: 125472 - DNA, 8 bp, Unknown
  misc_feature (1)..( 8): Result.003 file - promoters60/2113299
aacaataa

SEQ ID NO: 125473 - DNA, 6 bp, Unknown
  misc_feature (1)..( 6): Result.003 file - promoters60/2113299
gtaaaa

SEQ ID NO: 125474 - DNA, 6 bp, Unknown
  misc_feature (1)..( 6): Result.003 file - promoters60/2113299
gtaaaa

SEQ ID NO: 125475 - DNA, 8 bp, Unknown
  misc_feature (1)..( 8): Result.003 file - promoters60/2113299
tttccatt

SEQ ID NO: 125476 - DNA, 8 bp, Unknown
  misc_feature (1)..( 8): Result.003 file - promoters60/2113299
tttcgatt

SEQ ID NO: 125477 - DNA, 7 bp, Unknown
  misc_feature (1)..( 7): Result.003 file - promoters60/2113299
ttttttg

SEQ ID NO: 125478 - DNA, 7 bp, Unknown
  misc_feature (1)..( 7): Result.003 file - promoters60/2113299
tttattg

SEQ ID NO: 125479 - DNA, 7 bp, Unknown
  misc_feature (1)..( 7): Result.003 file - promoters60/2113315
atgcaat

SEQ ID NO: 125480 - DNA, 7 bp, Unknown
  misc_feature (1)..( 7): Result.003 file - promoters60/2113315
atgtaat

SEQ ID NO: 125481 - DNA, 8 bp, Unknown
  misc_feature (1)..( 8): Result.003 file - promoters60/2113315
gtgtaaat

SEQ ID NO: 125482 - DNA, 8 bp, Unknown
  misc_feature (1)..( 8): Result.003 file - promoters60/2113315
gtggaaat

SEQ ID NO: 125483 - DNA, 6 bp, Unknown
  misc_feature (1)..( 6): Result.003 file - promoters60/2113315
acatat

SEQ ID NO: 125484 - DNA, 6 bp, Unknown
  misc_feature (1)..( 6): Result.003 file - promoters60/2113315
acatat

SEQ ID NO: 125485 - DNA, 6 bp, Unknown
  misc_feature (1)..( 6): Result.003 file - promoters60/2113315
acatat

SEQ ID NO: 125486 - DNA, 6 bp, Unknown
  misc_feature (1)..( 6): Result.003 file - promoters60/2113315
atatgg

SEQ ID NO: 125487 - DNA, 6 bp, Unknown
  misc_feature (1)..( 6): Result.003 file - promoters60/2113315
atatgg

SEQ ID NO: 125488 - DNA, 6 bp, Unknown
  misc_feature (1)..( 6): Result.003 file - promoters60/2113315
ataata

SEQ ID NO: 125489 - DNA, 6 bp, Unknown
  misc_feature (1)..( 6): Result.003 file - promoters60/2113315
ataata

SEQ ID NO: 125490 - DNA, 8 bp, Unknown
  misc_feature (1)..( 8): Result.003 file - promoters60/2113315
ttggcaaa

SEQ ID NO: 125491 - DNA, 8 bp, Unknown
  misc_feature (1)..( 8): Result.003 file - promoters60/2113315
caggcaaa

SEQ ID NO: 125492 - DNA, 8 bp, Unknown
  misc_feature (1)..( 8): Result.003 file - promoters60/2113315
ttgtcaag

SEQ ID NO: 125493 - DNA, 7 bp, Unknown
  misc_feature (1)..( 7): Result.003 file - promoters60/2113315
ttacaaa

SEQ ID NO: 125494 - DNA, 7 bp, Unknown
  misc_feature (1)..( 7): Result.003 file - promoters60/2113315
ttataaa

SEQ ID NO: 125495 - DNA, 6 bp, Unknown
  misc_feature (1)..( 6): Result.003 file - promoters60/2113315
ttaatt

SEQ ID NO: 125496 - DNA, 6 bp, Unknown
  misc_feature (1)..( 6): Result.003 file - promoters60/2113315
ttaatt

SEQ ID NO: 125497 - DNA, 7 bp, Unknown
  misc_feature (1)..( 7): Result.003 file - promoters60/2113315
ataaaaa

SEQ ID NO: 125498 - DNA, 7 bp, Unknown
  misc_feature (1)..( 7): Result.003 file - promoters60/2113315
ataaaaa

SEQ ID NO: 125499 - DNA, 6 bp, Unknown
  misc_feature (1)..( 6): Result.003 file - promoters60/2113315
taaaat

SEQ ID NO: 125500 - DNA, 6 bp, Unknown
  misc_feature (1)..( 6): Result.003 file - promoters60/2113315
taaaat

SEQ ID NO: 125501 - DNA, 6 bp, Unknown
  misc_feature (1)..( 6): Result.003 file - promoters60/2113315
ctaaaa

SEQ ID NO: 125502 - DNA, 6 bp, Unknown
  misc_feature (1)..( 6): Result.003 file - promoters60/2113315
ctaaaa

SEQ ID NO: 125503 - DNA, 8 bp, Unknown
  misc_feature (1)..( 8): Result.003 file - promoters60/2113315
aaagtctt

SEQ ID NO: 125504 - DNA, 8 bp, Unknown
  misc_feature (1)..( 8): Result.003 file - promoters60/2113315
aaaatctc

SEQ ID NO: 125505 - DNA, 8 bp, Unknown
  misc_feature (1)..( 8): Result.003 file - promoters60/2113315
ctaatctc

SEQ ID NO: 125506 - DNA, 6 bp, Unknown
  misc_feature (1)..( 6): Result.003 file - promoters60/2113315
ttagtg

SEQ ID NO: 125507 - DNA, 6 bp, Unknown
  misc_feature (1)..( 6): Result.003 file - promoters60/2113315
ttagtg

SEQ ID NO: 125508 - DNA, 7 bp, Unknown
  misc_feature (1)..( 7): Result.003 file - promoters60/2113315
taagaag

SEQ ID NO: 125509 - DNA, 7 bp, Unknown
  misc_feature (1)..( 7): Result.003 file - promoters60/2113315
taataag

SEQ ID NO: 125510 - DNA, 6 bp, Unknown
  misc_feature (1)..( 6): Result.003 file - promoters60/2113315
aagtaa

SEQ ID NO: 125511 - DNA, 6 bp, Unknown
  misc_feature (1)..( 6): Result.003 file - promoters60/2113315
aagtaa

SEQ ID NO: 125512 - DNA, 6 bp, Unknown
  misc_feature (1)..( 6): Result.003 file - promoters60/2113315
ttaaaa

SEQ ID NO: 125513 - DNA, 6 bp, Unknown
  misc_feature (1)..( 6): Result.003 file - promoters60/2113315
ttaaaa

SEQ ID NO: 125514 - DNA, 6 bp, Unknown
  misc_feature (1)..( 6): Result.003 file - promoters60/2113315
aactct

SEQ ID NO: 125515 - DNA, 6 bp, Unknown
  misc_feature (1)..( 6): Result.003 file - promoters60/2113315
aactct

SEQ ID NO: 125516 - DNA, 7 bp, Unknown
  misc_feature (1)..( 7): Result.003 file - promoters60/2113315
attattt

SEQ ID NO: 125517 - DNA, 7 bp, Unknown
  misc_feature (1)..( 7): Result.003 file - promoters60/2113315
attattt

SEQ ID NO: 125518 - DNA, 8 bp, Unknown
  misc_feature (1)..( 8): Result.003 file - promoters60/2113315
aattataa

SEQ ID NO: 125519 - DNA, 8 bp, Unknown
  misc_feature (1)..( 8): Result.003 file - promoters60/2113315
aataataa

SEQ ID NO: 125520 - DNA, 7 bp, Unknown
  misc_feature (1)..( 7): Result.003 file - promoters60/2113315
ttcgtta

SEQ ID NO: 125521 - DNA, 7 bp, Unknown
  misc_feature (1)..( 7): Result.003 file - promoters60/2113315
ttcctta

SEQ ID NO: 125522 - DNA, 7 bp, Unknown
  misc_feature (1)..( 7): Result.003 file - promoters60/2113315
actctat

SEQ ID NO: 125523 - DNA, 7 bp, Unknown
  misc_feature (1)..( 7): Result.003 file - promoters60/2113315
actttat

SEQ ID NO: 125524 - DNA, 8 bp, Unknown
  misc_feature (1)..( 8): Result.003 file - promoters60/2113323
aaacaact

SEQ ID NO: 125525 - DNA, 8 bp, Unknown
  misc_feature (1)..( 8): Result.003 file - promoters60/2113323
caacaacc

SEQ ID NO: 125526 - DNA, 8 bp, Unknown
  misc_feature (1)..( 8): Result.003 file - promoters60/2113323
acacaact

SEQ ID NO: 125527 - DNA, 8 bp, Unknown
  misc_feature (1)..( 8): Result.003 file - promoters60/2113323
caacaaac

SEQ ID NO: 125528 - DNA, 9 bp, Unknown
  misc_feature (1)..( 9): Result.003 file - promoters60/2113323
tgtcaagta

SEQ ID NO: 125529 - DNA, 9 bp, Unknown
  misc_feature (1)..( 9): Result.003 file - promoters60/2113323
catcaagtc

SEQ ID NO: 125530 - DNA, 9 bp, Unknown
  misc_feature (1)..( 9): Result.003 file - promoters60/2113323
tgtcaagta

SEQ ID NO: 125531 - DNA, 9 bp, Unknown
  misc_feature (1)..( 9): Result.003 file - promoters60/2113323
caattattt

SEQ ID NO: 125532 - DNA, 9 bp, Unknown
  misc_feature (1)..( 9): Result.003 file - promoters60/2113323
atatttttt

SEQ ID NO: 125533 - DNA, 9 bp, Unknown
  misc_feature (1)..( 9): Result.003 file - promoters60/2113323
caaatattt

SEQ ID NO: 125534 - DNA, 8 bp, Unknown
  misc_feature (1)..( 8): Result.003 file - promoters60/2113323
gattgtaa

SEQ ID NO: 125535 - DNA, 8 bp, Unknown
  misc_feature (1)..( 8): Result.003 file - promoters60/2113323
gattgttt

SEQ ID NO: 125536 - DNA, 8 bp, Unknown
  misc_feature (1)..( 8): Result.003 file - promoters60/2113323
aattgttt

SEQ ID NO: 125537 - DNA, 14 bp, Unknown
  misc_feature (1)..( 14): Result.003 file - promoters60/2113323
ttttttatagatta

SEQ ID NO: 125538 - DNA, 14 bp, Unknown
  misc_feature (1)..( 14): Result.003 file - promoters60/2113323
ttttctataaatta

SEQ ID NO: 125539 - DNA, 14 bp, Unknown
  misc_feature (1)..( 14): Result.003 file - promoters60/2113323
agagctaaaaacgg

SEQ ID NO: 125540 - DNA, 7 bp, Unknown
  misc_feature (1)..( 7): Result.003 file - promoters60/2113454
cttctta

SEQ ID NO: 125541 - DNA, 7 bp, Unknown
  misc_feature (1)..( 7): Result.003 file - promoters60/2113454
cttttta

SEQ ID NO: 125542 - DNA, 7 bp, Unknown
  misc_feature (1)..( 7): Result.003 file - promoters60/2113454
tctgatc

SEQ ID NO: 125543 - DNA, 7 bp, Unknown
  misc_feature (1)..( 7): Result.003 file - promoters60/2113454
tctaatc

SEQ ID NO: 125544 - DNA, 6 bp, Unknown
  misc_feature (1)..( 6): Result.003 file - promoters60/2113454
aaataa

SEQ ID NO: 125545 - DNA, 6 bp, Unknown
  misc_feature (1)..( 6): Result.003 file - promoters60/2113454
aaataa

SEQ ID NO: 125546 - DNA, 6 bp, Unknown
  misc_feature (1)..( 6): Result.003 file - promoters60/2113454
aacaaa

SEQ ID NO: 125547 - DNA, 6 bp, Unknown
  misc_feature (1)..( 6): Result.003 file - promoters60/2113454
aacaaa

SEQ ID NO: 125548 - DNA, 8 bp, Unknown
  misc_feature (1)..( 8): Result.003 file - promoters60/2113454
aaatgtat

SEQ ID NO: 125549 - DNA, 8 bp, Unknown
  misc_feature (1)..( 8): Result.003 file - promoters60/2113454
aaatgtat

SEQ ID NO: 125550 - DNA, 6 bp, Unknown
  misc_feature (1)..( 6): Result.003 file - promoters60/2113454
ttttgt

SEQ ID NO: 125551 - DNA, 6 bp, Unknown
  misc_feature (1)..( 6): Result.003 file - promoters60/2113454
ttttgt

SEQ ID NO: 125552 - DNA, 7 bp, Unknown
  misc_feature (1)..( 7): Result.003 file - promoters60/2113454
tatacaa

SEQ ID NO: 125553 - DNA, 7 bp, Unknown
  misc_feature (1)..( 7): Result.003 file - promoters60/2113454
tatacaa

SEQ ID NO: 125554 - DNA, 8 bp, Unknown
  misc_feature (1)..( 8): Result.003 file - promoters60/2113454
aaatatct

SEQ ID NO: 125555 - DNA, 8 bp, Unknown
  misc_feature (1)..( 8): Result.003 file - promoters60/2113454
aaatttct

SEQ ID NO: 125556 - DNA, 6 bp, Unknown
  misc_feature (1)..( 6): Result.003 file - promoters60/2113454
tagtaa

SEQ ID NO: 125557 - DNA, 6 bp, Unknown
  misc_feature (1)..( 6): Result.003 file - promoters60/2113454
tagtaa

SEQ ID NO: 125558 - DNA, 8 bp, Unknown
  misc_feature (1)..( 8): Result.003 file - promoters60/2113454
ttgcaatg

SEQ ID NO: 125559 - DNA, 8 bp, Unknown
  misc_feature (1)..( 8): Result.003 file - promoters60/2113454
ttgaaatg

SEQ ID NO: 125560 - DNA, 8 bp, Unknown
  misc_feature (1)..( 8): Result.003 file - promoters60/2113454
tgattatt

SEQ ID NO: 125561 - DNA, 8 bp, Unknown
  misc_feature (1)..( 8): Result.003 file - promoters60/2113454
tgattatt

SEQ ID NO: 125562 - DNA, 7 bp, Unknown
  misc_feature (1)..( 7): Result.003 file - promoters60/2113454
aaataaa

SEQ ID NO: 125563 - DNA, 7 bp, Unknown
  misc_feature (1)..( 7): Result.003 file - promoters60/2113454
aaataaa

SEQ ID NO: 125564 - DNA, 7 bp, Unknown
  misc_feature (1)..( 7): Result.003 file - promoters60/2113454
atcatgt

SEQ ID NO: 125565 - DNA, 7 bp, Unknown
  misc_feature (1)..( 7): Result.003 file - promoters60/2113454
atcgtgt

SEQ ID NO: 125566 - DNA, 11 bp, Unknown
  misc_feature (1)..( 11): Result.003 file - promoters60/2113454
ttcctcaaaca

SEQ ID NO: 125567 - DNA, 11 bp, Unknown
  misc_feature (1)..( 11): Result.003 file - promoters60/2113454
ttcttcaaaca

SEQ ID NO: 125568 - DNA, 7 bp, Unknown
  misc_feature (1)..( 7): Result.003 file - promoters60/2113454
gttccaa

SEQ ID NO: 125569 - DNA, 7 bp, Unknown
  misc_feature (1)..( 7): Result.003 file - promoters60/2113454
gttacaa

SEQ ID NO: 125570 - DNA, 7 bp, Unknown
  misc_feature (1)..( 7): Result.003 file - promoters60/2113454
tccctca

SEQ ID NO: 125571 - DNA, 7 bp, Unknown
  misc_feature (1)..( 7): Result.003 file - promoters60/2113454
tccatca

SEQ ID NO: 125572 - DNA, 6 bp, Unknown
  misc_feature (1)..( 6): Result.003 file - promoters60/2113454
attcat

SEQ ID NO: 125573 - DNA, 6 bp, Unknown
  misc_feature (1)..( 6): Result.003 file - promoters60/2113454
attcat

SEQ ID NO: 125574 - DNA, 7 bp, Unknown
  misc_feature (1)..( 7): Result.003 file - promoters60/2113454
acctaat

SEQ ID NO: 125575 - DNA, 7 bp, Unknown
  misc_feature (1)..( 7): Result.003 file - promoters60/2113454
acctaat

SEQ ID NO: 125576 - DNA, 8 bp, Unknown
  misc_feature (1)..( 8): Result.003 file - promoters60/2113454
taatttat

SEQ ID NO: 125577 - DNA, 8 bp, Unknown
  misc_feature (1)..( 8): Result.003 file - promoters60/2113454
taagttat

SEQ ID NO: 125578 - DNA, 8 bp, Unknown
  misc_feature (1)..( 8): Result.003 file - promoters60/2113454
ttctggtt

SEQ ID NO: 125579 - DNA, 8 bp, Unknown
  misc_feature (1)..( 8): Result.003 file - promoters60/2113454
ttctagtt

SEQ ID NO: 125580 - DNA, 8 bp, Unknown
  misc_feature (1)..( 8): Result.003 file - promoters60/2113454
tttaccaa

SEQ ID NO: 125581 - DNA, 8 bp, Unknown
  misc_feature (1)..( 8): Result.003 file - promoters60/2113454
ttttccaa

SEQ ID NO: 125582 - DNA, 6 bp, Unknown
  misc_feature (1)..( 6): Result.003 file - promoters60/2113454
caactt

SEQ ID NO: 125583 - DNA, 6 bp, Unknown
  misc_feature (1)..( 6): Result.003 file - promoters60/2113454
caactt

SEQ ID NO: 125584 - DNA, 7 bp, Unknown
  misc_feature (1)..( 7): Result.003 file - promoters60/2113454
gtcaaaa

SEQ ID NO: 125585 - DNA, 7 bp, Unknown
  misc_feature (1)..( 7): Result.003 file - promoters60/2113454
gtcaaaa

SEQ ID NO: 125586 - DNA, 7 bp, Unknown
  misc_feature (1)..( 7): Result.003 file - promoters60/2113454
aaattga

SEQ ID NO: 125587 - DNA, 7 bp, Unknown
  misc_feature (1)..( 7): Result.003 file - promoters60/2113454
aaattga

SEQ ID NO: 125588 - DNA, 7 bp, Unknown
  misc_feature (1)..( 7): Result.003 file - promoters60/2113454
catcagg

SEQ ID NO: 125589 - DNA, 7 bp, Unknown
  misc_feature (1)..( 7): Result.003 file - promoters60/2113454
catgagg

SEQ ID NO: 125590 - DNA, 11 bp, Unknown
  misc_feature (1)..( 11): Result.003 file - promoters60/2113462
atcttcatata

SEQ ID NO: 125591 - DNA, 11 bp, Unknown
  misc_feature (1)..( 11): Result.003 file - promoters60/2113462
atcatcactta

SEQ ID NO: 125592 - DNA, 11 bp, Unknown
  misc_feature (1)..( 11): Result.003 file - promoters60/2113462
ttctacatagt

SEQ ID NO: 125593 - DNA, 11 bp, Unknown
  misc_feature (1)..( 11): Result.003 file - promoters60/2113462
aacttaatata

SEQ ID NO: 125594 - DNA, 11 bp, Unknown
  misc_feature (1)..( 11): Result.003 file - promoters60/2113462
ccctacatttt

SEQ ID NO: 125595 - DNA, 16 bp, Unknown
  misc_feature (1)..( 16): Result.003 file - promoters60/2113462
agggatggatgtaatc

SEQ ID NO: 125596 - DNA, 16 bp, Unknown
  misc_feature (1)..( 16): Result.003 file - promoters60/2113462
aaattaagatataaaa

SEQ ID NO: 125597 - DNA, 16 bp, Unknown
  misc_feature (1)..( 16): Result.003 file - promoters60/2113462
aaactaaaatatcaac

SEQ ID NO: 125598 - DNA, 16 bp, Unknown
  misc_feature (1)..( 16): Result.003 file - promoters60/2113462
acactaaagtataaaa

SEQ ID NO: 125599 - DNA, 16 bp, Unknown
  misc_feature (1)..( 16): Result.003 file - promoters60/2113462
tttaaaaaataatatt

SEQ ID NO: 125600 - DNA, 16 bp, Unknown
  misc_feature (1)..( 16): Result.003 file - promoters60/2113462
actttaaaatcacatc

SEQ ID NO: 125601 - DNA, 8 bp, Unknown
  misc_feature (1)..( 8): Result.003 file - promoters60/2113462
cttatttc

SEQ ID NO: 125602 - DNA, 8 bp, Unknown
  misc_feature (1)..( 8): Result.003 file - promoters60/2113462
cttttttt

SEQ ID NO: 125603 - DNA, 8 bp, Unknown
  misc_feature (1)..( 8): Result.003 file - promoters60/2113462
attagttc

SEQ ID NO: 125604 - DNA, 8 bp, Unknown
  misc_feature (1)..( 8): Result.003 file - promoters60/2113462
ctttttaa

SEQ ID NO: 125605 - DNA, 9 bp, Unknown
  misc_feature (1)..( 9): Result.003 file - promoters60/2113462
agatgaaat

SEQ ID NO: 125606 - DNA, 9 bp, Unknown
  misc_feature (1)..( 9): Result.003 file - promoters60/2113462
agatgagat

SEQ ID NO: 125607 - DNA, 9 bp, Unknown
  misc_feature (1)..( 9): Result.003 file - promoters60/2113462
agatgtaat

SEQ ID NO: 125608 - DNA, 9 bp, Unknown
  misc_feature (1)..( 9): Result.003 file - promoters60/2113462
gattgtaat

SEQ ID NO: 125609 - DNA, 9 bp, Unknown
  misc_feature (1)..( 9): Result.003 file - promoters60/2113462
aacttaatc

SEQ ID NO: 125610 - DNA, 9 bp, Unknown
  misc_feature (1)..( 9): Result.003 file - promoters60/2113462
aactaaatt

SEQ ID NO: 125611 - DNA, 9 bp, Unknown
  misc_feature (1)..( 9): Result.003 file - promoters60/2113462
ccctttatc

SEQ ID NO: 125612 - DNA, 9 bp, Unknown
  misc_feature (1)..( 9): Result.003 file - promoters60/2113462
cattttatc

SEQ ID NO: 125613 - DNA, 9 bp, Unknown
  misc_feature (1)..( 9): Result.003 file - promoters60/2113462
atttataac

SEQ ID NO: 125614 - DNA, 9 bp, Unknown
  misc_feature (1)..( 9): Result.003 file - promoters60/2113462
attgataat

SEQ ID NO: 125615 - DNA, 9 bp, Unknown
  misc_feature (1)..( 9): Result.003 file - promoters60/2113462
attaataat

SEQ ID NO: 125616 - DNA, 9 bp, Unknown
  misc_feature (1)..( 9): Result.003 file - promoters60/2113462
cgtgaaaat

SEQ ID NO: 125617 - DNA, 9 bp, Unknown
  misc_feature (1)..( 9): Result.003 file - promoters60/2113462
aaaatgaac

SEQ ID NO: 125618 - DNA, 9 bp, Unknown
  misc_feature (1)..( 9): Result.003 file - promoters60/2113462
aaaattaac

SEQ ID NO: 125619 - DNA, 9 bp, Unknown
  misc_feature (1)..( 9): Result.003 file - promoters60/2113462
aaaaagaac

SEQ ID NO: 125620 - DNA, 9 bp, Unknown
  misc_feature (1)..( 9): Result.003 file - promoters60/2113462
aaatttacc

SEQ ID NO: 125621 - DNA, 7 bp, Unknown
  misc_feature (1)..( 7): Result.003 file - promoters60/2113462
aaaatta

SEQ ID NO: 125622 - DNA, 7 bp, Unknown
  misc_feature (1)..( 7): Result.003 file - promoters60/2113462
taaatta

SEQ ID NO: 125623 - DNA, 7 bp, Unknown
  misc_feature (1)..( 7): Result.003 file - promoters60/2113462
aaaatta

SEQ ID NO: 125624 - DNA, 7 bp, Unknown
  misc_feature (1)..( 7): Result.003 file - promoters60/2113462
gaaatta

SEQ ID NO: 125625 - DNA, 7 bp, Unknown
  misc_feature (1)..( 7): Result.003 file - promoters60/2113462
taaattt

SEQ ID NO: 125626 - DNA, 8 bp, Unknown
  misc_feature (1)..( 8): Result.003 file - promoters60/2113462
aaattaac

SEQ ID NO: 125627 - DNA, 8 bp, Unknown
  misc_feature (1)..( 8): Result.003 file - promoters60/2113462
aaattatt

SEQ ID NO: 125628 - DNA, 8 bp, Unknown
  misc_feature (1)..( 8): Result.003 file - promoters60/2113462
aaatttaa

SEQ ID NO: 125629 - DNA, 8 bp, Unknown
  misc_feature (1)..( 8): Result.003 file - promoters60/2113462
aaattaca

SEQ ID NO: 125630 - DNA, 11 bp, Unknown
  misc_feature (1)..( 11): Result.003 file - promoters60/2113462
atccatatatg

SEQ ID NO: 125631 - DNA, 11 bp, Unknown
  misc_feature (1)..( 11): Result.003 file - promoters60/2113462
tctcatataca

SEQ ID NO: 125632 - DNA, 11 bp, Unknown
  misc_feature (1)..( 11): Result.003 file - promoters60/2113462
atccttataaa

SEQ ID NO: 125633 - DNA, 11 bp, Unknown
  misc_feature (1)..( 11): Result.003 file - promoters60/2113462
tttgataaaca

SEQ ID NO: 125634 - DNA, 11 bp, Unknown
  misc_feature (1)..( 11): Result.003 file - promoters60/2113466
tttataatttg

SEQ ID NO: 125635 - DNA, 11 bp, Unknown
  misc_feature (1)..( 11): Result.003 file - promoters60/2113466
catataatttg

SEQ ID NO: 125636 - DNA, 11 bp, Unknown
  misc_feature (1)..( 11): Result.003 file - promoters60/2113466
cataaaataaa

SEQ ID NO: 125637 - DNA, 6 bp, Unknown
  misc_feature (1)..( 6): Result.003 file - promoters60/2113466
attcat

SEQ ID NO: 125638 - DNA, 6 bp, Unknown
  misc_feature (1)..( 6): Result.003 file - promoters60/2113466
attcat

SEQ ID NO: 125639 - DNA, 7 bp, Unknown
  misc_feature (1)..( 7): Result.003 file - promoters60/2113466
ttagaat

SEQ ID NO: 125640 - DNA, 7 bp, Unknown
  misc_feature (1)..( 7): Result.003 file - promoters60/2113466
ttacaat

SEQ ID NO: 125641 - DNA, 9 bp, Unknown
  misc_feature (1)..( 9): Result.003 file - promoters60/2113466
agaatctat

SEQ ID NO: 125642 - DNA, 9 bp, Unknown
  misc_feature (1)..( 9): Result.003 file - promoters60/2113466
ataatatat

SEQ ID NO: 125643 - DNA, 9 bp, Unknown
  misc_feature (1)..( 9): Result.003 file - promoters60/2113466
ataaaatat

SEQ ID NO: 125644 - DNA, 9 bp, Unknown
  misc_feature (1)..( 9): Result.003 file - promoters60/2113466
gtttatgtt

SEQ ID NO: 125645 - DNA, 9 bp, Unknown
  misc_feature (1)..( 9): Result.003 file - promoters60/2113466
atttatgtt

SEQ ID NO: 125646 - DNA, 9 bp, Unknown
  misc_feature (1)..( 9): Result.003 file - promoters60/2113466
attcatgat

SEQ ID NO: 125647 - DNA, 6 bp, Unknown
  misc_feature (1)..( 6): Result.003 file - promoters60/2113466
taagtt

SEQ ID NO: 125648 - DNA, 6 bp, Unknown
  misc_feature (1)..( 6): Result.003 file - promoters60/2113466
taagtt

SEQ ID NO: 125649 - DNA, 12 bp, Unknown
  misc_feature (1)..( 12): Result.003 file - promoters60/2113466
cttgtaaccaca

SEQ ID NO: 125650 - DNA, 12 bp, Unknown
  misc_feature (1)..( 12): Result.003 file - promoters60/2113466
cttttaactaca

SEQ ID NO: 125651 - DNA, 8 bp, Unknown
  misc_feature (1)..( 8): Result.003 file - promoters60/2113466
ttaatatg

SEQ ID NO: 125652 - DNA, 8 bp, Unknown
  misc_feature (1)..( 8): Result.003 file - promoters60/2113466
ttaatagg

SEQ ID NO: 125653 - DNA, 8 bp, Unknown
  misc_feature (1)..( 8): Result.003 file - promoters60/2113466
ctaatatg

SEQ ID NO: 125654 - DNA, 7 bp, Unknown
  misc_feature (1)..( 7): Result.003 file - promoters60/2113466
tatatgt

SEQ ID NO: 125655 - DNA, 7 bp, Unknown
  misc_feature (1)..( 7): Result.003 file - promoters60/2113466
tatttgt

SEQ ID NO: 125656 - DNA, 9 bp, Unknown
  misc_feature (1)..( 9): Result.003 file - promoters60/2113466
ctaagaaac

SEQ ID NO: 125657 - DNA, 9 bp, Unknown
  misc_feature (1)..( 9): Result.003 file - promoters60/2113466
ctaaaaaac

SEQ ID NO: 125658 - DNA, 6 bp, Unknown
  misc_feature (1)..( 6): Result.003 file - promoters60/2113466
aaaaat

SEQ ID NO: 125659 - DNA, 6 bp, Unknown
  misc_feature (1)..( 6): Result.003 file - promoters60/2113466
aaaaat

SEQ ID NO: 125660 - DNA, 7 bp, Unknown
  misc_feature (1)..( 7): Result.003 file - promoters60/2113466
ttttgct

SEQ ID NO: 125661 - DNA, 7 bp, Unknown
  misc_feature (1)..( 7): Result.003 file - promoters60/2113466
ttttgct

SEQ ID NO: 125662 - DNA, 7 bp, Unknown
  misc_feature (1)..( 7): Result.003 file - promoters60/2113466
aagtttt

SEQ ID NO: 125663 - DNA, 7 bp, Unknown
  misc_feature (1)..( 7): Result.003 file - promoters60/2113466
aagtttt

SEQ ID NO: 125664 - DNA, 9 bp, Unknown
  misc_feature (1)..( 9): Result.003 file - promoters60/2113466
ataacaata

SEQ ID NO: 125665 - DNA, 9 bp, Unknown
  misc_feature (1)..( 9): Result.003 file - promoters60/2113466
ataaccata

SEQ ID NO: 125666 - DNA, 6 bp, Unknown
  misc_feature (1)..( 6): Result.003 file - promoters60/2113466
tttttg

SEQ ID NO: 125667 - DNA, 6 bp, Unknown
  misc_feature (1)..( 6): Result.003 file - promoters60/2113466
tttttg

SEQ ID NO: 125668 - DNA, 7 bp, Unknown
  misc_feature (1)..( 7): Result.003 file - promoters60/2113466
ttgcttg

SEQ ID NO: 125669 - DNA, 7 bp, Unknown
  misc_feature (1)..( 7): Result.003 file - promoters60/2113466
ttgattg

SEQ ID NO: 125670 - DNA, 9 bp, Unknown
  misc_feature (1)..( 9): Result.003 file - promoters60/2113466
acatacacc

SEQ ID NO: 125671 - DNA, 9 bp, Unknown
  misc_feature (1)..( 9): Result.003 file - promoters60/2113466
acataaacc

SEQ ID NO: 125672 - DNA, 6 bp, Unknown
  misc_feature (1)..( 6): Result.003 file - promoters60/2113466
aacctt

SEQ ID NO: 125673 - DNA, 6 bp, Unknown
  misc_feature (1)..( 6): Result.003 file - promoters60/2113466
aacctt

SEQ ID NO: 125674 - DNA, 6 bp, Unknown
  misc_feature (1)..( 6): Result.003 file - promoters60/2113466
tttgta

SEQ ID NO: 125675 - DNA, 6 bp, Unknown
  misc_feature (1)..( 6): Result.003 file - promoters60/2113466
tttgta

SEQ ID NO: 125676 - DNA, 7 bp, Unknown
  misc_feature (1)..( 7): Result.003 file - promoters60/2113466
caaaata

SEQ ID NO: 125677 - DNA, 7 bp, Unknown
  misc_feature (1)..( 7): Result.003 file - promoters60/2113466
caacata

SEQ ID NO: 125678 - DNA, 6 bp, Unknown
  misc_feature (1)..( 6): Result.003 file - promoters60/2113466
atatac

SEQ ID NO: 125679 - DNA, 6 bp, Unknown
  misc_feature (1)..( 6): Result.003 file - promoters60/2113466
atatac

SEQ ID NO: 125680 - DNA, 10 bp, Unknown
  misc_feature (1)..( 10): Result.003 file - promoters60/2113466
atatttgcat

SEQ ID NO: 125681 - DNA, 10 bp, Unknown
  misc_feature (1)..( 10): Result.003 file - promoters60/2113466
atatatgcat

SEQ ID NO: 125682 - DNA, 6 bp, Unknown
  misc_feature (1)..( 6): Result.003 file - promoters60/2113466
tatttt

SEQ ID NO: 125683 - DNA, 6 bp, Unknown
  misc_feature (1)..( 6): Result.003 file - promoters60/2113466
tatttt

SEQ ID NO: 125684 - DNA, 7 bp, Unknown
  misc_feature (1)..( 7): Result.003 file - promoters60/2113466
ttttttt

SEQ ID NO: 125685 - DNA, 7 bp, Unknown
  misc_feature (1)..( 7): Result.003 file - promoters60/2113466
tttgttt

SEQ ID NO: 125686 - DNA, 7 bp, Unknown
  misc_feature (1)..( 7): Result.003 file - promoters60/2113466
tttgatt

SEQ ID NO: 125687 - DNA, 7 bp, Unknown
  misc_feature (1)..( 7): Result.003 file - promoters60/2113466
tttaatt

SEQ ID NO: 125688 - DNA, 10 bp, Unknown
  misc_feature (1)..( 10): Result.003 file - promoters60/2113466
aattaaacct

SEQ ID NO: 125689 - DNA, 10 bp, Unknown
  misc_feature (1)..( 10): Result.003 file - promoters60/2113466
aatttaacct

SEQ ID NO: 125690 - DNA, 6 bp, Unknown
  misc_feature (1)..( 6): Result.003 file - promoters60/2113466
aaaaca

SEQ ID NO: 125691 - DNA, 6 bp, Unknown
  misc_feature (1)..( 6): Result.003 file - promoters60/2113466
aaaaca

SEQ ID NO: 125692 - DNA, 7 bp, Unknown
  misc_feature (1)..( 7): Result.003 file - promoters60/2113466
tttcaat

SEQ ID NO: 125693 - DNA, 7 bp, Unknown
  misc_feature (1)..( 7): Result.003 file - promoters60/2113466
ttttaat

SEQ ID NO: 125694 - DNA, 15 bp, Unknown
  misc_feature (1)..( 15): Result.003 file - promoters60/2113481
caaaagattcattgt

SEQ ID NO: 125695 - DNA, 15 bp, Unknown
  misc_feature (1)..( 15): Result.003 file - promoters60/2113481
caaatgatacatttg

SEQ ID NO: 125696 - DNA, 15 bp, Unknown
  misc_feature (1)..( 15): Result.003 file - promoters60/2113481
gtaaacataaatttg

SEQ ID NO: 125697 - DNA, 15 bp, Unknown
  misc_feature (1)..( 15): Result.003 file - promoters60/2113481
cgtattacacatttt

SEQ ID NO: 125698 - DNA, 15 bp, Unknown
  misc_feature (1)..( 15): Result.003 file - promoters60/2113481
tagtaactaaattag

SEQ ID NO: 125699 - DNA, 11 bp, Unknown
  misc_feature (1)..( 11): Result.003 file - promoters60/2113481
ttatataaagc

SEQ ID NO: 125700 - DNA, 11 bp, Unknown
  misc_feature (1)..( 11): Result.003 file - promoters60/2113481
ttaaataacaa

SEQ ID NO: 125701 - DNA, 11 bp, Unknown
  misc_feature (1)..( 11): Result.003 file - promoters60/2113481
tttaataactt

SEQ ID NO: 125702 - DNA, 11 bp, Unknown
  misc_feature (1)..( 11): Result.003 file - promoters60/2113481
tgtaataaacg

SEQ ID NO: 125703 - DNA, 11 bp, Unknown
  misc_feature (1)..( 11): Result.003 file - promoters60/2113481
atggataactt

SEQ ID NO: 125704 - DNA, 8 bp, Unknown
  misc_feature (1)..( 8): Result.003 file - promoters60/2113481
tataaata

SEQ ID NO: 125705 - DNA, 8 bp, Unknown
  misc_feature (1)..( 8): Result.003 file - promoters60/2113481
tataaata

SEQ ID NO: 125706 - DNA, 8 bp, Unknown
  misc_feature (1)..( 8): Result.003 file - promoters60/2113481
tataaata

SEQ ID NO: 125707 - DNA, 8 bp, Unknown
  misc_feature (1)..( 8): Result.003 file - promoters60/2113481
tataaact

SEQ ID NO: 125708 - DNA, 8 bp, Unknown
  misc_feature (1)..( 8): Result.003 file - promoters60/2113481
tagaaaaa

SEQ ID NO: 125709 - DNA, 8 bp, Unknown
  misc_feature (1)..( 8): Result.003 file - promoters60/2113481
tagtaaat

SEQ ID NO: 125710 - DNA, 8 bp, Unknown
  misc_feature (1)..( 8): Result.003 file - promoters60/2113481
aagaaaat

SEQ ID NO: 125711 - DNA, 8 bp, Unknown
  misc_feature (1)..( 8): Result.003 file - promoters60/2113481
aagataat

SEQ ID NO: 125712 - DNA, 10 bp, Unknown
  misc_feature (1)..( 10): Result.003 file - promoters60/2113481
agaatctaaa

SEQ ID NO: 125713 - DNA, 10 bp, Unknown
  misc_feature (1)..( 10): Result.003 file - promoters60/2113481
agaatttaat

SEQ ID NO: 125714 - DNA, 10 bp, Unknown
  misc_feature (1)..( 10): Result.003 file - promoters60/2113481
tcaatctaaa

SEQ ID NO: 125715 - DNA, 10 bp, Unknown
  misc_feature (1)..( 10): Result.003 file - promoters60/2113481
tagatttaaa

SEQ ID NO: 125716 - DNA, 12 bp, Unknown
  misc_feature (1)..( 12): Result.003 file - promoters60/2113481
cgttgtttatac

SEQ ID NO: 125717 - DNA, 12 bp, Unknown
  misc_feature (1)..( 12): Result.003 file - promoters60/2113481
attagttaatat

SEQ ID NO: 125718 - DNA, 12 bp, Unknown
  misc_feature (1)..( 12): Result.003 file - promoters60/2113481
atttgttaattt

SEQ ID NO: 125719 - DNA, 13 bp, Unknown
  misc_feature (1)..( 13): Result.003 file - promoters60/2113481
aattagtagataa

SEQ ID NO: 125720 - DNA, 11 bp, Unknown
  misc_feature (1)..( 11): Result.003 file - promoters60/2113481
aaaattatcat

SEQ ID NO: 125721 - DNA, 11 bp, Unknown
  misc_feature (1)..( 11): Result.003 file - promoters60/2113481
aacattaacat

SEQ ID NO: 125722 - DNA, 11 bp, Unknown
  misc_feature (1)..( 11): Result.003 file - promoters60/2113481
aactttaacga

SEQ ID NO: 125723 - DNA, 11 bp, Unknown
  misc_feature (1)..( 11): Result.003 file - promoters60/2113481
atggataactt

SEQ ID NO: 125724 - DNA, 9 bp, Unknown
  misc_feature (1)..( 9): Result.003 file - promoters60/2113481
atttaatat

SEQ ID NO: 125725 - DNA, 9 bp, Unknown
  misc_feature (1)..( 9): Result.003 file - promoters60/2113481
attcaataa

SEQ ID NO: 125726 - DNA, 9 bp, Unknown
  misc_feature (1)..( 9): Result.003 file - promoters60/2113481
ttataatat

SEQ ID NO: 125727 - DNA, 9 bp, Unknown
  misc_feature (1)..( 9): Result.003 file - promoters60/2113481
ataaaataa

SEQ ID NO: 125728 - DNA, 17 bp, Unknown
  misc_feature (1)..( 17): Result.003 file - promoters60/2113502
acaatgggctgggccta

SEQ ID NO: 125729 - DNA, 17 bp, Unknown
  misc_feature (1)..( 17): Result.003 file - promoters60/2113502
caaatgggcctaattat

SEQ ID NO: 125730 - DNA, 17 bp, Unknown
  misc_feature (1)..( 17): Result.003 file - promoters60/2113502
gaaataggcccaacaaa

SEQ ID NO: 125731 - DNA, 17 bp, Unknown
  misc_feature (1)..( 17): Result.003 file - promoters60/2113502
taaaaaggcccattata

SEQ ID NO: 125732 - DNA, 17 bp, Unknown
  misc_feature (1)..( 17): Result.003 file - promoters60/2113502
aaataaagcccattata

SEQ ID NO: 125733 - DNA, 17 bp, Unknown
  misc_feature (1)..( 17): Result.003 file - promoters60/2113502
taaaaaatatctgaaac

SEQ ID NO: 125734 - DNA, 6 bp, Unknown
  misc_feature (1)..( 6): Result.003 file - promoters60/2113592
taaaca

SEQ ID NO: 125735 - DNA, 6 bp, Unknown
  misc_feature (1)..( 6): Result.003 file - promoters60/2113592
taaaca

SEQ ID NO: 125736 - DNA, 10 bp, Unknown
  misc_feature (1)..( 10): Result.003 file - promoters60/2113592
tttttagatc

SEQ ID NO: 125737 - DNA, 10 bp, Unknown
  misc_feature (1)..( 10): Result.003 file - promoters60/2113592
cagttagatc

SEQ ID NO: 125738 - DNA, 10 bp, Unknown
  misc_feature (1)..( 10): Result.003 file - promoters60/2113592
tttatagatt

SEQ ID NO: 125739 - DNA, 9 bp, Unknown
  misc_feature (1)..( 9): Result.003 file - promoters60/2113592
agatcattt

SEQ ID NO: 125740 - DNA, 9 bp, Unknown
  misc_feature (1)..( 9): Result.003 file - promoters60/2113592
aaatctttt

SEQ ID NO: 125741 - DNA, 9 bp, Unknown
  misc_feature (1)..( 9): Result.003 file - promoters60/2113592
aaatgttta

SEQ ID NO: 125742 - DNA, 7 bp, Unknown
  misc_feature (1)..( 7): Result.003 file - promoters60/2113592
gatttat

SEQ ID NO: 125743 - DNA, 7 bp, Unknown
  misc_feature (1)..( 7): Result.003 file - promoters60/2113592
gatctat

SEQ ID NO: 125744 - DNA, 7 bp, Unknown
  misc_feature (1)..( 7): Result.003 file - promoters60/2113592
gatatat

SEQ ID NO: 125745 - DNA, 6 bp, Unknown
  misc_feature (1)..( 6): Result.003 file - promoters60/2113592
ttttca

SEQ ID NO: 125746 - DNA, 6 bp, Unknown
  misc_feature (1)..( 6): Result.003 file - promoters60/2113592
ttttca

SEQ ID NO: 125747 - DNA, 7 bp, Unknown
  misc_feature (1)..( 7): Result.003 file - promoters60/2113592
cgagcaa

SEQ ID NO: 125748 - DNA, 7 bp, Unknown
  misc_feature (1)..( 7): Result.003 file - promoters60/2113592
cgaacaa

SEQ ID NO: 125749 - DNA, 7 bp, Unknown
  misc_feature (1)..( 7): Result.003 file - promoters60/2113592
atatcta

SEQ ID NO: 125750 - DNA, 7 bp, Unknown
  misc_feature (1)..( 7): Result.003 file - promoters60/2113592
ttatcta

SEQ ID NO: 125751 - DNA, 7 bp, Unknown
  misc_feature (1)..( 7): Result.003 file - promoters60/2113592
atagcta

SEQ ID NO: 125752 - DNA, 9 bp, Unknown
  misc_feature (1)..( 9): Result.003 file - promoters60/2113592
ttattgttt

SEQ ID NO: 125753 - DNA, 9 bp, Unknown
  misc_feature (1)..( 9): Result.003 file - promoters60/2113592
ttactgttt

SEQ ID NO: 125754 - DNA, 10 bp, Unknown
  misc_feature (1)..( 10): Result.003 file - promoters60/2113592
attatttttt

SEQ ID NO: 125755 - DNA, 10 bp, Unknown
  misc_feature (1)..( 10): Result.003 file - promoters60/2113592
attacttttt

SEQ ID NO: 125756 - DNA, 7 bp, Unknown
  misc_feature (1)..( 7): Result.003 file - promoters60/2113592
tcaaaag

SEQ ID NO: 125757 - DNA, 7 bp, Unknown
  misc_feature (1)..( 7): Result.003 file - promoters60/2113592
acaaaag

SEQ ID NO: 125758 - DNA, 7 bp, Unknown
  misc_feature (1)..( 7): Result.003 file - promoters60/2113592
acaaaaa

SEQ ID NO: 125759 - DNA, 7 bp, Unknown
  misc_feature (1)..( 7): Result.003 file - promoters60/2113592
ttgggtt

SEQ ID NO: 125760 - DNA, 7 bp, Unknown
  misc_feature (1)..( 7): Result.003 file - promoters60/2113592
ttgagtt

SEQ ID NO: 125761 - DNA, 10 bp, Unknown
  misc_feature (1)..( 10): Result.003 file - promoters60/2113592
actatatata

SEQ ID NO: 125762 - DNA, 10 bp, Unknown
  misc_feature (1)..( 10): Result.003 file - promoters60/2113592
actctatata

SEQ ID NO: 125763 - DNA, 8 bp, Unknown
  misc_feature (1)..( 8): Result.003 file - promoters60/2113592
acatagga

SEQ ID NO: 125764 - DNA, 8 bp, Unknown
  misc_feature (1)..( 8): Result.003 file - promoters60/2113592
acattgga

SEQ ID NO: 125765 - DNA, 6 bp, Unknown
  misc_feature (1)..( 6): Result.003 file - promoters60/2113592
tcaaat

SEQ ID NO: 125766 - DNA, 6 bp, Unknown
  misc_feature (1)..( 6): Result.003 file - promoters60/2113592
tcaaat

SEQ ID NO: 125767 - DNA, 6 bp, Unknown
  misc_feature (1)..( 6): Result.003 file - promoters60/2113592
aaatta

SEQ ID NO: 125768 - DNA, 6 bp, Unknown
  misc_feature (1)..( 6): Result.003 file - promoters60/2113592
aaatta

SEQ ID NO: 125769 - DNA, 8 bp, Unknown
  misc_feature (1)..( 8): Result.003 file - promoters60/2113592
attattat

SEQ ID NO: 125770 - DNA, 8 bp, Unknown
  misc_feature (1)..( 8): Result.003 file - promoters60/2113592
attactat

SEQ ID NO: 125771 - DNA, 6 bp, Unknown
  misc_feature (1)..( 6): Result.003 file - promoters60/2113592
atcgaa

SEQ ID NO: 125772 - DNA, 6 bp, Unknown
  misc_feature (1)..( 6): Result.003 file - promoters60/2113592
atcgaa

SEQ ID NO: 125773 - DNA, 8 bp, Unknown
  misc_feature (1)..( 8): Result.003 file - promoters60/2113592
gaagtcac

SEQ ID NO: 125774 - DNA, 8 bp, Unknown
  misc_feature (1)..( 8): Result.003 file - promoters60/2113592
gaattcac

SEQ ID NO: 125775 - DNA, 7 bp, Unknown
  misc_feature (1)..( 7): Result.003 file - promoters60/2113592
aaataat

SEQ ID NO: 125776 - DNA, 7 bp, Unknown
  misc_feature (1)..( 7): Result.003 file - promoters60/2113592
aaataat

SEQ ID NO: 125777 - DNA, 8 bp, Unknown
  misc_feature (1)..( 8): Result.003 file - promoters60/2113620
gaaggaag

SEQ ID NO: 125778 - DNA, 8 bp, Unknown
  misc_feature (1)..( 8): Result.003 file - promoters60/2113620
aaagaaag

SEQ ID NO: 125779 - DNA, 8 bp, Unknown
  misc_feature (1)..( 8): Result.003 file - promoters60/2113620
gaatgaat

SEQ ID NO: 125780 - DNA, 7 bp, Unknown
  misc_feature (1)..( 7): Result.003 file - promoters60/2113620
caatgaa

SEQ ID NO: 125781 - DNA, 7 bp, Unknown
  misc_feature (1)..( 7): Result.003 file - promoters60/2113620
caaagaa

SEQ ID NO: 125782 - DNA, 7 bp, Unknown
  misc_feature (1)..( 7): Result.003 file - promoters60/2113620
atcgcag

SEQ ID NO: 125783 - DNA, 7 bp, Unknown
  misc_feature (1)..( 7): Result.003 file - promoters60/2113620
atcacag

SEQ ID NO: 125784 - DNA, 6 bp, Unknown
  misc_feature (1)..( 6): Result.003 file - promoters60/2113620
tagtga

SEQ ID NO: 125785 - DNA, 6 bp, Unknown
  misc_feature (1)..( 6): Result.003 file - promoters60/2113620
tagtga

SEQ ID NO: 125786 - DNA, 8 bp, Unknown
  misc_feature (1)..( 8): Result.003 file - promoters60/2113620
tgtgactt

SEQ ID NO: 125787 - DNA, 8 bp, Unknown
  misc_feature (1)..( 8): Result.003 file - promoters60/2113620
tgtgtctt

SEQ ID NO: 125788 - DNA, 6 bp, Unknown
  misc_feature (1)..( 6): Result.003 file - promoters60/2113620
ttgcaa

SEQ ID NO: 125789 - DNA, 6 bp, Unknown
  misc_feature (1)..( 6): Result.003 file - promoters60/2113620
ttgcaa

SEQ ID NO: 125790 - DNA, 6 bp, Unknown
  misc_feature (1)..( 6): Result.003 file - promoters60/2113620
attgtg

SEQ ID NO: 125791 - DNA, 6 bp, Unknown
  misc_feature (1)..( 6): Result.003 file - promoters60/2113620
attgtg

SEQ ID NO: 125792 - DNA, 7 bp, Unknown
  misc_feature (1)..( 7): Result.003 file - promoters60/2113620
tgcctgt

SEQ ID NO: 125793 - DNA, 7 bp, Unknown
  misc_feature (1)..( 7): Result.003 file - promoters60/2113620
tgcatgt

SEQ ID NO: 125794 - DNA, 8 bp, Unknown
  misc_feature (1)..( 8): Result.003 file - promoters60/2113620
caagttta

SEQ ID NO: 125795 - DNA, 8 bp, Unknown
  misc_feature (1)..( 8): Result.003 file - promoters60/2113620
caatttta

SEQ ID NO: 125796 - DNA, 9 bp, Unknown
  misc_feature (1)..( 9): Result.003 file - promoters60/2113620
accagtcaa

SEQ ID NO: 125797 - DNA, 9 bp, Unknown
  misc_feature (1)..( 9): Result.003 file - promoters60/2113620
accagccaa

SEQ ID NO: 125798 - DNA, 7 bp, Unknown
  misc_feature (1)..( 7): Result.003 file - promoters60/2113620
tgtcttg

SEQ ID NO: 125799 - DNA, 7 bp, Unknown
  misc_feature (1)..( 7): Result.003 file - promoters60/2113620
tgtattg

SEQ ID NO: 125800 - DNA, 6 bp, Unknown
  misc_feature (1)..( 6): Result.003 file - promoters60/2113620
atttgt

SEQ ID NO: 125801 - DNA, 6 bp, Unknown
  misc_feature (1)..( 6): Result.003 file - promoters60/2113620
atttgt

SEQ ID NO: 125802 - DNA, 7 bp, Unknown
  misc_feature (1)..( 7): Result.003 file - promoters60/2113620
tattact

SEQ ID NO: 125803 - DNA, 7 bp, Unknown
  misc_feature (1)..( 7): Result.003 file - promoters60/2113620
tatgact

SEQ ID NO: 125804 - DNA, 8 bp, Unknown
  misc_feature (1)..( 8): Result.003 file - promoters60/2113620
ggtgtgat

SEQ ID NO: 125805 - DNA, 8 bp, Unknown
  misc_feature (1)..( 8): Result.003 file - promoters60/2113620
ggtgggat

SEQ ID NO: 125806 - DNA, 6 bp, Unknown
  misc_feature (1)..( 6): Result.003 file - promoters60/2113620
tggaaa

SEQ ID NO: 125807 - DNA, 6 bp, Unknown
  misc_feature (1)..( 6): Result.003 file - promoters60/2113620
tggaaa

SEQ ID NO: 125808 - DNA, 8 bp, Unknown
  misc_feature (1)..( 8): Result.003 file - promoters60/2113620
caacacca

SEQ ID NO: 125809 - DNA, 8 bp, Unknown
  misc_feature (1)..( 8): Result.003 file - promoters60/2113620
caactcca

SEQ ID NO: 125810 - DNA, 7 bp, Unknown
  misc_feature (1)..( 7): Result.003 file - promoters60/2113620
ttacttg

SEQ ID NO: 125811 - DNA, 7 bp, Unknown
  misc_feature (1)..( 7): Result.003 file - promoters60/2113620
ttaattg

SEQ ID NO: 125812 - DNA, 8 bp, Unknown
  misc_feature (1)..( 8): Result.003 file - promoters60/2113620
actttata

SEQ ID NO: 125813 - DNA, 8 bp, Unknown
  misc_feature (1)..( 8): Result.003 file - promoters60/2113620
acttcata

SEQ ID NO: 125814 - DNA, 7 bp, Unknown
  misc_feature (1)..( 7): Result.003 file - promoters60/2113620
catttcc

SEQ ID NO: 125815 - DNA, 7 bp, Unknown
  misc_feature (1)..( 7): Result.003 file - promoters60/2113620
catatcc

SEQ ID NO: 125816 - DNA, 11 bp, Unknown
  misc_feature (1)..( 11): Result.003 file - promoters60/2113624
tgtacttagag

SEQ ID NO: 125817 - DNA, 11 bp, Unknown
  misc_feature (1)..( 11): Result.003 file - promoters60/2113624
tgtatttaact

SEQ ID NO: 125818 - DNA, 11 bp, Unknown
  misc_feature (1)..( 11): Result.003 file - promoters60/2113624
aatatttatac

SEQ ID NO: 125819 - DNA, 8 bp, Unknown
  misc_feature (1)..( 8): Result.003 file - promoters60/2113624
tctttaat

SEQ ID NO: 125820 - DNA, 8 bp, Unknown
  misc_feature (1)..( 8): Result.003 file - promoters60/2113624
aatttaat

SEQ ID NO: 125821 - DNA, 8 bp, Unknown
  misc_feature (1)..( 8): Result.003 file - promoters60/2113624
tctataaa

SEQ ID NO: 125822 - DNA, 12 bp, Unknown
  misc_feature (1)..( 12): Result.003 file - promoters60/2113624
ttgtcaaaaata

SEQ ID NO: 125823 - DNA, 12 bp, Unknown
  misc_feature (1)..( 12): Result.003 file - promoters60/2113624
ctttgaaacata

SEQ ID NO: 125824 - DNA, 12 bp, Unknown
  misc_feature (1)..( 12): Result.003 file - promoters60/2113624
taatcataaatc

SEQ ID NO: 125825 - DNA, 12 bp, Unknown
  misc_feature (1)..( 12): Result.003 file - promoters60/2113624
aaattaaaaaaa

SEQ ID NO: 125826 - DNA, 9 bp, Unknown
  misc_feature (1)..( 9): Result.003 file - promoters60/2113624
gtataaaac

SEQ ID NO: 125827 - DNA, 9 bp, Unknown
  misc_feature (1)..( 9): Result.003 file - promoters60/2113624
ttataaaac

SEQ ID NO: 125828 - DNA, 9 bp, Unknown
  misc_feature (1)..( 9): Result.003 file - promoters60/2113624
gtataaatt

SEQ ID NO: 125829 - DNA, 7 bp, Unknown
  misc_feature (1)..( 7): Result.003 file - promoters60/2113624
ttacaat

SEQ ID NO: 125830 - DNA, 7 bp, Unknown
  misc_feature (1)..( 7): Result.003 file - promoters60/2113624
ttacaaa

SEQ ID NO: 125831 - DNA, 7 bp, Unknown
  misc_feature (1)..( 7): Result.003 file - promoters60/2113624
ttacaat

SEQ ID NO: 125832 - DNA, 9 bp, Unknown
  misc_feature (1)..( 9): Result.003 file - promoters60/2113624
tcaatttac

SEQ ID NO: 125833 - DNA, 9 bp, Unknown
  misc_feature (1)..( 9): Result.003 file - promoters60/2113624
tcatttttt

SEQ ID NO: 125834 - DNA, 9 bp, Unknown
  misc_feature (1)..( 9): Result.003 file - promoters60/2113624
taatttttt

SEQ ID NO: 125835 - DNA, 9 bp, Unknown
  misc_feature (1)..( 9): Result.003 file - promoters60/2113631
gctttgttt

SEQ ID NO: 125836 - DNA, 9 bp, Unknown
  misc_feature (1)..( 9): Result.003 file - promoters60/2113631
gcttcgttt

SEQ ID NO: 125837 - DNA, 6 bp, Unknown
  misc_feature (1)..( 6): Result.003 file - promoters60/2113631
gacatt

SEQ ID NO: 125838 - DNA, 6 bp, Unknown
  misc_feature (1)..( 6): Result.003 file - promoters60/2113631
gacatt

SEQ ID NO: 125839 - DNA, 6 bp, Unknown
  misc_feature (1)..( 6): Result.003 file - promoters60/2113631
ttctaa

SEQ ID NO: 125840 - DNA, 6 bp, Unknown
  misc_feature (1)..( 6): Result.003 file - promoters60/2113631
ttctaa

SEQ ID NO: 125841 - DNA, 9 bp, Unknown
  misc_feature (1)..( 9): Result.003 file - promoters60/2113631
taacttcaa

SEQ ID NO: 125842 - DNA, 9 bp, Unknown
  misc_feature (1)..( 9): Result.003 file - promoters60/2113631
taacgtcaa

SEQ ID NO: 125843 - DNA, 7 bp, Unknown
  misc_feature (1)..( 7): Result.003 file - promoters60/2113631
acataat

SEQ ID NO: 125844 - DNA, 7 bp, Unknown
  misc_feature (1)..( 7): Result.003 file - promoters60/2113631
acaaaat

SEQ ID NO: 125845 - DNA, 7 bp, Unknown
  misc_feature (1)..( 7): Result.003 file - promoters60/2113631
aatctcc

SEQ ID NO: 125846 - DNA, 7 bp, Unknown
  misc_feature (1)..( 7): Result.003 file - promoters60/2113631
aatttcc

SEQ ID NO: 125847 - DNA, 8 bp, Unknown
  misc_feature (1)..( 8): Result.003 file - promoters60/2113631
aaaatctt

SEQ ID NO: 125848 - DNA, 8 bp, Unknown
  misc_feature (1)..( 8): Result.003 file - promoters60/2113631
aaaacctt

SEQ ID NO: 125849 - DNA, 8 bp, Unknown
  misc_feature (1)..( 8): Result.003 file - promoters60/2113631
atggataa

SEQ ID NO: 125850 - DNA, 8 bp, Unknown
  misc_feature (1)..( 8): Result.003 file - promoters60/2113631
atggataa

SEQ ID NO: 125851 - DNA, 9 bp, Unknown
  misc_feature (1)..( 9): Result.003 file - promoters60/2113631
caatgttgt

SEQ ID NO: 125852 - DNA, 9 bp, Unknown
  misc_feature (1)..( 9): Result.003 file - promoters60/2113631
caattttgt

SEQ ID NO: 125853 - DNA, 6 bp, Unknown
  misc_feature (1)..( 6): Result.003 file - promoters60/2113631
tccttg

SEQ ID NO: 125854 - DNA, 6 bp, Unknown
  misc_feature (1)..( 6): Result.003 file - promoters60/2113631
tccttg

SEQ ID NO: 125855 - DNA, 6 bp, Unknown
  misc_feature (1)..( 6): Result.003 file - promoters60/2113631
gttatt

SEQ ID NO: 125856 - DNA, 6 bp, Unknown
  misc_feature (1)..( 6): Result.003 file - promoters60/2113631
gttatt

SEQ ID NO: 125857 - DNA, 7 bp, Unknown
  misc_feature (1)..( 7): Result.003 file - promoters60/2113631
aaatcaa

SEQ ID NO: 125858 - DNA, 7 bp, Unknown
  misc_feature (1)..( 7): Result.003 file - promoters60/2113631
aaaccaa

SEQ ID NO: 125859 - DNA, 6 bp, Unknown
  misc_feature (1)..( 6): Result.003 file - promoters60/2113631
agtaaa

SEQ ID NO: 125860 - DNA, 6 bp, Unknown
  misc_feature (1)..( 6): Result.003 file - promoters60/2113631
agtaaa

SEQ ID NO: 125861 - DNA, 7 bp, Unknown
  misc_feature (1)..( 7): Result.003 file - promoters60/2113631
aatcggg

SEQ ID NO: 125862 - DNA, 7 bp, Unknown
  misc_feature (1)..( 7): Result.003 file - promoters60/2113631
aattggg

SEQ ID NO: 125863 - DNA, 8 bp, Unknown
  misc_feature (1)..( 8): Result.003 file - promoters60/2113631
gaaagaaa

SEQ ID NO: 125864 - DNA, 8 bp, Unknown
  misc_feature (1)..( 8): Result.003 file - promoters60/2113631
gaaacaaa

SEQ ID NO: 125865 - DNA, 10 bp, Unknown
  misc_feature (1)..( 10): Result.003 file - promoters60/2113631
ggaaaagaaa

SEQ ID NO: 125866 - DNA, 10 bp, Unknown
  misc_feature (1)..( 10): Result.003 file - promoters60/2113631
ggaaatgaaa

SEQ ID NO: 125867 - DNA, 7 bp, Unknown
  misc_feature (1)..( 7): Result.003 file - promoters60/2113631
cccacta

SEQ ID NO: 125868 - DNA, 7 bp, Unknown
  misc_feature (1)..( 7): Result.003 file - promoters60/2113631
cccacta

SEQ ID NO: 125869 - DNA, 9 bp, Unknown
  misc_feature (1)..( 9): Result.003 file - promoters60/2113631
aaagaaaag

SEQ ID NO: 125870 - DNA, 9 bp, Unknown
  misc_feature (1)..( 9): Result.003 file - promoters60/2113631
aaagtaaag

SEQ ID NO: 125871 - DNA, 7 bp, Unknown
  misc_feature (1)..( 7): Result.003 file - promoters60/2113631
gtatata

SEQ ID NO: 125872 - DNA, 7 bp, Unknown
  misc_feature (1)..( 7): Result.003 file - promoters60/2113631
gtatata

SEQ ID NO: 125873 - DNA, 10 bp, Unknown
  misc_feature (1)..( 10): Result.003 file - promoters60/2113640
ctaaactaaa

SEQ ID NO: 125874 - DNA, 10 bp, Unknown
  misc_feature (1)..( 10): Result.003 file - promoters60/2113640
ctatactcga

SEQ ID NO: 125875 - DNA, 10 bp, Unknown
  misc_feature (1)..( 10): Result.003 file - promoters60/2113640
taaaacgaaa

SEQ ID NO: 125876 - DNA, 9 bp, Unknown
  misc_feature (1)..( 9): Result.003 file - promoters60/2113640
tagatttta

SEQ ID NO: 125877 - DNA, 9 bp, Unknown
  misc_feature (1)..( 9): Result.003 file - promoters60/2113640
tagatttgt

SEQ ID NO: 125878 - DNA, 9 bp, Unknown
  misc_feature (1)..( 9): Result.003 file - promoters60/2113640
cggatttta

SEQ ID NO: 125879 - DNA, 9 bp, Unknown
  misc_feature (1)..( 9): Result.003 file - promoters60/2113640
aaaattaag

SEQ ID NO: 125880 - DNA, 9 bp, Unknown
  misc_feature (1)..( 9): Result.003 file - promoters60/2113640
aaaaataat

SEQ ID NO: 125881 - DNA, 9 bp, Unknown
  misc_feature (1)..( 9): Result.003 file - promoters60/2113640
ataatgaag

SEQ ID NO: 125882 - DNA, 9 bp, Unknown
  misc_feature (1)..( 9): Result.003 file - promoters60/2113640
taaaatatt

SEQ ID NO: 125883 - DNA, 7 bp, Unknown
  misc_feature (1)..( 7): Result.003 file - promoters60/2113640
aatatat

SEQ ID NO: 125884 - DNA, 7 bp, Unknown
  misc_feature (1)..( 7): Result.003 file - promoters60/2113640
tatatat

SEQ ID NO: 125885 - DNA, 7 bp, Unknown
  misc_feature (1)..( 7): Result.003 file - promoters60/2113640
aatataa

SEQ ID NO: 125886 - DNA, 7 bp, Unknown
  misc_feature (1)..( 7): Result.003 file - promoters60/2113640
ataaaca

SEQ ID NO: 125887 - DNA, 7 bp, Unknown
  misc_feature (1)..( 7): Result.003 file - promoters60/2113640
atataca

SEQ ID NO: 125888 - DNA, 7 bp, Unknown
  misc_feature (1)..( 7): Result.003 file - promoters60/2113640
gtaaaca

SEQ ID NO: 125889 - DNA, 9 bp, Unknown
  misc_feature (1)..( 9): Result.003 file - promoters60/2113640
ttacgaata

SEQ ID NO: 125890 - DNA, 9 bp, Unknown
  misc_feature (1)..( 9): Result.003 file - promoters60/2113640
aatcgaata

SEQ ID NO: 125891 - DNA, 9 bp, Unknown
  misc_feature (1)..( 9): Result.003 file - promoters60/2113640
aatcaaatg

SEQ ID NO: 125892 - DNA, 8 bp, Unknown
  misc_feature (1)..( 8): Result.003 file - promoters60/2113640
atttgtta

SEQ ID NO: 125893 - DNA, 8 bp, Unknown
  misc_feature (1)..( 8): Result.003 file - promoters60/2113640
atttatta

SEQ ID NO: 125894 - DNA, 8 bp, Unknown
  misc_feature (1)..( 8): Result.003 file - promoters60/2113640
ttttgtta

SEQ ID NO: 125895 - DNA, 9 bp, Unknown
  misc_feature (1)..( 9): Result.003 file - promoters60/2113640
aaaattaca

SEQ ID NO: 125896 - DNA, 9 bp, Unknown
  misc_feature (1)..( 9): Result.003 file - promoters60/2113640
aaaatttat

SEQ ID NO: 125897 - DNA, 9 bp, Unknown
  misc_feature (1)..( 9): Result.003 file - promoters60/2113640
aaaataaca

SEQ ID NO: 125898 - DNA, 9 bp, Unknown
  misc_feature (1)..( 9): Result.003 file - promoters60/2113660
ccaagaaaa

SEQ ID NO: 125899 - DNA, 9 bp, Unknown
  misc_feature (1)..( 9): Result.003 file - promoters60/2113660
agaagaaaa

SEQ ID NO: 125900 - DNA, 9 bp, Unknown
  misc_feature (1)..( 9): Result.003 file - promoters60/2113660
ccaacaaaa

SEQ ID NO: 125901 - DNA, 7 bp, Unknown
  misc_feature (1)..( 7): Result.003 file - promoters60/2113660
aaataaa

SEQ ID NO: 125902 - DNA, 7 bp, Unknown
  misc_feature (1)..( 7): Result.003 file - promoters60/2113660
aaataaa

SEQ ID NO: 125903 - DNA, 6 bp, Unknown
  misc_feature (1)..( 6): Result.003 file - promoters60/2113660
ataata

SEQ ID NO: 125904 - DNA, 6 bp, Unknown
  misc_feature (1)..( 6): Result.003 file - promoters60/2113660
ataata

SEQ ID NO: 125905 - DNA, 6 bp, Unknown
  misc_feature (1)..( 6): Result.003 file - promoters60/2113660
atttgc

SEQ ID NO: 125906 - DNA, 6 bp, Unknown
  misc_feature (1)..( 6): Result.003 file - promoters60/2113660
atttgc

SEQ ID NO: 125907 - DNA, 7 bp, Unknown
  misc_feature (1)..( 7): Result.003 file - promoters60/2113660
aaataaa

SEQ ID NO: 125908 - DNA, 7 bp, Unknown
  misc_feature (1)..( 7): Result.003 file - promoters60/2113660
aaataat

SEQ ID NO: 125909 - DNA, 7 bp, Unknown
  misc_feature (1)..( 7): Result.003 file - promoters60/2113660
aaataaa

SEQ ID NO: 125910 - DNA, 6 bp, Unknown
  misc_feature (1)..( 6): Result.003 file - promoters60/2113660
caagta

SEQ ID NO: 125911 - DNA, 6 bp, Unknown
  misc_feature (1)..( 6): Result.003 file - promoters60/2113660
caagta

SEQ ID NO: 125912 - DNA, 7 bp, Unknown
  misc_feature (1)..( 7): Result.003 file - promoters60/2113660
gaatgaa

SEQ ID NO: 125913 - DNA, 7 bp, Unknown
  misc_feature (1)..( 7): Result.003 file - promoters60/2113660
gaaagaa

SEQ ID NO: 125914 - DNA, 7 bp, Unknown
  misc_feature (1)..( 7): Result.003 file - promoters60/2113660
cacgaag

SEQ ID NO: 125915 - DNA, 7 bp, Unknown
  misc_feature (1)..( 7): Result.003 file - promoters60/2113660
cacaaag

SEQ ID NO: 125916 - DNA, 6 bp, Unknown
  misc_feature (1)..( 6): Result.003 file - promoters60/2113660
acataa

SEQ ID NO: 125917 - DNA, 6 bp, Unknown
  misc_feature (1)..( 6): Result.003 file - promoters60/2113660
acataa

SEQ ID NO: 125918 - DNA, 6 bp, Unknown
  misc_feature (1)..( 6): Result.003 file - promoters60/2113660
tcagta

SEQ ID NO: 125919 - DNA, 6 bp, Unknown
  misc_feature (1)..( 6): Result.003 file - promoters60/2113660
tcagta

SEQ ID NO: 125920 - DNA, 8 bp, Unknown
  misc_feature (1)..( 8): Result.003 file - promoters60/2113660
atagtaaa

SEQ ID NO: 125921 - DNA, 8 bp, Unknown
  misc_feature (1)..( 8): Result.003 file - promoters60/2113660
atattaaa

SEQ ID NO: 125922 - DNA, 6 bp, Unknown
  misc_feature (1)..( 6): Result.003 file - promoters60/2113660
aaattg

SEQ ID NO: 125923 - DNA, 6 bp, Unknown
  misc_feature (1)..( 6): Result.003 file - promoters60/2113660
aaattg

SEQ ID NO: 125924 - DNA, 8 bp, Unknown
  misc_feature (1)..( 8): Result.003 file - promoters60/2113660
tgaatttt

SEQ ID NO: 125925 - DNA, 8 bp, Unknown
  misc_feature (1)..( 8): Result.003 file - promoters60/2113660
agaaattt

SEQ ID NO: 125926 - DNA, 8 bp, Unknown
  misc_feature (1)..( 8): Result.003 file - promoters60/2113660
agatattt

SEQ ID NO: 125927 - DNA, 7 bp, Unknown
  misc_feature (1)..( 7): Result.003 file - promoters60/2113660
tttgaat

SEQ ID NO: 125928 - DNA, 7 bp, Unknown
  misc_feature (1)..( 7): Result.003 file - promoters60/2113660
tttgaat

SEQ ID NO: 125929 - DNA, 7 bp, Unknown
  misc_feature (1)..( 7): Result.003 file - promoters60/2113660
acttcaa

SEQ ID NO: 125930 - DNA, 7 bp, Unknown
  misc_feature (1)..( 7): Result.003 file - promoters60/2113660
acttcaa

SEQ ID NO: 125931 - DNA, 7 bp, Unknown
  misc_feature (1)..( 7): Result.003 file - promoters60/2113660
aattttg

SEQ ID NO: 125932 - DNA, 7 bp, Unknown
  misc_feature (1)..( 7): Result.003 file - promoters60/2113660
aatcttg

SEQ ID NO: 125933 - DNA, 6 bp, Unknown
  misc_feature (1)..( 6): Result.003 file - promoters60/2113660
gacaaa

SEQ ID NO: 125934 - DNA, 6 bp, Unknown
  misc_feature (1)..( 6): Result.003 file - promoters60/2113660
gacaaa

SEQ ID NO: 125935 - DNA, 7 bp, Unknown
  misc_feature (1)..( 7): Result.003 file - promoters60/2113660
attcttt

SEQ ID NO: 125936 - DNA, 7 bp, Unknown
  misc_feature (1)..( 7): Result.003 file - promoters60/2113660
attgttt

SEQ ID NO: 125937 - DNA, 6 bp, Unknown
  misc_feature (1)..( 6): Result.003 file - promoters60/2113660
taaatc

SEQ ID NO: 125938 - DNA, 6 bp, Unknown
  misc_feature (1)..( 6): Result.003 file - promoters60/2113660
taaatc

SEQ ID NO: 125939 - DNA, 8 bp, Unknown
  misc_feature (1)..( 8): Result.003 file - promoters60/2113675
gtagagaa

SEQ ID NO: 125940 - DNA, 8 bp, Unknown
  misc_feature (1)..( 8): Result.003 file - promoters60/2113675
gtagagaa

SEQ ID NO: 125941 - DNA, 8 bp, Unknown
  misc_feature (1)..( 8): Result.003 file - promoters60/2113675
gtggagaa

SEQ ID NO: 125942 - DNA, 8 bp, Unknown
  misc_feature (1)..( 8): Result.003 file - promoters60/2113675
gaaaaaat

SEQ ID NO: 125943 - DNA, 8 bp, Unknown
  misc_feature (1)..( 8): Result.003 file - promoters60/2113675
gaagaaat

SEQ ID NO: 125944 - DNA, 8 bp, Unknown
  misc_feature (1)..( 8): Result.003 file - promoters60/2113675
aaagaaag

SEQ ID NO: 125945 - DNA, 9 bp, Unknown
  misc_feature (1)..( 9): Result.003 file - promoters60/2113675
ctttataat

SEQ ID NO: 125946 - DNA, 9 bp, Unknown
  misc_feature (1)..( 9): Result.003 file - promoters60/2113675
cattaaaat

SEQ ID NO: 125947 - DNA, 10 bp, Unknown
  misc_feature (1)..( 10): Result.003 file - promoters60/2113675
acttcataga

SEQ ID NO: 125948 - DNA, 9 bp, Unknown
  misc_feature (1)..( 9): Result.003 file - promoters60/2113734
tgttagaga

SEQ ID NO: 125949 - DNA, 9 bp, Unknown
  misc_feature (1)..( 9): Result.003 file - promoters60/2113734
aattaaaga

SEQ ID NO: 125950 - DNA, 9 bp, Unknown
  misc_feature (1)..( 9): Result.003 file - promoters60/2113734
aattaaaaa

SEQ ID NO: 125951 - DNA, 11 bp, Unknown
  misc_feature (1)..( 11): Result.003 file - promoters60/2113734
tgctaagataa

SEQ ID NO: 125952 - DNA, 11 bp, Unknown
  misc_feature (1)..( 11): Result.003 file - promoters60/2113734
aattaaaataa

SEQ ID NO: 125953 - DNA, 11 bp, Unknown
  misc_feature (1)..( 11): Result.003 file - promoters60/2113734
aattaaaaaat

SEQ ID NO: 125954 - DNA, 9 bp, Unknown
  misc_feature (1)..( 9): Result.003 file - promoters60/2113734
aaagtttaa

SEQ ID NO: 125955 - DNA, 9 bp, Unknown
  misc_feature (1)..( 9): Result.003 file - promoters60/2113734
ggtgtttaa

SEQ ID NO: 125956 - DNA, 9 bp, Unknown
  misc_feature (1)..( 9): Result.003 file - promoters60/2113734
aaactttat

SEQ ID NO: 125957 - DNA, 15 bp, Unknown
  misc_feature (1)..( 15): Result.003 file - promoters60/2113738
tcagaattaatataa

SEQ ID NO: 125958 - DNA, 15 bp, Unknown
  misc_feature (1)..( 15): Result.003 file - promoters60/2113738
tcataattaataaac

SEQ ID NO: 125959 - DNA, 15 bp, Unknown
  misc_feature (1)..( 15): Result.003 file - promoters60/2113738
atataatgaatattt

SEQ ID NO: 125960 - DNA, 15 bp, Unknown
  misc_feature (1)..( 15): Result.003 file - promoters60/2113738
acatgatttgaataa

SEQ ID NO: 125961 - DNA, 15 bp, Unknown
  misc_feature (1)..( 15): Result.003 file - promoters60/2113738
ccataggaaatattt

SEQ ID NO: 125962 - DNA, 15 bp, Unknown
  misc_feature (1)..( 15): Result.003 file - promoters60/2113738
tgatgatgaatgtga

SEQ ID NO: 125963 - DNA, 10 bp, Unknown
  misc_feature (1)..( 10): Result.003 file - promoters60/2113738
taaatataaa

SEQ ID NO: 125964 - DNA, 10 bp, Unknown
  misc_feature (1)..( 10): Result.003 file - promoters60/2113738
gaaatatttt

SEQ ID NO: 125965 - DNA, 10 bp, Unknown
  misc_feature (1)..( 10): Result.003 file - promoters60/2113738
gaaataggtc

SEQ ID NO: 125966 - DNA, 10 bp, Unknown
  misc_feature (1)..( 10): Result.003 file - promoters60/2113738
tgaatatttg

SEQ ID NO: 125967 - DNA, 10 bp, Unknown
  misc_feature (1)..( 10): Result.003 file - promoters60/2113738
aaattatttg

SEQ ID NO: 125968 - DNA, 15 bp, Unknown
  misc_feature (1)..( 15): Result.003 file - promoters60/2113738
taactttatttctcc

SEQ ID NO: 125969 - DNA, 15 bp, Unknown
  misc_feature (1)..( 15): Result.003 file - promoters60/2113738
taatttttttttcct

SEQ ID NO: 125970 - DNA, 15 bp, Unknown
  misc_feature (1)..( 15): Result.003 file - promoters60/2113738
tataattatttttgg

SEQ ID NO: 125971 - DNA, 15 bp, Unknown
  misc_feature (1)..( 15): Result.003 file - promoters60/2113738
gtgaatcattgaaat

SEQ ID NO: 125972 - DNA, 15 bp, Unknown
  misc_feature (1)..( 15): Result.003 file - promoters60/2113738
tgactttgttccttc

SEQ ID NO: 125973 - DNA, 13 bp, Unknown
  misc_feature (1)..( 13): Result.003 file - promoters60/2113839
attcattaacaaa

SEQ ID NO: 125974 - DNA, 13 bp, Unknown
  misc_feature (1)..( 13): Result.003 file - promoters60/2113839
attcataaaaaaa

SEQ ID NO: 125975 - DNA, 13 bp, Unknown
  misc_feature (1)..( 13): Result.003 file - promoters60/2113839
atttataaagaaa

SEQ ID NO: 125976 - DNA, 13 bp, Unknown
  misc_feature (1)..( 13): Result.003 file - promoters60/2113839
cagaaaaaagaaa

SEQ ID NO: 125977 - DNA, 8 bp, Unknown
  misc_feature (1)..( 8): Result.003 file - promoters60/2113839
taacaaat

SEQ ID NO: 125978 - DNA, 8 bp, Unknown
  misc_feature (1)..( 8): Result.003 file - promoters60/2113839
taaaaaaa

SEQ ID NO: 125979 - DNA, 8 bp, Unknown
  misc_feature (1)..( 8): Result.003 file - promoters60/2113839
gaaccaat

SEQ ID NO: 125980 - DNA, 8 bp, Unknown
  misc_feature (1)..( 8): Result.003 file - promoters60/2113839
gaaaaaag

SEQ ID NO: 125981 - DNA, 12 bp, Unknown
  misc_feature (1)..( 12): Result.003 file - promoters60/2113839
aactaattcaat

SEQ ID NO: 125982 - DNA, 12 bp, Unknown
  misc_feature (1)..( 12): Result.003 file - promoters60/2113839
gactaatgcaat

SEQ ID NO: 125983 - DNA, 12 bp, Unknown
  misc_feature (1)..( 12): Result.003 file - promoters60/2113839
aaccaatggttg

SEQ ID NO: 125984 - DNA, 13 bp, Unknown
  misc_feature (1)..( 13): Result.003 file - promoters60/2113839
atttctacaaaac

SEQ ID NO: 125985 - DNA, 13 bp, Unknown
  misc_feature (1)..( 13): Result.003 file - promoters60/2113839
attcctaaaaaat

SEQ ID NO: 125986 - DNA, 13 bp, Unknown
  misc_feature (1)..( 13): Result.003 file - promoters60/2113839
atggtcaaaaaag

SEQ ID NO: 125987 - DNA, 13 bp, Unknown
  misc_feature (1)..( 13): Result.003 file - promoters60/2113839
taaaataaatata

SEQ ID NO: 125988 - DNA, 10 bp, Unknown
  misc_feature (1)..( 10): Result.003 file - promoters60/2113839
aaataaaaca

SEQ ID NO: 125989 - DNA, 10 bp, Unknown
  misc_feature (1)..( 10): Result.003 file - promoters60/2113839
aaagaaaaca

SEQ ID NO: 125990 - DNA, 10 bp, Unknown
  misc_feature (1)..( 10): Result.003 file - promoters60/2113839
aaagaaagaa

SEQ ID NO: 125991 - DNA, 10 bp, Unknown
  misc_feature (1)..( 10): Result.003 file - promoters60/2113839
aaaaaaatct

SEQ ID NO: 125992 - DNA, 9 bp, Unknown
  misc_feature (1)..( 9): Result.003 file - promoters60/2113839
caaaacaaa

SEQ ID NO: 125993 - DNA, 9 bp, Unknown
  misc_feature (1)..( 9): Result.003 file - promoters60/2113839
caaatcaaa

SEQ ID NO: 125994 - DNA, 9 bp, Unknown
  misc_feature (1)..( 9): Result.003 file - promoters60/2113839
taaaacaat

SEQ ID NO: 125995 - DNA, 7 bp, Unknown
  misc_feature (1)..( 7): Result.003 file - promoters60/2113839
tattttg

SEQ ID NO: 125996 - DNA, 7 bp, Unknown
  misc_feature (1)..( 7): Result.003 file - promoters60/2113839
aattttg

SEQ ID NO: 125997 - DNA, 7 bp, Unknown
  misc_feature (1)..( 7): Result.003 file - promoters60/2113839
aatcttg

SEQ ID NO: 125998 - DNA, 9 bp, Unknown
  misc_feature (1)..( 9): Result.003 file - promoters60/2113839
tcatgttta

SEQ ID NO: 125999 - DNA, 9 bp, Unknown
  misc_feature (1)..( 9): Result.003 file - promoters60/2113839
ttttgttta

SEQ ID NO: 126000 - DNA, 9 bp, Unknown
  misc_feature (1)..( 9): Result.003 file - promoters60/2113839
ttttgtttc

SEQ ID NO: 126001 - DNA, 9 bp, Unknown
  misc_feature (1)..( 9): Result.003 file - promoters60/2113839
ctttgatta

SEQ ID NO: 126002 - DNA, 8 bp, Unknown
  misc_feature (1)..( 8): Result.003 file - promoters60/2113839
ttgaaatc

SEQ ID NO: 126003 - DNA, 8 bp, Unknown
  misc_feature (1)..( 8): Result.003 file - promoters60/2113839
ttgagatc

SEQ ID NO: 126004 - DNA, 8 bp, Unknown
  misc_feature (1)..( 8): Result.003 file - promoters60/2113839
atgagatg

SEQ ID NO: 126005 - DNA, 9 bp, Unknown
  misc_feature (1)..( 9): Result.003 file - promoters60/2113839
gaaatgatg

SEQ ID NO: 126006 - DNA, 9 bp, Unknown
  misc_feature (1)..( 9): Result.003 file - promoters60/2113839
gaaatgaag

SEQ ID NO: 126007 - DNA, 9 bp, Unknown
  misc_feature (1)..( 9): Result.003 file - promoters60/2113839
ctaatcaag

SEQ ID NO: 126008 - DNA, 8 bp, Unknown
  misc_feature (1)..( 8): Result.003 file - promoters60/2113839
aaacatat

SEQ ID NO: 126009 - DNA, 8 bp, Unknown
  misc_feature (1)..( 8): Result.003 file - promoters60/2113839
aaatatat

SEQ ID NO: 126010 - DNA, 8 bp, Unknown
  misc_feature (1)..( 8): Result.003 file - promoters60/2113839
aaaaatag

SEQ ID NO: 126011 - DNA, 12 bp, Unknown
  misc_feature (1)..( 12): Result.003 file - promoters60/2113839
tcatattacaat

SEQ ID NO: 126012 - DNA, 12 bp, Unknown
  misc_feature (1)..( 12): Result.003 file - promoters60/2113839
ttttattaaaat

SEQ ID NO: 126013 - DNA, 12 bp, Unknown
  misc_feature (1)..( 12): Result.003 file - promoters60/2113839
ttttcttaagtc

SEQ ID NO: 126014 - DNA, 9 bp, Unknown
  misc_feature (1)..( 9): Result.003 file - promoters60/2113839
ctttcacaa

SEQ ID NO: 126015 - DNA, 9 bp, Unknown
  misc_feature (1)..( 9): Result.003 file - promoters60/2113839
ttttgacaa

SEQ ID NO: 126016 - DNA, 9 bp, Unknown
  misc_feature (1)..( 9): Result.003 file - promoters60/2113839
ctttcataa

SEQ ID NO: 126017 - DNA, 9 bp, Unknown
  misc_feature (1)..( 9): Result.003 file - promoters60/2113839
aaataaatt

SEQ ID NO: 126018 - DNA, 9 bp, Unknown
  misc_feature (1)..( 9): Result.003 file - promoters60/2113839
aaaaaaaag

SEQ ID NO: 126019 - DNA, 10 bp, Unknown
  misc_feature (1)..( 10): Result.003 file - promoters60/2113839
aaattaaatt

SEQ ID NO: 126020 - DNA, 7 bp, Unknown
  misc_feature (1)..( 7): Result.003 file - promoters60/2113839
atataaa

SEQ ID NO: 126021 - DNA, 7 bp, Unknown
  misc_feature (1)..( 7): Result.003 file - promoters60/2113839
ctataaa

SEQ ID NO: 126022 - DNA, 7 bp, Unknown
  misc_feature (1)..( 7): Result.003 file - promoters60/2113839
ctataag

SEQ ID NO: 126023 - DNA, 10 bp, Unknown
  misc_feature (1)..( 10): Result.003 file - promoters60/2113842
ttaatctttt

SEQ ID NO: 126024 - DNA, 10 bp, Unknown
  misc_feature (1)..( 10): Result.003 file - promoters60/2113842
ttaatttttt

SEQ ID NO: 126025 - DNA, 8 bp, Unknown
  misc_feature (1)..( 8): Result.003 file - promoters60/2113842
ttttatat

SEQ ID NO: 126026 - DNA, 8 bp, Unknown
  misc_feature (1)..( 8): Result.003 file - promoters60/2113842
ttttttat

SEQ ID NO: 126027 - DNA, 7 bp, Unknown
  misc_feature (1)..( 7): Result.003 file - promoters60/2113842
tttagat

SEQ ID NO: 126028 - DNA, 7 bp, Unknown
  misc_feature (1)..( 7): Result.003 file - promoters60/2113842
ttttgat

SEQ ID NO: 126029 - DNA, 6 bp, Unknown
  misc_feature (1)..( 6): Result.003 file - promoters60/2113842
ttatat

SEQ ID NO: 126030 - DNA, 6 bp, Unknown
  misc_feature (1)..( 6): Result.003 file - promoters60/2113842
ttatat

SEQ ID NO: 126031 - DNA, 10 bp, Unknown
  misc_feature (1)..( 10): Result.003 file - promoters60/2113842
cgtaaaaata

SEQ ID NO: 126032 - DNA, 10 bp, Unknown
  misc_feature (1)..( 10): Result.003 file - promoters60/2113842
cgtaaaaata

SEQ ID NO: 126033 - DNA, 10 bp, Unknown
  misc_feature (1)..( 10): Result.003 file - promoters60/2113842
cctatattaa

SEQ ID NO: 126034 - DNA, 10 bp, Unknown
  misc_feature (1)..( 10): Result.003 file - promoters60/2113842
aaaataataa

SEQ ID NO: 126035 - DNA, 10 bp, Unknown
  misc_feature (1)..( 10): Result.003 file - promoters60/2113842
aaaataatat

SEQ ID NO: 126036 - DNA, 7 bp, Unknown
  misc_feature (1)..( 7): Result.003 file - promoters60/2113842
aacgtta

SEQ ID NO: 126037 - DNA, 7 bp, Unknown
  misc_feature (1)..( 7): Result.003 file - promoters60/2113842
aacttta

SEQ ID NO: 126038 - DNA, 6 bp, Unknown
  misc_feature (1)..( 6): Result.003 file - promoters60/2113842
gtatca

SEQ ID NO: 126039 - DNA, 6 bp, Unknown
  misc_feature (1)..( 6): Result.003 file - promoters60/2113842
gtatca

SEQ ID NO: 126040 - DNA, 8 bp, Unknown
  misc_feature (1)..( 8): Result.003 file - promoters60/2113842
atcactat

SEQ ID NO: 126041 - DNA, 8 bp, Unknown
  misc_feature (1)..( 8): Result.003 file - promoters60/2113842
ctcaatat

SEQ ID NO: 126042 - DNA, 8 bp, Unknown
  misc_feature (1)..( 8): Result.003 file - promoters60/2113842
ctcaatat

SEQ ID NO: 126043 - DNA, 7 bp, Unknown
  misc_feature (1)..( 7): Result.003 file - promoters60/2113842
aaaatca

SEQ ID NO: 126044 - DNA, 7 bp, Unknown
  misc_feature (1)..( 7): Result.003 file - promoters60/2113842
aaaatca

SEQ ID NO: 126045 - DNA, 8 bp, Unknown
  misc_feature (1)..( 8): Result.003 file - promoters60/2113842
atttacat

SEQ ID NO: 126046 - DNA, 8 bp, Unknown
  misc_feature (1)..( 8): Result.003 file - promoters60/2113842
attcacat

SEQ ID NO: 126047 - DNA, 7 bp, Unknown
  misc_feature (1)..( 7): Result.003 file - promoters60/2113842
taaattt

SEQ ID NO: 126048 - DNA, 7 bp, Unknown
  misc_feature (1)..( 7): Result.003 file - promoters60/2113842
taagttt

SEQ ID NO: 126049 - DNA, 6 bp, Unknown
  misc_feature (1)..( 6): Result.003 file - promoters60/2113842
atattt

SEQ ID NO: 126050 - DNA, 6 bp, Unknown
  misc_feature (1)..( 6): Result.003 file - promoters60/2113842
atattt

SEQ ID NO: 126051 - DNA, 7 bp, Unknown
  misc_feature (1)..( 7): Result.003 file - promoters60/2113842
tcataaa

SEQ ID NO: 126052 - DNA, 7 bp, Unknown
  misc_feature (1)..( 7): Result.003 file - promoters60/2113842
tcaaaaa

SEQ ID NO: 126053 - DNA, 6 bp, Unknown
  misc_feature (1)..( 6): Result.003 file - promoters60/2113842
attgct

SEQ ID NO: 126054 - DNA, 6 bp, Unknown
  misc_feature (1)..( 6): Result.003 file - promoters60/2113842
attgct

SEQ ID NO: 126055 - DNA, 6 bp, Unknown
  misc_feature (1)..( 6): Result.003 file - promoters60/2113842
atctaa

SEQ ID NO: 126056 - DNA, 6 bp, Unknown
  misc_feature (1)..( 6): Result.003 file - promoters60/2113842
atctaa

SEQ ID NO: 126057 - DNA, 7 bp, Unknown
  misc_feature (1)..( 7): Result.003 file - promoters60/2113842
aaccacc

SEQ ID NO: 126058 - DNA, 7 bp, Unknown
  misc_feature (1)..( 7): Result.003 file - promoters60/2113842
aaccacc

SEQ ID NO: 126059 - DNA, 7 bp, Unknown
  misc_feature (1)..( 7): Result.003 file - promoters60/2113842
atggtca

SEQ ID NO: 126060 - DNA, 7 bp, Unknown
  misc_feature (1)..( 7): Result.003 file - promoters60/2113842
atggtca

SEQ ID NO: 126061 - DNA, 8 bp, Unknown
  misc_feature (1)..( 8): Result.003 file - promoters60/2113842
agaacaat

SEQ ID NO: 126062 - DNA, 8 bp, Unknown
  misc_feature (1)..( 8): Result.003 file - promoters60/2113842
agaccaat

SEQ ID NO: 126063 - DNA, 7 bp, Unknown
  misc_feature (1)..( 7): Result.003 file - promoters60/2113842
tatatat

SEQ ID NO: 126064 - DNA, 7 bp, Unknown
  misc_feature (1)..( 7): Result.003 file - promoters60/2113842
tatataa

SEQ ID NO: 126065 - DNA, 7 bp, Unknown
  misc_feature (1)..( 7): Result.003 file - promoters60/2113842
tatttaa

SEQ ID NO: 126066 - DNA, 6 bp, Unknown
  misc_feature (1)..( 6): Result.003 file - promoters60/2113842
atttta

SEQ ID NO: 126067 - DNA, 6 bp, Unknown
  misc_feature (1)..( 6): Result.003 file - promoters60/2113842
atttta

SEQ ID NO: 126068 - DNA, 8 bp, Unknown
  misc_feature (1)..( 8): Result.003 file - promoters60/2113842
ttatttga

SEQ ID NO: 126069 - DNA, 8 bp, Unknown
  misc_feature (1)..( 8): Result.003 file - promoters60/2113842
ttatttga

SEQ ID NO: 126070 - DNA, 6 bp, Unknown
  misc_feature (1)..( 6): Result.003 file - promoters60/2113842
ttttca

SEQ ID NO: 126071 - DNA, 6 bp, Unknown
  misc_feature (1)..( 6): Result.003 file - promoters60/2113842
ttttca

SEQ ID NO: 126072 - DNA, 7 bp, Unknown
  misc_feature (1)..( 7): Result.003 file - promoters60/2113842
aaggggt

SEQ ID NO: 126073 - DNA, 7 bp, Unknown
  misc_feature (1)..( 7): Result.003 file - promoters60/2113842
aagtggt

SEQ ID NO: 126074 - DNA, 10 bp, Unknown
  misc_feature (1)..( 10): Result.003 file - promoters60/2113842
aagtaaactt

SEQ ID NO: 126075 - DNA, 10 bp, Unknown
  misc_feature (1)..( 10): Result.003 file - promoters60/2113842
aagttaactt

SEQ ID NO: 126076 - DNA, 6 bp, Unknown
  misc_feature (1)..( 6): Result.003 file - promoters60/2113842
tcacaa

SEQ ID NO: 126077 - DNA, 6 bp, Unknown
  misc_feature (1)..( 6): Result.003 file - promoters60/2113842
tcacaa

SEQ ID NO: 126078 - DNA, 11 bp, Unknown
  misc_feature (1)..( 11): Result.003 file - promoters60/2113846
gttataattta

SEQ ID NO: 126079 - DNA, 11 bp, Unknown
  misc_feature (1)..( 11): Result.003 file - promoters60/2113846
actatcatttt

SEQ ID NO: 126080 - DNA, 11 bp, Unknown
  misc_feature (1)..( 11): Result.003 file - promoters60/2113846
gttagaattac

SEQ ID NO: 126081 - DNA, 11 bp, Unknown
  misc_feature (1)..( 11): Result.003 file - promoters60/2113846
agtatgattaa

SEQ ID NO: 126082 - DNA, 7 bp, Unknown
  misc_feature (1)..( 7): Result.003 file - promoters60/2113846
ccatttt

SEQ ID NO: 126083 - DNA, 9 bp, Unknown
  misc_feature (1)..( 9): Result.003 file - promoters60/2113846
aatttaacg

SEQ ID NO: 126084 - DNA, 9 bp, Unknown
  misc_feature (1)..( 9): Result.003 file - promoters60/2113846
tttttgacg

SEQ ID NO: 126085 - DNA, 9 bp, Unknown
  misc_feature (1)..( 9): Result.003 file - promoters60/2113846
aatttaatg

SEQ ID NO: 126086 - DNA, 9 bp, Unknown
  misc_feature (1)..( 9): Result.003 file - promoters60/2113846
tatttaaaa

SEQ ID NO: 126087 - DNA, 11 bp, Unknown
  misc_feature (1)..( 11): Result.003 file - promoters60/2113846
caaatttattt

SEQ ID NO: 126088 - DNA, 11 bp, Unknown
  misc_feature (1)..( 11): Result.003 file - promoters60/2113846
aaaaattagat

SEQ ID NO: 126089 - DNA, 11 bp, Unknown
  misc_feature (1)..( 11): Result.003 file - promoters60/2113846
tgtatttattt

SEQ ID NO: 126090 - DNA, 11 bp, Unknown
  misc_feature (1)..( 11): Result.003 file - promoters60/2113846
taaaagaatca

SEQ ID NO: 126091 - DNA, 7 bp, Unknown
  misc_feature (1)..( 7): Result.003 file - promoters60/2113846
ttagatc

SEQ ID NO: 126092 - DNA, 7 bp, Unknown
  misc_feature (1)..( 7): Result.003 file - promoters60/2113846
ttatatc

SEQ ID NO: 126093 - DNA, 7 bp, Unknown
  misc_feature (1)..( 7): Result.003 file - promoters60/2113846
ttatatc

SEQ ID NO: 126094 - DNA, 7 bp, Unknown
  misc_feature (1)..( 7): Result.003 file - promoters60/2113846
ttatatt

SEQ ID NO: 126095 - DNA, 10 bp, Unknown
  misc_feature (1)..( 10): Result.003 file - promoters60/2113889
cttgagttta

SEQ ID NO: 126096 - DNA, 10 bp, Unknown
  misc_feature (1)..( 10): Result.003 file - promoters60/2113889
tttgactttt

SEQ ID NO: 126097 - DNA, 10 bp, Unknown
  misc_feature (1)..( 10): Result.003 file - promoters60/2113889
gttgaatttt

SEQ ID NO: 126098 - DNA, 10 bp, Unknown
  misc_feature (1)..( 10): Result.003 file - promoters60/2113889
gttggcttct

SEQ ID NO: 126099 - DNA, 10 bp, Unknown
  misc_feature (1)..( 10): Result.003 file - promoters60/2113889
ttctaatttt

SEQ ID NO: 126100 - DNA, 10 bp, Unknown
  misc_feature (1)..( 10): Result.003 file - promoters60/2113889
gttaactttg

SEQ ID NO: 126101 - DNA, 10 bp, Unknown
  misc_feature (1)..( 10): Result.003 file - promoters60/2113889
gttgactggt

SEQ ID NO: 126102 - DNA, 10 bp, Unknown
  misc_feature (1)..( 10): Result.003 file - promoters60/2113889
gaaaaacaaa

SEQ ID NO: 126103 - DNA, 10 bp, Unknown
  misc_feature (1)..( 10): Result.003 file - promoters60/2113889
acggaacaaa

SEQ ID NO: 126104 - DNA, 10 bp, Unknown
  misc_feature (1)..( 10): Result.003 file - promoters60/2113889
gtcaaacaaa

SEQ ID NO: 126105 - DNA, 10 bp, Unknown
  misc_feature (1)..( 10): Result.003 file - promoters60/2113889
tttaaaaaaa

SEQ ID NO: 126106 - DNA, 10 bp, Unknown
  misc_feature (1)..( 10): Result.003 file - promoters60/2113889
tataagaaaa

SEQ ID NO: 126107 - DNA, 10 bp, Unknown
  misc_feature (1)..( 10): Result.003 file - promoters60/2113889
tatgagaaat

SEQ ID NO: 126108 - DNA, 10 bp, Unknown
  misc_feature (1)..( 10): Result.003 file - promoters60/2113889
aatgaaaaac

SEQ ID NO: 126109 - DNA, 10 bp, Unknown
  misc_feature (1)..( 10): Result.003 file - promoters60/2113889
aatgaaattc

SEQ ID NO: 126110 - DNA, 11 bp, Unknown
  misc_feature (1)..( 11): Result.003 file - promoters60/2113889
tatgagaaatc

SEQ ID NO: 126111 - DNA, 11 bp, Unknown
  misc_feature (1)..( 11): Result.003 file - promoters60/2113889
aatgatattcg

SEQ ID NO: 126112 - DNA, 11 bp, Unknown
  misc_feature (1)..( 11): Result.003 file - promoters60/2113889
aatgttatttt

SEQ ID NO: 126113 - DNA, 11 bp, Unknown
  misc_feature (1)..( 11): Result.003 file - promoters60/2113889
gattttatttt

SEQ ID NO: 126114 - DNA, 12 bp, Unknown
  misc_feature (1)..( 12): Result.003 file - promoters60/2113889
attaaccttgag

SEQ ID NO: 126115 - DNA, 12 bp, Unknown
  misc_feature (1)..( 12): Result.003 file - promoters60/2113889
gttaactttgta

SEQ ID NO: 126116 - DNA, 12 bp, Unknown
  misc_feature (1)..( 12): Result.003 file - promoters60/2113889
gttaatttttga

SEQ ID NO: 126117 - DNA, 12 bp, Unknown
  misc_feature (1)..( 12): Result.003 file - promoters60/2113889
catcacttggta

SEQ ID NO: 126118 - DNA, 12 bp, Unknown
  misc_feature (1)..( 12): Result.003 file - promoters60/2113889
tctaattttcta

SEQ ID NO: 126119 - DNA, 12 bp, Unknown
  misc_feature (1)..( 12): Result.003 file - promoters60/2113889
attaacttatag

SEQ ID NO: 126120 - DNA, 12 bp, Unknown
  misc_feature (1)..( 12): Result.003 file - promoters60/2113889
gttgactggttc

SEQ ID NO: 126121 - DNA, 12 bp, Unknown
  misc_feature (1)..( 12): Result.003 file - promoters60/2113889
gttaatttttga

SEQ ID NO: 126122 - DNA, 12 bp, Unknown
  misc_feature (1)..( 12): Result.003 file - promoters60/2113889
tctaattttcta

SEQ ID NO: 126123 - DNA, 12 bp, Unknown
  misc_feature (1)..( 12): Result.003 file - promoters60/2113889
ttgaattttttt

SEQ ID NO: 126124 - DNA, 12 bp, Unknown
  misc_feature (1)..( 12): Result.003 file - promoters60/2113889
gttaactttgta

SEQ ID NO: 126125 - DNA, 12 bp, Unknown
  misc_feature (1)..( 12): Result.003 file - promoters60/2113889
catcacttggta

SEQ ID NO: 126126 - DNA, 12 bp, Unknown
  misc_feature (1)..( 12): Result.003 file - promoters60/2113889
gttgactggttc

SEQ ID NO: 126127 - DNA, 18 bp, Unknown
  misc_feature (1)..( 18): Result.003 file - promoters60/2113928
aaaaattattaaagtata

SEQ ID NO: 126128 - DNA, 18 bp, Unknown
  misc_feature (1)..( 18): Result.003 file - promoters60/2113928
aaagattattaaattata

SEQ ID NO: 126129 - DNA, 16 bp, Unknown
  misc_feature (1)..( 16): Result.003 file - promoters60/2113928
cattgatcaaagttaa

SEQ ID NO: 126130 - DNA, 7 bp, Unknown
  misc_feature (1)..( 7): Result.003 file - promoters60/2113928
ttactaa

SEQ ID NO: 126131 - DNA, 7 bp, Unknown
  misc_feature (1)..( 7): Result.003 file - promoters60/2113928
ttattaa

SEQ ID NO: 126132 - DNA, 8 bp, Unknown
  misc_feature (1)..( 8): Result.003 file - promoters60/2113928
taatttta

SEQ ID NO: 126133 - DNA, 8 bp, Unknown
  misc_feature (1)..( 8): Result.003 file - promoters60/2113928
taatttta

SEQ ID NO: 126134 - DNA, 8 bp, Unknown
  misc_feature (1)..( 8): Result.003 file - promoters60/2113928
agtcggtc

SEQ ID NO: 126135 - DNA, 8 bp, Unknown
  misc_feature (1)..( 8): Result.003 file - promoters60/2113928
agtctgtc

SEQ ID NO: 126136 - DNA, 6 bp, Unknown
  misc_feature (1)..( 6): Result.003 file - promoters60/2113928
atttta

SEQ ID NO: 126137 - DNA, 6 bp, Unknown
  misc_feature (1)..( 6): Result.003 file - promoters60/2113928
atttta

SEQ ID NO: 126138 - DNA, 9 bp, Unknown
  misc_feature (1)..( 9): Result.003 file - promoters60/2113928
gaattcaaa

SEQ ID NO: 126139 - DNA, 9 bp, Unknown
  misc_feature (1)..( 9): Result.003 file - promoters60/2113928
gaattcctc

SEQ ID NO: 126140 - DNA, 9 bp, Unknown
  misc_feature (1)..( 9): Result.003 file - promoters60/2113928
gaatacaaa

SEQ ID NO: 126141 - DNA, 6 bp, Unknown
  misc_feature (1)..( 6): Result.003 file - promoters60/2113928
atattt

SEQ ID NO: 126142 - DNA, 6 bp, Unknown
  misc_feature (1)..( 6): Result.003 file - promoters60/2113928
atattt

SEQ ID NO: 126143 - DNA, 9 bp, Unknown
  misc_feature (1)..( 9): Result.003 file - promoters60/2113928
tgctaatat

SEQ ID NO: 126144 - DNA, 9 bp, Unknown
  misc_feature (1)..( 9): Result.003 file - promoters60/2113928
aaataatat

SEQ ID NO: 126145 - DNA, 9 bp, Unknown
  misc_feature (1)..( 9): Result.003 file - promoters60/2113928
aaaaaatat

SEQ ID NO: 126146 - DNA, 10 bp, Unknown
  misc_feature (1)..( 10): Result.003 file - promoters60/2113928
ctatatatat

SEQ ID NO: 126147 - DNA, 10 bp, Unknown
  misc_feature (1)..( 10): Result.003 file - promoters60/2113928
ttatttatat

SEQ ID NO: 126148 - DNA, 10 bp, Unknown
  misc_feature (1)..( 10): Result.003 file - promoters60/2113928
ctataaatag

SEQ ID NO: 126149 - DNA, 6 bp, Unknown
  misc_feature (1)..( 6): Result.003 file - promoters60/2113928
aaaaag

SEQ ID NO: 126150 - DNA, 6 bp, Unknown
  misc_feature (1)..( 6): Result.003 file - promoters60/2113928
aaaaag

SEQ ID NO: 126151 - DNA, 6 bp, Unknown
  misc_feature (1)..( 6): Result.003 file - promoters60/2113928
aacaat

SEQ ID NO: 126152 - DNA, 6 bp, Unknown
  misc_feature (1)..( 6): Result.003 file - promoters60/2113928
aacaat

SEQ ID NO: 126153 - DNA, 6 bp, Unknown
  misc_feature (1)..( 6): Result.003 file - promoters60/2113928
atttct

SEQ ID NO: 126154 - DNA, 6 bp, Unknown
  misc_feature (1)..( 6): Result.003 file - promoters60/2113928
atttct

SEQ ID NO: 126155 - DNA, 9 bp, Unknown
  misc_feature (1)..( 9): Result.003 file - promoters60/2113928
ctaacaaat

SEQ ID NO: 126156 - DNA, 9 bp, Unknown
  misc_feature (1)..( 9): Result.003 file - promoters60/2113928
aatacaaat

SEQ ID NO: 126157 - DNA, 9 bp, Unknown
  misc_feature (1)..( 9): Result.003 file - promoters60/2113928
aattcaaaa

SEQ ID NO: 126158 - DNA, 7 bp, Unknown
  misc_feature (1)..( 7): Result.003 file - promoters60/2113928
taacaca

SEQ ID NO: 126159 - DNA, 7 bp, Unknown
  misc_feature (1)..( 7): Result.003 file - promoters60/2113928
taaaaca

SEQ ID NO: 126160 - DNA, 7 bp, Unknown
  misc_feature (1)..( 7): Result.003 file - promoters60/2113928
tatatcc

SEQ ID NO: 126161 - DNA, 7 bp, Unknown
  misc_feature (1)..( 7): Result.003 file - promoters60/2113928
tatttcc

SEQ ID NO: 126162 - DNA, 7 bp, Unknown
  misc_feature (1)..( 7): Result.003 file - promoters60/2113928
aaagtat

SEQ ID NO: 126163 - DNA, 7 bp, Unknown
  misc_feature (1)..( 7): Result.003 file - promoters60/2113928
aaaatat

SEQ ID NO: 126164 - DNA, 6 bp, Unknown
  misc_feature (1)..( 6): Result.003 file - promoters60/2113928
caaaaa

SEQ ID NO: 126165 - DNA, 6 bp, Unknown
  misc_feature (1)..( 6): Result.003 file - promoters60/2113928
caaaaa

SEQ ID NO: 126166 - DNA, 6 bp, Unknown
  misc_feature (1)..( 6): Result.003 file - promoters60/2113928
taatat

SEQ ID NO: 126167 - DNA, 6 bp, Unknown
  misc_feature (1)..( 6): Result.003 file - promoters60/2113928
taatat

SEQ ID NO: 126168 - DNA, 6 bp, Unknown
  misc_feature (1)..( 6): Result.003 file - promoters60/2113928
aaaata

SEQ ID NO: 126169 - DNA, 6 bp, Unknown
  misc_feature (1)..( 6): Result.003 file - promoters60/2113928
aaaata

SEQ ID NO: 126170 - DNA, 7 bp, Unknown
  misc_feature (1)..( 7): Result.003 file - promoters60/2113928
aatcaaa

SEQ ID NO: 126171 - DNA, 7 bp, Unknown
  misc_feature (1)..( 7): Result.003 file - promoters60/2113928
aatgaaa

SEQ ID NO: 126172 - DNA, 10 bp, Unknown
  misc_feature (1)..( 10): Result.003 file - promoters60/2113928
ctaacaaata

SEQ ID NO: 126173 - DNA, 10 bp, Unknown
  misc_feature (1)..( 10): Result.003 file - promoters60/2113928
ctaaaaaata

SEQ ID NO: 126174 - DNA, 9 bp, Unknown
  misc_feature (1)..( 9): Result.003 file - promoters60/2113967
caattattt

SEQ ID NO: 126175 - DNA, 9 bp, Unknown
  misc_feature (1)..( 9): Result.003 file - promoters60/2113967
gcattgttt

SEQ ID NO: 126176 - DNA, 9 bp, Unknown
  misc_feature (1)..( 9): Result.003 file - promoters60/2113967
caaatataa

SEQ ID NO: 126177 - DNA, 9 bp, Unknown
  misc_feature (1)..( 9): Result.003 file - promoters60/2113967
aaaatattt

SEQ ID NO: 126178 - DNA, 11 bp, Unknown
  misc_feature (1)..( 11): Result.003 file - promoters60/2113967
tgttatattaa

SEQ ID NO: 126179 - DNA, 11 bp, Unknown
  misc_feature (1)..( 11): Result.003 file - promoters60/2113967
acttattttat

SEQ ID NO: 126180 - DNA, 11 bp, Unknown
  misc_feature (1)..( 11): Result.003 file - promoters60/2113967
aattattttaa

SEQ ID NO: 126181 - DNA, 11 bp, Unknown
  misc_feature (1)..( 11): Result.003 file - promoters60/2113967
acttgtttcaa

SEQ ID NO: 126182 - DNA, 11 bp, Unknown
  misc_feature (1)..( 11): Result.003 file - promoters60/2113967
ttttgaattca

SEQ ID NO: 126183 - DNA, 11 bp, Unknown
  misc_feature (1)..( 11): Result.003 file - promoters60/2113967
ttatgtattca

SEQ ID NO: 126184 - DNA, 11 bp, Unknown
  misc_feature (1)..( 11): Result.003 file - promoters60/2113967
ttaagtagatt

SEQ ID NO: 126185 - DNA, 11 bp, Unknown
  misc_feature (1)..( 11): Result.003 file - promoters60/2113967
ataattagttt

SEQ ID NO: 126186 - DNA, 11 bp, Unknown
  misc_feature (1)..( 11): Result.003 file - promoters60/2113967
cgaagaagatt

SEQ ID NO: 126187 - DNA, 8 bp, Unknown
  misc_feature (1)..( 8): Result.003 file - promoters60/2113967
gttcaatg

SEQ ID NO: 126188 - DNA, 8 bp, Unknown
  misc_feature (1)..( 8): Result.003 file - promoters60/2113967
tttcaata

SEQ ID NO: 126189 - DNA, 8 bp, Unknown
  misc_feature (1)..( 8): Result.003 file - promoters60/2113967
tttgaatt

SEQ ID NO: 126190 - DNA, 8 bp, Unknown
  misc_feature (1)..( 8): Result.003 file - promoters60/2113967
ttttaatt

SEQ ID NO: 126191 - DNA, 12 bp, Unknown
  misc_feature (1)..( 12): Result.003 file - promoters60/2113967
tcaaaatcattt

SEQ ID NO: 126192 - DNA, 12 bp, Unknown
  misc_feature (1)..( 12): Result.003 file - promoters60/2113967
aaaaaaacattg

SEQ ID NO: 126193 - DNA, 12 bp, Unknown
  misc_feature (1)..( 12): Result.003 file - promoters60/2113967
gattaatcatag

SEQ ID NO: 126194 - DNA, 12 bp, Unknown
  misc_feature (1)..( 12): Result.003 file - promoters60/2113967
aaataaaaattg

SEQ ID NO: 126195 - DNA, 8 bp, Unknown
  misc_feature (1)..( 8): Result.003 file - promoters60/2113975
ttttattc

SEQ ID NO: 126196 - DNA, 8 bp, Unknown
  misc_feature (1)..( 8): Result.003 file - promoters60/2113975
ttttcttc

SEQ ID NO: 126197 - DNA, 7 bp, Unknown
  misc_feature (1)..( 7): Result.003 file - promoters60/2113975
attacaa

SEQ ID NO: 126198 - DNA, 7 bp, Unknown
  misc_feature (1)..( 7): Result.003 file - promoters60/2113975
attccaa

SEQ ID NO: 126199 - DNA, 7 bp, Unknown
  misc_feature (1)..( 7): Result.003 file - promoters60/2113975
aaacttc

SEQ ID NO: 126200 - DNA, 7 bp, Unknown
  misc_feature (1)..( 7): Result.003 file - promoters60/2113975
aaagttc

SEQ ID NO: 126201 - DNA, 6 bp, Unknown
  misc_feature (1)..( 6): Result.003 file - promoters60/2113975
acttta

SEQ ID NO: 126202 - DNA, 6 bp, Unknown
  misc_feature (1)..( 6): Result.003 file - promoters60/2113975
acttta

SEQ ID NO: 126203 - DNA, 8 bp, Unknown
  misc_feature (1)..( 8): Result.003 file - promoters60/2113975
aaaaaatc

SEQ ID NO: 126204 - DNA, 8 bp, Unknown
  misc_feature (1)..( 8): Result.003 file - promoters60/2113975
aaataatc

SEQ ID NO: 126205 - DNA, 6 bp, Unknown
  misc_feature (1)..( 6): Result.003 file - promoters60/2113975
aaaaga

SEQ ID NO: 126206 - DNA, 6 bp, Unknown
  misc_feature (1)..( 6): Result.003 file - promoters60/2113975
aaaaga

SEQ ID NO: 126207 - DNA, 8 bp, Unknown
  misc_feature (1)..( 8): Result.003 file - promoters60/2113975
tatactag

SEQ ID NO: 126208 - DNA, 8 bp, Unknown
  misc_feature (1)..( 8): Result.003 file - promoters60/2113975
tataatag

SEQ ID NO: 126209 - DNA, 7 bp, Unknown
  misc_feature (1)..( 7): Result.003 file - promoters60/2113975
atttgtt

SEQ ID NO: 126210 - DNA, 7 bp, Unknown
  misc_feature (1)..( 7): Result.003 file - promoters60/2113975
attagtt

SEQ ID NO: 126211 - DNA, 8 bp, Unknown
  misc_feature (1)..( 8): Result.003 file - promoters60/2113975
caaactaa

SEQ ID NO: 126212 - DNA, 8 bp, Unknown
  misc_feature (1)..( 8): Result.003 file - promoters60/2113975
caatctaa

SEQ ID NO: 126213 - DNA, 10 bp, Unknown
  misc_feature (1)..( 10): Result.003 file - promoters60/2113975
aattgataac

SEQ ID NO: 126214 - DNA, 10 bp, Unknown
  misc_feature (1)..( 10): Result.003 file - promoters60/2113975
aatggataac

SEQ ID NO: 126215 - DNA, 6 bp, Unknown
  misc_feature (1)..( 6): Result.003 file - promoters60/2113975
taaaga

SEQ ID NO: 126216 - DNA, 6 bp, Unknown
  misc_feature (1)..( 6): Result.003 file - promoters60/2113975
taaaga

SEQ ID NO: 126217 - DNA, 7 bp, Unknown
  misc_feature (1)..( 7): Result.003 file - promoters60/2113975
aaaaagt

SEQ ID NO: 126218 - DNA, 7 bp, Unknown
  misc_feature (1)..( 7): Result.003 file - promoters60/2113975
aaaaagt

SEQ ID NO: 126219 - DNA, 8 bp, Unknown
  misc_feature (1)..( 8): Result.003 file - promoters60/2113975
aagacaaa

SEQ ID NO: 126220 - DNA, 8 bp, Unknown
  misc_feature (1)..( 8): Result.003 file - promoters60/2113975
aagaaaaa

SEQ ID NO: 126221 - DNA, 8 bp, Unknown
  misc_feature (1)..( 8): Result.003 file - promoters60/2113975
caaaaaaa

SEQ ID NO: 126222 - DNA, 8 bp, Unknown
  misc_feature (1)..( 8): Result.003 file - promoters60/2113975
caataaaa

SEQ ID NO: 126223 - DNA, 8 bp, Unknown
  misc_feature (1)..( 8): Result.003 file - promoters60/2113975
gaataaaa

SEQ ID NO: 126224 - DNA, 6 bp, Unknown
  misc_feature (1)..( 6): Result.003 file - promoters60/2113975
agtttc

SEQ ID NO: 126225 - DNA, 6 bp, Unknown
  misc_feature (1)..( 6): Result.003 file - promoters60/2113975
agtttc

SEQ ID NO: 126226 - DNA, 9 bp, Unknown
  misc_feature (1)..( 9): Result.003 file - promoters60/2113975
tttgaccag

SEQ ID NO: 126227 - DNA, 9 bp, Unknown
  misc_feature (1)..( 9): Result.003 file - promoters60/2113975
ttttaccag

SEQ ID NO: 126228 - DNA, 6 bp, Unknown
  misc_feature (1)..( 6): Result.003 file - promoters60/2113975
ttcacc

SEQ ID NO: 126229 - DNA, 6 bp, Unknown
  misc_feature (1)..( 6): Result.003 file - promoters60/2113975
ttcacc

SEQ ID NO: 126230 - DNA, 8 bp, Unknown
  misc_feature (1)..( 8): Result.003 file - promoters60/2113975
aaacaaaa

SEQ ID NO: 126231 - DNA, 8 bp, Unknown
  misc_feature (1)..( 8): Result.003 file - promoters60/2113975
aaagaaaa

SEQ ID NO: 126232 - DNA, 7 bp, Unknown
  misc_feature (1)..( 7): Result.003 file - promoters60/2113975
caattat

SEQ ID NO: 126233 - DNA, 7 bp, Unknown
  misc_feature (1)..( 7): Result.003 file - promoters60/2113975
caagtat

SEQ ID NO: 126234 - DNA, 6 bp, Unknown
  misc_feature (1)..( 6): Result.003 file - promoters60/2113975
ttattt

SEQ ID NO: 126235 - DNA, 6 bp, Unknown
  misc_feature (1)..( 6): Result.003 file - promoters60/2113975
ttattt

SEQ ID NO: 126236 - DNA, 6 bp, Unknown
  misc_feature (1)..( 6): Result.003 file - promoters60/2113975
aaaata

SEQ ID NO: 126237 - DNA, 6 bp, Unknown
  misc_feature (1)..( 6): Result.003 file - promoters60/2113975
aaaata

SEQ ID NO: 126238 - DNA, 7 bp, Unknown
  misc_feature (1)..( 7): Result.003 file - promoters60/2113975
atataat

SEQ ID NO: 126239 - DNA, 7 bp, Unknown
  misc_feature (1)..( 7): Result.003 file - promoters60/2113975
ataaaat

SEQ ID NO: 126240 - DNA, 8 bp, Unknown
  misc_feature (1)..( 8): Result.003 file - promoters60/2114005
ttttctta

SEQ ID NO: 126241 - DNA, 8 bp, Unknown
  misc_feature (1)..( 8): Result.003 file - promoters60/2114005
ttttgtta

SEQ ID NO: 126242 - DNA, 8 bp, Unknown
  misc_feature (1)..( 8): Result.003 file - promoters60/2114005
tttccttt

SEQ ID NO: 126243 - DNA, 8 bp, Unknown
  misc_feature (1)..( 8): Result.003 file - promoters60/2114005
aaaatcaa

SEQ ID NO: 126244 - DNA, 8 bp, Unknown
  misc_feature (1)..( 8): Result.003 file - promoters60/2114005
aaaaacaa

SEQ ID NO: 126245 - DNA, 7 bp, Unknown
  misc_feature (1)..( 7): Result.003 file - promoters60/2114005
attcaaa

SEQ ID NO: 126246 - DNA, 7 bp, Unknown
  misc_feature (1)..( 7): Result.003 file - promoters60/2114005
atttaaa

SEQ ID NO: 126247 - DNA, 7 bp, Unknown
  misc_feature (1)..( 7): Result.003 file - promoters60/2114005
aaaagat

SEQ ID NO: 126248 - DNA, 7 bp, Unknown
  misc_feature (1)..( 7): Result.003 file - promoters60/2114005
taaagat

SEQ ID NO: 126249 - DNA, 7 bp, Unknown
  misc_feature (1)..( 7): Result.003 file - promoters60/2114005
aaaagac

SEQ ID NO: 126250 - DNA, 7 bp, Unknown
  misc_feature (1)..( 7): Result.003 file - promoters60/2114005
ttaatca

SEQ ID NO: 126251 - DNA, 7 bp, Unknown
  misc_feature (1)..( 7): Result.003 file - promoters60/2114005
ttaatca

SEQ ID NO: 126252 - DNA, 7 bp, Unknown
  misc_feature (1)..( 7): Result.003 file - promoters60/2114005
ccaaagc

SEQ ID NO: 126253 - DNA, 7 bp, Unknown
  misc_feature (1)..( 7): Result.003 file - promoters60/2114005
ccacagc

SEQ ID NO: 126254 - DNA, 6 bp, Unknown
  misc_feature (1)..( 6): Result.003 file - promoters60/2114005
aaaaca

SEQ ID NO: 126255 - DNA, 6 bp, Unknown
  misc_feature (1)..( 6): Result.003 file - promoters60/2114005
aaaaca

SEQ ID NO: 126256 - DNA, 7 bp, Unknown
  misc_feature (1)..( 7): Result.003 file - promoters60/2114005
agtagga

SEQ ID NO: 126257 - DNA, 7 bp, Unknown
  misc_feature (1)..( 7): Result.003 file - promoters60/2114005
agtagga

SEQ ID NO: 126258 - DNA, 6 bp, Unknown
  misc_feature (1)..( 6): Result.003 file - promoters60/2114005
ttttta

SEQ ID NO: 126259 - DNA, 6 bp, Unknown
  misc_feature (1)..( 6): Result.003 file - promoters60/2114005
ttttta

SEQ ID NO: 126260 - DNA, 12 bp, Unknown
  misc_feature (1)..( 12): Result.003 file - promoters60/2114005
cggtatataatt

SEQ ID NO: 126261 - DNA, 12 bp, Unknown
  misc_feature (1)..( 12): Result.003 file - promoters60/2114005
caaaaaataatt

SEQ ID NO: 126262 - DNA, 12 bp, Unknown
  misc_feature (1)..( 12): Result.003 file - promoters60/2114005
caaaaaataatc

SEQ ID NO: 126263 - DNA, 7 bp, Unknown
  misc_feature (1)..( 7): Result.003 file - promoters60/2114005
aaaagac

SEQ ID NO: 126264 - DNA, 7 bp, Unknown
  misc_feature (1)..( 7): Result.003 file - promoters60/2114005
aaaagac

SEQ ID NO: 126265 - DNA, 6 bp, Unknown
  misc_feature (1)..( 6): Result.003 file - promoters60/2114005
aaactg

SEQ ID NO: 126266 - DNA, 6 bp, Unknown
  misc_feature (1)..( 6): Result.003 file - promoters60/2114005
aaactg

SEQ ID NO: 126267 - DNA, 15 bp, Unknown
  misc_feature (1)..( 15): Result.003 file - promoters60/2114005
aattccttatttata

SEQ ID NO: 126268 - DNA, 15 bp, Unknown
  misc_feature (1)..( 15): Result.003 file - promoters60/2114005
aatacctcatttata

SEQ ID NO: 126269 - DNA, 7 bp, Unknown
  misc_feature (1)..( 7): Result.003 file - promoters60/2114005
ttataaa

SEQ ID NO: 126270 - DNA, 7 bp, Unknown
  misc_feature (1)..( 7): Result.003 file - promoters60/2114005
ttaaaaa

SEQ ID NO: 126271 - DNA, 7 bp, Unknown
  misc_feature (1)..( 7): Result.003 file - promoters60/2114005
aaagttt

SEQ ID NO: 126272 - DNA, 7 bp, Unknown
  misc_feature (1)..( 7): Result.003 file - promoters60/2114005
aaaattt

SEQ ID NO: 126273 - DNA, 8 bp, Unknown
  misc_feature (1)..( 8): Result.003 file - promoters60/2114005
ttatgtat

SEQ ID NO: 126274 - DNA, 8 bp, Unknown
  misc_feature (1)..( 8): Result.003 file - promoters60/2114005
ttatatat

SEQ ID NO: 126275 - DNA, 11 bp, Unknown
  misc_feature (1)..( 11): Result.003 file - promoters60/2114005
ttaattgataa

SEQ ID NO: 126276 - DNA, 11 bp, Unknown
  misc_feature (1)..( 11): Result.003 file - promoters60/2114005
ttaagtgataa

SEQ ID NO: 126277 - DNA, 8 bp, Unknown
  misc_feature (1)..( 8): Result.003 file - promoters60/2114005
agagatta

SEQ ID NO: 126278 - DNA, 8 bp, Unknown
  misc_feature (1)..( 8): Result.003 file - promoters60/2114005
agatatta

SEQ ID NO: 126279 - DNA, 9 bp, Unknown
  misc_feature (1)..( 9): Result.003 file - promoters60/2114005
aaaaaaaca

SEQ ID NO: 126280 - DNA, 9 bp, Unknown
  misc_feature (1)..( 9): Result.003 file - promoters60/2114005
aaaaataca

SEQ ID NO: 126281 - DNA, 9 bp, Unknown
  misc_feature (1)..( 9): Result.003 file - promoters60/2114005
taacaaaaa

SEQ ID NO: 126282 - DNA, 9 bp, Unknown
  misc_feature (1)..( 9): Result.003 file - promoters60/2114005
taaaaaaaa

SEQ ID NO: 126283 - DNA, 7 bp, Unknown
  misc_feature (1)..( 7): Result.003 file - promoters60/2114012
aaaatta

SEQ ID NO: 126284 - DNA, 7 bp, Unknown
  misc_feature (1)..( 7): Result.003 file - promoters60/2114012
aaaattg

SEQ ID NO: 126285 - DNA, 7 bp, Unknown
  misc_feature (1)..( 7): Result.003 file - promoters60/2114012
taaatta

SEQ ID NO: 126286 - DNA, 8 bp, Unknown
  misc_feature (1)..( 8): Result.003 file - promoters60/2114012
aaaagtca

SEQ ID NO: 126287 - DNA, 8 bp, Unknown
  misc_feature (1)..( 8): Result.003 file - promoters60/2114012
aaaagttt

SEQ ID NO: 126288 - DNA, 8 bp, Unknown
  misc_feature (1)..( 8): Result.003 file - promoters60/2114012
taaagttt

SEQ ID NO: 126289 - DNA, 10 bp, Unknown
  misc_feature (1)..( 10): Result.003 file - promoters60/2114012
acaaatacga

SEQ ID NO: 126290 - DNA, 10 bp, Unknown
  misc_feature (1)..( 10): Result.003 file - promoters60/2114012
acaaagacga

SEQ ID NO: 126291 - DNA, 10 bp, Unknown
  misc_feature (1)..( 10): Result.003 file - promoters60/2114012
gagaagacag

SEQ ID NO: 126292 - DNA, 8 bp, Unknown
  misc_feature (1)..( 8): Result.003 file - promoters60/2114012
tttgttat

SEQ ID NO: 126293 - DNA, 8 bp, Unknown
  misc_feature (1)..( 8): Result.003 file - promoters60/2114012
tttattaa

SEQ ID NO: 126294 - DNA, 8 bp, Unknown
  misc_feature (1)..( 8): Result.003 file - promoters60/2114012
actattaa

SEQ ID NO: 126295 - DNA, 9 bp, Unknown
  misc_feature (1)..( 9): Result.003 file - promoters60/2114026
tatatatac

SEQ ID NO: 126296 - DNA, 9 bp, Unknown
  misc_feature (1)..( 9): Result.003 file - promoters60/2114026
tatatatac

SEQ ID NO: 126297 - DNA, 9 bp, Unknown
  misc_feature (1)..( 9): Result.003 file - promoters60/2114026
tatataata

SEQ ID NO: 126298 - DNA, 9 bp, Unknown
  misc_feature (1)..( 9): Result.003 file - promoters60/2114026
tatataatg

SEQ ID NO: 126299 - DNA, 9 bp, Unknown
  misc_feature (1)..( 9): Result.003 file - promoters60/2114026
aatataaaa

SEQ ID NO: 126300 - DNA, 9 bp, Unknown
  misc_feature (1)..( 9): Result.003 file - promoters60/2114026
accctcatt

SEQ ID NO: 126301 - DNA, 9 bp, Unknown
  misc_feature (1)..( 9): Result.003 file - promoters60/2114026
accgtcata

SEQ ID NO: 126302 - DNA, 9 bp, Unknown
  misc_feature (1)..( 9): Result.003 file - promoters60/2114026
ctcctcatc

SEQ ID NO: 126303 - DNA, 9 bp, Unknown
  misc_feature (1)..( 9): Result.003 file - promoters60/2114026
catgtcata

SEQ ID NO: 126304 - DNA, 13 bp, Unknown
  misc_feature (1)..( 13): Result.003 file - promoters60/2114026
atagtttcttttt

SEQ ID NO: 126305 - DNA, 13 bp, Unknown
  misc_feature (1)..( 13): Result.003 file - promoters60/2114026
ataatttcttact

SEQ ID NO: 126306 - DNA, 13 bp, Unknown
  misc_feature (1)..( 13): Result.003 file - promoters60/2114026
ttggtttctcatt

SEQ ID NO: 126307 - DNA, 13 bp, Unknown
  misc_feature (1)..( 13): Result.003 file - promoters60/2114026
tgtttttttcatt

SEQ ID NO: 126308 - DNA, 12 bp, Unknown
  misc_feature (1)..( 12): Result.003 file - promoters60/2114026
caagttttgatc

SEQ ID NO: 126309 - DNA, 12 bp, Unknown
  misc_feature (1)..( 12): Result.003 file - promoters60/2114026
gaagttttcgaa

SEQ ID NO: 126310 - DNA, 12 bp, Unknown
  misc_feature (1)..( 12): Result.003 file - promoters60/2114026
tgagtattgatc

SEQ ID NO: 126311 - DNA, 12 bp, Unknown
  misc_feature (1)..( 12): Result.003 file - promoters60/2114026
tcggaattgatt

SEQ ID NO: 126312 - DNA, 12 bp, Unknown
  misc_feature (1)..( 12): Result.003 file - promoters60/2114026
gaatttttttaa

SEQ ID NO: 126313 - DNA, 12 bp, Unknown
  misc_feature (1)..( 12): Result.003 file - promoters60/2114026
ctattctttatt

SEQ ID NO: 126314 - DNA, 8 bp, Unknown
  misc_feature (1)..( 8): Result.003 file - promoters60/2114026
caatcaaa

SEQ ID NO: 126315 - DNA, 8 bp, Unknown
  misc_feature (1)..( 8): Result.003 file - promoters60/2114026
taatcaaa

SEQ ID NO: 126316 - DNA, 8 bp, Unknown
  misc_feature (1)..( 8): Result.003 file - promoters60/2114026
caattaaa

SEQ ID NO: 126317 - DNA, 8 bp, Unknown
  misc_feature (1)..( 8): Result.003 file - promoters60/2114026
aaatcaat

SEQ ID NO: 126318 - DNA, 9 bp, Unknown
  misc_feature (1)..( 9): Result.003 file - promoters60/2114026
catttttag

SEQ ID NO: 126319 - DNA, 9 bp, Unknown
  misc_feature (1)..( 9): Result.003 file - promoters60/2114026
aatttttag

SEQ ID NO: 126320 - DNA, 9 bp, Unknown
  misc_feature (1)..( 9): Result.003 file - promoters60/2114026
cattttttt

SEQ ID NO: 126321 - DNA, 9 bp, Unknown
  misc_feature (1)..( 9): Result.003 file - promoters60/2114026
ttttttttc

SEQ ID NO: 126322 - DNA, 9 bp, Unknown
  misc_feature (1)..( 9): Result.003 file - promoters60/2114026
gattgtaag

SEQ ID NO: 126323 - DNA, 9 bp, Unknown
  misc_feature (1)..( 9): Result.003 file - promoters60/2114026
aattttaaa

SEQ ID NO: 126324 - DNA, 9 bp, Unknown
  misc_feature (1)..( 9): Result.003 file - promoters60/2114026
aatttttag

SEQ ID NO: 126325 - DNA, 9 bp, Unknown
  misc_feature (1)..( 9): Result.003 file - promoters60/2114026
tcgtttaaa

SEQ ID NO: 126326 - DNA, 7 bp, Unknown
  misc_feature (1)..( 7): Result.003 file - promoters60/2114026
gttatat

SEQ ID NO: 126327 - DNA, 7 bp, Unknown
  misc_feature (1)..( 7): Result.003 file - promoters60/2114026
tttatat

SEQ ID NO: 126328 - DNA, 8 bp, Unknown
  misc_feature (1)..( 8): Result.003 file - promoters60/2114026
tttaataa

SEQ ID NO: 126329 - DNA, 8 bp, Unknown
  misc_feature (1)..( 8): Result.003 file - promoters60/2114026
tttaatta

SEQ ID NO: 126330 - DNA, 21 bp, Unknown
  misc_feature (1)..( 21): Result.003 file - promoters60/2114030
atgcattcaaagaatgttgga

SEQ ID NO: 126331 - DNA, 21 bp, Unknown
  misc_feature (1)..( 21): Result.003 file - promoters60/2114030
aaatgctagaagaatgttgga

SEQ ID NO: 126332 - DNA, 21 bp, Unknown
  misc_feature (1)..( 21): Result.003 file - promoters60/2114030
ttcattataaaaaatttacaa

SEQ ID NO: 126333 - DNA, 21 bp, Unknown
  misc_feature (1)..( 21): Result.003 file - promoters60/2114030
gaaaatacaaatgatttgatt

SEQ ID NO: 126334 - DNA, 21 bp, Unknown
  misc_feature (1)..( 21): Result.003 file - promoters60/2114030
tgttcgtcaaaaaactttatt

SEQ ID NO: 126335 - DNA, 21 bp, Unknown
  misc_feature (1)..( 21): Result.003 file - promoters60/2114030
gaacatacaatgtaatgaata

SEQ ID NO: 126336 - DNA, 14 bp, Unknown
  misc_feature (1)..( 14): Result.003 file - promoters60/2114030
tccgaatagaattg

SEQ ID NO: 126337 - DNA, 14 bp, Unknown
  misc_feature (1)..( 14): Result.003 file - promoters60/2114030
aaacaataaaatta

SEQ ID NO: 126338 - DNA, 14 bp, Unknown
  misc_feature (1)..( 14): Result.003 file - promoters60/2114030
aaaaaatcaaaatc

SEQ ID NO: 126339 - DNA, 14 bp, Unknown
  misc_feature (1)..( 14): Result.003 file - promoters60/2114030
tttgatttaaatta

SEQ ID NO: 126340 - DNA, 14 bp, Unknown
  misc_feature (1)..( 14): Result.003 file - promoters60/2114030
tgttcgtcaaaaaa

SEQ ID NO: 126341 - DNA, 14 bp, Unknown
  misc_feature (1)..( 14): Result.003 file - promoters60/2114030
acttttgaaaaaac

SEQ ID NO: 126342 - DNA, 8 bp, Unknown
  misc_feature (1)..( 8): Result.003 file - promoters60/2114030
tataaata

SEQ ID NO: 126343 - DNA, 8 bp, Unknown
  misc_feature (1)..( 8): Result.003 file - promoters60/2114030
tatatata

SEQ ID NO: 126344 - DNA, 8 bp, Unknown
  misc_feature (1)..( 8): Result.003 file - promoters60/2114030
tatatata

SEQ ID NO: 126345 - DNA, 8 bp, Unknown
  misc_feature (1)..( 8): Result.003 file - promoters60/2114030
tataaata

SEQ ID NO: 126346 - DNA, 8 bp, Unknown
  misc_feature (1)..( 8): Result.003 file - promoters60/2114030
tatatata

SEQ ID NO: 126347 - DNA, 8 bp, Unknown
  misc_feature (1)..( 8): Result.003 file - promoters60/2114030
tataaact

SEQ ID NO: 126348 - DNA, 8 bp, Unknown
  misc_feature (1)..( 8): Result.003 file - promoters60/2114095
aaaatctt

SEQ ID NO: 126349 - DNA, 8 bp, Unknown
  misc_feature (1)..( 8): Result.003 file - promoters60/2114095
aaaatctt

SEQ ID NO: 126350 - DNA, 8 bp, Unknown
  misc_feature (1)..( 8): Result.003 file - promoters60/2114095
tcaatctt

SEQ ID NO: 126351 - DNA, 8 bp, Unknown
  misc_feature (1)..( 8): Result.003 file - promoters60/2114095
aaactctc

SEQ ID NO: 126352 - DNA, 8 bp, Unknown
  misc_feature (1)..( 8): Result.003 file - promoters60/2114095
caaatctt

SEQ ID NO: 126353 - DNA, 11 bp, Unknown
  misc_feature (1)..( 11): Result.003 file - promoters60/2114115
agagttttgtt

SEQ ID NO: 126354 - DNA, 11 bp, Unknown
  misc_feature (1)..( 11): Result.003 file - promoters60/2114115
taaattttgtt

SEQ ID NO: 126355 - DNA, 11 bp, Unknown
  misc_feature (1)..( 11): Result.003 file - promoters60/2114115
ttgcttttcga

SEQ ID NO: 126356 - DNA, 7 bp, Unknown
  misc_feature (1)..( 7): Result.003 file - promoters60/2114115
tattttt

SEQ ID NO: 126357 - DNA, 7 bp, Unknown
  misc_feature (1)..( 7): Result.003 file - promoters60/2114115
tattttt

SEQ ID NO: 126358 - DNA, 7 bp, Unknown
  misc_feature (1)..( 7): Result.003 file - promoters60/2114115
tattttt

SEQ ID NO: 126359 - DNA, 12 bp, Unknown
  misc_feature (1)..( 12): Result.003 file - promoters60/2114115
tcaaaagatatt

SEQ ID NO: 126360 - DNA, 12 bp, Unknown
  misc_feature (1)..( 12): Result.003 file - promoters60/2114115
agaaaatataat

SEQ ID NO: 126361 - DNA, 12 bp, Unknown
  misc_feature (1)..( 12): Result.003 file - promoters60/2114115
caaaaaaattat

SEQ ID NO: 126362 - DNA, 11 bp, Unknown
  misc_feature (1)..( 11): Result.003 file - promoters60/2114115
cgagcaatgct

SEQ ID NO: 126363 - DNA, 11 bp, Unknown
  misc_feature (1)..( 11): Result.003 file - promoters60/2114115
cgaacaaaagg

SEQ ID NO: 126364 - DNA, 11 bp, Unknown
  misc_feature (1)..( 11): Result.003 file - promoters60/2114115
ggaacaaaagg

SEQ ID NO: 126365 - DNA, 13 bp, Unknown
  misc_feature (1)..( 13): Result.003 file - promoters60/2114138
taatggatctaca

SEQ ID NO: 126366 - DNA, 13 bp, Unknown
  misc_feature (1)..( 13): Result.003 file - promoters60/2114138
taatagatttacg

SEQ ID NO: 126367 - DNA, 13 bp, Unknown
  misc_feature (1)..( 13): Result.003 file - promoters60/2114138
atcttgatgtaca

SEQ ID NO: 126368 - DNA, 13 bp, Unknown
  misc_feature (1)..( 13): Result.003 file - promoters60/2114138
aagtagattctag

SEQ ID NO: 126369 - DNA, 13 bp, Unknown
  misc_feature (1)..( 13): Result.003 file - promoters60/2114138
aaggagataagta

SEQ ID NO: 126370 - DNA, 8 bp, Unknown
  misc_feature (1)..( 8): Result.003 file - promoters60/2114138
ttttggga

SEQ ID NO: 126371 - DNA, 8 bp, Unknown
  misc_feature (1)..( 8): Result.003 file - promoters60/2114138
ttttggtt

SEQ ID NO: 126372 - DNA, 8 bp, Unknown
  misc_feature (1)..( 8): Result.003 file - promoters60/2114138
atttggtt

SEQ ID NO: 126373 - DNA, 8 bp, Unknown
  misc_feature (1)..( 8): Result.003 file - promoters60/2114138
ttttgggg

SEQ ID NO: 126374 - DNA, 16 bp, Unknown
  misc_feature (1)..( 16): Result.003 file - promoters60/2114145
ctttcgaccaataact

SEQ ID NO: 126375 - DNA, 16 bp, Unknown
  misc_feature (1)..( 16): Result.003 file - promoters60/2114145
agctaccggaattact

SEQ ID NO: 126376 - DNA, 16 bp, Unknown
  misc_feature (1)..( 16): Result.003 file - promoters60/2114145
ctttcgaccaataact

SEQ ID NO: 126377 - DNA, 7 bp, Unknown
  misc_feature (1)..( 7): Result.003 file - promoters60/2114145
tacggga

SEQ ID NO: 126378 - DNA, 7 bp, Unknown
  misc_feature (1)..( 7): Result.003 file - promoters60/2114145
taccgga

SEQ ID NO: 126379 - DNA, 6 bp, Unknown
  misc_feature (1)..( 6): Result.003 file - promoters60/2114145
atacaa

SEQ ID NO: 126380 - DNA, 6 bp, Unknown
  misc_feature (1)..( 6): Result.003 file - promoters60/2114145
atacaa

SEQ ID NO: 126381 - DNA, 6 bp, Unknown
  misc_feature (1)..( 6): Result.003 file - promoters60/2114145
atacaa

SEQ ID NO: 126382 - DNA, 7 bp, Unknown
  misc_feature (1)..( 7): Result.003 file - promoters60/2114145
aaatgat

SEQ ID NO: 126383 - DNA, 7 bp, Unknown
  misc_feature (1)..( 7): Result.003 file - promoters60/2114145
aaatgat

SEQ ID NO: 126384 - DNA, 7 bp, Unknown
  misc_feature (1)..( 7): Result.003 file - promoters60/2114145
aaatgat

SEQ ID NO: 126385 - DNA, 9 bp, Unknown
  misc_feature (1)..( 9): Result.003 file - promoters60/2114145
tctattcta

SEQ ID NO: 126386 - DNA, 9 bp, Unknown
  misc_feature (1)..( 9): Result.003 file - promoters60/2114145
atgattcta

SEQ ID NO: 126387 - DNA, 9 bp, Unknown
  misc_feature (1)..( 9): Result.003 file - promoters60/2114145
atgattctt

SEQ ID NO: 126388 - DNA, 7 bp, Unknown
  misc_feature (1)..( 7): Result.003 file - promoters60/2114145
atactat

SEQ ID NO: 126389 - DNA, 7 bp, Unknown
  misc_feature (1)..( 7): Result.003 file - promoters60/2114145
ataatat

SEQ ID NO: 126390 - DNA, 6 bp, Unknown
  misc_feature (1)..( 6): Result.003 file - promoters60/2114145
aaggca

SEQ ID NO: 126391 - DNA, 6 bp, Unknown
  misc_feature (1)..( 6): Result.003 file - promoters60/2114145
aaggca

SEQ ID NO: 126392 - DNA, 6 bp, Unknown
  misc_feature (1)..( 6): Result.003 file - promoters60/2114145
aaggca

SEQ ID NO: 126393 - DNA, 6 bp, Unknown
  misc_feature (1)..( 6): Result.003 file - promoters60/2114145
attata

SEQ ID NO: 126394 - DNA, 6 bp, Unknown
  misc_feature (1)..( 6): Result.003 file - promoters60/2114145
attata

SEQ ID NO: 126395 - DNA, 7 bp, Unknown
  misc_feature (1)..( 7): Result.003 file - promoters60/2114145
aaacttt

SEQ ID NO: 126396 - DNA, 7 bp, Unknown
  misc_feature (1)..( 7): Result.003 file - promoters60/2114145
aaaattt

SEQ ID NO: 126397 - DNA, 7 bp, Unknown
  misc_feature (1)..( 7): Result.003 file - promoters60/2114145
aaacttt

SEQ ID NO: 126398 - DNA, 7 bp, Unknown
  misc_feature (1)..( 7): Result.003 file - promoters60/2114145
tttatcc

SEQ ID NO: 126399 - DNA, 7 bp, Unknown
  misc_feature (1)..( 7): Result.003 file - promoters60/2114145
tttatcc

SEQ ID NO: 126400 - DNA, 7 bp, Unknown
  misc_feature (1)..( 7): Result.003 file - promoters60/2114145
tttatcc

SEQ ID NO: 126401 - DNA, 6 bp, Unknown
  misc_feature (1)..( 6): Result.003 file - promoters60/2114145
tttatt

SEQ ID NO: 126402 - DNA, 6 bp, Unknown
  misc_feature (1)..( 6): Result.003 file - promoters60/2114145
tttatt

SEQ ID NO: 126403 - DNA, 11 bp, Unknown
  misc_feature (1)..( 11): Result.003 file - promoters60/2114145
aaataaacaaa

SEQ ID NO: 126404 - DNA, 11 bp, Unknown
  misc_feature (1)..( 11): Result.003 file - promoters60/2114145
aaagaaataaa

SEQ ID NO: 126405 - DNA, 8 bp, Unknown
  misc_feature (1)..( 8): Result.003 file - promoters60/2114145
aaaaaaaa

SEQ ID NO: 126406 - DNA, 8 bp, Unknown
  misc_feature (1)..( 8): Result.003 file - promoters60/2114145
aaaaaaaa

SEQ ID NO: 126407 - DNA, 8 bp, Unknown
  misc_feature (1)..( 8): Result.003 file - promoters60/2114145
aaacaaaa

SEQ ID NO: 126408 - DNA, 6 bp, Unknown
  misc_feature (1)..( 6): Result.003 file - promoters60/2114145
tctctc

SEQ ID NO: 126409 - DNA, 6 bp, Unknown
  misc_feature (1)..( 6): Result.003 file - promoters60/2114145
tctctc

SEQ ID NO: 126410 - DNA, 6 bp, Unknown
  misc_feature (1)..( 6): Result.003 file - promoters60/2114145
taactt

SEQ ID NO: 126411 - DNA, 6 bp, Unknown
  misc_feature (1)..( 6): Result.003 file - promoters60/2114145
taactt

SEQ ID NO: 126412 - DNA, 6 bp, Unknown
  misc_feature (1)..( 6): Result.003 file - promoters60/2114145
tcctcc

SEQ ID NO: 126413 - DNA, 6 bp, Unknown
  misc_feature (1)..( 6): Result.003 file - promoters60/2114145
tcctcc

SEQ ID NO: 126414 - DNA, 6 bp, Unknown
  misc_feature (1)..( 6): Result.003 file - promoters60/2114145
atttta

SEQ ID NO: 126415 - DNA, 6 bp, Unknown
  misc_feature (1)..( 6): Result.003 file - promoters60/2114145
atttta

SEQ ID NO: 126416 - DNA, 21 bp, Unknown
  misc_feature (1)..( 21): Result.003 file - promoters60/2114175
acacccatcttttctcgctca

SEQ ID NO: 126417 - DNA, 21 bp, Unknown
  misc_feature (1)..( 21): Result.003 file - promoters60/2114175
acacccatctcttctcgctca

SEQ ID NO: 126418 - DNA, 25 bp, Unknown
  misc_feature (1)..( 25): Result.003 file - promoters60/2114175
ggaagctgttgccaattactcgttt

SEQ ID NO: 126419 - DNA, 25 bp, Unknown
  misc_feature (1)..( 25): Result.003 file - promoters60/2114175
ggaacctgttgtcaattactcgttt

SEQ ID NO: 126420 - DNA, 13 bp, Unknown
  misc_feature (1)..( 13): Result.003 file - promoters60/2114175
cattattgttttt

SEQ ID NO: 126421 - DNA, 13 bp, Unknown
  misc_feature (1)..( 13): Result.003 file - promoters60/2114175
ttttattggtttt

SEQ ID NO: 126422 - DNA, 13 bp, Unknown
  misc_feature (1)..( 13): Result.003 file - promoters60/2114175
gtttatgttggtc

SEQ ID NO: 126423 - DNA, 19 bp, Unknown
  misc_feature (1)..( 19): Result.003 file - promoters60/2114175
caactactctatcaattat

SEQ ID NO: 126424 - DNA, 19 bp, Unknown
  misc_feature (1)..( 19): Result.003 file - promoters60/2114175
caattactctatcaattat

SEQ ID NO: 126425 - DNA, 7 bp, Unknown
  misc_feature (1)..( 7): Result.003 file - promoters60/2114175
aaagaaa

SEQ ID NO: 126426 - DNA, 7 bp, Unknown
  misc_feature (1)..( 7): Result.003 file - promoters60/2114175
aaaaaaa

SEQ ID NO: 126427 - DNA, 9 bp, Unknown
  misc_feature (1)..( 9): Result.003 file - promoters60/2114175
aaataaaaa

SEQ ID NO: 126428 - DNA, 9 bp, Unknown
  misc_feature (1)..( 9): Result.003 file - promoters60/2114175
aaaaaaaaa

SEQ ID NO: 126429 - DNA, 9 bp, Unknown
  misc_feature (1)..( 9): Result.003 file - promoters60/2114175
aaagatggg

SEQ ID NO: 126430 - DNA, 38 bp, Unknown
  misc_feature (1)..( 38): Result.003 file - promoters60/2114175
tttactctataaattatttccgcaaactcaagttatac

SEQ ID NO: 126431 - DNA, 38 bp, Unknown
  misc_feature (1)..( 38): Result.003 file - promoters60/2114175
tttactctatatattatttccgcaaacacaaattatac

SEQ ID NO: 126432 - DNA, 10 bp, Unknown
  misc_feature (1)..( 10): Result.003 file - promoters60/2114175
acatcatcat

SEQ ID NO: 126433 - DNA, 10 bp, Unknown
  misc_feature (1)..( 10): Result.003 file - promoters60/2114175
acatcaacat

SEQ ID NO: 126434 - DNA, 23 bp, Unknown
  misc_feature (1)..( 23): Result.003 file - promoters60/2114175
tacatttttctactaatgtggaa

SEQ ID NO: 126435 - DNA, 23 bp, Unknown
  misc_feature (1)..( 23): Result.003 file - promoters60/2114175
tacatttttctagtaatgtagaa

SEQ ID NO: 126436 - DNA, 12 bp, Unknown
  misc_feature (1)..( 12): Result.003 file - promoters60/2114175
aacttcacagta

SEQ ID NO: 126437 - DNA, 12 bp, Unknown
  misc_feature (1)..( 12): Result.003 file - promoters60/2114175
aactttacagta

SEQ ID NO: 126438 - DNA, 6 bp, Unknown
  misc_feature (1)..( 6): Result.003 file - promoters60/2114175
caaaat

SEQ ID NO: 126439 - DNA, 6 bp, Unknown
  misc_feature (1)..( 6): Result.003 file - promoters60/2114175
caaaat

SEQ ID NO: 126440 - DNA, 7 bp, Unknown
  misc_feature (1)..( 7): Result.003 file - promoters60/2114175
acaagca

SEQ ID NO: 126441 - DNA, 7 bp, Unknown
  misc_feature (1)..( 7): Result.003 file - promoters60/2114175
acaagca

SEQ ID NO: 126442 - DNA, 7 bp, Unknown
  misc_feature (1)..( 7): Result.003 file - promoters60/2114175
gataata

SEQ ID NO: 126443 - DNA, 7 bp, Unknown
  misc_feature (1)..( 7): Result.003 file - promoters60/2114175
gataata

SEQ ID NO: 126444 - DNA, 6 bp, Unknown
  misc_feature (1)..( 6): Result.003 file - promoters60/2114175
aacaac

SEQ ID NO: 126445 - DNA, 6 bp, Unknown
  misc_feature (1)..( 6): Result.003 file - promoters60/2114175
aacaac

SEQ ID NO: 126446 - DNA, 13 bp, Unknown
  misc_feature (1)..( 13): Result.003 file - promoters60/2114175
acgccaaattcta

SEQ ID NO: 126447 - DNA, 13 bp, Unknown
  misc_feature (1)..( 13): Result.003 file - promoters60/2114175
acgccaaattcta

SEQ ID NO: 126448 - DNA, 6 bp, Unknown
  misc_feature (1)..( 6): Result.003 file - promoters60/2114175
agcaca

SEQ ID NO: 126449 - DNA, 6 bp, Unknown
  misc_feature (1)..( 6): Result.003 file - promoters60/2114175
agcaca

SEQ ID NO: 126450 - DNA, 32 bp, Unknown
  misc_feature (1)..( 32): Result.003 file - promoters60/2114175
cacagtctcaacgtgctctaaaaacgagtggt

SEQ ID NO: 126451 - DNA, 32 bp, Unknown; identical to SEQ ID NO: 54671
  misc_feature (1)..( 32): Result.003 file - promoters60/2114175

SEQ ID NO: 126452 - DNA, 8 bp, Unknown
  misc_feature (1)..( 8): Result.003 file - promoters60/2114175
aaaatatc

SEQ ID NO: 126453 - DNA, 8 bp, Unknown
  misc_feature (1)..( 8): Result.003 file - promoters60/2114175
aaaatatc

SEQ ID NO: 126454 - DNA, 13 bp, Unknown
  misc_feature (1)..( 13): Result.003 file - promoters60/2114175
cataatgggacca

SEQ ID NO: 126455 - DNA, 13 bp, Unknown
  misc_feature (1)..( 13): Result.003 file - promoters60/2114175
cattatgggacca

SEQ ID NO: 126456 - DNA, 13 bp, Unknown
  misc_feature (1)..( 13): Result.003 file - promoters60/2114175
ttccatgggaaag

SEQ ID NO: 126457 - DNA, 8 bp, Unknown
  misc_feature (1)..( 8): Result.003 file - promoters60/2114175
agcatttg

SEQ ID NO: 126458 - DNA, 8 bp, Unknown
  misc_feature (1)..( 8): Result.003 file - promoters60/2114175
agcatttg

SEQ ID NO: 126459 - DNA, 18 bp, Unknown
  misc_feature (1)..( 18): Result.003 file - promoters60/2114175
acacttatctccgcattt

SEQ ID NO: 126460 - DNA, 18 bp, Unknown
  misc_feature (1)..( 18): Result.003 file - promoters60/2114175
acacatatctcctcattt

SEQ ID NO: 126461 - DNA, 9 bp, Unknown
  misc_feature (1)..( 9): Result.003 file - promoters60/2114175
tttcccatc

SEQ ID NO: 126462 - DNA, 9 bp, Unknown
  misc_feature (1)..( 9): Result.003 file - promoters60/2114175
tttctcatc

SEQ ID NO: 126463 - DNA, 8 bp, Unknown
  misc_feature (1)..( 8): Result.003 file - promoters60/2114175
cttcataa

SEQ ID NO: 126464 - DNA, 8 bp, Unknown
  misc_feature (1)..( 8): Result.003 file - promoters60/2114175
cttcttaa

SEQ ID NO: 126465 - DNA, 6 bp, Unknown
  misc_feature (1)..( 6): Result.003 file - promoters60/2114175
taaccc

SEQ ID NO: 126466 - DNA, 6 bp, Unknown
  misc_feature (1)..( 6): Result.003 file - promoters60/2114175
taaccc

SEQ ID NO: 126467 - DNA, 14 bp, Unknown
  misc_feature (1)..( 14): Result.003 file - promoters60/2114175
cccacctcattata

SEQ ID NO: 126468 - DNA, 14 bp, Unknown
  misc_feature (1)..( 14): Result.003 file - promoters60/2114175
cccacctcattata

SEQ ID NO: 126469 - DNA, 14 bp, Unknown
  misc_feature (1)..( 14): Result.003 file - promoters60/2114175
aataccaccctttg

SEQ ID NO: 126470 - DNA, 14 bp, Unknown
  misc_feature (1)..( 14): Result.003 file - promoters60/2114175
aataccaccctttg

SEQ ID NO: 126471 - DNA, 6 bp, Unknown
  misc_feature (1)..( 6): Result.003 file - promoters60/2114175
gtttat

SEQ ID NO: 126472 - DNA, 6 bp, Unknown
  misc_feature (1)..( 6): Result.003 file - promoters60/2114175
gtttat

SEQ ID NO: 126473 - DNA, 6 bp, Unknown
  misc_feature (1)..( 6): Result.003 file - promoters60/2114175
agcgaa

SEQ ID NO: 126474 - DNA, 6 bp, Unknown
  misc_feature (1)..( 6): Result.003 file - promoters60/2114175
agcgaa

SEQ ID NO: 126475 - DNA, 6 bp, Unknown
  misc_feature (1)..( 6): Result.003 file - promoters60/2114175
gaaaca

SEQ ID NO: 126476 - DNA, 6 bp, Unknown
  misc_feature (1)..( 6): Result.003 file - promoters60/2114175
gaaaca

SEQ ID NO: 126477 - DNA, 7 bp, Unknown
  misc_feature (1)..( 7): Result.003 file - promoters60/2114175
aaactct

SEQ ID NO: 126478 - DNA, 7 bp, Unknown
  misc_feature (1)..( 7): Result.003 file - promoters60/2114175
aaagtct

SEQ ID NO: 126479 - DNA, 9 bp, Unknown
  misc_feature (1)..( 9): Result.003 file - promoters60/2114178
gtttcaaaa

SEQ ID NO: 126480 - DNA, 9 bp, Unknown
  misc_feature (1)..( 9): Result.003 file - promoters60/2114178
gtttcaaac

SEQ ID NO: 126481 - DNA, 9 bp, Unknown
  misc_feature (1)..( 9): Result.003 file - promoters60/2114178
caatcaaaa

SEQ ID NO: 126482 - DNA, 7 bp, Unknown
  misc_feature (1)..( 7): Result.003 file - promoters60/2114178
ttcaaaa

SEQ ID NO: 126483 - DNA, 7 bp, Unknown
  misc_feature (1)..( 7): Result.003 file - promoters60/2114178
ttcaaat

SEQ ID NO: 126484 - DNA, 7 bp, Unknown
  misc_feature (1)..( 7): Result.003 file - promoters60/2114178
atcaaaa

SEQ ID NO: 126485 - DNA, 13 bp, Unknown
  misc_feature (1)..( 13): Result.003 file - promoters60/2114178
ttgtaaaagatga

SEQ ID NO: 126486 - DNA, 13 bp, Unknown
  misc_feature (1)..( 13): Result.003 file - promoters60/2114178
ttgtaaaaaatag

SEQ ID NO: 126487 - DNA, 13 bp, Unknown
  misc_feature (1)..( 13): Result.003 file - promoters60/2114178
atttaaaatatga

SEQ ID NO: 126488 - DNA, 6 bp, Unknown
  misc_feature (1)..( 6): Result.003 file - promoters60/2114178
caataa

SEQ ID NO: 126489 - DNA, 6 bp, Unknown
  misc_feature (1)..( 6): Result.003 file - promoters60/2114178
caataa

SEQ ID NO: 126490 - DNA, 6 bp, Unknown
  misc_feature (1)..( 6): Result.003 file - promoters60/2114178
aattat

SEQ ID NO: 126491 - DNA, 6 bp, Unknown
  misc_feature (1)..( 6): Result.003 file - promoters60/2114178
aattat

SEQ ID NO: 126492 - DNA, 9 bp, Unknown
  misc_feature (1)..( 9): Result.003 file - promoters60/2114178
tgtattatt

SEQ ID NO: 126493 - DNA, 9 bp, Unknown
  misc_feature (1)..( 9): Result.003 file - promoters60/2114178
attattatt

SEQ ID NO: 126494 - DNA, 9 bp, Unknown
  misc_feature (1)..( 9): Result.003 file - promoters60/2114178
tgttttata

SEQ ID NO: 126495 - DNA, 14 bp, Unknown
  misc_feature (1)..( 14): Result.003 file - promoters60/2114178
tatagcaaaactcc

SEQ ID NO: 126496 - DNA, 14 bp, Unknown
  misc_feature (1)..( 14): Result.003 file - promoters60/2114178
aagtggaaaaatcc

SEQ ID NO: 126497 - DNA, 14 bp, Unknown
  misc_feature (1)..( 14): Result.003 file - promoters60/2114178
tatagtaaaacagc

SEQ ID NO: 126498 - DNA, 6 bp, Unknown
  misc_feature (1)..( 6): Result.003 file - promoters60/2114178
agaaaa

SEQ ID NO: 126499 - DNA, 6 bp, Unknown
  misc_feature (1)..( 6): Result.003 file - promoters60/2114178
agaaaa

SEQ ID NO: 126500 - DNA, 7 bp, Unknown
  misc_feature (1)..( 7): Result.003 file - promoters60/2114178
cttcctc

SEQ ID NO: 126501 - DNA, 7 bp, Unknown
  misc_feature (1)..( 7): Result.003 file - promoters60/2114178
cttcctc

SEQ ID NO: 126502 - DNA, 9 bp, Unknown
  misc_feature (1)..( 9): Result.003 file - promoters60/2114178
taggtcgta

SEQ ID NO: 126503 - DNA, 9 bp, Unknown
  misc_feature (1)..( 9): Result.003 file - promoters60/2114178
tagttcgta

SEQ ID NO: 126504 - DNA, 6 bp, Unknown
  misc_feature (1)..( 6): Result.003 file - promoters60/2114178
tttagt

SEQ ID NO: 126505 - DNA, 6 bp, Unknown
  misc_feature (1)..( 6): Result.003 file - promoters60/2114178
tttagt

SEQ ID NO: 126506 - DNA, 9 bp, Unknown
  misc_feature (1)..( 9): Result.003 file - promoters60/2114178
atcttcttc

SEQ ID NO: 126507 - DNA, 9 bp, Unknown
  misc_feature (1)..( 9): Result.003 file - promoters60/2114178
atctacttc

SEQ ID NO: 126508 - DNA, 8 bp, Unknown
  misc_feature (1)..( 8): Result.003 file - promoters60/2114178
aaaataac

SEQ ID NO: 126509 - DNA, 8 bp, Unknown
  misc_feature (1)..( 8): Result.003 file - promoters60/2114178
aaattaac

SEQ ID NO: 126510 - DNA, 6 bp, Unknown
  misc_feature (1)..( 6): Result.003 file - promoters60/2114178
agcaaa

SEQ ID NO: 126511 - DNA, 6 bp, Unknown
  misc_feature (1)..( 6): Result.003 file - promoters60/2114178
agcaaa

SEQ ID NO: 126512 - DNA, 7 bp, Unknown
  misc_feature (1)..( 7): Result.003 file - promoters60/2114178
ttcaaca

SEQ ID NO: 126513 - DNA, 7 bp, Unknown
  misc_feature (1)..( 7): Result.003 file - promoters60/2114178
ttctaca

SEQ ID NO: 126514 - DNA, 7 bp, Unknown
  misc_feature (1)..( 7): Result.003 file - promoters60/2114178
aaattaa

SEQ ID NO: 126515 - DNA, 7 bp, Unknown
  misc_feature (1)..( 7): Result.003 file - promoters60/2114178
aaaataa

SEQ ID NO: 126516 - DNA, 7 bp, Unknown
  misc_feature (1)..( 7): Result.003 file - promoters60/2114178
tttgtaa

SEQ ID NO: 126517 - DNA, 7 bp, Unknown
  misc_feature (1)..( 7): Result.003 file - promoters60/2114178
tttgtaa

SEQ ID NO: 126518 - DNA, 9 bp, Unknown
  misc_feature (1)..( 9): Result.003 file - promoters60/2114178
ttacctttt

SEQ ID NO: 126519 - DNA, 9 bp, Unknown
  misc_feature (1)..( 9): Result.003 file - promoters60/2114178
ttatctttt

SEQ ID NO: 126520 - DNA, 8 bp, Unknown
  misc_feature (1)..( 8): Result.003 file - promoters60/2114178
gttgtgtt

SEQ ID NO: 126521 - DNA, 8 bp, Unknown
  misc_feature (1)..( 8): Result.003 file - promoters60/2114178
gttttgtt

SEQ ID NO: 126522 - DNA, 12 bp, Unknown
  misc_feature (1)..( 12): Result.003 file - promoters60/2114200
atcgaattcaag

SEQ ID NO: 126523 - DNA, 12 bp, Unknown
  misc_feature (1)..( 12): Result.003 file - promoters60/2114200
aatgaattcttt

SEQ ID NO: 126524 - DNA, 12 bp, Unknown
  misc_feature (1)..( 12): Result.003 file - promoters60/2114200
taataattaaag

SEQ ID NO: 126525 - DNA, 12 bp, Unknown
  misc_feature (1)..( 12): Result.003 file - promoters60/2114200
catcaatgctta

SEQ ID NO: 126526 - DNA, 12 bp, Unknown
  misc_feature (1)..( 12): Result.003 file - promoters60/2114200
cattaatccttg

SEQ ID NO: 126527 - DNA, 12 bp, Unknown
  misc_feature (1)..( 12): Result.003 file - promoters60/2114200
attccatcctta

SEQ ID NO: 126528 - DNA, 8 bp, Unknown
  misc_feature (1)..( 8): Result.003 file - promoters60/2131829
atttaaaa

SEQ ID NO: 126529 - DNA, 8 bp, Unknown
  misc_feature (1)..( 8): Result.003 file - promoters60/2131829
tattaaaa

SEQ ID NO: 126530 - DNA, 9 bp, Unknown
  misc_feature (1)..( 9): Result.003 file - promoters60/2131829
tattgaaaa

SEQ ID NO: 126531 - DNA, 9 bp, Unknown
  misc_feature (1)..( 9): Result.003 file - promoters60/2131829
aattgaaac

SEQ ID NO: 126532 - DNA, 11 bp, Unknown
  misc_feature (1)..( 11): Result.003 file - promoters60/2169576
ttttttaaaaa

SEQ ID NO: 126533 - DNA, 11 bp, Unknown
  misc_feature (1)..( 11): Result.003 file - promoters60/2169576
attttgaaaaa

SEQ ID NO: 126534 - DNA, 12 bp, Unknown
  misc_feature (1)..( 12): Result.003 file - promoters60/2169576
attgtttaagat

SEQ ID NO: 126535 - DNA, 12 bp, Unknown
  misc_feature (1)..( 12): Result.003 file - promoters60/2169576
gttttcgaatct

SEQ ID NO: 126536 - DNA, 12 bp, Unknown
  misc_feature (1)..( 12): Result.003 file - promoters60/2169576
tttgtttctctt

SEQ ID NO: 126537 - DNA, 12 bp, Unknown
  misc_feature (1)..( 12): Result.003 file - promoters60/2169576
aatgtttctcca

SEQ ID NO: 126538 - DNA, 14 bp, Unknown
  misc_feature (1)..( 14): Result.003 file - promoters60/2169576
ctcatataaataca

SEQ ID NO: 126539 - DNA, 14 bp, Unknown
  misc_feature (1)..( 14): Result.003 file - promoters60/2169576
acaatataaacata

SEQ ID NO: 126540 - DNA, 14 bp, Unknown
  misc_feature (1)..( 14): Result.003 file - promoters60/2169576
atcacatattaaca

SEQ ID NO: 126541 - DNA, 14 bp, Unknown
  misc_feature (1)..( 14): Result.003 file - promoters60/2169576
ctcatatatatcac

SEQ ID NO: 126542 - DNA, 14 bp, Unknown
  misc_feature (1)..( 14): Result.003 file - promoters60/2169576
ctcatatatataca

SEQ ID NO: 126543 - DNA, 14 bp, Unknown
  misc_feature (1)..( 14): Result.003 file - promoters60/2169576
cgtatatataaaga

SEQ ID NO: 126544 - DNA, 13 bp, Unknown
  misc_feature (1)..( 13): Result.003 file - promoters60/2169576
ctctagattttta

SEQ ID NO: 126545 - DNA, 13 bp, Unknown
  misc_feature (1)..( 13): Result.003 file - promoters60/2169576
tgaacaatttttc

SEQ ID NO: 126546 - DNA, 13 bp, Unknown
  misc_feature (1)..( 13): Result.003 file - promoters60/2169576
atacgttttttta

SEQ ID NO: 126547 - DNA, 13 bp, Unknown
  misc_feature (1)..( 13): Result.003 file - promoters60/2169576
ggtgagatgtttg

SEQ ID NO: 126548 - DNA, 13 bp, Unknown
  misc_feature (1)..( 13): Result.003 file - promoters60/2169576
aactagagtttcc

SEQ ID NO: 126549 - DNA, 13 bp, Unknown
  misc_feature (1)..( 13): Result.003 file - promoters60/2169576
aactagacccgtt

SEQ ID NO: 126550 - DNA, 13 bp, Unknown
  misc_feature (1)..( 13): Result.003 file - promoters60/2169576
tcgtagtgttcat

SEQ ID NO: 126551 - DNA, 14 bp, Unknown
  misc_feature (1)..( 14): Result.003 file - promoters60/2169576
aaagttttgagcta

SEQ ID NO: 126552 - DNA, 14 bp, Unknown
  misc_feature (1)..( 14): Result.003 file - promoters60/2169576
aaattttttttcta

SEQ ID NO: 126553 - DNA, 14 bp, Unknown
  misc_feature (1)..( 14): Result.003 file - promoters60/2169576
aaactttttttaca

SEQ ID NO: 126554 - DNA, 14 bp, Unknown
  misc_feature (1)..( 14): Result.003 file - promoters60/2169576
ctagtttttcttat

SEQ ID NO: 126555 - DNA, 14 bp, Unknown
  misc_feature (1)..( 14): Result.003 file - promoters60/2169576
tgacttttctttct

SEQ ID NO: 126556 - DNA, 14 bp, Unknown
  misc_feature (1)..( 14): Result.003 file - promoters60/2169576
caatttttagtcat

SEQ ID NO: 126557 - DNA, 9 bp, Unknown
  misc_feature (1)..( 9): Result.003 file - promoters60/2185389
tgaagaaaa

SEQ ID NO: 126558 - DNA, 9 bp, Unknown
  misc_feature (1)..( 9): Result.003 file - promoters60/2185389
tgaagaaca

SEQ ID NO: 126559 - DNA, 9 bp, Unknown
  misc_feature (1)..( 9): Result.003 file - promoters60/2185389
aaaagaaaa

SEQ ID NO: 126560 - DNA, 9 bp, Unknown
  misc_feature (1)..( 9): Result.003 file - promoters60/2185389
tgatgaaac

SEQ ID NO: 126561 - DNA, 9 bp, Unknown
  misc_feature (1)..( 9): Result.003 file - promoters60/2185389
ctaagaaat

SEQ ID NO: 126562 - DNA, 9 bp, Unknown
  misc_feature (1)..( 9): Result.003 file - promoters60/2185389
ccaatagaa

SEQ ID NO: 126563 - DNA, 9 bp, Unknown
  misc_feature (1)..( 9): Result.003 file - promoters60/2185389
acaagagag

SEQ ID NO: 126564 - DNA, 9 bp, Unknown
  misc_feature (1)..( 9): Result.003 file - promoters60/2185389
acaaaagag

SEQ ID NO: 126565 - DNA, 9 bp, Unknown
  misc_feature (1)..( 9): Result.003 file - promoters60/2185389
acaaaaaca

SEQ ID NO: 126566 - DNA, 8 bp, Unknown
  misc_feature (1)..( 8): Result.003 file - promoters60/2185389
ttttcttc

SEQ ID NO: 126567 - DNA, 8 bp, Unknown
  misc_feature (1)..( 8): Result.003 file - promoters60/2185389
ttttcttt

SEQ ID NO: 126568 - DNA, 8 bp, Unknown
  misc_feature (1)..( 8): Result.003 file - promoters60/2185389
tcttcttc

SEQ ID NO: 126569 - DNA, 8 bp, Unknown
  misc_feature (1)..( 8): Result.003 file - promoters60/2185389
ctttcttc

SEQ ID NO: 126570 - DNA, 11 bp, Unknown
  misc_feature (1)..( 11): Result.003 file - promoters60/2185389
gaagaaaatga

SEQ ID NO: 126571 - DNA, 11 bp, Unknown
  misc_feature (1)..( 11): Result.003 file - promoters60/2185389
acataaagtga

SEQ ID NO: 126572 - DNA, 11 bp, Unknown
  misc_feature (1)..( 11): Result.003 file - promoters60/2185389
gaaaaaaatgg

SEQ ID NO: 126573 - DNA, 11 bp, Unknown
  misc_feature (1)..( 11): Result.003 file - promoters60/2185389
gtaaataatta

SEQ ID NO: 126574 - DNA, 10 bp, Unknown
  misc_feature (1)..( 10): Result.003 file - promoters60/2185389
gcagagacaa

SEQ ID NO: 126575 - DNA, 10 bp, Unknown
  misc_feature (1)..( 10): Result.003 file - promoters60/2185389
cttgagtcaa

SEQ ID NO: 126576 - DNA, 10 bp, Unknown
  misc_feature (1)..( 10): Result.003 file - promoters60/2185389
tttgaatcaa

SEQ ID NO: 126577 - DNA, 10 bp, Unknown
  misc_feature (1)..( 10): Result.003 file - promoters60/2185389
tttgtatcag

SEQ ID NO: 126578 - DNA, 11 bp, Unknown
  misc_feature (1)..( 11): Result.003 file - promoters60/2187156
ccagaattaag

SEQ ID NO: 126579 - DNA, 11 bp, Unknown
  misc_feature (1)..( 11): Result.003 file - promoters60/2187156
ccataattagt

SEQ ID NO: 126580 - DNA, 11 bp, Unknown
  misc_feature (1)..( 11): Result.003 file - promoters60/2187156
atgtaattaag

SEQ ID NO: 126581 - DNA, 11 bp, Unknown
  misc_feature (1)..( 11): Result.003 file - promoters60/2187156
aaatacttaag

SEQ ID NO: 126582 - DNA, 11 bp, Unknown
  misc_feature (1)..( 11): Result.003 file - promoters60/2187156
tcataattttg

SEQ ID NO: 126583 - DNA, 9 bp, Unknown
  misc_feature (1)..( 9): Result.003 file - promoters60/2187156
tgtaaaaat

SEQ ID NO: 126584 - DNA, 9 bp, Unknown
  misc_feature (1)..( 9): Result.003 file - promoters60/2187156
tgtaaataa

SEQ ID NO: 126585 - DNA, 9 bp, Unknown
  misc_feature (1)..( 9): Result.003 file - promoters60/2187156
agtaaaatt

SEQ ID NO: 126586 - DNA, 9 bp, Unknown
  misc_feature (1)..( 9): Result.003 file - promoters60/2187156
ggtacataa

SEQ ID NO: 126587 - DNA, 10 bp, Unknown
  misc_feature (1)..( 10): Result.003 file - promoters60/2217817
aaaagatagc

SEQ ID NO: 126588 - DNA, 10 bp, Unknown
  misc_feature (1)..( 10): Result.003 file - promoters60/2217817
gaaatatata

SEQ ID NO: 126589 - DNA, 10 bp, Unknown
  misc_feature (1)..( 10): Result.003 file - promoters60/2217817
gaaatagatt

SEQ ID NO: 126590 - DNA, 10 bp, Unknown
  misc_feature (1)..( 10): Result.003 file - promoters60/2217817
ttagtagatt

SEQ ID NO: 126591 - DNA, 10 bp, Unknown
  misc_feature (1)..( 10): Result.003 file - promoters60/2217817
ttaatttatt

SEQ ID NO: 126592 - DNA, 10 bp, Unknown
  misc_feature (1)..( 10): Result.003 file - promoters60/2217817
tgattacttt

SEQ ID NO: 126593 - DNA, 8 bp, Unknown
  misc_feature (1)..( 8): Result.003 file - promoters60/2217996
ctcatttt

SEQ ID NO: 126594 - DNA, 8 bp, Unknown
  misc_feature (1)..( 8): Result.003 file - promoters60/2217996
ctcagttt

SEQ ID NO: 126595 - DNA, 7 bp, Unknown
  misc_feature (1)..( 7): Result.003 file - promoters60/2217996
ccatttt

SEQ ID NO: 126596 - DNA, 8 bp, Unknown
  misc_feature (1)..( 8): Result.003 file - promoters60/2217996
tccagttt

SEQ ID NO: 126597 - DNA, 6 bp, Unknown
  misc_feature (1)..( 6): Result.003 file - promoters60/2218016
ttcaca

SEQ ID NO: 126598 - DNA, 6 bp, Unknown
  misc_feature (1)..( 6): Result.003 file - promoters60/2218016
ttcaca

SEQ ID NO: 126599 - DNA, 6 bp, Unknown
  misc_feature (1)..( 6): Result.003 file - promoters60/2218016
agcttt

SEQ ID NO: 126600 - DNA, 6 bp, Unknown
  misc_feature (1)..( 6): Result.003 file - promoters60/2218016
agcttt

SEQ ID NO: 126601 - DNA, 6 bp, Unknown
  misc_feature (1)..( 6): Result.003 file - promoters60/2218016
ttttca

SEQ ID NO: 126602 - DNA, 6 bp, Unknown
  misc_feature (1)..( 6): Result.003 file - promoters60/2218016
ttttca

SEQ ID NO: 126603 - DNA, 7 bp, Unknown
  misc_feature (1)..( 7): Result.003 file - promoters60/2218016
atataag

SEQ ID NO: 126604 - DNA, 7 bp, Unknown
  misc_feature (1)..( 7): Result.003 file - promoters60/2218016
atataag

SEQ ID NO: 126605 - DNA, 6 bp, Unknown
  misc_feature (1)..( 6): Result.003 file - promoters60/2218016
tcacta

SEQ ID NO: 126606 - DNA, 6 bp, Unknown
  misc_feature (1)..( 6): Result.003 file - promoters60/2218016
tcacta

SEQ ID NO: 126607 - DNA, 6 bp, Unknown
  misc_feature (1)..( 6): Result.003 file - promoters60/2218016
tcaatc

SEQ ID NO: 126608 - DNA, 6 bp, Unknown
  misc_feature (1)..( 6): Result.003 file - promoters60/2218016
tcaatc

SEQ ID NO: 126609 - DNA, 6 bp, Unknown
  misc_feature (1)..( 6): Result.003 file - promoters60/2218016
agtaag

SEQ ID NO: 126610 - DNA, 6 bp, Unknown
  misc_feature (1)..( 6): Result.003 file - promoters60/2218016
agtaag

SEQ ID NO: 126611 - DNA, 7 bp, Unknown
  misc_feature (1)..( 7): Result.003 file - promoters60/2218016
accaaac

SEQ ID NO: 126612 - DNA, 7 bp, Unknown
  misc_feature (1)..( 7): Result.003 file - promoters60/2218016
accaaac

SEQ ID NO: 126613 - DNA, 7 bp, Unknown
  misc_feature (1)..( 7): Result.003 file - promoters60/2218016
ttgctgt

SEQ ID NO: 126614 - DNA, 7 bp, Unknown
  misc_feature (1)..( 7): Result.003 file - promoters60/2218016
ttgatgt

SEQ ID NO: 126615 - DNA, 12 bp, Unknown
  misc_feature (1)..( 12): Result.003 file - promoters60/2218207
taatcttttggg

SEQ ID NO: 126616 - DNA, 12 bp, Unknown
  misc_feature (1)..( 12): Result.003 file - promoters60/2218207
taatgtttttct

SEQ ID NO: 126617 - DNA, 12 bp, Unknown
  misc_feature (1)..( 12): Result.003 file - promoters60/2218207
atttcttttcac

SEQ ID NO: 126618 - DNA, 12 bp, Unknown
  misc_feature (1)..( 12): Result.003 file - promoters60/2218207
aactcttttgag

SEQ ID NO: 126619 - DNA, 12 bp, Unknown
  misc_feature (1)..( 12): Result.003 file - promoters60/2218207
gtttctgttcac

SEQ ID NO: 126620 - DNA, 12 bp, Unknown
  misc_feature (1)..( 12): Result.003 file - promoters60/2218207
gattctgtgaag

SEQ ID NO: 126621 - DNA, 13 bp, Unknown
  misc_feature (1)..( 13): Result.003 file - promoters60/2218260
ggatagatagact

SEQ ID NO: 126622 - DNA, 13 bp, Unknown
  misc_feature (1)..( 13): Result.003 file - promoters60/2218260
ggaaagattgata

SEQ ID NO: 126623 - DNA, 13 bp, Unknown
  misc_feature (1)..( 13): Result.003 file - promoters60/2218260
caataaataataa

SEQ ID NO: 126624 - DNA, 14 bp, Unknown
  misc_feature (1)..( 14): Result.003 file - promoters60/2218260
cagtagcatacaaa

SEQ ID NO: 126625 - DNA, 14 bp, Unknown
  misc_feature (1)..( 14): Result.003 file - promoters60/2218260
aacaaaaattatac

SEQ ID NO: 126626 - DNA, 14 bp, Unknown
  misc_feature (1)..( 14): Result.003 file - promoters60/2218260
gtcgagaatacata

SEQ ID NO: 126627 - DNA, 12 bp, Unknown
  misc_feature (1)..( 12): Result.003 file - promoters60/2218260
acatatatactt

SEQ ID NO: 126628 - DNA, 12 bp, Unknown
  misc_feature (1)..( 12): Result.003 file - promoters60/2218260
gtatatatataa

SEQ ID NO: 126629 - DNA, 12 bp, Unknown
  misc_feature (1)..( 12): Result.003 file - promoters60/2218260
atttatatagat

SEQ ID NO: 126630 - DNA, 12 bp, Unknown
  misc_feature (1)..( 12): Result.003 file - promoters60/2218260
gtatttatattt

SEQ ID NO: 126631 - DNA, 12 bp, Unknown
  misc_feature (1)..( 12): Result.003 file - promoters60/2218260
agttaaatagca

SEQ ID NO: 126632 - DNA, 12 bp, Unknown
  misc_feature (1)..( 12): Result.003 file - promoters60/2218260
caataaaaagca

SEQ ID NO: 126633 - DNA, 6 bp, Unknown
  misc_feature (1)..( 6): Result.003 file - promoters60/2685725
tcaatg

SEQ ID NO: 126634 - DNA, 6 bp, Unknown
  misc_feature (1)..( 6): Result.003 file - promoters60/2685725
tcaatg

SEQ ID NO: 126635 - DNA, 8 bp, Unknown
  misc_feature (1)..( 8): Result.003 file - promoters60/2685725
gtcaaggt

SEQ ID NO: 126636 - DNA, 8 bp, Unknown
  misc_feature (1)..( 8): Result.003 file - promoters60/2685725
gtcatggt

SEQ ID NO: 126637 - DNA, 9 bp, Unknown
  misc_feature (1)..( 9): Result.003 file - promoters60/2685725
taatattgt

SEQ ID NO: 126638 - DNA, 9 bp, Unknown
  misc_feature (1)..( 9): Result.003 file - promoters60/2685725
taatcttgt

SEQ ID NO: 126639 - DNA, 7 bp, Unknown
  misc_feature (1)..( 7): Result.003 file - promoters60/2685725
aaggttc

SEQ ID NO: 126640 - DNA, 7 bp, Unknown
  misc_feature (1)..( 7): Result.003 file - promoters60/2685725
aaggttc

SEQ ID NO: 126641 - DNA, 6 bp, Unknown
  misc_feature (1)..( 6): Result.003 file - promoters60/2685725
gatacg

SEQ ID NO: 126642 - DNA, 6 bp, Unknown
  misc_feature (1)..( 6): Result.003 file - promoters60/2685725
gatacg

SEQ ID NO: 126643 - DNA, 8 bp, Unknown
  misc_feature (1)..( 8): Result.003 file - promoters60/2685725
tcatacac

SEQ ID NO: 126644 - DNA, 8 bp, Unknown
  misc_feature (1)..( 8): Result.003 file - promoters60/2685725
tcacacac

SEQ ID NO: 126645 - DNA, 7 bp, Unknown
  misc_feature (1)..( 7): Result.003 file - promoters60/2685725
ttaggta

SEQ ID NO: 126646 - DNA, 7 bp, Unknown
  misc_feature (1)..( 7): Result.003 file - promoters60/2685725
ttatgta

SEQ ID NO: 126647 - DNA, 7 bp, Unknown
  misc_feature (1)..( 7): Result.003 file - promoters60/2685725
tatcatg

SEQ ID NO: 126648 - DNA, 7 bp, Unknown
  misc_feature (1)..( 7): Result.003 file - promoters60/2685725
tataatg

SEQ ID NO: 126649 - DNA, 7 bp, Unknown
  misc_feature (1)..( 7): Result.003 file - promoters60/2685725
caaacga

SEQ ID NO: 126650 - DNA, 7 bp, Unknown
  misc_feature (1)..( 7): Result.003 file - promoters60/2685725
caaacga

SEQ ID NO: 126651 - DNA, 6 bp, Unknown
  misc_feature (1)..( 6): Result.003 file - promoters60/2685725
aataag

SEQ ID NO: 126652 - DNA, 6 bp, Unknown
  misc_feature (1)..( 6): Result.003 file - promoters60/2685725
aataag

SEQ ID NO: 126653 - DNA, 7 bp, Unknown
  misc_feature (1)..( 7): Result.003 file - promoters60/2685873
acctaat

SEQ ID NO: 126654 - DNA, 7 bp, Unknown
  misc_feature (1)..( 7): Result.003 file - promoters60/2685873
acccaat

SEQ ID NO: 126655 - DNA, 8 bp, Unknown
  misc_feature (1)..( 8): Result.003 file - promoters60/2685873
tctatctt

SEQ ID NO: 126656 - DNA, 8 bp, Unknown
  misc_feature (1)..( 8): Result.003 file - promoters60/2685873
tctgtctt

SEQ ID NO: 126657 - DNA, 6 bp, Unknown
  misc_feature (1)..( 6): Result.003 file - promoters60/2685873
caacaa

SEQ ID NO: 126658 - DNA, 6 bp, Unknown
  misc_feature (1)..( 6): Result.003 file - promoters60/2685873
caacaa

SEQ ID NO: 126659 - DNA, 8 bp, Unknown
  misc_feature (1)..( 8): Result.003 file - promoters60/2685873
aaatgtca

SEQ ID NO: 126660 - DNA, 8 bp, Unknown
  misc_feature (1)..( 8): Result.003 file - promoters60/2685873
aaatatca

SEQ ID NO: 126661 - DNA, 6 bp, Unknown
  misc_feature (1)..( 6): Result.003 file - promoters60/2685873
aaagaa

SEQ ID NO: 126662 - DNA, 6 bp, Unknown
  misc_feature (1)..( 6): Result.003 file - promoters60/2685873
aaagaa

SEQ ID NO: 126663 - DNA, 6 bp, Unknown
  misc_feature (1)..( 6): Result.003 file - promoters60/2685873
aaaaga

SEQ ID NO: 126664 - DNA, 6 bp, Unknown
  misc_feature (1)..( 6): Result.003 file - promoters60/2685873
aaaaga

SEQ ID NO: 126665 - DNA, 8 bp, Unknown
  misc_feature (1)..( 8): Result.003 file - promoters60/2685873
ttcttaga

SEQ ID NO: 126666 - DNA, 8 bp, Unknown
  misc_feature (1)..( 8): Result.003 file - promoters60/2685873
ttctaaga

SEQ ID NO: 126667 - DNA, 8 bp, Unknown
  misc_feature (1)..( 8): Result.003 file - promoters60/2685873
tttttttt

SEQ ID NO: 126668 - DNA, 8 bp, Unknown
  misc_feature (1)..( 8): Result.003 file - promoters60/2685873
tttttttt

SEQ ID NO: 126669 - DNA, 8 bp, Unknown
  misc_feature (1)..( 8): Result.003 file - promoters60/2685873
ttgtaatt

SEQ ID NO: 126670 - DNA, 8 bp, Unknown
  misc_feature (1)..( 8): Result.003 file - promoters60/2685873
ttgcaatt

SEQ ID NO: 126671 - DNA, 7 bp, Unknown
  misc_feature (1)..( 7): Result.003 file - promoters60/2685873
aacaatt

SEQ ID NO: 126672 - DNA, 7 bp, Unknown
  misc_feature (1)..( 7): Result.003 file - promoters60/2685873
aacaatt

SEQ ID NO: 126673 - DNA, 7 bp, Unknown
  misc_feature (1)..( 7): Result.003 file - promoters60/2685873
tctaaca

SEQ ID NO: 126674 - DNA, 7 bp, Unknown
  misc_feature (1)..( 7): Result.003 file - promoters60/2685873
tcttaca

SEQ ID NO: 126675 - DNA, 6 bp, Unknown
  misc_feature (1)..( 6): Result.003 file - promoters60/2685873
attcaa

SEQ ID NO: 126676 - DNA, 6 bp, Unknown
  misc_feature (1)..( 6): Result.003 file - promoters60/2685873
attcaa

SEQ ID NO: 126677 - DNA, 6 bp, Unknown
  misc_feature (1)..( 6): Result.003 file - promoters60/2685873
aaaaaa

SEQ ID NO: 126678 - DNA, 6 bp, Unknown
  misc_feature (1)..( 6): Result.003 file - promoters60/2685873
aaaaaa

SEQ ID NO: 126679 - DNA, 8 bp, Unknown
  misc_feature (1)..( 8): Result.003 file - promoters60/2685873
aaaatctt

SEQ ID NO: 126680 - DNA, 8 bp, Unknown
  misc_feature (1)..( 8): Result.003 file - promoters60/2685873
aaaacctt

SEQ ID NO: 126681 - DNA, 7 bp, Unknown
  misc_feature (1)..( 7): Result.003 file - promoters60/2685873
gaaagaa

SEQ ID NO: 126682 - DNA, 7 bp, Unknown
  misc_feature (1)..( 7): Result.003 file - promoters60/2685873
gaaagaa

SEQ ID NO: 126683 - DNA, 6 bp, Unknown
  misc_feature (1)..( 6): Result.003 file - promoters60/2685873
ttgatg

SEQ ID NO: 126684 - DNA, 6 bp, Unknown
  misc_feature (1)..( 6): Result.003 file - promoters60/2685873
ttgatg

SEQ ID NO: 126685 - DNA, 8 bp, Unknown
  misc_feature (1)..( 8): Result.003 file - promoters60/2685873
ttgagctt

SEQ ID NO: 126686 - DNA, 8 bp, Unknown
  misc_feature (1)..( 8): Result.003 file - promoters60/2685873
ttgatctt

SEQ ID NO: 126687 - DNA, 6 bp, Unknown
  misc_feature (1)..( 6): Result.003 file - promoters60/2685873
aatttg

SEQ ID NO: 126688 - DNA, 6 bp, Unknown
  misc_feature (1)..( 6): Result.003 file - promoters60/2685873
aatttg

SEQ ID NO: 126689 - DNA, 8 bp, Unknown
  misc_feature (1)..( 8): Result.003 file - promoters60/2685873
aaaccctt

SEQ ID NO: 126690 - DNA, 8 bp, Unknown
  misc_feature (1)..( 8): Result.003 file - promoters60/2685873
aaactctt

SEQ ID NO: 126691 - DNA, 6 bp, Unknown
  misc_feature (1)..( 6): Result.003 file - promoters60/2685873
aatcaa

SEQ ID NO: 126692 - DNA, 6 bp, Unknown
  misc_feature (1)..( 6): Result.003 file - promoters60/2685873
aatcaa

SEQ ID NO: 126693 - DNA, 8 bp, Unknown
  misc_feature (1)..( 8): Result.003 file - promoters60/2685873
cacctctc

SEQ ID NO: 126694 - DNA, 8 bp, Unknown
  misc_feature (1)..( 8): Result.003 file - promoters60/2685873
caccactc

SEQ ID NO: 126695 - DNA, 14 bp, Unknown
  misc_feature (1)..( 14): Result.003 file - promoters60/2685951
aagtttcaaataca

SEQ ID NO: 126696 - DNA, 14 bp, Unknown
  misc_feature (1)..( 14): Result.003 file - promoters60/2685951
ggagatcaaatagg

SEQ ID NO: 126697 - DNA, 14 bp, Unknown
  misc_feature (1)..( 14): Result.003 file - promoters60/2685951
ataaaaaaaaaaca

SEQ ID NO: 126698 - DNA, 14 bp, Unknown
  misc_feature (1)..( 14): Result.003 file - promoters60/2685951
tttgattaaattgg

SEQ ID NO: 126699 - DNA, 14 bp, Unknown
  misc_feature (1)..( 14): Result.003 file - promoters60/2685951
ctgcattaaacaac

SEQ ID NO: 126700 - DNA, 14 bp, Unknown
  misc_feature (1)..( 14): Result.003 file - promoters60/2685951
ttttattaccacta

SEQ ID NO: 126701 - DNA, 8 bp, Unknown
  misc_feature (1)..( 8): Result.003 file - promoters60/2685951
tttagtgt

SEQ ID NO: 126702 - DNA, 8 bp, Unknown
  misc_feature (1)..( 8): Result.003 file - promoters60/2685951
tttattgt

SEQ ID NO: 126703 - DNA, 8 bp, Unknown
  misc_feature (1)..( 8): Result.003 file - promoters60/2685951
tttatttc

SEQ ID NO: 126704 - DNA, 8 bp, Unknown
  misc_feature (1)..( 8): Result.003 file - promoters60/2685951
tttatttt

SEQ ID NO: 126705 - DNA, 8 bp, Unknown
  misc_feature (1)..( 8): Result.003 file - promoters60/2685951
tttttttt

SEQ ID NO: 126706 - DNA, 8 bp, Unknown
  misc_feature (1)..( 8): Result.003 file - promoters60/2685951
tttattac

SEQ ID NO: 126707 - DNA, 8 bp, Unknown
  misc_feature (1)..( 8): Result.003 file - promoters60/2685968
tgaaaata

SEQ ID NO: 126708 - DNA, 8 bp, Unknown
  misc_feature (1)..( 8): Result.003 file - promoters60/2685968
tgacaatt

SEQ ID NO: 126709 - DNA, 8 bp, Unknown
  misc_feature (1)..( 8): Result.003 file - promoters60/2685968
agaagata

SEQ ID NO: 126710 - DNA, 7 bp, Unknown
  misc_feature (1)..( 7): Result.003 file - promoters60/2685968
aagaaat

SEQ ID NO: 126711 - DNA, 7 bp, Unknown
  misc_feature (1)..( 7): Result.003 file - promoters60/2685968
aagaaat

SEQ ID NO: 126712 - DNA, 6 bp, Unknown
  misc_feature (1)..( 6): Result.003 file - promoters60/2685968
aattaa

SEQ ID NO: 126713 - DNA, 6 bp, Unknown
  misc_feature (1)..( 6): Result.003 file - promoters60/2685968
aattaa

SEQ ID NO: 126714 - DNA, 8 bp, Unknown
  misc_feature (1)..( 8): Result.003 file - promoters60/2685968
atatgaat

SEQ ID NO: 126715 - DNA, 8 bp, Unknown
  misc_feature (1)..( 8): Result.003 file - promoters60/2685968
atataaat

SEQ ID NO: 126716 - DNA, 8 bp, Unknown
  misc_feature (1)..( 8): Result.003 file - promoters60/2685968
aaaataaa

SEQ ID NO: 126717 - DNA, 8 bp, Unknown
  misc_feature (1)..( 8): Result.003 file - promoters60/2685968
aaaagaaa

SEQ ID NO: 126718 - DNA, 7 bp, Unknown
  misc_feature (1)..( 7): Result.003 file - promoters60/2685968
cattttt

SEQ ID NO: 126719 - DNA, 7 bp, Unknown
  misc_feature (1)..( 7): Result.003 file - promoters60/2685968
tattttt

SEQ ID NO: 126720 - DNA, 8 bp, Unknown
  misc_feature (1)..( 8): Result.003 file - promoters60/2685968
tattattt

SEQ ID NO: 126721 - DNA, 12 bp, Unknown
  misc_feature (1)..( 12): Result.003 file - promoters60/2685968
gaagaagaaaag

SEQ ID NO: 126722 - DNA, 12 bp, Unknown
  misc_feature (1)..( 12): Result.003 file - promoters60/2685968
gaaaaagataag

SEQ ID NO: 126723 - DNA, 6 bp, Unknown
  misc_feature (1)..( 6): Result.003 file - promoters60/2685968
cgtttt

SEQ ID NO: 126724 - DNA, 6 bp, Unknown
  misc_feature (1)..( 6): Result.003 file - promoters60/2685968
cgtttt

SEQ ID NO: 126725 - DNA, 8 bp, Unknown
  misc_feature (1)..( 8): Result.003 file - promoters60/2685968
tttgttca

SEQ ID NO: 126726 - DNA, 8 bp, Unknown
  misc_feature (1)..( 8): Result.003 file - promoters60/2685968
ttttttca

SEQ ID NO: 126727 - DNA, 7 bp, Unknown
  misc_feature (1)..( 7): Result.003 file - promoters60/2685968
agagaga

SEQ ID NO: 126728 - DNA, 7 bp, Unknown
  misc_feature (1)..( 7): Result.003 file - promoters60/2685968
agataga

SEQ ID NO: 126729 - DNA, 6 bp, Unknown
  misc_feature (1)..( 6): Result.003 file - promoters60/2685968
ttttaa

SEQ ID NO: 126730 - DNA, 6 bp, Unknown
  misc_feature (1)..( 6): Result.003 file - promoters60/2685968
ttttaa

SEQ ID NO: 126731 - DNA, 6 bp, Unknown
  misc_feature (1)..( 6): Result.003 file - promoters60/2685968
tttttt

SEQ ID NO: 126732 - DNA, 6 bp, Unknown
  misc_feature (1)..( 6): Result.003 file - promoters60/2685968
tttttt

SEQ ID NO: 126733 - DNA, 6 bp, Unknown
  misc_feature (1)..( 6): Result.003 file - promoters60/2685968
caaatt

SEQ ID NO: 126734 - DNA, 6 bp, Unknown
  misc_feature (1)..( 6): Result.003 file - promoters60/2685968
caaatt

SEQ ID NO: 126735 - DNA, 7 bp, Unknown
  misc_feature (1)..( 7): Result.003 file - promoters60/2685968
gaacaat

SEQ ID NO: 126736 - DNA, 7 bp, Unknown
  misc_feature (1)..( 7): Result.003 file - promoters60/2685968
gaacaaa

SEQ ID NO: 126737 - DNA, 7 bp, Unknown
  misc_feature (1)..( 7): Result.003 file - promoters60/2685968
aaacaaa

SEQ ID NO: 126738 - DNA, 10 bp, Unknown
  misc_feature (1)..( 10): Result.003 file - promoters60/2685968
aattatgtgt

SEQ ID NO: 126739 - DNA, 10 bp, Unknown
  misc_feature (1)..( 10): Result.003 file - promoters60/2685968
tattatttgt

SEQ ID NO: 126740 - DNA, 10 bp, Unknown
  misc_feature (1)..( 10): Result.003 file - promoters60/2685968
tattttttta

SEQ ID NO: 126741 - DNA, 6 bp, Unknown
  misc_feature (1)..( 6): Result.003 file - promoters60/2685968
attatc

SEQ ID NO: 126742 - DNA, 6 bp, Unknown
  misc_feature (1)..( 6): Result.003 file - promoters60/2685968
attatc

SEQ ID NO: 126743 - DNA, 9 bp, Unknown
  misc_feature (1)..( 9): Result.003 file - promoters60/2685968
tgttataaa

SEQ ID NO: 126744 - DNA, 9 bp, Unknown
  misc_feature (1)..( 9): Result.003 file - promoters60/2685968
ttttataaa

SEQ ID NO: 126745 - DNA, 9 bp, Unknown
  misc_feature (1)..( 9): Result.003 file - promoters60/2685968
ttttatagg

SEQ ID NO: 126746 - DNA, 7 bp, Unknown
  misc_feature (1)..( 7): Result.003 file - promoters60/2685968
ttcattt

SEQ ID NO: 126747 - DNA, 7 bp, Unknown
  misc_feature (1)..( 7): Result.003 file - promoters60/2685968
ttcattt

SEQ ID NO: 126748 - DNA, 6 bp, Unknown
  misc_feature (1)..( 6): Result.003 file - promoters60/2685968
ttgcat

SEQ ID NO: 126749 - DNA, 6 bp, Unknown
  misc_feature (1)..( 6): Result.003 file - promoters60/2685968
ttgcat

SEQ ID NO: 126750 - DNA, 8 bp, Unknown
  misc_feature (1)..( 8): Result.003 file - promoters60/2685968
aagctaat

SEQ ID NO: 126751 - DNA, 8 bp, Unknown
  misc_feature (1)..( 8): Result.003 file - promoters60/2685968
aagataat

SEQ ID NO: 126752 - DNA, 7 bp, Unknown
  misc_feature (1)..( 7): Result.003 file - promoters60/2685968
tgttaaa

SEQ ID NO: 126753 - DNA, 7 bp, Unknown
  misc_feature (1)..( 7): Result.003 file - promoters60/2685968
tgtcaaa

SEQ ID NO: 126754 - DNA, 6 bp, Unknown
  misc_feature (1)..( 6): Result.003 file - promoters60/2685968
caaaga

SEQ ID NO: 126755 - DNA, 6 bp, Unknown
  misc_feature (1)..( 6): Result.003 file - promoters60/2685968
caaaga

SEQ ID NO: 126756 - DNA, 7 bp, Unknown
  misc_feature (1)..( 7): Result.003 file - promoters60/2685968
aaaaact

SEQ ID NO: 126757 - DNA, 7 bp, Unknown
  misc_feature (1)..( 7): Result.003 file - promoters60/2685968
aaaaact

SEQ ID NO: 126758 - DNA, 6 bp, Unknown
  misc_feature (1)..( 6): Result.003 file - promoters60/2685968
acaaaa

SEQ ID NO: 126759 - DNA, 6 bp, Unknown
  misc_feature (1)..( 6): Result.003 file - promoters60/2685968
acaaaa

SEQ ID NO: 126760 - DNA, 10 bp, Unknown
  misc_feature (1)..( 10): Result.003 file - promoters60/2685968
aaaacaaaac

SEQ ID NO: 126761 - DNA, 10 bp, Unknown
  misc_feature (1)..( 10): Result.003 file - promoters60/2685968
aaaacagaac

SEQ ID NO: 126762 - DNA, 7 bp, Unknown
  misc_feature (1)..( 7): Result.003 file - promoters60/2685968
tttgatt

SEQ ID NO: 126763 - DNA, 7 bp, Unknown
  misc_feature (1)..( 7): Result.003 file - promoters60/2685968
tttgatt

SEQ ID NO: 126764 - DNA, 8 bp, Unknown
  misc_feature (1)..( 8): Result.003 file - promoters60/2685968
aaaaacaa

SEQ ID NO: 126765 - DNA, 8 bp, Unknown
  misc_feature (1)..( 8): Result.003 file - promoters60/2685968
aaaatcaa

SEQ ID NO: 126766 - DNA, 7 bp, Unknown
  misc_feature (1)..( 7): Result.003 file - promoters60/2685968
atttaaa

SEQ ID NO: 126767 - DNA, 7 bp, Unknown
  misc_feature (1)..( 7): Result.003 file - promoters60/2685968
attaaaa

SEQ ID NO: 126768 - DNA, 8 bp, Unknown
  misc_feature (1)..( 8): Result.003 file - promoters60/2686138
ataactta

SEQ ID NO: 126769 - DNA, 8 bp, Unknown
  misc_feature (1)..( 8): Result.003 file - promoters60/2686138
ataattta

SEQ ID NO: 126770 - DNA, 8 bp, Unknown
  misc_feature (1)..( 8): Result.003 file - promoters60/2686138
tataatta

SEQ ID NO: 126771 - DNA, 8 bp, Unknown
  misc_feature (1)..( 8): Result.003 file - promoters60/2686138
tatattta

SEQ ID NO: 126772 - DNA, 10 bp, Unknown
  misc_feature (1)..( 10): Result.003 file - promoters60/2686138
ggtcaaatat

SEQ ID NO: 126773 - DNA, 10 bp, Unknown
  misc_feature (1)..( 10): Result.003 file - promoters60/2686138
aaacaattat

SEQ ID NO: 126774 - DNA, 10 bp, Unknown
  misc_feature (1)..( 10): Result.003 file - promoters60/2686138
aaacgattcc

SEQ ID NO: 126775 - DNA, 8 bp, Unknown
  misc_feature (1)..( 8): Result.003 file - promoters60/2686138
ttgtgttt

SEQ ID NO: 126776 - DNA, 8 bp, Unknown
  misc_feature (1)..( 8): Result.003 file - promoters60/2686138
ttgtattt

SEQ ID NO: 126777 - DNA, 7 bp, Unknown
  misc_feature (1)..( 7): Result.003 file - promoters60/2686138
ataattt

SEQ ID NO: 126778 - DNA, 7 bp, Unknown
  misc_feature (1)..( 7): Result.003 file - promoters60/2686138
atatttt

SEQ ID NO: 126779 - DNA, 7 bp, Unknown
  misc_feature (1)..( 7): Result.003 file - promoters60/2686138
attttgt

SEQ ID NO: 126780 - DNA, 7 bp, Unknown
  misc_feature (1)..( 7): Result.003 file - promoters60/2686138
tttttgt

SEQ ID NO: 126781 - DNA, 7 bp, Unknown
  misc_feature (1)..( 7): Result.003 file - promoters60/2686138
attttgt

SEQ ID NO: 126782 - DNA, 6 bp, Unknown
  misc_feature (1)..( 6): Result.003 file - promoters60/2686138
attcat

SEQ ID NO: 126783 - DNA, 6 bp, Unknown
  misc_feature (1)..( 6): Result.003 file - promoters60/2686138
attcat

SEQ ID NO: 126784 - DNA, 9 bp, Unknown
  misc_feature (1)..( 9): Result.003 file - promoters60/2686138
tataattaa

SEQ ID NO: 126785 - DNA, 9 bp, Unknown
  misc_feature (1)..( 9): Result.003 file - promoters60/2686138
tatgatttc

SEQ ID NO: 126786 - DNA, 9 bp, Unknown
  misc_feature (1)..( 9): Result.003 file - promoters60/2686138
cttaactaa

SEQ ID NO: 126787 - DNA, 6 bp, Unknown
  misc_feature (1)..( 6): Result.003 file - promoters60/2686138
aaaaat

SEQ ID NO: 126788 - DNA, 6 bp, Unknown
  misc_feature (1)..( 6): Result.003 file - promoters60/2686138
aaaaat

SEQ ID NO: 126789 - DNA, 6 bp, Unknown
  misc_feature (1)..( 6): Result.003 file - promoters60/2686138
tgggtt

SEQ ID NO: 126790 - DNA, 6 bp, Unknown
  misc_feature (1)..( 6): Result.003 file - promoters60/2686138
tgggtt

SEQ ID NO: 126791 - DNA, 7 bp, Unknown
  misc_feature (1)..( 7): Result.003 file - promoters60/2686138
aaataaa

SEQ ID NO: 126792 - DNA, 7 bp, Unknown
  misc_feature (1)..( 7): Result.003 file - promoters60/2686138
aaataat

SEQ ID NO: 126793 - DNA, 7 bp, Unknown
  misc_feature (1)..( 7): Result.003 file - promoters60/2686138
taataat

SEQ ID NO: 126794 - DNA, 6 bp, Unknown
  misc_feature (1)..( 6): Result.003 file - promoters60/2686138
acaaaa

SEQ ID NO: 126795 - DNA, 6 bp, Unknown
  misc_feature (1)..( 6): Result.003 file - promoters60/2686138
acaaaa

SEQ ID NO: 126796 - DNA, 7 bp, Unknown
  misc_feature (1)..( 7): Result.003 file - promoters60/2686138
aaagtga

SEQ ID NO: 126797 - DNA, 7 bp, Unknown
  misc_feature (1)..( 7): Result.003 file - promoters60/2686138
aaattga

SEQ ID NO: 126798 - DNA, 8 bp, Unknown
  misc_feature (1)..( 8): Result.003 file - promoters60/2686138
taaataaa

SEQ ID NO: 126799 - DNA, 8 bp, Unknown
  misc_feature (1)..( 8): Result.003 file - promoters60/2686138
taaagaaa

SEQ ID NO: 126800 - DNA, 6 bp, Unknown
  misc_feature (1)..( 6): Result.003 file - promoters60/2686138
aaaaac

SEQ ID NO: 126801 - DNA, 6 bp, Unknown
  misc_feature (1)..( 6): Result.003 file - promoters60/2686138
aaaaac

SEQ ID NO: 126802 - DNA, 7 bp, Unknown
  misc_feature (1)..( 7): Result.003 file - promoters60/2686138
ctaaaat

SEQ ID NO: 126803 - DNA, 7 bp, Unknown
  misc_feature (1)..( 7): Result.003 file - promoters60/2686138
ctacaat

SEQ ID NO: 126804 - DNA, 7 bp, Unknown
  misc_feature (1)..( 7): Result.003 file - promoters60/2686138
ttagtaa

SEQ ID NO: 126805 - DNA, 7 bp, Unknown
  misc_feature (1)..( 7): Result.003 file - promoters60/2686138
ttattaa

SEQ ID NO: 126806 - DNA, 7 bp, Unknown
  misc_feature (1)..( 7): Result.003 file - promoters60/2686138
tcttttc

SEQ ID NO: 126807 - DNA, 7 bp, Unknown
  misc_feature (1)..( 7): Result.003 file - promoters60/2686138
tctgttc

SEQ ID NO: 126808 - DNA, 6 bp, Unknown
  misc_feature (1)..( 6): Result.003 file - promoters60/2724638
tgaaaa

SEQ ID NO: 126809 - DNA, 6 bp, Unknown
  misc_feature (1)..( 6): Result.003 file - promoters60/2724638
tgaaaa

SEQ ID NO: 126810 - DNA, 6 bp, Unknown
  misc_feature (1)..( 6): Result.003 file - promoters60/2724638
ataata

SEQ ID NO: 126811 - DNA, 6 bp, Unknown
  misc_feature (1)..( 6): Result.003 file - promoters60/2724638
ataata

SEQ ID NO: 126812 - DNA, 6 bp, Unknown
  misc_feature (1)..( 6): Result.003 file - promoters60/2724638
acagaa

SEQ ID NO: 126813 - DNA, 6 bp, Unknown
  misc_feature (1)..( 6): Result.003 file - promoters60/2724638
acagaa

SEQ ID NO: 126814 - DNA, 12 bp, Unknown
  misc_feature (1)..( 12): Result.003 file - promoters60/2724638
aaaaattgttgt

SEQ ID NO: 126815 - DNA, 12 bp, Unknown
  misc_feature (1)..( 12): Result.003 file - promoters60/2724638
aaatattggggc

SEQ ID NO: 126816 - DNA, 12 bp, Unknown
  misc_feature (1)..( 12): Result.003 file - promoters60/2724638
atatatttgggc

SEQ ID NO: 126817 - DNA, 7 bp, Unknown
  misc_feature (1)..( 7): Result.003 file - promoters60/2724638
gttaaaa

SEQ ID NO: 126818 - DNA, 7 bp, Unknown
  misc_feature (1)..( 7): Result.003 file - promoters60/2724638
gttgaaa

SEQ ID NO: 126819 - DNA, 9 bp, Unknown
  misc_feature (1)..( 9): Result.003 file - promoters60/2724638
agtgagaca

SEQ ID NO: 126820 - DNA, 9 bp, Unknown
  misc_feature (1)..( 9): Result.003 file - promoters60/2724638
agtgaaaca

SEQ ID NO: 126821 - DNA, 6 bp, Unknown
  misc_feature (1)..( 6): Result.003 file - promoters60/2724638
acaaaa

SEQ ID NO: 126822 - DNA, 6 bp, Unknown
  misc_feature (1)..( 6): Result.003 file - promoters60/2724638
acaaaa

SEQ ID NO: 126823 - DNA, 9 bp, Unknown
  misc_feature (1)..( 9): Result.003 file - promoters60/2724638
atattatat

SEQ ID NO: 126824 - DNA, 9 bp, Unknown
  misc_feature (1)..( 9): Result.003 file - promoters60/2724638
atagtatat

SEQ ID NO: 126825 - DNA, 19 bp, Unknown
  misc_feature (1)..( 19): Result.003 file - promoters60/2724699
aacaaactacaaaagttta

SEQ ID NO: 126826 - DNA, 13 bp, Unknown
  misc_feature (1)..( 13): Result.003 file - promoters60/2724699
cagaaaatgtttt

SEQ ID NO: 126827 - DNA, 19 bp, Unknown
  misc_feature (1)..( 19): Result.003 file - promoters60/2724699
agtttagggaaaatggatc

SEQ ID NO: 126828 - DNA, 19 bp, Unknown
  misc_feature (1)..( 19): Result.003 file - promoters60/2724699
ccaacacattcaatatttt

SEQ ID NO: 126829 - DNA, 15 bp, Unknown
  misc_feature (1)..( 15): Result.003 file - promoters60/2724699
atcactgatccaaca

SEQ ID NO: 126830 - DNA, 15 bp, Unknown
  misc_feature (1)..( 15): Result.003 file - promoters60/2724699
atcactgatccaaca

SEQ ID NO: 126831 - DNA, 15 bp, Unknown
  misc_feature (1)..( 15): Result.003 file - promoters60/2724699
atcactgatccaaca

SEQ ID NO: 126832 - DNA, 7 bp, Unknown
  misc_feature (1)..( 7): Result.003 file - promoters60/2724699
aattatc

SEQ ID NO: 126833 - DNA, 7 bp, Unknown
  misc_feature (1)..( 7): Result.003 file - promoters60/2724699
cattatc

SEQ ID NO: 126834 - DNA, 7 bp, Unknown
  misc_feature (1)..( 7): Result.003 file - promoters60/2724699
cattata

SEQ ID NO: 126835 - DNA, 7 bp, Unknown
  misc_feature (1)..( 7): Result.003 file - promoters60/2724699
aattatc

SEQ ID NO: 126836 - DNA, 10 bp, Unknown
  misc_feature (1)..( 10): Result.003 file - promoters60/2724703
tgtgttttct

SEQ ID NO: 126837 - DNA, 10 bp, Unknown
  misc_feature (1)..( 10): Result.003 file - promoters60/2724703
tgtgttttta

SEQ ID NO: 126838 - DNA, 10 bp, Unknown
  misc_feature (1)..( 10): Result.003 file - promoters60/2724703
attgttttta

SEQ ID NO: 126839 - DNA, 7 bp, Unknown
  misc_feature (1)..( 7): Result.003 file - promoters60/2724703
ctttggt

SEQ ID NO: 126840 - DNA, 7 bp, Unknown
  misc_feature (1)..( 7): Result.003 file - promoters60/2724703
ttttggt

SEQ ID NO: 126841 - DNA, 7 bp, Unknown
  misc_feature (1)..( 7): Result.003 file - promoters60/2724703
ttttgga

SEQ ID NO: 126842 - DNA, 8 bp, Unknown
  misc_feature (1)..( 8): Result.003 file - promoters60/2724703
ttatccca

SEQ ID NO: 126843 - DNA, 8 bp, Unknown
  misc_feature (1)..( 8): Result.003 file - promoters60/2724703
ttaaccca

SEQ ID NO: 126844 - DNA, 8 bp, Unknown
  misc_feature (1)..( 8): Result.003 file - promoters60/2724703
ataaccct

SEQ ID NO: 126845 - DNA, 7 bp, Unknown
  misc_feature (1)..( 7): Result.003 file - promoters60/2724703
agagatt

SEQ ID NO: 126846 - DNA, 7 bp, Unknown
  misc_feature (1)..( 7): Result.003 file - promoters60/2724703
agagata

SEQ ID NO: 126847 - DNA, 7 bp, Unknown
  misc_feature (1)..( 7): Result.003 file - promoters60/2724703
agatata

SEQ ID NO: 126848 - DNA, 9 bp, Unknown
  misc_feature (1)..( 9): Result.003 file - promoters60/2724703
tgatcacct

SEQ ID NO: 126849 - DNA, 9 bp, Unknown
  misc_feature (1)..( 9): Result.003 file - promoters60/2724703
tgataaccc

SEQ ID NO: 126850 - DNA, 9 bp, Unknown
  misc_feature (1)..( 9): Result.003 file - promoters60/2724703
gtttaaccc

SEQ ID NO: 126851 - DNA, 8 bp, Unknown
  misc_feature (1)..( 8): Result.003 file - promoters60/2724703
tctcagag

SEQ ID NO: 126852 - DNA, 8 bp, Unknown
  misc_feature (1)..( 8): Result.003 file - promoters60/2724703
tctaagat

SEQ ID NO: 126853 - DNA, 8 bp, Unknown
  misc_feature (1)..( 8): Result.003 file - promoters60/2724703
tatcagag

SEQ ID NO: 126854 - DNA, 12 bp, Unknown
  misc_feature (1)..( 12): Result.003 file - promoters60/2724703
tgtatcaaaacg

SEQ ID NO: 126855 - DNA, 12 bp, Unknown
  misc_feature (1)..( 12): Result.003 file - promoters60/2724703
aaaaacaaaaca

SEQ ID NO: 126856 - DNA, 12 bp, Unknown
  misc_feature (1)..( 12): Result.003 file - promoters60/2724703
aaacacaataca

SEQ ID NO: 126857 - DNA, 9 bp, Unknown
  misc_feature (1)..( 9): Result.003 file - promoters60/2724703
tatttaaaa

SEQ ID NO: 126858 - DNA, 9 bp, Unknown
  misc_feature (1)..( 9): Result.003 file - promoters60/2724703
tatttatcc

SEQ ID NO: 126859 - DNA, 9 bp, Unknown
  misc_feature (1)..( 9): Result.003 file - promoters60/2724703
aattaaaaa

SEQ ID NO: 126860 - DNA, 8 bp, Unknown
  misc_feature (1)..( 8): Result.003 file - promoters60/2724703
aaagactg

SEQ ID NO: 126861 - DNA, 8 bp, Unknown
  misc_feature (1)..( 8): Result.003 file - promoters60/2724703
aaaaacta

SEQ ID NO: 126862 - DNA, 8 bp, Unknown
  misc_feature (1)..( 8): Result.003 file - promoters60/2724703
aaaataag

SEQ ID NO: 126863 - DNA, 10 bp, Unknown
  misc_feature (1)..( 10): Result.003 file - promoters60/2724724
tatgacttga

SEQ ID NO: 126864 - DNA, 10 bp, Unknown
  misc_feature (1)..( 10): Result.003 file - promoters60/2724724
tatcacttgt

SEQ ID NO: 126865 - DNA, 10 bp, Unknown
  misc_feature (1)..( 10): Result.003 file - promoters60/2724724
gataacttga

SEQ ID NO: 126866 - DNA, 7 bp, Unknown
  misc_feature (1)..( 7): Result.003 file - promoters60/2724724
ttataca

SEQ ID NO: 126867 - DNA, 7 bp, Unknown
  misc_feature (1)..( 7): Result.003 file - promoters60/2724724
ttaaaca

SEQ ID NO: 126868 - DNA, 6 bp, Unknown
  misc_feature (1)..( 6): Result.003 file - promoters60/2724724
ctttat

SEQ ID NO: 126869 - DNA, 6 bp, Unknown
  misc_feature (1)..( 6): Result.003 file - promoters60/2724724
ctttat

SEQ ID NO: 126870 - DNA, 12 bp, Unknown
  misc_feature (1)..( 12): Result.003 file - promoters60/2724724
tcataaagaaat

SEQ ID NO: 126871 - DNA, 12 bp, Unknown
  misc_feature (1)..( 12): Result.003 file - promoters60/2724724
tcaaaaagcaat

SEQ ID NO: 126872 - DNA, 8 bp, Unknown
  misc_feature (1)..( 8): Result.003 file - promoters60/2724724
aaataaaa

SEQ ID NO: 126873 - DNA, 8 bp, Unknown
  misc_feature (1)..( 8): Result.003 file - promoters60/2724724
caataaaa

SEQ ID NO: 126874 - DNA, 8 bp, Unknown
  misc_feature (1)..( 8): Result.003 file - promoters60/2724724
aaacaaaa

SEQ ID NO: 126875 - DNA, 10 bp, Unknown
  misc_feature (1)..( 10): Result.003 file - promoters60/2724724
agcaaaaata

SEQ ID NO: 126876 - DNA, 10 bp, Unknown
  misc_feature (1)..( 10): Result.003 file - promoters60/2724724
aaagaaaata

SEQ ID NO: 126877 - DNA, 10 bp, Unknown
  misc_feature (1)..( 10): Result.003 file - promoters60/2724724
aaatgaaata

SEQ ID NO: 126878 - DNA, 9 bp, Unknown
  misc_feature (1)..( 9): Result.003 file - promoters60/2724724
aatattttc

SEQ ID NO: 126879 - DNA, 9 bp, Unknown
  misc_feature (1)..( 9): Result.003 file - promoters60/2724724
aatattttc

SEQ ID NO: 126880 - DNA, 8 bp, Unknown
  misc_feature (1)..( 8): Result.003 file - promoters60/2724724
tcataaaa

SEQ ID NO: 126881 - DNA, 8 bp, Unknown
  misc_feature (1)..( 8): Result.003 file - promoters60/2724724
tcacaaaa

SEQ ID NO: 126882 - DNA, 7 bp, Unknown
  misc_feature (1)..( 7): Result.003 file - promoters60/2724724
aaacgaa

SEQ ID NO: 126883 - DNA, 7 bp, Unknown
  misc_feature (1)..( 7): Result.003 file - promoters60/2724724
aaatgaa

SEQ ID NO: 126884 - DNA, 6 bp, Unknown
  misc_feature (1)..( 6): Result.003 file - promoters60/2724724
ctggtt

SEQ ID NO: 126885 - DNA, 6 bp, Unknown
  misc_feature (1)..( 6): Result.003 file - promoters60/2724724
ctggtt

SEQ ID NO: 126886 - DNA, 7 bp, Unknown
  misc_feature (1)..( 7): Result.003 file - promoters60/2724724
tatttga

SEQ ID NO: 126887 - DNA, 7 bp, Unknown
  misc_feature (1)..( 7): Result.003 file - promoters60/2724724
tatctga

SEQ ID NO: 126888 - DNA, 7 bp, Unknown
  misc_feature (1)..( 7): Result.003 file - promoters60/2724724
caaagag

SEQ ID NO: 126889 - DNA, 7 bp, Unknown
  misc_feature (1)..( 7): Result.003 file - promoters60/2724724
caaagag

SEQ ID NO: 126890 - DNA, 8 bp, Unknown
  misc_feature (1)..( 8): Result.003 file - promoters60/2724724
tttgaatt

SEQ ID NO: 126891 - DNA, 8 bp, Unknown
  misc_feature (1)..( 8): Result.003 file - promoters60/2724724
ttttaatt

SEQ ID NO: 126892 - DNA, 8 bp, Unknown
  misc_feature (1)..( 8): Result.003 file - promoters60/2724724
ttttattt

SEQ ID NO: 126893 - DNA, 8 bp, Unknown
  misc_feature (1)..( 8): Result.003 file - promoters60/2724724
ttttgttt

SEQ ID NO: 126894 - DNA, 6 bp, Unknown
  misc_feature (1)..( 6): Result.003 file - promoters60/2724724
actaaa

SEQ ID NO: 126895 - DNA, 6 bp, Unknown
  misc_feature (1)..( 6): Result.003 file - promoters60/2724724
actaaa

SEQ ID NO: 126896 - DNA, 8 bp, Unknown
  misc_feature (1)..( 8): Result.003 file - promoters60/2724724
accattaa

SEQ ID NO: 126897 - DNA, 8 bp, Unknown
  misc_feature (1)..( 8): Result.003 file - promoters60/2724724
cccactaa

SEQ ID NO: 126898 - DNA, 8 bp, Unknown
  misc_feature (1)..( 8): Result.003 file - promoters60/2724724
cccactag

SEQ ID NO: 126899 - DNA, 9 bp, Unknown
  misc_feature (1)..( 9): Result.003 file - promoters60/2724724
taacccaag

SEQ ID NO: 126900 - DNA, 9 bp, Unknown
  misc_feature (1)..( 9): Result.003 file - promoters60/2724724
taaaccaag

SEQ ID NO: 126901 - DNA, 6 bp, Unknown
  misc_feature (1)..( 6): Result.003 file - promoters60/2724724
actaaa

SEQ ID NO: 126902 - DNA, 6 bp, Unknown
  misc_feature (1)..( 6): Result.003 file - promoters60/2724724
actaaa

SEQ ID NO: 126903 - DNA, 6 bp, Unknown
  misc_feature (1)..( 6): Result.003 file - promoters60/2724724
agtaaa

SEQ ID NO: 126904 - DNA, 6 bp, Unknown
  misc_feature (1)..( 6): Result.003 file - promoters60/2724724
agtaaa

SEQ ID NO: 126905 - DNA, 7 bp, Unknown
  misc_feature (1)..( 7): Result.003 file - promoters60/2724724
aatcggg

SEQ ID NO: 126906 - DNA, 7 bp, Unknown
  misc_feature (1)..( 7): Result.003 file - promoters60/2724724
aattggg

SEQ ID NO: 126907 - DNA, 10 bp, Unknown
  misc_feature (1)..( 10): Result.003 file - promoters60/2724724
ggaaaagaaa

SEQ ID NO: 126908 - DNA, 10 bp, Unknown
  misc_feature (1)..( 10): Result.003 file - promoters60/2724724
ggaaatgaaa

SEQ ID NO: 126909 - DNA, 9 bp, Unknown
  misc_feature (1)..( 9): Result.003 file - promoters60/2724724
aaagaaaag

SEQ ID NO: 126910 - DNA, 9 bp, Unknown
  misc_feature (1)..( 9): Result.003 file - promoters60/2724724
aaagtaaag

SEQ ID NO: 126911 - DNA, 7 bp, Unknown
  misc_feature (1)..( 7): Result.003 file - promoters60/2724724
gtatata

SEQ ID NO: 126912 - DNA, 7 bp, Unknown
  misc_feature (1)..( 7): Result.003 file - promoters60/2724724
gtatata

SEQ ID NO: 126913 - DNA, 6 bp, Unknown
  misc_feature (1)..( 6): Result.003 file - promoters60/2724736
aagatt

SEQ ID NO: 126914 - DNA, 6 bp, Unknown
  misc_feature (1)..( 6): Result.003 file - promoters60/2724736
aagatt

SEQ ID NO: 126915 - DNA, 7 bp, Unknown
  misc_feature (1)..( 7): Result.003 file - promoters60/2724736
aaagatg

SEQ ID NO: 126916 - DNA, 7 bp, Unknown
  misc_feature (1)..( 7): Result.003 file - promoters60/2724736
aaaaatg

SEQ ID NO: 126917 - DNA, 7 bp, Unknown
  misc_feature (1)..( 7): Result.003 file - promoters60/2724736
caaattg

SEQ ID NO: 126918 - DNA, 7 bp, Unknown
  misc_feature (1)..( 7): Result.003 file - promoters60/2724736
caatttg

SEQ ID NO: 126919 - DNA, 8 bp, Unknown
  misc_feature (1)..( 8): Result.003 file - promoters60/2724736
tgattagg

SEQ ID NO: 126920 - DNA, 8 bp, Unknown
  misc_feature (1)..( 8): Result.003 file - promoters60/2724736
tgactagg

SEQ ID NO: 126921 - DNA, 6 bp, Unknown
  misc_feature (1)..( 6): Result.003 file - promoters60/2724736
aatcct

SEQ ID NO: 126922 - DNA, 6 bp, Unknown
  misc_feature (1)..( 6): Result.003 file - promoters60/2724736
aatcct

SEQ ID NO: 126923 - DNA, 7 bp, Unknown
  misc_feature (1)..( 7): Result.003 file - promoters60/2724736
cacgtgt

SEQ ID NO: 126924 - DNA, 7 bp, Unknown
  misc_feature (1)..( 7): Result.003 file - promoters60/2724736
cacgtgt

SEQ ID NO: 126925 - DNA, 7 bp, Unknown
  misc_feature (1)..( 7): Result.003 file - promoters60/2724736
aaaaaga

SEQ ID NO: 126926 - DNA, 7 bp, Unknown
  misc_feature (1)..( 7): Result.003 file - promoters60/2724736
aaataga

SEQ ID NO: 126927 - DNA, 6 bp, Unknown
  misc_feature (1)..( 6): Result.003 file - promoters60/2724736
agattc

SEQ ID NO: 126928 - DNA, 6 bp, Unknown
  misc_feature (1)..( 6): Result.003 file - promoters60/2724736
agattc

SEQ ID NO: 126929 - DNA, 7 bp, Unknown
  misc_feature (1)..( 7): Result.003 file - promoters60/2724736
aatccaa

SEQ ID NO: 126930 - DNA, 7 bp, Unknown
  misc_feature (1)..( 7): Result.003 file - promoters60/2724736
aatacaa

SEQ ID NO: 126931 - DNA, 7 bp, Unknown
  misc_feature (1)..( 7): Result.003 file - promoters60/2724736
ccatatg

SEQ ID NO: 126932 - DNA, 7 bp, Unknown
  misc_feature (1)..( 7): Result.003 file - promoters60/2724736
ccagatg

SEQ ID NO: 126933 - DNA, 7 bp, Unknown
  misc_feature (1)..( 7): Result.003 file - promoters60/2724736
gatcata

SEQ ID NO: 126934 - DNA, 7 bp, Unknown
  misc_feature (1)..( 7): Result.003 file - promoters60/2724736
gataata

SEQ ID NO: 126935 - DNA, 7 bp, Unknown
  misc_feature (1)..( 7): Result.003 file - promoters60/2724736
aaacttt

SEQ ID NO: 126936 - DNA, 7 bp, Unknown
  misc_feature (1)..( 7): Result.003 file - promoters60/2724736
aaaattt

SEQ ID NO: 126937 - DNA, 12 bp, Unknown
  misc_feature (1)..( 12): Result.003 file - promoters60/2724736
tttaacaataag

SEQ ID NO: 126938 - DNA, 12 bp, Unknown
  misc_feature (1)..( 12): Result.003 file - promoters60/2724736
tttagcaaaaag

SEQ ID NO: 126939 - DNA, 10 bp, Unknown
  misc_feature (1)..( 10): Result.003 file - promoters60/2724736
agatattatc

SEQ ID NO: 126940 - DNA, 10 bp, Unknown
  misc_feature (1)..( 10): Result.003 file - promoters60/2724736
agatatcatc

SEQ ID NO: 126941 - DNA, 7 bp, Unknown
  misc_feature (1)..( 7): Result.003 file - promoters60/2724736
caattaa

SEQ ID NO: 126942 - DNA, 7 bp, Unknown
  misc_feature (1)..( 7): Result.003 file - promoters60/2724736
caattaa

SEQ ID NO: 126943 - DNA, 7 bp, Unknown
  misc_feature (1)..( 7): Result.003 file - promoters60/2724736
cagccac

SEQ ID NO: 126944 - DNA, 7 bp, Unknown
  misc_feature (1)..( 7): Result.003 file - promoters60/2724736
cagccac

SEQ ID NO: 126945 - DNA, 11 bp, Unknown
  misc_feature (1)..( 11): Result.003 file - promoters60/2781251
tattcgtaaaa

SEQ ID NO: 126946 - DNA, 11 bp, Unknown
  misc_feature (1)..( 11): Result.003 file - promoters60/2781251
atatcgtaatc

SEQ ID NO: 126947 - DNA, 11 bp, Unknown
  misc_feature (1)..( 11): Result.003 file - promoters60/2781251
aaatcgaaatc

SEQ ID NO: 126948 - DNA, 11 bp, Unknown
  misc_feature (1)..( 11): Result.003 file - promoters60/2781251
gaatcgatagc

SEQ ID NO: 126949 - DNA, 11 bp, Unknown
  misc_feature (1)..( 11): Result.003 file - promoters60/2781251
aaatagatatc

SEQ ID NO: 126950 - DNA, 11 bp, Unknown
  misc_feature (1)..( 11): Result.003 file - promoters60/2781251
aaagagattaa

SEQ ID NO: 126951 - DNA, 10 bp, Unknown
  misc_feature (1)..( 10): Result.003 file - promoters60/2781251
cttctttagg

SEQ ID NO: 126952 - DNA, 10 bp, Unknown
  misc_feature (1)..( 10): Result.003 file - promoters60/2781251
cttcttctgc

SEQ ID NO: 126953 - DNA, 10 bp, Unknown
  misc_feature (1)..( 10): Result.003 file - promoters60/2781251
gttctctaga

SEQ ID NO: 126954 - DNA, 10 bp, Unknown
  misc_feature (1)..( 10): Result.003 file - promoters60/2781251
cttctttaac

SEQ ID NO: 126955 - DNA, 10 bp, Unknown
  misc_feature (1)..( 10): Result.003 file - promoters60/2781251
attcttcatc

SEQ ID NO: 126956 - DNA, 10 bp, Unknown
  misc_feature (1)..( 10): Result.003 file - promoters60/2781251
gttcttaaac

SEQ ID NO: 126957 - DNA, 9 bp, Unknown
  misc_feature (1)..( 9): Result.003 file - promoters60/2781786
taatgggat

SEQ ID NO: 126958 - DNA, 9 bp, Unknown
  misc_feature (1)..( 9): Result.003 file - promoters60/2781786
caattggat

SEQ ID NO: 126959 - DNA, 9 bp, Unknown
  misc_feature (1)..( 9): Result.003 file - promoters60/2781786
caattgaaa

SEQ ID NO: 126960 - DNA, 6 bp, Unknown
  misc_feature (1)..( 6): Result.003 file - promoters60/2781786
taagta

SEQ ID NO: 126961 - DNA, 6 bp, Unknown
  misc_feature (1)..( 6): Result.003 file - promoters60/2781786
taagta

SEQ ID NO: 126962 - DNA, 6 bp, Unknown
  misc_feature (1)..( 6): Result.003 file - promoters60/2781786
ctttgc

SEQ ID NO: 126963 - DNA, 6 bp, Unknown
  misc_feature (1)..( 6): Result.003 file - promoters60/2781786
ctttgc

SEQ ID NO: 126964 - DNA, 6 bp, Unknown
  misc_feature (1)..( 6): Result.003 file - promoters60/2781786
ggtgag

SEQ ID NO: 126965 - DNA, 6 bp, Unknown
  misc_feature (1)..( 6): Result.003 file - promoters60/2781786
ggtgag

SEQ ID NO: 126966 - DNA, 11 bp, Unknown
  misc_feature (1)..( 11): Result.003 file - promoters60/2781786
ctgaaaattta

SEQ ID NO: 126967 - DNA, 11 bp, Unknown
  misc_feature (1)..( 11): Result.003 file - promoters60/2781786
ctgaaacttta

SEQ ID NO: 126968 - DNA, 12 bp, Unknown
  misc_feature (1)..( 12): Result.003 file - promoters60/2785798
cctttcaatgag

SEQ ID NO: 126969 - DNA, 12 bp, Unknown
  misc_feature (1)..( 12): Result.003 file - promoters60/2785798
ttttttaatacg

SEQ ID NO: 126970 - DNA, 12 bp, Unknown
  misc_feature (1)..( 12): Result.003 file - promoters60/2785798
aagatcaaggag

SEQ ID NO: 126971 - DNA, 12 bp, Unknown
  misc_feature (1)..( 12): Result.003 file - promoters60/2785798
tttgttaaacta

SEQ ID NO: 126972 - DNA, 10 bp, Unknown
  misc_feature (1)..( 10): Result.003 file - promoters60/2785798
aatgaaaatt

SEQ ID NO: 126973 - DNA, 10 bp, Unknown
  misc_feature (1)..( 10): Result.003 file - promoters60/2785798
tatgcaaatc

SEQ ID NO: 126974 - DNA, 10 bp, Unknown
  misc_feature (1)..( 10): Result.003 file - promoters60/2785798
gttgacaatt

SEQ ID NO: 126975 - DNA, 10 bp, Unknown
  misc_feature (1)..( 10): Result.003 file - promoters60/2785798
tatccaaatt

SEQ ID NO: 126976 - DNA, 10 bp, Unknown
  misc_feature (1)..( 10): Result.003 file - promoters60/2785798
gttgacataa

SEQ ID NO: 126977 - DNA, 9 bp, Unknown
  misc_feature (1)..( 9): Result.003 file - promoters60/2785798
gttattttt

SEQ ID NO: 126978 - DNA, 9 bp, Unknown
  misc_feature (1)..( 9): Result.003 file - promoters60/2785798
aatatttta

SEQ ID NO: 126979 - DNA, 9 bp, Unknown
  misc_feature (1)..( 9): Result.003 file - promoters60/2785798
tttattttt

SEQ ID NO: 126980 - DNA, 9 bp, Unknown
  misc_feature (1)..( 9): Result.003 file - promoters60/2785798
cttaattta

SEQ ID NO: 126981 - DNA, 10 bp, Unknown
  misc_feature (1)..( 10): Result.003 file - promoters60/2785798
aagtaaaggg

SEQ ID NO: 126982 - DNA, 10 bp, Unknown
  misc_feature (1)..( 10): Result.003 file - promoters60/2785798
aagttaagtc

SEQ ID NO: 126983 - DNA, 10 bp, Unknown
  misc_feature (1)..( 10): Result.003 file - promoters60/2785798
tctttaagtc

SEQ ID NO: 126984 - DNA, 10 bp, Unknown
  misc_feature (1)..( 10): Result.003 file - promoters60/2785798
aagttaaaac

SEQ ID NO: 126985 - DNA, 7 bp, Unknown
  misc_feature (1)..( 7): Result.003 file - promoters60/2918658
aaaatat

SEQ ID NO: 126986 - DNA, 7 bp, Unknown
  misc_feature (1)..( 7): Result.003 file - promoters60/2918658
aaaataa

SEQ ID NO: 126987 - DNA, 8 bp, Unknown
  misc_feature (1)..( 8): Result.003 file - promoters60/2918658
aaacatat

SEQ ID NO: 126988 - DNA, 8 bp, Unknown
  misc_feature (1)..( 8): Result.003 file - promoters60/2918658
aaaaatct

SEQ ID NO: 126989 - DNA, 8 bp, Unknown
  misc_feature (1)..( 8): Result.003 file - promoters60/2918658
caaattaa

SEQ ID NO: 126990 - DNA, 8 bp, Unknown
  misc_feature (1)..( 8): Result.003 file - promoters60/2918658
taaaatat

SEQ ID NO: 126991 - DNA, 11 bp, Unknown
  misc_feature (1)..( 11): Result.003 file - promoters60/2918658
aaaacaaacgt

SEQ ID NO: 126992 - DNA, 11 bp, Unknown
  misc_feature (1)..( 11): Result.003 file - promoters60/2918658
aaaaaaaagac

SEQ ID NO: 126993 - DNA, 11 bp, Unknown
  misc_feature (1)..( 11): Result.003 file - promoters60/2918658
aaaaaaagaag

SEQ ID NO: 126994 - DNA, 11 bp, Unknown
  misc_feature (1)..( 11): Result.003 file - promoters60/2918658
taaataaattt

SEQ ID NO: 126995 - DNA, 11 bp, Unknown
  misc_feature (1)..( 11): Result.003 file - promoters60/2918658
attacaaatat

SEQ ID NO: 126996 - DNA, 11 bp, Unknown
  misc_feature (1)..( 11): Result.003 file - promoters60/2918658
gaaatgaattt

SEQ ID NO: 126997 - DNA, 10 bp, Unknown
  misc_feature (1)..( 10): Result.003 file - promoters60/2918658
ctacatattc

SEQ ID NO: 126998 - DNA, 10 bp, Unknown
  misc_feature (1)..( 10): Result.003 file - promoters60/2918658
aaacatattg

SEQ ID NO: 126999 - DNA, 10 bp, Unknown
  misc_feature (1)..( 10): Result.003 file - promoters60/2918658
aatcatattt

SEQ ID NO: 127000 - DNA, 10 bp, Unknown
  misc_feature (1)..( 10): Result.003 file - promoters60/2918658
taaaatattc

SEQ ID NO: 127001 - DNA, 10 bp, Unknown
  misc_feature (1)..( 10): Result.003 file - promoters60/2918658
aaaaataaga

SEQ ID NO: 127002 - DNA, 10 bp, Unknown
  misc_feature (1)..( 10): Result.003 file - promoters60/2918658
aaaaatctaa

SEQ ID NO: 127003 - DNA, 12 bp, Unknown
  misc_feature (1)..( 12): Result.003 file - promoters60/2918658
tttaacaaaaaa

SEQ ID NO: 127004 - DNA, 12 bp, Unknown
  misc_feature (1)..( 12): Result.003 file - promoters60/2918658
aaaaacaaactg

SEQ ID NO: 127005 - DNA, 12 bp, Unknown
  misc_feature (1)..( 12): Result.003 file - promoters60/2918658
cgtaataaaaaa

SEQ ID NO: 127006 - DNA, 12 bp, Unknown
  misc_feature (1)..( 12): Result.003 file - promoters60/2918658
aaagacaaaaaa

SEQ ID NO: 127007 - DNA, 12 bp, Unknown
  misc_feature (1)..( 12): Result.003 file - promoters60/2918658
ggaaacacttat

SEQ ID NO: 127008 - DNA, 13 bp, Unknown
  misc_feature (1)..( 13): Result.003 file - promoters60/2918658
cataattaaactc

SEQ ID NO: 127009 - DNA, 13 bp, Unknown
  misc_feature (1)..( 13): Result.003 file - promoters60/2918658
ttcaattaacttc

SEQ ID NO: 127010 - DNA, 9 bp, Unknown
  misc_feature (1)..( 9): Result.003 file - promoters60/2918658
aaatgtcaa

SEQ ID NO: 127011 - DNA, 9 bp, Unknown
  misc_feature (1)..( 9): Result.003 file - promoters60/2918658
taatctcac

SEQ ID NO: 127012 - DNA, 9 bp, Unknown
  misc_feature (1)..( 9): Result.003 file - promoters60/2918658
aaatgtagt

SEQ ID NO: 127013 - DNA, 9 bp, Unknown
  misc_feature (1)..( 9): Result.003 file - promoters60/2918658
aaatatcaa

SEQ ID NO: 127014 - DNA, 10 bp, Unknown
  misc_feature (1)..( 10): Result.003 file - promoters60/2918658
aaattgttta

SEQ ID NO: 127015 - DNA, 10 bp, Unknown
  misc_feature (1)..( 10): Result.003 file - promoters60/2918658
tttttattct

SEQ ID NO: 127016 - DNA, 8 bp, Unknown
  misc_feature (1)..( 8): Result.003 file - promoters60/2918658
atttattt

SEQ ID NO: 127017 - DNA, 8 bp, Unknown
  misc_feature (1)..( 8): Result.003 file - promoters60/2918658
attcattt

SEQ ID NO: 127018 - DNA, 8 bp, Unknown
  misc_feature (1)..( 8): Result.003 file - promoters60/2918658
gtttattt

SEQ ID NO: 127019 - DNA, 8 bp, Unknown
  misc_feature (1)..( 8): Result.003 file - promoters60/2918658
ttttattc

SEQ ID NO: 127020 - DNA, 8 bp, Unknown
  misc_feature (1)..( 8): Result.003 file - promoters60/2918658
attcatcc

SEQ ID NO: 127021 - DNA, 8 bp, Unknown
  misc_feature (1)..( 8): Result.003 file - promoters60/2918658
attaatct

SEQ ID NO: 127022 - DNA, 8 bp, Unknown
  misc_feature (1)..( 8): Result.003 file - promoters60/2918674
tcatttca

SEQ ID NO: 127023 - DNA, 8 bp, Unknown
  misc_feature (1)..( 8): Result.003 file - promoters60/2918674
tcattttc

SEQ ID NO: 127024 - DNA, 8 bp, Unknown
  misc_feature (1)..( 8): Result.003 file - promoters60/2918674
tcacttca

SEQ ID NO: 127025 - DNA, 8 bp, Unknown
  misc_feature (1)..( 8): Result.003 file - promoters60/2918674
tcaattcc

SEQ ID NO: 127026 - DNA, 8 bp, Unknown
  misc_feature (1)..( 8): Result.003 file - promoters60/2918674
gtaaaaat

SEQ ID NO: 127027 - DNA, 8 bp, Unknown
  misc_feature (1)..( 8): Result.003 file - promoters60/2918674
gtaaaagg

SEQ ID NO: 127028 - DNA, 8 bp, Unknown
  misc_feature (1)..( 8): Result.003 file - promoters60/2918674
ataaaaat

SEQ ID NO: 127029 - DNA, 12 bp, Unknown
  misc_feature (1)..( 12): Result.003 file - promoters60/2918680
tttatgggccgt

SEQ ID NO: 127030 - DNA, 12 bp, Unknown
  misc_feature (1)..( 12): Result.003 file - promoters60/2918680
caaatgggccta

SEQ ID NO: 127031 - DNA, 12 bp, Unknown
  misc_feature (1)..( 12): Result.003 file - promoters60/2918680
acaatgggctgg

SEQ ID NO: 127032 - DNA, 12 bp, Unknown
  misc_feature (1)..( 12): Result.003 file - promoters60/2918680
gaaataggccca

SEQ ID NO: 127033 - DNA, 12 bp, Unknown
  misc_feature (1)..( 12): Result.003 file - promoters60/2918680
taaaaaggccca

SEQ ID NO: 127034 - DNA, 12 bp, Unknown
  misc_feature (1)..( 12): Result.003 file - promoters60/2918680
taaaaaatatct

SEQ ID NO: 127035 - DNA, 15 bp, Unknown
  misc_feature (1)..( 15): Result.003 file - promoters60/2989991
aaatcatctcaatgc

SEQ ID NO: 127036 - DNA, 15 bp, Unknown
  misc_feature (1)..( 15): Result.003 file - promoters60/2989991
aaatcatctcaatgc

SEQ ID NO: 127037 - DNA, 7 bp, Unknown
  misc_feature (1)..( 7): Result.003 file - promoters60/2989991
catcata

SEQ ID NO: 127038 - DNA, 7 bp, Unknown
  misc_feature (1)..( 7): Result.003 file - promoters60/2989991
cataata

SEQ ID NO: 127039 - DNA, 8 bp, Unknown
  misc_feature (1)..( 8): Result.003 file - promoters60/2989991
caagaaca

SEQ ID NO: 127040 - DNA, 8 bp, Unknown
  misc_feature (1)..( 8): Result.003 file - promoters60/2989991
caataaca

SEQ ID NO: 127041 - DNA, 6 bp, Unknown
  misc_feature (1)..( 6): Result.003 file - promoters60/2989991
aattaa

SEQ ID NO: 127042 - DNA, 6 bp, Unknown
  misc_feature (1)..( 6): Result.003 file - promoters60/2989991
aattaa

SEQ ID NO: 127043 - DNA, 9 bp, Unknown
  misc_feature (1)..( 9): Result.003 file - promoters60/2989991
gatgaagaa

SEQ ID NO: 127044 - DNA, 9 bp, Unknown
  misc_feature (1)..( 9): Result.003 file - promoters60/2989991
attgatgaa

SEQ ID NO: 127045 - DNA, 9 bp, Unknown
  misc_feature (1)..( 9): Result.003 file - promoters60/2989991
gatgcagat

SEQ ID NO: 127046 - DNA, 6 bp, Unknown
  misc_feature (1)..( 6): Result.003 file - promoters60/2989991
ctctct

SEQ ID NO: 127047 - DNA, 6 bp, Unknown
  misc_feature (1)..( 6): Result.003 file - promoters60/2989991
ctctct

SEQ ID NO: 127048 - DNA, 7 bp, Unknown
  misc_feature (1)..( 7): Result.003 file - promoters60/2989991
tcgaatt

SEQ ID NO: 127049 - DNA, 7 bp, Unknown
  misc_feature (1)..( 7): Result.003 file - promoters60/2989991
tcgtatt

SEQ ID NO: 127050 - DNA, 9 bp, Unknown
  misc_feature (1)..( 9): Result.003 file - promoters60/2989991
aagctcgat

SEQ ID NO: 127051 - DNA, 9 bp, Unknown
  misc_feature (1)..( 9): Result.003 file - promoters60/2989991
aaggtcgat

SEQ ID NO: 127052 - DNA, 9 bp, Unknown
  misc_feature (1)..( 9): Result.003 file - promoters60/2989991
aagctcgat

SEQ ID NO: 127053 - DNA, 6 bp, Unknown
  misc_feature (1)..( 6): Result.003 file - promoters60/2989991
gaaaaa

SEQ ID NO: 127054 - DNA, 6 bp, Unknown
  misc_feature (1)..( 6): Result.003 file - promoters60/2989991
gaaaaa

SEQ ID NO: 127055 - DNA, 7 bp, Unknown
  misc_feature (1)..( 7): Result.003 file - promoters60/2989991
aaaaaat

SEQ ID NO: 127056 - DNA, 7 bp, Unknown
  misc_feature (1)..( 7): Result.003 file - promoters60/2989991
aaaaaat

SEQ ID NO: 127057 - DNA, 7 bp, Unknown
  misc_feature (1)..( 7): Result.003 file - promoters60/2989991
aaaaaaa

SEQ ID NO: 127058 - DNA, 7 bp, Unknown
  misc_feature (1)..( 7): Result.003 file - promoters60/2989991
atttgtt

SEQ ID NO: 127059 - DNA, 7 bp, Unknown
  misc_feature (1)..( 7): Result.003 file - promoters60/2989991
attggtt

SEQ ID NO: 127060 - DNA, 6 bp, Unknown
  misc_feature (1)..( 6): Result.003 file - promoters60/2989991
aaactt

SEQ ID NO: 127061 - DNA, 6 bp, Unknown
  misc_feature (1)..( 6): Result.003 file - promoters60/2989991
aaactt

SEQ ID NO: 127062 - DNA, 8 bp, Unknown
  misc_feature (1)..( 8): Result.003 file - promoters60/2989991
aaaattaa

SEQ ID NO: 127063 - DNA, 8 bp, Unknown
  misc_feature (1)..( 8): Result.003 file - promoters60/2989991
aaaattaa

SEQ ID NO: 127064 - DNA, 7 bp, Unknown
  misc_feature (1)..( 7): Result.003 file - promoters60/2989991
tactata

SEQ ID NO: 127065 - DNA, 7 bp, Unknown
  misc_feature (1)..( 7): Result.003 file - promoters60/2989991
tactata

SEQ ID NO: 127066 - DNA, 10 bp, Unknown
  misc_feature (1)..( 10): Result.003 file - promoters60/2990087
aaaactattt

SEQ ID NO: 127067 - DNA, 10 bp, Unknown
  misc_feature (1)..( 10): Result.003 file - promoters60/2990087
aaaaatataa

SEQ ID NO: 127068 - DNA, 10 bp, Unknown
  misc_feature (1)..( 10): Result.003 file - promoters60/2990087
tcaaccattt

SEQ ID NO: 127069 - DNA, 7 bp, Unknown
  misc_feature (1)..( 7): Result.003 file - promoters60/2990087
ttttctt

SEQ ID NO: 127070 - DNA, 7 bp, Unknown
  misc_feature (1)..( 7): Result.003 file - promoters60/2990087
ttttctt

SEQ ID NO: 127071 - DNA, 7 bp, Unknown
  misc_feature (1)..( 7): Result.003 file - promoters60/2990087
ttttttg

SEQ ID NO: 127072 - DNA, 7 bp, Unknown
  misc_feature (1)..( 7): Result.003 file - promoters60/2990087
tgtagtt

SEQ ID NO: 127073 - DNA, 7 bp, Unknown
  misc_feature (1)..( 7): Result.003 file - promoters60/2990087
tgtggtt

SEQ ID NO: 127074 - DNA, 6 bp, Unknown
  misc_feature (1)..( 6): Result.003 file - promoters60/2990087
tctaca

SEQ ID NO: 127075 - DNA, 6 bp, Unknown
  misc_feature (1)..( 6): Result.003 file - promoters60/2990087
tctaca

SEQ ID NO: 127076 - DNA, 6 bp, Unknown
  misc_feature (1)..( 6): Result.003 file - promoters60/2990087
ctaaaa

SEQ ID NO: 127077 - DNA, 6 bp, Unknown
  misc_feature (1)..( 6): Result.003 file - promoters60/2990087
ctaaaa

SEQ ID NO: 127078 - DNA, 8 bp, Unknown
  misc_feature (1)..( 8): Result.003 file - promoters60/2990087
attcatcc

SEQ ID NO: 127079 - DNA, 8 bp, Unknown
  misc_feature (1)..( 8): Result.003 file - promoters60/2990087
attcatcc

SEQ ID NO: 127080 - DNA, 7 bp, Unknown
  misc_feature (1)..( 7): Result.003 file - promoters60/2990087
ttcctta

SEQ ID NO: 127081 - DNA, 7 bp, Unknown
  misc_feature (1)..( 7): Result.003 file - promoters60/2990087
ttcatta

SEQ ID NO: 127082 - DNA, 7 bp, Unknown
  misc_feature (1)..( 7): Result.003 file - promoters60/2990087
aacaaag

SEQ ID NO: 127083 - DNA, 7 bp, Unknown
  misc_feature (1)..( 7): Result.003 file - promoters60/2990087
aactaag

SEQ ID NO: 127084 - DNA, 8 bp, Unknown
  misc_feature (1)..( 8): Result.003 file - promoters60/2990087
cttagaaa

SEQ ID NO: 127085 - DNA, 8 bp, Unknown
  misc_feature (1)..( 8): Result.003 file - promoters60/2990087
cttagaaa

SEQ ID NO: 127086 - DNA, 7 bp, Unknown
  misc_feature (1)..( 7): Result.003 file - promoters60/2990087
tatatat

SEQ ID NO: 127087 - DNA, 7 bp, Unknown
  misc_feature (1)..( 7): Result.003 file - promoters60/2990087
tatatat

SEQ ID NO: 127088 - DNA, 7 bp, Unknown
  misc_feature (1)..( 7): Result.003 file - promoters60/2990087
tatattc

SEQ ID NO: 127089 - DNA, 8 bp, Unknown
  misc_feature (1)..( 8): Result.003 file - promoters60/2990087
aataaaat

SEQ ID NO: 127090 - DNA, 8 bp, Unknown
  misc_feature (1)..( 8): Result.003 file - promoters60/2990087
aataaaat

SEQ ID NO: 127091 - DNA, 10 bp, Unknown
  misc_feature (1)..( 10): Result.003 file - promoters60/2990087
ttaatatttt

SEQ ID NO: 127092 - DNA, 10 bp, Unknown
  misc_feature (1)..( 10): Result.003 file - promoters60/2990087
ttaatttttt

SEQ ID NO: 127093 - DNA, 7 bp, Unknown
  misc_feature (1)..( 7): Result.003 file - promoters60/2990087
ttatttt

SEQ ID NO: 127094 - DNA, 7 bp, Unknown
  misc_feature (1)..( 7): Result.003 file - promoters60/2990087
ttatttt

SEQ ID NO: 127095 - DNA, 6 bp, Unknown
  misc_feature (1)..( 6): Result.003 file - promoters60/2990087
taacat

SEQ ID NO: 127096 - DNA, 6 bp, Unknown
  misc_feature (1)..( 6): Result.003 file - promoters60/2990087
taacat

SEQ ID NO: 127097 - DNA, 7 bp, Unknown
  misc_feature (1)..( 7): Result.003 file - promoters60/2990087
aatgtga

SEQ ID NO: 127098 - DNA, 7 bp, Unknown
  misc_feature (1)..( 7): Result.003 file - promoters60/2990087
aatttga

SEQ ID NO: 127099 - DNA, 8 bp, Unknown
  misc_feature (1)..( 8): Result.003 file - promoters60/2990087
aaaacaaa

SEQ ID NO: 127100 - DNA, 8 bp, Unknown
  misc_feature (1)..( 8): Result.003 file - promoters60/2990087
aaaaaaaa

SEQ ID NO: 127101 - DNA, 8 bp, Unknown
  misc_feature (1)..( 8): Result.003 file - promoters60/2990087
atttgatt

SEQ ID NO: 127102 - DNA, 8 bp, Unknown
  misc_feature (1)..( 8): Result.003 file - promoters60/2990087
atttgatt

SEQ ID NO: 127103 - DNA, 10 bp, Unknown
  misc_feature (1)..( 10): Result.003 file - promoters60/2990087
aaaaatactt

SEQ ID NO: 127104 - DNA, 10 bp, Unknown
  misc_feature (1)..( 10): Result.003 file - promoters60/2990087
aaaaaaactt

SEQ ID NO: 127105 - DNA, 7 bp, Unknown
  misc_feature (1)..( 7): Result.003 file - promoters60/2990087
cttaaga

SEQ ID NO: 127106 - DNA, 7 bp, Unknown
  misc_feature (1)..( 7): Result.003 file - promoters60/2990087
ctttaga

SEQ ID NO: 127107 - DNA, 6 bp, Unknown
  misc_feature (1)..( 6): Result.003 file - promoters60/2990087
aaacaa

SEQ ID NO: 127108 - DNA, 6 bp, Unknown
  misc_feature (1)..( 6): Result.003 file - promoters60/2990087
aaacaa

SEQ ID NO: 127109 - DNA, 10 bp, Unknown
  misc_feature (1)..( 10): Result.003 file - promoters60/2990087
ttgagagtac

SEQ ID NO: 127110 - DNA, 10 bp, Unknown
  misc_feature (1)..( 10): Result.003 file - promoters60/2990087
ttgaaagtac

SEQ ID NO: 127111 - DNA, 7 bp, Unknown
  misc_feature (1)..( 7): Result.003 file - promoters60/2990087
atatagg

SEQ ID NO: 127112 - DNA, 7 bp, Unknown
  misc_feature (1)..( 7): Result.003 file - promoters60/2990087
ataaagg

SEQ ID NO: 127113 - DNA, 7 bp, Unknown
  misc_feature (1)..( 7): Result.003 file - promoters60/2990087
ataaact

SEQ ID NO: 127114 - DNA, 7 bp, Unknown
  misc_feature (1)..( 7): Result.003 file - promoters60/2990087
atatact

SEQ ID NO: 127115 - DNA, 7 bp, Unknown
  misc_feature (1)..( 7): Result.003 file - promoters60/2990087
ttgatta

SEQ ID NO: 127116 - DNA, 7 bp, Unknown
  misc_feature (1)..( 7): Result.003 file - promoters60/2990087
ttgttta

SEQ ID NO: 127117 - DNA, 10 bp, Unknown
  misc_feature (1)..( 10): Result.003 file - promoters60/2990249
cgacaacttt

SEQ ID NO: 127118 - DNA, 10 bp, Unknown
  misc_feature (1)..( 10): Result.003 file - promoters60/2990249
cgacatcttt

SEQ ID NO: 127119 - DNA, 6 bp, Unknown
  misc_feature (1)..( 6): Result.003 file - promoters60/2990249
ttttct

SEQ ID NO: 127120 - DNA, 6 bp, Unknown
  misc_feature (1)..( 6): Result.003 file - promoters60/2990249
ttttct

SEQ ID NO: 127121 - DNA, 6 bp, Unknown
  misc_feature (1)..( 6): Result.003 file - promoters60/2990249
tatata

SEQ ID NO: 127122 - DNA, 6 bp, Unknown
  misc_feature (1)..( 6): Result.003 file - promoters60/2990249
tatata

SEQ ID NO: 127123 - DNA, 6 bp, Unknown
  misc_feature (1)..( 6): Result.003 file - promoters60/2990249
cactta

SEQ ID NO: 127124 - DNA, 6 bp, Unknown
  misc_feature (1)..( 6): Result.003 file - promoters60/2990249
cactta

SEQ ID NO: 127125 - DNA, 7 bp, Unknown
  misc_feature (1)..( 7): Result.003 file - promoters60/2990249
agaaaca

SEQ ID NO: 127126 - DNA, 7 bp, Unknown
  misc_feature (1)..( 7): Result.003 file - promoters60/2990249
agagaca

SEQ ID NO: 127127 - DNA, 9 bp, Unknown
  misc_feature (1)..( 9): Result.003 file - promoters60/2990249
caaccatat

SEQ ID NO: 127128 - DNA, 9 bp, Unknown
  misc_feature (1)..( 9): Result.003 file - promoters60/2990249
aaacaatat

SEQ ID NO: 127129 - DNA, 9 bp, Unknown
  misc_feature (1)..( 9): Result.003 file - promoters60/2990249
aaacaaaac

SEQ ID NO: 127130 - DNA, 6 bp, Unknown
  misc_feature (1)..( 6): Result.003 file - promoters60/2990249
aacaat

SEQ ID NO: 127131 - DNA, 6 bp, Unknown
  misc_feature (1)..( 6): Result.003 file - promoters60/2990249
aacaat

SEQ ID NO: 127132 - DNA, 9 bp, Unknown
  misc_feature (1)..( 9): Result.003 file - promoters60/2990249
tgagtacac

SEQ ID NO: 127133 - DNA, 9 bp, Unknown
  misc_feature (1)..( 9): Result.003 file - promoters60/2990249
tgagtccac

SEQ ID NO: 127134 - DNA, 6 bp, Unknown
  misc_feature (1)..( 6): Result.003 file - promoters60/2990249
aagtgg

SEQ ID NO: 127135 - DNA, 6 bp, Unknown
  misc_feature (1)..( 6): Result.003 file - promoters60/2990249
aagtgg

SEQ ID NO: 127136 - DNA, 6 bp, Unknown
  misc_feature (1)..( 6): Result.003 file - promoters60/2990249
gaataa

SEQ ID NO: 127137 - DNA, 6 bp, Unknown
  misc_feature (1)..( 6): Result.003 file - promoters60/2990249
gaataa

SEQ ID NO: 127138 - DNA, 6 bp, Unknown
  misc_feature (1)..( 6): Result.003 file - promoters60/2990249
tgtata

SEQ ID NO: 127139 - DNA, 6 bp, Unknown
  misc_feature (1)..( 6): Result.003 file - promoters60/2990249
tgtata

SEQ ID NO: 127140 - DNA, 9 bp, Unknown
  misc_feature (1)..( 9): Result.003 file - promoters60/2990249
caaaagcaa

SEQ ID NO: 127141 - DNA, 9 bp, Unknown
  misc_feature (1)..( 9): Result.003 file - promoters60/2990249
caaaatcaa

SEQ ID NO: 127142 - DNA, 7 bp, Unknown
  misc_feature (1)..( 7): Result.003 file - promoters60/2990249
aaaatct

SEQ ID NO: 127143 - DNA, 7 bp, Unknown
  misc_feature (1)..( 7): Result.003 file - promoters60/2990249
aaaatct

SEQ ID NO: 127144 - DNA, 7 bp, Unknown
  misc_feature (1)..( 7): Result.003 file - promoters60/2990249
ttctgtt

SEQ ID NO: 127145 - DNA, 7 bp, Unknown
  misc_feature (1)..( 7): Result.003 file - promoters60/2990249
ttctgtt

SEQ ID NO: 127146 - DNA, 7 bp, Unknown
  misc_feature (1)..( 7): Result.003 file - promoters60/2990249
gattttc

SEQ ID NO: 127147 - DNA, 7 bp, Unknown
  misc_feature (1)..( 7): Result.003 file - promoters60/2990249
gatgttc

SEQ ID NO: 127148 - DNA, 6 bp, Unknown
  misc_feature (1)..( 6): Result.003 file - promoters60/2990249
aaaaac

SEQ ID NO: 127149 - DNA, 6 bp, Unknown
  misc_feature (1)..( 6): Result.003 file - promoters60/2990249
aaaaac

SEQ ID NO: 127150 - DNA, 8 bp, Unknown
  misc_feature (1)..( 8): Result.003 file - promoters60/2990249
acaaaacg

SEQ ID NO: 127151 - DNA, 8 bp, Unknown
  misc_feature (1)..( 8): Result.003 file - promoters60/2990249
acaaaacg

SEQ ID NO: 127152 - DNA, 9 bp, Unknown
  misc_feature (1)..( 9): Result.003 file - promoters60/2990249
tacaccaaa

SEQ ID NO: 127153 - DNA, 9 bp, Unknown
  misc_feature (1)..( 9): Result.003 file - promoters60/2990249
tacacaaaa

SEQ ID NO: 127154 - DNA, 6 bp, Unknown
  misc_feature (1)..( 6): Result.003 file - promoters60/2990249
aattaa

SEQ ID NO: 127155 - DNA, 6 bp, Unknown
  misc_feature (1)..( 6): Result.003 file - promoters60/2990249
aattaa

SEQ ID NO: 127156 - DNA, 6 bp, Unknown
  misc_feature (1)..( 6): Result.003 file - promoters60/2990249
tctttt

SEQ ID NO: 127157 - DNA, 6 bp, Unknown
  misc_feature (1)..( 6): Result.003 file - promoters60/2990249
tctttt

SEQ ID NO: 127158 - DNA, 6 bp, Unknown
  misc_feature (1)..( 6): Result.003 file - promoters60/2990249
tatata

SEQ ID NO: 127159 - DNA, 6 bp, Unknown
  misc_feature (1)..( 6): Result.003 file - promoters60/2990249
tatata

SEQ ID NO: 127160 - DNA, 8 bp, Unknown
  misc_feature (1)..( 8): Result.003 file - promoters60/2990263
aatctaaa

SEQ ID NO: 127161 - DNA, 8 bp, Unknown
  misc_feature (1)..( 8): Result.003 file - promoters60/2990263
aatttaac

SEQ ID NO: 127162 - DNA, 8 bp, Unknown
  misc_feature (1)..( 8): Result.003 file - promoters60/2990263
tttttact

SEQ ID NO: 127163 - DNA, 8 bp, Unknown
  misc_feature (1)..( 8): Result.003 file - promoters60/2990263
tttttaca

SEQ ID NO: 127164 - DNA, 9 bp, Unknown
  misc_feature (1)..( 9): Result.003 file - promoters60/2990263
tatataata

SEQ ID NO: 127165 - DNA, 9 bp, Unknown
  misc_feature (1)..( 9): Result.003 file - promoters60/2990263
tataaaata

SEQ ID NO: 127166 - DNA, 9 bp, Unknown
  misc_feature (1)..( 9): Result.003 file - promoters60/2990263
tatttaatt

SEQ ID NO: 127167 - DNA, 9 bp, Unknown
  misc_feature (1)..( 9): Result.003 file - promoters60/2990263
tatgaaaca

SEQ ID NO: 127168 - DNA, 10 bp, Unknown
  misc_feature (1)..( 10): Result.003 file - promoters60/2990263
attcttataa

SEQ ID NO: 127169 - DNA, 10 bp, Unknown
  misc_feature (1)..( 10): Result.003 file - promoters60/2990263
atttttactc

SEQ ID NO: 127170 - DNA, 10 bp, Unknown
  misc_feature (1)..( 10): Result.003 file - promoters60/2990263
caatttaact

SEQ ID NO: 127171 - DNA, 10 bp, Unknown
  misc_feature (1)..( 10): Result.003 file - promoters60/2990263
ttttttacat

SEQ ID NO: 127172 - DNA, 12 bp, Unknown
  misc_feature (1)..( 12): Result.003 file - promoters60/2990263
caaattgaaacc

SEQ ID NO: 127173 - DNA, 12 bp, Unknown
  misc_feature (1)..( 12): Result.003 file - promoters60/2990263
aaatttgaaaaa

SEQ ID NO: 127174 - DNA, 12 bp, Unknown
  misc_feature (1)..( 12): Result.003 file - promoters60/2990263
caaatcgaagaa

SEQ ID NO: 127175 - DNA, 12 bp, Unknown
  misc_feature (1)..( 12): Result.003 file - promoters60/2990263
ggagtcgaagaa

SEQ ID NO: 127176 - DNA, 8 bp, Unknown
  misc_feature (1)..( 8): Result.003 file - promoters60/2990528
caaaccaa

SEQ ID NO: 127177 - DNA, 8 bp, Unknown
  misc_feature (1)..( 8): Result.003 file - promoters60/2990528
caaaacaa

SEQ ID NO: 127178 - DNA, 8 bp, Unknown
  misc_feature (1)..( 8): Result.003 file - promoters60/2990528
aaaaacaa

SEQ ID NO: 127179 - DNA, 8 bp, Unknown
  misc_feature (1)..( 8): Result.003 file - promoters60/2990528
taaaccaa

SEQ ID NO: 127180 - DNA, 8 bp, Unknown
  misc_feature (1)..( 8): Result.003 file - promoters60/2990528
tttcaatt

SEQ ID NO: 127181 - DNA, 8 bp, Unknown
  misc_feature (1)..( 8): Result.003 file - promoters60/2990528
attcaatg

SEQ ID NO: 127182 - DNA, 8 bp, Unknown
  misc_feature (1)..( 8): Result.003 file - promoters60/2990528
ttttaatt

SEQ ID NO: 127183 - DNA, 8 bp, Unknown
  misc_feature (1)..( 8): Result.003 file - promoters60/2990528
attcaact

SEQ ID NO: 127184 - DNA, 7 bp, Unknown
  misc_feature (1)..( 7): Result.003 file - promoters60/2990528
cttttct

SEQ ID NO: 127185 - DNA, 7 bp, Unknown
  misc_feature (1)..( 7): Result.003 file - promoters60/2990528
cttatct

SEQ ID NO: 127186 - DNA, 7 bp, Unknown
  misc_feature (1)..( 7): Result.003 file - promoters60/2990528
gttatct

SEQ ID NO: 127187 - DNA, 15 bp, Unknown
  misc_feature (1)..( 15): Result.003 file - promoters60/2990528
actaaaataactcac

SEQ ID NO: 127188 - DNA, 15 bp, Unknown
  misc_feature (1)..( 15): Result.003 file - promoters60/2990528
acagaaataaatcac

SEQ ID NO: 127189 - DNA, 15 bp, Unknown
  misc_feature (1)..( 15): Result.003 file - promoters60/2990528
acacaaatatgccaa

SEQ ID NO: 127190 - DNA, 9 bp, Unknown
  misc_feature (1)..( 9): Result.003 file - promoters60/2990544
ctttctttg

SEQ ID NO: 127191 - DNA, 9 bp, Unknown
  misc_feature (1)..( 9): Result.003 file - promoters60/2990544
cttcctttg

SEQ ID NO: 127192 - DNA, 9 bp, Unknown
  misc_feature (1)..( 9): Result.003 file - promoters60/2990544
atttatttc

SEQ ID NO: 127193 - DNA, 9 bp, Unknown
  misc_feature (1)..( 9): Result.003 file - promoters60/2990544
tcttatttt

SEQ ID NO: 127194 - DNA, 8 bp, Unknown
  misc_feature (1)..( 8): Result.003 file - promoters60/2990548
tattcatt

SEQ ID NO: 127195 - DNA, 8 bp, Unknown
  misc_feature (1)..( 8): Result.003 file - promoters60/2990548
gattcata

SEQ ID NO: 127196 - DNA, 8 bp, Unknown
  misc_feature (1)..( 8): Result.003 file - promoters60/2990548
tattcatt

SEQ ID NO: 127197 - DNA, 8 bp, Unknown
  misc_feature (1)..( 8): Result.003 file - promoters60/2990548
tattgatt

SEQ ID NO: 127198 - DNA, 7 bp, Unknown
  misc_feature (1)..( 7): Result.003 file - promoters60/2990548
gtttgtc

SEQ ID NO: 127199 - DNA, 7 bp, Unknown
  misc_feature (1)..( 7): Result.003 file - promoters60/2990548
gtttgtg

SEQ ID NO: 127200 - DNA, 7 bp, Unknown
  misc_feature (1)..( 7): Result.003 file - promoters60/2990548
ctttgtc

SEQ ID NO: 127201 - DNA, 7 bp, Unknown
  misc_feature (1)..( 7): Result.003 file - promoters60/2990548
gtttgtt

SEQ ID NO: 127202 - DNA, 10 bp, Unknown
  misc_feature (1)..( 10): Result.003 file - promoters60/2990548
gaacgcagaa

SEQ ID NO: 127203 - DNA, 10 bp, Unknown
  misc_feature (1)..( 10): Result.003 file - promoters60/2990548
gaactcagat

SEQ ID NO: 127204 - DNA, 10 bp, Unknown
  misc_feature (1)..( 10): Result.003 file - promoters60/2990548
agcagcagaa

SEQ ID NO: 127205 - DNA, 10 bp, Unknown
  misc_feature (1)..( 10): Result.003 file - promoters60/2990548
tcacgcagac

SEQ ID NO: 127206 - DNA, 8 bp, Unknown
  misc_feature (1)..( 8): Result.003 file - promoters60/2990548
tttctctg

SEQ ID NO: 127207 - DNA, 8 bp, Unknown
  misc_feature (1)..( 8): Result.003 file - promoters60/2990548
tttcactg

SEQ ID NO: 127208 - DNA, 8 bp, Unknown
  misc_feature (1)..( 8): Result.003 file - promoters60/2990548
cttcactt

SEQ ID NO: 127209 - DNA, 8 bp, Unknown
  misc_feature (1)..( 8): Result.003 file - promoters60/2990548
cttcaccc

SEQ ID NO: 127210 - DNA, 10 bp, Unknown
  misc_feature (1)..( 10): Result.003 file - promoters60/2990548
cttcactttg

SEQ ID NO: 127211 - DNA, 10 bp, Unknown
  misc_feature (1)..( 10): Result.003 file - promoters60/2990548
gttctctttt

SEQ ID NO: 127212 - DNA, 10 bp, Unknown
  misc_feature (1)..( 10): Result.003 file - promoters60/2990548
gtaaactttg

SEQ ID NO: 127213 - DNA, 10 bp, Unknown
  misc_feature (1)..( 10): Result.003 file - promoters60/2990548
cttcacccgg

SEQ ID NO: 127214 - DNA, 13 bp, Unknown
  misc_feature (1)..( 13): Result.003 file - promoters60/2990611
cgaaaaataaata

SEQ ID NO: 127215 - DNA, 13 bp, Unknown
  misc_feature (1)..( 13): Result.003 file - promoters60/2990611
ttaaacatatagt

SEQ ID NO: 127216 - DNA, 13 bp, Unknown
  misc_feature (1)..( 13): Result.003 file - promoters60/2990611
cgataaatttgct

SEQ ID NO: 127217 - DNA, 13 bp, Unknown
  misc_feature (1)..( 13): Result.003 file - promoters60/2990611
cacaaaataaagt

SEQ ID NO: 127218 - DNA, 13 bp, Unknown
  misc_feature (1)..( 13): Result.003 file - promoters60/2990611
tcaaaaaaacgtt

SEQ ID NO: 127219 - DNA, 13 bp, Unknown
  misc_feature (1)..( 13): Result.003 file - promoters60/2990611
ataatcatgctat

SEQ ID NO: 127220 - DNA, 13 bp, Unknown
  misc_feature (1)..( 13): Result.003 file - promoters60/2990611
atcataattttgc

SEQ ID NO: 127221 - DNA, 13 bp, Unknown
  misc_feature (1)..( 13): Result.003 file - promoters60/2990611
atattaaccttga

SEQ ID NO: 127222 - DNA, 13 bp, Unknown
  misc_feature (1)..( 13): Result.003 file - promoters60/2990611
aaattgaccctga

SEQ ID NO: 127223 - DNA, 13 bp, Unknown
  misc_feature (1)..( 13): Result.003 file - promoters60/2990611
taaataataaagt

SEQ ID NO: 127224 - DNA, 13 bp, Unknown
  misc_feature (1)..( 13): Result.003 file - promoters60/2990611
taatagacagctt

SEQ ID NO: 127225 - DNA, 13 bp, Unknown
  misc_feature (1)..( 13): Result.003 file - promoters60/2990611
aaactgacaagaa

SEQ ID NO: 127226 - DNA, 13 bp, Unknown
  misc_feature (1)..( 13): Result.003 file - promoters60/2990611
aaattgatctctc

SEQ ID NO: 127227 - DNA, 10 bp, Unknown
  misc_feature (1)..( 10): Result.003 file - promoters60/2990611
aaatgaaaaa

SEQ ID NO: 127228 - DNA, 10 bp, Unknown
  misc_feature (1)..( 10): Result.003 file - promoters60/2990611
ctatgagaaa

SEQ ID NO: 127229 - DNA, 10 bp, Unknown
  misc_feature (1)..( 10): Result.003 file - promoters60/2990611
gaataacaat

SEQ ID NO: 127230 - DNA, 10 bp, Unknown
  misc_feature (1)..( 10): Result.003 file - promoters60/2990611
tattaataat

SEQ ID NO: 127231 - DNA, 10 bp, Unknown
  misc_feature (1)..( 10): Result.003 file - promoters60/2990611
aatttatatg

SEQ ID NO: 127232 - DNA, 10 bp, Unknown
  misc_feature (1)..( 10): Result.003 file - promoters60/2990611
aatttagatg

SEQ ID NO: 127233 - DNA, 8 bp, Unknown
  misc_feature (1)..( 8): Result.003 file - promoters60/2990611
tatgtttt

SEQ ID NO: 127234 - DNA, 8 bp, Unknown
  misc_feature (1)..( 8): Result.003 file - promoters60/2990611
tttgtttt

SEQ ID NO: 127235 - DNA, 8 bp, Unknown
  misc_feature (1)..( 8): Result.003 file - promoters60/2990611
attgttta

SEQ ID NO: 127236 - DNA, 8 bp, Unknown
  misc_feature (1)..( 8): Result.003 file - promoters60/2990611
aatgttta

SEQ ID NO: 127237 - DNA, 8 bp, Unknown
  misc_feature (1)..( 8): Result.003 file - promoters60/2990611
attgttta

SEQ ID NO: 127238 - DNA, 8 bp, Unknown
  misc_feature (1)..( 8): Result.003 file - promoters60/2990611
tttattta

SEQ ID NO: 127239 - DNA, 14 bp, Unknown
  misc_feature (1)..( 14): Result.003 file - promoters60/2990611
cgacaggaaaatgg

SEQ ID NO: 127240 - DNA, 14 bp, Unknown
  misc_feature (1)..( 14): Result.003 file - promoters60/2990611
aaaaaggaaagaat

SEQ ID NO: 127241 - DNA, 14 bp, Unknown
  misc_feature (1)..( 14): Result.003 file - promoters60/2990611
aaaaaagaaataaa

SEQ ID NO: 127242 - DNA, 14 bp, Unknown
  misc_feature (1)..( 14): Result.003 file - promoters60/2990611
ataaagcaaacaat

SEQ ID NO: 127243 - DNA, 14 bp, Unknown
  misc_feature (1)..( 14): Result.003 file - promoters60/2990611
aaaaaacaaagacg

SEQ ID NO: 127244 - DNA, 14 bp, Unknown
  misc_feature (1)..( 14): Result.003 file - promoters60/2990611
taaaaacttaatca

SEQ ID NO: 127245 - DNA, 7 bp, Unknown
  misc_feature (1)..( 7): Result.003 file - promoters60/2990616
ttaataa

SEQ ID NO: 127246 - DNA, 7 bp, Unknown
  misc_feature (1)..( 7): Result.003 file - promoters60/2990616
ttactaa

SEQ ID NO: 127247 - DNA, 6 bp, Unknown
  misc_feature (1)..( 6): Result.003 file - promoters60/2990616
caaaac

SEQ ID NO: 127248 - DNA, 6 bp, Unknown
  misc_feature (1)..( 6): Result.003 file - promoters60/2990616
caaaac

SEQ ID NO: 127249 - DNA, 7 bp, Unknown
  misc_feature (1)..( 7): Result.003 file - promoters60/2990616
tgtgttg

SEQ ID NO: 127250 - DNA, 7 bp, Unknown
  misc_feature (1)..( 7): Result.003 file - promoters60/2990616
tgttttg

SEQ ID NO: 127251 - DNA, 7 bp, Unknown
  misc_feature (1)..( 7): Result.003 file - promoters60/2990616
aaagtta

SEQ ID NO: 127252 - DNA, 7 bp, Unknown
  misc_feature (1)..( 7): Result.003 file - promoters60/2990616
aaattta

SEQ ID NO: 127253 - DNA, 7 bp, Unknown
  misc_feature (1)..( 7): Result.003 file - promoters60/2990616
agagaaa

SEQ ID NO: 127254 - DNA, 7 bp, Unknown
  misc_feature (1)..( 7): Result.003 file - promoters60/2990616
agaaaaa

SEQ ID NO: 127255 - DNA, 7 bp, Unknown
  misc_feature (1)..( 7): Result.003 file - promoters60/2990616
atttaca

SEQ ID NO: 127256 - DNA, 7 bp, Unknown
  misc_feature (1)..( 7): Result.003 file - promoters60/2990616
attcaca

SEQ ID NO: 127257 - DNA, 7 bp, Unknown
  misc_feature (1)..( 7): Result.003 file - promoters60/2990616
aaataag

SEQ ID NO: 127258 - DNA, 7 bp, Unknown
  misc_feature (1)..( 7): Result.003 file - promoters60/2990616
aaataag

SEQ ID NO: 127259 - DNA, 6 bp, Unknown
  misc_feature (1)..( 6): Result.003 file - promoters60/2990616
tttatg

SEQ ID NO: 127260 - DNA, 6 bp, Unknown
  misc_feature (1)..( 6): Result.003 file - promoters60/2990616
tttatg

SEQ ID NO: 127261 - DNA, 7 bp, Unknown
  misc_feature (1)..( 7): Result.003 file - promoters60/2990616
taaccta

SEQ ID NO: 127262 - DNA, 7 bp, Unknown
  misc_feature (1)..( 7): Result.003 file - promoters60/2990616
taaacta

SEQ ID NO: 127263 - DNA, 7 bp, Unknown
  misc_feature (1)..( 7): Result.003 file - promoters60/2990616
ctggact

SEQ ID NO: 127264 - DNA, 7 bp, Unknown
  misc_feature (1)..( 7): Result.003 file - promoters60/2990616
ctggact

SEQ ID NO: 127265 - DNA, 6 bp, Unknown
  misc_feature (1)..( 6): Result.003 file - promoters60/2990616
aaggta

SEQ ID NO: 127266 - DNA, 6 bp, Unknown
  misc_feature (1)..( 6): Result.003 file - promoters60/2990616
aaggta

SEQ ID NO: 127267 - DNA, 10 bp, Unknown
  misc_feature (1)..( 10): Result.003 file - promoters60/2990616
taatttatga

SEQ ID NO: 127268 - DNA, 10 bp, Unknown
  misc_feature (1)..( 10): Result.003 file - promoters60/2990616
taatctatga

SEQ ID NO: 127269 - DNA, 7 bp, Unknown
  misc_feature (1)..( 7): Result.003 file - promoters60/2990616
tattgtt

SEQ ID NO: 127270 - DNA, 7 bp, Unknown
  misc_feature (1)..( 7): Result.003 file - promoters60/2990616
tatagtt

SEQ ID NO: 127271 - DNA, 11 bp, Unknown
  misc_feature (1)..( 11): Result.003 file - promoters60/2990616
aaacttcatct

SEQ ID NO: 127272 - DNA, 11 bp, Unknown
  misc_feature (1)..( 11): Result.003 file - promoters60/2990616
aaagttcatct

SEQ ID NO: 127273 - DNA, 7 bp, Unknown
  misc_feature (1)..( 7): Result.003 file - promoters60/2990616
tatatgt

SEQ ID NO: 127274 - DNA, 7 bp, Unknown
  misc_feature (1)..( 7): Result.003 file - promoters60/2990616
tatgtgt

SEQ ID NO: 127275 - DNA, 7 bp, Unknown
  misc_feature (1)..( 7): Result.003 file - promoters60/2990616
taagatt

SEQ ID NO: 127276 - DNA, 7 bp, Unknown
  misc_feature (1)..( 7): Result.003 file - promoters60/2990616
taagatt

SEQ ID NO: 127277 - DNA, 7 bp, Unknown
  misc_feature (1)..( 7): Result.003 file - promoters60/2990616
tggttat

SEQ ID NO: 127278 - DNA, 7 bp, Unknown
  misc_feature (1)..( 7): Result.003 file - promoters60/2990616
tggatat

SEQ ID NO: 127279 - DNA, 8 bp, Unknown
  misc_feature (1)..( 8): Result.003 file - promoters60/2990616
attgtttt

SEQ ID NO: 127280 - DNA, 8 bp, Unknown
  misc_feature (1)..( 8): Result.003 file - promoters60/2990616
attttttt

SEQ ID NO: 127281 - DNA, 8 bp, Unknown
  misc_feature (1)..( 8): Result.003 file - promoters60/2990659
ttaaaaaa

SEQ ID NO: 127282 - DNA, 8 bp, Unknown
  misc_feature (1)..( 8): Result.003 file - promoters60/2990659
ttacaaaa

SEQ ID NO: 127283 - DNA, 8 bp, Unknown
  misc_feature (1)..( 8): Result.003 file - promoters60/2990659
ttaaaatc

SEQ ID NO: 127284 - DNA, 8 bp, Unknown
  misc_feature (1)..( 8): Result.003 file - promoters60/2990659
aaaatggt

SEQ ID NO: 127285 - DNA, 8 bp, Unknown
  misc_feature (1)..( 8): Result.003 file - promoters60/2990659
aaaatgaa

SEQ ID NO: 127286 - DNA, 8 bp, Unknown
  misc_feature (1)..( 8): Result.003 file - promoters60/2990659
aaattgtc

SEQ ID NO: 127287 - DNA, 7 bp, Unknown
  misc_feature (1)..( 7): Result.003 file - promoters60/2990659
atcattg

SEQ ID NO: 127288 - DNA, 7 bp, Unknown
  misc_feature (1)..( 7): Result.003 file - promoters60/2990659
atctttg

SEQ ID NO: 127289 - DNA, 8 bp, Unknown
  misc_feature (1)..( 8): Result.003 file - promoters60/2990659
aattcata

SEQ ID NO: 127290 - DNA, 8 bp, Unknown
  misc_feature (1)..( 8): Result.003 file - promoters60/2990659
aatttata

SEQ ID NO: 127291 - DNA, 10 bp, Unknown
  misc_feature (1)..( 10): Result.003 file - promoters60/2990659
tttttcacat

SEQ ID NO: 127292 - DNA, 10 bp, Unknown
  misc_feature (1)..( 10): Result.003 file - promoters60/2990659
ttttttacat

SEQ ID NO: 127293 - DNA, 7 bp, Unknown
  misc_feature (1)..( 7): Result.003 file - promoters60/2990659
acatttt

SEQ ID NO: 127294 - DNA, 7 bp, Unknown
  misc_feature (1)..( 7): Result.003 file - promoters60/2990659
acatttt

SEQ ID NO: 127295 - DNA, 8 bp, Unknown
  misc_feature (1)..( 8): Result.003 file - promoters60/2990659
aaagattt

SEQ ID NO: 127296 - DNA, 8 bp, Unknown
  misc_feature (1)..( 8): Result.003 file - promoters60/2990659
aaatattt

SEQ ID NO: 127297 - DNA, 7 bp, Unknown
  misc_feature (1)..( 7): Result.003 file - promoters60/2990659
tttattt

SEQ ID NO: 127298 - DNA, 7 bp, Unknown
  misc_feature (1)..( 7): Result.003 file - promoters60/2990659
tttattt

SEQ ID NO: 127299 - DNA, 7 bp, Unknown
  misc_feature (1)..( 7): Result.003 file - promoters60/2990659
tttaatt

SEQ ID NO: 127300 - DNA, 7 bp, Unknown
  misc_feature (1)..( 7): Result.003 file - promoters60/2990659
tttcatt

SEQ ID NO: 127301 - DNA, 7 bp, Unknown
  misc_feature (1)..( 7): Result.003 file - promoters60/2990659
taatgta

SEQ ID NO: 127302 - DNA, 7 bp, Unknown
  misc_feature (1)..( 7): Result.003 file - promoters60/2990659
taatgta

SEQ ID NO: 127303 - DNA, 6 bp, Unknown
  misc_feature (1)..( 6): Result.003 file - promoters60/2990659
acgatt

SEQ ID NO: 127304 - DNA, 6 bp, Unknown
  misc_feature (1)..( 6): Result.003 file - promoters60/2990659
acgatt

SEQ ID NO: 127305 - DNA, 7 bp, Unknown
  misc_feature (1)..( 7): Result.003 file - promoters60/2990659
tcacaca

SEQ ID NO: 127306 - DNA, 7 bp, Unknown
  misc_feature (1)..( 7): Result.003 file - promoters60/2990659
tcaaaca

SEQ ID NO: 127307 - DNA, 8 bp, Unknown
  misc_feature (1)..( 8): Result.003 file - promoters60/2990659
atataact

SEQ ID NO: 127308 - DNA, 8 bp, Unknown
  misc_feature (1)..( 8): Result.003 file - promoters60/2990659
atattact

SEQ ID NO: 127309 - DNA, 6 bp, Unknown
  misc_feature (1)..( 6): Result.003 file - promoters60/2990659
tgtttt

SEQ ID NO: 127310 - DNA, 6 bp, Unknown
  misc_feature (1)..( 6): Result.003 file - promoters60/2990659
tgtttt

SEQ ID NO: 127311 - DNA, 8 bp, Unknown
  misc_feature (1)..( 8): Result.003 file - promoters60/2990659
taatctat

SEQ ID NO: 127312 - DNA, 8 bp, Unknown
  misc_feature (1)..( 8): Result.003 file - promoters60/2990659
taatgtat

SEQ ID NO: 127313 - DNA, 9 bp, Unknown
  misc_feature (1)..( 9): Result.003 file - promoters60/2990659
tcaatgcat

SEQ ID NO: 127314 - DNA, 9 bp, Unknown
  misc_feature (1)..( 9): Result.003 file - promoters60/2990659
tcaatgcat

SEQ ID NO: 127315 - DNA, 13 bp, Unknown
  misc_feature (1)..( 13): Result.003 file - promoters60/2990659
ataggattcacat

SEQ ID NO: 127316 - DNA, 13 bp, Unknown
  misc_feature (1)..( 13): Result.003 file - promoters60/2990659
ataagattcacat

SEQ ID NO: 127317 - DNA, 7 bp, Unknown
  misc_feature (1)..( 7): Result.003 file - promoters60/2990659
tcattta

SEQ ID NO: 127318 - DNA, 7 bp, Unknown
  misc_feature (1)..( 7): Result.003 file - promoters60/2990659
tcactta

SEQ ID NO: 127319 - DNA, 7 bp, Unknown
  misc_feature (1)..( 7): Result.003 file - promoters60/2990659
ctaccaa

SEQ ID NO: 127320 - DNA, 7 bp, Unknown
  misc_feature (1)..( 7): Result.003 file - promoters60/2990659
ctaccaa

SEQ ID NO: 127321 - DNA, 8 bp, Unknown
  misc_feature (1)..( 8): Result.003 file - promoters60/2990659
aaaataag

SEQ ID NO: 127322 - DNA, 8 bp, Unknown
  misc_feature (1)..( 8): Result.003 file - promoters60/2990659
aaactaag

SEQ ID NO: 127323 - DNA, 6 bp, Unknown
  misc_feature (1)..( 6): Result.003 file - promoters60/2990659
atagat

SEQ ID NO: 127324 - DNA, 6 bp, Unknown
  misc_feature (1)..( 6): Result.003 file - promoters60/2990659
atagat

SEQ ID NO: 127325 - DNA, 7 bp, Unknown
  misc_feature (1)..( 7): Result.003 file - promoters60/2990659
agatata

SEQ ID NO: 127326 - DNA, 7 bp, Unknown
  misc_feature (1)..( 7): Result.003 file - promoters60/2990659
agagata

SEQ ID NO: 127327 - DNA, 6 bp, Unknown
  misc_feature (1)..( 6): Result.003 file - promoters60/2990659
ttttgg

SEQ ID NO: 127328 - DNA, 6 bp, Unknown
  misc_feature (1)..( 6): Result.003 file - promoters60/2990659
ttttgg

SEQ ID NO: 127329 - DNA, 6 bp, Unknown
  misc_feature (1)..( 6): Result.003 file - promoters60/2990659
taagat

SEQ ID NO: 127330 - DNA, 6 bp, Unknown
  misc_feature (1)..( 6): Result.003 file - promoters60/2990659
taagat

SEQ ID NO: 127331 - DNA, 6 bp, Unknown
  misc_feature (1)..( 6): Result.003 file - promoters60/2990659
aaagaa

SEQ ID NO: 127332 - DNA, 6 bp, Unknown
  misc_feature (1)..( 6): Result.003 file - promoters60/2990659
aaagaa

SEQ ID NO: 127333 - DNA, 12 bp, Unknown
  misc_feature (1)..( 12): Result.003 file - promoters60/2990659
aaaaacaaaaca

SEQ ID NO: 127334 - DNA, 12 bp, Unknown
  misc_feature (1)..( 12): Result.003 file - promoters60/2990659
aaacacaataca

SEQ ID NO: 127335 - DNA, 6 bp, Unknown
  misc_feature (1)..( 6): Result.003 file - promoters60/2990659
aaaaat

SEQ ID NO: 127336 - DNA, 6 bp, Unknown
  misc_feature (1)..( 6): Result.003 file - promoters60/2990659
aaaaat

SEQ ID NO: 127337 - DNA, 6 bp, Unknown
  misc_feature (1)..( 6): Result.003 file - promoters60/2990659
taaccc

SEQ ID NO: 127338 - DNA, 6 bp, Unknown
  misc_feature (1)..( 6): Result.003 file - promoters60/2990659
taaccc

SEQ ID NO: 127339 - DNA, 7 bp, Unknown
  misc_feature (1)..( 7): Result.003 file - promoters60/2990777
atttttc

SEQ ID NO: 127340 - DNA, 7 bp, Unknown
  misc_feature (1)..( 7): Result.003 file - promoters60/2990777
attcttc

SEQ ID NO: 127341 - DNA, 6 bp, Unknown
  misc_feature (1)..( 6): Result.003 file - promoters60/2990777
agagag

SEQ ID NO: 127342 - DNA, 6 bp, Unknown
  misc_feature (1)..( 6): Result.003 file - promoters60/2990777
agagag

SEQ ID NO: 127343 - DNA, 7 bp, Unknown
  misc_feature (1)..( 7): Result.003 file - promoters60/2990777
attcaaa

SEQ ID NO: 127344 - DNA, 7 bp, Unknown
  misc_feature (1)..( 7): Result.003 file - promoters60/2990777
attcaac

SEQ ID NO: 127345 - DNA, 8 bp, Unknown
  misc_feature (1)..( 8): Result.003 file - promoters60/2990777
tttcgaaa

SEQ ID NO: 127346 - DNA, 8 bp, Unknown
  misc_feature (1)..( 8): Result.003 file - promoters60/2990777
tttgtgtt

SEQ ID NO: 127347 - DNA, 8 bp, Unknown
  misc_feature (1)..( 8): Result.003 file - promoters60/2990777
tttatgtt

SEQ ID NO: 127348 - DNA, 6 bp, Unknown
  misc_feature (1)..( 6): Result.003 file - promoters60/2990777
aaaaag

SEQ ID NO: 127349 - DNA, 6 bp, Unknown
  misc_feature (1)..( 6): Result.003 file - promoters60/2990777
aaaaag

SEQ ID NO: 127350 - DNA, 6 bp, Unknown
  misc_feature (1)..( 6): Result.003 file - promoters60/2990777
tataaa

SEQ ID NO: 127351 - DNA, 6 bp, Unknown
  misc_feature (1)..( 6): Result.003 file - promoters60/2990777
tataaa

SEQ ID NO: 127352 - DNA, 7 bp, Unknown
  misc_feature (1)..( 7): Result.003 file - promoters60/2990777
tcgtgaa

SEQ ID NO: 127353 - DNA, 7 bp, Unknown
  misc_feature (1)..( 7): Result.003 file - promoters60/2990777
tcgcgaa

SEQ ID NO: 127354 - DNA, 7 bp, Unknown
  misc_feature (1)..( 7): Result.003 file - promoters60/2990777
agccggt

SEQ ID NO: 127355 - DNA, 7 bp, Unknown
  misc_feature (1)..( 7): Result.003 file - promoters60/2990777
agctggt

SEQ ID NO: 127356 - DNA, 8 bp, Unknown
  misc_feature (1)..( 8): Result.003 file - promoters60/2990777
aaaaatat

SEQ ID NO: 127357 - DNA, 8 bp, Unknown
  misc_feature (1)..( 8): Result.003 file - promoters60/2990777
aaaaatat

SEQ ID NO: 127358 - DNA, 6 bp, Unknown
  misc_feature (1)..( 6): Result.003 file - promoters60/2990777
atctga

SEQ ID NO: 127359 - DNA, 6 bp, Unknown
  misc_feature (1)..( 6): Result.003 file - promoters60/2990777
atctga

SEQ ID NO: 127360 - DNA, 6 bp, Unknown
  misc_feature (1)..( 6): Result.003 file - promoters60/2990777
ccaaag

SEQ ID NO: 127361 - DNA, 6 bp, Unknown
  misc_feature (1)..( 6): Result.003 file - promoters60/2990777
ccaaag

SEQ ID NO: 127362 - DNA, 10 bp, Unknown
  misc_feature (1)..( 10): Result.003 file - promoters60/2990777
ctcaatctaa

SEQ ID NO: 127363 - DNA, 10 bp, Unknown
  misc_feature (1)..( 10): Result.003 file - promoters60/2990777
ctcagtctaa

SEQ ID NO: 127364 - DNA, 6 bp, Unknown
  misc_feature (1)..( 6): Result.003 file - promoters60/2990777
gcgcag

SEQ ID NO: 127365 - DNA, 6 bp, Unknown
  misc_feature (1)..( 6): Result.003 file - promoters60/2990777
gcgcag

SEQ ID NO: 127366 - DNA, 9 bp, Unknown
  misc_feature (1)..( 9): Result.003 file - promoters60/2990777
aaagtacaa

SEQ ID NO: 127367 - DNA, 9 bp, Unknown
  misc_feature (1)..( 9): Result.003 file - promoters60/2990777
aaagtaaag

SEQ ID NO: 127368 - DNA, 9 bp, Unknown
  misc_feature (1)..( 9): Result.003 file - promoters60/2990777
aaagaaaag

SEQ ID NO: 127369 - DNA, 6 bp, Unknown
  misc_feature (1)..( 6): Result.003 file - promoters60/2990777
agtaaa

SEQ ID NO: 127370 - DNA, 6 bp, Unknown
  misc_feature (1)..( 6): Result.003 file - promoters60/2990777
agtaaa

SEQ ID NO: 127371 - DNA, 7 bp, Unknown
  misc_feature (1)..( 7): Result.003 file - promoters60/2990777
aatcggg

SEQ ID NO: 127372 - DNA, 7 bp, Unknown
  misc_feature (1)..( 7): Result.003 file - promoters60/2990777
aattggg

SEQ ID NO: 127373 - DNA, 8 bp, Unknown
  misc_feature (1)..( 8): Result.003 file - promoters60/2990777
gaaagaaa

SEQ ID NO: 127374 - DNA, 8 bp, Unknown
  misc_feature (1)..( 8): Result.003 file - promoters60/2990777
gaaacaaa

SEQ ID NO: 127375 - DNA, 10 bp, Unknown
  misc_feature (1)..( 10): Result.003 file - promoters60/2990777
ggaaaagaaa

SEQ ID NO: 127376 - DNA, 10 bp, Unknown
  misc_feature (1)..( 10): Result.003 file - promoters60/2990777
ggaaatgaaa

SEQ ID NO: 127377 - DNA, 7 bp, Unknown
  misc_feature (1)..( 7): Result.003 file - promoters60/2990777
cccacta

SEQ ID NO: 127378 - DNA, 7 bp, Unknown
  misc_feature (1)..( 7): Result.003 file - promoters60/2990777
cccacta

SEQ ID NO: 127379 - DNA, 7 bp, Unknown
  misc_feature (1)..( 7): Result.003 file - promoters60/2990777
gtatata

SEQ ID NO: 127380 - DNA, 7 bp, Unknown
  misc_feature (1)..( 7): Result.003 file - promoters60/2990777
gtatata

SEQ ID NO: 127381 - DNA, 7 bp, Unknown
  misc_feature (1)..( 7): Result.003 file - promoters60/2991101
tcttttt

SEQ ID NO: 127382 - DNA, 7 bp, Unknown
  misc_feature (1)..( 7): Result.003 file - promoters60/2991101
tctattt

SEQ ID NO: 127383 - DNA, 12 bp, Unknown
  misc_feature (1)..( 12): Result.003 file - promoters60/2991101
ggtttctttttg

SEQ ID NO: 127384 - DNA, 12 bp, Unknown
  misc_feature (1)..( 12): Result.003 file - promoters60/2991101
ggtttatttata

SEQ ID NO: 127385 - DNA, 12 bp, Unknown
  misc_feature (1)..( 12): Result.003 file - promoters60/2991101
gatttttttata

SEQ ID NO: 127386 - DNA, 9 bp, Unknown
  misc_feature (1)..( 9): Result.003 file - promoters60/2991101
tctttttcc

SEQ ID NO: 127387 - DNA, 9 bp, Unknown
  misc_feature (1)..( 9): Result.003 file - promoters60/2991101
gttttttcc

SEQ ID NO: 127388 - DNA, 9 bp, Unknown
  misc_feature (1)..( 9): Result.003 file - promoters60/2991101
tctttttct

SEQ ID NO: 127389 - DNA, 6 bp, Unknown
  misc_feature (1)..( 6): Result.003 file - promoters60/2991101
taaact

SEQ ID NO: 127390 - DNA, 6 bp, Unknown
  misc_feature (1)..( 6): Result.003 file - promoters60/2991101
taaact

SEQ ID NO: 127391 - DNA, 6 bp, Unknown
  misc_feature (1)..( 6): Result.003 file - promoters60/2991101
tattcc

SEQ ID NO: 127392 - DNA, 6 bp, Unknown
  misc_feature (1)..( 6): Result.003 file - promoters60/2991101
tattcc

SEQ ID NO: 127393 - DNA, 6 bp, Unknown
  misc_feature (1)..( 6): Result.003 file - promoters60/2991101
agaaaa

SEQ ID NO: 127394 - DNA, 6 bp, Unknown
  misc_feature (1)..( 6): Result.003 file - promoters60/2991101
agaaaa

SEQ ID NO: 127395 - DNA, 8 bp, Unknown
  misc_feature (1)..( 8): Result.003 file - promoters60/2991101
aaaaggta

SEQ ID NO: 127396 - DNA, 8 bp, Unknown
  misc_feature (1)..( 8): Result.003 file - promoters60/2991101
aaatggta

SEQ ID NO: 127397 - DNA, 10 bp, Unknown
  misc_feature (1)..( 10): Result.003 file - promoters60/2991101
tttgtttcga

SEQ ID NO: 127398 - DNA, 10 bp, Unknown
  misc_feature (1)..( 10): Result.003 file - promoters60/2991101
tttttttata

SEQ ID NO: 127399 - DNA, 10 bp, Unknown
  misc_feature (1)..( 10): Result.003 file - promoters60/2991101
tttatttata

SEQ ID NO: 127400 - DNA, 7 bp, Unknown
  misc_feature (1)..( 7): Result.003 file - promoters60/2991101
aaatata

SEQ ID NO: 127401 - DNA, 7 bp, Unknown
  misc_feature (1)..( 7): Result.003 file - promoters60/2991101
aaatata

SEQ ID NO: 127402 - DNA, 7 bp, Unknown
  misc_feature (1)..( 7): Result.003 file - promoters60/2991101
atgttga

SEQ ID NO: 127403 - DNA, 7 bp, Unknown
  misc_feature (1)..( 7): Result.003 file - promoters60/2991101
atgatga

SEQ ID NO: 127404 - DNA, 8 bp, Unknown
  misc_feature (1)..( 8): Result.003 file - promoters60/2991101
attgtttt

SEQ ID NO: 127405 - DNA, 8 bp, Unknown
  misc_feature (1)..( 8): Result.003 file - promoters60/2991101
attttttt

SEQ ID NO: 127406 - DNA, 8 bp, Unknown
  misc_feature (1)..( 8): Result.003 file - promoters60/2991101
tgattatt

SEQ ID NO: 127407 - DNA, 8 bp, Unknown
  misc_feature (1)..( 8): Result.003 file - promoters60/2991101
tgagtatt

SEQ ID NO: 127408 - DNA, 8 bp, Unknown
  misc_feature (1)..( 8): Result.003 file - promoters60/2991101
aagatgat

SEQ ID NO: 127409 - DNA, 8 bp, Unknown
  misc_feature (1)..( 8): Result.003 file - promoters60/2991101
aagaggat

SEQ ID NO: 127410 - DNA, 7 bp, Unknown
  misc_feature (1)..( 7): Result.003 file - promoters60/2991101
tcttaaa

SEQ ID NO: 127411 - DNA, 7 bp, Unknown
  misc_feature (1)..( 7): Result.003 file - promoters60/2991101
tctaaaa

SEQ ID NO: 127412 - DNA, 6 bp, Unknown
  misc_feature (1)..( 6): Result.003 file - promoters60/2991122
aaccta

SEQ ID NO: 127413 - DNA, 6 bp, Unknown
  misc_feature (1)..( 6): Result.003 file - promoters60/2991122
aaccta

SEQ ID NO: 127414 - DNA, 6 bp, Unknown
  misc_feature (1)..( 6): Result.003 file - promoters60/2991122
ggagac

SEQ ID NO: 127415 - DNA, 6 bp, Unknown
  misc_feature (1)..( 6): Result.003 file - promoters60/2991122
ggagac

SEQ ID NO: 127416 - DNA, 8 bp, Unknown
  misc_feature (1)..( 8): Result.003 file - promoters60/2991122
ttggctgc

SEQ ID NO: 127417 - DNA, 8 bp, Unknown
  misc_feature (1)..( 8): Result.003 file - promoters60/2991122
ttgggtgc

SEQ ID NO: 127418 - DNA, 7 bp, Unknown
  misc_feature (1)..( 7): Result.003 file - promoters60/2991122
ggtggta

SEQ ID NO: 127419 - DNA, 7 bp, Unknown
  misc_feature (1)..( 7): Result.003 file - promoters60/2991122
ggtggta

SEQ ID NO: 127420 - DNA, 7 bp, Unknown
  misc_feature (1)..( 7): Result.003 file - promoters60/2991122
aggtcag

SEQ ID NO: 127421 - DNA, 7 bp, Unknown
  misc_feature (1)..( 7): Result.003 file - promoters60/2991122
aggacag

SEQ ID NO: 127422 - DNA, 6 bp, Unknown
  misc_feature (1)..( 6): Result.003 file - promoters60/2991122
tgtgaa

SEQ ID NO: 127423 - DNA, 6 bp, Unknown
  misc_feature (1)..( 6): Result.003 file - promoters60/2991122
tgtgaa

SEQ ID NO: 127424 - DNA, 7 bp, Unknown
  misc_feature (1)..( 7): Result.003 file - promoters60/2991122
tagtaac

SEQ ID NO: 127425 - DNA, 7 bp, Unknown
  misc_feature (1)..( 7): Result.003 file - promoters60/2991122
tagcaac

SEQ ID NO: 127426 - DNA, 8 bp, Unknown
  misc_feature (1)..( 8): Result.003 file - promoters60/2991122
caagtgaa

SEQ ID NO: 127427 - DNA, 8 bp, Unknown
  misc_feature (1)..( 8): Result.003 file - promoters60/2991122
caaatgaa

SEQ ID NO: 127428 - DNA, 6 bp, Unknown
  misc_feature (1)..( 6): Result.003 file - promoters60/2991122
ggctga

SEQ ID NO: 127429 - DNA, 6 bp, Unknown
  misc_feature (1)..( 6): Result.003 file - promoters60/2991122
ggctga

SEQ ID NO: 127430 - DNA, 11 bp, Unknown
  misc_feature (1)..( 11): Result.003 file - promoters60/2991122
aggttctcaga

SEQ ID NO: 127431 - DNA, 11 bp, Unknown
  misc_feature (1)..( 11): Result.003 file - promoters60/2991122
agggtctgaga

SEQ ID NO: 127432 - DNA, 6 bp, Unknown
  misc_feature (1)..( 6): Result.003 file - promoters60/2991122
agattt

SEQ ID NO: 127433 - DNA, 6 bp, Unknown
  misc_feature (1)..( 6): Result.003 file - promoters60/2991122
agattt

SEQ ID NO: 127434 - DNA, 9 bp, Unknown
  misc_feature (1)..( 9): Result.003 file - promoters60/2991235
catggaggt

SEQ ID NO: 127435 - DNA, 9 bp, Unknown
  misc_feature (1)..( 9): Result.003 file - promoters60/2991235
catagagaa

SEQ ID NO: 127436 - DNA, 9 bp, Unknown
  misc_feature (1)..( 9): Result.003 file - promoters60/2991235
agtagagaa

SEQ ID NO: 127437 - DNA, 7 bp, Unknown
  misc_feature (1)..( 7): Result.003 file - promoters60/2991235
gataaca

SEQ ID NO: 127438 - DNA, 7 bp, Unknown
  misc_feature (1)..( 7): Result.003 file - promoters60/2991235
gataaca

SEQ ID NO: 127439 - DNA, 8 bp, Unknown
  misc_feature (1)..( 8): Result.003 file - promoters60/2991235
ttgattat

SEQ ID NO: 127440 - DNA, 8 bp, Unknown
  misc_feature (1)..( 8): Result.003 file - promoters60/2991235
ttgcttat

SEQ ID NO: 127441 - DNA, 7 bp, Unknown
  misc_feature (1)..( 7): Result.003 file - promoters60/2991235
tcaacaa

SEQ ID NO: 127442 - DNA, 7 bp, Unknown
  misc_feature (1)..( 7): Result.003 file - promoters60/2991235
gcaacaa

SEQ ID NO: 127443 - DNA, 7 bp, Unknown
  misc_feature (1)..( 7): Result.003 file - promoters60/2991235
tcaacac

SEQ ID NO: 127444 - DNA, 8 bp, Unknown
  misc_feature (1)..( 8): Result.003 file - promoters60/2991235
aaacccaa

SEQ ID NO: 127445 - DNA, 8 bp, Unknown
  misc_feature (1)..( 8): Result.003 file - promoters60/2991235
caacacaa

SEQ ID NO: 127446 - DNA, 8 bp, Unknown
  misc_feature (1)..( 8): Result.003 file - promoters60/2991235
caacacca

SEQ ID NO: 127447 - DNA, 8 bp, Unknown
  misc_feature (1)..( 8): Result.003 file - promoters60/2991235
gaaaaaac

SEQ ID NO: 127448 - DNA, 8 bp, Unknown
  misc_feature (1)..( 8): Result.003 file - promoters60/2991235
gaagaaac

SEQ ID NO: 127449 - DNA, 6 bp, Unknown
  misc_feature (1)..( 6): Result.003 file - promoters60/2991235
gaagat

SEQ ID NO: 127450 - DNA, 6 bp, Unknown
  misc_feature (1)..( 6): Result.003 file - promoters60/2991235
gaagat

SEQ ID NO: 127451 - DNA, 13 bp, Unknown
  misc_feature (1)..( 13): Result.003 file - promoters60/2991235
gaagcatttagta

SEQ ID NO: 127452 - DNA, 13 bp, Unknown
  misc_feature (1)..( 13): Result.003 file - promoters60/2991235
gaagcacgaatgt

SEQ ID NO: 127453 - DNA, 13 bp, Unknown
  misc_feature (1)..( 13): Result.003 file - promoters60/2991235
gaagtagcattta

SEQ ID NO: 127454 - DNA, 7 bp, Unknown
  misc_feature (1)..( 7): Result.003 file - promoters60/2991235
cgttcat

SEQ ID NO: 127455 - DNA, 7 bp, Unknown
  misc_feature (1)..( 7): Result.003 file - promoters60/2991235
cgtacat

SEQ ID NO: 127456 - DNA, 8 bp, Unknown
  misc_feature (1)..( 8): Result.003 file - promoters60/2991235
gtagagtg

SEQ ID NO: 127457 - DNA, 8 bp, Unknown
  misc_feature (1)..( 8): Result.003 file - promoters60/2991235
gtagagaa

SEQ ID NO: 127458 - DNA, 8 bp, Unknown
  misc_feature (1)..( 8): Result.003 file - promoters60/2991235
atagagaa

SEQ ID NO: 127459 - DNA, 7 bp, Unknown
  misc_feature (1)..( 7): Result.003 file - promoters60/2991235
acaggta

SEQ ID NO: 127460 - DNA, 7 bp, Unknown
  misc_feature (1)..( 7): Result.003 file - promoters60/2991235
acaggta

SEQ ID NO: 127461 - DNA, 7 bp, Unknown
  misc_feature (1)..( 7): Result.003 file - promoters60/2991235
tttccag

SEQ ID NO: 127462 - DNA, 7 bp, Unknown
  misc_feature (1)..( 7): Result.003 file - promoters60/2991235
ttttcag

SEQ ID NO: 127463 - DNA, 6 bp, Unknown
  misc_feature (1)..( 6): Result.003 file - promoters60/2991235
gattct

SEQ ID NO: 127464 - DNA, 6 bp, Unknown
  misc_feature (1)..( 6): Result.003 file - promoters60/2991235
gattct

SEQ ID NO: 127465 - DNA, 8 bp, Unknown
  misc_feature (1)..( 8): Result.003 file - promoters60/2991235
attgtaga

SEQ ID NO: 127466 - DNA, 8 bp, Unknown
  misc_feature (1)..( 8): Result.003 file - promoters60/2991235
attgcaga

SEQ ID NO: 127467 - DNA, 7 bp, Unknown
  misc_feature (1)..( 7): Result.003 file - promoters60/2991235
agactgg

SEQ ID NO: 127468 - DNA, 7 bp, Unknown
  misc_feature (1)..( 7): Result.003 file - promoters60/2991235
agaatgg

SEQ ID NO: 127469 - DNA, 9 bp, Unknown
  misc_feature (1)..( 9): Result.003 file - promoters60/2991235
gactctact

SEQ ID NO: 127470 - DNA, 9 bp, Unknown
  misc_feature (1)..( 9): Result.003 file - promoters60/2991235
gactttact

SEQ ID NO: 127471 - DNA, 6 bp, Unknown
  misc_feature (1)..( 6): Result.003 file - promoters60/2991235
aaagaa

SEQ ID NO: 127472 - DNA, 6 bp, Unknown
  misc_feature (1)..( 6): Result.003 file - promoters60/2991235
aaagaa

SEQ ID NO: 127473 - DNA, 8 bp, Unknown
  misc_feature (1)..( 8): Result.003 file - promoters60/2991235
aaggagaa

SEQ ID NO: 127474 - DNA, 8 bp, Unknown
  misc_feature (1)..( 8): Result.003 file - promoters60/2991235
aagaagaa

SEQ ID NO: 127475 - DNA, 6 bp, Unknown
  misc_feature (1)..( 6): Result.003 file - promoters60/2991235
caaaag

SEQ ID NO: 127476 - DNA, 6 bp, Unknown
  misc_feature (1)..( 6): Result.003 file - promoters60/2991235
caaaag

SEQ ID NO: 127477 - DNA, 6 bp, Unknown
  misc_feature (1)..( 6): Result.003 file - promoters60/2991235
ttgaag

SEQ ID NO: 127478 - DNA, 6 bp, Unknown
  misc_feature (1)..( 6): Result.003 file - promoters60/2991235
ttgaag

SEQ ID NO: 127479 - DNA, 7 bp, Unknown
  misc_feature (1)..( 7): Result.003 file - promoters60/2991235
ctctatt

SEQ ID NO: 127480 - DNA, 7 bp, Unknown
  misc_feature (1)..( 7): Result.003 file - promoters60/2991235
ctccatt

SEQ ID NO: 127481 - DNA, 10 bp, Unknown
  misc_feature (1)..( 10): Result.003 file - promoters60/2991239
ttaaaaaaaa

SEQ ID NO: 127482 - DNA, 10 bp, Unknown
  misc_feature (1)..( 10): Result.003 file - promoters60/2991239
caaaacaaaa

SEQ ID NO: 127483 - DNA, 10 bp, Unknown
  misc_feature (1)..( 10): Result.003 file - promoters60/2991239
acaaaaaaaa

SEQ ID NO: 127484 - DNA, 10 bp, Unknown
  misc_feature (1)..( 10): Result.003 file - promoters60/2991239
ttaaaaaagg

SEQ ID NO: 127485 - DNA, 9 bp, Unknown
  misc_feature (1)..( 9): Result.003 file - promoters60/2991239
ctaatctaa

SEQ ID NO: 127486 - DNA, 9 bp, Unknown
  misc_feature (1)..( 9): Result.003 file - promoters60/2991239
ctagtctca

SEQ ID NO: 127487 - DNA, 9 bp, Unknown
  misc_feature (1)..( 9): Result.003 file - promoters60/2991239
ataatataa

SEQ ID NO: 127488 - DNA, 10 bp, Unknown
  misc_feature (1)..( 10): Result.003 file - promoters60/2991239
aaaaatgctc

SEQ ID NO: 127489 - DNA, 10 bp, Unknown
  misc_feature (1)..( 10): Result.003 file - promoters60/2991239
aaaaatgcaa

SEQ ID NO: 127490 - DNA, 10 bp, Unknown
  misc_feature (1)..( 10): Result.003 file - promoters60/2991239
gtaaatacaa

SEQ ID NO: 127491 - DNA, 8 bp, Unknown
  misc_feature (1)..( 8): Result.003 file - promoters60/2991239
aaatatag

SEQ ID NO: 127492 - DNA, 8 bp, Unknown
  misc_feature (1)..( 8): Result.003 file - promoters60/2991239
aaatattt

SEQ ID NO: 127493 - DNA, 8 bp, Unknown
  misc_feature (1)..( 8): Result.003 file - promoters60/2991239
taatttag

SEQ ID NO: 127494 - DNA, 34 bp, Unknown; identical to SEQ ID NO: 76977
  misc_feature (1)..( 34): Result.003 file - promoters60/2991239

SEQ ID NO: 127495 - DNA, 34 bp, Unknown; identical to SEQ ID NO: 104971
  misc_feature (1)..( 34): Result.003 file - promoters60/2991239

SEQ ID NO: 127496 - DNA, 34 bp, Unknown; identical to SEQ ID NO: 104972
  misc_feature (1)..( 34): Result.003 file - promoters60/2991239

SEQ ID NO: 127497 - DNA, 34 bp, Unknown; identical to SEQ ID NO: 76979
  misc_feature (1)..( 34): Result.003 file - promoters60/2991239

SEQ ID NO: 127498 - DNA, 14 bp, Unknown
  misc_feature (1)..( 14): Result.003 file - promoters60/2991239
attatatatgtgat

SEQ ID NO: 127499 - DNA, 14 bp, Unknown
  misc_feature (1)..( 14): Result.003 file - promoters60/2991239
tcaataaatggaaa

SEQ ID NO: 127500 - DNA, 14 bp, Unknown
  misc_feature (1)..( 14): Result.003 file - promoters60/2991239
agccaaaatggaaa

SEQ ID NO: 127501 - DNA, 14 bp, Unknown
  misc_feature (1)..( 14): Result.003 file - promoters60/2991239
tcattaaaaatcaa

SEQ ID NO: 127502 - DNA, 34 bp, Unknown; identical to SEQ ID NO: 76977
  misc_feature (1)..( 34): Result.003 file - promoters60/2991239

SEQ ID NO: 127503 - DNA, 34 bp, Unknown; identical to SEQ ID NO: 76981
  misc_feature (1)..( 34): Result.003 file - promoters60/2991239

SEQ ID NO: 127504 - DNA, 34 bp, Unknown; identical to SEQ ID NO: 76979
  misc_feature (1)..( 34): Result.003 file - promoters60/2991239

SEQ ID NO: 127505 - DNA, 9 bp, Unknown
  misc_feature (1)..( 9): Result.003 file - promoters60/2991239
taattacag

SEQ ID NO: 127506 - DNA, 9 bp, Unknown
  misc_feature (1)..( 9): Result.003 file - promoters60/2991239
taaatacaa

SEQ ID NO: 127507 - DNA, 9 bp, Unknown
  misc_feature (1)..( 9): Result.003 file - promoters60/2991239
aaaatgcaa

SEQ ID NO: 127508 - DNA, 8 bp, Unknown
  misc_feature (1)..( 8): Result.003 file - promoters60/2991239
gaatccaa

SEQ ID NO: 127509 - DNA, 8 bp, Unknown
  misc_feature (1)..( 8): Result.003 file - promoters60/2991239
taatacaa

SEQ ID NO: 127510 - DNA, 8 bp, Unknown
  misc_feature (1)..( 8): Result.003 file - promoters60/2991239
taaaacac

SEQ ID NO: 127511 - DNA, 15 bp, Unknown
  misc_feature (1)..( 15): Result.003 file - promoters60/2991239
attgaagacttttca

SEQ ID NO: 127512 - DNA, 15 bp, Unknown
  misc_feature (1)..( 15): Result.003 file - promoters60/2991239
attgaagacttttca

SEQ ID NO: 127513 - DNA, 15 bp, Unknown
  misc_feature (1)..( 15): Result.003 file - promoters60/2991239
gtagaagaccatata

SEQ ID NO: 127514 - DNA, 13 bp, Unknown
  misc_feature (1)..( 13): Result.003 file - promoters60/2991239
ctataagctttaa

SEQ ID NO: 127515 - DNA, 13 bp, Unknown
  misc_feature (1)..( 13): Result.003 file - promoters60/2991239
ctataagctttta

SEQ ID NO: 127516 - DNA, 14 bp, Unknown
  misc_feature (1)..( 14): Result.003 file - promoters60/2991239
aagacagcatttaa

SEQ ID NO: 127517 - DNA, 29 bp, Unknown
  misc_feature (1)..( 29): Result.003 file - promoters60/2991239
aagctttaagtctatcgctagactgtcca

SEQ ID NO: 127518 - DNA, 29 bp, Unknown
  misc_feature (1)..( 29): Result.003 file - promoters60/2991239
agcttttaagtctctcgctagactgtcca

SEQ ID NO: 127519 - DNA, 29 bp, Unknown
  misc_feature (1)..( 29): Result.003 file - promoters60/2991239
agcatttaatgatgataacgatttggaag

SEQ ID NO: 127520 - DNA, 12 bp, Unknown
  misc_feature (1)..( 12): Result.003 file - promoters60/2991239
ctttctaataaa

SEQ ID NO: 127521 - DNA, 12 bp, Unknown
  misc_feature (1)..( 12): Result.003 file - promoters60/2991239
ctttcaaataaa

SEQ ID NO: 127522 - DNA, 12 bp, Unknown
  misc_feature (1)..( 12): Result.003 file - promoters60/2991239
tcataaaataag

SEQ ID NO: 127523 - DNA, 9 bp, Unknown
  misc_feature (1)..( 9): Result.003 file - promoters60/2991281
atttgagag

SEQ ID NO: 127524 - DNA, 9 bp, Unknown
  misc_feature (1)..( 9): Result.003 file - promoters60/2991281
ttttgagtg

SEQ ID NO: 127525 - DNA, 9 bp, Unknown
  misc_feature (1)..( 9): Result.003 file - promoters60/2991281
atttgaaat

SEQ ID NO: 127526 - DNA, 9 bp, Unknown
  misc_feature (1)..( 9): Result.003 file - promoters60/2991281
acttgggag

SEQ ID NO: 127527 - DNA, 9 bp, Unknown
  misc_feature (1)..( 9): Result.003 file - promoters60/2991281
atttgagcc

SEQ ID NO: 127528 - DNA, 9 bp, Unknown
  misc_feature (1)..( 9): Result.003 file - promoters60/2991281
atttgattc

SEQ ID NO: 127529 - DNA, 9 bp, Unknown
  misc_feature (1)..( 9): Result.003 file - promoters60/2991281
gttttagag

SEQ ID NO: 127530 - DNA, 9 bp, Unknown
  misc_feature (1)..( 9): Result.003 file - promoters60/2991281
ataaaaatt

SEQ ID NO: 127531 - DNA, 9 bp, Unknown
  misc_feature (1)..( 9): Result.003 file - promoters60/2991281
taaaatatt

SEQ ID NO: 127532 - DNA, 9 bp, Unknown
  misc_feature (1)..( 9): Result.003 file - promoters60/2991281
accaatatt

SEQ ID NO: 127533 - DNA, 10 bp, Unknown
  misc_feature (1)..( 10): Result.003 file - promoters60/2991281
aaaaactata

SEQ ID NO: 127534 - DNA, 10 bp, Unknown
  misc_feature (1)..( 10): Result.003 file - promoters60/2991281
aaaagctaat

SEQ ID NO: 127535 - DNA, 10 bp, Unknown
  misc_feature (1)..( 10): Result.003 file - promoters60/2991281
taaagcttca

SEQ ID NO: 127536 - DNA, 9 bp, Unknown
  misc_feature (1)..( 9): Result.003 file - promoters60/2991281
gtgaaattc

SEQ ID NO: 127537 - DNA, 9 bp, Unknown
  misc_feature (1)..( 9): Result.003 file - promoters60/2991281
atgaaatgt

SEQ ID NO: 127538 - DNA, 9 bp, Unknown
  misc_feature (1)..( 9): Result.003 file - promoters60/2991281
ctgaaattt

SEQ ID NO: 127539 - DNA, 9 bp, Unknown
  misc_feature (1)..( 9): Result.003 file - promoters60/2991281
atgaaatca

SEQ ID NO: 127540 - DNA, 9 bp, Unknown
  misc_feature (1)..( 9): Result.003 file - promoters60/2991281
ttgatattt

SEQ ID NO: 127541 - DNA, 9 bp, Unknown
  misc_feature (1)..( 9): Result.003 file - promoters60/2991281
ctgcaattg

SEQ ID NO: 127542 - DNA, 6 bp, Unknown
  misc_feature (1)..( 6): Result.003 file - promoters60/2991333
ctaaat

SEQ ID NO: 127543 - DNA, 6 bp, Unknown
  misc_feature (1)..( 6): Result.003 file - promoters60/2991333
ctaaat

SEQ ID NO: 127544 - DNA, 7 bp, Unknown
  misc_feature (1)..( 7): Result.003 file - promoters60/2991333
aatcaag

SEQ ID NO: 127545 - DNA, 7 bp, Unknown
  misc_feature (1)..( 7): Result.003 file - promoters60/2991333
aataaag

SEQ ID NO: 127546 - DNA, 7 bp, Unknown
  misc_feature (1)..( 7): Result.003 file - promoters60/2991333
aataaat

SEQ ID NO: 127547 - DNA, 6 bp, Unknown
  misc_feature (1)..( 6): Result.003 file - promoters60/2991333
tgaaaa

SEQ ID NO: 127548 - DNA, 6 bp, Unknown
  misc_feature (1)..( 6): Result.003 file - promoters60/2991333
tgaaaa

SEQ ID NO: 127549 - DNA, 6 bp, Unknown
  misc_feature (1)..( 6): Result.003 file - promoters60/2991333
attaag

SEQ ID NO: 127550 - DNA, 6 bp, Unknown
  misc_feature (1)..( 6): Result.003 file - promoters60/2991333
attaag

SEQ ID NO: 127551 - DNA, 6 bp, Unknown
  misc_feature (1)..( 6): Result.003 file - promoters60/2991333
aaaatg

SEQ ID NO: 127552 - DNA, 6 bp, Unknown
  misc_feature (1)..( 6): Result.003 file - promoters60/2991333
aaaatg

SEQ ID NO: 127553 - DNA, 7 bp, Unknown
  misc_feature (1)..( 7): Result.003 file - promoters60/2991333
ttcttct

SEQ ID NO: 127554 - DNA, 7 bp, Unknown
  misc_feature (1)..( 7): Result.003 file - promoters60/2991333
ttcctct

SEQ ID NO: 127555 - DNA, 6 bp, Unknown
  misc_feature (1)..( 6): Result.003 file - promoters60/2991333
tcaaat

SEQ ID NO: 127556 - DNA, 6 bp, Unknown
  misc_feature (1)..( 6): Result.003 file - promoters60/2991333
tcaaat

SEQ ID NO: 127557 - DNA, 7 bp, Unknown
  misc_feature (1)..( 7): Result.003 file - promoters60/2991333
aacgaat

SEQ ID NO: 127558 - DNA, 7 bp, Unknown
  misc_feature (1)..( 7): Result.003 file - promoters60/2991333
aactaat

SEQ ID NO: 127559 - DNA, 8 bp, Unknown
  misc_feature (1)..( 8): Result.003 file - promoters60/2991333
aaaagaaa

SEQ ID NO: 127560 - DNA, 8 bp, Unknown
  misc_feature (1)..( 8): Result.003 file - promoters60/2991333
aaaataaa

SEQ ID NO: 127561 - DNA, 8 bp, Unknown
  misc_feature (1)..( 8): Result.003 file - promoters60/2991333
gtaataaa

SEQ ID NO: 127562 - DNA, 7 bp, Unknown
  misc_feature (1)..( 7): Result.003 file - promoters60/2991333
gaaaaaa

SEQ ID NO: 127563 - DNA, 7 bp, Unknown
  misc_feature (1)..( 7): Result.003 file - promoters60/2991333
gaaaaaa

SEQ ID NO: 127564 - DNA, 7 bp, Unknown
  misc_feature (1)..( 7): Result.003 file - promoters60/2991333
accacac

SEQ ID NO: 127565 - DNA, 7 bp, Unknown
  misc_feature (1)..( 7): Result.003 file - promoters60/2991333
accacac

SEQ ID NO: 127566 - DNA, 6 bp, Unknown
  misc_feature (1)..( 6): Result.003 file - promoters60/2991333
aaacac

SEQ ID NO: 127567 - DNA, 6 bp, Unknown
  misc_feature (1)..( 6): Result.003 file - promoters60/2991333
aaacac

SEQ ID NO: 127568 - DNA, 6 bp, Unknown
  misc_feature (1)..( 6): Result.003 file - promoters60/2991333
cttctc

SEQ ID NO: 127569 - DNA, 6 bp, Unknown
  misc_feature (1)..( 6): Result.003 file - promoters60/2991333
cttctc

SEQ ID NO: 127570 - DNA, 8 bp, Unknown
  misc_feature (1)..( 8): Result.003 file - promoters60/2991333
tctccaaa

SEQ ID NO: 127571 - DNA, 8 bp, Unknown
  misc_feature (1)..( 8): Result.003 file - promoters60/2991333
tctccaaa

SEQ ID NO: 127572 - DNA, 8 bp, Unknown
  misc_feature (1)..( 8): Result.003 file - promoters60/2991333
attgaaga

SEQ ID NO: 127573 - DNA, 8 bp, Unknown
  misc_feature (1)..( 8): Result.003 file - promoters60/2991333
attaaaga

SEQ ID NO: 127574 - DNA, 6 bp, Unknown
  misc_feature (1)..( 6): Result.003 file - promoters60/2991333
aaattt

SEQ ID NO: 127575 - DNA, 6 bp, Unknown
  misc_feature (1)..( 6): Result.003 file - promoters60/2991333
aaattt

SEQ ID NO: 127576 - DNA, 6 bp, Unknown
  misc_feature (1)..( 6): Result.003 file - promoters60/2991333
aaggat

SEQ ID NO: 127577 - DNA, 6 bp, Unknown
  misc_feature (1)..( 6): Result.003 file - promoters60/2991333
aaggat

SEQ ID NO: 127578 - DNA, 10 bp, Unknown
  misc_feature (1)..( 10): Result.003 file - promoters60/2991466
atactaattg

SEQ ID NO: 127579 - DNA, 10 bp, Unknown
  misc_feature (1)..( 10): Result.003 file - promoters60/2991466
atactatttg

SEQ ID NO: 127580 - DNA, 10 bp, Unknown
  misc_feature (1)..( 10): Result.003 file - promoters60/2991466
ttcaatgtag

SEQ ID NO: 127581 - DNA, 10 bp, Unknown
  misc_feature (1)..( 10): Result.003 file - promoters60/2991466
ttcaatttta

SEQ ID NO: 127582 - DNA, 10 bp, Unknown
  misc_feature (1)..( 10): Result.003 file - promoters60/2991466
atcattttta

SEQ ID NO: 127583 - DNA, 7 bp, Unknown
  misc_feature (1)..( 7): Result.003 file - promoters60/2991466
caatgta

SEQ ID NO: 127584 - DNA, 7 bp, Unknown
  misc_feature (1)..( 7): Result.003 file - promoters60/2991466
caaagta

SEQ ID NO: 127585 - DNA, 7 bp, Unknown
  misc_feature (1)..( 7): Result.003 file - promoters60/2991466
ttgccac

SEQ ID NO: 127586 - DNA, 7 bp, Unknown
  misc_feature (1)..( 7): Result.003 file - promoters60/2991466
ttgtcac

SEQ ID NO: 127587 - DNA, 10 bp, Unknown
  misc_feature (1)..( 10): Result.003 file - promoters60/2991466
atttttcaaa

SEQ ID NO: 127588 - DNA, 10 bp, Unknown
  misc_feature (1)..( 10): Result.003 file - promoters60/2991466
atttttggaa

SEQ ID NO: 127589 - DNA, 10 bp, Unknown
  misc_feature (1)..( 10): Result.003 file - promoters60/2991466
attattcaaa

SEQ ID NO: 127590 - DNA, 6 bp, Unknown
  misc_feature (1)..( 6): Result.003 file - promoters60/2991466
caaaac

SEQ ID NO: 127591 - DNA, 6 bp, Unknown
  misc_feature (1)..( 6): Result.003 file - promoters60/2991466
caaaac

SEQ ID NO: 127592 - DNA, 7 bp, Unknown
  misc_feature (1)..( 7): Result.003 file - promoters60/2991466
aatgatc

SEQ ID NO: 127593 - DNA, 7 bp, Unknown
  misc_feature (1)..( 7): Result.003 file - promoters60/2991466
aattatc

SEQ ID NO: 127594 - DNA, 7 bp, Unknown
  misc_feature (1)..( 7): Result.003 file - promoters60/2991466
aatcttg

SEQ ID NO: 127595 - DNA, 7 bp, Unknown
  misc_feature (1)..( 7): Result.003 file - promoters60/2991466
aattttg

SEQ ID NO: 127596 - DNA, 8 bp, Unknown
  misc_feature (1)..( 8): Result.003 file - promoters60/2991466
acaaagaa

SEQ ID NO: 127597 - DNA, 8 bp, Unknown
  misc_feature (1)..( 8): Result.003 file - promoters60/2991466
acagagaa

SEQ ID NO: 127598 - DNA, 6 bp, Unknown
  misc_feature (1)..( 6): Result.003 file - promoters60/2991466
aaaaaa

SEQ ID NO: 127599 - DNA, 6 bp, Unknown
  misc_feature (1)..( 6): Result.003 file - promoters60/2991466
aaaaaa

SEQ ID NO: 127600 - DNA, 6 bp, Unknown
  misc_feature (1)..( 6): Result.003 file - promoters60/2991466
aaaaat

SEQ ID NO: 127601 - DNA, 7 bp, Unknown
  misc_feature (1)..( 7): Result.003 file - promoters60/2991466
tactccc

SEQ ID NO: 127602 - DNA, 7 bp, Unknown
  misc_feature (1)..( 7): Result.003 file - promoters60/2991466
tacaccc

SEQ ID NO: 127603 - DNA, 9 bp, Unknown
  misc_feature (1)..( 9): Result.003 file - promoters60/2991466
tcattatta

SEQ ID NO: 127604 - DNA, 9 bp, Unknown
  misc_feature (1)..( 9): Result.003 file - promoters60/2991466
tcattttta

SEQ ID NO: 127605 - DNA, 9 bp, Unknown
  misc_feature (1)..( 9): Result.003 file - promoters60/2991466
tcaatttta

SEQ ID NO: 127606 - DNA, 6 bp, Unknown
  misc_feature (1)..( 6): Result.003 file - promoters60/2991466
agaaaa

SEQ ID NO: 127607 - DNA, 6 bp, Unknown
  misc_feature (1)..( 6): Result.003 file - promoters60/2991466
agaaaa

SEQ ID NO: 127608 - DNA, 9 bp, Unknown
  misc_feature (1)..( 9): Result.003 file - promoters60/2991466
agaactaat

SEQ ID NO: 127609 - DNA, 9 bp, Unknown
  misc_feature (1)..( 9): Result.003 file - promoters60/2991466
agaacaaat

SEQ ID NO: 127610 - DNA, 7 bp, Unknown
  misc_feature (1)..( 7): Result.003 file - promoters60/2991466
ttatatt

SEQ ID NO: 127611 - DNA, 7 bp, Unknown
  misc_feature (1)..( 7): Result.003 file - promoters60/2991466
ttagatt

SEQ ID NO: 127612 - DNA, 6 bp, Unknown
  misc_feature (1)..( 6): Result.003 file - promoters60/2991466
aaccaa

SEQ ID NO: 127613 - DNA, 6 bp, Unknown
  misc_feature (1)..( 6): Result.003 file - promoters60/2991466
aaccaa

SEQ ID NO: 127614 - DNA, 7 bp, Unknown
  misc_feature (1)..( 7): Result.003 file - promoters60/2991466
atagtac

SEQ ID NO: 127615 - DNA, 7 bp, Unknown
  misc_feature (1)..( 7): Result.003 file - promoters60/2991466
ataatac

SEQ ID NO: 127616 - DNA, 9 bp, Unknown
  misc_feature (1)..( 9): Result.003 file - promoters60/2991466
gaaacaaat

SEQ ID NO: 127617 - DNA, 9 bp, Unknown
  misc_feature (1)..( 9): Result.003 file - promoters60/2991466
aaaataaat

SEQ ID NO: 127618 - DNA, 9 bp, Unknown
  misc_feature (1)..( 9): Result.003 file - promoters60/2991466
taactaaca

SEQ ID NO: 127619 - DNA, 7 bp, Unknown
  misc_feature (1)..( 7): Result.003 file - promoters60/2991466
aaaaaga

SEQ ID NO: 127620 - DNA, 7 bp, Unknown
  misc_feature (1)..( 7): Result.003 file - promoters60/2991466
aaaaaga

SEQ ID NO: 127621 - DNA, 6 bp, Unknown
  misc_feature (1)..( 6): Result.003 file - promoters60/2991466
tgaatt

SEQ ID NO: 127622 - DNA, 6 bp, Unknown
  misc_feature (1)..( 6): Result.003 file - promoters60/2991466
tgaatt

SEQ ID NO: 127623 - DNA, 6 bp, Unknown
  misc_feature (1)..( 6): Result.003 file - promoters60/2991466
aaaaat

SEQ ID NO: 127624 - DNA, 6 bp, Unknown
  misc_feature (1)..( 6): Result.003 file - promoters60/2991466
aaaaat

SEQ ID NO: 127625 - DNA, 12 bp, Unknown
  misc_feature (1)..( 12): Result.003 file - promoters60/2991489
acaatgggctgg

SEQ ID NO: 127626 - DNA, 12 bp, Unknown
  misc_feature (1)..( 12): Result.003 file - promoters60/2991489
caaatgggccta

SEQ ID NO: 127627 - DNA, 12 bp, Unknown
  misc_feature (1)..( 12): Result.003 file - promoters60/2991489
gaaataggccca

SEQ ID NO: 127628 - DNA, 12 bp, Unknown
  misc_feature (1)..( 12): Result.003 file - promoters60/2991489
taaaaaggccca

SEQ ID NO: 127629 - DNA, 12 bp, Unknown
  misc_feature (1)..( 12): Result.003 file - promoters60/2991489
taaaaaatatct

SEQ ID NO: 127630 - DNA, 12 bp, Unknown
  misc_feature (1)..( 12): Result.003 file - promoters60/2991489
cctaaaggccca

SEQ ID NO: 127631 - DNA, 7 bp, Unknown
  misc_feature (1)..( 7): Result.003 file - promoters60/2991507
aaattta

SEQ ID NO: 127632 - DNA, 7 bp, Unknown
  misc_feature (1)..( 7): Result.003 file - promoters60/2991507
aaagtta

SEQ ID NO: 127633 - DNA, 7 bp, Unknown
  misc_feature (1)..( 7): Result.003 file - promoters60/2991507
tcaatat

SEQ ID NO: 127634 - DNA, 7 bp, Unknown
  misc_feature (1)..( 7): Result.003 file - promoters60/2991507
tcattat

SEQ ID NO: 127635 - DNA, 8 bp, Unknown
  misc_feature (1)..( 8): Result.003 file - promoters60/2991507
tcattttt

SEQ ID NO: 127636 - DNA, 8 bp, Unknown
  misc_feature (1)..( 8): Result.003 file - promoters60/2991507
tcattttt

SEQ ID NO: 127637 - DNA, 8 bp, Unknown
  misc_feature (1)..( 8): Result.003 file - promoters60/2991507
tgttttta

SEQ ID NO: 127638 - DNA, 8 bp, Unknown
  misc_feature (1)..( 8): Result.003 file - promoters60/2991507
tgtttttt

SEQ ID NO: 127639 - DNA, 9 bp, Unknown
  misc_feature (1)..( 9): Result.003 file - promoters60/2991507
gatttatta

SEQ ID NO: 127640 - DNA, 14 bp, Unknown
  misc_feature (1)..( 14): Result.003 file - promoters60/2991507
atcaactaattttc

SEQ ID NO: 127641 - DNA, 14 bp, Unknown
  misc_feature (1)..( 14): Result.003 file - promoters60/2991507
ttttactaactttc

SEQ ID NO: 127642 - DNA, 14 bp, Unknown
  misc_feature (1)..( 14): Result.003 file - promoters60/2991507
ttttaataacagga

SEQ ID NO: 127643 - DNA, 7 bp, Unknown
  misc_feature (1)..( 7): Result.003 file - promoters60/2991507
taaaatt

SEQ ID NO: 127644 - DNA, 7 bp, Unknown
  misc_feature (1)..( 7): Result.003 file - promoters60/2991507
taaaatc

SEQ ID NO: 127645 - DNA, 7 bp, Unknown
  misc_feature (1)..( 7): Result.003 file - promoters60/2991507
caaaatc

SEQ ID NO: 127646 - DNA, 6 bp, Unknown
  misc_feature (1)..( 6): Result.003 file - promoters60/2991507
tagtta

SEQ ID NO: 127647 - DNA, 6 bp, Unknown
  misc_feature (1)..( 6): Result.003 file - promoters60/2991507
tagtta

SEQ ID NO: 127648 - DNA, 7 bp, Unknown
  misc_feature (1)..( 7): Result.003 file - promoters60/2991507
tttcaca

SEQ ID NO: 127649 - DNA, 7 bp, Unknown
  misc_feature (1)..( 7): Result.003 file - promoters60/2991507
ttttaca

SEQ ID NO: 127650 - DNA, 7 bp, Unknown
  misc_feature (1)..( 7): Result.003 file - promoters60/2991507
tttcact

SEQ ID NO: 127651 - DNA, 7 bp, Unknown
  misc_feature (1)..( 7): Result.003 file - promoters60/2991507
attttgg

SEQ ID NO: 127652 - DNA, 7 bp, Unknown
  misc_feature (1)..( 7): Result.003 file - promoters60/2991507
attgtgg

SEQ ID NO: 127653 - DNA, 7 bp, Unknown
  misc_feature (1)..( 7): Result.003 file - promoters60/2991507
tttaatc

SEQ ID NO: 127654 - DNA, 7 bp, Unknown
  misc_feature (1)..( 7): Result.003 file - promoters60/2991507
tttaatc

SEQ ID NO: 127655 - DNA, 8 bp, Unknown
  misc_feature (1)..( 8): Result.003 file - promoters60/2991507
acttgata

SEQ ID NO: 127656 - DNA, 8 bp, Unknown
  misc_feature (1)..( 8): Result.003 file - promoters60/2991507
acttcata

SEQ ID NO: 127657 - DNA, 7 bp, Unknown
  misc_feature (1)..( 7): Result.003 file - promoters60/2991507
gatcgag

SEQ ID NO: 127658 - DNA, 7 bp, Unknown
  misc_feature (1)..( 7): Result.003 file - promoters60/2991507
gatcgat

SEQ ID NO: 127659 - DNA, 7 bp, Unknown
  misc_feature (1)..( 7): Result.003 file - promoters60/2991507
gatggat

SEQ ID NO: 127660 - DNA, 6 bp, Unknown
  misc_feature (1)..( 6): Result.003 file - promoters60/2991507
tgataa

SEQ ID NO: 127661 - DNA, 6 bp, Unknown
  misc_feature (1)..( 6): Result.003 file - promoters60/2991507
tgataa

SEQ ID NO: 127662 - DNA, 10 bp, Unknown
  misc_feature (1)..( 10): Result.003 file - promoters60/2991507
gcgatgaatg

SEQ ID NO: 127663 - DNA, 10 bp, Unknown
  misc_feature (1)..( 10): Result.003 file - promoters60/2991507
gcggtgaatg

SEQ ID NO: 127664 - DNA, 7 bp, Unknown
  misc_feature (1)..( 7): Result.003 file - promoters60/2991507
ttatgtc

SEQ ID NO: 127665 - DNA, 7 bp, Unknown
  misc_feature (1)..( 7): Result.003 file - promoters60/2991507
ttatgtc

SEQ ID NO: 127666 - DNA, 7 bp, Unknown
  misc_feature (1)..( 7): Result.003 file - promoters60/2991507
attggta

SEQ ID NO: 127667 - DNA, 7 bp, Unknown
  misc_feature (1)..( 7): Result.003 file - promoters60/2991507
attagta

SEQ ID NO: 127668 - DNA, 7 bp, Unknown
  misc_feature (1)..( 7): Result.003 file - promoters60/2991507
gattcag

SEQ ID NO: 127669 - DNA, 7 bp, Unknown
  misc_feature (1)..( 7): Result.003 file - promoters60/2991507
gattcag

SEQ ID NO: 127670 - DNA, 11 bp, Unknown
  misc_feature (1)..( 11): Result.003 file - promoters60/2991515
atgttttgttg

SEQ ID NO: 127671 - DNA, 11 bp, Unknown
  misc_feature (1)..( 11): Result.003 file - promoters60/2991515
ctttttttttg

SEQ ID NO: 127672 - DNA, 12 bp, Unknown
  misc_feature (1)..( 12): Result.003 file - promoters60/2991515
tctttttatttg

SEQ ID NO: 127673 - DNA, 8 bp, Unknown
  misc_feature (1)..( 8): Result.003 file - promoters60/2991515
ttttttgt

SEQ ID NO: 127674 - DNA, 8 bp, Unknown
  misc_feature (1)..( 8): Result.003 file - promoters60/2991515
ccttttgt

SEQ ID NO: 127675 - DNA, 8 bp, Unknown
  misc_feature (1)..( 8): Result.003 file - promoters60/2991515
ttttttgc

SEQ ID NO: 127676 - DNA, 8 bp, Unknown
  misc_feature (1)..( 8): Result.003 file - promoters60/2991515
gtttatgc

SEQ ID NO: 127677 - DNA, 7 bp, Unknown
  misc_feature (1)..( 7): Result.003 file - promoters60/2991515
tttaatt

SEQ ID NO: 127678 - DNA, 7 bp, Unknown
  misc_feature (1)..( 7): Result.003 file - promoters60/2991515
tttaata

SEQ ID NO: 127679 - DNA, 7 bp, Unknown
  misc_feature (1)..( 7): Result.003 file - promoters60/2991515
tttgata

SEQ ID NO: 127680 - DNA, 8 bp, Unknown
  misc_feature (1)..( 8): Result.003 file - promoters60/2991515
gaaacatt

SEQ ID NO: 127681 - DNA, 8 bp, Unknown
  misc_feature (1)..( 8): Result.003 file - promoters60/2991515
caaaaatt

SEQ ID NO: 127682 - DNA, 8 bp, Unknown
  misc_feature (1)..( 8): Result.003 file - promoters60/2991515
gaatcata

SEQ ID NO: 127683 - DNA, 11 bp, Unknown
  misc_feature (1)..( 11): Result.003 file - promoters60/2991515
aataaaaaact

SEQ ID NO: 127684 - DNA, 11 bp, Unknown
  misc_feature (1)..( 11): Result.003 file - promoters60/2991515
aattaaaagaa

SEQ ID NO: 127685 - DNA, 11 bp, Unknown
  misc_feature (1)..( 11): Result.003 file - promoters60/2991515
aattaaatact

SEQ ID NO: 127686 - DNA, 9 bp, Unknown
  misc_feature (1)..( 9): Result.003 file - promoters60/2991515
tcatgttct

SEQ ID NO: 127687 - DNA, 9 bp, Unknown
  misc_feature (1)..( 9): Result.003 file - promoters60/2991515
tcaagttcg

SEQ ID NO: 127688 - DNA, 9 bp, Unknown
  misc_feature (1)..( 9): Result.003 file - promoters60/2991515
tcttgttct

SEQ ID NO: 127689 - DNA, 8 bp, Unknown
  misc_feature (1)..( 8): Result.003 file - promoters60/2991515
tatagttt

SEQ ID NO: 127690 - DNA, 8 bp, Unknown
  misc_feature (1)..( 8): Result.003 file - promoters60/2991515
tatggttt

SEQ ID NO: 127691 - DNA, 8 bp, Unknown
  misc_feature (1)..( 8): Result.003 file - promoters60/2991515
aatggttg

SEQ ID NO: 127692 - DNA, 7 bp, Unknown
  misc_feature (1)..( 7): Result.003 file - promoters60/2991515
aaacagt

SEQ ID NO: 127693 - DNA, 7 bp, Unknown
  misc_feature (1)..( 7): Result.003 file - promoters60/2991515
aaaaagt

SEQ ID NO: 127694 - DNA, 7 bp, Unknown
  misc_feature (1)..( 7): Result.003 file - promoters60/2991515
aaacagt

SEQ ID NO: 127695 - DNA, 9 bp, Unknown
  misc_feature (1)..( 9): Result.003 file - promoters60/2991515
aaattaatt

SEQ ID NO: 127696 - DNA, 9 bp, Unknown
  misc_feature (1)..( 9): Result.003 file - promoters60/2991515
aaattcatt

SEQ ID NO: 127697 - DNA, 9 bp, Unknown
  misc_feature (1)..( 9): Result.003 file - promoters60/2991515
aaattcata

SEQ ID NO: 127698 - DNA, 10 bp, Unknown
  misc_feature (1)..( 10): Result.003 file - promoters60/2991774
taatgataat

SEQ ID NO: 127699 - DNA, 10 bp, Unknown
  misc_feature (1)..( 10): Result.003 file - promoters60/2991774
aaattataag

SEQ ID NO: 127700 - DNA, 10 bp, Unknown
  misc_feature (1)..( 10): Result.003 file - promoters60/2991774
cccggataat

SEQ ID NO: 127701 - DNA, 10 bp, Unknown
  misc_feature (1)..( 10): Result.003 file - promoters60/2991774
aaactatata

SEQ ID NO: 127702 - DNA, 10 bp, Unknown
  misc_feature (1)..( 10): Result.003 file - promoters60/2991774
aaattaaaaa

SEQ ID NO: 127703 - DNA, 6 bp, Unknown
  misc_feature (1)..( 6): Result.003 file - promoters60/2992000
ttctaa

SEQ ID NO: 127704 - DNA, 6 bp, Unknown
  misc_feature (1)..( 6): Result.003 file - promoters60/2992000
ttctaa

SEQ ID NO: 127705 - DNA, 9 bp, Unknown
  misc_feature (1)..( 9): Result.003 file - promoters60/2992000
atttgaaag

SEQ ID NO: 127706 - DNA, 9 bp, Unknown
  misc_feature (1)..( 9): Result.003 file - promoters60/2992000
attggaaag

SEQ ID NO: 127707 - DNA, 6 bp, Unknown
  misc_feature (1)..( 6): Result.003 file - promoters60/2992000
aataat

SEQ ID NO: 127708 - DNA, 6 bp, Unknown
  misc_feature (1)..( 6): Result.003 file - promoters60/2992000
aataat

SEQ ID NO: 127709 - DNA, 7 bp, Unknown
  misc_feature (1)..( 7): Result.003 file - promoters60/2992000
cccaaaa

SEQ ID NO: 127710 - DNA, 7 bp, Unknown
  misc_feature (1)..( 7): Result.003 file - promoters60/2992000
cccaaaa

SEQ ID NO: 127711 - DNA, 6 bp, Unknown
  misc_feature (1)..( 6): Result.003 file - promoters60/2992000
aatcat

SEQ ID NO: 127712 - DNA, 6 bp, Unknown
  misc_feature (1)..( 6): Result.003 file - promoters60/2992000
aatcat

SEQ ID NO: 127713 - DNA, 10 bp, Unknown
  misc_feature (1)..( 10): Result.003 file - promoters60/2992000
tatgatatat

SEQ ID NO: 127714 - DNA, 10 bp, Unknown
  misc_feature (1)..( 10): Result.003 file - promoters60/2992000
tattatatat

SEQ ID NO: 127715 - DNA, 6 bp, Unknown
  misc_feature (1)..( 6): Result.003 file - promoters60/2992000
aaatta

SEQ ID NO: 127716 - DNA, 6 bp, Unknown
  misc_feature (1)..( 6): Result.003 file - promoters60/2992000
aaatta

SEQ ID NO: 127717 - DNA, 7 bp, Unknown
  misc_feature (1)..( 7): Result.003 file - promoters60/2992000
attacaa

SEQ ID NO: 127718 - DNA, 7 bp, Unknown
  misc_feature (1)..( 7): Result.003 file - promoters60/2992000
atttcaa

SEQ ID NO: 127719 - DNA, 7 bp, Unknown
  misc_feature (1)..( 7): Result.003 file - promoters60/2992000
tatcact

SEQ ID NO: 127720 - DNA, 7 bp, Unknown
  misc_feature (1)..( 7): Result.003 file - promoters60/2992000
tattact

SEQ ID NO: 127721 - DNA, 6 bp, Unknown
  misc_feature (1)..( 6): Result.003 file - promoters60/2992101
ttccca

SEQ ID NO: 127722 - DNA, 6 bp, Unknown
  misc_feature (1)..( 6): Result.003 file - promoters60/2992101
ttccca

SEQ ID NO: 127723 - DNA, 8 bp, Unknown
  misc_feature (1)..( 8): Result.003 file - promoters60/2992101
ccgtatct

SEQ ID NO: 127724 - DNA, 8 bp, Unknown
  misc_feature (1)..( 8): Result.003 file - promoters60/2992101
ccgtttct

SEQ ID NO: 127725 - DNA, 9 bp, Unknown
  misc_feature (1)..( 9): Result.003 file - promoters60/2992101
cttcatatg

SEQ ID NO: 127726 - DNA, 9 bp, Unknown
  misc_feature (1)..( 9): Result.003 file - promoters60/2992101
tttcttatg

SEQ ID NO: 127727 - DNA, 10 bp, Unknown
  misc_feature (1)..( 10): Result.003 file - promoters60/2992101
tttacttctg

SEQ ID NO: 127728 - DNA, 6 bp, Unknown
  misc_feature (1)..( 6): Result.003 file - promoters60/2992101
tcaaac

SEQ ID NO: 127729 - DNA, 6 bp, Unknown
  misc_feature (1)..( 6): Result.003 file - promoters60/2992101
tcaaac

SEQ ID NO: 127730 - DNA, 9 bp, Unknown
  misc_feature (1)..( 9): Result.003 file - promoters60/2992101
ttagggttt

SEQ ID NO: 127731 - DNA, 9 bp, Unknown
  misc_feature (1)..( 9): Result.003 file - promoters60/2992101
ttaggattt

SEQ ID NO: 127732 - DNA, 7 bp, Unknown
  misc_feature (1)..( 7): Result.003 file - promoters60/2992101
tgaattg

SEQ ID NO: 127733 - DNA, 7 bp, Unknown
  misc_feature (1)..( 7): Result.003 file - promoters60/2992101
tgagttg

SEQ ID NO: 127734 - DNA, 6 bp, Unknown
  misc_feature (1)..( 6): Result.003 file - promoters60/2992101
aaaaaa

SEQ ID NO: 127735 - DNA, 6 bp, Unknown
  misc_feature (1)..( 6): Result.003 file - promoters60/2992101
aaaaaa

SEQ ID NO: 127736 - DNA, 6 bp, Unknown
  misc_feature (1)..( 6): Result.003 file - promoters60/2992101
ttgact

SEQ ID NO: 127737 - DNA, 6 bp, Unknown
  misc_feature (1)..( 6): Result.003 file - promoters60/2992101
ttgact

SEQ ID NO: 127738 - DNA, 8 bp, Unknown
  misc_feature (1)..( 8): Result.003 file - promoters60/2992101
tctcttct

SEQ ID NO: 127739 - DNA, 8 bp, Unknown
  misc_feature (1)..( 8): Result.003 file - promoters60/2992101
tcttttct

SEQ ID NO: 127740 - DNA, 8 bp, Unknown
  misc_feature (1)..( 8): Result.003 file - promoters60/2992101
gcttatct

SEQ ID NO: 127741 - DNA, 7 bp, Unknown
  misc_feature (1)..( 7): Result.003 file - promoters60/2992101
tggattt

SEQ ID NO: 127742 - DNA, 7 bp, Unknown
  misc_feature (1)..( 7): Result.003 file - promoters60/2992101
tggattt

SEQ ID NO: 127743 - DNA, 7 bp, Unknown
  misc_feature (1)..( 7): Result.003 file - promoters60/2992101
ttgctta

SEQ ID NO: 127744 - DNA, 7 bp, Unknown
  misc_feature (1)..( 7): Result.003 file - promoters60/2992101
ttgatta

SEQ ID NO: 127745 - DNA, 6 bp, Unknown
  misc_feature (1)..( 6): Result.003 file - promoters60/2992101
ttagtc

SEQ ID NO: 127746 - DNA, 6 bp, Unknown
  misc_feature (1)..( 6): Result.003 file - promoters60/2992101
ttagtc

SEQ ID NO: 127747 - DNA, 6 bp, Unknown
  misc_feature (1)..( 6): Result.003 file - promoters60/2992101
gatgtg

SEQ ID NO: 127748 - DNA, 6 bp, Unknown
  misc_feature (1)..( 6): Result.003 file - promoters60/2992101
gatgtg

SEQ ID NO: 127749 - DNA, 7 bp, Unknown
  misc_feature (1)..( 7): Result.003 file - promoters60/2992101
caaaaaa

SEQ ID NO: 127750 - DNA, 7 bp, Unknown
  misc_feature (1)..( 7): Result.003 file - promoters60/2992101
caaaaaa

SEQ ID NO: 127751 - DNA, 11 bp, Unknown
  misc_feature (1)..( 11): Result.003 file - promoters60/2992247
gacaaagatat

SEQ ID NO: 127752 - DNA, 11 bp, Unknown
  misc_feature (1)..( 11): Result.003 file - promoters60/2992247
agcttagatat

SEQ ID NO: 127753 - DNA, 11 bp, Unknown
  misc_feature (1)..( 11): Result.003 file - promoters60/2992247
ctgaaacatat

SEQ ID NO: 127754 - DNA, 11 bp, Unknown
  misc_feature (1)..( 11): Result.003 file - promoters60/2992247
cttaaatattt

SEQ ID NO: 127755 - DNA, 10 bp, Unknown
  misc_feature (1)..( 10): Result.003 file - promoters60/2992247
aaatccaaaa

SEQ ID NO: 127756 - DNA, 10 bp, Unknown
  misc_feature (1)..( 10): Result.003 file - promoters60/2992247
aaatcaaaaa

SEQ ID NO: 127757 - DNA, 11 bp, Unknown
  misc_feature (1)..( 11): Result.003 file - promoters60/2992247
gtgatcaaatc

SEQ ID NO: 127758 - DNA, 11 bp, Unknown
  misc_feature (1)..( 11): Result.003 file - promoters60/2992247
aaagtcacaag

SEQ ID NO: 127759 - DNA, 17 bp, Unknown
  misc_feature (1)..( 17): Result.003 file - promoters60/2992281
gtacaatgggctgggcc

SEQ ID NO: 127760 - DNA, 17 bp, Unknown
  misc_feature (1)..( 17): Result.003 file - promoters60/2992281
tacaaatgggcctaatt

SEQ ID NO: 127761 - DNA, 17 bp, Unknown
  misc_feature (1)..( 17): Result.003 file - promoters60/2992281
cttaaatgggccaatat

SEQ ID NO: 127762 - DNA, 17 bp, Unknown
  misc_feature (1)..( 17): Result.003 file - promoters60/2992281
ttttaatgggccgaatt

SEQ ID NO: 127763 - DNA, 17 bp, Unknown
  misc_feature (1)..( 17): Result.003 file - promoters60/2992281
gcccaatagtggaagtc

SEQ ID NO: 127764 - DNA, 10 bp, Unknown
  misc_feature (1)..( 10): Result.003 file - promoters60/2992349
tttcttaaac

SEQ ID NO: 127765 - DNA, 10 bp, Unknown
  misc_feature (1)..( 10): Result.003 file - promoters60/2992349
ccccttaaaa

SEQ ID NO: 127766 - DNA, 10 bp, Unknown
  misc_feature (1)..( 10): Result.003 file - promoters60/2992349
cttctgaaac

SEQ ID NO: 127767 - DNA, 10 bp, Unknown
  misc_feature (1)..( 10): Result.003 file - promoters60/2992349
cttcagaaag

SEQ ID NO: 127768 - DNA, 11 bp, Unknown
  misc_feature (1)..( 11): Result.003 file - promoters60/2992349
cattatatata

SEQ ID NO: 127769 - DNA, 11 bp, Unknown
  misc_feature (1)..( 11): Result.003 file - promoters60/2992349
tattaaatacg

SEQ ID NO: 127770 - DNA, 11 bp, Unknown
  misc_feature (1)..( 11): Result.003 file - promoters60/2992349
tataaaaagtt

SEQ ID NO: 127771 - DNA, 11 bp, Unknown
  misc_feature (1)..( 11): Result.003 file - promoters60/2992349
cattatataaa

SEQ ID NO: 127772 - DNA, 9 bp, Unknown
  misc_feature (1)..( 9): Result.003 file - promoters60/2992349
aacaaaaaa

SEQ ID NO: 127773 - DNA, 9 bp, Unknown
  misc_feature (1)..( 9): Result.003 file - promoters60/2992349
aactaaagt

SEQ ID NO: 127774 - DNA, 9 bp, Unknown
  misc_feature (1)..( 9): Result.003 file - promoters60/2992349
aactaaaaa

SEQ ID NO: 127775 - DNA, 9 bp, Unknown
  misc_feature (1)..( 9): Result.003 file - promoters60/2992349
aacaaaacc

SEQ ID NO: 127776 - DNA, 6 bp, Unknown
  misc_feature (1)..( 6): Result.003 file - promoters60/2992373
ttcaaa

SEQ ID NO: 127777 - DNA, 6 bp, Unknown
  misc_feature (1)..( 6): Result.003 file - promoters60/2992373
ttcaaa

SEQ ID NO: 127778 - DNA, 6 bp, Unknown
  misc_feature (1)..( 6): Result.003 file - promoters60/2992373
ggtgtt

SEQ ID NO: 127779 - DNA, 6 bp, Unknown
  misc_feature (1)..( 6): Result.003 file - promoters60/2992373
ggtgtt

SEQ ID NO: 127780 - DNA, 8 bp, Unknown
  misc_feature (1)..( 8): Result.003 file - promoters60/2992373
acccccta

SEQ ID NO: 127781 - DNA, 8 bp, Unknown
  misc_feature (1)..( 8): Result.003 file - promoters60/2992373
acccgcta

SEQ ID NO: 127782 - DNA, 6 bp, Unknown
  misc_feature (1)..( 6): Result.003 file - promoters60/2992373
atccga

SEQ ID NO: 127783 - DNA, 6 bp, Unknown
  misc_feature (1)..( 6): Result.003 file - promoters60/2992373
atccga

SEQ ID NO: 127784 - DNA, 8 bp, Unknown
  misc_feature (1)..( 8): Result.003 file - promoters60/2992373
ttgggctg

SEQ ID NO: 127785 - DNA, 8 bp, Unknown
  misc_feature (1)..( 8): Result.003 file - promoters60/2992373
ttgggctg

SEQ ID NO: 127786 - DNA, 8 bp, Unknown
  misc_feature (1)..( 8): Result.003 file - promoters60/2992373
cattcgga

SEQ ID NO: 127787 - DNA, 8 bp, Unknown
  misc_feature (1)..( 8): Result.003 file - promoters60/2992373
catttgga

SEQ ID NO: 127788 - DNA, 7 bp, Unknown
  misc_feature (1)..( 7): Result.003 file - promoters60/2992373
accttaa

SEQ ID NO: 127789 - DNA, 7 bp, Unknown
  misc_feature (1)..( 7): Result.003 file - promoters60/2992373
accataa

SEQ ID NO: 127790 - DNA, 7 bp, Unknown
  misc_feature (1)..( 7): Result.003 file - promoters60/2992373
caataaa

SEQ ID NO: 127791 - DNA, 7 bp, Unknown
  misc_feature (1)..( 7): Result.003 file - promoters60/2992373
caacaaa

SEQ ID NO: 127792 - DNA, 6 bp, Unknown
  misc_feature (1)..( 6): Result.003 file - promoters60/2992373
gaatgg

SEQ ID NO: 127793 - DNA, 6 bp, Unknown
  misc_feature (1)..( 6): Result.003 file - promoters60/2992373
gaatgg

SEQ ID NO: 127794 - DNA, 7 bp, Unknown
  misc_feature (1)..( 7): Result.003 file - promoters60/2992373
aaatgaa

SEQ ID NO: 127795 - DNA, 7 bp, Unknown
  misc_feature (1)..( 7): Result.003 file - promoters60/2992373
aaaggaa

SEQ ID NO: 127796 - DNA, 6 bp, Unknown
  misc_feature (1)..( 6): Result.003 file - promoters60/2992373
tgtttt

SEQ ID NO: 127797 - DNA, 6 bp, Unknown
  misc_feature (1)..( 6): Result.003 file - promoters60/2992373
tgtttt

SEQ ID NO: 127798 - DNA, 6 bp, Unknown
  misc_feature (1)..( 6): Result.003 file - promoters60/2992373
ttttga

SEQ ID NO: 127799 - DNA, 6 bp, Unknown
  misc_feature (1)..( 6): Result.003 file - promoters60/2992373
ttttga

SEQ ID NO: 127800 - DNA, 10 bp, Unknown
  misc_feature (1)..( 10): Result.003 file - promoters60/2992373
tttaatgaag

SEQ ID NO: 127801 - DNA, 10 bp, Unknown
  misc_feature (1)..( 10): Result.003 file - promoters60/2992373
tttaaggaag

SEQ ID NO: 127802 - DNA, 7 bp, Unknown
  misc_feature (1)..( 7): Result.003 file - promoters60/2992373
gatgtat

SEQ ID NO: 127803 - DNA, 7 bp, Unknown
  misc_feature (1)..( 7): Result.003 file - promoters60/2992373
gatctat

SEQ ID NO: 127804 - DNA, 10 bp, Unknown
  misc_feature (1)..( 10): Result.003 file - promoters60/2992373
caaggtaaat

SEQ ID NO: 127805 - DNA, 10 bp, Unknown
  misc_feature (1)..( 10): Result.003 file - promoters60/2992373
caaggtaaat

SEQ ID NO: 127806 - DNA, 6 bp, Unknown
  misc_feature (1)..( 6): Result.003 file - promoters60/2992373
tcttaa

SEQ ID NO: 127807 - DNA, 6 bp, Unknown
  misc_feature (1)..( 6): Result.003 file - promoters60/2992373
tcttaa

SEQ ID NO: 127808 - DNA, 8 bp, Unknown
  misc_feature (1)..( 8): Result.003 file - promoters60/2992373
actctaaa

SEQ ID NO: 127809 - DNA, 8 bp, Unknown
  misc_feature (1)..( 8): Result.003 file - promoters60/2992373
actctaaa

SEQ ID NO: 127810 - DNA, 10 bp, Unknown
  misc_feature (1)..( 10): Result.003 file - promoters60/2992722
aaaagatagc

SEQ ID NO: 127811 - DNA, 10 bp, Unknown
  misc_feature (1)..( 10): Result.003 file - promoters60/2992722
gaaatatata

SEQ ID NO: 127812 - DNA, 10 bp, Unknown
  misc_feature (1)..( 10): Result.003 file - promoters60/2992722
gaaatagatt

SEQ ID NO: 127813 - DNA, 10 bp, Unknown
  misc_feature (1)..( 10): Result.003 file - promoters60/2992722
ttagtagatt

SEQ ID NO: 127814 - DNA, 10 bp, Unknown
  misc_feature (1)..( 10): Result.003 file - promoters60/2992722
ttaatttatt

SEQ ID NO: 127815 - DNA, 10 bp, Unknown
  misc_feature (1)..( 10): Result.003 file - promoters60/2992722
tgattacttt

SEQ ID NO: 127816 - DNA, 16 bp, Unknown
  misc_feature (1)..( 16): Result.003 file - promoters60/2993642
tcataagaatttgaaa

SEQ ID NO: 127817 - DNA, 16 bp, Unknown
  misc_feature (1)..( 16): Result.003 file - promoters60/2993642
tatcgtctatttaaaa

SEQ ID NO: 127818 - DNA, 16 bp, Unknown
  misc_feature (1)..( 16): Result.003 file - promoters60/2993642
aataaagtatttaaac

SEQ ID NO: 127819 - DNA, 16 bp, Unknown
  misc_feature (1)..( 16): Result.003 file - promoters60/2993642
acaaaaaaattgaaac

SEQ ID NO: 127820 - DNA, 16 bp, Unknown
  misc_feature (1)..( 16): Result.003 file - promoters60/2993642
aataaaatatttaaat

SEQ ID NO: 127821 - DNA, 16 bp, Unknown
  misc_feature (1)..( 16): Result.003 file - promoters60/2993642
aaaaaactattggggt

SEQ ID NO: 127822 - DNA, 16 bp, Unknown
  misc_feature (1)..( 16): Result.003 file - promoters60/2993642
agaaaaagattgtgtt

SEQ ID NO: 127823 - DNA, 15 bp, Unknown
  misc_feature (1)..( 15): Result.003 file - promoters60/2993642
tttatatatttttaa

SEQ ID NO: 127824 - DNA, 15 bp, Unknown
  misc_feature (1)..( 15): Result.003 file - promoters60/2993642
aactaggattcttac

SEQ ID NO: 127825 - DNA, 15 bp, Unknown
  misc_feature (1)..( 15): Result.003 file - promoters60/2993642
tttatatattttgtc

SEQ ID NO: 127826 - DNA, 15 bp, Unknown
  misc_feature (1)..( 15): Result.003 file - promoters60/2993642
ttataggatttttct

SEQ ID NO: 127827 - DNA, 15 bp, Unknown
  misc_feature (1)..( 15): Result.003 file - promoters60/2993642
aagagagattctttg

SEQ ID NO: 127828 - DNA, 15 bp, Unknown
  misc_feature (1)..( 15): Result.003 file - promoters60/2993642
aaagatcattcgtac

SEQ ID NO: 127829 - DNA, 15 bp, Unknown
  misc_feature (1)..( 15): Result.003 file - promoters60/2993642
aatctttgttctttt

SEQ ID NO: 127830 - DNA, 9 bp, Unknown
  misc_feature (1)..( 9): Result.003 file - promoters60/2993705
ttacgaaag

SEQ ID NO: 127831 - DNA, 9 bp, Unknown
  misc_feature (1)..( 9): Result.003 file - promoters60/2993705
ttacggaag

SEQ ID NO: 127832 - DNA, 7 bp, Unknown
  misc_feature (1)..( 7): Result.003 file - promoters60/2993705
acaaaga

SEQ ID NO: 127833 - DNA, 7 bp, Unknown
  misc_feature (1)..( 7): Result.003 file - promoters60/2993705
acagaga

SEQ ID NO: 127834 - DNA, 7 bp, Unknown
  misc_feature (1)..( 7): Result.003 file - promoters60/2993705
tatatat

SEQ ID NO: 127835 - DNA, 7 bp, Unknown
  misc_feature (1)..( 7): Result.003 file - promoters60/2993705
tatatat

SEQ ID NO: 127836 - DNA, 6 bp, Unknown
  misc_feature (1)..( 6): Result.003 file - promoters60/2993705
tcataa

SEQ ID NO: 127837 - DNA, 6 bp, Unknown
  misc_feature (1)..( 6): Result.003 file - promoters60/2993705
tcataa

SEQ ID NO: 127838 - DNA, 6 bp, Unknown
  misc_feature (1)..( 6): Result.003 file - promoters60/2993705
catttc

SEQ ID NO: 127839 - DNA, 6 bp, Unknown
  misc_feature (1)..( 6): Result.003 file - promoters60/2993705
catttc

SEQ ID NO: 127840 - DNA, 7 bp, Unknown
  misc_feature (1)..( 7): Result.003 file - promoters60/2993705
catatgt

SEQ ID NO: 127841 - DNA, 7 bp, Unknown
  misc_feature (1)..( 7): Result.003 file - promoters60/2993705
catatgt

SEQ ID NO: 127842 - DNA, 6 bp, Unknown
  misc_feature (1)..( 6): Result.003 file - promoters60/2993705
caagtc

SEQ ID NO: 127843 - DNA, 6 bp, Unknown
  misc_feature (1)..( 6): Result.003 file - promoters60/2993705
caagtc

SEQ ID NO: 127844 - DNA, 9 bp, Unknown
  misc_feature (1)..( 9): Result.003 file - promoters60/2993705
attaaatat

SEQ ID NO: 127845 - DNA, 9 bp, Unknown
  misc_feature (1)..( 9): Result.003 file - promoters60/2993705
attatatat

SEQ ID NO: 127846 - DNA, 7 bp, Unknown
  misc_feature (1)..( 7): Result.003 file - promoters60/2993705
gattcat

SEQ ID NO: 127847 - DNA, 7 bp, Unknown
  misc_feature (1)..( 7): Result.003 file - promoters60/2993705
gatacat

SEQ ID NO: 127848 - DNA, 8 bp, Unknown
  misc_feature (1)..( 8): Result.003 file - promoters60/2993705
gtcgctct

SEQ ID NO: 127849 - DNA, 8 bp, Unknown
  misc_feature (1)..( 8): Result.003 file - promoters60/2993705
gtcgatct

SEQ ID NO: 127850 - DNA, 6 bp, Unknown
  misc_feature (1)..( 6): Result.003 file - promoters60/2993705
taaact

SEQ ID NO: 127851 - DNA, 6 bp, Unknown
  misc_feature (1)..( 6): Result.003 file - promoters60/2993705
taaact

SEQ ID NO: 127852 - DNA, 8 bp, Unknown
  misc_feature (1)..( 8): Result.003 file - promoters60/2993705
aatggtgt

SEQ ID NO: 127853 - DNA, 8 bp, Unknown
  misc_feature (1)..( 8): Result.003 file - promoters60/2993705
aatgttgt

SEQ ID NO: 127854 - DNA, 6 bp, Unknown
  misc_feature (1)..( 6): Result.003 file - promoters60/2993705
aatgtt

SEQ ID NO: 127855 - DNA, 6 bp, Unknown
  misc_feature (1)..( 6): Result.003 file - promoters60/2993705
aatgtt

SEQ ID NO: 127856 - DNA, 7 bp, Unknown
  misc_feature (1)..( 7): Result.003 file - promoters60/2993705
tgttcat

SEQ ID NO: 127857 - DNA, 7 bp, Unknown
  misc_feature (1)..( 7): Result.003 file - promoters60/2993705
tgtacat

SEQ ID NO: 127858 - DNA, 6 bp, Unknown
  misc_feature (1)..( 6): Result.003 file - promoters60/2993705
tatgag

SEQ ID NO: 127859 - DNA, 6 bp, Unknown
  misc_feature (1)..( 6): Result.003 file - promoters60/2993705
tatgag

SEQ ID NO: 127860 - DNA, 8 bp, Unknown
  misc_feature (1)..( 8): Result.003 file - promoters60/2993705
gatgtttc

SEQ ID NO: 127861 - DNA, 8 bp, Unknown
  misc_feature (1)..( 8): Result.003 file - promoters60/2993705
gatgtttc

SEQ ID NO: 127862 - DNA, 10 bp, Unknown
  misc_feature (1)..( 10): Result.003 file - promoters60/2994916
tttttctaat

SEQ ID NO: 127863 - DNA, 10 bp, Unknown
  misc_feature (1)..( 10): Result.003 file - promoters60/2994916
tttctctaat

SEQ ID NO: 127864 - DNA, 18 bp, Unknown
  misc_feature (1)..( 18): Result.003 file - promoters60/2994916
agatattttttttaacaa

SEQ ID NO: 127865 - DNA, 18 bp, Unknown
  misc_feature (1)..( 18): Result.003 file - promoters60/2994916
agatattttgtttcacaa

SEQ ID NO: 127866 - DNA, 6 bp, Unknown
  misc_feature (1)..( 6): Result.003 file - promoters60/2994916
tctttt

SEQ ID NO: 127867 - DNA, 6 bp, Unknown
  misc_feature (1)..( 6): Result.003 file - promoters60/2994916
tctttt

SEQ ID NO: 127868 - DNA, 6 bp, Unknown
  misc_feature (1)..( 6): Result.003 file - promoters60/2994916
ttaact

SEQ ID NO: 127869 - DNA, 6 bp, Unknown
  misc_feature (1)..( 6): Result.003 file - promoters60/2994916
ttaact

SEQ ID NO: 127870 - DNA, 7 bp, Unknown
  misc_feature (1)..( 7): Result.003 file - promoters60/2994916
tgaattc

SEQ ID NO: 127871 - DNA, 7 bp, Unknown
  misc_feature (1)..( 7): Result.003 file - promoters60/2994916
tgaattc

SEQ ID NO: 127872 - DNA, 6 bp, Unknown
  misc_feature (1)..( 6): Result.003 file - promoters60/2994916
aaaaca

SEQ ID NO: 127873 - DNA, 6 bp, Unknown
  misc_feature (1)..( 6): Result.003 file - promoters60/2994916
aaaaca

SEQ ID NO: 127874 - DNA, 6 bp, Unknown
  misc_feature (1)..( 6): Result.003 file - promoters60/2994916
tcatca

SEQ ID NO: 127875 - DNA, 6 bp, Unknown
  misc_feature (1)..( 6): Result.003 file - promoters60/2994916
tcatca

SEQ ID NO: 127876 - DNA, 9 bp, Unknown
  misc_feature (1)..( 9): Result.003 file - promoters60/2994916
aggttccta

SEQ ID NO: 127877 - DNA, 9 bp, Unknown
  misc_feature (1)..( 9): Result.003 file - promoters60/2994916
aggttacta

SEQ ID NO: 127878 - DNA, 6 bp, Unknown
  misc_feature (1)..( 6): Result.003 file - promoters60/2994916
aacaaa

SEQ ID NO: 127879 - DNA, 6 bp, Unknown
  misc_feature (1)..( 6): Result.003 file - promoters60/2994916
aacaaa

SEQ ID NO: 127880 - DNA, 8 bp, Unknown
  misc_feature (1)..( 8): Result.003 file - promoters60/2994916
cggtcaag

SEQ ID NO: 127881 - DNA, 8 bp, Unknown
  misc_feature (1)..( 8): Result.003 file - promoters60/2994916
cggttaag

SEQ ID NO: 127882 - DNA, 6 bp, Unknown
  misc_feature (1)..( 6): Result.003 file - promoters60/2994916
aaacta

SEQ ID NO: 127883 - DNA, 6 bp, Unknown
  misc_feature (1)..( 6): Result.003 file - promoters60/2994916
aaacta

SEQ ID NO: 127884 - DNA, 6 bp, Unknown
  misc_feature (1)..( 6): Result.003 file - promoters60/2995898
tcgtcg

SEQ ID NO: 127885 - DNA, 6 bp, Unknown
  misc_feature (1)..( 6): Result.003 file - promoters60/2995898
tcgtcg

SEQ ID NO: 127886 - DNA, 7 bp, Unknown
  misc_feature (1)..( 7): Result.003 file - promoters60/2995898
agagaaa

SEQ ID NO: 127887 - DNA, 7 bp, Unknown
  misc_feature (1)..( 7): Result.003 file - promoters60/2995898
agagaaa

SEQ ID NO: 127888 - DNA, 7 bp, Unknown
  misc_feature (1)..( 7): Result.003 file - promoters60/2995898
agagaag

SEQ ID NO: 127889 - DNA, 7 bp, Unknown
  misc_feature (1)..( 7): Result.003 file - promoters60/2995898
aaattcg

SEQ ID NO: 127890 - DNA, 7 bp, Unknown
  misc_feature (1)..( 7): Result.003 file - promoters60/2995898
aaattcg

SEQ ID NO: 127891 - DNA, 11 bp, Unknown
  misc_feature (1)..( 11): Result.003 file - promoters60/2995898
cgccggcgatt

SEQ ID NO: 127892 - DNA, 11 bp, Unknown
  misc_feature (1)..( 11): Result.003 file - promoters60/2995898
cgccggagatt

SEQ ID NO: 127893 - DNA, 8 bp, Unknown
  misc_feature (1)..( 8): Result.003 file - promoters60/2995898
acgaagaa

SEQ ID NO: 127894 - DNA, 8 bp, Unknown
  misc_feature (1)..( 8): Result.003 file - promoters60/2995898
acgatgaa

SEQ ID NO: 127895 - DNA, 7 bp, Unknown
  misc_feature (1)..( 7): Result.003 file - promoters60/2995898
gtttgtg

SEQ ID NO: 127896 - DNA, 7 bp, Unknown
  misc_feature (1)..( 7): Result.003 file - promoters60/2995898
gttagtg

SEQ ID NO: 127897 - DNA, 8 bp, Unknown
  misc_feature (1)..( 8): Result.003 file - promoters60/2995898
gatagttt

SEQ ID NO: 127898 - DNA, 8 bp, Unknown
  misc_feature (1)..( 8): Result.003 file - promoters60/2995898
gataattt

SEQ ID NO: 127899 - DNA, 8 bp, Unknown
  misc_feature (1)..( 8): Result.003 file - promoters60/2995898
attaattt

SEQ ID NO: 127900 - DNA, 8 bp, Unknown
  misc_feature (1)..( 8): Result.003 file - promoters60/2995898
ttaaaaaa

SEQ ID NO: 127901 - DNA, 8 bp, Unknown
  misc_feature (1)..( 8): Result.003 file - promoters60/2995898
ttaacaaa

SEQ ID NO: 127902 - DNA, 6 bp, Unknown
  misc_feature (1)..( 6): Result.003 file - promoters60/2995898
gaaaat

SEQ ID NO: 127903 - DNA, 6 bp, Unknown
  misc_feature (1)..( 6): Result.003 file - promoters60/2995898
gaaaat

SEQ ID NO: 127904 - DNA, 7 bp, Unknown
  misc_feature (1)..( 7): Result.003 file - promoters60/2995898
gtgaaat

SEQ ID NO: 127905 - DNA, 7 bp, Unknown
  misc_feature (1)..( 7): Result.003 file - promoters60/2995898
gtgaaat

SEQ ID NO: 127906 - DNA, 6 bp, Unknown
  misc_feature (1)..( 6): Result.003 file - promoters60/2995898
gagtga

SEQ ID NO: 127907 - DNA, 6 bp, Unknown
  misc_feature (1)..( 6): Result.003 file - promoters60/2995898
gagtga

SEQ ID NO: 127908 - DNA, 6 bp, Unknown
  misc_feature (1)..( 6): Result.003 file - promoters60/2995898
ttttta

SEQ ID NO: 127909 - DNA, 6 bp, Unknown
  misc_feature (1)..( 6): Result.003 file - promoters60/2995898
ttttta

SEQ ID NO: 127910 - DNA, 6 bp, Unknown
  misc_feature (1)..( 6): Result.003 file - promoters60/2995898
attttt

SEQ ID NO: 127911 - DNA, 6 bp, Unknown
  misc_feature (1)..( 6): Result.003 file - promoters60/2995898
attttt

SEQ ID NO: 127912 - DNA, 8 bp, Unknown
  misc_feature (1)..( 8): Result.003 file - promoters60/2995898
aaatattt

SEQ ID NO: 127913 - DNA, 8 bp, Unknown
  misc_feature (1)..( 8): Result.003 file - promoters60/2995898
aaagattt

SEQ ID NO: 127914 - DNA, 6 bp, Unknown
  misc_feature (1)..( 6): Result.003 file - promoters60/2995898
atttac

SEQ ID NO: 127915 - DNA, 6 bp, Unknown
  misc_feature (1)..( 6): Result.003 file - promoters60/2995898
atttac

SEQ ID NO: 127916 - DNA, 7 bp, Unknown
  misc_feature (1)..( 7): Result.003 file - promoters60/2995898
caaagaa

SEQ ID NO: 127917 - DNA, 7 bp, Unknown
  misc_feature (1)..( 7): Result.003 file - promoters60/2995898
caaagaa

SEQ ID NO: 127918 - DNA, 6 bp, Unknown
  misc_feature (1)..( 6): Result.003 file - promoters60/2995898
tttcaa

SEQ ID NO: 127919 - DNA, 6 bp, Unknown
  misc_feature (1)..( 6): Result.003 file - promoters60/2995898
tttcaa

SEQ ID NO: 127920 - DNA, 7 bp, Unknown
  misc_feature (1)..( 7): Result.003 file - promoters60/2995898
taacgtt

SEQ ID NO: 127921 - DNA, 7 bp, Unknown
  misc_feature (1)..( 7): Result.003 file - promoters60/2995898
taatgtt

SEQ ID NO: 127922 - DNA, 6 bp, Unknown
  misc_feature (1)..( 6): Result.003 file - promoters60/2995898
cttctt

SEQ ID NO: 127923 - DNA, 6 bp, Unknown
  misc_feature (1)..( 6): Result.003 file - promoters60/2995898
cttctt

SEQ ID NO: 127924 - DNA, 7 bp, Unknown
  misc_feature (1)..( 7): Result.003 file - promoters60/2995898
agattgt

SEQ ID NO: 127925 - DNA, 7 bp, Unknown
  misc_feature (1)..( 7): Result.003 file - promoters60/2995898
agattgt

SEQ ID NO: 127926 - DNA, 7 bp, Unknown
  misc_feature (1)..( 7): Result.003 file - promoters60/2995898
atataat

SEQ ID NO: 127927 - DNA, 7 bp, Unknown
  misc_feature (1)..( 7): Result.003 file - promoters60/2995898
atataat

SEQ ID NO: 127928 - DNA, 7 bp, Unknown
  misc_feature (1)..( 7): Result.003 file - promoters60/2995898
tccaaaa

SEQ ID NO: 127929 - DNA, 7 bp, Unknown
  misc_feature (1)..( 7): Result.003 file - promoters60/2995898
tccaaaa

SEQ ID NO: 127930 - DNA, 6 bp, Unknown
  misc_feature (1)..( 6): Result.003 file - promoters60/2995898
aaaatt

SEQ ID NO: 127931 - DNA, 6 bp, Unknown
  misc_feature (1)..( 6): Result.003 file - promoters60/2995898
aaaatt

SEQ ID NO: 127932 - DNA, 6 bp, Unknown
  misc_feature (1)..( 6): Result.003 file - promoters60/2995898
ggtatt

SEQ ID NO: 127933 - DNA, 6 bp, Unknown
  misc_feature (1)..( 6): Result.003 file - promoters60/2995898
ggtatt

SEQ ID NO: 127934 - DNA, 11 bp, Unknown
  misc_feature (1)..( 11): Result.003 file - promoters60/2995898
tttaagttttt

SEQ ID NO: 127935 - DNA, 11 bp, Unknown
  misc_feature (1)..( 11): Result.003 file - promoters60/2995898
tttaacttttt

SEQ ID NO: 127936 - DNA, 10 bp, Unknown
  misc_feature (1)..( 10): Result.003 file - promoters60/2995898
tttttaagtg

SEQ ID NO: 127937 - DNA, 10 bp, Unknown
  misc_feature (1)..( 10): Result.003 file - promoters60/2995898
tttttcagtg

SEQ ID NO: 127938 - DNA, 6 bp, Unknown
  misc_feature (1)..( 6): Result.003 file - promoters60/2995898
agaata

SEQ ID NO: 127939 - DNA, 6 bp, Unknown
  misc_feature (1)..( 6): Result.003 file - promoters60/2995898
agaata

SEQ ID NO: 127940 - DNA, 7 bp, Unknown
  misc_feature (1)..( 7): Result.003 file - promoters60/2996054
acaaaaa

SEQ ID NO: 127941 - DNA, 7 bp, Unknown
  misc_feature (1)..( 7): Result.003 file - promoters60/2996054
acaaaaa

SEQ ID NO: 127942 - DNA, 7 bp, Unknown
  misc_feature (1)..( 7): Result.003 file - promoters60/2996054
tcaaaaa

SEQ ID NO: 127943 - DNA, 10 bp, Unknown
  misc_feature (1)..( 10): Result.003 file - promoters60/2996054
tgttttcact

SEQ ID NO: 127944 - DNA, 10 bp, Unknown
  misc_feature (1)..( 10): Result.003 file - promoters60/2996054
taattttact

SEQ ID NO: 127945 - DNA, 10 bp, Unknown
  misc_feature (1)..( 10): Result.003 file - promoters60/2996054
tgtattcacc

SEQ ID NO: 127946 - DNA, 9 bp, Unknown
  misc_feature (1)..( 9): Result.003 file - promoters60/2996054
aactcttta

SEQ ID NO: 127947 - DNA, 9 bp, Unknown
  misc_feature (1)..( 9): Result.003 file - promoters60/2996054
aactttttt

SEQ ID NO: 127948 - DNA, 10 bp, Unknown
  misc_feature (1)..( 10): Result.003 file - promoters60/2996054
tgttttatta

SEQ ID NO: 127949 - DNA, 7 bp, Unknown
  misc_feature (1)..( 7): Result.003 file - promoters60/2996054
tttattg

SEQ ID NO: 127950 - DNA, 7 bp, Unknown
  misc_feature (1)..( 7): Result.003 file - promoters60/2996054
tttatta

SEQ ID NO: 127951 - DNA, 7 bp, Unknown
  misc_feature (1)..( 7): Result.003 file - promoters60/2996054
tttttta

SEQ ID NO: 127952 - DNA, 9 bp, Unknown
  misc_feature (1)..( 9): Result.003 file - promoters60/2996054
ctgtcatta

SEQ ID NO: 127953 - DNA, 9 bp, Unknown
  misc_feature (1)..( 9): Result.003 file - promoters60/2996054
ctgtcaaag

SEQ ID NO: 127954 - DNA, 9 bp, Unknown
  misc_feature (1)..( 9): Result.003 file - promoters60/2996054
ttgtctaag

SEQ ID NO: 127955 - DNA, 6 bp, Unknown
  misc_feature (1)..( 6): Result.003 file - promoters60/2996080
gtgaga

SEQ ID NO: 127956 - DNA, 6 bp, Unknown
  misc_feature (1)..( 6): Result.003 file - promoters60/2996080
gtgaga

SEQ ID NO: 127957 - DNA, 8 bp, Unknown
  misc_feature (1)..( 8): Result.003 file - promoters60/2996080
ctgtctat

SEQ ID NO: 127958 - DNA, 8 bp, Unknown
  misc_feature (1)..( 8): Result.003 file - promoters60/2996080
ctggctat

SEQ ID NO: 127959 - DNA, 7 bp, Unknown
  misc_feature (1)..( 7): Result.003 file - promoters60/2996080
tttcgag

SEQ ID NO: 127960 - DNA, 7 bp, Unknown
  misc_feature (1)..( 7): Result.003 file - promoters60/2996080
tttggag

SEQ ID NO: 127961 - DNA, 6 bp, Unknown
  misc_feature (1)..( 6): Result.003 file - promoters60/2996080
tgcttt

SEQ ID NO: 127962 - DNA, 6 bp, Unknown
  misc_feature (1)..( 6): Result.003 file - promoters60/2996080
tgcttt

SEQ ID NO: 127963 - DNA, 6 bp, Unknown
  misc_feature (1)..( 6): Result.003 file - promoters60/2996080
tttatt

SEQ ID NO: 127964 - DNA, 6 bp, Unknown
  misc_feature (1)..( 6): Result.003 file - promoters60/2996080
tttatt

SEQ ID NO: 127965 - DNA, 6 bp, Unknown
  misc_feature (1)..( 6): Result.003 file - promoters60/2996080
caacaa

SEQ ID NO: 127966 - DNA, 6 bp, Unknown
  misc_feature (1)..( 6): Result.003 file - promoters60/2996080
caacaa

SEQ ID NO: 127967 - DNA, 6 bp, Unknown
  misc_feature (1)..( 6): Result.003 file - promoters60/2996080
gaaaca

SEQ ID NO: 127968 - DNA, 6 bp, Unknown
  misc_feature (1)..( 6): Result.003 file - promoters60/2996080
gaaaca

SEQ ID NO: 127969 - DNA, 8 bp, Unknown
  misc_feature (1)..( 8): Result.003 file - promoters60/2996080
aaaataag

SEQ ID NO: 127970 - DNA, 8 bp, Unknown
  misc_feature (1)..( 8): Result.003 file - promoters60/2996080
aaattaag

SEQ ID NO: 127971 - DNA, 6 bp, Unknown
  misc_feature (1)..( 6): Result.003 file - promoters60/2996080
tttgat

SEQ ID NO: 127972 - DNA, 6 bp, Unknown
  misc_feature (1)..( 6): Result.003 file - promoters60/2996080
tttgat

SEQ ID NO: 127973 - DNA, 6 bp, Unknown
  misc_feature (1)..( 6): Result.003 file - promoters60/2996080
ggtgga

SEQ ID NO: 127974 - DNA, 6 bp, Unknown
  misc_feature (1)..( 6): Result.003 file - promoters60/2996080
ggtgga

SEQ ID NO: 127975 - DNA, 8 bp, Unknown
  misc_feature (1)..( 8): Result.003 file - promoters60/2996080
cttcaggt

SEQ ID NO: 127976 - DNA, 8 bp, Unknown
  misc_feature (1)..( 8): Result.003 file - promoters60/2996080
ctttaggt

SEQ ID NO: 127977 - DNA, 7 bp, Unknown
  misc_feature (1)..( 7): Result.003 file - promoters60/2996080
gacgacg

SEQ ID NO: 127978 - DNA, 7 bp, Unknown
  misc_feature (1)..( 7): Result.003 file - promoters60/2996080
gacgacg

SEQ ID NO: 127979 - DNA, 7 bp, Unknown
  misc_feature (1)..( 7): Result.003 file - promoters60/2996080
tatcatc

SEQ ID NO: 127980 - DNA, 7 bp, Unknown
  misc_feature (1)..( 7): Result.003 file - promoters60/2996080
tattatc

SEQ ID NO: 127981 - DNA, 8 bp, Unknown
  misc_feature (1)..( 8): Result.003 file - promoters60/2996080
ctcaaaaa

SEQ ID NO: 127982 - DNA, 8 bp, Unknown
  misc_feature (1)..( 8): Result.003 file - promoters60/2996080
ctcagaaa

SEQ ID NO: 127983 - DNA, 8 bp, Unknown
  misc_feature (1)..( 8): Result.003 file - promoters60/2996109
attttttt

SEQ ID NO: 127984 - DNA, 8 bp, Unknown
  misc_feature (1)..( 8): Result.003 file - promoters60/2996109
attatttg

SEQ ID NO: 127985 - DNA, 8 bp, Unknown
  misc_feature (1)..( 8): Result.003 file - promoters60/2996109
attgtttt

SEQ ID NO: 127986 - DNA, 13 bp, Unknown
  misc_feature (1)..( 13): Result.003 file - promoters60/2996109
taattaaacataa

SEQ ID NO: 127987 - DNA, 13 bp, Unknown
  misc_feature (1)..( 13): Result.003 file - promoters60/2996109
taattatgttttg

SEQ ID NO: 127988 - DNA, 13 bp, Unknown
  misc_feature (1)..( 13): Result.003 file - promoters60/2996109
caattaaaaaagg

SEQ ID NO: 127989 - DNA, 13 bp, Unknown
  misc_feature (1)..( 13): Result.003 file - promoters60/2996109
taataaaatataa

SEQ ID NO: 127990 - DNA, 13 bp, Unknown
  misc_feature (1)..( 13): Result.003 file - promoters60/2996109
taattaaacataa

SEQ ID NO: 127991 - DNA, 13 bp, Unknown
  misc_feature (1)..( 13): Result.003 file - promoters60/2996109
gcttccaacttaa

SEQ ID NO: 127992 - DNA, 13 bp, Unknown
  misc_feature (1)..( 13): Result.003 file - promoters60/2996109
taataaaatataa

SEQ ID NO: 127993 - DNA, 7 bp, Unknown
  misc_feature (1)..( 7): Result.003 file - promoters60/2996109
aaacatc

SEQ ID NO: 127994 - DNA, 7 bp, Unknown
  misc_feature (1)..( 7): Result.003 file - promoters60/2996109
aaacatt

SEQ ID NO: 127995 - DNA, 7 bp, Unknown
  misc_feature (1)..( 7): Result.003 file - promoters60/2996109
taacatc

SEQ ID NO: 127996 - DNA, 8 bp, Unknown
  misc_feature (1)..( 8): Result.003 file - promoters60/2996109
ttttctat

SEQ ID NO: 127997 - DNA, 8 bp, Unknown
  misc_feature (1)..( 8): Result.003 file - promoters60/2996109
ttttgtat

SEQ ID NO: 127998 - DNA, 8 bp, Unknown
  misc_feature (1)..( 8): Result.003 file - promoters60/2996109
atttgtaa

SEQ ID NO: 127999 - DNA, 13 bp, Unknown
  misc_feature (1)..( 13): Result.003 file - promoters60/2996109
aacaatcaaatgt

SEQ ID NO: 128000 - DNA, 13 bp, Unknown
  misc_feature (1)..( 13): Result.003 file - promoters60/2996109
tcaggtcaaatcc

SEQ ID NO: 128001 - DNA, 13 bp, Unknown
  misc_feature (1)..( 13): Result.003 file - promoters60/2996109
aacagtcaaaaaa

SEQ ID NO: 128002 - DNA, 13 bp, Unknown
  misc_feature (1)..( 13): Result.003 file - promoters60/2996109
aaatctcaaaaaa

SEQ ID NO: 128003 - DNA, 8 bp, Unknown
  misc_feature (1)..( 8): Result.003 file - promoters60/2996109
aatatacc

SEQ ID NO: 128004 - DNA, 8 bp, Unknown
  misc_feature (1)..( 8): Result.003 file - promoters60/2996109
aatatata

SEQ ID NO: 128005 - DNA, 8 bp, Unknown
  misc_feature (1)..( 8): Result.003 file - promoters60/2996109
catagata

SEQ ID NO: 128006 - DNA, 7 bp, Unknown
  misc_feature (1)..( 7): Result.003 file - promoters60/2996109
tataata

SEQ ID NO: 128007 - DNA, 7 bp, Unknown
  misc_feature (1)..( 7): Result.003 file - promoters60/2996109
tattata

SEQ ID NO: 128008 - DNA, 7 bp, Unknown
  misc_feature (1)..( 7): Result.003 file - promoters60/2996109
tattatg

SEQ ID NO: 128009 - DNA, 7 bp, Unknown
  misc_feature (1)..( 7): Result.003 file - promoters60/2996109
caaaaag

SEQ ID NO: 128010 - DNA, 7 bp, Unknown
  misc_feature (1)..( 7): Result.003 file - promoters60/2996109
aaaaaag

SEQ ID NO: 128011 - DNA, 7 bp, Unknown
  misc_feature (1)..( 7): Result.003 file - promoters60/2996109
aaaaaag

SEQ ID NO: 128012 - DNA, 9 bp, Unknown
  misc_feature (1)..( 9): Result.003 file - promoters60/2996119
aaaaaacga

SEQ ID NO: 128013 - DNA, 9 bp, Unknown
  misc_feature (1)..( 9): Result.003 file - promoters60/2996119
aaacaacga

SEQ ID NO: 128014 - DNA, 9 bp, Unknown
  misc_feature (1)..( 9): Result.003 file - promoters60/2996119
aaataacat

SEQ ID NO: 128015 - DNA, 8 bp, Unknown
  misc_feature (1)..( 8): Result.003 file - promoters60/2996119
aatgtgtt

SEQ ID NO: 128016 - DNA, 8 bp, Unknown
  misc_feature (1)..( 8): Result.003 file - promoters60/2996119
aatatgtt

SEQ ID NO: 128017 - DNA, 9 bp, Unknown
  misc_feature (1)..( 9): Result.003 file - promoters60/2996119
ttggtgagt

SEQ ID NO: 128018 - DNA, 9 bp, Unknown
  misc_feature (1)..( 9): Result.003 file - promoters60/2996119
ttggttagt

SEQ ID NO: 128019 - DNA, 6 bp, Unknown
  misc_feature (1)..( 6): Result.003 file - promoters60/2996119
atactg

SEQ ID NO: 128020 - DNA, 6 bp, Unknown
  misc_feature (1)..( 6): Result.003 file - promoters60/2996119
atactg

SEQ ID NO: 128021 - DNA, 6 bp, Unknown
  misc_feature (1)..( 6): Result.003 file - promoters60/2996119
aggaaa

SEQ ID NO: 128022 - DNA, 6 bp, Unknown
  misc_feature (1)..( 6): Result.003 file - promoters60/2996119
aggaaa

SEQ ID NO: 128023 - DNA, 6 bp, Unknown
  misc_feature (1)..( 6): Result.003 file - promoters60/2996119
aaaaac

SEQ ID NO: 128024 - DNA, 6 bp, Unknown
  misc_feature (1)..( 6): Result.003 file - promoters60/2996119
aaaaac

SEQ ID NO: 128025 - DNA, 6 bp, Unknown
  misc_feature (1)..( 6): Result.003 file - promoters60/2996119
gataaa

SEQ ID NO: 128026 - DNA, 6 bp, Unknown
  misc_feature (1)..( 6): Result.003 file - promoters60/2996119
gataaa

SEQ ID NO: 128027 - DNA, 8 bp, Unknown
  misc_feature (1)..( 8): Result.003 file - promoters60/2996119
aaaatcac

SEQ ID NO: 128028 - DNA, 8 bp, Unknown
  misc_feature (1)..( 8): Result.003 file - promoters60/2996119
aaaatcac

SEQ ID NO: 128029 - DNA, 7 bp, Unknown
  misc_feature (1)..( 7): Result.003 file - promoters60/2996119
gatgaaa

SEQ ID NO: 128030 - DNA, 7 bp, Unknown
  misc_feature (1)..( 7): Result.003 file - promoters60/2996119
gataaaa

SEQ ID NO: 128031 - DNA, 7 bp, Unknown
  misc_feature (1)..( 7): Result.003 file - promoters60/2996119
aatttat

SEQ ID NO: 128032 - DNA, 7 bp, Unknown
  misc_feature (1)..( 7): Result.003 file - promoters60/2996119
aatttat

SEQ ID NO: 128033 - DNA, 9 bp, Unknown
  misc_feature (1)..( 9): Result.003 file - promoters60/2996119
aagaaaaat

SEQ ID NO: 128034 - DNA, 9 bp, Unknown
  misc_feature (1)..( 9): Result.003 file - promoters60/2996119
aaggaaaat

SEQ ID NO: 128035 - DNA, 7 bp, Unknown
  misc_feature (1)..( 7): Result.003 file - promoters60/2996119
tttcttg

SEQ ID NO: 128036 - DNA, 7 bp, Unknown
  misc_feature (1)..( 7): Result.003 file - promoters60/2996119
ttttttg

SEQ ID NO: 128037 - DNA, 6 bp, Unknown
  misc_feature (1)..( 6): Result.003 file - promoters60/2996119
atttta

SEQ ID NO: 128038 - DNA, 6 bp, Unknown
  misc_feature (1)..( 6): Result.003 file - promoters60/2996119
atttta

SEQ ID NO: 128039 - DNA, 6 bp, Unknown
  misc_feature (1)..( 6): Result.003 file - promoters60/2996119
tttttg

SEQ ID NO: 128040 - DNA, 6 bp, Unknown
  misc_feature (1)..( 6): Result.003 file - promoters60/2996119
tttttg

SEQ ID NO: 128041 - DNA, 7 bp, Unknown
  misc_feature (1)..( 7): Result.003 file - promoters60/2996119
tgtggtt

SEQ ID NO: 128042 - DNA, 7 bp, Unknown
  misc_feature (1)..( 7): Result.003 file - promoters60/2996119
tgtggtt

SEQ ID NO: 128043 - DNA, 13 bp, Unknown
  misc_feature (1)..( 13): Result.003 file - promoters60/2996222
acggaattcctcc

SEQ ID NO: 128044 - DNA, 13 bp, Unknown
  misc_feature (1)..( 13): Result.003 file - promoters60/2996222
aaagaatttctcc

SEQ ID NO: 128045 - DNA, 13 bp, Unknown
  misc_feature (1)..( 13): Result.003 file - promoters60/2996222
aaataattgataa

SEQ ID NO: 128046 - DNA, 13 bp, Unknown
  misc_feature (1)..( 13): Result.003 file - promoters60/2996222
tatcaatgtctaa

SEQ ID NO: 128047 - DNA, 10 bp, Unknown
  misc_feature (1)..( 10): Result.003 file - promoters60/2996222
tttactaata

SEQ ID NO: 128048 - DNA, 10 bp, Unknown
  misc_feature (1)..( 10): Result.003 file - promoters60/2996222
attattaaag

SEQ ID NO: 128049 - DNA, 10 bp, Unknown
  misc_feature (1)..( 10): Result.003 file - promoters60/2996222
tttgctatac

SEQ ID NO: 128050 - DNA, 10 bp, Unknown
  misc_feature (1)..( 10): Result.003 file - promoters60/2996222
tataataatt

SEQ ID NO: 128051 - DNA, 10 bp, Unknown
  misc_feature (1)..( 10): Result.003 file - promoters60/2996222
tataatttta

SEQ ID NO: 128052 - DNA, 10 bp, Unknown
  misc_feature (1)..( 10): Result.003 file - promoters60/2996222
tctaatttta

SEQ ID NO: 128053 - DNA, 10 bp, Unknown
  misc_feature (1)..( 10): Result.003 file - promoters60/2996222
aataattatt

SEQ ID NO: 128054 - DNA, 10 bp, Unknown
  misc_feature (1)..( 10): Result.003 file - promoters60/2996222
aataatagta

SEQ ID NO: 128055 - DNA, 11 bp, Unknown
  misc_feature (1)..( 11): Result.003 file - promoters60/2996222
cattttacttt

SEQ ID NO: 128056 - DNA, 11 bp, Unknown
  misc_feature (1)..( 11): Result.003 file - promoters60/2996222
tattttagtcg

SEQ ID NO: 128057 - DNA, 11 bp, Unknown
  misc_feature (1)..( 11): Result.003 file - promoters60/2996222
aattttagcaa

SEQ ID NO: 128058 - DNA, 11 bp, Unknown
  misc_feature (1)..( 11): Result.003 file - promoters60/2996222
atctttaacaa

SEQ ID NO: 128059 - DNA, 11 bp, Unknown
  misc_feature (1)..( 11): Result.003 file - promoters60/2996222
tatttttactc

SEQ ID NO: 128060 - DNA, 10 bp, Unknown
  misc_feature (1)..( 10): Result.003 file - promoters60/2996222
ctatatatat

SEQ ID NO: 128061 - DNA, 10 bp, Unknown
  misc_feature (1)..( 10): Result.003 file - promoters60/2996222
ttatttatat

SEQ ID NO: 128062 - DNA, 10 bp, Unknown
  misc_feature (1)..( 10): Result.003 file - promoters60/2996222
gtatatataa

SEQ ID NO: 128063 - DNA, 10 bp, Unknown
  misc_feature (1)..( 10): Result.003 file - promoters60/2996222
ctatataaac

SEQ ID NO: 128064 - DNA, 10 bp, Unknown
  misc_feature (1)..( 10): Result.003 file - promoters60/2996222
ctataaaaaa

SEQ ID NO: 128065 - DNA, 11 bp, Unknown
  misc_feature (1)..( 11): Result.003 file - promoters60/2996222
aaacaatcatt

SEQ ID NO: 128066 - DNA, 11 bp, Unknown
  misc_feature (1)..( 11): Result.003 file - promoters60/2996222
aaaaaataatt

SEQ ID NO: 128067 - DNA, 11 bp, Unknown
  misc_feature (1)..( 11): Result.003 file - promoters60/2996222
aaaaaattgat

SEQ ID NO: 128068 - DNA, 11 bp, Unknown
  misc_feature (1)..( 11): Result.003 file - promoters60/2996222
aaagaatttct

SEQ ID NO: 128069 - DNA, 9 bp, Unknown
  misc_feature (1)..( 9): Result.003 file - promoters60/2996222
cttttgtta

SEQ ID NO: 128070 - DNA, 9 bp, Unknown
  misc_feature (1)..( 9): Result.003 file - promoters60/2996222
gatttctta

SEQ ID NO: 128071 - DNA, 9 bp, Unknown
  misc_feature (1)..( 9): Result.003 file - promoters60/2996222
aatttctcc

SEQ ID NO: 128072 - DNA, 9 bp, Unknown
  misc_feature (1)..( 9): Result.003 file - promoters60/2996222
aatgtctaa

SEQ ID NO: 128073 - DNA, 9 bp, Unknown
  misc_feature (1)..( 9): Result.003 file - promoters60/2996222
caaagaatt

SEQ ID NO: 128074 - DNA, 9 bp, Unknown
  misc_feature (1)..( 9): Result.003 file - promoters60/2996222
caaacaatc

SEQ ID NO: 128075 - DNA, 9 bp, Unknown
  misc_feature (1)..( 9): Result.003 file - promoters60/2996222
aaaataatt

SEQ ID NO: 128076 - DNA, 9 bp, Unknown
  misc_feature (1)..( 9): Result.003 file - promoters60/2996222
ataacaata

SEQ ID NO: 128077 - DNA, 9 bp, Unknown
  misc_feature (1)..( 9): Result.003 file - promoters60/2996222
ttaaagatc

SEQ ID NO: 128078 - DNA, 9 bp, Unknown
  misc_feature (1)..( 9): Result.003 file - promoters60/2996222
ttaaggatg

SEQ ID NO: 128079 - DNA, 9 bp, Unknown
  misc_feature (1)..( 9): Result.003 file - promoters60/2996222
ttaaagtag

SEQ ID NO: 128080 - DNA, 9 bp, Unknown
  misc_feature (1)..( 9): Result.003 file - promoters60/2996222
aaaaaaatc

SEQ ID NO: 128081 - DNA, 7 bp, Unknown
  misc_feature (1)..( 7): Result.003 file - promoters60/2996290
aaaacaa

SEQ ID NO: 128082 - DNA, 7 bp, Unknown
  misc_feature (1)..( 7): Result.003 file - promoters60/2996290
aaagcaa

SEQ ID NO: 128083 - DNA, 7 bp, Unknown
  misc_feature (1)..( 7): Result.003 file - promoters60/2996290
aactttg

SEQ ID NO: 128084 - DNA, 7 bp, Unknown
  misc_feature (1)..( 7): Result.003 file - promoters60/2996290
aactttg

SEQ ID NO: 128085 - DNA, 11 bp, Unknown
  misc_feature (1)..( 11): Result.003 file - promoters60/2996290
gtaaattattt

SEQ ID NO: 128086 - DNA, 11 bp, Unknown
  misc_feature (1)..( 11): Result.003 file - promoters60/2996290
gtaaatagtaa

SEQ ID NO: 128087 - DNA, 11 bp, Unknown
  misc_feature (1)..( 11): Result.003 file - promoters60/2996290
ataaatactaa

SEQ ID NO: 128088 - DNA, 6 bp, Unknown
  misc_feature (1)..( 6): Result.003 file - promoters60/2996290
ccaaaa

SEQ ID NO: 128089 - DNA, 6 bp, Unknown
  misc_feature (1)..( 6): Result.003 file - promoters60/2996290
ccaaaa

SEQ ID NO: 128090 - DNA, 7 bp, Unknown
  misc_feature (1)..( 7): Result.003 file - promoters60/2996290
aaaataa

SEQ ID NO: 128091 - DNA, 7 bp, Unknown
  misc_feature (1)..( 7): Result.003 file - promoters60/2996290
aaaataa

SEQ ID NO: 128092 - DNA, 6 bp, Unknown
  misc_feature (1)..( 6): Result.003 file - promoters60/2996290
atagaa

SEQ ID NO: 128093 - DNA, 6 bp, Unknown
  misc_feature (1)..( 6): Result.003 file - promoters60/2996290
atagaa

SEQ ID NO: 128094 - DNA, 11 bp, Unknown
  misc_feature (1)..( 11): Result.003 file - promoters60/2996290
aaacataataa

SEQ ID NO: 128095 - DNA, 11 bp, Unknown
  misc_feature (1)..( 11): Result.003 file - promoters60/2996290
aaaaatagtaa

SEQ ID NO: 128096 - DNA, 7 bp, Unknown
  misc_feature (1)..( 7): Result.003 file - promoters60/2996290
aaataat

SEQ ID NO: 128097 - DNA, 7 bp, Unknown
  misc_feature (1)..( 7): Result.003 file - promoters60/2996290
aaataat

SEQ ID NO: 128098 - DNA, 7 bp, Unknown
  misc_feature (1)..( 7): Result.003 file - promoters60/2996290
attcata

SEQ ID NO: 128099 - DNA, 7 bp, Unknown
  misc_feature (1)..( 7): Result.003 file - promoters60/2996290
atttata

SEQ ID NO: 128100 - DNA, 6 bp, Unknown
  misc_feature (1)..( 6): Result.003 file - promoters60/2996290
aaatct

SEQ ID NO: 128101 - DNA, 6 bp, Unknown
  misc_feature (1)..( 6): Result.003 file - promoters60/2996290
aaatct

SEQ ID NO: 128102 - DNA, 6 bp, Unknown
  misc_feature (1)..( 6): Result.003 file - promoters60/2996290
ttttaa

SEQ ID NO: 128103 - DNA, 6 bp, Unknown
  misc_feature (1)..( 6): Result.003 file - promoters60/2996290
ttttaa

SEQ ID NO: 128104 - DNA, 8 bp, Unknown
  misc_feature (1)..( 8): Result.003 file - promoters60/2996290
aatggaac

SEQ ID NO: 128105 - DNA, 8 bp, Unknown
  misc_feature (1)..( 8): Result.003 file - promoters60/2996290
aatgtaac

SEQ ID NO: 128106 - DNA, 6 bp, Unknown
  misc_feature (1)..( 6): Result.003 file - promoters60/2996290
cttttt

SEQ ID NO: 128107 - DNA, 6 bp, Unknown
  misc_feature (1)..( 6): Result.003 file - promoters60/2996290
cttttt

SEQ ID NO: 128108 - DNA, 7 bp, Unknown
  misc_feature (1)..( 7): Result.003 file - promoters60/2996290
aagatct

SEQ ID NO: 128109 - DNA, 7 bp, Unknown
  misc_feature (1)..( 7): Result.003 file - promoters60/2996290
aagatct

SEQ ID NO: 128110 - DNA, 6 bp, Unknown
  misc_feature (1)..( 6): Result.003 file - promoters60/2996290
cactct

SEQ ID NO: 128111 - DNA, 6 bp, Unknown
  misc_feature (1)..( 6): Result.003 file - promoters60/2996290
cactct

SEQ ID NO: 128112 - DNA, 11 bp, Unknown
  misc_feature (1)..( 11): Result.003 file - promoters60/2997951
gctaaaatatc

SEQ ID NO: 128113 - DNA, 11 bp, Unknown
  misc_feature (1)..( 11): Result.003 file - promoters60/2997951
aataaagtata

SEQ ID NO: 128114 - DNA, 11 bp, Unknown
  misc_feature (1)..( 11): Result.003 file - promoters60/2997951
tgcaaaaaacg

SEQ ID NO: 128115 - DNA, 11 bp, Unknown
  misc_feature (1)..( 11): Result.003 file - promoters60/2997951
ataatagtata

SEQ ID NO: 128116 - DNA, 11 bp, Unknown
  misc_feature (1)..( 11): Result.003 file - promoters60/2997951
tttaaaatatt

SEQ ID NO: 128117 - DNA, 11 bp, Unknown
  misc_feature (1)..( 11): Result.003 file - promoters60/2997951
caaaaaacatt

SEQ ID NO: 128118 - DNA, 6 bp, Unknown
  misc_feature (1)..( 6): Result.003 file - promoters60/3003010
caaacc

SEQ ID NO: 128119 - DNA, 6 bp, Unknown
  misc_feature (1)..( 6): Result.003 file - promoters60/3003010
caaacc

SEQ ID NO: 128120 - DNA, 7 bp, Unknown
  misc_feature (1)..( 7): Result.003 file - promoters60/3003010
tttaggt

SEQ ID NO: 128121 - DNA, 7 bp, Unknown
  misc_feature (1)..( 7): Result.003 file - promoters60/3003010
ttttggt

SEQ ID NO: 128122 - DNA, 6 bp, Unknown
  misc_feature (1)..( 6): Result.003 file - promoters60/3003010
ttcagt

SEQ ID NO: 128123 - DNA, 6 bp, Unknown
  misc_feature (1)..( 6): Result.003 file - promoters60/3003010
ttcagt

SEQ ID NO: 128124 - DNA, 6 bp, Unknown
  misc_feature (1)..( 6): Result.003 file - promoters60/3003010
aatttt

SEQ ID NO: 128125 - DNA, 6 bp, Unknown
  misc_feature (1)..( 6): Result.003 file - promoters60/3003010
aatttt

SEQ ID NO: 128126 - DNA, 7 bp, Unknown
  misc_feature (1)..( 7): Result.003 file - promoters60/3003010
taaaaat

SEQ ID NO: 128127 - DNA, 7 bp, Unknown
  misc_feature (1)..( 7): Result.003 file - promoters60/3003010
taataat

SEQ ID NO: 128128 - DNA, 7 bp, Unknown
  misc_feature (1)..( 7): Result.003 file - promoters60/3003010
caaaatt

SEQ ID NO: 128129 - DNA, 7 bp, Unknown
  misc_feature (1)..( 7): Result.003 file - promoters60/3003010
caatatt

SEQ ID NO: 128130 - DNA, 7 bp, Unknown
  misc_feature (1)..( 7): Result.003 file - promoters60/3003010
caatatg

SEQ ID NO: 128131 - DNA, 8 bp, Unknown
  misc_feature (1)..( 8): Result.003 file - promoters60/3003010
aattatat

SEQ ID NO: 128132 - DNA, 8 bp, Unknown
  misc_feature (1)..( 8): Result.003 file - promoters60/3003010
aattgtat

SEQ ID NO: 128133 - DNA, 6 bp, Unknown
  misc_feature (1)..( 6): Result.003 file - promoters60/3003010
aataaa

SEQ ID NO: 128134 - DNA, 6 bp, Unknown
  misc_feature (1)..( 6): Result.003 file - promoters60/3003010
aataaa

SEQ ID NO: 128135 - DNA, 7 bp, Unknown
  misc_feature (1)..( 7): Result.003 file - promoters60/3003010
tacagta

SEQ ID NO: 128136 - DNA, 7 bp, Unknown
  misc_feature (1)..( 7): Result.003 file - promoters60/3003010
tactgta

SEQ ID NO: 128137 - DNA, 8 bp, Unknown
  misc_feature (1)..( 8): Result.003 file - promoters60/3003010
aaaaaaat

SEQ ID NO: 128138 - DNA, 8 bp, Unknown
  misc_feature (1)..( 8): Result.003 file - promoters60/3003010
aaaataat

SEQ ID NO: 128139 - DNA, 6 bp, Unknown
  misc_feature (1)..( 6): Result.003 file - promoters60/3011901
ataaaa

SEQ ID NO: 128140 - DNA, 6 bp, Unknown
  misc_feature (1)..( 6): Result.003 file - promoters60/3011901
ataaaa

SEQ ID NO: 128141 - DNA, 6 bp, Unknown
  misc_feature (1)..( 6): Result.003 file - promoters60/3011901
aaaaca

SEQ ID NO: 128142 - DNA, 6 bp, Unknown
  misc_feature (1)..( 6): Result.003 file - promoters60/3011901
aaaaca

SEQ ID NO: 128143 - DNA, 6 bp, Unknown
  misc_feature (1)..( 6): Result.003 file - promoters60/3011901
agtgca

SEQ ID NO: 128144 - DNA, 6 bp, Unknown
  misc_feature (1)..( 6): Result.003 file - promoters60/3011901
agtgca

SEQ ID NO: 128145 - DNA, 6 bp, Unknown
  misc_feature (1)..( 6): Result.003 file - promoters60/3011901
ttaaaa

SEQ ID NO: 128146 - DNA, 6 bp, Unknown
  misc_feature (1)..( 6): Result.003 file - promoters60/3011901
ttaaaa

SEQ ID NO: 128147 - DNA, 6 bp, Unknown
  misc_feature (1)..( 6): Result.003 file - promoters60/3011901
agaaaa

SEQ ID NO: 128148 - DNA, 6 bp, Unknown
  misc_feature (1)..( 6): Result.003 file - promoters60/3011901
agaaaa

SEQ ID NO: 128149 - DNA, 6 bp, Unknown
  misc_feature (1)..( 6): Result.003 file - promoters60/3011901
gaagag

SEQ ID NO: 128150 - DNA, 6 bp, Unknown
  misc_feature (1)..( 6): Result.003 file - promoters60/3011901
gaagag

SEQ ID NO: 128151 - DNA, 7 bp, Unknown
  misc_feature (1)..( 7): Result.003 file - promoters60/3011901
aaaactt

SEQ ID NO: 128152 - DNA, 7 bp, Unknown
  misc_feature (1)..( 7): Result.003 file - promoters60/3011901
aaaactt

SEQ ID NO: 128153 - DNA, 9 bp, Unknown
  misc_feature (1)..( 9): Result.003 file - promoters60/3011901
aattcgtaa

SEQ ID NO: 128154 - DNA, 9 bp, Unknown
  misc_feature (1)..( 9): Result.003 file - promoters60/3011901
aattcataa

SEQ ID NO: 128155 - DNA, 6 bp, Unknown
  misc_feature (1)..( 6): Result.003 file - promoters60/3011901
gttaac

SEQ ID NO: 128156 - DNA, 6 bp, Unknown
  misc_feature (1)..( 6): Result.003 file - promoters60/3011901
gttaac

SEQ ID NO: 128157 - DNA, 9 bp, Unknown
  misc_feature (1)..( 9): Result.003 file - promoters60/3011901
agagaatat

SEQ ID NO: 128158 - DNA, 9 bp, Unknown
  misc_feature (1)..( 9): Result.003 file - promoters60/3011901
agagaatat

SEQ ID NO: 128159 - DNA, 7 bp, Unknown
  misc_feature (1)..( 7): Result.003 file - promoters60/3011901
aaaccaa

SEQ ID NO: 128160 - DNA, 7 bp, Unknown
  misc_feature (1)..( 7): Result.003 file - promoters60/3011901
aaaccaa

SEQ ID NO: 128161 - DNA, 6 bp, Unknown
  misc_feature (1)..( 6): Result.003 file - promoters60/3011901
ccaatg

SEQ ID NO: 128162 - DNA, 6 bp, Unknown
  misc_feature (1)..( 6): Result.003 file - promoters60/3011901
ccaatg

SEQ ID NO: 128163 - DNA, 7 bp, Unknown
  misc_feature (1)..( 7): Result.003 file - promoters60/3011901
cattaga

SEQ ID NO: 128164 - DNA, 7 bp, Unknown
  misc_feature (1)..( 7): Result.003 file - promoters60/3011901
cataaga

SEQ ID NO: 128165 - DNA, 7 bp, Unknown
  misc_feature (1)..( 7): Result.003 file - promoters60/3011901
ggcacat

SEQ ID NO: 128166 - DNA, 7 bp, Unknown
  misc_feature (1)..( 7): Result.003 file - promoters60/3011901
ggcccat

SEQ ID NO: 128167 - DNA, 7 bp, Unknown
  misc_feature (1)..( 7): Result.003 file - promoters60/3011901
taaataa

SEQ ID NO: 128168 - DNA, 7 bp, Unknown
  misc_feature (1)..( 7): Result.003 file - promoters60/3011901
taaataa

SEQ ID NO: 128169 - DNA, 11 bp, Unknown
  misc_feature (1)..( 11): Result.003 file - promoters60/3014276
taatgataatc

SEQ ID NO: 128170 - DNA, 11 bp, Unknown
  misc_feature (1)..( 11): Result.003 file - promoters60/3014276
gggtgagaatc

SEQ ID NO: 128171 - DNA, 11 bp, Unknown
  misc_feature (1)..( 11): Result.003 file - promoters60/3014276
taacgatatcc

SEQ ID NO: 128172 - DNA, 9 bp, Unknown
  misc_feature (1)..( 9): Result.003 file - promoters60/3014276
ctcgtcttc

SEQ ID NO: 128173 - DNA, 9 bp, Unknown
  misc_feature (1)..( 9): Result.003 file - promoters60/3014276
ctcgacttt

SEQ ID NO: 128174 - DNA, 9 bp, Unknown
  misc_feature (1)..( 9): Result.003 file - promoters60/3014276
ctcgttttc

SEQ ID NO: 128175 - DNA, 9 bp, Unknown
  misc_feature (1)..( 9): Result.003 file - promoters60/3014276
tgttcaaaa

SEQ ID NO: 128176 - DNA, 9 bp, Unknown
  misc_feature (1)..( 9): Result.003 file - promoters60/3014276
tgtttaaaa

SEQ ID NO: 128177 - DNA, 9 bp, Unknown
  misc_feature (1)..( 9): Result.003 file - promoters60/3014276
ttttttttg

SEQ ID NO: 128178 - DNA, 7 bp, Unknown
  misc_feature (1)..( 7): Result.003 file - promoters60/3014276
atctctt

SEQ ID NO: 128179 - DNA, 7 bp, Unknown
  misc_feature (1)..( 7): Result.003 file - promoters60/3014276
atctctc

SEQ ID NO: 128180 - DNA, 7 bp, Unknown
  misc_feature (1)..( 7): Result.003 file - promoters60/3014276
gtctctc

SEQ ID NO: 128181 - DNA, 7 bp, Unknown
  misc_feature (1)..( 7): Result.003 file - promoters60/3043322
attatat

SEQ ID NO: 128182 - DNA, 7 bp, Unknown
  misc_feature (1)..( 7): Result.003 file - promoters60/3043322
attgtat

SEQ ID NO: 128183 - DNA, 11 bp, Unknown
  misc_feature (1)..( 11): Result.003 file - promoters60/3043322
tgtgaatctac

SEQ ID NO: 128184 - DNA, 11 bp, Unknown
  misc_feature (1)..( 11): Result.003 file - promoters60/3043322
tgtcaatcttg

SEQ ID NO: 128185 - DNA, 11 bp, Unknown
  misc_feature (1)..( 11): Result.003 file - promoters60/3043322
aacaaatttga

SEQ ID NO: 128186 - DNA, 7 bp, Unknown
  misc_feature (1)..( 7): Result.003 file - promoters60/3043322
acgttta

SEQ ID NO: 128187 - DNA, 7 bp, Unknown
  misc_feature (1)..( 7): Result.003 file - promoters60/3043322
acgatta

SEQ ID NO: 128188 - DNA, 7 bp, Unknown
  misc_feature (1)..( 7): Result.003 file - promoters60/3043322
atcattc

SEQ ID NO: 128189 - DNA, 7 bp, Unknown
  misc_feature (1)..( 7): Result.003 file - promoters60/3043322
atctttc

SEQ ID NO: 128190 - DNA, 6 bp, Unknown
  misc_feature (1)..( 6): Result.003 file - promoters60/3043322
aaagtc

SEQ ID NO: 128191 - DNA, 6 bp, Unknown
  misc_feature (1)..( 6): Result.003 file - promoters60/3043322
aaagtc

SEQ ID NO: 128192 - DNA, 6 bp, Unknown
  misc_feature (1)..( 6): Result.003 file - promoters60/3043322
catatt

SEQ ID NO: 128193 - DNA, 6 bp, Unknown
  misc_feature (1)..( 6): Result.003 file - promoters60/3043322
catatt

SEQ ID NO: 128194 - DNA, 8 bp, Unknown
  misc_feature (1)..( 8): Result.003 file - promoters60/3043322
atttgatt

SEQ ID NO: 128195 - DNA, 8 bp, Unknown
  misc_feature (1)..( 8): Result.003 file - promoters60/3043322
atttgata

SEQ ID NO: 128196 - DNA, 8 bp, Unknown
  misc_feature (1)..( 8): Result.003 file - promoters60/3043322
atttgatt

SEQ ID NO: 128197 - DNA, 8 bp, Unknown
  misc_feature (1)..( 8): Result.003 file - promoters60/3043322
aactattt

SEQ ID NO: 128198 - DNA, 8 bp, Unknown
  misc_feature (1)..( 8): Result.003 file - promoters60/3043322
aaccattt

SEQ ID NO: 128199 - DNA, 9 bp, Unknown
  misc_feature (1)..( 9): Result.003 file - promoters60/3043322
aataaaatt

SEQ ID NO: 128200 - DNA, 9 bp, Unknown
  misc_feature (1)..( 9): Result.003 file - promoters60/3043322
aataaaatc

SEQ ID NO: 128201 - DNA, 9 bp, Unknown
  misc_feature (1)..( 9): Result.003 file - promoters60/3043322
tctaaaatc

SEQ ID NO: 128202 - DNA, 10 bp, Unknown
  misc_feature (1)..( 10): Result.003 file - promoters60/3043322
ttaatatttt

SEQ ID NO: 128203 - DNA, 10 bp, Unknown
  misc_feature (1)..( 10): Result.003 file - promoters60/3043322
ttaatttttt

SEQ ID NO: 128204 - DNA, 7 bp, Unknown
  misc_feature (1)..( 7): Result.003 file - promoters60/3043322
ttatttt

SEQ ID NO: 128205 - DNA, 7 bp, Unknown
  misc_feature (1)..( 7): Result.003 file - promoters60/3043322
ttatttt

SEQ ID NO: 128206 - DNA, 6 bp, Unknown
  misc_feature (1)..( 6): Result.003 file - promoters60/3043322
taacat

SEQ ID NO: 128207 - DNA, 6 bp, Unknown
  misc_feature (1)..( 6): Result.003 file - promoters60/3043322
taacat

SEQ ID NO: 128208 - DNA, 6 bp, Unknown
  misc_feature (1)..( 6): Result.003 file - promoters60/3043322
taacat

SEQ ID NO: 128209 - DNA, 8 bp, Unknown
  misc_feature (1)..( 8): Result.003 file - promoters60/3043322
aaaacaaa

SEQ ID NO: 128210 - DNA, 8 bp, Unknown
  misc_feature (1)..( 8): Result.003 file - promoters60/3043322
aaaaaaaa

SEQ ID NO: 128211 - DNA, 10 bp, Unknown
  misc_feature (1)..( 10): Result.003 file - promoters60/3043322
aaaaatactt

SEQ ID NO: 128212 - DNA, 10 bp, Unknown
  misc_feature (1)..( 10): Result.003 file - promoters60/3043322
aaaaaaactt

SEQ ID NO: 128213 - DNA, 6 bp, Unknown
  misc_feature (1)..( 6): Result.003 file - promoters60/3043322
tatatt

SEQ ID NO: 128214 - DNA, 6 bp, Unknown
  misc_feature (1)..( 6): Result.003 file - promoters60/3043322
tatatt

SEQ ID NO: 128215 - DNA, 8 bp, Unknown
  misc_feature (1)..( 8): Result.003 file - promoters60/3043322
tctataga

SEQ ID NO: 128216 - DNA, 8 bp, Unknown
  misc_feature (1)..( 8): Result.003 file - promoters60/3043322
tctttaga

SEQ ID NO: 128217 - DNA, 7 bp, Unknown
  misc_feature (1)..( 7): Result.003 file - promoters60/3043322
tttgtta

SEQ ID NO: 128218 - DNA, 7 bp, Unknown
  misc_feature (1)..( 7): Result.003 file - promoters60/3043322
tttttta

SEQ ID NO: 128219 - DNA, 7 bp, Unknown
  misc_feature (1)..( 7): Result.003 file - promoters60/3043322
aacaaaa

SEQ ID NO: 128220 - DNA, 7 bp, Unknown
  misc_feature (1)..( 7): Result.003 file - promoters60/3043322
aactaaa

SEQ ID NO: 128221 - DNA, 6 bp, Unknown
  misc_feature (1)..( 6): Result.003 file - promoters60/3043322
ttctta

SEQ ID NO: 128222 - DNA, 6 bp, Unknown
  misc_feature (1)..( 6): Result.003 file - promoters60/3043322
ttctta

SEQ ID NO: 128223 - DNA, 8 bp, Unknown
  misc_feature (1)..( 8): Result.003 file - promoters60/3043322
ttttttta

SEQ ID NO: 128224 - DNA, 8 bp, Unknown
  misc_feature (1)..( 8): Result.003 file - promoters60/3043322
tttgttta

SEQ ID NO: 128225 - DNA, 9 bp, Unknown
  misc_feature (1)..( 9): Result.003 file - promoters60/3043962
tttttttaa

SEQ ID NO: 128226 - DNA, 9 bp, Unknown
  misc_feature (1)..( 9): Result.003 file - promoters60/3043962
tttttttgg

SEQ ID NO: 128227 - DNA, 9 bp, Unknown
  misc_feature (1)..( 9): Result.003 file - promoters60/3043962
tttatttgt

SEQ ID NO: 128228 - DNA, 9 bp, Unknown
  misc_feature (1)..( 9): Result.003 file - promoters60/3043962
tatatctgt

SEQ ID NO: 128229 - DNA, 9 bp, Unknown
  misc_feature (1)..( 9): Result.003 file - promoters60/3043962
tcttgattc

SEQ ID NO: 128230 - DNA, 9 bp, Unknown
  misc_feature (1)..( 9): Result.003 file - promoters60/3043962
gtttgattg

SEQ ID NO: 128231 - DNA, 9 bp, Unknown
  misc_feature (1)..( 9): Result.003 file - promoters60/3043962
atttgtttg

SEQ ID NO: 128232 - DNA, 9 bp, Unknown
  misc_feature (1)..( 9): Result.003 file - promoters60/3043962
atttgtata

SEQ ID NO: 128233 - DNA, 11 bp, Unknown
  misc_feature (1)..( 11): Result.003 file - promoters60/3043962
aaactatttaa

SEQ ID NO: 128234 - DNA, 11 bp, Unknown
  misc_feature (1)..( 11): Result.003 file - promoters60/3043962
cttctatataa

SEQ ID NO: 128235 - DNA, 11 bp, Unknown
  misc_feature (1)..( 11): Result.003 file - promoters60/3043962
tgactattatc

SEQ ID NO: 128236 - DNA, 11 bp, Unknown
  misc_feature (1)..( 11): Result.003 file - promoters60/3043962
aacctagttac

SEQ ID NO: 128237 - DNA, 11 bp, Unknown
  misc_feature (1)..( 11): Result.003 file - promoters60/3043962
tgattatcctt

SEQ ID NO: 128238 - DNA, 6 bp, Unknown
  misc_feature (1)..( 6): Result.003 file - promoters60/3100782
tttgta

SEQ ID NO: 128239 - DNA, 6 bp, Unknown
  misc_feature (1)..( 6): Result.003 file - promoters60/3100782
tttgta

SEQ ID NO: 128240 - DNA, 7 bp, Unknown
  misc_feature (1)..( 7): Result.003 file - promoters60/3100782
atctttt

SEQ ID NO: 128241 - DNA, 7 bp, Unknown
  misc_feature (1)..( 7): Result.003 file - promoters60/3100782
atcattt

SEQ ID NO: 128242 - DNA, 8 bp, Unknown
  misc_feature (1)..( 8): Result.003 file - promoters60/3100782
aactgaaa

SEQ ID NO: 128243 - DNA, 8 bp, Unknown
  misc_feature (1)..( 8): Result.003 file - promoters60/3100782
aacagaaa

SEQ ID NO: 128244 - DNA, 7 bp, Unknown
  misc_feature (1)..( 7): Result.003 file - promoters60/3100782
ataaaat

SEQ ID NO: 128245 - DNA, 7 bp, Unknown
  misc_feature (1)..( 7): Result.003 file - promoters60/3100782
ataaaat

SEQ ID NO: 128246 - DNA, 8 bp, Unknown
  misc_feature (1)..( 8): Result.003 file - promoters60/3100782
aaatagaa

SEQ ID NO: 128247 - DNA, 8 bp, Unknown
  misc_feature (1)..( 8): Result.003 file - promoters60/3100782
aaaaagaa

SEQ ID NO: 128248 - DNA, 7 bp, Unknown
  misc_feature (1)..( 7): Result.003 file - promoters60/3100782
ccaccat

SEQ ID NO: 128249 - DNA, 7 bp, Unknown
  misc_feature (1)..( 7): Result.003 file - promoters60/3100782
ccaacat

SEQ ID NO: 128250 - DNA, 7 bp, Unknown
  misc_feature (1)..( 7): Result.003 file - promoters60/3100782
caattct

SEQ ID NO: 128251 - DNA, 7 bp, Unknown
  misc_feature (1)..( 7): Result.003 file - promoters60/3100782
caattct

SEQ ID NO: 128252 - DNA, 6 bp, Unknown
  misc_feature (1)..( 6): Result.003 file - promoters60/3100782
ttctgg

SEQ ID NO: 128253 - DNA, 6 bp, Unknown
  misc_feature (1)..( 6): Result.003 file - promoters60/3100782
ttctgg

SEQ ID NO: 128254 - DNA, 7 bp, Unknown
  misc_feature (1)..( 7): Result.003 file - promoters60/3100782
cataact

SEQ ID NO: 128255 - DNA, 7 bp, Unknown
  misc_feature (1)..( 7): Result.003 file - promoters60/3100782
cattact

SEQ ID NO: 128256 - DNA, 8 bp, Unknown
  misc_feature (1)..( 8): Result.003 file - promoters60/3100782
attcttac

SEQ ID NO: 128257 - DNA, 8 bp, Unknown
  misc_feature (1)..( 8): Result.003 file - promoters60/3100782
atttttac

SEQ ID NO: 128258 - DNA, 7 bp, Unknown
  misc_feature (1)..( 7): Result.003 file - promoters60/3100782
tttgaga

SEQ ID NO: 128259 - DNA, 7 bp, Unknown
  misc_feature (1)..( 7): Result.003 file - promoters60/3100782
tttgaga

SEQ ID NO: 128260 - DNA, 6 bp, Unknown
  misc_feature (1)..( 6): Result.003 file - promoters60/3238306
tttatt

SEQ ID NO: 128261 - DNA, 6 bp, Unknown
  misc_feature (1)..( 6): Result.003 file - promoters60/3238306
tttatt

SEQ ID NO: 128262 - DNA, 8 bp, Unknown
  misc_feature (1)..( 8): Result.003 file - promoters60/3238306
caagtcca

SEQ ID NO: 128263 - DNA, 8 bp, Unknown
  misc_feature (1)..( 8): Result.003 file - promoters60/3238306
caactcca

SEQ ID NO: 128264 - DNA, 8 bp, Unknown
  misc_feature (1)..( 8): Result.003 file - promoters60/3238306
taaattat

SEQ ID NO: 128265 - DNA, 8 bp, Unknown
  misc_feature (1)..( 8): Result.003 file - promoters60/3238306
aaaaatat

SEQ ID NO: 128266 - DNA, 8 bp, Unknown
  misc_feature (1)..( 8): Result.003 file - promoters60/3238306
aaaaatcc

SEQ ID NO: 128267 - DNA, 8 bp, Unknown
  misc_feature (1)..( 8): Result.003 file - promoters60/3238306
caaatcaa

SEQ ID NO: 128268 - DNA, 8 bp, Unknown
  misc_feature (1)..( 8): Result.003 file - promoters60/3238306
caagtcaa

SEQ ID NO: 128269 - DNA, 6 bp, Unknown
  misc_feature (1)..( 6): Result.003 file - promoters60/3238306
ttatat

SEQ ID NO: 128270 - DNA, 6 bp, Unknown
  misc_feature (1)..( 6): Result.003 file - promoters60/3238306
ttatat

SEQ ID NO: 128271 - DNA, 7 bp, Unknown
  misc_feature (1)..( 7): Result.003 file - promoters60/3238306
gattaat

SEQ ID NO: 128272 - DNA, 7 bp, Unknown
  misc_feature (1)..( 7): Result.003 file - promoters60/3238306
gatcaat

SEQ ID NO: 128273 - DNA, 9 bp, Unknown
  misc_feature (1)..( 9): Result.003 file - promoters60/3238306
acatacaca

SEQ ID NO: 128274 - DNA, 9 bp, Unknown
  misc_feature (1)..( 9): Result.003 file - promoters60/3238306
acaaacaca

SEQ ID NO: 128275 - DNA, 6 bp, Unknown
  misc_feature (1)..( 6): Result.003 file - promoters60/3238306
acaata

SEQ ID NO: 128276 - DNA, 6 bp, Unknown
  misc_feature (1)..( 6): Result.003 file - promoters60/3238306
acaata

SEQ ID NO: 128277 - DNA, 9 bp, Unknown
  misc_feature (1)..( 9): Result.003 file - promoters60/3238306
gttttggcg

SEQ ID NO: 128278 - DNA, 9 bp, Unknown
  misc_feature (1)..( 9): Result.003 file - promoters60/3238306
gtttgggcg

SEQ ID NO: 128279 - DNA, 7 bp, Unknown
  misc_feature (1)..( 7): Result.003 file - promoters60/3238306
atagcaa

SEQ ID NO: 128280 - DNA, 7 bp, Unknown
  misc_feature (1)..( 7): Result.003 file - promoters60/3238306
ataccaa

SEQ ID NO: 128281 - DNA, 6 bp, Unknown
  misc_feature (1)..( 6): Result.003 file - promoters60/3238306
gtctaa

SEQ ID NO: 128282 - DNA, 6 bp, Unknown
  misc_feature (1)..( 6): Result.003 file - promoters60/3238306
gtctaa

SEQ ID NO: 128283 - DNA, 6 bp, Unknown
  misc_feature (1)..( 6): Result.003 file - promoters60/3238306
aatgtc

SEQ ID NO: 128284 - DNA, 6 bp, Unknown
  misc_feature (1)..( 6): Result.003 file - promoters60/3238306
aatgtc

SEQ ID NO: 128285 - DNA, 6 bp, Unknown
  misc_feature (1)..( 6): Result.003 file - promoters60/3238306
acgtaa

SEQ ID NO: 128286 - DNA, 6 bp, Unknown
  misc_feature (1)..( 6): Result.003 file - promoters60/3238306
acgtaa

SEQ ID NO: 128287 - DNA, 6 bp, Unknown
  misc_feature (1)..( 6): Result.003 file - promoters60/3238306
agattc

SEQ ID NO: 128288 - DNA, 6 bp, Unknown
  misc_feature (1)..( 6): Result.003 file - promoters60/3238306
agattc

SEQ ID NO: 128289 - DNA, 8 bp, Unknown
  misc_feature (1)..( 8): Result.003 file - promoters60/3238306
gagaagga

SEQ ID NO: 128290 - DNA, 8 bp, Unknown
  misc_feature (1)..( 8): Result.003 file - promoters60/3238306
gagaagga

SEQ ID NO: 128291 - DNA, 6 bp, Unknown
  misc_feature (1)..( 6): Result.003 file - promoters60/3239163
gccaat

SEQ ID NO: 128292 - DNA, 6 bp, Unknown
  misc_feature (1)..( 6): Result.003 file - promoters60/3239163
gccaat

SEQ ID NO: 128293 - DNA, 6 bp, Unknown
  misc_feature (1)..( 6): Result.003 file - promoters60/3239163
gcagag

SEQ ID NO: 128294 - DNA, 6 bp, Unknown
  misc_feature (1)..( 6): Result.003 file - promoters60/3239163
gcagag

SEQ ID NO: 128295 - DNA, 6 bp, Unknown
  misc_feature (1)..( 6): Result.003 file - promoters60/3239163
ttaaag

SEQ ID NO: 128296 - DNA, 6 bp, Unknown
  misc_feature (1)..( 6): Result.003 file - promoters60/3239163
ttaaag

SEQ ID NO: 128297 - DNA, 8 bp, Unknown
  misc_feature (1)..( 8): Result.003 file - promoters60/3239163
aattctaa

SEQ ID NO: 128298 - DNA, 8 bp, Unknown
  misc_feature (1)..( 8): Result.003 file - promoters60/3239163
aattttaa

SEQ ID NO: 128299 - DNA, 7 bp, Unknown
  misc_feature (1)..( 7): Result.003 file - promoters60/3239163
aatcgga

SEQ ID NO: 128300 - DNA, 7 bp, Unknown
  misc_feature (1)..( 7): Result.003 file - promoters60/3239163
aatcgga

SEQ ID NO: 128301 - DNA, 11 bp, Unknown
  misc_feature (1)..( 11): Result.003 file - promoters60/3239163
agagagtgaag

SEQ ID NO: 128302 - DNA, 11 bp, Unknown
  misc_feature (1)..( 11): Result.003 file - promoters60/3239163
agacagtgaag

SEQ ID NO: 128303 - DNA, 6 bp, Unknown
  misc_feature (1)..( 6): Result.003 file - promoters60/3239163
aagtgt

SEQ ID NO: 128304 - DNA, 6 bp, Unknown
  misc_feature (1)..( 6): Result.003 file - promoters60/3239163
aagtgt

SEQ ID NO: 128305 - DNA, 6 bp, Unknown
  misc_feature (1)..( 6): Result.003 file - promoters60/3239163
atatat

SEQ ID NO: 128306 - DNA, 6 bp, Unknown
  misc_feature (1)..( 6): Result.003 file - promoters60/3239163
atatat

SEQ ID NO: 128307 - DNA, 7 bp, Unknown
  misc_feature (1)..( 7): Result.003 file - promoters60/3239163
acaatac

SEQ ID NO: 128308 - DNA, 7 bp, Unknown
  misc_feature (1)..( 7): Result.003 file - promoters60/3239163
acaatac

SEQ ID NO: 128309 - DNA, 9 bp, Unknown
  misc_feature (1)..( 9): Result.003 file - promoters60/3239163
atacaaata

SEQ ID NO: 128310 - DNA, 9 bp, Unknown
  misc_feature (1)..( 9): Result.003 file - promoters60/3239163
atacacata

SEQ ID NO: 128311 - DNA, 6 bp, Unknown
  misc_feature (1)..( 6): Result.003 file - promoters60/3239163
tcaaat

SEQ ID NO: 128312 - DNA, 6 bp, Unknown
  misc_feature (1)..( 6): Result.003 file - promoters60/3239163
tcaaat

SEQ ID NO: 128313 - DNA, 6 bp, Unknown
  misc_feature (1)..( 6): Result.003 file - promoters60/3239163
gagcag

SEQ ID NO: 128314 - DNA, 6 bp, Unknown
  misc_feature (1)..( 6): Result.003 file - promoters60/3239163
gagcag

SEQ ID NO: 128315 - DNA, 7 bp, Unknown
  misc_feature (1)..( 7): Result.003 file - promoters60/3239163
gaattaa

SEQ ID NO: 128316 - DNA, 7 bp, Unknown
  misc_feature (1)..( 7): Result.003 file - promoters60/3239163
gaaataa

SEQ ID NO: 128317 - DNA, 6 bp, Unknown
  misc_feature (1)..( 6): Result.003 file - promoters60/3239175
aaggat

SEQ ID NO: 128318 - DNA, 6 bp, Unknown
  misc_feature (1)..( 6): Result.003 file - promoters60/3239175
aaggat

SEQ ID NO: 128319 - DNA, 8 bp, Unknown
  misc_feature (1)..( 8): Result.003 file - promoters60/3239175
aatgcttt

SEQ ID NO: 128320 - DNA, 8 bp, Unknown
  misc_feature (1)..( 8): Result.003 file - promoters60/3239175
aatgcttt

SEQ ID NO: 128321 - DNA, 8 bp, Unknown
  misc_feature (1)..( 8): Result.003 file - promoters60/3239175
gaaagaca

SEQ ID NO: 128322 - DNA, 8 bp, Unknown
  misc_feature (1)..( 8): Result.003 file - promoters60/3239175
gaaagaaa

SEQ ID NO: 128323 - DNA, 8 bp, Unknown
  misc_feature (1)..( 8): Result.003 file - promoters60/3239175
caaaaaca

SEQ ID NO: 128324 - DNA, 7 bp, Unknown
  misc_feature (1)..( 7): Result.003 file - promoters60/3239175
atagttg

SEQ ID NO: 128325 - DNA, 7 bp, Unknown
  misc_feature (1)..( 7): Result.003 file - promoters60/3239175
atatttg

SEQ ID NO: 128326 - DNA, 6 bp, Unknown
  misc_feature (1)..( 6): Result.003 file - promoters60/3239175
taaaaa

SEQ ID NO: 128327 - DNA, 6 bp, Unknown
  misc_feature (1)..( 6): Result.003 file - promoters60/3239175
taaaaa

SEQ ID NO: 128328 - DNA, 9 bp, Unknown
  misc_feature (1)..( 9): Result.003 file - promoters60/3239175
aaaggaaga

SEQ ID NO: 128329 - DNA, 9 bp, Unknown
  misc_feature (1)..( 9): Result.003 file - promoters60/3239175
aaaagaaaa

SEQ ID NO: 128330 - DNA, 9 bp, Unknown
  misc_feature (1)..( 9): Result.003 file - promoters60/3239175
aaagtaaag

SEQ ID NO: 128331 - DNA, 9 bp, Unknown
  misc_feature (1)..( 9): Result.003 file - promoters60/3239175
gagaataac

SEQ ID NO: 128332 - DNA, 9 bp, Unknown
  misc_feature (1)..( 9): Result.003 file - promoters60/3239175
gagtatata

SEQ ID NO: 128333 - DNA, 9 bp, Unknown
  misc_feature (1)..( 9): Result.003 file - promoters60/3239175
ttgtatata

SEQ ID NO: 128334 - DNA, 7 bp, Unknown
  misc_feature (1)..( 7): Result.003 file - promoters60/3239175
tggctag

SEQ ID NO: 128335 - DNA, 7 bp, Unknown
  misc_feature (1)..( 7): Result.003 file - promoters60/3239175
tggttag

SEQ ID NO: 128336 - DNA, 6 bp, Unknown
  misc_feature (1)..( 6): Result.003 file - promoters60/3239175
agagta

SEQ ID NO: 128337 - DNA, 6 bp, Unknown
  misc_feature (1)..( 6): Result.003 file - promoters60/3239175
agagta

SEQ ID NO: 128338 - DNA, 8 bp, Unknown
  misc_feature (1)..( 8): Result.003 file - promoters60/3239175
ttgtactc

SEQ ID NO: 128339 - DNA, 8 bp, Unknown
  misc_feature (1)..( 8): Result.003 file - promoters60/3239175
ttgaactc

SEQ ID NO: 128340 - DNA, 7 bp, Unknown
  misc_feature (1)..( 7): Result.003 file - promoters60/3239175
tggattt

SEQ ID NO: 128341 - DNA, 7 bp, Unknown
  misc_feature (1)..( 7): Result.003 file - promoters60/3239175
tgggttt

SEQ ID NO: 128342 - DNA, 8 bp, Unknown
  misc_feature (1)..( 8): Result.003 file - promoters60/3239175
tctagtgt

SEQ ID NO: 128343 - DNA, 8 bp, Unknown
  misc_feature (1)..( 8): Result.003 file - promoters60/3239175
tctattgt

SEQ ID NO: 128344 - DNA, 7 bp, Unknown
  misc_feature (1)..( 7): Result.003 file - promoters60/3239175
actttag

SEQ ID NO: 128345 - DNA, 7 bp, Unknown
  misc_feature (1)..( 7): Result.003 file - promoters60/3239175
actttag

SEQ ID NO: 128346 - DNA, 6 bp, Unknown
  misc_feature (1)..( 6): Result.003 file - promoters60/3239175
ttaaag

SEQ ID NO: 128347 - DNA, 6 bp, Unknown
  misc_feature (1)..( 6): Result.003 file - promoters60/3239175
ttaaag

SEQ ID NO: 128348 - DNA, 6 bp, Unknown
  misc_feature (1)..( 6): Result.003 file - promoters60/3239175
agtaaa

SEQ ID NO: 128349 - DNA, 6 bp, Unknown
  misc_feature (1)..( 6): Result.003 file - promoters60/3239175
agtaaa

SEQ ID NO: 128350 - DNA, 7 bp, Unknown
  misc_feature (1)..( 7): Result.003 file - promoters60/3239175
aatcggg

SEQ ID NO: 128351 - DNA, 7 bp, Unknown
  misc_feature (1)..( 7): Result.003 file - promoters60/3239175
aattggg

SEQ ID NO: 128352 - DNA, 10 bp, Unknown
  misc_feature (1)..( 10): Result.003 file - promoters60/3239175
ggaaaagaaa

SEQ ID NO: 128353 - DNA, 10 bp, Unknown
  misc_feature (1)..( 10): Result.003 file - promoters60/3239175
ggaaatgaaa

SEQ ID NO: 128354 - DNA, 7 bp, Unknown
  misc_feature (1)..( 7): Result.003 file - promoters60/3239175
cccacta

SEQ ID NO: 128355 - DNA, 7 bp, Unknown
  misc_feature (1)..( 7): Result.003 file - promoters60/3239175
cccacta

SEQ ID NO: 128356 - DNA, 7 bp, Unknown
  misc_feature (1)..( 7): Result.003 file - promoters60/3239193
aattgat

SEQ ID NO: 128357 - DNA, 7 bp, Unknown
  misc_feature (1)..( 7): Result.003 file - promoters60/3239193
aattgaa

SEQ ID NO: 128358 - DNA, 7 bp, Unknown
  misc_feature (1)..( 7): Result.003 file - promoters60/3239193
gattgaa

SEQ ID NO: 128359 - DNA, 7 bp, Unknown
  misc_feature (1)..( 7): Result.003 file - promoters60/3239193
gaatagt

SEQ ID NO: 128360 - DNA, 7 bp, Unknown
  misc_feature (1)..( 7): Result.003 file - promoters60/3239193
gaataga

SEQ ID NO: 128361 - DNA, 7 bp, Unknown
  misc_feature (1)..( 7): Result.003 file - promoters60/3239193
gaaaaga

SEQ ID NO: 128362 - DNA, 9 bp, Unknown
  misc_feature (1)..( 9): Result.003 file - promoters60/3239193
gttataaaa

SEQ ID NO: 128363 - DNA, 9 bp, Unknown
  misc_feature (1)..( 9): Result.003 file - promoters60/3239193
ttgataaaa

SEQ ID NO: 128364 - DNA, 9 bp, Unknown
  misc_feature (1)..( 9): Result.003 file - promoters60/3239193
tatataaat

SEQ ID NO: 128365 - DNA, 7 bp, Unknown
  misc_feature (1)..( 7): Result.003 file - promoters60/3239193
cttgaag

SEQ ID NO: 128366 - DNA, 7 bp, Unknown
  misc_feature (1)..( 7): Result.003 file - promoters60/3239193
attgaag

SEQ ID NO: 128367 - DNA, 7 bp, Unknown
  misc_feature (1)..( 7): Result.003 file - promoters60/3239193
attgaac

SEQ ID NO: 128368 - DNA, 9 bp, Unknown
  misc_feature (1)..( 9): Result.003 file - promoters60/3239193
tgaaagaag

SEQ ID NO: 128369 - DNA, 9 bp, Unknown
  misc_feature (1)..( 9): Result.003 file - promoters60/3239193
aaaaataag

SEQ ID NO: 128370 - DNA, 9 bp, Unknown
  misc_feature (1)..( 9): Result.003 file - promoters60/3239193
aaaaatact

SEQ ID NO: 128371 - DNA, 7 bp, Unknown
  misc_feature (1)..( 7): Result.003 file - promoters60/3408983
tatatat

SEQ ID NO: 128372 - DNA, 7 bp, Unknown
  misc_feature (1)..( 7): Result.003 file - promoters60/3408983
tatctat

SEQ ID NO: 128373 - DNA, 6 bp, Unknown
  misc_feature (1)..( 6): Result.003 file - promoters60/3408983
agaatc

SEQ ID NO: 128374 - DNA, 6 bp, Unknown
  misc_feature (1)..( 6): Result.003 file - promoters60/3408983
agaatc

SEQ ID NO: 128375 - DNA, 7 bp, Unknown
  misc_feature (1)..( 7): Result.003 file - promoters60/3408983
tgtcata

SEQ ID NO: 128376 - DNA, 7 bp, Unknown
  misc_feature (1)..( 7): Result.003 file - promoters60/3408983
tgtaata

SEQ ID NO: 128377 - DNA, 7 bp, Unknown
  misc_feature (1)..( 7): Result.003 file - promoters60/3408983
gatggaa

SEQ ID NO: 128378 - DNA, 7 bp, Unknown
  misc_feature (1)..( 7): Result.003 file - promoters60/3408983
gattgaa

SEQ ID NO: 128379 - DNA, 8 bp, Unknown
  misc_feature (1)..( 8): Result.003 file - promoters60/3408983
aaatatga

SEQ ID NO: 128380 - DNA, 8 bp, Unknown
  misc_feature (1)..( 8): Result.003 file - promoters60/3408983
gaatgtga

SEQ ID NO: 128381 - DNA, 8 bp, Unknown
  misc_feature (1)..( 8): Result.003 file - promoters60/3408983
aaatattc

SEQ ID NO: 128382 - DNA, 8 bp, Unknown
  misc_feature (1)..( 8): Result.003 file - promoters60/3408983
aaggtata

SEQ ID NO: 128383 - DNA, 8 bp, Unknown
  misc_feature (1)..( 8): Result.003 file - promoters60/3408983
aagctata

SEQ ID NO: 128384 - DNA, 7 bp, Unknown
  misc_feature (1)..( 7): Result.003 file - promoters60/3408983
aaataaa

SEQ ID NO: 128385 - DNA, 7 bp, Unknown
  misc_feature (1)..( 7): Result.003 file - promoters60/3408983
aaataaa

SEQ ID NO: 128386 - DNA, 6 bp, Unknown
  misc_feature (1)..( 6): Result.003 file - promoters60/3408983
cataat

SEQ ID NO: 128387 - DNA, 6 bp, Unknown
  misc_feature (1)..( 6): Result.003 file - promoters60/3408983
cataat

SEQ ID NO: 128388 - DNA, 7 bp, Unknown
  misc_feature (1)..( 7): Result.003 file - promoters60/3408983
aaataaa

SEQ ID NO: 128389 - DNA, 7 bp, Unknown
  misc_feature (1)..( 7): Result.003 file - promoters60/3408983
aaaaaaa

SEQ ID NO: 128390 - DNA, 6 bp, Unknown
  misc_feature (1)..( 6): Result.003 file - promoters60/3408983
aaaata

SEQ ID NO: 128391 - DNA, 6 bp, Unknown
  misc_feature (1)..( 6): Result.003 file - promoters60/3408983
aaaata

SEQ ID NO: 128392 - DNA, 8 bp, Unknown
  misc_feature (1)..( 8): Result.003 file - promoters60/3408983
tttaaatt

SEQ ID NO: 128393 - DNA, 8 bp, Unknown
  misc_feature (1)..( 8): Result.003 file - promoters60/3408983
tttaaatt

SEQ ID NO: 128394 - DNA, 7 bp, Unknown
  misc_feature (1)..( 7): Result.003 file - promoters60/3408983
ttacttt

SEQ ID NO: 128395 - DNA, 7 bp, Unknown
  misc_feature (1)..( 7): Result.003 file - promoters60/3408983
ttaattt

SEQ ID NO: 128396 - DNA, 7 bp, Unknown
  misc_feature (1)..( 7): Result.003 file - promoters60/3408983
ttactaa

SEQ ID NO: 128397 - DNA, 7 bp, Unknown
  misc_feature (1)..( 7): Result.003 file - promoters60/3408983
ttattaa

SEQ ID NO: 128398 - DNA, 6 bp, Unknown
  misc_feature (1)..( 6): Result.003 file - promoters60/3408983
aattta

SEQ ID NO: 128399 - DNA, 6 bp, Unknown
  misc_feature (1)..( 6): Result.003 file - promoters60/3408983
aattta

SEQ ID NO: 128400 - DNA, 9 bp, Unknown
  misc_feature (1)..( 9): Result.003 file - promoters60/3408983
tctttctct

SEQ ID NO: 128401 - DNA, 9 bp, Unknown
  misc_feature (1)..( 9): Result.003 file - promoters60/3408983
tctctctct

SEQ ID NO: 128402 - DNA, 6 bp, Unknown
  misc_feature (1)..( 6): Result.003 file - promoters60/3408983
cgagaa

SEQ ID NO: 128403 - DNA, 6 bp, Unknown
  misc_feature (1)..( 6): Result.003 file - promoters60/3408983
cgagaa

SEQ ID NO: 128404 - DNA, 8 bp, Unknown
  misc_feature (1)..( 8): Result.003 file - promoters60/3408983
caacaaaa

SEQ ID NO: 128405 - DNA, 8 bp, Unknown
  misc_feature (1)..( 8): Result.003 file - promoters60/3408983
caacaaaa

SEQ ID NO: 128406 - DNA, 6 bp, Unknown
  misc_feature (1)..( 6): Result.003 file - promoters60/3408983
gagttt

SEQ ID NO: 128407 - DNA, 6 bp, Unknown
  misc_feature (1)..( 6): Result.003 file - promoters60/3408983
gagttt

SEQ ID NO: 128408 - DNA, 8 bp, Unknown
  misc_feature (1)..( 8): Result.003 file - promoters60/3409161
attttttt

SEQ ID NO: 128409 - DNA, 8 bp, Unknown
  misc_feature (1)..( 8): Result.003 file - promoters60/3409161
attttttt

SEQ ID NO: 128410 - DNA, 6 bp, Unknown
  misc_feature (1)..( 6): Result.003 file - promoters60/3409161
agtctt

SEQ ID NO: 128411 - DNA, 6 bp, Unknown
  misc_feature (1)..( 6): Result.003 file - promoters60/3409161
agtctt

SEQ ID NO: 128412 - DNA, 6 bp, Unknown
  misc_feature (1)..( 6): Result.003 file - promoters60/3409161
tctttt

SEQ ID NO: 128413 - DNA, 6 bp, Unknown
  misc_feature (1)..( 6): Result.003 file - promoters60/3409161
tctttt

SEQ ID NO: 128414 - DNA, 8 bp, Unknown
  misc_feature (1)..( 8): Result.003 file - promoters60/3409161
ttttgttt

SEQ ID NO: 128415 - DNA, 8 bp, Unknown
  misc_feature (1)..( 8): Result.003 file - promoters60/3409161
tttcgttt

SEQ ID NO: 128416 - DNA, 6 bp, Unknown
  misc_feature (1)..( 6): Result.003 file - promoters60/3409161
tttatt

SEQ ID NO: 128417 - DNA, 6 bp, Unknown
  misc_feature (1)..( 6): Result.003 file - promoters60/3409161
tttatt

SEQ ID NO: 128418 - DNA, 6 bp, Unknown
  misc_feature (1)..( 6): Result.003 file - promoters60/3409161
aaacag

SEQ ID NO: 128419 - DNA, 6 bp, Unknown
  misc_feature (1)..( 6): Result.003 file - promoters60/3409161
aaacag

SEQ ID NO: 128420 - DNA, 8 bp, Unknown
  misc_feature (1)..( 8): Result.003 file - promoters60/3409161
aaagtaca

SEQ ID NO: 128421 - DNA, 8 bp, Unknown
  misc_feature (1)..( 8): Result.003 file - promoters60/3409161
aaagaaca

SEQ ID NO: 128422 - DNA, 7 bp, Unknown
  misc_feature (1)..( 7): Result.003 file - promoters60/3409161
cagtgga

SEQ ID NO: 128423 - DNA, 7 bp, Unknown
  misc_feature (1)..( 7): Result.003 file - promoters60/3409161
cagagga

SEQ ID NO: 128424 - DNA, 8 bp, Unknown
  misc_feature (1)..( 8): Result.003 file - promoters60/3409161
ctaaggaa

SEQ ID NO: 128425 - DNA, 8 bp, Unknown
  misc_feature (1)..( 8): Result.003 file - promoters60/3409161
ctaacgaa

SEQ ID NO: 128426 - DNA, 7 bp, Unknown
  misc_feature (1)..( 7): Result.003 file - promoters60/3409161
ctcaaaa

SEQ ID NO: 128427 - DNA, 7 bp, Unknown
  misc_feature (1)..( 7): Result.003 file - promoters60/3409161
ctcaaaa

SEQ ID NO: 128428 - DNA, 6 bp, Unknown
  misc_feature (1)..( 6): Result.003 file - promoters60/3409161
caatgc

SEQ ID NO: 128429 - DNA, 6 bp, Unknown
  misc_feature (1)..( 6): Result.003 file - promoters60/3409161
caatgc

SEQ ID NO: 128430 - DNA, 6 bp, Unknown
  misc_feature (1)..( 6): Result.003 file - promoters60/3409161
catttc

SEQ ID NO: 128431 - DNA, 6 bp, Unknown
  misc_feature (1)..( 6): Result.003 file - promoters60/3409161
catttc

SEQ ID NO: 128432 - DNA, 6 bp, Unknown
  misc_feature (1)..( 6): Result.003 file - promoters60/3409161
ccccca

SEQ ID NO: 128433 - DNA, 6 bp, Unknown
  misc_feature (1)..( 6): Result.003 file - promoters60/3409161
ccccca

SEQ ID NO: 128434 - DNA, 6 bp, Unknown
  misc_feature (1)..( 6): Result.003 file - promoters60/3409161
gagata

SEQ ID NO: 128435 - DNA, 6 bp, Unknown
  misc_feature (1)..( 6): Result.003 file - promoters60/3409161
gagata

SEQ ID NO: 128436 - DNA, 10 bp, Unknown
  misc_feature (1)..( 10): Result.003 file - promoters60/3409165
acaacaaagt

SEQ ID NO: 128437 - DNA, 10 bp, Unknown
  misc_feature (1)..( 10): Result.003 file - promoters60/3409165
aaaacaaacg

SEQ ID NO: 128438 - DNA, 10 bp, Unknown
  misc_feature (1)..( 10): Result.003 file - promoters60/3409165
ggaaaaaaaa

SEQ ID NO: 128439 - DNA, 10 bp, Unknown
  misc_feature (1)..( 10): Result.003 file - promoters60/3409165
ttaaaaaaag

SEQ ID NO: 128440 - DNA, 10 bp, Unknown
  misc_feature (1)..( 10): Result.003 file - promoters60/3409165
aaaacaattc

SEQ ID NO: 128441 - DNA, 10 bp, Unknown
  misc_feature (1)..( 10): Result.003 file - promoters60/3409165
caaacaaatg

SEQ ID NO: 128442 - DNA, 10 bp, Unknown
  misc_feature (1)..( 10): Result.003 file - promoters60/3409165
ataaaaaata

SEQ ID NO: 128443 - DNA, 10 bp, Unknown
  misc_feature (1)..( 10): Result.003 file - promoters60/3409165
ccactatata

SEQ ID NO: 128444 - DNA, 10 bp, Unknown
  misc_feature (1)..( 10): Result.003 file - promoters60/3409165
ccattatata

SEQ ID NO: 128445 - DNA, 10 bp, Unknown
  misc_feature (1)..( 10): Result.003 file - promoters60/3409165
cttttatata

SEQ ID NO: 128446 - DNA, 10 bp, Unknown
  misc_feature (1)..( 10): Result.003 file - promoters60/3409165
cttgtatata

SEQ ID NO: 128447 - DNA, 10 bp, Unknown
  misc_feature (1)..( 10): Result.003 file - promoters60/3409165
cgcctatata

SEQ ID NO: 128448 - DNA, 10 bp, Unknown
  misc_feature (1)..( 10): Result.003 file - promoters60/3409165
tccctataaa

SEQ ID NO: 128449 - DNA, 11 bp, Unknown
  misc_feature (1)..( 11): Result.003 file - promoters60/3409165
aacgaaaaata

SEQ ID NO: 128450 - DNA, 11 bp, Unknown
  misc_feature (1)..( 11): Result.003 file - promoters60/3409165
attataaaata

SEQ ID NO: 128451 - DNA, 11 bp, Unknown
  misc_feature (1)..( 11): Result.003 file - promoters60/3409165
tataaaaaatt

SEQ ID NO: 128452 - DNA, 11 bp, Unknown
  misc_feature (1)..( 11): Result.003 file - promoters60/3409165
attagaaaatt

SEQ ID NO: 128453 - DNA, 11 bp, Unknown
  misc_feature (1)..( 11): Result.003 file - promoters60/3409165
aggagataata

SEQ ID NO: 128454 - DNA, 11 bp, Unknown
  misc_feature (1)..( 11): Result.003 file - promoters60/3409165
catctaacata

SEQ ID NO: 128455 - DNA, 12 bp, Unknown
  misc_feature (1)..( 12): Result.003 file - promoters60/3409165
taaataaaagca

SEQ ID NO: 128456 - DNA, 12 bp, Unknown
  misc_feature (1)..( 12): Result.003 file - promoters60/3409165
attataaaatac

SEQ ID NO: 128457 - DNA, 12 bp, Unknown
  misc_feature (1)..( 12): Result.003 file - promoters60/3409165
attagaaaattt

SEQ ID NO: 128458 - DNA, 12 bp, Unknown
  misc_feature (1)..( 12): Result.003 file - promoters60/3409165
tttacaaacttt

SEQ ID NO: 128459 - DNA, 12 bp, Unknown
  misc_feature (1)..( 12): Result.003 file - promoters60/3409165
aggagataatat

SEQ ID NO: 128460 - DNA, 12 bp, Unknown
  misc_feature (1)..( 12): Result.003 file - promoters60/3409165
ctaacataggca

SEQ ID NO: 128461 - DNA, 8 bp, Unknown
  misc_feature (1)..( 8): Result.003 file - promoters60/3409214
cccaaaga

SEQ ID NO: 128462 - DNA, 8 bp, Unknown
  misc_feature (1)..( 8): Result.003 file - promoters60/3409214
agcaaaga

SEQ ID NO: 128463 - DNA, 8 bp, Unknown
  misc_feature (1)..( 8): Result.003 file - promoters60/3409214
aaaaaagc

SEQ ID NO: 128464 - DNA, 8 bp, Unknown
  misc_feature (1)..( 8): Result.003 file - promoters60/3409214
gatccttt

SEQ ID NO: 128465 - DNA, 8 bp, Unknown
  misc_feature (1)..( 8): Result.003 file - promoters60/3409214
tttccttt

SEQ ID NO: 128466 - DNA, 8 bp, Unknown
  misc_feature (1)..( 8): Result.003 file - promoters60/3409214
ttttctta

SEQ ID NO: 128467 - DNA, 9 bp, Unknown
  misc_feature (1)..( 9): Result.003 file - promoters60/3409214
acttttgtt

SEQ ID NO: 128468 - DNA, 9 bp, Unknown
  misc_feature (1)..( 9): Result.003 file - promoters60/3409214
ttctttgtt

SEQ ID NO: 128469 - DNA, 9 bp, Unknown
  misc_feature (1)..( 9): Result.003 file - promoters60/3409214
ttcttcgtt

SEQ ID NO: 128470 - DNA, 7 bp, Unknown
  misc_feature (1)..( 7): Result.003 file - promoters60/3409390
cacttca

SEQ ID NO: 128471 - DNA, 7 bp, Unknown
  misc_feature (1)..( 7): Result.003 file - promoters60/3409390
cacctca

SEQ ID NO: 128472 - DNA, 6 bp, Unknown
  misc_feature (1)..( 6): Result.003 file - promoters60/3409390
cttttc

SEQ ID NO: 128473 - DNA, 6 bp, Unknown
  misc_feature (1)..( 6): Result.003 file - promoters60/3409390
cttttc

SEQ ID NO: 128474 - DNA, 6 bp, Unknown
  misc_feature (1)..( 6): Result.003 file - promoters60/3409390
aaaatt

SEQ ID NO: 128475 - DNA, 6 bp, Unknown
  misc_feature (1)..( 6): Result.003 file - promoters60/3409390
aaaatt

SEQ ID NO: 128476 - DNA, 9 bp, Unknown
  misc_feature (1)..( 9): Result.003 file - promoters60/3409390
acataaata

SEQ ID NO: 128477 - DNA, 9 bp, Unknown
  misc_feature (1)..( 9): Result.003 file - promoters60/3409390
tcatcaata

SEQ ID NO: 128478 - DNA, 9 bp, Unknown
  misc_feature (1)..( 9): Result.003 file - promoters60/3409390
acacaaatc

SEQ ID NO: 128479 - DNA, 9 bp, Unknown
  misc_feature (1)..( 9): Result.003 file - promoters60/3409390
ttattcaat

SEQ ID NO: 128480 - DNA, 9 bp, Unknown
  misc_feature (1)..( 9): Result.003 file - promoters60/3409390
ttatacaat

SEQ ID NO: 128481 - DNA, 7 bp, Unknown
  misc_feature (1)..( 7): Result.003 file - promoters60/3409390
ataaggt

SEQ ID NO: 128482 - DNA, 7 bp, Unknown
  misc_feature (1)..( 7): Result.003 file - promoters60/3409390
ataaggt

SEQ ID NO: 128483 - DNA, 9 bp, Unknown
  misc_feature (1)..( 9): Result.003 file - promoters60/3409390
tttatttta

SEQ ID NO: 128484 - DNA, 9 bp, Unknown
  misc_feature (1)..( 9): Result.003 file - promoters60/3409390
tttattttt

SEQ ID NO: 128485 - DNA, 9 bp, Unknown
  misc_feature (1)..( 9): Result.003 file - promoters60/3409390
aacattttt

SEQ ID NO: 128486 - DNA, 6 bp, Unknown
  misc_feature (1)..( 6): Result.003 file - promoters60/3409390
tttttt

SEQ ID NO: 128487 - DNA, 6 bp, Unknown
  misc_feature (1)..( 6): Result.003 file - promoters60/3409390
tttttt

SEQ ID NO: 128488 - DNA, 7 bp, Unknown
  misc_feature (1)..( 7): Result.003 file - promoters60/3409390
aaaaaaa

SEQ ID NO: 128489 - DNA, 7 bp, Unknown
  misc_feature (1)..( 7): Result.003 file - promoters60/3409390
aaataaa

SEQ ID NO: 128490 - DNA, 7 bp, Unknown
  misc_feature (1)..( 7): Result.003 file - promoters60/3409390
aaaaaca

SEQ ID NO: 128491 - DNA, 7 bp, Unknown
  misc_feature (1)..( 7): Result.003 file - promoters60/3409390
aaacaca

SEQ ID NO: 128492 - DNA, 6 bp, Unknown
  misc_feature (1)..( 6): Result.003 file - promoters60/3409390
acaaaa

SEQ ID NO: 128493 - DNA, 6 bp, Unknown
  misc_feature (1)..( 6): Result.003 file - promoters60/3409390
acaaaa

SEQ ID NO: 128494 - DNA, 6 bp, Unknown
  misc_feature (1)..( 6): Result.003 file - promoters60/3409390
aagaaa

SEQ ID NO: 128495 - DNA, 6 bp, Unknown
  misc_feature (1)..( 6): Result.003 file - promoters60/3409390
aagaaa

SEQ ID NO: 128496 - DNA, 6 bp, Unknown
  misc_feature (1)..( 6): Result.003 file - promoters60/3409390
cgtggc

SEQ ID NO: 128497 - DNA, 6 bp, Unknown
  misc_feature (1)..( 6): Result.003 file - promoters60/3409390
cgtggc

SEQ ID NO: 128498 - DNA, 7 bp, Unknown
  misc_feature (1)..( 7): Result.003 file - promoters60/3409390
agttttt

SEQ ID NO: 128499 - DNA, 7 bp, Unknown
  misc_feature (1)..( 7): Result.003 file - promoters60/3409390
agtattt

SEQ ID NO: 128500 - DNA, 7 bp, Unknown
  misc_feature (1)..( 7): Result.003 file - promoters60/3409390
tttgctg

SEQ ID NO: 128501 - DNA, 7 bp, Unknown
  misc_feature (1)..( 7): Result.003 file - promoters60/3409390
ttttctg

SEQ ID NO: 128502 - DNA, 8 bp, Unknown
  misc_feature (1)..( 8): Result.003 file - promoters60/3409390
attttttt

SEQ ID NO: 128503 - DNA, 8 bp, Unknown
  misc_feature (1)..( 8): Result.003 file - promoters60/3409390
attttttt

SEQ ID NO: 128504 - DNA, 6 bp, Unknown
  misc_feature (1)..( 6): Result.003 file - promoters60/3409390
ggttag

SEQ ID NO: 128505 - DNA, 6 bp, Unknown
  misc_feature (1)..( 6): Result.003 file - promoters60/3409390
ggttag

SEQ ID NO: 128506 - DNA, 6 bp, Unknown
  misc_feature (1)..( 6): Result.003 file - promoters60/3409390
tcaatc

SEQ ID NO: 128507 - DNA, 6 bp, Unknown
  misc_feature (1)..( 6): Result.003 file - promoters60/3409390
tcaatc

SEQ ID NO: 128508 - DNA, 6 bp, Unknown
  misc_feature (1)..( 6): Result.003 file - promoters60/3409390
aagcta

SEQ ID NO: 128509 - DNA, 6 bp, Unknown
  misc_feature (1)..( 6): Result.003 file - promoters60/3409390
aagcta

SEQ ID NO: 128510 - DNA, 7 bp, Unknown
  misc_feature (1)..( 7): Result.003 file - promoters60/3409637
tttgtta

SEQ ID NO: 128511 - DNA, 7 bp, Unknown
  misc_feature (1)..( 7): Result.003 file - promoters60/3409637
tttgtta

SEQ ID NO: 128512 - DNA, 7 bp, Unknown
  misc_feature (1)..( 7): Result.003 file - promoters60/3409637
tttatta

SEQ ID NO: 128513 - DNA, 8 bp, Unknown
  misc_feature (1)..( 8): Result.003 file - promoters60/3409637
catggata

SEQ ID NO: 128514 - DNA, 8 bp, Unknown
  misc_feature (1)..( 8): Result.003 file - promoters60/3409637
catggatt

SEQ ID NO: 128515 - DNA, 8 bp, Unknown
  misc_feature (1)..( 8): Result.003 file - promoters60/3409637
tatgaatt

SEQ ID NO: 128516 - DNA, 8 bp, Unknown
  misc_feature (1)..( 8): Result.003 file - promoters60/3409637
tttgaatt

SEQ ID NO: 128517 - DNA, 8 bp, Unknown
  misc_feature (1)..( 8): Result.003 file - promoters60/3409637
caatatct

SEQ ID NO: 128518 - DNA, 8 bp, Unknown
  misc_feature (1)..( 8): Result.003 file - promoters60/3409637
aaatttct

SEQ ID NO: 128519 - DNA, 9 bp, Unknown
  misc_feature (1)..( 9): Result.003 file - promoters60/3409637
taactttta

SEQ ID NO: 128520 - DNA, 9 bp, Unknown
  misc_feature (1)..( 9): Result.003 file - promoters60/3409637
ggtatttct

SEQ ID NO: 128521 - DNA, 11 bp, Unknown
  misc_feature (1)..( 11): Result.003 file - promoters60/3409637
aattttttgaa

SEQ ID NO: 128522 - DNA, 11 bp, Unknown
  misc_feature (1)..( 11): Result.003 file - promoters60/3409637
aatttttttct

SEQ ID NO: 128523 - DNA, 11 bp, Unknown
  misc_feature (1)..( 11): Result.003 file - promoters60/3409637
agtttatgaat

SEQ ID NO: 128524 - DNA, 8 bp, Unknown
  misc_feature (1)..( 8): Result.003 file - promoters60/3409637
ttttgttt

SEQ ID NO: 128525 - DNA, 8 bp, Unknown
  misc_feature (1)..( 8): Result.003 file - promoters60/3409637
tttggttt

SEQ ID NO: 128526 - DNA, 8 bp, Unknown
  misc_feature (1)..( 8): Result.003 file - promoters60/3409637
cttggttg

SEQ ID NO: 128527 - DNA, 7 bp, Unknown
  misc_feature (1)..( 7): Result.003 file - promoters60/3409637
ttttacc

SEQ ID NO: 128528 - DNA, 7 bp, Unknown
  misc_feature (1)..( 7): Result.003 file - promoters60/3409637
tttgacc

SEQ ID NO: 128529 - DNA, 7 bp, Unknown
  misc_feature (1)..( 7): Result.003 file - promoters60/3409637
tttaacc

SEQ ID NO: 128530 - DNA, 13 bp, Unknown
  misc_feature (1)..( 13): Result.003 file - promoters60/3433703
aaagaatttctcc

SEQ ID NO: 128531 - DNA, 13 bp, Unknown
  misc_feature (1)..( 13): Result.003 file - promoters60/3433703
acggaattcctcc

SEQ ID NO: 128532 - DNA, 13 bp, Unknown
  misc_feature (1)..( 13): Result.003 file - promoters60/3433703
aaataattgataa

SEQ ID NO: 128533 - DNA, 13 bp, Unknown
  misc_feature (1)..( 13): Result.003 file - promoters60/3433703
ggtcgatttcttg

SEQ ID NO: 128534 - DNA, 13 bp, Unknown
  misc_feature (1)..( 13): Result.003 file - promoters60/3433703
tataaatatatct

SEQ ID NO: 128535 - DNA, 12 bp, Unknown
  misc_feature (1)..( 12): Result.003 file - promoters60/3433703
caaagaatttct

SEQ ID NO: 128536 - DNA, 12 bp, Unknown
  misc_feature (1)..( 12): Result.003 file - promoters60/3433703
caaacaatcatt

SEQ ID NO: 128537 - DNA, 12 bp, Unknown
  misc_feature (1)..( 12): Result.003 file - promoters60/3433703
aaaataattgat

SEQ ID NO: 128538 - DNA, 12 bp, Unknown
  misc_feature (1)..( 12): Result.003 file - promoters60/3433703
caaacaatcatt

SEQ ID NO: 128539 - DNA, 12 bp, Unknown
  misc_feature (1)..( 12): Result.003 file - promoters60/3433703
taaatatatctt

SEQ ID NO: 128540 - DNA, 9 bp, Unknown
  misc_feature (1)..( 9): Result.003 file - promoters60/3433703
aaatcaatc

SEQ ID NO: 128541 - DNA, 9 bp, Unknown
  misc_feature (1)..( 9): Result.003 file - promoters60/3433703
caatcaaat

SEQ ID NO: 128542 - DNA, 9 bp, Unknown
  misc_feature (1)..( 9): Result.003 file - promoters60/3433703
aaaacaatg

SEQ ID NO: 128543 - DNA, 9 bp, Unknown
  misc_feature (1)..( 9): Result.003 file - promoters60/3433703
taaacaaca

SEQ ID NO: 128544 - DNA, 9 bp, Unknown
  misc_feature (1)..( 9): Result.003 file - promoters60/3433703
aaaacattt

SEQ ID NO: 128545 - DNA, 12 bp, Unknown
  misc_feature (1)..( 12): Result.003 file - promoters60/3433703
tctataaaaaaa

SEQ ID NO: 128546 - DNA, 12 bp, Unknown
  misc_feature (1)..( 12): Result.003 file - promoters60/3433703
catataaatctc

SEQ ID NO: 128547 - DNA, 12 bp, Unknown
  misc_feature (1)..( 12): Result.003 file - promoters60/3433703
tatataaatagt

SEQ ID NO: 128548 - DNA, 12 bp, Unknown
  misc_feature (1)..( 12): Result.003 file - promoters60/3433703
tatatatatctc

SEQ ID NO: 128549 - DNA, 12 bp, Unknown
  misc_feature (1)..( 12): Result.003 file - promoters60/3433703
tatttatatgtt

SEQ ID NO: 128550 - DNA, 12 bp, Unknown
  misc_feature (1)..( 12): Result.003 file - promoters60/3433703
gctataaaagga

SEQ ID NO: 128551 - DNA, 12 bp, Unknown
  misc_feature (1)..( 12): Result.003 file - promoters60/3433703
tatatatatctc

SEQ ID NO: 128552 - DNA, 12 bp, Unknown
  misc_feature (1)..( 12): Result.003 file - promoters60/3433703
tatttatatgtt

SEQ ID NO: 128553 - DNA, 12 bp, Unknown
  misc_feature (1)..( 12): Result.003 file - promoters60/3433703
catataaatctc

SEQ ID NO: 128554 - DNA, 12 bp, Unknown
  misc_feature (1)..( 12): Result.003 file - promoters60/3433703
tatatataaata

SEQ ID NO: 128555 - DNA, 12 bp, Unknown
  misc_feature (1)..( 12): Result.003 file - promoters60/3433703
gctataaaagga

SEQ ID NO: 128556 - DNA, 11 bp, Unknown
  misc_feature (1)..( 11): Result.003 file - promoters60/3433703
aatcattttac

SEQ ID NO: 128557 - DNA, 11 bp, Unknown
  misc_feature (1)..( 11): Result.003 file - promoters60/3433703
aattattacga

SEQ ID NO: 128558 - DNA, 11 bp, Unknown
  misc_feature (1)..( 11): Result.003 file - promoters60/3433703
aatgatttctt

SEQ ID NO: 128559 - DNA, 11 bp, Unknown
  misc_feature (1)..( 11): Result.003 file - promoters60/3433703
tatcatttttg

SEQ ID NO: 128560 - DNA, 11 bp, Unknown
  misc_feature (1)..( 11): Result.003 file - promoters60/3433703
gtcgatttctt

SEQ ID NO: 128561 - DNA, 12 bp, Unknown
  misc_feature (1)..( 12): Result.003 file - promoters60/3433799
gattgataacag

SEQ ID NO: 128562 - DNA, 12 bp, Unknown
  misc_feature (1)..( 12): Result.003 file - promoters60/3433799
gattgttaacag

SEQ ID NO: 128563 - DNA, 12 bp, Unknown
  misc_feature (1)..( 12): Result.003 file - promoters60/3433799
tattaataatcg

SEQ ID NO: 128564 - DNA, 7 bp, Unknown
  misc_feature (1)..( 7): Result.003 file - promoters60/3433799
tggcaaa

SEQ ID NO: 128565 - DNA, 7 bp, Unknown
  misc_feature (1)..( 7): Result.003 file - promoters60/3433799
tggaaaa

SEQ ID NO: 128566 - DNA, 7 bp, Unknown
  misc_feature (1)..( 7): Result.003 file - promoters60/3433799
tggaaac

SEQ ID NO: 128567 - DNA, 9 bp, Unknown
  misc_feature (1)..( 9): Result.003 file - promoters60/3433799
aaatcattg

SEQ ID NO: 128568 - DNA, 9 bp, Unknown
  misc_feature (1)..( 9): Result.003 file - promoters60/3433799
aaaccattt

SEQ ID NO: 128569 - DNA, 9 bp, Unknown
  misc_feature (1)..( 9): Result.003 file - promoters60/3433799
tatccattt

SEQ ID NO: 128570 - DNA, 9 bp, Unknown
  misc_feature (1)..( 9): Result.003 file - promoters60/3433799
ctttataat

SEQ ID NO: 128571 - DNA, 9 bp, Unknown
  misc_feature (1)..( 9): Result.003 file - promoters60/3433799
cattaaaat

SEQ ID NO: 128572 - DNA, 10 bp, Unknown
  misc_feature (1)..( 10): Result.003 file - promoters60/3433799
acttcataga

SEQ ID NO: 128573 - DNA, 8 bp, Unknown
  misc_feature (1)..( 8): Result.003 file - promoters60/3433831
ttgcattt

SEQ ID NO: 128574 - DNA, 8 bp, Unknown
  misc_feature (1)..( 8): Result.003 file - promoters60/3433831
ttgcattt

SEQ ID NO: 128575 - DNA, 8 bp, Unknown
  misc_feature (1)..( 8): Result.003 file - promoters60/3433831
ataaaaaa

SEQ ID NO: 128576 - DNA, 8 bp, Unknown
  misc_feature (1)..( 8): Result.003 file - promoters60/3433831
ataaaaaa

SEQ ID NO: 128577 - DNA, 7 bp, Unknown
  misc_feature (1)..( 7): Result.003 file - promoters60/3433831
taagaaa

SEQ ID NO: 128578 - DNA, 7 bp, Unknown
  misc_feature (1)..( 7): Result.003 file - promoters60/3433831
taacaaa

SEQ ID NO: 128579 - DNA, 7 bp, Unknown
  misc_feature (1)..( 7): Result.003 file - promoters60/3433831
agaatta

SEQ ID NO: 128580 - DNA, 7 bp, Unknown
  misc_feature (1)..( 7): Result.003 file - promoters60/3433831
agactta

SEQ ID NO: 128581 - DNA, 9 bp, Unknown
  misc_feature (1)..( 9): Result.003 file - promoters60/3433831
attcgataa

SEQ ID NO: 128582 - DNA, 9 bp, Unknown
  misc_feature (1)..( 9): Result.003 file - promoters60/3433831
attagataa

SEQ ID NO: 128583 - DNA, 7 bp, Unknown
  misc_feature (1)..( 7): Result.003 file - promoters60/3433831
ttaagaa

SEQ ID NO: 128584 - DNA, 7 bp, Unknown
  misc_feature (1)..( 7): Result.003 file - promoters60/3433831
ttatgaa

SEQ ID NO: 128585 - DNA, 6 bp, Unknown
  misc_feature (1)..( 6): Result.003 file - promoters60/3433831
ataatt

SEQ ID NO: 128586 - DNA, 6 bp, Unknown
  misc_feature (1)..( 6): Result.003 file - promoters60/3433831
ataatt

SEQ ID NO: 128587 - DNA, 6 bp, Unknown
  misc_feature (1)..( 6): Result.003 file - promoters60/3433831
tttaat

SEQ ID NO: 128588 - DNA, 6 bp, Unknown
  misc_feature (1)..( 6): Result.003 file - promoters60/3433831
tttaat

SEQ ID NO: 128589 - DNA, 7 bp, Unknown
  misc_feature (1)..( 7): Result.003 file - promoters60/3433831
gagagat

SEQ ID NO: 128590 - DNA, 7 bp, Unknown
  misc_feature (1)..( 7): Result.003 file - promoters60/3433831
gagtgat

SEQ ID NO: 128591 - DNA, 8 bp, Unknown
  misc_feature (1)..( 8): Result.003 file - promoters60/3433831
cacaattg

SEQ ID NO: 128592 - DNA, 8 bp, Unknown
  misc_feature (1)..( 8): Result.003 file - promoters60/3433831
cacgattg

SEQ ID NO: 128593 - DNA, 7 bp, Unknown
  misc_feature (1)..( 7): Result.003 file - promoters60/3433831
atgacaa

SEQ ID NO: 128594 - DNA, 7 bp, Unknown
  misc_feature (1)..( 7): Result.003 file - promoters60/3433831
atgtcaa

SEQ ID NO: 128595 - DNA, 6 bp, Unknown
  misc_feature (1)..( 6): Result.003 file - promoters60/3433831
tcatat

SEQ ID NO: 128596 - DNA, 6 bp, Unknown
  misc_feature (1)..( 6): Result.003 file - promoters60/3433831
tcatat

SEQ ID NO: 128597 - DNA, 7 bp, Unknown
  misc_feature (1)..( 7): Result.003 file - promoters60/3433831
ttaggtg

SEQ ID NO: 128598 - DNA, 7 bp, Unknown
  misc_feature (1)..( 7): Result.003 file - promoters60/3433831
ttatgtg

SEQ ID NO: 128599 - DNA, 8 bp, Unknown
  misc_feature (1)..( 8): Result.003 file - promoters60/3433831
atatatac

SEQ ID NO: 128600 - DNA, 8 bp, Unknown
  misc_feature (1)..( 8): Result.003 file - promoters60/3433831
atacatac

SEQ ID NO: 128601 - DNA, 6 bp, Unknown
  misc_feature (1)..( 6): Result.003 file - promoters60/3433831
ttcaaa

SEQ ID NO: 128602 - DNA, 6 bp, Unknown
  misc_feature (1)..( 6): Result.003 file - promoters60/3433831
ttcaaa

SEQ ID NO: 128603 - DNA, 11 bp, Unknown
  misc_feature (1)..( 11): Result.003 file - promoters60/3433904
agtaaaccaac

SEQ ID NO: 128604 - DNA, 11 bp, Unknown
  misc_feature (1)..( 11): Result.003 file - promoters60/3433904
atcaaaccaga

SEQ ID NO: 128605 - DNA, 11 bp, Unknown
  misc_feature (1)..( 11): Result.003 file - promoters60/3433904
cgtagaccaag

SEQ ID NO: 128606 - DNA, 11 bp, Unknown
  misc_feature (1)..( 11): Result.003 file - promoters60/3433904
ctgtaacaaac

SEQ ID NO: 128607 - DNA, 11 bp, Unknown
  misc_feature (1)..( 11): Result.003 file - promoters60/3433904
agtagactctc

SEQ ID NO: 128608 - DNA, 11 bp, Unknown
  misc_feature (1)..( 11): Result.003 file - promoters60/3433904
agtagaacgca

SEQ ID NO: 128609 - DNA, 10 bp, Unknown
  misc_feature (1)..( 10): Result.003 file - promoters60/3433926
attcttagaa

SEQ ID NO: 128610 - DNA, 10 bp, Unknown
  misc_feature (1)..( 10): Result.003 file - promoters60/3433926
catcttagca

SEQ ID NO: 128611 - DNA, 10 bp, Unknown
  misc_feature (1)..( 10): Result.003 file - promoters60/3433926
attgttaacg

SEQ ID NO: 128612 - DNA, 10 bp, Unknown
  misc_feature (1)..( 10): Result.003 file - promoters60/3433926
aatcttggca

SEQ ID NO: 128613 - DNA, 10 bp, Unknown
  misc_feature (1)..( 10): Result.003 file - promoters60/3433926
tatcttggag

SEQ ID NO: 128614 - DNA, 10 bp, Unknown
  misc_feature (1)..( 10): Result.003 file - promoters60/3433926
attgttccct

SEQ ID NO: 128615 - DNA, 8 bp, Unknown
  misc_feature (1)..( 8): Result.003 file - promoters60/3433926
aattctta

SEQ ID NO: 128616 - DNA, 8 bp, Unknown
  misc_feature (1)..( 8): Result.003 file - promoters60/3433926
aattcttt

SEQ ID NO: 128617 - DNA, 8 bp, Unknown
  misc_feature (1)..( 8): Result.003 file - promoters60/3433926
cattgtta

SEQ ID NO: 128618 - DNA, 8 bp, Unknown
  misc_feature (1)..( 8): Result.003 file - promoters60/3433926
gattcttg

SEQ ID NO: 128619 - DNA, 8 bp, Unknown
  misc_feature (1)..( 8): Result.003 file - promoters60/3433926
ccttcttt

SEQ ID NO: 128620 - DNA, 8 bp, Unknown
  misc_feature (1)..( 8): Result.003 file - promoters60/3433926
tattgttc

SEQ ID NO: 128621 - DNA, 9 bp, Unknown
  misc_feature (1)..( 9): Result.003 file - promoters60/3433978
caatgaaac

SEQ ID NO: 128622 - DNA, 9 bp, Unknown
  misc_feature (1)..( 9): Result.003 file - promoters60/3433978
aaataaaaa

SEQ ID NO: 128623 - DNA, 9 bp, Unknown
  misc_feature (1)..( 9): Result.003 file - promoters60/3433978
aaataaagt

SEQ ID NO: 128624 - DNA, 9 bp, Unknown
  misc_feature (1)..( 9): Result.003 file - promoters60/3433978
caatagagt

SEQ ID NO: 128625 - DNA, 8 bp, Unknown
  misc_feature (1)..( 8): Result.003 file - promoters60/3433978
ttttgttc

SEQ ID NO: 128626 - DNA, 8 bp, Unknown
  misc_feature (1)..( 8): Result.003 file - promoters60/3433978
ttttcttc

SEQ ID NO: 128627 - DNA, 8 bp, Unknown
  misc_feature (1)..( 8): Result.003 file - promoters60/3433978
ttttgttg

SEQ ID NO: 128628 - DNA, 8 bp, Unknown
  misc_feature (1)..( 8): Result.003 file - promoters60/3433978
tgttgttg

SEQ ID NO: 128629 - DNA, 9 bp, Unknown
  misc_feature (1)..( 9): Result.003 file - promoters60/3433978
aaaattata

SEQ ID NO: 128630 - DNA, 9 bp, Unknown
  misc_feature (1)..( 9): Result.003 file - promoters60/3433978
aaacttata

SEQ ID NO: 128631 - DNA, 9 bp, Unknown
  misc_feature (1)..( 9): Result.003 file - promoters60/3433978
aaagttata

SEQ ID NO: 128632 - DNA, 9 bp, Unknown
  misc_feature (1)..( 9): Result.003 file - promoters60/3433978
gaagtcata

SEQ ID NO: 128633 - DNA, 8 bp, Unknown
  misc_feature (1)..( 8): Result.003 file - promoters60/3433978
ttattaaa

SEQ ID NO: 128634 - DNA, 8 bp, Unknown
  misc_feature (1)..( 8): Result.003 file - promoters60/3433978
ttattaat

SEQ ID NO: 128635 - DNA, 9 bp, Unknown
  misc_feature (1)..( 9): Result.003 file - promoters60/3433978
caattcaag

SEQ ID NO: 128636 - DNA, 9 bp, Unknown
  misc_feature (1)..( 9): Result.003 file - promoters60/3433978
ttattatat

SEQ ID NO: 128637 - DNA, 8 bp, Unknown
  misc_feature (1)..( 8): Result.003 file - promoters60/3433998
acatatct

SEQ ID NO: 128638 - DNA, 8 bp, Unknown
  misc_feature (1)..( 8): Result.003 file - promoters60/3433998
ccatctct

SEQ ID NO: 128639 - DNA, 8 bp, Unknown
  misc_feature (1)..( 8): Result.003 file - promoters60/3433998
acatatct

SEQ ID NO: 128640 - DNA, 7 bp, Unknown
  misc_feature (1)..( 7): Result.003 file - promoters60/3433998
caaaaaa

SEQ ID NO: 128641 - DNA, 7 bp, Unknown
  misc_feature (1)..( 7): Result.003 file - promoters60/3433998
caagaaa

SEQ ID NO: 128642 - DNA, 7 bp, Unknown
  misc_feature (1)..( 7): Result.003 file - promoters60/3433998
caaaaac

SEQ ID NO: 128643 - DNA, 8 bp, Unknown
  misc_feature (1)..( 8): Result.003 file - promoters60/3433998
aaaaattc

SEQ ID NO: 128644 - DNA, 8 bp, Unknown
  misc_feature (1)..( 8): Result.003 file - promoters60/3433998
caaagttc

SEQ ID NO: 128645 - DNA, 8 bp, Unknown
  misc_feature (1)..( 8): Result.003 file - promoters60/3433998
caaagtga

SEQ ID NO: 128646 - DNA, 8 bp, Unknown
  misc_feature (1)..( 8): Result.003 file - promoters60/3433998
gtttaaaa

SEQ ID NO: 128647 - DNA, 8 bp, Unknown
  misc_feature (1)..( 8): Result.003 file - promoters60/3433998
ttttaaaa

SEQ ID NO: 128648 - DNA, 9 bp, Unknown
  misc_feature (1)..( 9): Result.003 file - promoters60/3433998
ttttataaa

SEQ ID NO: 128649 - DNA, 8 bp, Unknown
  misc_feature (1)..( 8): Result.003 file - promoters60/3433998
tcttatct

SEQ ID NO: 128650 - DNA, 8 bp, Unknown
  misc_feature (1)..( 8): Result.003 file - promoters60/3433998
gcttctct

SEQ ID NO: 128651 - DNA, 8 bp, Unknown
  misc_feature (1)..( 8): Result.003 file - promoters60/3433998
tcttatga

SEQ ID NO: 128652 - DNA, 9 bp, Unknown
  misc_feature (1)..( 9): Result.003 file - promoters60/3433998
cacatatcc

SEQ ID NO: 128653 - DNA, 9 bp, Unknown
  misc_feature (1)..( 9): Result.003 file - promoters60/3433998
cacatatct

SEQ ID NO: 128654 - DNA, 9 bp, Unknown
  misc_feature (1)..( 9): Result.003 file - promoters60/3433998
aaaatatcc

SEQ ID NO: 128655 - DNA, 7 bp, Unknown
  misc_feature (1)..( 7): Result.003 file - promoters60/3433998
atataat

SEQ ID NO: 128656 - DNA, 7 bp, Unknown
  misc_feature (1)..( 7): Result.003 file - promoters60/3433998
ataaaat

SEQ ID NO: 128657 - DNA, 7 bp, Unknown
  misc_feature (1)..( 7): Result.003 file - promoters60/3433998
ataaaaa

SEQ ID NO: 128658 - DNA, 7 bp, Unknown
  misc_feature (1)..( 7): Result.003 file - promoters60/3433998
aaaaaaa

SEQ ID NO: 128659 - DNA, 7 bp, Unknown
  misc_feature (1)..( 7): Result.003 file - promoters60/3433998
aaaaaaa

SEQ ID NO: 128660 - DNA, 7 bp, Unknown
  misc_feature (1)..( 7): Result.003 file - promoters60/3433998
aaaaaaa

SEQ ID NO: 128661 - DNA, 6 bp, Unknown
  misc_feature (1)..( 6): Result.003 file - promoters60/3433998
aaaaaa

SEQ ID NO: 128662 - DNA, 6 bp, Unknown
  misc_feature (1)..( 6): Result.003 file - promoters60/3433998
aaaaaa

SEQ ID NO: 128663 - DNA, 6 bp, Unknown
  misc_feature (1)..( 6): Result.003 file - promoters60/3433998
aaaaaa

SEQ ID NO: 128664 - DNA, 11 bp, Unknown
  misc_feature (1)..( 11): Result.003 file - promoters60/3434028
atcgaatcaat

SEQ ID NO: 128665 - DNA, 11 bp, Unknown
  misc_feature (1)..( 11): Result.003 file - promoters60/3434028
tccgattcaat

SEQ ID NO: 128666 - DNA, 11 bp, Unknown
  misc_feature (1)..( 11): Result.003 file - promoters60/3434028
ttaaaatcaat

SEQ ID NO: 128667 - DNA, 11 bp, Unknown
  misc_feature (1)..( 11): Result.003 file - promoters60/3434028
aaaaaatgaat

SEQ ID NO: 128668 - DNA, 11 bp, Unknown
  misc_feature (1)..( 11): Result.003 file - promoters60/3434028
ctcgattaaat

SEQ ID NO: 128669 - DNA, 11 bp, Unknown
  misc_feature (1)..( 11): Result.003 file - promoters60/3434028
ttcgattgtgt

SEQ ID NO: 128670 - DNA, 9 bp, Unknown
  misc_feature (1)..( 9): Result.003 file - promoters60/3434028
taatgtttg

SEQ ID NO: 128671 - DNA, 9 bp, Unknown
  misc_feature (1)..( 9): Result.003 file - promoters60/3434028
taaggttag

SEQ ID NO: 128672 - DNA, 9 bp, Unknown
  misc_feature (1)..( 9): Result.003 file - promoters60/3434028
ttatgtttt

SEQ ID NO: 128673 - DNA, 9 bp, Unknown
  misc_feature (1)..( 9): Result.003 file - promoters60/3434028
tgatgattg

SEQ ID NO: 128674 - DNA, 9 bp, Unknown
  misc_feature (1)..( 9): Result.003 file - promoters60/3434028
gaagcttaa

SEQ ID NO: 128675 - DNA, 9 bp, Unknown
  misc_feature (1)..( 9): Result.003 file - promoters60/3434028
caagattat

SEQ ID NO: 128676 - DNA, 8 bp, Unknown
  misc_feature (1)..( 8): Result.003 file - promoters60/3434036
ggtgggat

SEQ ID NO: 128677 - DNA, 8 bp, Unknown
  misc_feature (1)..( 8): Result.003 file - promoters60/3434036
ggtgtgat

SEQ ID NO: 128678 - DNA, 7 bp, Unknown
  misc_feature (1)..( 7): Result.003 file - promoters60/3434036
cttgatt

SEQ ID NO: 128679 - DNA, 7 bp, Unknown
  misc_feature (1)..( 7): Result.003 file - promoters60/3434036
cttgatt

SEQ ID NO: 128680 - DNA, 7 bp, Unknown
  misc_feature (1)..( 7): Result.003 file - promoters60/3434036
atctgtt

SEQ ID NO: 128681 - DNA, 7 bp, Unknown
  misc_feature (1)..( 7): Result.003 file - promoters60/3434036
atctgtt

SEQ ID NO: 128682 - DNA, 7 bp, Unknown
  misc_feature (1)..( 7): Result.003 file - promoters60/3434036
aagatca

SEQ ID NO: 128683 - DNA, 7 bp, Unknown
  misc_feature (1)..( 7): Result.003 file - promoters60/3434036
aaggtca

SEQ ID NO: 128684 - DNA, 6 bp, Unknown
  misc_feature (1)..( 6): Result.003 file - promoters60/3434036
ctttac

SEQ ID NO: 128685 - DNA, 6 bp, Unknown
  misc_feature (1)..( 6): Result.003 file - promoters60/3434036
ctttac

SEQ ID NO: 128686 - DNA, 9 bp, Unknown
  misc_feature (1)..( 9): Result.003 file - promoters60/3434036
ctttttttt

SEQ ID NO: 128687 - DNA, 9 bp, Unknown
  misc_feature (1)..( 9): Result.003 file - promoters60/3434036
ctttgtttt

SEQ ID NO: 128688 - DNA, 7 bp, Unknown
  misc_feature (1)..( 7): Result.003 file - promoters60/3434036
acgcgag

SEQ ID NO: 128689 - DNA, 7 bp, Unknown
  misc_feature (1)..( 7): Result.003 file - promoters60/3434036
acgagag

SEQ ID NO: 128690 - DNA, 7 bp, Unknown
  misc_feature (1)..( 7): Result.003 file - promoters60/3434036
gttagga

SEQ ID NO: 128691 - DNA, 7 bp, Unknown
  misc_feature (1)..( 7): Result.003 file - promoters60/3434036
gttggga

SEQ ID NO: 128692 - DNA, 6 bp, Unknown
  misc_feature (1)..( 6): Result.003 file - promoters60/3434036
gatcgg

SEQ ID NO: 128693 - DNA, 6 bp, Unknown
  misc_feature (1)..( 6): Result.003 file - promoters60/3434036
gatcgg

SEQ ID NO: 128694 - DNA, 7 bp, Unknown
  misc_feature (1)..( 7): Result.003 file - promoters60/3434036
gatcgga

SEQ ID NO: 128695 - DNA, 7 bp, Unknown
  misc_feature (1)..( 7): Result.003 file - promoters60/3434036
gattgga

SEQ ID NO: 128696 - DNA, 6 bp, Unknown
  misc_feature (1)..( 6): Result.003 file - promoters60/3434036
acgcga

SEQ ID NO: 128697 - DNA, 6 bp, Unknown
  misc_feature (1)..( 6): Result.003 file - promoters60/3434036
acgcga

SEQ ID NO: 128698 - DNA, 9 bp, Unknown
  misc_feature (1)..( 9): Result.003 file - promoters60/3434036
aatccaaga

SEQ ID NO: 128699 - DNA, 9 bp, Unknown
  misc_feature (1)..( 9): Result.003 file - promoters60/3434036
aatccgaga

SEQ ID NO: 128700 - DNA, 7 bp, Unknown
  misc_feature (1)..( 7): Result.003 file - promoters60/3434036
agataaa

SEQ ID NO: 128701 - DNA, 7 bp, Unknown
  misc_feature (1)..( 7): Result.003 file - promoters60/3434036
agacaaa

SEQ ID NO: 128702 - DNA, 7 bp, Unknown
  misc_feature (1)..( 7): Result.003 file - promoters60/3434036
ttaaaaa

SEQ ID NO: 128703 - DNA, 7 bp, Unknown
  misc_feature (1)..( 7): Result.003 file - promoters60/3434036
ttagaaa

SEQ ID NO: 128704 - DNA, 8 bp, Unknown
  misc_feature (1)..( 8): Result.003 file - promoters60/3434036
gtagagaa

SEQ ID NO: 128705 - DNA, 8 bp, Unknown
  misc_feature (1)..( 8): Result.003 file - promoters60/3434036
gtagagaa

SEQ ID NO: 128706 - DNA, 6 bp, Unknown
  misc_feature (1)..( 6): Result.003 file - promoters60/3434036
agaaga

SEQ ID NO: 128707 - DNA, 6 bp, Unknown
  misc_feature (1)..( 6): Result.003 file - promoters60/3434036
agaaga

SEQ ID NO: 128708 - DNA, 6 bp, Unknown
  misc_feature (1)..( 6): Result.003 file - promoters60/3434036
gtgatt

SEQ ID NO: 128709 - DNA, 6 bp, Unknown
  misc_feature (1)..( 6): Result.003 file - promoters60/3434036
gtgatt

SEQ ID NO: 128710 - DNA, 11 bp, Unknown
  misc_feature (1)..( 11): Result.003 file - promoters60/3434044
gaaacaagttc

SEQ ID NO: 128711 - DNA, 11 bp, Unknown
  misc_feature (1)..( 11): Result.003 file - promoters60/3434044
gaaacaaaatc

SEQ ID NO: 128712 - DNA, 11 bp, Unknown
  misc_feature (1)..( 11): Result.003 file - promoters60/3434044
aaaataaggat

SEQ ID NO: 128713 - DNA, 11 bp, Unknown
  misc_feature (1)..( 11): Result.003 file - promoters60/3434044
aaaataaataa

SEQ ID NO: 128714 - DNA, 11 bp, Unknown
  misc_feature (1)..( 11): Result.003 file - promoters60/3434044
atcataattaa

SEQ ID NO: 128715 - DNA, 11 bp, Unknown
  misc_feature (1)..( 11): Result.003 file - promoters60/3434044
caattaaatgt

SEQ ID NO: 128716 - DNA, 12 bp, Unknown
  misc_feature (1)..( 12): Result.003 file - promoters60/3434044
tataatatttcc

SEQ ID NO: 128717 - DNA, 12 bp, Unknown
  misc_feature (1)..( 12): Result.003 file - promoters60/3434044
cttaatgtttgc

SEQ ID NO: 128718 - DNA, 12 bp, Unknown
  misc_feature (1)..( 12): Result.003 file - promoters60/3434044
gagtttgtttgt

SEQ ID NO: 128719 - DNA, 12 bp, Unknown
  misc_feature (1)..( 12): Result.003 file - promoters60/3434044
ttatttatttta

SEQ ID NO: 128720 - DNA, 12 bp, Unknown
  misc_feature (1)..( 12): Result.003 file - promoters60/3434044
ataacgatttat

SEQ ID NO: 128721 - DNA, 12 bp, Unknown
  misc_feature (1)..( 12): Result.003 file - promoters60/3434044
gagattgattgc

SEQ ID NO: 128722 - DNA, 12 bp, Unknown
  misc_feature (1)..( 12): Result.003 file - promoters60/3434044
gttattgatttc

SEQ ID NO: 128723 - DNA, 15 bp, Unknown
  misc_feature (1)..( 15): Result.003 file - promoters60/3434044
caagtagaagaaaga

SEQ ID NO: 128724 - DNA, 15 bp, Unknown
  misc_feature (1)..( 15): Result.003 file - promoters60/3434044
caagaagaaaaaaat

SEQ ID NO: 128725 - DNA, 15 bp, Unknown
  misc_feature (1)..( 15): Result.003 file - promoters60/3434044
atgacggaaaaaaaa

SEQ ID NO: 128726 - DNA, 15 bp, Unknown
  misc_feature (1)..( 15): Result.003 file - promoters60/3434044
gtctaacaaaaaaac

SEQ ID NO: 128727 - DNA, 15 bp, Unknown
  misc_feature (1)..( 15): Result.003 file - promoters60/3434044
gaagaaaaaaaaaat

SEQ ID NO: 128728 - DNA, 15 bp, Unknown
  misc_feature (1)..( 15): Result.003 file - promoters60/3434044
tatgaaaaaaaaagt

SEQ ID NO: 128729 - DNA, 11 bp, Unknown
  misc_feature (1)..( 11): Result.003 file - promoters60/3434044
cgaacatgata

SEQ ID NO: 128730 - DNA, 11 bp, Unknown
  misc_feature (1)..( 11): Result.003 file - promoters60/3434044
ataacattata

SEQ ID NO: 128731 - DNA, 11 bp, Unknown
  misc_feature (1)..( 11): Result.003 file - promoters60/3434044
ccttaatgata

SEQ ID NO: 128732 - DNA, 11 bp, Unknown
  misc_feature (1)..( 11): Result.003 file - promoters60/3434044
taggaatgatt

SEQ ID NO: 128733 - DNA, 11 bp, Unknown
  misc_feature (1)..( 11): Result.003 file - promoters60/3434044
ataaaatttca

SEQ ID NO: 128734 - DNA, 11 bp, Unknown
  misc_feature (1)..( 11): Result.003 file - promoters60/3434044
atcaaataata

SEQ ID NO: 128735 - DNA, 14 bp, Unknown
  misc_feature (1)..( 14): Result.003 file - promoters60/3434044
aagaaagaaacctc

SEQ ID NO: 128736 - DNA, 14 bp, Unknown
  misc_feature (1)..( 14): Result.003 file - promoters60/3434044
aacaaaaaaacatt

SEQ ID NO: 128737 - DNA, 14 bp, Unknown
  misc_feature (1)..( 14): Result.003 file - promoters60/3434044
cggaaaaaaaaact

SEQ ID NO: 128738 - DNA, 14 bp, Unknown
  misc_feature (1)..( 14): Result.003 file - promoters60/3434044
aagaaaaaaattgt

SEQ ID NO: 128739 - DNA, 14 bp, Unknown
  misc_feature (1)..( 14): Result.003 file - promoters60/3434044
aagaaaaaaaaaat

SEQ ID NO: 128740 - DNA, 14 bp, Unknown
  misc_feature (1)..( 14): Result.003 file - promoters60/3434044
atgaaaaaaaaagt

SEQ ID NO: 128741 - DNA, 8 bp, Unknown
  misc_feature (1)..( 8): Result.003 file - promoters60/3434044
aatgaaaa

SEQ ID NO: 128742 - DNA, 8 bp, Unknown
  misc_feature (1)..( 8): Result.003 file - promoters60/3434044
tatgcaaa

SEQ ID NO: 128743 - DNA, 8 bp, Unknown
  misc_feature (1)..( 8): Result.003 file - promoters60/3434044
aattaaat

SEQ ID NO: 128744 - DNA, 8 bp, Unknown
  misc_feature (1)..( 8): Result.003 file - promoters60/3434044
gattaaaa

SEQ ID NO: 128745 - DNA, 8 bp, Unknown
  misc_feature (1)..( 8): Result.003 file - promoters60/3434044
cattaaag

SEQ ID NO: 128746 - DNA, 8 bp, Unknown
  misc_feature (1)..( 8): Result.003 file - promoters60/3434044
aattaaat

SEQ ID NO: 128747 - DNA, 10 bp, Unknown
  misc_feature (1)..( 10): Result.003 file - promoters60/3434044
agaatatctt

SEQ ID NO: 128748 - DNA, 10 bp, Unknown
  misc_feature (1)..( 10): Result.003 file - promoters60/3434044
atcatatctt

SEQ ID NO: 128749 - DNA, 10 bp, Unknown
  misc_feature (1)..( 10): Result.003 file - promoters60/3434044
agaaaatcat

SEQ ID NO: 128750 - DNA, 10 bp, Unknown
  misc_feature (1)..( 10): Result.003 file - promoters60/3434044
tgaaaatcag

SEQ ID NO: 128751 - DNA, 10 bp, Unknown
  misc_feature (1)..( 10): Result.003 file - promoters60/3434044
agaaaaaaat

SEQ ID NO: 128752 - DNA, 10 bp, Unknown
  misc_feature (1)..( 10): Result.003 file - promoters60/3434044
aaaaaaacat

SEQ ID NO: 128753 - DNA, 8 bp, Unknown
  misc_feature (1)..( 8): Result.003 file - promoters60/3434074
aaagtcat

SEQ ID NO: 128754 - DNA, 8 bp, Unknown
  misc_feature (1)..( 8): Result.003 file - promoters60/3434074
aaattcat

SEQ ID NO: 128755 - DNA, 6 bp, Unknown
  misc_feature (1)..( 6): Result.003 file - promoters60/3434074
ttgaag

SEQ ID NO: 128756 - DNA, 6 bp, Unknown
  misc_feature (1)..( 6): Result.003 file - promoters60/3434074
ttgaag

SEQ ID NO: 128757 - DNA, 10 bp, Unknown
  misc_feature (1)..( 10): Result.003 file - promoters60/3434074
gataacttta

SEQ ID NO: 128758 - DNA, 10 bp, Unknown
  misc_feature (1)..( 10): Result.003 file - promoters60/3434074
gataacctta

SEQ ID NO: 128759 - DNA, 9 bp, Unknown
  misc_feature (1)..( 9): Result.003 file - promoters60/3434074
aacattttg

SEQ ID NO: 128760 - DNA, 9 bp, Unknown
  misc_feature (1)..( 9): Result.003 file - promoters60/3434074
aacgttttg

SEQ ID NO: 128761 - DNA, 6 bp, Unknown
  misc_feature (1)..( 6): Result.003 file - promoters60/3434074
ctgatt

SEQ ID NO: 128762 - DNA, 6 bp, Unknown
  misc_feature (1)..( 6): Result.003 file - promoters60/3434074
ctgatt

SEQ ID NO: 128763 - DNA, 6 bp, Unknown
  misc_feature (1)..( 6): Result.003 file - promoters60/3434074
ggctga

SEQ ID NO: 128764 - DNA, 6 bp, Unknown
  misc_feature (1)..( 6): Result.003 file - promoters60/3434074
ggctga

SEQ ID NO: 128765 - DNA, 11 bp, Unknown
  misc_feature (1)..( 11): Result.003 file - promoters60/3434074
aggttctcaga

SEQ ID NO: 128766 - DNA, 11 bp, Unknown
  misc_feature (1)..( 11): Result.003 file - promoters60/3434074
agggtctgaga

SEQ ID NO: 128767 - DNA, 6 bp, Unknown
  misc_feature (1)..( 6): Result.003 file - promoters60/3434074
agattt

SEQ ID NO: 128768 - DNA, 6 bp, Unknown
  misc_feature (1)..( 6): Result.003 file - promoters60/3434074
agattt

SEQ ID NO: 128769 - DNA, 6 bp, Unknown
  misc_feature (1)..( 6): Result.003 file - promoters60/3434112
taaaaa

SEQ ID NO: 128770 - DNA, 6 bp, Unknown
  misc_feature (1)..( 6): Result.003 file - promoters60/3434112
taaaaa

SEQ ID NO: 128771 - DNA, 9 bp, Unknown
  misc_feature (1)..( 9): Result.003 file - promoters60/3434112
tcatataat

SEQ ID NO: 128772 - DNA, 9 bp, Unknown
  misc_feature (1)..( 9): Result.003 file - promoters60/3434112
tcatacaat

SEQ ID NO: 128773 - DNA, 7 bp, Unknown
  misc_feature (1)..( 7): Result.003 file - promoters60/3434112
tataccg

SEQ ID NO: 128774 - DNA, 7 bp, Unknown
  misc_feature (1)..( 7): Result.003 file - promoters60/3434112
tataccg

SEQ ID NO: 128775 - DNA, 6 bp, Unknown
  misc_feature (1)..( 6): Result.003 file - promoters60/3434112
tctcca

SEQ ID NO: 128776 - DNA, 6 bp, Unknown
  misc_feature (1)..( 6): Result.003 file - promoters60/3434112
tctcca

SEQ ID NO: 128777 - DNA, 7 bp, Unknown
  misc_feature (1)..( 7): Result.003 file - promoters60/3434112
atttctc

SEQ ID NO: 128778 - DNA, 7 bp, Unknown
  misc_feature (1)..( 7): Result.003 file - promoters60/3434112
atttctc

SEQ ID NO: 128779 - DNA, 7 bp, Unknown
  misc_feature (1)..( 7): Result.003 file - promoters60/3434112
tgtgata

SEQ ID NO: 128780 - DNA, 7 bp, Unknown
  misc_feature (1)..( 7): Result.003 file - promoters60/3434112
tgttata

SEQ ID NO: 128781 - DNA, 8 bp, Unknown
  misc_feature (1)..( 8): Result.003 file - promoters60/3434112
aaacagat

SEQ ID NO: 128782 - DNA, 8 bp, Unknown
  misc_feature (1)..( 8): Result.003 file - promoters60/3434112
aaagagat

SEQ ID NO: 128783 - DNA, 8 bp, Unknown
  misc_feature (1)..( 8): Result.003 file - promoters60/3434112
ctcttcgt

SEQ ID NO: 128784 - DNA, 8 bp, Unknown
  misc_feature (1)..( 8): Result.003 file - promoters60/3434112
ctcgtcgt

SEQ ID NO: 128785 - DNA, 11 bp, Unknown
  misc_feature (1)..( 11): Result.003 file - promoters60/3434112
ctgagaagaag

SEQ ID NO: 128786 - DNA, 11 bp, Unknown
  misc_feature (1)..( 11): Result.003 file - promoters60/3434112
ctgagaagaag

SEQ ID NO: 128787 - DNA, 7 bp, Unknown
  misc_feature (1)..( 7): Result.003 file - promoters60/3434112
ttgaatt

SEQ ID NO: 128788 - DNA, 7 bp, Unknown
  misc_feature (1)..( 7): Result.003 file - promoters60/3434112
ttggatt

SEQ ID NO: 128789 - DNA, 6 bp, Unknown
  misc_feature (1)..( 6): Result.003 file - promoters60/3434112
atttga

SEQ ID NO: 128790 - DNA, 6 bp, Unknown
  misc_feature (1)..( 6): Result.003 file - promoters60/3434112
atttga

SEQ ID NO: 128791 - DNA, 6 bp, Unknown
  misc_feature (1)..( 6): Result.003 file - promoters60/3434112
actatt

SEQ ID NO: 128792 - DNA, 6 bp, Unknown
  misc_feature (1)..( 6): Result.003 file - promoters60/3434112
actatt

SEQ ID NO: 128793 - DNA, 6 bp, Unknown
  misc_feature (1)..( 6): Result.003 file - promoters60/3434147
tcaaaa

SEQ ID NO: 128794 - DNA, 6 bp, Unknown
  misc_feature (1)..( 6): Result.003 file - promoters60/3434147
tcaaaa

SEQ ID NO: 128795 - DNA, 8 bp, Unknown
  misc_feature (1)..( 8): Result.003 file - promoters60/3434147
aaatcata

SEQ ID NO: 128796 - DNA, 8 bp, Unknown
  misc_feature (1)..( 8): Result.003 file - promoters60/3434147
aaataata

SEQ ID NO: 128797 - DNA, 7 bp, Unknown
  misc_feature (1)..( 7): Result.003 file - promoters60/3434147
taggtaa

SEQ ID NO: 128798 - DNA, 7 bp, Unknown
  misc_feature (1)..( 7): Result.003 file - promoters60/3434147
tagataa

SEQ ID NO: 128799 - DNA, 12 bp, Unknown
  misc_feature (1)..( 12): Result.003 file - promoters60/3434147
ctgaaatatatt

SEQ ID NO: 128800 - DNA, 12 bp, Unknown
  misc_feature (1)..( 12): Result.003 file - promoters60/3434147
ctgaaataaatt

SEQ ID NO: 128801 - DNA, 6 bp, Unknown
  misc_feature (1)..( 6): Result.003 file - promoters60/3434147
ttatgt

SEQ ID NO: 128802 - DNA, 6 bp, Unknown
  misc_feature (1)..( 6): Result.003 file - promoters60/3434147
ttatgt

SEQ ID NO: 128803 - DNA, 11 bp, Unknown
  misc_feature (1)..( 11): Result.003 file - promoters60/3434147
tttgtaaacaa

SEQ ID NO: 128804 - DNA, 11 bp, Unknown
  misc_feature (1)..( 11): Result.003 file - promoters60/3434147
tttgtatacaa

SEQ ID NO: 128805 - DNA, 9 bp, Unknown
  misc_feature (1)..( 9): Result.003 file - promoters60/3434147
tatattatt

SEQ ID NO: 128806 - DNA, 9 bp, Unknown
  misc_feature (1)..( 9): Result.003 file - promoters60/3434147
tattttatt

SEQ ID NO: 128807 - DNA, 9 bp, Unknown
  misc_feature (1)..( 9): Result.003 file - promoters60/3434147
attaaaatt

SEQ ID NO: 128808 - DNA, 9 bp, Unknown
  misc_feature (1)..( 9): Result.003 file - promoters60/3434147
attaatatt

SEQ ID NO: 128809 - DNA, 7 bp, Unknown
  misc_feature (1)..( 7): Result.003 file - promoters60/3434147
gaccaaa

SEQ ID NO: 128810 - DNA, 7 bp, Unknown
  misc_feature (1)..( 7): Result.003 file - promoters60/3434147
gacaaaa

SEQ ID NO: 128811 - DNA, 7 bp, Unknown
  misc_feature (1)..( 7): Result.003 file - promoters60/3434147
ttcaata

SEQ ID NO: 128812 - DNA, 7 bp, Unknown
  misc_feature (1)..( 7): Result.003 file - promoters60/3434147
ttccata

SEQ ID NO: 128813 - DNA, 8 bp, Unknown
  misc_feature (1)..( 8): Result.003 file - promoters60/3434147
atttcaca

SEQ ID NO: 128814 - DNA, 8 bp, Unknown
  misc_feature (1)..( 8): Result.003 file - promoters60/3434147
attttaca

SEQ ID NO: 128815 - DNA, 6 bp, Unknown
  misc_feature (1)..( 6): Result.003 file - promoters60/3434147
tattta

SEQ ID NO: 128816 - DNA, 6 bp, Unknown
  misc_feature (1)..( 6): Result.003 file - promoters60/3434147
tattta

SEQ ID NO: 128817 - DNA, 6 bp, Unknown
  misc_feature (1)..( 6): Result.003 file - promoters60/3434147
taaaac

SEQ ID NO: 128818 - DNA, 6 bp, Unknown
  misc_feature (1)..( 6): Result.003 file - promoters60/3434147
taaaac

SEQ ID NO: 128819 - DNA, 6 bp, Unknown
  misc_feature (1)..( 6): Result.003 file - promoters60/3434147
cccaat

SEQ ID NO: 128820 - DNA, 6 bp, Unknown
  misc_feature (1)..( 6): Result.003 file - promoters60/3434147
cccaat

SEQ ID NO: 128821 - DNA, 11 bp, Unknown
  misc_feature (1)..( 11): Result.003 file - promoters60/3434147
aagcaaagagg

SEQ ID NO: 128822 - DNA, 11 bp, Unknown
  misc_feature (1)..( 11): Result.003 file - promoters60/3434147
aaggaaacagg

SEQ ID NO: 128823 - DNA, 9 bp, Unknown
  misc_feature (1)..( 9): Result.003 file - promoters60/3434233
tattgaaaa

SEQ ID NO: 128824 - DNA, 9 bp, Unknown
  misc_feature (1)..( 9): Result.003 file - promoters60/3434233
ctttgtaaa

SEQ ID NO: 128825 - DNA, 9 bp, Unknown
  misc_feature (1)..( 9): Result.003 file - promoters60/3434233
tatttaaaa

SEQ ID NO: 128826 - DNA, 9 bp, Unknown
  misc_feature (1)..( 9): Result.003 file - promoters60/3434233
tattgaaaa

SEQ ID NO: 128827 - DNA, 9 bp, Unknown
  misc_feature (1)..( 9): Result.003 file - promoters60/3434233
aattgaaac

SEQ ID NO: 128828 - DNA, 9 bp, Unknown
  misc_feature (1)..( 9): Result.003 file - promoters60/3434233
tcttgtaac

SEQ ID NO: 128829 - DNA, 9 bp, Unknown
  misc_feature (1)..( 9): Result.003 file - promoters60/3434233
aatcgaagg

SEQ ID NO: 128830 - DNA, 15 bp, Unknown
  misc_feature (1)..( 15): Result.003 file - promoters60/3434256
gttggcttctatttc

SEQ ID NO: 128831 - DNA, 15 bp, Unknown
  misc_feature (1)..( 15): Result.003 file - promoters60/3434256
ttttgcttcttattt

SEQ ID NO: 128832 - DNA, 15 bp, Unknown
  misc_feature (1)..( 15): Result.003 file - promoters60/3434256
tttttcttcttcttt

SEQ ID NO: 128833 - DNA, 15 bp, Unknown
  misc_feature (1)..( 15): Result.003 file - promoters60/3434256
gtgaaattctgtttg

SEQ ID NO: 128834 - DNA, 15 bp, Unknown
  misc_feature (1)..( 15): Result.003 file - promoters60/3434256
ttaattttctcattg

SEQ ID NO: 128835 - DNA, 15 bp, Unknown
  misc_feature (1)..( 15): Result.003 file - promoters60/3434256
attcctttcttcaca

SEQ ID NO: 128836 - DNA, 10 bp, Unknown
  misc_feature (1)..( 10): Result.003 file - promoters60/3434256
ctttgttatt

SEQ ID NO: 128837 - DNA, 10 bp, Unknown
  misc_feature (1)..( 10): Result.003 file - promoters60/3434256
tcttgttaac

SEQ ID NO: 128838 - DNA, 10 bp, Unknown
  misc_feature (1)..( 10): Result.003 file - promoters60/3434256
atatgttatc

SEQ ID NO: 128839 - DNA, 10 bp, Unknown
  misc_feature (1)..( 10): Result.003 file - promoters60/3434256
tgttcttaga

SEQ ID NO: 128840 - DNA, 10 bp, Unknown
  misc_feature (1)..( 10): Result.003 file - promoters60/3434256
ttttatttta

SEQ ID NO: 128841 - DNA, 13 bp, Unknown
  misc_feature (1)..( 13): Result.003 file - promoters60/3434256
ctatatataaaac

SEQ ID NO: 128842 - DNA, 13 bp, Unknown
  misc_feature (1)..( 13): Result.003 file - promoters60/3434256
gtatttattaaac

SEQ ID NO: 128843 - DNA, 13 bp, Unknown
  misc_feature (1)..( 13): Result.003 file - promoters60/3434256
ctatataaaccag

SEQ ID NO: 128844 - DNA, 13 bp, Unknown
  misc_feature (1)..( 13): Result.003 file - promoters60/3434256
atatataaacaac

SEQ ID NO: 128845 - DNA, 13 bp, Unknown
  misc_feature (1)..( 13): Result.003 file - promoters60/3434256
gtataaataaagc

SEQ ID NO: 128846 - DNA, 13 bp, Unknown
  misc_feature (1)..( 13): Result.003 file - promoters60/3434256
atagatataaaga

SEQ ID NO: 128847 - DNA, 12 bp, Unknown
  misc_feature (1)..( 12): Result.003 file - promoters60/3434256
accgttaaaaat

SEQ ID NO: 128848 - DNA, 12 bp, Unknown
  misc_feature (1)..( 12): Result.003 file - promoters60/3434256
tttattaaaaaa

SEQ ID NO: 128849 - DNA, 12 bp, Unknown
  misc_feature (1)..( 12): Result.003 file - promoters60/3434256
atcaacaaaaat

SEQ ID NO: 128850 - DNA, 13 bp, Unknown
  misc_feature (1)..( 13): Result.003 file - promoters60/3434256
gttgataataaag

SEQ ID NO: 128851 - DNA, 13 bp, Unknown
  misc_feature (1)..( 13): Result.003 file - promoters60/3434256
gttgttaataaat

SEQ ID NO: 128852 - DNA, 13 bp, Unknown
  misc_feature (1)..( 13): Result.003 file - promoters60/3434256
tttattaaaaaaa

SEQ ID NO: 128853 - DNA, 13 bp, Unknown
  misc_feature (1)..( 13): Result.003 file - promoters60/3434256
gtgtttaataaac

SEQ ID NO: 128854 - DNA, 12 bp, Unknown
  misc_feature (1)..( 12): Result.003 file - promoters60/3434256
aaccgttggctt

SEQ ID NO: 128855 - DNA, 12 bp, Unknown
  misc_feature (1)..( 12): Result.003 file - promoters60/3434256
atctgtttgcta

SEQ ID NO: 128856 - DNA, 12 bp, Unknown
  misc_feature (1)..( 12): Result.003 file - promoters60/3434256
cgcgttttgctt

SEQ ID NO: 128857 - DNA, 12 bp, Unknown
  misc_feature (1)..( 12): Result.003 file - promoters60/3434256
attaattttctt

SEQ ID NO: 128858 - DNA, 12 bp, Unknown
  misc_feature (1)..( 12): Result.003 file - promoters60/3434256
attaattttctc

SEQ ID NO: 128859 - DNA, 12 bp, Unknown
  misc_feature (1)..( 12): Result.003 file - promoters60/3434256
cgcgttttgctt

SEQ ID NO: 128860 - DNA, 12 bp, Unknown
  misc_feature (1)..( 12): Result.003 file - promoters60/3434256
cttgttgtgctt

SEQ ID NO: 128861 - DNA, 12 bp, Unknown
  misc_feature (1)..( 12): Result.003 file - promoters60/3434256
atctgtttgcta

SEQ ID NO: 128862 - DNA, 12 bp, Unknown
  misc_feature (1)..( 12): Result.003 file - promoters60/3434256
attaattttctt

SEQ ID NO: 128863 - DNA, 12 bp, Unknown
  misc_feature (1)..( 12): Result.003 file - promoters60/3434256
attaattttctc

SEQ ID NO: 128864 - DNA, 14 bp, Unknown
  misc_feature (1)..( 14): Result.003 file - promoters60/3434256
gagaattatgccta

SEQ ID NO: 128865 - DNA, 14 bp, Unknown
  misc_feature (1)..( 14): Result.003 file - promoters60/3434256
ttaatttattccta

SEQ ID NO: 128866 - DNA, 14 bp, Unknown
  misc_feature (1)..( 14): Result.003 file - promoters60/3434256
ttaatttatttatt

SEQ ID NO: 128867 - DNA, 14 bp, Unknown
  misc_feature (1)..( 14): Result.003 file - promoters60/3434256
ttggtttttttccg

SEQ ID NO: 128868 - DNA, 14 bp, Unknown
  misc_feature (1)..( 14): Result.003 file - promoters60/3434256
acaatgtattcaac

SEQ ID NO: 128869 - DNA, 14 bp, Unknown
  misc_feature (1)..( 14): Result.003 file - promoters60/3434256
aagatttgtttttt

SEQ ID NO: 128870 - DNA, 16 bp, Unknown
  misc_feature (1)..( 16): Result.003 file - promoters60/3434256
aaatattaagtacttt

SEQ ID NO: 128871 - DNA, 16 bp, Unknown
  misc_feature (1)..( 16): Result.003 file - promoters60/3434256
agtgattaaatactac

SEQ ID NO: 128872 - DNA, 16 bp, Unknown
  misc_feature (1)..( 16): Result.003 file - promoters60/3434256
tgactttaagtcagaa

SEQ ID NO: 128873 - DNA, 16 bp, Unknown
  misc_feature (1)..( 16): Result.003 file - promoters60/3434256
ctagatatagttcttt

SEQ ID NO: 128874 - DNA, 16 bp, Unknown
  misc_feature (1)..( 16): Result.003 file - promoters60/3434256
agtgataaaaagtttt

SEQ ID NO: 128875 - DNA, 10 bp, Unknown
  misc_feature (1)..( 10): Result.003 file - promoters60/3434256
tgattaattt

SEQ ID NO: 128876 - DNA, 10 bp, Unknown
  misc_feature (1)..( 10): Result.003 file - promoters60/3434256
aaattaatgt

SEQ ID NO: 128877 - DNA, 10 bp, Unknown
  misc_feature (1)..( 10): Result.003 file - promoters60/3434256
aaataaatca

SEQ ID NO: 128878 - DNA, 10 bp, Unknown
  misc_feature (1)..( 10): Result.003 file - promoters60/3434256
tactaaatat

SEQ ID NO: 128879 - DNA, 10 bp, Unknown
  misc_feature (1)..( 10): Result.003 file - promoters60/3434256
atattgatgt

SEQ ID NO: 128880 - DNA, 12 bp, Unknown
  misc_feature (1)..( 12): Result.003 file - promoters60/3434256
taaaacatttat

SEQ ID NO: 128881 - DNA, 12 bp, Unknown
  misc_feature (1)..( 12): Result.003 file - promoters60/3434256
taaaacaaaact

SEQ ID NO: 128882 - DNA, 12 bp, Unknown
  misc_feature (1)..( 12): Result.003 file - promoters60/3434256
tgaaatattttt

SEQ ID NO: 128883 - DNA, 12 bp, Unknown
  misc_feature (1)..( 12): Result.003 file - promoters60/3434256
aaaaagaaatga

SEQ ID NO: 128884 - DNA, 12 bp, Unknown
  misc_feature (1)..( 12): Result.003 file - promoters60/3434256
tagaatgttttt

SEQ ID NO: 128885 - DNA, 16 bp, Unknown
  misc_feature (1)..( 16): Result.003 file - promoters60/3434256
tttaatttattcctat

SEQ ID NO: 128886 - DNA, 16 bp, Unknown
  misc_feature (1)..( 16): Result.003 file - promoters60/3434256
tttaataaacaaaacg

SEQ ID NO: 128887 - DNA, 16 bp, Unknown
  misc_feature (1)..( 16): Result.003 file - promoters60/3434256
tttattaaaaaaaaaa

SEQ ID NO: 128888 - DNA, 16 bp, Unknown
  misc_feature (1)..( 16): Result.003 file - promoters60/3434256
gttaataaatttatta

SEQ ID NO: 128889 - DNA, 16 bp, Unknown
  misc_feature (1)..( 16): Result.003 file - promoters60/3434256
atcaataaattcatta

SEQ ID NO: 128890 - DNA, 11 bp, Unknown
  misc_feature (1)..( 11): Result.003 file - promoters60/3434279
cttgtttatat

SEQ ID NO: 128891 - DNA, 11 bp, Unknown
  misc_feature (1)..( 11): Result.003 file - promoters60/3434279
tttggttacaa

SEQ ID NO: 128892 - DNA, 11 bp, Unknown
  misc_feature (1)..( 11): Result.003 file - promoters60/3434279
cgagtttattt

SEQ ID NO: 128893 - DNA, 11 bp, Unknown
  misc_feature (1)..( 11): Result.003 file - promoters60/3434279
cttgtttactg

SEQ ID NO: 128894 - DNA, 11 bp, Unknown
  misc_feature (1)..( 11): Result.003 file - promoters60/3434279
acggtttgctg

SEQ ID NO: 128895 - DNA, 11 bp, Unknown
  misc_feature (1)..( 11): Result.003 file - promoters60/3434279
attttttttat

SEQ ID NO: 128896 - DNA, 9 bp, Unknown
  misc_feature (1)..( 9): Result.003 file - promoters60/3434299
catataaag

SEQ ID NO: 128897 - DNA, 9 bp, Unknown
  misc_feature (1)..( 9): Result.003 file - promoters60/3434299
catatatac

SEQ ID NO: 128898 - DNA, 9 bp, Unknown
  misc_feature (1)..( 9): Result.003 file - promoters60/3434299
aataaaaag

SEQ ID NO: 128899 - DNA, 9 bp, Unknown
  misc_feature (1)..( 9): Result.003 file - promoters60/3434299
tatatatat

SEQ ID NO: 128900 - DNA, 9 bp, Unknown
  misc_feature (1)..( 9): Result.003 file - promoters60/3434299
tatagataa

SEQ ID NO: 128901 - DNA, 9 bp, Unknown
  misc_feature (1)..( 9): Result.003 file - promoters60/3434299
tataaaacc

SEQ ID NO: 128902 - DNA, 9 bp, Unknown
  misc_feature (1)..( 9): Result.003 file - promoters60/3434311
atcagaatc

SEQ ID NO: 128903 - DNA, 9 bp, Unknown
  misc_feature (1)..( 9): Result.003 file - promoters60/3434311
ttcaaaatt

SEQ ID NO: 128904 - DNA, 9 bp, Unknown
  misc_feature (1)..( 9): Result.003 file - promoters60/3434311
atcagaccg

SEQ ID NO: 128905 - DNA, 9 bp, Unknown
  misc_feature (1)..( 9): Result.003 file - promoters60/3434311
tccaaaatg

SEQ ID NO: 128906 - DNA, 9 bp, Unknown
  misc_feature (1)..( 9): Result.003 file - promoters60/3434311
ttccaaatg

SEQ ID NO: 128907 - DNA, 9 bp, Unknown
  misc_feature (1)..( 9): Result.003 file - promoters60/3434311
gagaaaatg

SEQ ID NO: 128908 - DNA, 9 bp, Unknown
  misc_feature (1)..( 9): Result.003 file - promoters60/3434311
atccgaccg

SEQ ID NO: 128909 - DNA, 11 bp, Unknown
  misc_feature (1)..( 11): Result.003 file - promoters60/3434311
tttcaaaatgt

SEQ ID NO: 128910 - DNA, 11 bp, Unknown
  misc_feature (1)..( 11): Result.003 file - promoters60/3434311
attccaaatgt

SEQ ID NO: 128911 - DNA, 11 bp, Unknown
  misc_feature (1)..( 11): Result.003 file - promoters60/3434311
gttcaaaattt

SEQ ID NO: 128912 - DNA, 11 bp, Unknown
  misc_feature (1)..( 11): Result.003 file - promoters60/3434311
gtttaaatcag

SEQ ID NO: 128913 - DNA, 11 bp, Unknown
  misc_feature (1)..( 11): Result.003 file - promoters60/3434311
ctttaaacgat

SEQ ID NO: 128914 - DNA, 11 bp, Unknown
  misc_feature (1)..( 11): Result.003 file - promoters60/3434311
ttttgaatcga

SEQ ID NO: 128915 - DNA, 7 bp, Unknown
  misc_feature (1)..( 7): Result.003 file - promoters60/3434381
aaagcac

SEQ ID NO: 128916 - DNA, 7 bp, Unknown
  misc_feature (1)..( 7): Result.003 file - promoters60/3434381
aaaacac

SEQ ID NO: 128917 - DNA, 6 bp, Unknown
  misc_feature (1)..( 6): Result.003 file - promoters60/3434381
accact

SEQ ID NO: 128918 - DNA, 6 bp, Unknown
  misc_feature (1)..( 6): Result.003 file - promoters60/3434381
accact

SEQ ID NO: 128919 - DNA, 6 bp, Unknown
  misc_feature (1)..( 6): Result.003 file - promoters60/3434381
aaacta

SEQ ID NO: 128920 - DNA, 6 bp, Unknown
  misc_feature (1)..( 6): Result.003 file - promoters60/3434381
aaacta

SEQ ID NO: 128921 - DNA, 7 bp, Unknown
  misc_feature (1)..( 7): Result.003 file - promoters60/3434381
taatcca

SEQ ID NO: 128922 - DNA, 7 bp, Unknown
  misc_feature (1)..( 7): Result.003 file - promoters60/3434381
taatcca

SEQ ID NO: 128923 - DNA, 7 bp, Unknown
  misc_feature (1)..( 7): Result.003 file - promoters60/3434381
gatgaca

SEQ ID NO: 128924 - DNA, 7 bp, Unknown
  misc_feature (1)..( 7): Result.003 file - promoters60/3434381
gatgaca

SEQ ID NO: 128925 - DNA, 7 bp, Unknown
  misc_feature (1)..( 7): Result.003 file - promoters60/3434381
ttggttt

SEQ ID NO: 128926 - DNA, 7 bp, Unknown
  misc_feature (1)..( 7): Result.003 file - promoters60/3434381
ttgtttt

SEQ ID NO: 128927 - DNA, 12 bp, Unknown
  misc_feature (1)..( 12): Result.003 file - promoters60/3434381
ttgaagtgaaaa

SEQ ID NO: 128928 - DNA, 12 bp, Unknown
  misc_feature (1)..( 12): Result.003 file - promoters60/3434381
ttgaaatgaaaa

SEQ ID NO: 128929 - DNA, 12 bp, Unknown
  misc_feature (1)..( 12): Result.003 file - promoters60/3434381
tacaaatgagtg

SEQ ID NO: 128930 - DNA, 6 bp, Unknown
  misc_feature (1)..( 6): Result.003 file - promoters60/3434381
aaaaga

SEQ ID NO: 128931 - DNA, 6 bp, Unknown
  misc_feature (1)..( 6): Result.003 file - promoters60/3434381
aaaaga

SEQ ID NO: 128932 - DNA, 6 bp, Unknown
  misc_feature (1)..( 6): Result.003 file - promoters60/3434381
tgtgat

SEQ ID NO: 128933 - DNA, 6 bp, Unknown
  misc_feature (1)..( 6): Result.003 file - promoters60/3434381
tgtgat

SEQ ID NO: 128934 - DNA, 8 bp, Unknown
  misc_feature (1)..( 8): Result.003 file - promoters60/3434381
acattaac

SEQ ID NO: 128935 - DNA, 8 bp, Unknown
  misc_feature (1)..( 8): Result.003 file - promoters60/3434381
acataaac

SEQ ID NO: 128936 - DNA, 6 bp, Unknown
  misc_feature (1)..( 6): Result.003 file - promoters60/3434381
cttctt

SEQ ID NO: 128937 - DNA, 6 bp, Unknown
  misc_feature (1)..( 6): Result.003 file - promoters60/3434381
cttctt

SEQ ID NO: 128938 - DNA, 7 bp, Unknown
  misc_feature (1)..( 7): Result.003 file - promoters60/3434381
atttgaa

SEQ ID NO: 128939 - DNA, 7 bp, Unknown
  misc_feature (1)..( 7): Result.003 file - promoters60/3434381
atttgaa

SEQ ID NO: 128940 - DNA, 6 bp, Unknown
  misc_feature (1)..( 6): Result.003 file - promoters60/3434381
ttaaaa

SEQ ID NO: 128941 - DNA, 6 bp, Unknown
  misc_feature (1)..( 6): Result.003 file - promoters60/3434381
ttaaaa

SEQ ID NO: 128942 - DNA, 6 bp, Unknown
  misc_feature (1)..( 6): Result.003 file - promoters60/3434381
atattg

SEQ ID NO: 128943 - DNA, 6 bp, Unknown
  misc_feature (1)..( 6): Result.003 file - promoters60/3434381
atattg

SEQ ID NO: 128944 - DNA, 8 bp, Unknown
  misc_feature (1)..( 8): Result.003 file - promoters60/3434381
attatatt

SEQ ID NO: 128945 - DNA, 8 bp, Unknown
  misc_feature (1)..( 8): Result.003 file - promoters60/3434381
attaaatt

SEQ ID NO: 128946 - DNA, 6 bp, Unknown
  misc_feature (1)..( 6): Result.003 file - promoters60/3434381
ggttga

SEQ ID NO: 128947 - DNA, 6 bp, Unknown
  misc_feature (1)..( 6): Result.003 file - promoters60/3434381
ggttga

SEQ ID NO: 128948 - DNA, 7 bp, Unknown
  misc_feature (1)..( 7): Result.003 file - promoters60/3434381
caaattg

SEQ ID NO: 128949 - DNA, 7 bp, Unknown
  misc_feature (1)..( 7): Result.003 file - promoters60/3434381
caatttg

SEQ ID NO: 128950 - DNA, 7 bp, Unknown
  misc_feature (1)..( 7): Result.003 file - promoters60/3434381
attcata

SEQ ID NO: 128951 - DNA, 7 bp, Unknown
  misc_feature (1)..( 7): Result.003 file - promoters60/3434381
atttata

SEQ ID NO: 128952 - DNA, 7 bp, Unknown
  misc_feature (1)..( 7): Result.003 file - promoters60/3434381
ataaata

SEQ ID NO: 128953 - DNA, 7 bp, Unknown
  misc_feature (1)..( 7): Result.003 file - promoters60/3434381
atatata

SEQ ID NO: 128954 - DNA, 7 bp, Unknown
  misc_feature (1)..( 7): Result.003 file - promoters60/3434381
taattaa

SEQ ID NO: 128955 - DNA, 7 bp, Unknown
  misc_feature (1)..( 7): Result.003 file - promoters60/3434381
taagtaa

SEQ ID NO: 128956 - DNA, 8 bp, Unknown
  misc_feature (1)..( 8): Result.003 file - promoters60/3434381
aaacaaaa

SEQ ID NO: 128957 - DNA, 8 bp, Unknown
  misc_feature (1)..( 8): Result.003 file - promoters60/3434381
aaataaaa

SEQ ID NO: 128958 - DNA, 7 bp, Unknown
  misc_feature (1)..( 7): Result.003 file - promoters60/3434381
aaactag

SEQ ID NO: 128959 - DNA, 7 bp, Unknown
  misc_feature (1)..( 7): Result.003 file - promoters60/3434381
aaaatag

SEQ ID NO: 128960 - DNA, 7 bp, Unknown
  misc_feature (1)..( 7): Result.003 file - promoters60/3434400
cagaaaa

SEQ ID NO: 128961 - DNA, 7 bp, Unknown
  misc_feature (1)..( 7): Result.003 file - promoters60/3434400
cagaaaa

SEQ ID NO: 128962 - DNA, 7 bp, Unknown
  misc_feature (1)..( 7): Result.003 file - promoters60/3434400
gagaaaa

SEQ ID NO: 128963 - DNA, 8 bp, Unknown
  misc_feature (1)..( 8): Result.003 file - promoters60/3434400
tagagaaa

SEQ ID NO: 128964 - DNA, 9 bp, Unknown
  misc_feature (1)..( 9): Result.003 file - promoters60/3434400
ttgaagaaa

SEQ ID NO: 128965 - DNA, 10 bp, Unknown
  misc_feature (1)..( 10): Result.003 file - promoters60/3434400
tggtttaatt

SEQ ID NO: 128966 - DNA, 10 bp, Unknown
  misc_feature (1)..( 10): Result.003 file - promoters60/3434400
ttttttaatt

SEQ ID NO: 128967 - DNA, 11 bp, Unknown
  misc_feature (1)..( 11): Result.003 file - promoters60/3434400
actttataatg

SEQ ID NO: 128968 - DNA, 11 bp, Unknown
  misc_feature (1)..( 11): Result.003 file - promoters60/3434400
acattaaaatc

SEQ ID NO: 128969 - DNA, 11 bp, Unknown
  misc_feature (1)..( 11): Result.003 file - promoters60/3434400
acttcatagag

SEQ ID NO: 128970 - DNA, 11 bp, Unknown
  misc_feature (1)..( 11): Result.003 file - promoters60/3434400
ccagaaaaaaa

SEQ ID NO: 128971 - DNA, 11 bp, Unknown
  misc_feature (1)..( 11): Result.003 file - promoters60/3434400
ctgcaaagaaa

SEQ ID NO: 128972 - DNA, 11 bp, Unknown
  misc_feature (1)..( 11): Result.003 file - promoters60/3434400
ttttgaagaaa

SEQ ID NO: 128973 - DNA, 9 bp, Unknown
  misc_feature (1)..( 9): Result.003 file - promoters60/3434400
gcatagaac

SEQ ID NO: 128974 - DNA, 11 bp, Unknown
  misc_feature (1)..( 11): Result.003 file - promoters60/3434400
tttcgaagaat

SEQ ID NO: 128975 - DNA, 11 bp, Unknown
  misc_feature (1)..( 11): Result.003 file - promoters60/3434471
acaaacatgtt

SEQ ID NO: 128976 - DNA, 12 bp, Unknown
  misc_feature (1)..( 12): Result.003 file - promoters60/3434471
accaaacacaag

SEQ ID NO: 128977 - DNA, 12 bp, Unknown
  misc_feature (1)..( 12): Result.003 file - promoters60/3434471
caaaaatacatt

SEQ ID NO: 128978 - DNA, 12 bp, Unknown
  misc_feature (1)..( 12): Result.003 file - promoters60/3434471
tataaatatata

SEQ ID NO: 128979 - DNA, 12 bp, Unknown
  misc_feature (1)..( 12): Result.003 file - promoters60/3434471
tgcgtatagatt

SEQ ID NO: 128980 - DNA, 12 bp, Unknown
  misc_feature (1)..( 12): Result.003 file - promoters60/3434471
accaaactctca

SEQ ID NO: 128981 - DNA, 6 bp, Unknown
  misc_feature (1)..( 6): Result.003 file - promoters60/3434496
actttt

SEQ ID NO: 128982 - DNA, 6 bp, Unknown
  misc_feature (1)..( 6): Result.003 file - promoters60/3434496
actttt

SEQ ID NO: 128983 - DNA, 6 bp, Unknown
  misc_feature (1)..( 6): Result.003 file - promoters60/3434496
attctc

SEQ ID NO: 128984 - DNA, 6 bp, Unknown
  misc_feature (1)..( 6): Result.003 file - promoters60/3434496
attctc

SEQ ID NO: 128985 - DNA, 7 bp, Unknown
  misc_feature (1)..( 7): Result.003 file - promoters60/3434496
aatttga

SEQ ID NO: 128986 - DNA, 7 bp, Unknown
  misc_feature (1)..( 7): Result.003 file - promoters60/3434496
aatttgg

SEQ ID NO: 128987 - DNA, 7 bp, Unknown
  misc_feature (1)..( 7): Result.003 file - promoters60/3434496
aatttga

SEQ ID NO: 128988 - DNA, 9 bp, Unknown
  misc_feature (1)..( 9): Result.003 file - promoters60/3434496
gattgcaaa

SEQ ID NO: 128989 - DNA, 9 bp, Unknown
  misc_feature (1)..( 9): Result.003 file - promoters60/3434496
gatggcaaa

SEQ ID NO: 128990 - DNA, 7 bp, Unknown
  misc_feature (1)..( 7): Result.003 file - promoters60/3434496
tgggctc

SEQ ID NO: 128991 - DNA, 7 bp, Unknown
  misc_feature (1)..( 7): Result.003 file - promoters60/3434496
tgggctc

SEQ ID NO: 128992 - DNA, 6 bp, Unknown
  misc_feature (1)..( 6): Result.003 file - promoters60/3434496
gattca

SEQ ID NO: 128993 - DNA, 6 bp, Unknown
  misc_feature (1)..( 6): Result.003 file - promoters60/3434496
gattca

SEQ ID NO: 128994 - DNA, 7 bp, Unknown
  misc_feature (1)..( 7): Result.003 file - promoters60/3434496
gcaacaa

SEQ ID NO: 128995 - DNA, 7 bp, Unknown
  misc_feature (1)..( 7): Result.003 file - promoters60/3434496
gcagcaa

SEQ ID NO: 128996 - DNA, 8 bp, Unknown
  misc_feature (1)..( 8): Result.003 file - promoters60/3434496
caaaaaac

SEQ ID NO: 128997 - DNA, 8 bp, Unknown
  misc_feature (1)..( 8): Result.003 file - promoters60/3434496
caaagaac

SEQ ID NO: 128998 - DNA, 6 bp, Unknown
  misc_feature (1)..( 6): Result.003 file - promoters60/3434496
atagat

SEQ ID NO: 128999 - DNA, 6 bp, Unknown
  misc_feature (1)..( 6): Result.003 file - promoters60/3434496
atagat

SEQ ID NO: 129000 - DNA, 9 bp, Unknown
  misc_feature (1)..( 9): Result.003 file - promoters60/3434496
tttccaatt

SEQ ID NO: 129001 - DNA, 9 bp, Unknown
  misc_feature (1)..( 9): Result.003 file - promoters60/3434496
ttttcaatt

SEQ ID NO: 129002 - DNA, 6 bp, Unknown
  misc_feature (1)..( 6): Result.003 file - promoters60/3434496
aatttc

SEQ ID NO: 129003 - DNA, 6 bp, Unknown
  misc_feature (1)..( 6): Result.003 file - promoters60/3434496
aatttc

SEQ ID NO: 129004 - DNA, 6 bp, Unknown
  misc_feature (1)..( 6): Result.003 file - promoters60/3434496
aaactg

SEQ ID NO: 129005 - DNA, 6 bp, Unknown
  misc_feature (1)..( 6): Result.003 file - promoters60/3434496
aaactg

SEQ ID NO: 129006 - DNA, 10 bp, Unknown
  misc_feature (1)..( 10): Result.003 file - promoters60/3434496
aaatcaaaga

SEQ ID NO: 129007 - DNA, 10 bp, Unknown
  misc_feature (1)..( 10): Result.003 file - promoters60/3434496
aaaccaattt

SEQ ID NO: 129008 - DNA, 10 bp, Unknown
  misc_feature (1)..( 10): Result.003 file - promoters60/3434496
tgaccatttt

SEQ ID NO: 129009 - DNA, 7 bp, Unknown
  misc_feature (1)..( 7): Result.003 file - promoters60/3434496
aaattat

SEQ ID NO: 129010 - DNA, 7 bp, Unknown
  misc_feature (1)..( 7): Result.003 file - promoters60/3434496
aaactat

SEQ ID NO: 129011 - DNA, 9 bp, Unknown
  misc_feature (1)..( 9): Result.003 file - promoters60/3434496
atcaaaccg

SEQ ID NO: 129012 - DNA, 9 bp, Unknown
  misc_feature (1)..( 9): Result.003 file - promoters60/3434496
atcgaaccg

SEQ ID NO: 129013 - DNA, 7 bp, Unknown
  misc_feature (1)..( 7): Result.003 file - promoters60/3434496
cgagatt

SEQ ID NO: 129014 - DNA, 7 bp, Unknown
  misc_feature (1)..( 7): Result.003 file - promoters60/3434496
cgatatt

SEQ ID NO: 129015 - DNA, 7 bp, Unknown
  misc_feature (1)..( 7): Result.003 file - promoters60/3434496
aagcttg

SEQ ID NO: 129016 - DNA, 7 bp, Unknown
  misc_feature (1)..( 7): Result.003 file - promoters60/3434496
aaggttg

SEQ ID NO: 129017 - DNA, 6 bp, Unknown
  misc_feature (1)..( 6): Result.003 file - promoters60/3434496
gctgat

SEQ ID NO: 129018 - DNA, 6 bp, Unknown
  misc_feature (1)..( 6): Result.003 file - promoters60/3434496
gctgat

SEQ ID NO: 129019 - DNA, 6 bp, Unknown
  misc_feature (1)..( 6): Result.003 file - promoters60/3434496
tgtaat

SEQ ID NO: 129020 - DNA, 6 bp, Unknown
  misc_feature (1)..( 6): Result.003 file - promoters60/3434496
tgtaat

SEQ ID NO: 129021 - DNA, 11 bp, Unknown
  misc_feature (1)..( 11): Result.003 file - promoters60/3434563
caagacctaaa

SEQ ID NO: 129022 - DNA, 11 bp, Unknown
  misc_feature (1)..( 11): Result.003 file - promoters60/3434563
caaaaccaaag

SEQ ID NO: 129023 - DNA, 11 bp, Unknown
  misc_feature (1)..( 11): Result.003 file - promoters60/3434563
taaaactaaaa

SEQ ID NO: 129024 - DNA, 11 bp, Unknown
  misc_feature (1)..( 11): Result.003 file - promoters60/3434563
agtaactaaaa

SEQ ID NO: 129025 - DNA, 9 bp, Unknown
  misc_feature (1)..( 9): Result.003 file - promoters60/3434563
gaacaaaaa

SEQ ID NO: 129026 - DNA, 11 bp, Unknown
  misc_feature (1)..( 11): Result.003 file - promoters60/3434563
acaaatcaaat

SEQ ID NO: 129027 - DNA, 8 bp, Unknown
  misc_feature (1)..( 8): Result.003 file - promoters60/3434648
tcttcatc

SEQ ID NO: 129028 - DNA, 8 bp, Unknown
  misc_feature (1)..( 8): Result.003 file - promoters60/3434648
tctccatc

SEQ ID NO: 129029 - DNA, 9 bp, Unknown
  misc_feature (1)..( 9): Result.003 file - promoters60/3434648
cttgtctga

SEQ ID NO: 129030 - DNA, 9 bp, Unknown
  misc_feature (1)..( 9): Result.003 file - promoters60/3434648
cttgtcata

SEQ ID NO: 129031 - DNA, 9 bp, Unknown
  misc_feature (1)..( 9): Result.003 file - promoters60/3434648
attgttata

SEQ ID NO: 129032 - DNA, 8 bp, Unknown
  misc_feature (1)..( 8): Result.003 file - promoters60/3434648
gtatccat

SEQ ID NO: 129033 - DNA, 8 bp, Unknown
  misc_feature (1)..( 8): Result.003 file - promoters60/3434648
gtattcat

SEQ ID NO: 129034 - DNA, 6 bp, Unknown
  misc_feature (1)..( 6): Result.003 file - promoters60/3434648
gatttg

SEQ ID NO: 129035 - DNA, 6 bp, Unknown
  misc_feature (1)..( 6): Result.003 file - promoters60/3434648
gatttg

SEQ ID NO: 129036 - DNA, 9 bp, Unknown
  misc_feature (1)..( 9): Result.003 file - promoters60/3434648
atgtctcag

SEQ ID NO: 129037 - DNA, 9 bp, Unknown
  misc_feature (1)..( 9): Result.003 file - promoters60/3434648
ttgtatcag

SEQ ID NO: 129038 - DNA, 9 bp, Unknown
  misc_feature (1)..( 9): Result.003 file - promoters60/3434648
atgtttcaa

SEQ ID NO: 129039 - DNA, 7 bp, Unknown
  misc_feature (1)..( 7): Result.003 file - promoters60/3434648
ctaaatc

SEQ ID NO: 129040 - DNA, 7 bp, Unknown
  misc_feature (1)..( 7): Result.003 file - promoters60/3434648
ctaaatc

SEQ ID NO: 129041 - DNA, 27 bp, Unknown
  misc_feature (1)..( 27): Result.003 file - promoters60/3434648
atttatacccacatgatcatgtcttct

SEQ ID NO: 129042 - DNA, 27 bp, Unknown
  misc_feature (1)..( 27): Result.003 file - promoters60/3434648
attcatactcacatggtcatgtcttct

SEQ ID NO: 129043 - DNA, 9 bp, Unknown
  misc_feature (1)..( 9): Result.003 file - promoters60/3434648
ttctaacca

SEQ ID NO: 129044 - DNA, 9 bp, Unknown
  misc_feature (1)..( 9): Result.003 file - promoters60/3434648
ttctcacca

SEQ ID NO: 129045 - DNA, 12 bp, Unknown
  misc_feature (1)..( 12): Result.003 file - promoters60/3434648
tccactagttga

SEQ ID NO: 129046 - DNA, 12 bp, Unknown
  misc_feature (1)..( 12): Result.003 file - promoters60/3434648
tccacaagttga

SEQ ID NO: 129047 - DNA, 7 bp, Unknown
  misc_feature (1)..( 7): Result.003 file - promoters60/3434648
attgatt

SEQ ID NO: 129048 - DNA, 7 bp, Unknown
  misc_feature (1)..( 7): Result.003 file - promoters60/3434648
attgatt

SEQ ID NO: 129049 - DNA, 11 bp, Unknown
  misc_feature (1)..( 11): Result.003 file - promoters60/3434648
aacttgggacc

SEQ ID NO: 129050 - DNA, 11 bp, Unknown
  misc_feature (1)..( 11): Result.003 file - promoters60/3434648
aacttgggacc

SEQ ID NO: 129051 - DNA, 31 bp, Unknown
  misc_feature (1)..( 31): Result.003 file - promoters60/3434648
taatagtttctccttctatataatgaaacaa

SEQ ID NO: 129052 - DNA, 31 bp, Unknown; identical to SEQ ID NO: 55685
  misc_feature (1)..( 31): Result.003 file - promoters60/3434648

SEQ ID NO: 129053 - DNA, 7 bp, Unknown
  misc_feature (1)..( 7): Result.003 file - promoters60/3434648
taaccac

SEQ ID NO: 129054 - DNA, 7 bp, Unknown
  misc_feature (1)..( 7): Result.003 file - promoters60/3434648
taatcac

SEQ ID NO: 129055 - DNA, 10 bp, Unknown
  misc_feature (1)..( 10): Result.003 file - promoters60/3434648
atatatattt

SEQ ID NO: 129056 - DNA, 10 bp, Unknown
  misc_feature (1)..( 10): Result.003 file - promoters60/3434648
atatatgttt

SEQ ID NO: 129057 - DNA, 10 bp, Unknown
  misc_feature (1)..( 10): Result.003 file - promoters60/3434648
taataagttg

SEQ ID NO: 129058 - DNA, 6 bp, Unknown
  misc_feature (1)..( 6): Result.003 file - promoters60/3434648
atagat

SEQ ID NO: 129059 - DNA, 6 bp, Unknown
  misc_feature (1)..( 6): Result.003 file - promoters60/3434648
atagat

SEQ ID NO: 129060 - DNA, 6 bp, Unknown
  misc_feature (1)..( 6): Result.003 file - promoters60/3434648
ttttaa

SEQ ID NO: 129061 - DNA, 6 bp, Unknown
  misc_feature (1)..( 6): Result.003 file - promoters60/3434648
ttttaa

SEQ ID NO: 129062 - DNA, 6 bp, Unknown
  misc_feature (1)..( 6): Result.003 file - promoters60/3434648
aaaaca

SEQ ID NO: 129063 - DNA, 6 bp, Unknown
  misc_feature (1)..( 6): Result.003 file - promoters60/3434648
aaaaca

SEQ ID NO: 129064 - DNA, 7 bp, Unknown
  misc_feature (1)..( 7): Result.003 file - promoters60/3434652
gttcttt

SEQ ID NO: 129065 - DNA, 7 bp, Unknown
  misc_feature (1)..( 7): Result.003 file - promoters60/3434652
gttcttt

SEQ ID NO: 129066 - DNA, 8 bp, Unknown
  misc_feature (1)..( 8): Result.003 file - promoters60/3434652
aaaattaa

SEQ ID NO: 129067 - DNA, 8 bp, Unknown
  misc_feature (1)..( 8): Result.003 file - promoters60/3434652
aaagttaa

SEQ ID NO: 129068 - DNA, 8 bp, Unknown
  misc_feature (1)..( 8): Result.003 file - promoters60/3434652
gatcaaaa

SEQ ID NO: 129069 - DNA, 8 bp, Unknown
  misc_feature (1)..( 8): Result.003 file - promoters60/3434652
gataaaaa

SEQ ID NO: 129070 - DNA, 11 bp, Unknown
  misc_feature (1)..( 11): Result.003 file - promoters60/3434652
attttttaagc

SEQ ID NO: 129071 - DNA, 11 bp, Unknown
  misc_feature (1)..( 11): Result.003 file - promoters60/3434652
attttttcagc

SEQ ID NO: 129072 - DNA, 11 bp, Unknown
  misc_feature (1)..( 11): Result.003 file - promoters60/3434652
gttttttttac

SEQ ID NO: 129073 - DNA, 9 bp, Unknown
  misc_feature (1)..( 9): Result.003 file - promoters60/3434652
taaggttgt

SEQ ID NO: 129074 - DNA, 9 bp, Unknown
  misc_feature (1)..( 9): Result.003 file - promoters60/3434652
taaagttgt

SEQ ID NO: 129075 - DNA, 7 bp, Unknown
  misc_feature (1)..( 7): Result.003 file - promoters60/3434652
atctaaa

SEQ ID NO: 129076 - DNA, 7 bp, Unknown
  misc_feature (1)..( 7): Result.003 file - promoters60/3434652
atctaaa

SEQ ID NO: 129077 - DNA, 8 bp, Unknown
  misc_feature (1)..( 8): Result.003 file - promoters60/3434652
tgttttat

SEQ ID NO: 129078 - DNA, 8 bp, Unknown
  misc_feature (1)..( 8): Result.003 file - promoters60/3434652
tgtattat

SEQ ID NO: 129079 - DNA, 10 bp, Unknown
  misc_feature (1)..( 10): Result.003 file - promoters60/3434652
tttaactata

SEQ ID NO: 129080 - DNA, 10 bp, Unknown
  misc_feature (1)..( 10): Result.003 file - promoters60/3434652
tttaattata

SEQ ID NO: 129081 - DNA, 6 bp, Unknown
  misc_feature (1)..( 6): Result.003 file - promoters60/3434652
agtcaa

SEQ ID NO: 129082 - DNA, 6 bp, Unknown
  misc_feature (1)..( 6): Result.003 file - promoters60/3434652
agtcaa

SEQ ID NO: 129083 - DNA, 6 bp, Unknown
  misc_feature (1)..( 6): Result.003 file - promoters60/3434652
taacca

SEQ ID NO: 129084 - DNA, 6 bp, Unknown
  misc_feature (1)..( 6): Result.003 file - promoters60/3434652
taacca

SEQ ID NO: 129085 - DNA, 6 bp, Unknown
  misc_feature (1)..( 6): Result.003 file - promoters60/3434652
tataaa

SEQ ID NO: 129086 - DNA, 6 bp, Unknown
  misc_feature (1)..( 6): Result.003 file - promoters60/3434652
tataaa

SEQ ID NO: 129087 - DNA, 7 bp, Unknown
  misc_feature (1)..( 7): Result.003 file - promoters60/3434652
actttag

SEQ ID NO: 129088 - DNA, 7 bp, Unknown
  misc_feature (1)..( 7): Result.003 file - promoters60/3434652
actatag

SEQ ID NO: 129089 - DNA, 6 bp, Unknown
  misc_feature (1)..( 6): Result.003 file - promoters60/3434652
ttttgt

SEQ ID NO: 129090 - DNA, 6 bp, Unknown
  misc_feature (1)..( 6): Result.003 file - promoters60/3434652
ttttgt

SEQ ID NO: 129091 - DNA, 7 bp, Unknown
  misc_feature (1)..( 7): Result.003 file - promoters60/3434652
tttctta

SEQ ID NO: 129092 - DNA, 7 bp, Unknown
  misc_feature (1)..( 7): Result.003 file - promoters60/3434652
tttatta

SEQ ID NO: 129093 - DNA, 7 bp, Unknown
  misc_feature (1)..( 7): Result.003 file - promoters60/3434652
acaactt

SEQ ID NO: 129094 - DNA, 7 bp, Unknown
  misc_feature (1)..( 7): Result.003 file - promoters60/3434652
acaactt

SEQ ID NO: 129095 - DNA, 6 bp, Unknown
  misc_feature (1)..( 6): Result.003 file - promoters60/3434652
aacagc

SEQ ID NO: 129096 - DNA, 6 bp, Unknown
  misc_feature (1)..( 6): Result.003 file - promoters60/3434652
aacagc

SEQ ID NO: 129097 - DNA, 7 bp, Unknown
  misc_feature (1)..( 7): Result.003 file - promoters60/3434652
acttgta

SEQ ID NO: 129098 - DNA, 7 bp, Unknown
  misc_feature (1)..( 7): Result.003 file - promoters60/3434652
acttgta

SEQ ID NO: 129099 - DNA, 6 bp, Unknown
  misc_feature (1)..( 6): Result.003 file - promoters60/3434652
ccaatc

SEQ ID NO: 129100 - DNA, 6 bp, Unknown
  misc_feature (1)..( 6): Result.003 file - promoters60/3434652
ccaatc

SEQ ID NO: 129101 - DNA, 8 bp, Unknown
  misc_feature (1)..( 8): Result.003 file - promoters60/3434652
aataagac

SEQ ID NO: 129102 - DNA, 8 bp, Unknown
  misc_feature (1)..( 8): Result.003 file - promoters60/3434652
aatcagac

SEQ ID NO: 129103 - DNA, 7 bp, Unknown
  misc_feature (1)..( 7): Result.003 file - promoters60/3434652
aaacata

SEQ ID NO: 129104 - DNA, 7 bp, Unknown
  misc_feature (1)..( 7): Result.003 file - promoters60/3434652
aaatata

SEQ ID NO: 129105 - DNA, 8 bp, Unknown
  misc_feature (1)..( 8): Result.003 file - promoters60/3434652
ttaaaatg

SEQ ID NO: 129106 - DNA, 8 bp, Unknown
  misc_feature (1)..( 8): Result.003 file - promoters60/3434652
ctaaaatt

SEQ ID NO: 129107 - DNA, 8 bp, Unknown
  misc_feature (1)..( 8): Result.003 file - promoters60/3434652
ctaatatt

SEQ ID NO: 129108 - DNA, 6 bp, Unknown
  misc_feature (1)..( 6): Result.003 file - promoters60/3434652
attaaa

SEQ ID NO: 129109 - DNA, 6 bp, Unknown
  misc_feature (1)..( 6): Result.003 file - promoters60/3434652
attaaa

SEQ ID NO: 129110 - DNA, 6 bp, Unknown
  misc_feature (1)..( 6): Result.003 file - promoters60/3434652
aaaaag

SEQ ID NO: 129111 - DNA, 6 bp, Unknown
  misc_feature (1)..( 6): Result.003 file - promoters60/3434652
aaaaag

SEQ ID NO: 129112 - DNA, 7 bp, Unknown
  misc_feature (1)..( 7): Result.003 file - promoters60/3434652
tttataa

SEQ ID NO: 129113 - DNA, 7 bp, Unknown
  misc_feature (1)..( 7): Result.003 file - promoters60/3434652
tttctaa

SEQ ID NO: 129114 - DNA, 6 bp, Unknown
  misc_feature (1)..( 6): Result.003 file - promoters60/3434652
tcagct

SEQ ID NO: 129115 - DNA, 6 bp, Unknown
  misc_feature (1)..( 6): Result.003 file - promoters60/3434652
tcagct

SEQ ID NO: 129116 - DNA, 6 bp, Unknown
  misc_feature (1)..( 6): Result.003 file - promoters60/3434652
ctattc

SEQ ID NO: 129117 - DNA, 6 bp, Unknown
  misc_feature (1)..( 6): Result.003 file - promoters60/3434652
ctattc

SEQ ID NO: 129118 - DNA, 6 bp, Unknown
  misc_feature (1)..( 6): Result.003 file - promoters60/3434652
attttt

SEQ ID NO: 129119 - DNA, 6 bp, Unknown
  misc_feature (1)..( 6): Result.003 file - promoters60/3434652
attttt

SEQ ID NO: 129120 - DNA, 7 bp, Unknown
  misc_feature (1)..( 7): Result.003 file - promoters60/3434652
aaatttt

SEQ ID NO: 129121 - DNA, 7 bp, Unknown
  misc_feature (1)..( 7): Result.003 file - promoters60/3434652
aaagttt

SEQ ID NO: 129122 - DNA, 6 bp, Unknown
  misc_feature (1)..( 6): Result.003 file - promoters60/3434836
ttcaaa

SEQ ID NO: 129123 - DNA, 6 bp, Unknown
  misc_feature (1)..( 6): Result.003 file - promoters60/3434836
ttcaaa

SEQ ID NO: 129124 - DNA, 7 bp, Unknown
  misc_feature (1)..( 7): Result.003 file - promoters60/3434836
caaaaaa

SEQ ID NO: 129125 - DNA, 7 bp, Unknown
  misc_feature (1)..( 7): Result.003 file - promoters60/3434836
caacaaa

SEQ ID NO: 129126 - DNA, 7 bp, Unknown
  misc_feature (1)..( 7): Result.003 file - promoters60/3434836
ggtgttt

SEQ ID NO: 129127 - DNA, 7 bp, Unknown
  misc_feature (1)..( 7): Result.003 file - promoters60/3434836
ggttttt

SEQ ID NO: 129128 - DNA, 7 bp, Unknown
  misc_feature (1)..( 7): Result.003 file - promoters60/3434836
aacaaaa

SEQ ID NO: 129129 - DNA, 7 bp, Unknown
  misc_feature (1)..( 7): Result.003 file - promoters60/3434836
aacaaaa

SEQ ID NO: 129130 - DNA, 7 bp, Unknown
  misc_feature (1)..( 7): Result.003 file - promoters60/3434836
ttagtat

SEQ ID NO: 129131 - DNA, 7 bp, Unknown
  misc_feature (1)..( 7): Result.003 file - promoters60/3434836
ttattat

SEQ ID NO: 129132 - DNA, 8 bp, Unknown
  misc_feature (1)..( 8): Result.003 file - promoters60/3434836
tattcgtc

SEQ ID NO: 129133 - DNA, 8 bp, Unknown
  misc_feature (1)..( 8): Result.003 file - promoters60/3434836
tattagtc

SEQ ID NO: 129134 - DNA, 8 bp, Unknown
  misc_feature (1)..( 8): Result.003 file - promoters60/3434836
aaaagtgt

SEQ ID NO: 129135 - DNA, 8 bp, Unknown
  misc_feature (1)..( 8): Result.003 file - promoters60/3434836
aaaagtgt

SEQ ID NO: 129136 - DNA, 7 bp, Unknown
  misc_feature (1)..( 7): Result.003 file - promoters60/3434836
ttttttg

SEQ ID NO: 129137 - DNA, 7 bp, Unknown
  misc_feature (1)..( 7): Result.003 file - promoters60/3434836
tttattg

SEQ ID NO: 129138 - DNA, 7 bp, Unknown
  misc_feature (1)..( 7): Result.003 file - promoters60/3434836
tttggtt

SEQ ID NO: 129139 - DNA, 7 bp, Unknown
  misc_feature (1)..( 7): Result.003 file - promoters60/3434836
ttttgtt

SEQ ID NO: 129140 - DNA, 8 bp, Unknown
  misc_feature (1)..( 8): Result.003 file - promoters60/3434836
caaatcag

SEQ ID NO: 129141 - DNA, 8 bp, Unknown
  misc_feature (1)..( 8): Result.003 file - promoters60/3434836
caactcag

SEQ ID NO: 129142 - DNA, 6 bp, Unknown
  misc_feature (1)..( 6): Result.003 file - promoters60/3434836
atcaga

SEQ ID NO: 129143 - DNA, 6 bp, Unknown
  misc_feature (1)..( 6): Result.003 file - promoters60/3434836
atcaga

SEQ ID NO: 129144 - DNA, 6 bp, Unknown
  misc_feature (1)..( 6): Result.003 file - promoters60/3434836
gataga

SEQ ID NO: 129145 - DNA, 6 bp, Unknown
  misc_feature (1)..( 6): Result.003 file - promoters60/3434836
gataga

SEQ ID NO: 129146 - DNA, 6 bp, Unknown
  misc_feature (1)..( 6): Result.003 file - promoters60/3434836
agatct

SEQ ID NO: 129147 - DNA, 6 bp, Unknown
  misc_feature (1)..( 6): Result.003 file - promoters60/3434836
agatct

SEQ ID NO: 129148 - DNA, 9 bp, Unknown
  misc_feature (1)..( 9): Result.003 file - promoters60/3434836
attgaaaga

SEQ ID NO: 129149 - DNA, 9 bp, Unknown
  misc_feature (1)..( 9): Result.003 file - promoters60/3434836
attaaaaga

SEQ ID NO: 129150 - DNA, 10 bp, Unknown
  misc_feature (1)..( 10): Result.003 file - promoters60/3434836
tctctgatca

SEQ ID NO: 129151 - DNA, 10 bp, Unknown
  misc_feature (1)..( 10): Result.003 file - promoters60/3434836
tctttgatca

SEQ ID NO: 129152 - DNA, 8 bp, Unknown
  misc_feature (1)..( 8): Result.003 file - promoters60/3434909
tatatctt

SEQ ID NO: 129153 - DNA, 8 bp, Unknown
  misc_feature (1)..( 8): Result.003 file - promoters60/3434909
gataactt

SEQ ID NO: 129154 - DNA, 8 bp, Unknown
  misc_feature (1)..( 8): Result.003 file - promoters60/3434909
tatatcca

SEQ ID NO: 129155 - DNA, 9 bp, Unknown
  misc_feature (1)..( 9): Result.003 file - promoters60/3434909
aaggatata

SEQ ID NO: 129156 - DNA, 9 bp, Unknown
  misc_feature (1)..( 9): Result.003 file - promoters60/3434909
aaggagata

SEQ ID NO: 129157 - DNA, 7 bp, Unknown
  misc_feature (1)..( 7): Result.003 file - promoters60/3434909
atcagaa

SEQ ID NO: 129158 - DNA, 7 bp, Unknown
  misc_feature (1)..( 7): Result.003 file - promoters60/3434909
atctgaa

SEQ ID NO: 129159 - DNA, 6 bp, Unknown
  misc_feature (1)..( 6): Result.003 file - promoters60/3434909
taaaaa

SEQ ID NO: 129160 - DNA, 6 bp, Unknown
  misc_feature (1)..( 6): Result.003 file - promoters60/3434909
taaaaa

SEQ ID NO: 129161 - DNA, 11 bp, Unknown
  misc_feature (1)..( 11): Result.003 file - promoters60/3434909
caacatgaaat

SEQ ID NO: 129162 - DNA, 11 bp, Unknown
  misc_feature (1)..( 11): Result.003 file - promoters60/3434909
gctaatggaat

SEQ ID NO: 129163 - DNA, 11 bp, Unknown
  misc_feature (1)..( 11): Result.003 file - promoters60/3434909
caacaagaacc

SEQ ID NO: 129164 - DNA, 8 bp, Unknown
  misc_feature (1)..( 8): Result.003 file - promoters60/3434909
taatttta

SEQ ID NO: 129165 - DNA, 8 bp, Unknown
  misc_feature (1)..( 8): Result.003 file - promoters60/3434909
taatgtta

SEQ ID NO: 129166 - DNA, 10 bp, Unknown
  misc_feature (1)..( 10): Result.003 file - promoters60/3434909
cccataaaaa

SEQ ID NO: 129167 - DNA, 10 bp, Unknown
  misc_feature (1)..( 10): Result.003 file - promoters60/3434909
cccatataaa

SEQ ID NO: 129168 - DNA, 6 bp, Unknown
  misc_feature (1)..( 6): Result.003 file - promoters60/3434909
tccatt

SEQ ID NO: 129169 - DNA, 6 bp, Unknown
  misc_feature (1)..( 6): Result.003 file - promoters60/3434909
tccatt

SEQ ID NO: 129170 - DNA, 6 bp, Unknown
  misc_feature (1)..( 6): Result.003 file - promoters60/3434909
tcaaca

SEQ ID NO: 129171 - DNA, 6 bp, Unknown
  misc_feature (1)..( 6): Result.003 file - promoters60/3434909
tcaaca

SEQ ID NO: 129172 - DNA, 8 bp, Unknown
  misc_feature (1)..( 8): Result.003 file - promoters60/3434909
atgtcata

SEQ ID NO: 129173 - DNA, 8 bp, Unknown
  misc_feature (1)..( 8): Result.003 file - promoters60/3434909
atgtaata

SEQ ID NO: 129174 - DNA, 9 bp, Unknown
  misc_feature (1)..( 9): Result.003 file - promoters60/3434909
atcaaatct

SEQ ID NO: 129175 - DNA, 9 bp, Unknown
  misc_feature (1)..( 9): Result.003 file - promoters60/3434909
atcacatct

SEQ ID NO: 129176 - DNA, 6 bp, Unknown
  misc_feature (1)..( 6): Result.003 file - promoters60/3434909
ttccgc

SEQ ID NO: 129177 - DNA, 6 bp, Unknown
  misc_feature (1)..( 6): Result.003 file - promoters60/3434909
ttccgc

SEQ ID NO: 129178 - DNA, 9 bp, Unknown
  misc_feature (1)..( 9): Result.003 file - promoters60/3435057
aaatatata

SEQ ID NO: 129179 - DNA, 9 bp, Unknown
  misc_feature (1)..( 9): Result.003 file - promoters60/3435057
aaatatctg

SEQ ID NO: 129180 - DNA, 10 bp, Unknown
  misc_feature (1)..( 10): Result.003 file - promoters60/3435057
aaactatata

SEQ ID NO: 129181 - DNA, 11 bp, Unknown
  misc_feature (1)..( 11): Result.003 file - promoters60/3435057
aaaatatatat

SEQ ID NO: 129182 - DNA, 11 bp, Unknown
  misc_feature (1)..( 11): Result.003 file - promoters60/3435057
tctaaatatat

SEQ ID NO: 129183 - DNA, 11 bp, Unknown
  misc_feature (1)..( 11): Result.003 file - promoters60/3435057
aaactatataa

SEQ ID NO: 129184 - DNA, 6 bp, Unknown
  misc_feature (1)..( 6): Result.003 file - promoters60/3435057
cataaa

SEQ ID NO: 129185 - DNA, 6 bp, Unknown
  misc_feature (1)..( 6): Result.003 file - promoters60/3435057
cataaa

SEQ ID NO: 129186 - DNA, 7 bp, Unknown
  misc_feature (1)..( 7): Result.003 file - promoters60/3435057
cattaaa

SEQ ID NO: 129187 - DNA, 9 bp, Unknown
  misc_feature (1)..( 9): Result.003 file - promoters60/3435057
ccataaaaa

SEQ ID NO: 129188 - DNA, 9 bp, Unknown
  misc_feature (1)..( 9): Result.003 file - promoters60/3435057
cggtaaaaa

SEQ ID NO: 129189 - DNA, 9 bp, Unknown
  misc_feature (1)..( 9): Result.003 file - promoters60/3435057
cattaaatc

SEQ ID NO: 129190 - DNA, 14 bp, Unknown
  misc_feature (1)..( 14): Result.003 file - promoters60/3435057
actatatgtttttc

SEQ ID NO: 129191 - DNA, 14 bp, Unknown
  misc_feature (1)..( 14): Result.003 file - promoters60/3435057
agactgtgttttta

SEQ ID NO: 129192 - DNA, 14 bp, Unknown
  misc_feature (1)..( 14): Result.003 file - promoters60/3435057
tattagtctttttc

SEQ ID NO: 129193 - DNA, 14 bp, Unknown
  misc_feature (1)..( 14): Result.003 file - promoters60/3435057
tttacttctcttta

SEQ ID NO: 129194 - DNA, 8 bp, Unknown
  misc_feature (1)..( 8): Result.003 file - promoters60/3435057
aaaaatta

SEQ ID NO: 129195 - DNA, 8 bp, Unknown
  misc_feature (1)..( 8): Result.003 file - promoters60/3435057
aaaaatta

SEQ ID NO: 129196 - DNA, 8 bp, Unknown
  misc_feature (1)..( 8): Result.003 file - promoters60/3435057
aaacatta

SEQ ID NO: 129197 - DNA, 10 bp, Unknown
  misc_feature (1)..( 10): Result.003 file - promoters60/3435057
aattttgttt

SEQ ID NO: 129198 - DNA, 10 bp, Unknown
  misc_feature (1)..( 10): Result.003 file - promoters60/3435057
ctttttattt

SEQ ID NO: 129199 - DNA, 10 bp, Unknown
  misc_feature (1)..( 10): Result.003 file - promoters60/3435057
ctttttaact

SEQ ID NO: 129200 - DNA, 9 bp, Unknown
  misc_feature (1)..( 9): Result.003 file - promoters60/3435057
ttttaattt

SEQ ID NO: 129201 - DNA, 9 bp, Unknown
  misc_feature (1)..( 9): Result.003 file - promoters60/3435057
gtttaattt

SEQ ID NO: 129202 - DNA, 9 bp, Unknown
  misc_feature (1)..( 9): Result.003 file - promoters60/3435057
gtttaaacc

SEQ ID NO: 129203 - DNA, 7 bp, Unknown
  misc_feature (1)..( 7): Result.003 file - promoters60/3435057
ttatatt

SEQ ID NO: 129204 - DNA, 7 bp, Unknown
  misc_feature (1)..( 7): Result.003 file - promoters60/3435057
atatatt

SEQ ID NO: 129205 - DNA, 7 bp, Unknown
  misc_feature (1)..( 7): Result.003 file - promoters60/3435057
atatatg

SEQ ID NO: 129206 - DNA, 9 bp, Unknown
  misc_feature (1)..( 9): Result.003 file - promoters60/3435057
gttatcata

SEQ ID NO: 129207 - DNA, 9 bp, Unknown
  misc_feature (1)..( 9): Result.003 file - promoters60/3435057
gttataata

SEQ ID NO: 129208 - DNA, 9 bp, Unknown
  misc_feature (1)..( 9): Result.003 file - promoters60/3435057
taaatcata

SEQ ID NO: 129209 - DNA, 9 bp, Unknown
  misc_feature (1)..( 9): Result.003 file - promoters60/3435057
ctatttata

SEQ ID NO: 129210 - DNA, 9 bp, Unknown
  misc_feature (1)..( 9): Result.003 file - promoters60/3435057
atatatata

SEQ ID NO: 129211 - DNA, 9 bp, Unknown
  misc_feature (1)..( 9): Result.003 file - promoters60/3435057
ccatctata

SEQ ID NO: 129212 - DNA, 8 bp, Unknown
  misc_feature (1)..( 8): Result.003 file - promoters60/3435091
tctttttt

SEQ ID NO: 129213 - DNA, 8 bp, Unknown
  misc_feature (1)..( 8): Result.003 file - promoters60/3435091
tcttcttt

SEQ ID NO: 129214 - DNA, 8 bp, Unknown
  misc_feature (1)..( 8): Result.003 file - promoters60/3435091
tcttcttt

SEQ ID NO: 129215 - DNA, 8 bp, Unknown
  misc_feature (1)..( 8): Result.003 file - promoters60/3435091
tctttttg

SEQ ID NO: 129216 - DNA, 9 bp, Unknown
  misc_feature (1)..( 9): Result.003 file - promoters60/3435091
tatttgttt

SEQ ID NO: 129217 - DNA, 9 bp, Unknown
  misc_feature (1)..( 9): Result.003 file - promoters60/3435091
tcttttctt

SEQ ID NO: 129218 - DNA, 24 bp, Unknown
  misc_feature (1)..( 24): Result.003 file - promoters60/3435091
tttcataaaaattctcaaatatta

SEQ ID NO: 129219 - DNA, 24 bp, Unknown
  misc_feature (1)..( 24): Result.003 file - promoters60/3435091
gttcatcactggtggaaaatgtta

SEQ ID NO: 129220 - DNA, 24 bp, Unknown
  misc_feature (1)..( 24): Result.003 file - promoters60/3435091
tttttaatttcttttcacatatat

SEQ ID NO: 129221 - DNA, 24 bp, Unknown
  misc_feature (1)..( 24): Result.003 file - promoters60/3435091
ttttataaatattttcaactattt

SEQ ID NO: 129222 - DNA, 24 bp, Unknown
  misc_feature (1)..( 24): Result.003 file - promoters60/3435091
tttttctaattttgtcaaatgatg

SEQ ID NO: 129223 - DNA, 24 bp, Unknown
  misc_feature (1)..( 24): Result.003 file - promoters60/3435091
agtggatgtttttgttaactatat

SEQ ID NO: 129224 - DNA, 24 bp, Unknown
  misc_feature (1)..( 24): Result.003 file - promoters60/3435091
ccaagtccaacgaaacgattatat

SEQ ID NO: 129225 - DNA, 10 bp, Unknown
  misc_feature (1)..( 10): Result.003 file - promoters60/3435091
gtatttatat

SEQ ID NO: 129226 - DNA, 10 bp, Unknown
  misc_feature (1)..( 10): Result.003 file - promoters60/3435091
gtatatatat

SEQ ID NO: 129227 - DNA, 10 bp, Unknown
  misc_feature (1)..( 10): Result.003 file - promoters60/3435091
ttatttagtt

SEQ ID NO: 129228 - DNA, 10 bp, Unknown
  misc_feature (1)..( 10): Result.003 file - promoters60/3435091
gtatataaat

SEQ ID NO: 129229 - DNA, 10 bp, Unknown
  misc_feature (1)..( 10): Result.003 file - promoters60/3435091
ttatataaat

SEQ ID NO: 129230 - DNA, 10 bp, Unknown
  misc_feature (1)..( 10): Result.003 file - promoters60/3435091
taatataaag

SEQ ID NO: 129231 - DNA, 11 bp, Unknown
  misc_feature (1)..( 11): Result.003 file - promoters60/3435091
caactttgttt

SEQ ID NO: 129232 - DNA, 11 bp, Unknown
  misc_feature (1)..( 11): Result.003 file - promoters60/3435091
caaccttgtaa

SEQ ID NO: 129233 - DNA, 11 bp, Unknown
  misc_feature (1)..( 11): Result.003 file - promoters60/3435091
caactttgaaa

SEQ ID NO: 129234 - DNA, 11 bp, Unknown
  misc_feature (1)..( 11): Result.003 file - promoters60/3435091
ttcctttgaca

SEQ ID NO: 129235 - DNA, 11 bp, Unknown
  misc_feature (1)..( 11): Result.003 file - promoters60/3435091
atacttttaat

SEQ ID NO: 129236 - DNA, 11 bp, Unknown
  misc_feature (1)..( 11): Result.003 file - promoters60/3435091
aaacattgaga

SEQ ID NO: 129237 - DNA, 8 bp, Unknown
  misc_feature (1)..( 8): Result.003 file - promoters60/3435091
attattga

SEQ ID NO: 129238 - DNA, 8 bp, Unknown
  misc_feature (1)..( 8): Result.003 file - promoters60/3435091
tttaatga

SEQ ID NO: 129239 - DNA, 8 bp, Unknown
  misc_feature (1)..( 8): Result.003 file - promoters60/3435091
attcataa

SEQ ID NO: 129240 - DNA, 8 bp, Unknown
  misc_feature (1)..( 8): Result.003 file - promoters60/3435091
atttttgg

SEQ ID NO: 129241 - DNA, 8 bp, Unknown
  misc_feature (1)..( 8): Result.003 file - promoters60/3435091
tttaatcg

SEQ ID NO: 129242 - DNA, 8 bp, Unknown
  misc_feature (1)..( 8): Result.003 file - promoters60/3435091
tttaatta

SEQ ID NO: 129243 - DNA, 8 bp, Unknown
  misc_feature (1)..( 8): Result.003 file - promoters60/3435091
ctttttgt

SEQ ID NO: 129244 - DNA, 10 bp, Unknown
  misc_feature (1)..( 10): Result.003 file - promoters60/3435091
tggttttaaa

SEQ ID NO: 129245 - DNA, 10 bp, Unknown
  misc_feature (1)..( 10): Result.003 file - promoters60/3435091
aagttttagc

SEQ ID NO: 129246 - DNA, 10 bp, Unknown
  misc_feature (1)..( 10): Result.003 file - promoters60/3435091
cggttttaaa

SEQ ID NO: 129247 - DNA, 10 bp, Unknown
  misc_feature (1)..( 10): Result.003 file - promoters60/3435091
aactttgaaa

SEQ ID NO: 129248 - DNA, 10 bp, Unknown
  misc_feature (1)..( 10): Result.003 file - promoters60/3435091
tcctttgaca

SEQ ID NO: 129249 - DNA, 10 bp, Unknown
  misc_feature (1)..( 10): Result.003 file - promoters60/3435091
aacattgaga

SEQ ID NO: 129250 - DNA, 9 bp, Unknown
  misc_feature (1)..( 9): Result.003 file - promoters60/3435091
agttataaa

SEQ ID NO: 129251 - DNA, 9 bp, Unknown
  misc_feature (1)..( 9): Result.003 file - promoters60/3435091
ccttataat

SEQ ID NO: 129252 - DNA, 9 bp, Unknown
  misc_feature (1)..( 9): Result.003 file - promoters60/3435091
ttttagaaa

SEQ ID NO: 129253 - DNA, 9 bp, Unknown
  misc_feature (1)..( 9): Result.003 file - promoters60/3435091
ccttatact

SEQ ID NO: 129254 - DNA, 9 bp, Unknown
  misc_feature (1)..( 9): Result.003 file - promoters60/3435091
aattaaaat

SEQ ID NO: 129255 - DNA, 9 bp, Unknown
  misc_feature (1)..( 9): Result.003 file - promoters60/3435091
gattataaa

SEQ ID NO: 129256 - DNA, 13 bp, Unknown
  misc_feature (1)..( 13): Result.003 file - promoters60/3435133
ctaaaatagtaaa

SEQ ID NO: 129257 - DNA, 13 bp, Unknown
  misc_feature (1)..( 13): Result.003 file - promoters60/3435133
aaataattgtata

SEQ ID NO: 129258 - DNA, 13 bp, Unknown
  misc_feature (1)..( 13): Result.003 file - promoters60/3435133
tcatatttgtata

SEQ ID NO: 129259 - DNA, 13 bp, Unknown
  misc_feature (1)..( 13): Result.003 file - promoters60/3435133
aaagaattgaaca

SEQ ID NO: 129260 - DNA, 10 bp, Unknown
  misc_feature (1)..( 10): Result.003 file - promoters60/3435133
gaaaaagata

SEQ ID NO: 129261 - DNA, 10 bp, Unknown
  misc_feature (1)..( 10): Result.003 file - promoters60/3435133
gaaatagatt

SEQ ID NO: 129262 - DNA, 10 bp, Unknown
  misc_feature (1)..( 10): Result.003 file - promoters60/3435133
ttagtagatt

SEQ ID NO: 129263 - DNA, 10 bp, Unknown
  misc_feature (1)..( 10): Result.003 file - promoters60/3435133
tatataaatt

SEQ ID NO: 129264 - DNA, 10 bp, Unknown
  misc_feature (1)..( 10): Result.003 file - promoters60/3435133
ttactaaaat

SEQ ID NO: 129265 - DNA, 10 bp, Unknown
  misc_feature (1)..( 10): Result.003 file - promoters60/3435133
ttattaattt

SEQ ID NO: 129266 - DNA, 11 bp, Unknown
  misc_feature (1)..( 11): Result.003 file - promoters60/3435133
gaactgaaaga

SEQ ID NO: 129267 - DNA, 11 bp, Unknown
  misc_feature (1)..( 11): Result.003 file - promoters60/3435133
ttgtataaatt

SEQ ID NO: 129268 - DNA, 6 bp, Unknown
  misc_feature (1)..( 6): Result.003 file - promoters60/3435213
agtcgt

SEQ ID NO: 129269 - DNA, 6 bp, Unknown
  misc_feature (1)..( 6): Result.003 file - promoters60/3435213
agtcgt

SEQ ID NO: 129270 - DNA, 7 bp, Unknown
  misc_feature (1)..( 7): Result.003 file - promoters60/3435213
tcttgct

SEQ ID NO: 129271 - DNA, 7 bp, Unknown
  misc_feature (1)..( 7): Result.003 file - promoters60/3435213
tctagct

SEQ ID NO: 129272 - DNA, 6 bp, Unknown
  misc_feature (1)..( 6): Result.003 file - promoters60/3435213
cttgta

SEQ ID NO: 129273 - DNA, 6 bp, Unknown
  misc_feature (1)..( 6): Result.003 file - promoters60/3435213
cttgta

SEQ ID NO: 129274 - DNA, 7 bp, Unknown
  misc_feature (1)..( 7): Result.003 file - promoters60/3435213
tttttgt

SEQ ID NO: 129275 - DNA, 7 bp, Unknown
  misc_feature (1)..( 7): Result.003 file - promoters60/3435213
tttctgt

SEQ ID NO: 129276 - DNA, 7 bp, Unknown
  misc_feature (1)..( 7): Result.003 file - promoters60/3435213
tttatca

SEQ ID NO: 129277 - DNA, 7 bp, Unknown
  misc_feature (1)..( 7): Result.003 file - promoters60/3435213
tttttca

SEQ ID NO: 129278 - DNA, 8 bp, Unknown
  misc_feature (1)..( 8): Result.003 file - promoters60/3435213
tttcttct

SEQ ID NO: 129279 - DNA, 8 bp, Unknown
  misc_feature (1)..( 8): Result.003 file - promoters60/3435213
tgtagtca

SEQ ID NO: 129280 - DNA, 8 bp, Unknown
  misc_feature (1)..( 8): Result.003 file - promoters60/3435213
tgtcgtca

SEQ ID NO: 129281 - DNA, 7 bp, Unknown
  misc_feature (1)..( 7): Result.003 file - promoters60/3435213
aacgaaa

SEQ ID NO: 129282 - DNA, 7 bp, Unknown
  misc_feature (1)..( 7): Result.003 file - promoters60/3435213
aaccaaa

SEQ ID NO: 129283 - DNA, 6 bp, Unknown
  misc_feature (1)..( 6): Result.003 file - promoters60/3435213
aaacag

SEQ ID NO: 129284 - DNA, 6 bp, Unknown
  misc_feature (1)..( 6): Result.003 file - promoters60/3435213
aaacag

SEQ ID NO: 129285 - DNA, 8 bp, Unknown
  misc_feature (1)..( 8): Result.003 file - promoters60/3435213
tcctcttt

SEQ ID NO: 129286 - DNA, 8 bp, Unknown
  misc_feature (1)..( 8): Result.003 file - promoters60/3435213
tccttttt

SEQ ID NO: 129287 - DNA, 8 bp, Unknown
  misc_feature (1)..( 8): Result.003 file - promoters60/3435213
tctcctgc

SEQ ID NO: 129288 - DNA, 8 bp, Unknown
  misc_feature (1)..( 8): Result.003 file - promoters60/3435213
tctcctgc

SEQ ID NO: 129289 - DNA, 6 bp, Unknown
  misc_feature (1)..( 6): Result.003 file - promoters60/3435213
tagagt

SEQ ID NO: 129290 - DNA, 6 bp, Unknown
  misc_feature (1)..( 6): Result.003 file - promoters60/3435213
tagagt

SEQ ID NO: 129291 - DNA, 11 bp, Unknown
  misc_feature (1)..( 11): Result.003 file - promoters60/3435239
gacgattttgt

SEQ ID NO: 129292 - DNA, 11 bp, Unknown
  misc_feature (1)..( 11): Result.003 file - promoters60/3435239
gacgattttgt

SEQ ID NO: 129293 - DNA, 11 bp, Unknown
  misc_feature (1)..( 11): Result.003 file - promoters60/3435239
gacaattagat

SEQ ID NO: 129294 - DNA, 8 bp, Unknown
  misc_feature (1)..( 8): Result.003 file - promoters60/3435239
attcgtat

SEQ ID NO: 129295 - DNA, 8 bp, Unknown
  misc_feature (1)..( 8): Result.003 file - promoters60/3435239
atttgtat

SEQ ID NO: 129296 - DNA, 8 bp, Unknown
  misc_feature (1)..( 8): Result.003 file - promoters60/3435239
gttcttat

SEQ ID NO: 129297 - DNA, 16 bp, Unknown
  misc_feature (1)..( 16): Result.003 file - promoters60/3435239
aattgtttattactgg

SEQ ID NO: 129298 - DNA, 16 bp, Unknown
  misc_feature (1)..( 16): Result.003 file - promoters60/3435239
tctcgttttttattgg

SEQ ID NO: 129299 - DNA, 16 bp, Unknown
  misc_feature (1)..( 16): Result.003 file - promoters60/3435239
ctttcttttttttgtt

SEQ ID NO: 129300 - DNA, 16 bp, Unknown
  misc_feature (1)..( 16): Result.003 file - promoters60/3435239
tcttgttttcttgaga

SEQ ID NO: 129301 - DNA, 8 bp, Unknown
  misc_feature (1)..( 8): Result.003 file - promoters60/3435239
aattgttt

SEQ ID NO: 129302 - DNA, 8 bp, Unknown
  misc_feature (1)..( 8): Result.003 file - promoters60/3435239
ttttgttt

SEQ ID NO: 129303 - DNA, 8 bp, Unknown
  misc_feature (1)..( 8): Result.003 file - promoters60/3435239
tcttgttt

SEQ ID NO: 129304 - DNA, 8 bp, Unknown
  misc_feature (1)..( 8): Result.003 file - promoters60/3435239
tctcgttt

SEQ ID NO: 129305 - DNA, 8 bp, Unknown
  misc_feature (1)..( 8): Result.003 file - promoters60/3435239
atttgtta

SEQ ID NO: 129306 - DNA, 8 bp, Unknown
  misc_feature (1)..( 8): Result.003 file - promoters60/3435239
atttgttt

SEQ ID NO: 129307 - DNA, 8 bp, Unknown
  misc_feature (1)..( 8): Result.003 file - promoters60/3435239
gtttcttt

SEQ ID NO: 129308 - DNA, 9 bp, Unknown
  misc_feature (1)..( 9): Result.003 file - promoters60/3435239
ttttatttt

SEQ ID NO: 129309 - DNA, 9 bp, Unknown
  misc_feature (1)..( 9): Result.003 file - promoters60/3435239
ctttctttt

SEQ ID NO: 129310 - DNA, 9 bp, Unknown
  misc_feature (1)..( 9): Result.003 file - promoters60/3435239
tcttgtttc

SEQ ID NO: 129311 - DNA, 9 bp, Unknown
  misc_feature (1)..( 9): Result.003 file - promoters60/3435239
aaaagaaga

SEQ ID NO: 129312 - DNA, 9 bp, Unknown
  misc_feature (1)..( 9): Result.003 file - promoters60/3435239
aaaagtaga

SEQ ID NO: 129313 - DNA, 9 bp, Unknown
  misc_feature (1)..( 9): Result.003 file - promoters60/3435239
tgaagtagt

SEQ ID NO: 129314 - DNA, 10 bp, Unknown
  misc_feature (1)..( 10): Result.003 file - promoters60/3435274
atgaaaatag

SEQ ID NO: 129315 - DNA, 10 bp, Unknown
  misc_feature (1)..( 10): Result.003 file - promoters60/3435274
atgaagatag

SEQ ID NO: 129316 - DNA, 7 bp, Unknown
  misc_feature (1)..( 7): Result.003 file - promoters60/3435274
aataaca

SEQ ID NO: 129317 - DNA, 7 bp, Unknown
  misc_feature (1)..( 7): Result.003 file - promoters60/3435274
aatcaca

SEQ ID NO: 129318 - DNA, 6 bp, Unknown
  misc_feature (1)..( 6): Result.003 file - promoters60/3435274
agtcaa

SEQ ID NO: 129319 - DNA, 6 bp, Unknown
  misc_feature (1)..( 6): Result.003 file - promoters60/3435274
agtcaa

SEQ ID NO: 129320 - DNA, 7 bp, Unknown
  misc_feature (1)..( 7): Result.003 file - promoters60/3435274
agaagga

SEQ ID NO: 129321 - DNA, 7 bp, Unknown
  misc_feature (1)..( 7): Result.003 file - promoters60/3435274
agatgga

SEQ ID NO: 129322 - DNA, 6 bp, Unknown
  misc_feature (1)..( 6): Result.003 file - promoters60/3435274
aaacaa

SEQ ID NO: 129323 - DNA, 6 bp, Unknown
  misc_feature (1)..( 6): Result.003 file - promoters60/3435274
aaacaa

SEQ ID NO: 129324 - DNA, 6 bp, Unknown
  misc_feature (1)..( 6): Result.003 file - promoters60/3435274
aatcaa

SEQ ID NO: 129325 - DNA, 6 bp, Unknown
  misc_feature (1)..( 6): Result.003 file - promoters60/3435274
aatcaa

SEQ ID NO: 129326 - DNA, 12 bp, Unknown
  misc_feature (1)..( 12): Result.003 file - promoters60/3435274
caggattgattt

SEQ ID NO: 129327 - DNA, 12 bp, Unknown
  misc_feature (1)..( 12): Result.003 file - promoters60/3435274
caggatttatta

SEQ ID NO: 129328 - DNA, 12 bp, Unknown
  misc_feature (1)..( 12): Result.003 file - promoters60/3435274
agttgtttttta

SEQ ID NO: 129329 - DNA, 7 bp, Unknown
  misc_feature (1)..( 7): Result.003 file - promoters60/3435274
acttgtg

SEQ ID NO: 129330 - DNA, 7 bp, Unknown
  misc_feature (1)..( 7): Result.003 file - promoters60/3435274
acttgtg

SEQ ID NO: 129331 - DNA, 7 bp, Unknown
  misc_feature (1)..( 7): Result.003 file - promoters60/3435274
ttatgtc

SEQ ID NO: 129332 - DNA, 7 bp, Unknown
  misc_feature (1)..( 7): Result.003 file - promoters60/3435274
ttatgtc

SEQ ID NO: 129333 - DNA, 10 bp, Unknown
  misc_feature (1)..( 10): Result.003 file - promoters60/3435274
ttttactaac

SEQ ID NO: 129334 - DNA, 10 bp, Unknown
  misc_feature (1)..( 10): Result.003 file - promoters60/3435274
ttttaataac

SEQ ID NO: 129335 - DNA, 7 bp, Unknown
  misc_feature (1)..( 7): Result.003 file - promoters60/3435274
attggta

SEQ ID NO: 129336 - DNA, 7 bp, Unknown
  misc_feature (1)..( 7): Result.003 file - promoters60/3435274
attagta

SEQ ID NO: 129337 - DNA, 6 bp, Unknown
  misc_feature (1)..( 6): Result.003 file - promoters60/3435274
aaaatc

SEQ ID NO: 129338 - DNA, 6 bp, Unknown
  misc_feature (1)..( 6): Result.003 file - promoters60/3435274
aaaatc

SEQ ID NO: 129339 - DNA, 7 bp, Unknown
  misc_feature (1)..( 7): Result.003 file - promoters60/3435274
gattcag

SEQ ID NO: 129340 - DNA, 7 bp, Unknown
  misc_feature (1)..( 7): Result.003 file - promoters60/3435274
gattcag

SEQ ID NO: 129341 - DNA, 7 bp, Unknown
  misc_feature (1)..( 7): Result.003 file - promoters60/3435274
gatggat

SEQ ID NO: 129342 - DNA, 7 bp, Unknown
  misc_feature (1)..( 7): Result.003 file - promoters60/3435274
gatcgat

SEQ ID NO: 129343 - DNA, 7 bp, Unknown
  misc_feature (1)..( 7): Result.003 file - promoters60/3435282
agaaata

SEQ ID NO: 129344 - DNA, 7 bp, Unknown
  misc_feature (1)..( 7): Result.003 file - promoters60/3435282
agaaata

SEQ ID NO: 129345 - DNA, 7 bp, Unknown
  misc_feature (1)..( 7): Result.003 file - promoters60/3435282
tgactta

SEQ ID NO: 129346 - DNA, 7 bp, Unknown
  misc_feature (1)..( 7): Result.003 file - promoters60/3435282
tgaatta

SEQ ID NO: 129347 - DNA, 7 bp, Unknown
  misc_feature (1)..( 7): Result.003 file - promoters60/3435282
gttgatt

SEQ ID NO: 129348 - DNA, 7 bp, Unknown
  misc_feature (1)..( 7): Result.003 file - promoters60/3435282
gtttatt

SEQ ID NO: 129349 - DNA, 7 bp, Unknown
  misc_feature (1)..( 7): Result.003 file - promoters60/3435282
tgtcggc

SEQ ID NO: 129350 - DNA, 7 bp, Unknown
  misc_feature (1)..( 7): Result.003 file - promoters60/3435282
tgttggc

SEQ ID NO: 129351 - DNA, 6 bp, Unknown
  misc_feature (1)..( 6): Result.003 file - promoters60/3435282
ttataa

SEQ ID NO: 129352 - DNA, 6 bp, Unknown
  misc_feature (1)..( 6): Result.003 file - promoters60/3435282
ttataa

SEQ ID NO: 129353 - DNA, 6 bp, Unknown
  misc_feature (1)..( 6): Result.003 file - promoters60/3435282
ttatgt

SEQ ID NO: 129354 - DNA, 6 bp, Unknown
  misc_feature (1)..( 6): Result.003 file - promoters60/3435282
ttatgt

SEQ ID NO: 129355 - DNA, 9 bp, Unknown
  misc_feature (1)..( 9): Result.003 file - promoters60/3435282
ttgtatctc

SEQ ID NO: 129356 - DNA, 9 bp, Unknown
  misc_feature (1)..( 9): Result.003 file - promoters60/3435282
ttgtgtctc

SEQ ID NO: 129357 - DNA, 7 bp, Unknown
  misc_feature (1)..( 7): Result.003 file - promoters60/3435282
tatcttt

SEQ ID NO: 129358 - DNA, 7 bp, Unknown
  misc_feature (1)..( 7): Result.003 file - promoters60/3435282
tattttt

SEQ ID NO: 129359 - DNA, 6 bp, Unknown
  misc_feature (1)..( 6): Result.003 file - promoters60/3435282
agcatc

SEQ ID NO: 129360 - DNA, 6 bp, Unknown
  misc_feature (1)..( 6): Result.003 file - promoters60/3435282
agcatc

SEQ ID NO: 129361 - DNA, 6 bp, Unknown
  misc_feature (1)..( 6): Result.003 file - promoters60/3435282
cttttc

SEQ ID NO: 129362 - DNA, 6 bp, Unknown
  misc_feature (1)..( 6): Result.003 file - promoters60/3435282
cttttc

SEQ ID NO: 129363 - DNA, 6 bp, Unknown
  misc_feature (1)..( 6): Result.003 file - promoters60/3435282
tttgga

SEQ ID NO: 129364 - DNA, 6 bp, Unknown
  misc_feature (1)..( 6): Result.003 file - promoters60/3435282
tttgga

SEQ ID NO: 129365 - DNA, 6 bp, Unknown
  misc_feature (1)..( 6): Result.003 file - promoters60/3435282
aaccaa

SEQ ID NO: 129366 - DNA, 6 bp, Unknown
  misc_feature (1)..( 6): Result.003 file - promoters60/3435282
aaccaa

SEQ ID NO: 129367 - DNA, 7 bp, Unknown
  misc_feature (1)..( 7): Result.003 file - promoters60/3435282
aaagatt

SEQ ID NO: 129368 - DNA, 7 bp, Unknown
  misc_feature (1)..( 7): Result.003 file - promoters60/3435282
aaatatt

SEQ ID NO: 129369 - DNA, 7 bp, Unknown
  misc_feature (1)..( 7): Result.003 file - promoters60/3435282
aaaaaag

SEQ ID NO: 129370 - DNA, 7 bp, Unknown
  misc_feature (1)..( 7): Result.003 file - promoters60/3435282
aaagaag

SEQ ID NO: 129371 - DNA, 7 bp, Unknown
  misc_feature (1)..( 7): Result.003 file - promoters60/3435282
atattat

SEQ ID NO: 129372 - DNA, 7 bp, Unknown
  misc_feature (1)..( 7): Result.003 file - promoters60/3435282
ataatat

SEQ ID NO: 129373 - DNA, 8 bp, Unknown
  misc_feature (1)..( 8): Result.003 file - promoters60/3435282
tttagaag

SEQ ID NO: 129374 - DNA, 8 bp, Unknown
  misc_feature (1)..( 8): Result.003 file - promoters60/3435282
tttacaag

SEQ ID NO: 129375 - DNA, 9 bp, Unknown
  misc_feature (1)..( 9): Result.003 file - promoters60/3435282
aatacaaaa

SEQ ID NO: 129376 - DNA, 9 bp, Unknown
  misc_feature (1)..( 9): Result.003 file - promoters60/3435282
aatagaaaa

SEQ ID NO: 129377 - DNA, 6 bp, Unknown
  misc_feature (1)..( 6): Result.003 file - promoters60/3435282
taaaaa

SEQ ID NO: 129378 - DNA, 6 bp, Unknown
  misc_feature (1)..( 6): Result.003 file - promoters60/3435282
taaaaa

SEQ ID NO: 129379 - DNA, 6 bp, Unknown
  misc_feature (1)..( 6): Result.003 file - promoters60/3435282
attttg

SEQ ID NO: 129380 - DNA, 6 bp, Unknown
  misc_feature (1)..( 6): Result.003 file - promoters60/3435282
attttg

SEQ ID NO: 129381 - DNA, 8 bp, Unknown
  misc_feature (1)..( 8): Result.003 file - promoters60/3435341
tttggttt

SEQ ID NO: 129382 - DNA, 8 bp, Unknown
  misc_feature (1)..( 8): Result.003 file - promoters60/3435341
attggttt

SEQ ID NO: 129383 - DNA, 8 bp, Unknown
  misc_feature (1)..( 8): Result.003 file - promoters60/3435341
attggtaa

SEQ ID NO: 129384 - DNA, 7 bp, Unknown
  misc_feature (1)..( 7): Result.003 file - promoters60/3435341
gaagtta

SEQ ID NO: 129385 - DNA, 7 bp, Unknown
  misc_feature (1)..( 7): Result.003 file - promoters60/3435341
gaactta

SEQ ID NO: 129386 - DNA, 7 bp, Unknown
  misc_feature (1)..( 7): Result.003 file - promoters60/3435341
tgataag

SEQ ID NO: 129387 - DNA, 7 bp, Unknown
  misc_feature (1)..( 7): Result.003 file - promoters60/3435341
tgacaag

SEQ ID NO: 129388 - DNA, 6 bp, Unknown
  misc_feature (1)..( 6): Result.003 file - promoters60/3435341
aatttt

SEQ ID NO: 129389 - DNA, 6 bp, Unknown
  misc_feature (1)..( 6): Result.003 file - promoters60/3435341
aatttt

SEQ ID NO: 129390 - DNA, 6 bp, Unknown
  misc_feature (1)..( 6): Result.003 file - promoters60/3435341
ttttga

SEQ ID NO: 129391 - DNA, 6 bp, Unknown
  misc_feature (1)..( 6): Result.003 file - promoters60/3435341
ttttga

SEQ ID NO: 129392 - DNA, 7 bp, Unknown
  misc_feature (1)..( 7): Result.003 file - promoters60/3435341
agttata

SEQ ID NO: 129393 - DNA, 7 bp, Unknown
  misc_feature (1)..( 7): Result.003 file - promoters60/3435341
agtaata

SEQ ID NO: 129394 - DNA, 7 bp, Unknown
  misc_feature (1)..( 7): Result.003 file - promoters60/3435341
aatgtgt

SEQ ID NO: 129395 - DNA, 7 bp, Unknown
  misc_feature (1)..( 7): Result.003 file - promoters60/3435341
aatttgt

SEQ ID NO: 129396 - DNA, 6 bp, Unknown
  misc_feature (1)..( 6): Result.003 file - promoters60/3435341
ggtttg

SEQ ID NO: 129397 - DNA, 6 bp, Unknown
  misc_feature (1)..( 6): Result.003 file - promoters60/3435341
ggtttg

SEQ ID NO: 129398 - DNA, 6 bp, Unknown
  misc_feature (1)..( 6): Result.003 file - promoters60/3435341
ttcaat

SEQ ID NO: 129399 - DNA, 6 bp, Unknown
  misc_feature (1)..( 6): Result.003 file - promoters60/3435341
ttcaat

SEQ ID NO: 129400 - DNA, 6 bp, Unknown
  misc_feature (1)..( 6): Result.003 file - promoters60/3435341
aagtta

SEQ ID NO: 129401 - DNA, 6 bp, Unknown
  misc_feature (1)..( 6): Result.003 file - promoters60/3435341
aagtta

SEQ ID NO: 129402 - DNA, 7 bp, Unknown
  misc_feature (1)..( 7): Result.003 file - promoters60/3435341
gagcaat

SEQ ID NO: 129403 - DNA, 7 bp, Unknown
  misc_feature (1)..( 7): Result.003 file - promoters60/3435341
gaggaat

SEQ ID NO: 129404 - DNA, 8 bp, Unknown
  misc_feature (1)..( 8): Result.003 file - promoters60/3435341
ttggaatt

SEQ ID NO: 129405 - DNA, 8 bp, Unknown
  misc_feature (1)..( 8): Result.003 file - promoters60/3435341
ttgcaatt

SEQ ID NO: 129406 - DNA, 6 bp, Unknown
  misc_feature (1)..( 6): Result.003 file - promoters60/3435341
tttctt

SEQ ID NO: 129407 - DNA, 6 bp, Unknown
  misc_feature (1)..( 6): Result.003 file - promoters60/3435341
tttctt

SEQ ID NO: 129408 - DNA, 10 bp, Unknown
  misc_feature (1)..( 10): Result.003 file - promoters60/3435341
ttacttatag

SEQ ID NO: 129409 - DNA, 10 bp, Unknown
  misc_feature (1)..( 10): Result.003 file - promoters60/3435341
ttactgatag

SEQ ID NO: 129410 - DNA, 7 bp, Unknown
  misc_feature (1)..( 7): Result.003 file - promoters60/3435341
tttcatc

SEQ ID NO: 129411 - DNA, 7 bp, Unknown
  misc_feature (1)..( 7): Result.003 file - promoters60/3435341
tttaatc

SEQ ID NO: 129412 - DNA, 6 bp, Unknown
  misc_feature (1)..( 6): Result.003 file - promoters60/3435341
gggacc

SEQ ID NO: 129413 - DNA, 6 bp, Unknown
  misc_feature (1)..( 6): Result.003 file - promoters60/3435341
gggacc

SEQ ID NO: 129414 - DNA, 8 bp, Unknown
  misc_feature (1)..( 8): Result.003 file - promoters60/3435341
cctaactt

SEQ ID NO: 129415 - DNA, 8 bp, Unknown
  misc_feature (1)..( 8): Result.003 file - promoters60/3435341
cctagctt

SEQ ID NO: 129416 - DNA, 8 bp, Unknown
  misc_feature (1)..( 8): Result.003 file - promoters60/3435341
ctttattg

SEQ ID NO: 129417 - DNA, 8 bp, Unknown
  misc_feature (1)..( 8): Result.003 file - promoters60/3435341
cttgattg

SEQ ID NO: 129418 - DNA, 6 bp, Unknown
  misc_feature (1)..( 6): Result.003 file - promoters60/3435341
tctttg

SEQ ID NO: 129419 - DNA, 6 bp, Unknown
  misc_feature (1)..( 6): Result.003 file - promoters60/3435341
tctttg

SEQ ID NO: 129420 - DNA, 6 bp, Unknown
  misc_feature (1)..( 6): Result.003 file - promoters60/3435341
gaggaa

SEQ ID NO: 129421 - DNA, 6 bp, Unknown
  misc_feature (1)..( 6): Result.003 file - promoters60/3435341
gaggaa

SEQ ID NO: 129422 - DNA, 6 bp, Unknown
  misc_feature (1)..( 6): Result.003 file - promoters60/3435341
tttttg

SEQ ID NO: 129423 - DNA, 6 bp, Unknown
  misc_feature (1)..( 6): Result.003 file - promoters60/3435341
tttttg

SEQ ID NO: 129424 - DNA, 10 bp, Unknown
  misc_feature (1)..( 10): Result.003 file - promoters60/3435411
ctcatcttct

SEQ ID NO: 129425 - DNA, 10 bp, Unknown
  misc_feature (1)..( 10): Result.003 file - promoters60/3435411
ctcttcttct

SEQ ID NO: 129426 - DNA, 10 bp, Unknown
  misc_feature (1)..( 10): Result.003 file - promoters60/3435411
agcttcgtcc

SEQ ID NO: 129427 - DNA, 9 bp, Unknown
  misc_feature (1)..( 9): Result.003 file - promoters60/3435411
gctaatatc

SEQ ID NO: 129428 - DNA, 9 bp, Unknown
  misc_feature (1)..( 9): Result.003 file - promoters60/3435411
tctaaaatc

SEQ ID NO: 129429 - DNA, 9 bp, Unknown
  misc_feature (1)..( 9): Result.003 file - promoters60/3435411
tctaaattg

SEQ ID NO: 129430 - DNA, 8 bp, Unknown
  misc_feature (1)..( 8): Result.003 file - promoters60/3435411
gaaggaaa

SEQ ID NO: 129431 - DNA, 8 bp, Unknown
  misc_feature (1)..( 8): Result.003 file - promoters60/3435411
gaagaaaa

SEQ ID NO: 129432 - DNA, 7 bp, Unknown
  misc_feature (1)..( 7): Result.003 file - promoters60/3435411
aaatatt

SEQ ID NO: 129433 - DNA, 7 bp, Unknown
  misc_feature (1)..( 7): Result.003 file - promoters60/3435411
aaaaatt

SEQ ID NO: 129434 - DNA, 10 bp, Unknown
  misc_feature (1)..( 10): Result.003 file - promoters60/3435411
agatagaaca

SEQ ID NO: 129435 - DNA, 10 bp, Unknown
  misc_feature (1)..( 10): Result.003 file - promoters60/3435411
agagagaaca

SEQ ID NO: 129436 - DNA, 7 bp, Unknown
  misc_feature (1)..( 7): Result.003 file - promoters60/3435411
aacaaag

SEQ ID NO: 129437 - DNA, 7 bp, Unknown
  misc_feature (1)..( 7): Result.003 file - promoters60/3435411
cacaaag

SEQ ID NO: 129438 - DNA, 7 bp, Unknown
  misc_feature (1)..( 7): Result.003 file - promoters60/3435411
aacaaaa

SEQ ID NO: 129439 - DNA, 6 bp, Unknown
  misc_feature (1)..( 6): Result.003 file - promoters60/3435411
gttttc

SEQ ID NO: 129440 - DNA, 6 bp, Unknown
  misc_feature (1)..( 6): Result.003 file - promoters60/3435411
gttttc

SEQ ID NO: 129441 - DNA, 6 bp, Unknown
  misc_feature (1)..( 6): Result.003 file - promoters60/3435411
agcttc

SEQ ID NO: 129442 - DNA, 6 bp, Unknown
  misc_feature (1)..( 6): Result.003 file - promoters60/3435411
agcttc

SEQ ID NO: 129443 - DNA, 9 bp, Unknown
  misc_feature (1)..( 9): Result.003 file - promoters60/3435411
atcttgact

SEQ ID NO: 129444 - DNA, 9 bp, Unknown
  misc_feature (1)..( 9): Result.003 file - promoters60/3435411
atcttaact

SEQ ID NO: 129445 - DNA, 6 bp, Unknown
  misc_feature (1)..( 6): Result.003 file - promoters60/3435411
ataatt

SEQ ID NO: 129446 - DNA, 6 bp, Unknown
  misc_feature (1)..( 6): Result.003 file - promoters60/3435411
ataatt

SEQ ID NO: 129447 - DNA, 6 bp, Unknown
  misc_feature (1)..( 6): Result.003 file - promoters60/3435411
tttagg

SEQ ID NO: 129448 - DNA, 6 bp, Unknown
  misc_feature (1)..( 6): Result.003 file - promoters60/3435411
tttagg

SEQ ID NO: 129449 - DNA, 9 bp, Unknown
  misc_feature (1)..( 9): Result.003 file - promoters60/3435411
gagcctgat

SEQ ID NO: 129450 - DNA, 9 bp, Unknown
  misc_feature (1)..( 9): Result.003 file - promoters60/3435411
gagtctgat

SEQ ID NO: 129451 - DNA, 6 bp, Unknown
  misc_feature (1)..( 6): Result.003 file - promoters60/3435411
aattgc

SEQ ID NO: 129452 - DNA, 6 bp, Unknown
  misc_feature (1)..( 6): Result.003 file - promoters60/3435411
aattgc

SEQ ID NO: 129453 - DNA, 6 bp, Unknown
  misc_feature (1)..( 6): Result.003 file - promoters60/3435411
tccaaa

SEQ ID NO: 129454 - DNA, 6 bp, Unknown
  misc_feature (1)..( 6): Result.003 file - promoters60/3435411
tccaaa

SEQ ID NO: 129455 - DNA, 6 bp, Unknown
  misc_feature (1)..( 6): Result.003 file - promoters60/3435411
aaacga

SEQ ID NO: 129456 - DNA, 6 bp, Unknown
  misc_feature (1)..( 6): Result.003 file - promoters60/3435411
aaacga

SEQ ID NO: 129457 - DNA, 6 bp, Unknown
  misc_feature (1)..( 6): Result.003 file - promoters60/3435411
ttgact

SEQ ID NO: 129458 - DNA, 6 bp, Unknown
  misc_feature (1)..( 6): Result.003 file - promoters60/3435411
ttgact

SEQ ID NO: 129459 - DNA, 8 bp, Unknown
  misc_feature (1)..( 8): Result.003 file - promoters60/3435411
ccaagacg

SEQ ID NO: 129460 - DNA, 8 bp, Unknown
  misc_feature (1)..( 8): Result.003 file - promoters60/3435411
ccaagacg

SEQ ID NO: 129461 - DNA, 7 bp, Unknown
  misc_feature (1)..( 7): Result.003 file - promoters60/3435411
aggccca

SEQ ID NO: 129462 - DNA, 7 bp, Unknown
  misc_feature (1)..( 7): Result.003 file - promoters60/3435411
aggccca

SEQ ID NO: 129463 - DNA, 8 bp, Unknown
  misc_feature (1)..( 8): Result.003 file - promoters60/3435452
attttctt

SEQ ID NO: 129464 - DNA, 8 bp, Unknown
  misc_feature (1)..( 8): Result.003 file - promoters60/3435452
ggtttctt

SEQ ID NO: 129465 - DNA, 8 bp, Unknown
  misc_feature (1)..( 8): Result.003 file - promoters60/3435452
tttttctt

SEQ ID NO: 129466 - DNA, 8 bp, Unknown
  misc_feature (1)..( 8): Result.003 file - promoters60/3435452
attgtctc

SEQ ID NO: 129467 - DNA, 8 bp, Unknown
  misc_feature (1)..( 8): Result.003 file - promoters60/3435452
ggtttcta

SEQ ID NO: 129468 - DNA, 8 bp, Unknown
  misc_feature (1)..( 8): Result.003 file - promoters60/3435452
actttctt

SEQ ID NO: 129469 - DNA, 11 bp, Unknown
  misc_feature (1)..( 11): Result.003 file - promoters60/3435469
ttttttaaaaa

SEQ ID NO: 129470 - DNA, 11 bp, Unknown
  misc_feature (1)..( 11): Result.003 file - promoters60/3435469
attttgaaaaa

SEQ ID NO: 129471 - DNA, 12 bp, Unknown
  misc_feature (1)..( 12): Result.003 file - promoters60/3435469
attgtttaagat

SEQ ID NO: 129472 - DNA, 12 bp, Unknown
  misc_feature (1)..( 12): Result.003 file - promoters60/3435469
gttttcgaatct

SEQ ID NO: 129473 - DNA, 12 bp, Unknown
  misc_feature (1)..( 12): Result.003 file - promoters60/3435469
tttgtttctctt

SEQ ID NO: 129474 - DNA, 12 bp, Unknown
  misc_feature (1)..( 12): Result.003 file - promoters60/3435469
aatgtttctcca

SEQ ID NO: 129475 - DNA, 14 bp, Unknown
  misc_feature (1)..( 14): Result.003 file - promoters60/3435469
ctcatataaataca

SEQ ID NO: 129476 - DNA, 14 bp, Unknown
  misc_feature (1)..( 14): Result.003 file - promoters60/3435469
acaatataaacata

SEQ ID NO: 129477 - DNA, 14 bp, Unknown
  misc_feature (1)..( 14): Result.003 file - promoters60/3435469
ctcatatatatcac

SEQ ID NO: 129478 - DNA, 14 bp, Unknown
  misc_feature (1)..( 14): Result.003 file - promoters60/3435469
ctcatatatataca

SEQ ID NO: 129479 - DNA, 14 bp, Unknown
  misc_feature (1)..( 14): Result.003 file - promoters60/3435469
cgtatatataaaga

SEQ ID NO: 129480 - DNA, 11 bp, Unknown
  misc_feature (1)..( 11): Result.003 file - promoters60/3435469
ctagattttta

SEQ ID NO: 129481 - DNA, 11 bp, Unknown
  misc_feature (1)..( 11): Result.003 file - promoters60/3435469
aacaatttttc

SEQ ID NO: 129482 - DNA, 11 bp, Unknown
  misc_feature (1)..( 11): Result.003 file - promoters60/3435469
acgttttttta

SEQ ID NO: 129483 - DNA, 11 bp, Unknown
  misc_feature (1)..( 11): Result.003 file - promoters60/3435469
tgagatgtttg

SEQ ID NO: 129484 - DNA, 11 bp, Unknown
  misc_feature (1)..( 11): Result.003 file - promoters60/3435469
ctagagtttcc

SEQ ID NO: 129485 - DNA, 11 bp, Unknown
  misc_feature (1)..( 11): Result.003 file - promoters60/3435469
tcgtagtgttc

SEQ ID NO: 129486 - DNA, 14 bp, Unknown
  misc_feature (1)..( 14): Result.003 file - promoters60/3435469
aaagttttgagcta

SEQ ID NO: 129487 - DNA, 14 bp, Unknown
  misc_feature (1)..( 14): Result.003 file - promoters60/3435469
aaattttttttcta

SEQ ID NO: 129488 - DNA, 14 bp, Unknown
  misc_feature (1)..( 14): Result.003 file - promoters60/3435469
aaactttttttaca

SEQ ID NO: 129489 - DNA, 14 bp, Unknown
  misc_feature (1)..( 14): Result.003 file - promoters60/3435469
ctagtttttcttat

SEQ ID NO: 129490 - DNA, 14 bp, Unknown
  misc_feature (1)..( 14): Result.003 file - promoters60/3435469
tgacttttctttct

SEQ ID NO: 129491 - DNA, 14 bp, Unknown
  misc_feature (1)..( 14): Result.003 file - promoters60/3435469
caatttttagtcat

SEQ ID NO: 129492 - DNA, 8 bp, Unknown
  misc_feature (1)..( 8): Result.003 file - promoters60/3435469
cttttttt

SEQ ID NO: 129493 - DNA, 8 bp, Unknown
  misc_feature (1)..( 8): Result.003 file - promoters60/3435469
tttttttt

SEQ ID NO: 129494 - DNA, 8 bp, Unknown
  misc_feature (1)..( 8): Result.003 file - promoters60/3435469
cttttttt

SEQ ID NO: 129495 - DNA, 8 bp, Unknown
  misc_feature (1)..( 8): Result.003 file - promoters60/3435469
gtttttct

SEQ ID NO: 129496 - DNA, 8 bp, Unknown
  misc_feature (1)..( 8): Result.003 file - promoters60/3435469
atttttag

SEQ ID NO: 129497 - DNA, 13 bp, Unknown
  misc_feature (1)..( 13): Result.003 file - promoters60/3435534
caaaaaaatgggt

SEQ ID NO: 129498 - DNA, 13 bp, Unknown
  misc_feature (1)..( 13): Result.003 file - promoters60/3435534
tagaaaaatgtaa

SEQ ID NO: 129499 - DNA, 13 bp, Unknown
  misc_feature (1)..( 13): Result.003 file - promoters60/3435534
acaaaaaataaat

SEQ ID NO: 129500 - DNA, 13 bp, Unknown
  misc_feature (1)..( 13): Result.003 file - promoters60/3435534
ggcccaaatgttt

SEQ ID NO: 129501 - DNA, 13 bp, Unknown
  misc_feature (1)..( 13): Result.003 file - promoters60/3435534
acacgaaatattt

SEQ ID NO: 129502 - DNA, 13 bp, Unknown
  misc_feature (1)..( 13): Result.003 file - promoters60/3435534
cgaagaaattttt

SEQ ID NO: 129503 - DNA, 13 bp, Unknown
  misc_feature (1)..( 13): Result.003 file - promoters60/3435534
acacaaaaggaga

SEQ ID NO: 129504 - DNA, 11 bp, Unknown
  misc_feature (1)..( 11): Result.003 file - promoters60/3435534
tcccaaaaaaa

SEQ ID NO: 129505 - DNA, 11 bp, Unknown
  misc_feature (1)..( 11): Result.003 file - promoters60/3435534
agacaaaaaat

SEQ ID NO: 129506 - DNA, 11 bp, Unknown
  misc_feature (1)..( 11): Result.003 file - promoters60/3435534
gtttaaataat

SEQ ID NO: 129507 - DNA, 11 bp, Unknown
  misc_feature (1)..( 11): Result.003 file - promoters60/3435534
ccacacaaaag

SEQ ID NO: 129508 - DNA, 11 bp, Unknown
  misc_feature (1)..( 11): Result.003 file - promoters60/3435534
agacacgaaat

SEQ ID NO: 129509 - DNA, 11 bp, Unknown
  misc_feature (1)..( 11): Result.003 file - promoters60/3435534
agagacgaaga

SEQ ID NO: 129510 - DNA, 12 bp, Unknown
  misc_feature (1)..( 12): Result.003 file - promoters60/3435534
aaaatgtaaata

SEQ ID NO: 129511 - DNA, 12 bp, Unknown
  misc_feature (1)..( 12): Result.003 file - promoters60/3435534
aatgtttaaata

SEQ ID NO: 129512 - DNA, 12 bp, Unknown
  misc_feature (1)..( 12): Result.003 file - promoters60/3435534
agacaaaaaata

SEQ ID NO: 129513 - DNA, 12 bp, Unknown
  misc_feature (1)..( 12): Result.003 file - promoters60/3435534
ccacacaaaagg

SEQ ID NO: 129514 - DNA, 12 bp, Unknown
  misc_feature (1)..( 12): Result.003 file - promoters60/3435534
agacacgaaata

SEQ ID NO: 129515 - DNA, 12 bp, Unknown
  misc_feature (1)..( 12): Result.003 file - promoters60/3435534
agagacgaagaa

SEQ ID NO: 129516 - DNA, 6 bp, Unknown
  misc_feature (1)..( 6): Result.003 file - promoters60/3435578
tatcaa

SEQ ID NO: 129517 - DNA, 6 bp, Unknown
  misc_feature (1)..( 6): Result.003 file - promoters60/3435578
tatcaa

SEQ ID NO: 129518 - DNA, 6 bp, Unknown
  misc_feature (1)..( 6): Result.003 file - promoters60/3435578
tatcaa

SEQ ID NO: 129519 - DNA, 12 bp, Unknown
  misc_feature (1)..( 12): Result.003 file - promoters60/3435578
ttgacattatat

SEQ ID NO: 129520 - DNA, 12 bp, Unknown
  misc_feature (1)..( 12): Result.003 file - promoters60/3435578
ttgaaattacca

SEQ ID NO: 129521 - DNA, 12 bp, Unknown
  misc_feature (1)..( 12): Result.003 file - promoters60/3435578
tgcacattcgac

SEQ ID NO: 129522 - DNA, 7 bp, Unknown
  misc_feature (1)..( 7): Result.003 file - promoters60/3435578
tgtgttt

SEQ ID NO: 129523 - DNA, 7 bp, Unknown
  misc_feature (1)..( 7): Result.003 file - promoters60/3435578
tgtgttt

SEQ ID NO: 129524 - DNA, 8 bp, Unknown
  misc_feature (1)..( 8): Result.003 file - promoters60/3435578
ttaggaag

SEQ ID NO: 129525 - DNA, 8 bp, Unknown
  misc_feature (1)..( 8): Result.003 file - promoters60/3435578
ttagcaag

SEQ ID NO: 129526 - DNA, 7 bp, Unknown
  misc_feature (1)..( 7): Result.003 file - promoters60/3435578
aggtgaa

SEQ ID NO: 129527 - DNA, 7 bp, Unknown
  misc_feature (1)..( 7): Result.003 file - promoters60/3435578
aggagaa

SEQ ID NO: 129528 - DNA, 7 bp, Unknown
  misc_feature (1)..( 7): Result.003 file - promoters60/3435578
attaggt

SEQ ID NO: 129529 - DNA, 7 bp, Unknown
  misc_feature (1)..( 7): Result.003 file - promoters60/3435578
attcggt

SEQ ID NO: 129530 - DNA, 8 bp, Unknown
  misc_feature (1)..( 8): Result.003 file - promoters60/3435578
ttcacaca

SEQ ID NO: 129531 - DNA, 8 bp, Unknown
  misc_feature (1)..( 8): Result.003 file - promoters60/3435578
ttcacaaa

SEQ ID NO: 129532 - DNA, 8 bp, Unknown
  misc_feature (1)..( 8): Result.003 file - promoters60/3435578
ttcaaaaa

SEQ ID NO: 129533 - DNA, 10 bp, Unknown
  misc_feature (1)..( 10): Result.003 file - promoters60/3435578
cacacacact

SEQ ID NO: 129534 - DNA, 10 bp, Unknown
  misc_feature (1)..( 10): Result.003 file - promoters60/3435578
ttcacaaact

SEQ ID NO: 129535 - DNA, 10 bp, Unknown
  misc_feature (1)..( 10): Result.003 file - promoters60/3435578
ttcaaaaaat

SEQ ID NO: 129536 - DNA, 7 bp, Unknown
  misc_feature (1)..( 7): Result.003 file - promoters60/3435578
tcttctt

SEQ ID NO: 129537 - DNA, 7 bp, Unknown
  misc_feature (1)..( 7): Result.003 file - promoters60/3435578
tcttctt

SEQ ID NO: 129538 - DNA, 6 bp, Unknown
  misc_feature (1)..( 6): Result.003 file - promoters60/3435578
taacca

SEQ ID NO: 129539 - DNA, 6 bp, Unknown
  misc_feature (1)..( 6): Result.003 file - promoters60/3435578
taacca

SEQ ID NO: 129540 - DNA, 6 bp, Unknown
  misc_feature (1)..( 6): Result.003 file - promoters60/3435578
aacttt

SEQ ID NO: 129541 - DNA, 6 bp, Unknown
  misc_feature (1)..( 6): Result.003 file - promoters60/3435578
aacttt

SEQ ID NO: 129542 - DNA, 7 bp, Unknown
  misc_feature (1)..( 7): Result.003 file - promoters60/3435578
tatacaa

SEQ ID NO: 129543 - DNA, 7 bp, Unknown
  misc_feature (1)..( 7): Result.003 file - promoters60/3435578
tatacaa

SEQ ID NO: 129544 - DNA, 8 bp, Unknown
  misc_feature (1)..( 8): Result.003 file - promoters60/3435578
aacaaaca

SEQ ID NO: 129545 - DNA, 8 bp, Unknown
  misc_feature (1)..( 8): Result.003 file - promoters60/3435578
aactaaca

SEQ ID NO: 129546 - DNA, 6 bp, Unknown
  misc_feature (1)..( 6): Result.003 file - promoters60/3435578
atttca

SEQ ID NO: 129547 - DNA, 6 bp, Unknown
  misc_feature (1)..( 6): Result.003 file - promoters60/3435578
atttca

SEQ ID NO: 129548 - DNA, 8 bp, Unknown
  misc_feature (1)..( 8): Result.003 file - promoters60/3435578
cagctatt

SEQ ID NO: 129549 - DNA, 8 bp, Unknown
  misc_feature (1)..( 8): Result.003 file - promoters60/3435578
cagttatt

SEQ ID NO: 129550 - DNA, 7 bp, Unknown
  misc_feature (1)..( 7): Result.003 file - promoters60/3435578
attgttg

SEQ ID NO: 129551 - DNA, 7 bp, Unknown
  misc_feature (1)..( 7): Result.003 file - promoters60/3435578
atttttg

SEQ ID NO: 129552 - DNA, 8 bp, Unknown
  misc_feature (1)..( 8): Result.003 file - promoters60/3435578
catataaa

SEQ ID NO: 129553 - DNA, 8 bp, Unknown
  misc_feature (1)..( 8): Result.003 file - promoters60/3435578
cataaaaa

SEQ ID NO: 129554 - DNA, 7 bp, Unknown
  misc_feature (1)..( 7): Result.003 file - promoters60/3435578
acagatt

SEQ ID NO: 129555 - DNA, 7 bp, Unknown
  misc_feature (1)..( 7): Result.003 file - promoters60/3435578
acatatt

SEQ ID NO: 129556 - DNA, 7 bp, Unknown
  misc_feature (1)..( 7): Result.003 file - promoters60/3435578
tttagtt

SEQ ID NO: 129557 - DNA, 7 bp, Unknown
  misc_feature (1)..( 7): Result.003 file - promoters60/3435578
ttttgtt

SEQ ID NO: 129558 - DNA, 12 bp, Unknown
  misc_feature (1)..( 12): Result.003 file - promoters60/3435605
agtaatttaatg

SEQ ID NO: 129559 - DNA, 12 bp, Unknown
  misc_feature (1)..( 12): Result.003 file - promoters60/3435605
tctaattttcta

SEQ ID NO: 129560 - DNA, 12 bp, Unknown
  misc_feature (1)..( 12): Result.003 file - promoters60/3435605
agtagtttccac

SEQ ID NO: 129561 - DNA, 12 bp, Unknown
  misc_feature (1)..( 12): Result.003 file - promoters60/3435605
tcaaattaaatc

SEQ ID NO: 129562 - DNA, 12 bp, Unknown
  misc_feature (1)..( 12): Result.003 file - promoters60/3435605
taaaatttttgt

SEQ ID NO: 129563 - DNA, 12 bp, Unknown
  misc_feature (1)..( 12): Result.003 file - promoters60/3435605
gttaattgtctc

SEQ ID NO: 129564 - DNA, 12 bp, Unknown
  misc_feature (1)..( 12): Result.003 file - promoters60/3435605
tagatttaaatc

SEQ ID NO: 129565 - DNA, 12 bp, Unknown
  misc_feature (1)..( 12): Result.003 file - promoters60/3435605
aaattttaatct

SEQ ID NO: 129566 - DNA, 12 bp, Unknown
  misc_feature (1)..( 12): Result.003 file - promoters60/3435605
acattataaaat

SEQ ID NO: 129567 - DNA, 12 bp, Unknown
  misc_feature (1)..( 12): Result.003 file - promoters60/3435605
catttttattct

SEQ ID NO: 129568 - DNA, 12 bp, Unknown
  misc_feature (1)..( 12): Result.003 file - promoters60/3435605
gaattctaaaat

SEQ ID NO: 129569 - DNA, 13 bp, Unknown
  misc_feature (1)..( 13): Result.003 file - promoters60/3435605
aaggtatcaaaca

SEQ ID NO: 129570 - DNA, 13 bp, Unknown
  misc_feature (1)..( 13): Result.003 file - promoters60/3435605
acattaaaaaaat

SEQ ID NO: 129571 - DNA, 13 bp, Unknown
  misc_feature (1)..( 13): Result.003 file - promoters60/3435605
gtattctaaaaag

SEQ ID NO: 129572 - DNA, 13 bp, Unknown
  misc_feature (1)..( 13): Result.003 file - promoters60/3435605
aactttttacggc

SEQ ID NO: 129573 - DNA, 10 bp, Unknown
  misc_feature (1)..( 10): Result.003 file - promoters60/3435605
tttaattttg

SEQ ID NO: 129574 - DNA, 10 bp, Unknown
  misc_feature (1)..( 10): Result.003 file - promoters60/3435605
tttaatgaaa

SEQ ID NO: 129575 - DNA, 10 bp, Unknown
  misc_feature (1)..( 10): Result.003 file - promoters60/3435605
ttttattcta

SEQ ID NO: 129576 - DNA, 10 bp, Unknown
  misc_feature (1)..( 10): Result.003 file - promoters60/3435605
gttaatgtct

SEQ ID NO: 129577 - DNA, 10 bp, Unknown
  misc_feature (1)..( 10): Result.003 file - promoters60/3435605
attaatctca

SEQ ID NO: 129578 - DNA, 10 bp, Unknown
  misc_feature (1)..( 10): Result.003 file - promoters60/3435605
taaaatatca

SEQ ID NO: 129579 - DNA, 12 bp, Unknown
  misc_feature (1)..( 12): Result.003 file - promoters60/3435605
gacaaattacct

SEQ ID NO: 129580 - DNA, 12 bp, Unknown
  misc_feature (1)..( 12): Result.003 file - promoters60/3435605
cacaaattgttt

SEQ ID NO: 129581 - DNA, 12 bp, Unknown
  misc_feature (1)..( 12): Result.003 file - promoters60/3435605
tacaaatatgaa

SEQ ID NO: 129582 - DNA, 12 bp, Unknown
  misc_feature (1)..( 12): Result.003 file - promoters60/3435605
cacaaatttgtt

SEQ ID NO: 129583 - DNA, 12 bp, Unknown
  misc_feature (1)..( 12): Result.003 file - promoters60/3435605
attaaatatgtt

SEQ ID NO: 129584 - DNA, 12 bp, Unknown
  misc_feature (1)..( 12): Result.003 file - promoters60/3435605
ctaaaatatcaa

SEQ ID NO: 129585 - DNA, 8 bp, Unknown
  misc_feature (1)..( 8): Result.003 file - promoters60/3435605
tttcaatt

SEQ ID NO: 129586 - DNA, 8 bp, Unknown
  misc_feature (1)..( 8): Result.003 file - promoters60/3435605
gttccatt

SEQ ID NO: 129587 - DNA, 8 bp, Unknown
  misc_feature (1)..( 8): Result.003 file - promoters60/3435605
tttaaatc

SEQ ID NO: 129588 - DNA, 8 bp, Unknown
  misc_feature (1)..( 8): Result.003 file - promoters60/3435605
attaaatc

SEQ ID NO: 129589 - DNA, 8 bp, Unknown
  misc_feature (1)..( 8): Result.003 file - promoters60/3435605
attcaaac

SEQ ID NO: 129590 - DNA, 8 bp, Unknown
  misc_feature (1)..( 8): Result.003 file - promoters60/3435605
aataaatc

SEQ ID NO: 129591 - DNA, 12 bp, Unknown
  misc_feature (1)..( 12): Result.003 file - promoters60/3435605
tttaaattttaa

SEQ ID NO: 129592 - DNA, 12 bp, Unknown
  misc_feature (1)..( 12): Result.003 file - promoters60/3435605
cacaaatttgtt

SEQ ID NO: 129593 - DNA, 12 bp, Unknown
  misc_feature (1)..( 12): Result.003 file - promoters60/3435605
tatgaattctaa

SEQ ID NO: 129594 - DNA, 12 bp, Unknown
  misc_feature (1)..( 12): Result.003 file - promoters60/3435605
cacaaattgttt

SEQ ID NO: 129595 - DNA, 12 bp, Unknown
  misc_feature (1)..( 12): Result.003 file - promoters60/3435605
aaaaaatgtagt

SEQ ID NO: 129596 - DNA, 12 bp, Unknown
  misc_feature (1)..( 12): Result.003 file - promoters60/3435605
attaaatatgtt

SEQ ID NO: 129597 - DNA, 12 bp, Unknown
  misc_feature (1)..( 12): Result.003 file - promoters60/3435605
aaatgaaaaatg

SEQ ID NO: 129598 - DNA, 12 bp, Unknown
  misc_feature (1)..( 12): Result.003 file - promoters60/3435605
aaaagaaattat

SEQ ID NO: 129599 - DNA, 12 bp, Unknown
  misc_feature (1)..( 12): Result.003 file - promoters60/3435605
aaatcaaattta

SEQ ID NO: 129600 - DNA, 12 bp, Unknown
  misc_feature (1)..( 12): Result.003 file - promoters60/3435605
tctagaaattct

SEQ ID NO: 129601 - DNA, 12 bp, Unknown
  misc_feature (1)..( 12): Result.003 file - promoters60/3435605
ctatcaaaatta

SEQ ID NO: 129602 - DNA, 12 bp, Unknown
  misc_feature (1)..( 12): Result.003 file - promoters60/3435605
atcttaaattta

SEQ ID NO: 129603 - DNA, 9 bp, Unknown
  misc_feature (1)..( 9): Result.003 file - promoters60/3435620
tcataaagc

SEQ ID NO: 129604 - DNA, 9 bp, Unknown
  misc_feature (1)..( 9): Result.003 file - promoters60/3435620
tcataacta

SEQ ID NO: 129605 - DNA, 9 bp, Unknown
  misc_feature (1)..( 9): Result.003 file - promoters60/3435620
tcatagagc

SEQ ID NO: 129606 - DNA, 10 bp, Unknown
  misc_feature (1)..( 10): Result.003 file - promoters60/3435620
ttagttataa

SEQ ID NO: 129607 - DNA, 10 bp, Unknown
  misc_feature (1)..( 10): Result.003 file - promoters60/3435620
ttagttctaa

SEQ ID NO: 129608 - DNA, 10 bp, Unknown
  misc_feature (1)..( 10): Result.003 file - promoters60/3435620
ttagttccca

SEQ ID NO: 129609 - DNA, 7 bp, Unknown
  misc_feature (1)..( 7): Result.003 file - promoters60/3435620
gaaaaaa

SEQ ID NO: 129610 - DNA, 7 bp, Unknown
  misc_feature (1)..( 7): Result.003 file - promoters60/3435620
caaaaaa

SEQ ID NO: 129611 - DNA, 7 bp, Unknown
  misc_feature (1)..( 7): Result.003 file - promoters60/3435620
gaacaaa

SEQ ID NO: 129612 - DNA, 7 bp, Unknown
  misc_feature (1)..( 7): Result.003 file - promoters60/3435620
aaaaaac

SEQ ID NO: 129613 - DNA, 7 bp, Unknown
  misc_feature (1)..( 7): Result.003 file - promoters60/3435620
caaaaac

SEQ ID NO: 129614 - DNA, 7 bp, Unknown
  misc_feature (1)..( 7): Result.003 file - promoters60/3435620
caaaaaa

SEQ ID NO: 129615 - DNA, 10 bp, Unknown
  misc_feature (1)..( 10): Result.003 file - promoters60/3435620
tcatttttat

SEQ ID NO: 129616 - DNA, 10 bp, Unknown
  misc_feature (1)..( 10): Result.003 file - promoters60/3435620
tcatttgtat

SEQ ID NO: 129617 - DNA, 10 bp, Unknown
  misc_feature (1)..( 10): Result.003 file - promoters60/3435620
tcatgtgtta

SEQ ID NO: 129618 - DNA, 9 bp, Unknown
  misc_feature (1)..( 9): Result.003 file - promoters60/3435620
ataacatac

SEQ ID NO: 129619 - DNA, 9 bp, Unknown
  misc_feature (1)..( 9): Result.003 file - promoters60/3435620
ctaacgtac

SEQ ID NO: 129620 - DNA, 9 bp, Unknown
  misc_feature (1)..( 9): Result.003 file - promoters60/3435620
atatcattg

SEQ ID NO: 129621 - DNA, 14 bp, Unknown
  misc_feature (1)..( 14): Result.003 file - promoters60/3435632
ggaacaaaatcttc

SEQ ID NO: 129622 - DNA, 14 bp, Unknown
  misc_feature (1)..( 14): Result.003 file - promoters60/3435632
gaaacaaaatccaa

SEQ ID NO: 129623 - DNA, 14 bp, Unknown
  misc_feature (1)..( 14): Result.003 file - promoters60/3435632
agaaaaaaagaata

SEQ ID NO: 129624 - DNA, 14 bp, Unknown
  misc_feature (1)..( 14): Result.003 file - promoters60/3435632
tatacaaaagcttc

SEQ ID NO: 129625 - DNA, 14 bp, Unknown
  misc_feature (1)..( 14): Result.003 file - promoters60/3435632
gaaacaagttccga

SEQ ID NO: 129626 - DNA, 15 bp, Unknown
  misc_feature (1)..( 15): Result.003 file - promoters60/3435632
taaacataaaagcat

SEQ ID NO: 129627 - DNA, 15 bp, Unknown
  misc_feature (1)..( 15): Result.003 file - promoters60/3435632
acaatataaaggaac

SEQ ID NO: 129628 - DNA, 9 bp, Unknown
  misc_feature (1)..( 9): Result.003 file - promoters60/3435632
tgtgaatgt

SEQ ID NO: 129629 - DNA, 9 bp, Unknown
  misc_feature (1)..( 9): Result.003 file - promoters60/3435632
aatgaatgg

SEQ ID NO: 129630 - DNA, 9 bp, Unknown
  misc_feature (1)..( 9): Result.003 file - promoters60/3435632
tttgattgt

SEQ ID NO: 129631 - DNA, 9 bp, Unknown
  misc_feature (1)..( 9): Result.003 file - promoters60/3435632
ttttatttt

SEQ ID NO: 129632 - DNA, 9 bp, Unknown
  misc_feature (1)..( 9): Result.003 file - promoters60/3435632
atttatatt

SEQ ID NO: 129633 - DNA, 9 bp, Unknown
  misc_feature (1)..( 9): Result.003 file - promoters60/3435632
gatgagtgg

SEQ ID NO: 129634 - DNA, 9 bp, Unknown
  misc_feature (1)..( 9): Result.003 file - promoters60/3435646
tttagggaa

SEQ ID NO: 129635 - DNA, 7 bp, Unknown
  misc_feature (1)..( 7): Result.003 file - promoters60/3435646
aagggaa

SEQ ID NO: 129636 - DNA, 9 bp, Unknown
  misc_feature (1)..( 9): Result.003 file - promoters60/3435646
attatggat

SEQ ID NO: 129637 - DNA, 9 bp, Unknown
  misc_feature (1)..( 9): Result.003 file - promoters60/3435646
attgtggga

SEQ ID NO: 129638 - DNA, 7 bp, Unknown
  misc_feature (1)..( 7): Result.003 file - promoters60/3435683
cttatca

SEQ ID NO: 129639 - DNA, 7 bp, Unknown
  misc_feature (1)..( 7): Result.003 file - promoters60/3435683
cttttca

SEQ ID NO: 129640 - DNA, 7 bp, Unknown
  misc_feature (1)..( 7): Result.003 file - promoters60/3435683
caaatac

SEQ ID NO: 129641 - DNA, 7 bp, Unknown
  misc_feature (1)..( 7): Result.003 file - promoters60/3435683
caagtac

SEQ ID NO: 129642 - DNA, 8 bp, Unknown
  misc_feature (1)..( 8): Result.003 file - promoters60/3435683
ccaaaaac

SEQ ID NO: 129643 - DNA, 8 bp, Unknown
  misc_feature (1)..( 8): Result.003 file - promoters60/3435683
ccaagaac

SEQ ID NO: 129644 - DNA, 8 bp, Unknown
  misc_feature (1)..( 8): Result.003 file - promoters60/3435683
acaaagtg

SEQ ID NO: 129645 - DNA, 8 bp, Unknown
  misc_feature (1)..( 8): Result.003 file - promoters60/3435683
acaaggtg

SEQ ID NO: 129646 - DNA, 9 bp, Unknown
  misc_feature (1)..( 9): Result.003 file - promoters60/3435683
aatttgaaa

SEQ ID NO: 129647 - DNA, 9 bp, Unknown
  misc_feature (1)..( 9): Result.003 file - promoters60/3435683
aatttcaaa

SEQ ID NO: 129648 - DNA, 6 bp, Unknown
  misc_feature (1)..( 6): Result.003 file - promoters60/3435683
tgtaat

SEQ ID NO: 129649 - DNA, 6 bp, Unknown
  misc_feature (1)..( 6): Result.003 file - promoters60/3435683
tgtaat

SEQ ID NO: 129650 - DNA, 6 bp, Unknown
  misc_feature (1)..( 6): Result.003 file - promoters60/3435683
aattta

SEQ ID NO: 129651 - DNA, 6 bp, Unknown
  misc_feature (1)..( 6): Result.003 file - promoters60/3435683
aattta

SEQ ID NO: 129652 - DNA, 9 bp, Unknown
  misc_feature (1)..( 9): Result.003 file - promoters60/3435683
tgttaaaat

SEQ ID NO: 129653 - DNA, 9 bp, Unknown
  misc_feature (1)..( 9): Result.003 file - promoters60/3435683
tgttagaat

SEQ ID NO: 129654 - DNA, 7 bp, Unknown
  misc_feature (1)..( 7): Result.003 file - promoters60/3435683
tatatat

SEQ ID NO: 129655 - DNA, 7 bp, Unknown
  misc_feature (1)..( 7): Result.003 file - promoters60/3435683
tatctat

SEQ ID NO: 129656 - DNA, 6 bp, Unknown
  misc_feature (1)..( 6): Result.003 file - promoters60/3435683
ggctga

SEQ ID NO: 129657 - DNA, 6 bp, Unknown
  misc_feature (1)..( 6): Result.003 file - promoters60/3435683
ggctga

SEQ ID NO: 129658 - DNA, 11 bp, Unknown
  misc_feature (1)..( 11): Result.003 file - promoters60/3435683
aggttctcaga

SEQ ID NO: 129659 - DNA, 11 bp, Unknown
  misc_feature (1)..( 11): Result.003 file - promoters60/3435683
agggtctgaga

SEQ ID NO: 129660 - DNA, 6 bp, Unknown
  misc_feature (1)..( 6): Result.003 file - promoters60/3435683
agattt

SEQ ID NO: 129661 - DNA, 6 bp, Unknown
  misc_feature (1)..( 6): Result.003 file - promoters60/3435683
agattt

SEQ ID NO: 129662 - DNA, 12 bp, Unknown
  misc_feature (1)..( 12): Result.003 file - promoters60/3435761
caatgggctggg

SEQ ID NO: 129663 - DNA, 12 bp, Unknown
  misc_feature (1)..( 12): Result.003 file - promoters60/3435761
aaatgggcctaa

SEQ ID NO: 129664 - DNA, 12 bp, Unknown
  misc_feature (1)..( 12): Result.003 file - promoters60/3435761
aaataggcccaa

SEQ ID NO: 129665 - DNA, 12 bp, Unknown
  misc_feature (1)..( 12): Result.003 file - promoters60/3435761
tgttgggctttt

SEQ ID NO: 129666 - DNA, 12 bp, Unknown
  misc_feature (1)..( 12): Result.003 file - promoters60/3435761
aattgggctttt

SEQ ID NO: 129667 - DNA, 12 bp, Unknown
  misc_feature (1)..( 12): Result.003 file - promoters60/3435761
aaaaaggcccat

SEQ ID NO: 129668 - DNA, 6 bp, Unknown
  misc_feature (1)..( 6): Result.003 file - promoters60/3435765
ttaaac

SEQ ID NO: 129669 - DNA, 6 bp, Unknown
  misc_feature (1)..( 6): Result.003 file - promoters60/3435765
ttaaac

SEQ ID NO: 129670 - DNA, 7 bp, Unknown
  misc_feature (1)..( 7): Result.003 file - promoters60/3435765
tgttttt

SEQ ID NO: 129671 - DNA, 7 bp, Unknown
  misc_feature (1)..( 7): Result.003 file - promoters60/3435765
tgtttta

SEQ ID NO: 129672 - DNA, 7 bp, Unknown
  misc_feature (1)..( 7): Result.003 file - promoters60/3435765
agttttt

SEQ ID NO: 129673 - DNA, 9 bp, Unknown
  misc_feature (1)..( 9): Result.003 file - promoters60/3435765
gtttttaaa

SEQ ID NO: 129674 - DNA, 9 bp, Unknown
  misc_feature (1)..( 9): Result.003 file - promoters60/3435765
ttttataaa

SEQ ID NO: 129675 - DNA, 9 bp, Unknown
  misc_feature (1)..( 9): Result.003 file - promoters60/3435765
gtttttctt

SEQ ID NO: 129676 - DNA, 9 bp, Unknown
  misc_feature (1)..( 9): Result.003 file - promoters60/3435765
atacaataa

SEQ ID NO: 129677 - DNA, 9 bp, Unknown
  misc_feature (1)..( 9): Result.003 file - promoters60/3435765
ataaaataa

SEQ ID NO: 129678 - DNA, 7 bp, Unknown
  misc_feature (1)..( 7): Result.003 file - promoters60/3435765
ataagga

SEQ ID NO: 129679 - DNA, 7 bp, Unknown
  misc_feature (1)..( 7): Result.003 file - promoters60/3435765
ataggga

SEQ ID NO: 129680 - DNA, 7 bp, Unknown
  misc_feature (1)..( 7): Result.003 file - promoters60/3435765
atatatg

SEQ ID NO: 129681 - DNA, 7 bp, Unknown
  misc_feature (1)..( 7): Result.003 file - promoters60/3435765
ataaatg

SEQ ID NO: 129682 - DNA, 6 bp, Unknown
  misc_feature (1)..( 6): Result.003 file - promoters60/3435765
tatatg

SEQ ID NO: 129683 - DNA, 6 bp, Unknown
  misc_feature (1)..( 6): Result.003 file - promoters60/3435765
tatatg

SEQ ID NO: 129684 - DNA, 6 bp, Unknown
  misc_feature (1)..( 6): Result.003 file - promoters60/3435765
aaacat

SEQ ID NO: 129685 - DNA, 6 bp, Unknown
  misc_feature (1)..( 6): Result.003 file - promoters60/3435765
aaacat

SEQ ID NO: 129686 - DNA, 7 bp, Unknown
  misc_feature (1)..( 7): Result.003 file - promoters60/3435765
ttatgat

SEQ ID NO: 129687 - DNA, 7 bp, Unknown
  misc_feature (1)..( 7): Result.003 file - promoters60/3435765
ttatgat

SEQ ID NO: 129688 - DNA, 6 bp, Unknown
  misc_feature (1)..( 6): Result.003 file - promoters60/3435765
acatgt

SEQ ID NO: 129689 - DNA, 6 bp, Unknown
  misc_feature (1)..( 6): Result.003 file - promoters60/3435765
acatgt

SEQ ID NO: 129690 - DNA, 9 bp, Unknown
  misc_feature (1)..( 9): Result.003 file - promoters60/3435765
agacgatta

SEQ ID NO: 129691 - DNA, 9 bp, Unknown
  misc_feature (1)..( 9): Result.003 file - promoters60/3435765
agaagatta

SEQ ID NO: 129692 - DNA, 6 bp, Unknown
  misc_feature (1)..( 6): Result.003 file - promoters60/3435765
aatgct

SEQ ID NO: 129693 - DNA, 6 bp, Unknown
  misc_feature (1)..( 6): Result.003 file - promoters60/3435765
aatgct

SEQ ID NO: 129694 - DNA, 6 bp, Unknown
  misc_feature (1)..( 6): Result.003 file - promoters60/3435765
aatatg

SEQ ID NO: 129695 - DNA, 6 bp, Unknown
  misc_feature (1)..( 6): Result.003 file - promoters60/3435765
aatatg

SEQ ID NO: 129696 - DNA, 6 bp, Unknown
  misc_feature (1)..( 6): Result.003 file - promoters60/3435765
gagttc

SEQ ID NO: 129697 - DNA, 6 bp, Unknown
  misc_feature (1)..( 6): Result.003 file - promoters60/3435765
gagttc

SEQ ID NO: 129698 - DNA, 6 bp, Unknown
  misc_feature (1)..( 6): Result.003 file - promoters60/3435765
ccattt

SEQ ID NO: 129699 - DNA, 6 bp, Unknown
  misc_feature (1)..( 6): Result.003 file - promoters60/3435765
ccattt

SEQ ID NO: 129700 - DNA, 6 bp, Unknown
  misc_feature (1)..( 6): Result.003 file - promoters60/3435765
tgaaaa

SEQ ID NO: 129701 - DNA, 6 bp, Unknown
  misc_feature (1)..( 6): Result.003 file - promoters60/3435765
tgaaaa

SEQ ID NO: 129702 - DNA, 8 bp, Unknown
  misc_feature (1)..( 8): Result.003 file - promoters60/3435765
atgatcat

SEQ ID NO: 129703 - DNA, 8 bp, Unknown
  misc_feature (1)..( 8): Result.003 file - promoters60/3435765
atgaacat

SEQ ID NO: 129704 - DNA, 7 bp, Unknown
  misc_feature (1)..( 7): Result.003 file - promoters60/3435765
tattttg

SEQ ID NO: 129705 - DNA, 7 bp, Unknown
  misc_feature (1)..( 7): Result.003 file - promoters60/3435765
tatgttg

SEQ ID NO: 129706 - DNA, 7 bp, Unknown
  misc_feature (1)..( 7): Result.003 file - promoters60/3435765
attaaga

SEQ ID NO: 129707 - DNA, 7 bp, Unknown
  misc_feature (1)..( 7): Result.003 file - promoters60/3435765
attaaga

SEQ ID NO: 129708 - DNA, 7 bp, Unknown
  misc_feature (1)..( 7): Result.003 file - promoters60/3435765
tctcttt

SEQ ID NO: 129709 - DNA, 7 bp, Unknown
  misc_feature (1)..( 7): Result.003 file - promoters60/3435765
tctcttt

SEQ ID NO: 129710 - DNA, 7 bp, Unknown
  misc_feature (1)..( 7): Result.003 file - promoters60/3435765
aaagaaa

SEQ ID NO: 129711 - DNA, 7 bp, Unknown
  misc_feature (1)..( 7): Result.003 file - promoters60/3435765
aaacaaa

SEQ ID NO: 129712 - DNA, 6 bp, Unknown
  misc_feature (1)..( 6): Result.003 file - promoters60/3435765
tcttaa

SEQ ID NO: 129713 - DNA, 6 bp, Unknown
  misc_feature (1)..( 6): Result.003 file - promoters60/3435765
tcttaa

SEQ ID NO: 129714 - DNA, 14 bp, Unknown
  misc_feature (1)..( 14): Result.003 file - promoters60/3435819
atcggagatttgtt

SEQ ID NO: 129715 - DNA, 14 bp, Unknown
  misc_feature (1)..( 14): Result.003 file - promoters60/3435819
atcggaaattttca

SEQ ID NO: 129716 - DNA, 14 bp, Unknown
  misc_feature (1)..( 14): Result.003 file - promoters60/3435819
gatgtagattagtt

SEQ ID NO: 129717 - DNA, 9 bp, Unknown
  misc_feature (1)..( 9): Result.003 file - promoters60/3435819
cgaaagaca

SEQ ID NO: 129718 - DNA, 9 bp, Unknown
  misc_feature (1)..( 9): Result.003 file - promoters60/3435819
cgagagaat

SEQ ID NO: 129719 - DNA, 9 bp, Unknown
  misc_feature (1)..( 9): Result.003 file - promoters60/3435819
ataaaaaca

SEQ ID NO: 129720 - DNA, 10 bp, Unknown
  misc_feature (1)..( 10): Result.003 file - promoters60/3435819
acgttttagt

SEQ ID NO: 129721 - DNA, 10 bp, Unknown
  misc_feature (1)..( 10): Result.003 file - promoters60/3435819
cgatttaagt

SEQ ID NO: 129722 - DNA, 10 bp, Unknown
  misc_feature (1)..( 10): Result.003 file - promoters60/3435819
acgttatagc

SEQ ID NO: 129723 - DNA, 7 bp, Unknown
  misc_feature (1)..( 7): Result.003 file - promoters60/3435819
atttttt

SEQ ID NO: 129724 - DNA, 7 bp, Unknown
  misc_feature (1)..( 7): Result.003 file - promoters60/3435819
ctttttt

SEQ ID NO: 129725 - DNA, 7 bp, Unknown
  misc_feature (1)..( 7): Result.003 file - promoters60/3435819
atttttt

SEQ ID NO: 129726 - DNA, 11 bp, Unknown
  misc_feature (1)..( 11): Result.003 file - promoters60/3435819
ataattggttc

SEQ ID NO: 129727 - DNA, 11 bp, Unknown
  misc_feature (1)..( 11): Result.003 file - promoters60/3435819
ttaatgggttc

SEQ ID NO: 129728 - DNA, 11 bp, Unknown
  misc_feature (1)..( 11): Result.003 file - promoters60/3435819
ttaatgaaatt

SEQ ID NO: 129729 - DNA, 9 bp, Unknown
  misc_feature (1)..( 9): Result.003 file - promoters60/3435829
gaatacata

SEQ ID NO: 129730 - DNA, 9 bp, Unknown
  misc_feature (1)..( 9): Result.003 file - promoters60/3435829
gaacacaca

SEQ ID NO: 129731 - DNA, 9 bp, Unknown
  misc_feature (1)..( 9): Result.003 file - promoters60/3435829
gtatatata

SEQ ID NO: 129732 - DNA, 8 bp, Unknown
  misc_feature (1)..( 8): Result.003 file - promoters60/3435829
aatgataa

SEQ ID NO: 129733 - DNA, 8 bp, Unknown
  misc_feature (1)..( 8): Result.003 file - promoters60/3435829
aattatat

SEQ ID NO: 129734 - DNA, 8 bp, Unknown
  misc_feature (1)..( 8): Result.003 file - promoters60/3435829
aattgtat

SEQ ID NO: 129735 - DNA, 8 bp, Unknown
  misc_feature (1)..( 8): Result.003 file - promoters60/3435829
tcaaaata

SEQ ID NO: 129736 - DNA, 8 bp, Unknown
  misc_feature (1)..( 8): Result.003 file - promoters60/3435829
tcaaaatt

SEQ ID NO: 129737 - DNA, 8 bp, Unknown
  misc_feature (1)..( 8): Result.003 file - promoters60/3435829
acaatatt

SEQ ID NO: 129738 - DNA, 8 bp, Unknown
  misc_feature (1)..( 8): Result.003 file - promoters60/3435829
ataagata

SEQ ID NO: 129739 - DNA, 8 bp, Unknown
  misc_feature (1)..( 8): Result.003 file - promoters60/3435829
ctaaaata

SEQ ID NO: 129740 - DNA, 8 bp, Unknown
  misc_feature (1)..( 8): Result.003 file - promoters60/3435829
ctacaatt

SEQ ID NO: 129741 - DNA, 8 bp, Unknown
  misc_feature (1)..( 8): Result.003 file - promoters60/3435829
attaacta

SEQ ID NO: 129742 - DNA, 8 bp, Unknown
  misc_feature (1)..( 8): Result.003 file - promoters60/3435829
tctaacta

SEQ ID NO: 129743 - DNA, 8 bp, Unknown
  misc_feature (1)..( 8): Result.003 file - promoters60/3435829
attgactc

SEQ ID NO: 129744 - DNA, 11 bp, Unknown
  misc_feature (1)..( 11): Result.003 file - promoters60/3435833
ttgagaaaagt

SEQ ID NO: 129745 - DNA, 11 bp, Unknown
  misc_feature (1)..( 11): Result.003 file - promoters60/3435833
atgaaaaaata

SEQ ID NO: 129746 - DNA, 11 bp, Unknown
  misc_feature (1)..( 11): Result.003 file - promoters60/3435833
atgaaagacta

SEQ ID NO: 129747 - DNA, 11 bp, Unknown
  misc_feature (1)..( 11): Result.003 file - promoters60/3435833
attaaatataa

SEQ ID NO: 129748 - DNA, 11 bp, Unknown
  misc_feature (1)..( 11): Result.003 file - promoters60/3435833
tattaataaaa

SEQ ID NO: 129749 - DNA, 11 bp, Unknown
  misc_feature (1)..( 11): Result.003 file - promoters60/3435833
acacaatatac

SEQ ID NO: 129750 - DNA, 17 bp, Unknown
  misc_feature (1)..( 17): Result.003 file - promoters60/3435833
aaatgttaaaccggttt

SEQ ID NO: 129751 - DNA, 17 bp, Unknown
  misc_feature (1)..( 17): Result.003 file - promoters60/3435833
ttttgtcaaatgatgaa

SEQ ID NO: 129752 - DNA, 17 bp, Unknown
  misc_feature (1)..( 17): Result.003 file - promoters60/3435833
gcccattaaaccatttt

SEQ ID NO: 129753 - DNA, 17 bp, Unknown
  misc_feature (1)..( 17): Result.003 file - promoters60/3435833
catgattaaattgaaca

SEQ ID NO: 129754 - DNA, 17 bp, Unknown
  misc_feature (1)..( 17): Result.003 file - promoters60/3435833
aaagattaaacaaacga

SEQ ID NO: 129755 - DNA, 17 bp, Unknown
  misc_feature (1)..( 17): Result.003 file - promoters60/3435833
ttttatcaaaaaaacac

SEQ ID NO: 129756 - DNA, 17 bp, Unknown
  misc_feature (1)..( 17): Result.003 file - promoters60/3435833
gaacacaaaagaataaa

SEQ ID NO: 129757 - DNA, 13 bp, Unknown
  misc_feature (1)..( 13): Result.003 file - promoters60/3435833
gagtgacaaaggt

SEQ ID NO: 129758 - DNA, 13 bp, Unknown
  misc_feature (1)..( 13): Result.003 file - promoters60/3435833
aattgacaaaaac

SEQ ID NO: 129759 - DNA, 13 bp, Unknown
  misc_feature (1)..( 13): Result.003 file - promoters60/3435833
ttatgaaaaaaaa

SEQ ID NO: 129760 - DNA, 13 bp, Unknown
  misc_feature (1)..( 13): Result.003 file - promoters60/3435833
atatgataaaaaa

SEQ ID NO: 129761 - DNA, 13 bp, Unknown
  misc_feature (1)..( 13): Result.003 file - promoters60/3435833
ttaggaaagccag

SEQ ID NO: 129762 - DNA, 13 bp, Unknown
  misc_feature (1)..( 13): Result.003 file - promoters60/3435833
ctttgacaatgat

SEQ ID NO: 129763 - DNA, 13 bp, Unknown
  misc_feature (1)..( 13): Result.003 file - promoters60/3435833
ttccaaaaataaa

SEQ ID NO: 129764 - DNA, 11 bp, Unknown
  misc_feature (1)..( 11): Result.003 file - promoters60/3435833
catgattaaat

SEQ ID NO: 129765 - DNA, 11 bp, Unknown
  misc_feature (1)..( 11): Result.003 file - promoters60/3435833
gttgatttaat

SEQ ID NO: 129766 - DNA, 11 bp, Unknown
  misc_feature (1)..( 11): Result.003 file - promoters60/3435833
aatgatgaaat

SEQ ID NO: 129767 - DNA, 11 bp, Unknown
  misc_feature (1)..( 11): Result.003 file - promoters60/3435833
gcccattaaac

SEQ ID NO: 129768 - DNA, 11 bp, Unknown
  misc_feature (1)..( 11): Result.003 file - promoters60/3435833
aaagattaaac

SEQ ID NO: 129769 - DNA, 11 bp, Unknown
  misc_feature (1)..( 11): Result.003 file - promoters60/3435833
aaagaataaat

SEQ ID NO: 129770 - DNA, 10 bp, Unknown
  misc_feature (1)..( 10): Result.003 file - promoters60/3435833
aaattttcat

SEQ ID NO: 129771 - DNA, 10 bp, Unknown
  misc_feature (1)..( 10): Result.003 file - promoters60/3435833
ttttttgcat

SEQ ID NO: 129772 - DNA, 10 bp, Unknown
  misc_feature (1)..( 10): Result.003 file - promoters60/3435833
cctttttcat

SEQ ID NO: 129773 - DNA, 10 bp, Unknown
  misc_feature (1)..( 10): Result.003 file - promoters60/3435833
aaatcttcta

SEQ ID NO: 129774 - DNA, 10 bp, Unknown
  misc_feature (1)..( 10): Result.003 file - promoters60/3435833
catttttcta

SEQ ID NO: 129775 - DNA, 10 bp, Unknown
  misc_feature (1)..( 10): Result.003 file - promoters60/3435833
aatttttgct

SEQ ID NO: 129776 - DNA, 8 bp, Unknown
  misc_feature (1)..( 8): Result.003 file - promoters60/3435891
aattcaac

SEQ ID NO: 129777 - DNA, 8 bp, Unknown
  misc_feature (1)..( 8): Result.003 file - promoters60/3435891
aatgcaac

SEQ ID NO: 129778 - DNA, 6 bp, Unknown
  misc_feature (1)..( 6): Result.003 file - promoters60/3435891
aaattt

SEQ ID NO: 129779 - DNA, 6 bp, Unknown
  misc_feature (1)..( 6): Result.003 file - promoters60/3435891
aaattt

SEQ ID NO: 129780 - DNA, 10 bp, Unknown
  misc_feature (1)..( 10): Result.003 file - promoters60/3435891
tgttttcact

SEQ ID NO: 129781 - DNA, 10 bp, Unknown
  misc_feature (1)..( 10): Result.003 file - promoters60/3435891
taattttact

SEQ ID NO: 129782 - DNA, 10 bp, Unknown
  misc_feature (1)..( 10): Result.003 file - promoters60/3435891
tgtattcacc

SEQ ID NO: 129783 - DNA, 7 bp, Unknown
  misc_feature (1)..( 7): Result.003 file - promoters60/3435891
gttaata

SEQ ID NO: 129784 - DNA, 7 bp, Unknown
  misc_feature (1)..( 7): Result.003 file - promoters60/3435891
gttaata

SEQ ID NO: 129785 - DNA, 9 bp, Unknown
  misc_feature (1)..( 9): Result.003 file - promoters60/3435891
aactcttta

SEQ ID NO: 129786 - DNA, 9 bp, Unknown
  misc_feature (1)..( 9): Result.003 file - promoters60/3435891
aactttttt

SEQ ID NO: 129787 - DNA, 10 bp, Unknown
  misc_feature (1)..( 10): Result.003 file - promoters60/3435891
tgttttatta

SEQ ID NO: 129788 - DNA, 6 bp, Unknown
  misc_feature (1)..( 6): Result.003 file - promoters60/3435891
caaaaa

SEQ ID NO: 129789 - DNA, 6 bp, Unknown
  misc_feature (1)..( 6): Result.003 file - promoters60/3435891
caaaaa

SEQ ID NO: 129790 - DNA, 7 bp, Unknown
  misc_feature (1)..( 7): Result.003 file - promoters60/3435891
tttattg

SEQ ID NO: 129791 - DNA, 7 bp, Unknown
  misc_feature (1)..( 7): Result.003 file - promoters60/3435891
tttatta

SEQ ID NO: 129792 - DNA, 7 bp, Unknown
  misc_feature (1)..( 7): Result.003 file - promoters60/3435891
tttttta

SEQ ID NO: 129793 - DNA, 7 bp, Unknown
  misc_feature (1)..( 7): Result.003 file - promoters60/3435891
tgaaatt

SEQ ID NO: 129794 - DNA, 7 bp, Unknown
  misc_feature (1)..( 7): Result.003 file - promoters60/3435891
tgatatt

SEQ ID NO: 129795 - DNA, 6 bp, Unknown
  misc_feature (1)..( 6): Result.003 file - promoters60/3435891
aagttg

SEQ ID NO: 129796 - DNA, 6 bp, Unknown
  misc_feature (1)..( 6): Result.003 file - promoters60/3435891
aagttg

SEQ ID NO: 129797 - DNA, 8 bp, Unknown
  misc_feature (1)..( 8): Result.003 file - promoters60/3435891
attactat

SEQ ID NO: 129798 - DNA, 8 bp, Unknown
  misc_feature (1)..( 8): Result.003 file - promoters60/3435891
attgctat

SEQ ID NO: 129799 - DNA, 6 bp, Unknown
  misc_feature (1)..( 6): Result.003 file - promoters60/3435891
taattc

SEQ ID NO: 129800 - DNA, 6 bp, Unknown
  misc_feature (1)..( 6): Result.003 file - promoters60/3435891
taattc

SEQ ID NO: 129801 - DNA, 8 bp, Unknown
  misc_feature (1)..( 8): Result.003 file - promoters60/3435891
tgtctaag

SEQ ID NO: 129802 - DNA, 8 bp, Unknown
  misc_feature (1)..( 8): Result.003 file - promoters60/3435891
tgtcaaag

SEQ ID NO: 129803 - DNA, 7 bp, Unknown
  misc_feature (1)..( 7): Result.003 file - promoters60/3435891
aaaaaaa

SEQ ID NO: 129804 - DNA, 7 bp, Unknown
  misc_feature (1)..( 7): Result.003 file - promoters60/3435891
aaacaaa

SEQ ID NO: 129805 - DNA, 6 bp, Unknown
  misc_feature (1)..( 6): Result.003 file - promoters60/3435891
tgtcga

SEQ ID NO: 129806 - DNA, 6 bp, Unknown
  misc_feature (1)..( 6): Result.003 file - promoters60/3435891
tgtcga

SEQ ID NO: 129807 - DNA, 7 bp, Unknown
  misc_feature (1)..( 7): Result.003 file - promoters60/3435891
tttactt

SEQ ID NO: 129808 - DNA, 7 bp, Unknown
  misc_feature (1)..( 7): Result.003 file - promoters60/3435891
tttgctt

SEQ ID NO: 129809 - DNA, 6 bp, Unknown
  misc_feature (1)..( 6): Result.003 file - promoters60/3435891
ttgtac

SEQ ID NO: 129810 - DNA, 6 bp, Unknown
  misc_feature (1)..( 6): Result.003 file - promoters60/3435891
ttgtac

SEQ ID NO: 129811 - DNA, 10 bp, Unknown
  misc_feature (1)..( 10): Result.003 file - promoters60/3435902
attgctaata

SEQ ID NO: 129812 - DNA, 10 bp, Unknown
  misc_feature (1)..( 10): Result.003 file - promoters60/3435902
attgcaaata

SEQ ID NO: 129813 - DNA, 6 bp, Unknown
  misc_feature (1)..( 6): Result.003 file - promoters60/3435902
tcttcc

SEQ ID NO: 129814 - DNA, 6 bp, Unknown
  misc_feature (1)..( 6): Result.003 file - promoters60/3435902
tcttcc

SEQ ID NO: 129815 - DNA, 6 bp, Unknown
  misc_feature (1)..( 6): Result.003 file - promoters60/3435902
aagaaa

SEQ ID NO: 129816 - DNA, 6 bp, Unknown
  misc_feature (1)..( 6): Result.003 file - promoters60/3435902
aagaaa

SEQ ID NO: 129817 - DNA, 6 bp, Unknown
  misc_feature (1)..( 6): Result.003 file - promoters60/3435902
ttgcta

SEQ ID NO: 129818 - DNA, 6 bp, Unknown
  misc_feature (1)..( 6): Result.003 file - promoters60/3435902
ttgcta

SEQ ID NO: 129819 - DNA, 6 bp, Unknown
  misc_feature (1)..( 6): Result.003 file - promoters60/3435902
tctgta

SEQ ID NO: 129820 - DNA, 6 bp, Unknown
  misc_feature (1)..( 6): Result.003 file - promoters60/3435902
tctgta

SEQ ID NO: 129821 - DNA, 8 bp, Unknown
  misc_feature (1)..( 8): Result.003 file - promoters60/3435902
acattttt

SEQ ID NO: 129822 - DNA, 8 bp, Unknown
  misc_feature (1)..( 8): Result.003 file - promoters60/3435902
acatcttt

SEQ ID NO: 129823 - DNA, 6 bp, Unknown
  misc_feature (1)..( 6): Result.003 file - promoters60/3435902
atagta

SEQ ID NO: 129824 - DNA, 6 bp, Unknown
  misc_feature (1)..( 6): Result.003 file - promoters60/3435902
atagta

SEQ ID NO: 129825 - DNA, 9 bp, Unknown
  misc_feature (1)..( 9): Result.003 file - promoters60/3435902
tattcgcat

SEQ ID NO: 129826 - DNA, 9 bp, Unknown
  misc_feature (1)..( 9): Result.003 file - promoters60/3435902
tattcccat

SEQ ID NO: 129827 - DNA, 6 bp, Unknown
  misc_feature (1)..( 6): Result.003 file - promoters60/3435902
tgcaat

SEQ ID NO: 129828 - DNA, 6 bp, Unknown
  misc_feature (1)..( 6): Result.003 file - promoters60/3435902
tgcaat

SEQ ID NO: 129829 - DNA, 8 bp, Unknown
  misc_feature (1)..( 8): Result.003 file - promoters60/3435902
taatttac

SEQ ID NO: 129830 - DNA, 8 bp, Unknown
  misc_feature (1)..( 8): Result.003 file - promoters60/3435902
taaattac

SEQ ID NO: 129831 - DNA, 6 bp, Unknown
  misc_feature (1)..( 6): Result.003 file - promoters60/3435902
aaatat

SEQ ID NO: 129832 - DNA, 6 bp, Unknown
  misc_feature (1)..( 6): Result.003 file - promoters60/3435902
aaatat

SEQ ID NO: 129833 - DNA, 9 bp, Unknown
  misc_feature (1)..( 9): Result.003 file - promoters60/3435902
ataattttt

SEQ ID NO: 129834 - DNA, 9 bp, Unknown
  misc_feature (1)..( 9): Result.003 file - promoters60/3435902
ataatgttt

SEQ ID NO: 129835 - DNA, 7 bp, Unknown
  misc_feature (1)..( 7): Result.003 file - promoters60/3435902
atagata

SEQ ID NO: 129836 - DNA, 7 bp, Unknown
  misc_feature (1)..( 7): Result.003 file - promoters60/3435902
atatata

SEQ ID NO: 129837 - DNA, 7 bp, Unknown
  misc_feature (1)..( 7): Result.003 file - promoters60/3435902
atgtaat

SEQ ID NO: 129838 - DNA, 7 bp, Unknown
  misc_feature (1)..( 7): Result.003 file - promoters60/3435902
atggaat

SEQ ID NO: 129839 - DNA, 7 bp, Unknown
  misc_feature (1)..( 7): Result.003 file - promoters60/3435902
acctaat

SEQ ID NO: 129840 - DNA, 7 bp, Unknown
  misc_feature (1)..( 7): Result.003 file - promoters60/3435902
accaaat

SEQ ID NO: 129841 - DNA, 6 bp, Unknown
  misc_feature (1)..( 6): Result.003 file - promoters60/3435902
tattat

SEQ ID NO: 129842 - DNA, 6 bp, Unknown
  misc_feature (1)..( 6): Result.003 file - promoters60/3435902
tattat

SEQ ID NO: 129843 - DNA, 6 bp, Unknown
  misc_feature (1)..( 6): Result.003 file - promoters60/3435902
aaaaaa

SEQ ID NO: 129844 - DNA, 6 bp, Unknown
  misc_feature (1)..( 6): Result.003 file - promoters60/3435902
aaaaaa

SEQ ID NO: 129845 - DNA, 6 bp, Unknown
  misc_feature (1)..( 6): Result.003 file - promoters60/3435902
gtcaaa

SEQ ID NO: 129846 - DNA, 6 bp, Unknown
  misc_feature (1)..( 6): Result.003 file - promoters60/3435902
gtcaaa

SEQ ID NO: 129847 - DNA, 6 bp, Unknown
  misc_feature (1)..( 6): Result.003 file - promoters60/3435902
ggcgag

SEQ ID NO: 129848 - DNA, 6 bp, Unknown
  misc_feature (1)..( 6): Result.003 file - promoters60/3435902
ggcgag

SEQ ID NO: 129849 - DNA, 6 bp, Unknown
  misc_feature (1)..( 6): Result.003 file - promoters60/3436121
tttaag

SEQ ID NO: 129850 - DNA, 6 bp, Unknown
  misc_feature (1)..( 6): Result.003 file - promoters60/3436121
tttaag

SEQ ID NO: 129851 - DNA, 6 bp, Unknown
  misc_feature (1)..( 6): Result.003 file - promoters60/3436121
ttcttt

SEQ ID NO: 129852 - DNA, 6 bp, Unknown
  misc_feature (1)..( 6): Result.003 file - promoters60/3436121
ttcttt

SEQ ID NO: 129853 - DNA, 7 bp, Unknown
  misc_feature (1)..( 7): Result.003 file - promoters60/3436121
tctttat

SEQ ID NO: 129854 - DNA, 7 bp, Unknown
  misc_feature (1)..( 7): Result.003 file - promoters60/3436121
tctctat

SEQ ID NO: 129855 - DNA, 6 bp, Unknown
  misc_feature (1)..( 6): Result.003 file - promoters60/3436121
ctgtgt

SEQ ID NO: 129856 - DNA, 6 bp, Unknown
  misc_feature (1)..( 6): Result.003 file - promoters60/3436121
ctgtgt

SEQ ID NO: 129857 - DNA, 6 bp, Unknown
  misc_feature (1)..( 6): Result.003 file - promoters60/3436121
gagaag

SEQ ID NO: 129858 - DNA, 6 bp, Unknown
  misc_feature (1)..( 6): Result.003 file - promoters60/3436121
gagaag

SEQ ID NO: 129859 - DNA, 6 bp, Unknown
  misc_feature (1)..( 6): Result.003 file - promoters60/3436121
aagaaa

SEQ ID NO: 129860 - DNA, 6 bp, Unknown
  misc_feature (1)..( 6): Result.003 file - promoters60/3436121
aagaaa

SEQ ID NO: 129861 - DNA, 8 bp, Unknown
  misc_feature (1)..( 8): Result.003 file - promoters60/3436121
cacataaa

SEQ ID NO: 129862 - DNA, 8 bp, Unknown
  misc_feature (1)..( 8): Result.003 file - promoters60/3436121
cacgtaaa

SEQ ID NO: 129863 - DNA, 7 bp, Unknown
  misc_feature (1)..( 7): Result.003 file - promoters60/3436121
tcttttt

SEQ ID NO: 129864 - DNA, 7 bp, Unknown
  misc_feature (1)..( 7): Result.003 file - promoters60/3436121
tctgttt

SEQ ID NO: 129865 - DNA, 6 bp, Unknown
  misc_feature (1)..( 6): Result.003 file - promoters60/3436121
atgtct

SEQ ID NO: 129866 - DNA, 6 bp, Unknown
  misc_feature (1)..( 6): Result.003 file - promoters60/3436121
atgtct

SEQ ID NO: 129867 - DNA, 7 bp, Unknown
  misc_feature (1)..( 7): Result.003 file - promoters60/3436121
ttggaga

SEQ ID NO: 129868 - DNA, 7 bp, Unknown
  misc_feature (1)..( 7): Result.003 file - promoters60/3436121
ttggaga

SEQ ID NO: 129869 - DNA, 6 bp, Unknown
  misc_feature (1)..( 6): Result.003 file - promoters60/3436121
gaagat

SEQ ID NO: 129870 - DNA, 6 bp, Unknown
  misc_feature (1)..( 6): Result.003 file - promoters60/3436121
gaagat

SEQ ID NO: 129871 - DNA, 6 bp, Unknown
  misc_feature (1)..( 6): Result.003 file - promoters60/3436121
gatcga

SEQ ID NO: 129872 - DNA, 6 bp, Unknown
  misc_feature (1)..( 6): Result.003 file - promoters60/3436121
gatcga

SEQ ID NO: 129873 - DNA, 6 bp, Unknown
  misc_feature (1)..( 6): Result.003 file - promoters60/3436121
aaatgc

SEQ ID NO: 129874 - DNA, 6 bp, Unknown
  misc_feature (1)..( 6): Result.003 file - promoters60/3436121
aaatgc

SEQ ID NO: 129875 - DNA, 8 bp, Unknown
  misc_feature (1)..( 8): Result.003 file - promoters60/3436121
ggatttgt

SEQ ID NO: 129876 - DNA, 8 bp, Unknown
  misc_feature (1)..( 8): Result.003 file - promoters60/3436121
ggacttgt

SEQ ID NO: 129877 - DNA, 10 bp, Unknown
  misc_feature (1)..( 10): Result.003 file - promoters60/3436196
cccaaaaata

SEQ ID NO: 129878 - DNA, 10 bp, Unknown
  misc_feature (1)..( 10): Result.003 file - promoters60/3436196
ctaaaaaatc

SEQ ID NO: 129879 - DNA, 10 bp, Unknown
  misc_feature (1)..( 10): Result.003 file - promoters60/3436196
aataaacata

SEQ ID NO: 129880 - DNA, 10 bp, Unknown
  misc_feature (1)..( 10): Result.003 file - promoters60/3436196
cccacaaaca

SEQ ID NO: 129881 - DNA, 10 bp, Unknown
  misc_feature (1)..( 10): Result.003 file - promoters60/3436196
cattaaaata

SEQ ID NO: 129882 - DNA, 11 bp, Unknown
  misc_feature (1)..( 11): Result.003 file - promoters60/3436196
cggaaactata

SEQ ID NO: 129883 - DNA, 10 bp, Unknown
  misc_feature (1)..( 10): Result.003 file - promoters60/3436196
taagattagt

SEQ ID NO: 129884 - DNA, 10 bp, Unknown
  misc_feature (1)..( 10): Result.003 file - promoters60/3436196
taaaattccc

SEQ ID NO: 129885 - DNA, 10 bp, Unknown
  misc_feature (1)..( 10): Result.003 file - promoters60/3436196
taaaattttt

SEQ ID NO: 129886 - DNA, 10 bp, Unknown
  misc_feature (1)..( 10): Result.003 file - promoters60/3436196
agaaattctc

SEQ ID NO: 129887 - DNA, 10 bp, Unknown
  misc_feature (1)..( 10): Result.003 file - promoters60/3436196
caaaattgac

SEQ ID NO: 129888 - DNA, 10 bp, Unknown
  misc_feature (1)..( 10): Result.003 file - promoters60/3436196
aacaattcta

SEQ ID NO: 129889 - DNA, 10 bp, Unknown
  misc_feature (1)..( 10): Result.003 file - promoters60/3436196
cgaaatggac

SEQ ID NO: 129890 - DNA, 9 bp, Unknown
  misc_feature (1)..( 9): Result.003 file - promoters60/3436196
gatttattt

SEQ ID NO: 129891 - DNA, 9 bp, Unknown
  misc_feature (1)..( 9): Result.003 file - promoters60/3436196
aattcattt

SEQ ID NO: 129892 - DNA, 10 bp, Unknown
  misc_feature (1)..( 10): Result.003 file - promoters60/3436196
aaccttattt

SEQ ID NO: 129893 - DNA, 9 bp, Unknown
  misc_feature (1)..( 9): Result.003 file - promoters60/3436196
tttttattc

SEQ ID NO: 129894 - DNA, 9 bp, Unknown
  misc_feature (1)..( 9): Result.003 file - promoters60/3436196
cattcatcc

SEQ ID NO: 129895 - DNA, 10 bp, Unknown
  misc_feature (1)..( 10): Result.003 file - promoters60/3436196
tattctattt

SEQ ID NO: 129896 - DNA, 10 bp, Unknown
  misc_feature (1)..( 10): Result.003 file - promoters60/3436196
tcgtttattt

SEQ ID NO: 129897 - DNA, 8 bp, Unknown
  misc_feature (1)..( 8): Result.003 file - promoters60/3436265
taaacttt

SEQ ID NO: 129898 - DNA, 8 bp, Unknown
  misc_feature (1)..( 8): Result.003 file - promoters60/3436265
taaacttc

SEQ ID NO: 129899 - DNA, 8 bp, Unknown
  misc_feature (1)..( 8): Result.003 file - promoters60/3436265
caaacttt

SEQ ID NO: 129900 - DNA, 8 bp, Unknown
  misc_feature (1)..( 8): Result.003 file - promoters60/3436265
gaaagttt

SEQ ID NO: 129901 - DNA, 10 bp, Unknown
  misc_feature (1)..( 10): Result.003 file - promoters60/3436265
ttttttattt

SEQ ID NO: 129902 - DNA, 10 bp, Unknown
  misc_feature (1)..( 10): Result.003 file - promoters60/3436265
tcaattattt

SEQ ID NO: 129903 - DNA, 10 bp, Unknown
  misc_feature (1)..( 10): Result.003 file - promoters60/3436265
tcaattattg

SEQ ID NO: 129904 - DNA, 9 bp, Unknown
  misc_feature (1)..( 9): Result.003 file - promoters60/3436265
atttataaa

SEQ ID NO: 129905 - DNA, 9 bp, Unknown
  misc_feature (1)..( 9): Result.003 file - promoters60/3436265
attaataat

SEQ ID NO: 129906 - DNA, 9 bp, Unknown
  misc_feature (1)..( 9): Result.003 file - promoters60/3436265
ctcaataat

SEQ ID NO: 129907 - DNA, 9 bp, Unknown
  misc_feature (1)..( 9): Result.003 file - promoters60/3436265
cttttttaa

SEQ ID NO: 129908 - DNA, 9 bp, Unknown
  misc_feature (1)..( 9): Result.003 file - promoters60/3436265
cttctttgt

SEQ ID NO: 129909 - DNA, 9 bp, Unknown
  misc_feature (1)..( 9): Result.003 file - promoters60/3436265
attctatgt

SEQ ID NO: 129910 - DNA, 12 bp, Unknown
  misc_feature (1)..( 12): Result.003 file - promoters60/3436265
tatcaaatttta

SEQ ID NO: 129911 - DNA, 12 bp, Unknown
  misc_feature (1)..( 12): Result.003 file - promoters60/3436265
taagaaatatta

SEQ ID NO: 129912 - DNA, 12 bp, Unknown
  misc_feature (1)..( 12): Result.003 file - promoters60/3436265
taaaaaatatct

SEQ ID NO: 129913 - DNA, 8 bp, Unknown
  misc_feature (1)..( 8): Result.003 file - promoters60/3436265
tatagtat

SEQ ID NO: 129914 - DNA, 8 bp, Unknown
  misc_feature (1)..( 8): Result.003 file - promoters60/3436265
aataatat

SEQ ID NO: 129915 - DNA, 8 bp, Unknown
  misc_feature (1)..( 8): Result.003 file - promoters60/3436265
aataatgt

SEQ ID NO: 129916 - DNA, 13 bp, Unknown
  misc_feature (1)..( 13): Result.003 file - promoters60/3436267
gttcttatcactg

SEQ ID NO: 129917 - DNA, 13 bp, Unknown
  misc_feature (1)..( 13): Result.003 file - promoters60/3436267
attcttaatttca

SEQ ID NO: 129918 - DNA, 13 bp, Unknown
  misc_feature (1)..( 13): Result.003 file - promoters60/3436267
atttttattttca

SEQ ID NO: 129919 - DNA, 14 bp, Unknown
  misc_feature (1)..( 14): Result.003 file - promoters60/3436267
gatcttgatttaga

SEQ ID NO: 129920 - DNA, 6 bp, Unknown
  misc_feature (1)..( 6): Result.003 file - promoters60/3436412
ttgtat

SEQ ID NO: 129921 - DNA, 6 bp, Unknown
  misc_feature (1)..( 6): Result.003 file - promoters60/3436412
ttgtat

SEQ ID NO: 129922 - DNA, 7 bp, Unknown
  misc_feature (1)..( 7): Result.003 file - promoters60/3436412
cactgtc

SEQ ID NO: 129923 - DNA, 7 bp, Unknown
  misc_feature (1)..( 7): Result.003 file - promoters60/3436412
cacggtc

SEQ ID NO: 129924 - DNA, 6 bp, Unknown
  misc_feature (1)..( 6): Result.003 file - promoters60/3436412
tctgaa

SEQ ID NO: 129925 - DNA, 6 bp, Unknown
  misc_feature (1)..( 6): Result.003 file - promoters60/3436412
tctgaa

SEQ ID NO: 129926 - DNA, 6 bp, Unknown
  misc_feature (1)..( 6): Result.003 file - promoters60/3436412
ggttta

SEQ ID NO: 129927 - DNA, 6 bp, Unknown
  misc_feature (1)..( 6): Result.003 file - promoters60/3436412
ggttta

SEQ ID NO: 129928 - DNA, 6 bp, Unknown
  misc_feature (1)..( 6): Result.003 file - promoters60/3436412
ttgact

SEQ ID NO: 129929 - DNA, 6 bp, Unknown
  misc_feature (1)..( 6): Result.003 file - promoters60/3436412
ttgact

SEQ ID NO: 129930 - DNA, 6 bp, Unknown
  misc_feature (1)..( 6): Result.003 file - promoters60/3436412
ggctgt

SEQ ID NO: 129931 - DNA, 6 bp, Unknown
  misc_feature (1)..( 6): Result.003 file - promoters60/3436412
ggctgt

SEQ ID NO: 129932 - DNA, 7 bp, Unknown
  misc_feature (1)..( 7): Result.003 file - promoters60/3436412
attgaaa

SEQ ID NO: 129933 - DNA, 7 bp, Unknown
  misc_feature (1)..( 7): Result.003 file - promoters60/3436412
attaaaa

SEQ ID NO: 129934 - DNA, 6 bp, Unknown
  misc_feature (1)..( 6): Result.003 file - promoters60/3436412
tgaatt

SEQ ID NO: 129935 - DNA, 6 bp, Unknown
  misc_feature (1)..( 6): Result.003 file - promoters60/3436412
tgaatt

SEQ ID NO: 129936 - DNA, 7 bp, Unknown
  misc_feature (1)..( 7): Result.003 file - promoters60/3436412
aaagcta

SEQ ID NO: 129937 - DNA, 7 bp, Unknown
  misc_feature (1)..( 7): Result.003 file - promoters60/3436412
aaatcta

SEQ ID NO: 129938 - DNA, 7 bp, Unknown
  misc_feature (1)..( 7): Result.003 file - promoters60/3436412
gatgaac

SEQ ID NO: 129939 - DNA, 7 bp, Unknown
  misc_feature (1)..( 7): Result.003 file - promoters60/3436412
gatcaac

SEQ ID NO: 129940 - DNA, 7 bp, Unknown
  misc_feature (1)..( 7): Result.003 file - promoters60/3436412
atacaat

SEQ ID NO: 129941 - DNA, 7 bp, Unknown
  misc_feature (1)..( 7): Result.003 file - promoters60/3436412
atataat

SEQ ID NO: 129942 - DNA, 16 bp, Unknown
  misc_feature (1)..( 16): Result.003 file - promoters60/3436412
agaaaacgaattaaat

SEQ ID NO: 129943 - DNA, 16 bp, Unknown
  misc_feature (1)..( 16): Result.003 file - promoters60/3436412
agaaaactaattaaat

SEQ ID NO: 129944 - DNA, 7 bp, Unknown
  misc_feature (1)..( 7): Result.003 file - promoters60/3436412
attgtat

SEQ ID NO: 129945 - DNA, 7 bp, Unknown
  misc_feature (1)..( 7): Result.003 file - promoters60/3436412
attttat

SEQ ID NO: 129946 - DNA, 6 bp, Unknown
  misc_feature (1)..( 6): Result.003 file - promoters60/3436412
aaccac

SEQ ID NO: 129947 - DNA, 6 bp, Unknown
  misc_feature (1)..( 6): Result.003 file - promoters60/3436412
aaccac

SEQ ID NO: 129948 - DNA, 8 bp, Unknown
  misc_feature (1)..( 8): Result.003 file - promoters60/3436412
cctggatt

SEQ ID NO: 129949 - DNA, 8 bp, Unknown
  misc_feature (1)..( 8): Result.003 file - promoters60/3436412
ccttgatt

SEQ ID NO: 129950 - DNA, 7 bp, Unknown
  misc_feature (1)..( 7): Result.003 file - promoters60/3436412
aaatgat

SEQ ID NO: 129951 - DNA, 7 bp, Unknown
  misc_feature (1)..( 7): Result.003 file - promoters60/3436412
aaaagat

SEQ ID NO: 129952 - DNA, 14 bp, Unknown
  misc_feature (1)..( 14): Result.003 file - promoters60/3436481
cacatacaaacgca

SEQ ID NO: 129953 - DNA, 14 bp, Unknown
  misc_feature (1)..( 14): Result.003 file - promoters60/3436481
tacatacagatcca

SEQ ID NO: 129954 - DNA, 14 bp, Unknown
  misc_feature (1)..( 14): Result.003 file - promoters60/3436481
gtcatagaaaaatt

SEQ ID NO: 129955 - DNA, 14 bp, Unknown
  misc_feature (1)..( 14): Result.003 file - promoters60/3436481
aacacacagaatcc

SEQ ID NO: 129956 - DNA, 14 bp, Unknown
  misc_feature (1)..( 14): Result.003 file - promoters60/3436481
tacataattgtcta

SEQ ID NO: 129957 - DNA, 14 bp, Unknown
  misc_feature (1)..( 14): Result.003 file - promoters60/3436481
ggtgaagaagaatt

SEQ ID NO: 129958 - DNA, 11 bp, Unknown
  misc_feature (1)..( 11): Result.003 file - promoters60/3436481
tatataaaaaa

SEQ ID NO: 129959 - DNA, 11 bp, Unknown
  misc_feature (1)..( 11): Result.003 file - promoters60/3436481
tttataaatgt

SEQ ID NO: 129960 - DNA, 11 bp, Unknown
  misc_feature (1)..( 11): Result.003 file - promoters60/3436481
acaataacaaa

SEQ ID NO: 129961 - DNA, 11 bp, Unknown
  misc_feature (1)..( 11): Result.003 file - promoters60/3436481
tatatacaaaa

SEQ ID NO: 129962 - DNA, 11 bp, Unknown
  misc_feature (1)..( 11): Result.003 file - promoters60/3436481
agaataaaaac

SEQ ID NO: 129963 - DNA, 11 bp, Unknown
  misc_feature (1)..( 11): Result.003 file - promoters60/3436481
tatttactttg

SEQ ID NO: 129964 - DNA, 9 bp, Unknown
  misc_feature (1)..( 9): Result.003 file - promoters60/3436481
aactaaaac

SEQ ID NO: 129965 - DNA, 9 bp, Unknown
  misc_feature (1)..( 9): Result.003 file - promoters60/3436481
aacaaaaaa

SEQ ID NO: 129966 - DNA, 9 bp, Unknown
  misc_feature (1)..( 9): Result.003 file - promoters60/3436481
cactaaaaa

SEQ ID NO: 129967 - DNA, 9 bp, Unknown
  misc_feature (1)..( 9): Result.003 file - promoters60/3436481
cacacaaag

SEQ ID NO: 129968 - DNA, 9 bp, Unknown
  misc_feature (1)..( 9): Result.003 file - promoters60/3436481
tacaaaata

SEQ ID NO: 129969 - DNA, 9 bp, Unknown
  misc_feature (1)..( 9): Result.003 file - promoters60/3436481
tgctaaaaa

SEQ ID NO: 129970 - DNA, 8 bp, Unknown
  misc_feature (1)..( 8): Result.003 file - promoters60/3436529
cttacaaa

SEQ ID NO: 129971 - DNA, 8 bp, Unknown
  misc_feature (1)..( 8): Result.003 file - promoters60/3436529
cttccaaa

SEQ ID NO: 129972 - DNA, 8 bp, Unknown
  misc_feature (1)..( 8): Result.003 file - promoters60/3436529
gatccaaa

SEQ ID NO: 129973 - DNA, 10 bp, Unknown
  misc_feature (1)..( 10): Result.003 file - promoters60/3436529
aaactaaaac

SEQ ID NO: 129974 - DNA, 10 bp, Unknown
  misc_feature (1)..( 10): Result.003 file - promoters60/3436529
aaactacaac

SEQ ID NO: 129975 - DNA, 10 bp, Unknown
  misc_feature (1)..( 10): Result.003 file - promoters60/3436529
aaactactta

SEQ ID NO: 129976 - DNA, 10 bp, Unknown
  misc_feature (1)..( 10): Result.003 file - promoters60/3436529
aaacgtgaaa

SEQ ID NO: 129977 - DNA, 10 bp, Unknown
  misc_feature (1)..( 10): Result.003 file - promoters60/3436529
aaacgtaaaa

SEQ ID NO: 129978 - DNA, 10 bp, Unknown
  misc_feature (1)..( 10): Result.003 file - promoters60/3436529
taacgtggca

SEQ ID NO: 129979 - DNA, 11 bp, Unknown
  misc_feature (1)..( 11): Result.003 file - promoters60/3436529
acaatataaac

SEQ ID NO: 129980 - DNA, 11 bp, Unknown
  misc_feature (1)..( 11): Result.003 file - promoters60/3436529
tatatataaag

SEQ ID NO: 129981 - DNA, 11 bp, Unknown
  misc_feature (1)..( 11): Result.003 file - promoters60/3436529
tatatataaag

SEQ ID NO: 129982 - DNA, 12 bp, Unknown
  misc_feature (1)..( 12): Result.003 file - promoters60/3436529
cctaatcagaaa

SEQ ID NO: 129983 - DNA, 12 bp, Unknown
  misc_feature (1)..( 12): Result.003 file - promoters60/3436529
actaattagaaa

SEQ ID NO: 129984 - DNA, 12 bp, Unknown
  misc_feature (1)..( 12): Result.003 file - promoters60/3436529
actaattaacac

SEQ ID NO: 129985 - DNA, 9 bp, Unknown
  misc_feature (1)..( 9): Result.003 file - promoters60/3436529
tgaagatta

SEQ ID NO: 129986 - DNA, 9 bp, Unknown
  misc_feature (1)..( 9): Result.003 file - promoters60/3436529
tgaatatta

SEQ ID NO: 129987 - DNA, 9 bp, Unknown
  misc_feature (1)..( 9): Result.003 file - promoters60/3436529
gtaatattg

SEQ ID NO: 129988 - DNA, 7 bp, Unknown
  misc_feature (1)..( 7): Result.003 file - promoters60/3436655
tccaatg

SEQ ID NO: 129989 - DNA, 7 bp, Unknown
  misc_feature (1)..( 7): Result.003 file - promoters60/3436655
tccgatg

SEQ ID NO: 129990 - DNA, 6 bp, Unknown
  misc_feature (1)..( 6): Result.003 file - promoters60/3436655
atggtt

SEQ ID NO: 129991 - DNA, 6 bp, Unknown
  misc_feature (1)..( 6): Result.003 file - promoters60/3436655
atggtt

SEQ ID NO: 129992 - DNA, 10 bp, Unknown
  misc_feature (1)..( 10): Result.003 file - promoters60/3436655
ttttgtttct

SEQ ID NO: 129993 - DNA, 10 bp, Unknown
  misc_feature (1)..( 10): Result.003 file - promoters60/3436655
ttttttttct

SEQ ID NO: 129994 - DNA, 6 bp, Unknown
  misc_feature (1)..( 6): Result.003 file - promoters60/3436655
tgcaaa

SEQ ID NO: 129995 - DNA, 6 bp, Unknown
  misc_feature (1)..( 6): Result.003 file - promoters60/3436655
tgcaaa

SEQ ID NO: 129996 - DNA, 6 bp, Unknown
  misc_feature (1)..( 6): Result.003 file - promoters60/3436655
atcaga

SEQ ID NO: 129997 - DNA, 6 bp, Unknown
  misc_feature (1)..( 6): Result.003 file - promoters60/3436655
atcaga

SEQ ID NO: 129998 - DNA, 9 bp, Unknown
  misc_feature (1)..( 9): Result.003 file - promoters60/3436655
aaagggacc

SEQ ID NO: 129999 - DNA, 9 bp, Unknown
  misc_feature (1)..( 9): Result.003 file - promoters60/3436655
aaatggaat

SEQ ID NO: 130000 - DNA, 9 bp, Unknown
  misc_feature (1)..( 9): Result.003 file - promoters60/3436655
atatgtaat

SEQ ID NO: 130001 - DNA, 6 bp, Unknown
  misc_feature (1)..( 6): Result.003 file - promoters60/3436655
agagtc

SEQ ID NO: 130002 - DNA, 6 bp, Unknown
  misc_feature (1)..( 6): Result.003 file - promoters60/3436655
agagtc

SEQ ID NO: 130003 - DNA, 6 bp, Unknown
  misc_feature (1)..( 6): Result.003 file - promoters60/3436655
taaaaa

SEQ ID NO: 130004 - DNA, 6 bp, Unknown
  misc_feature (1)..( 6): Result.003 file - promoters60/3436655
taaaaa

SEQ ID NO: 130005 - DNA, 9 bp, Unknown
  misc_feature (1)..( 9): Result.003 file - promoters60/3436655
ataattttt

SEQ ID NO: 130006 - DNA, 9 bp, Unknown
  misc_feature (1)..( 9): Result.003 file - promoters60/3436655
ataatgttt

SEQ ID NO: 130007 - DNA, 7 bp, Unknown
  misc_feature (1)..( 7): Result.003 file - promoters60/3436655
atagata

SEQ ID NO: 130008 - DNA, 7 bp, Unknown
  misc_feature (1)..( 7): Result.003 file - promoters60/3436655
atatata

SEQ ID NO: 130009 - DNA, 7 bp, Unknown
  misc_feature (1)..( 7): Result.003 file - promoters60/3436655
acctaat

SEQ ID NO: 130010 - DNA, 7 bp, Unknown
  misc_feature (1)..( 7): Result.003 file - promoters60/3436655
accaaat

SEQ ID NO: 130011 - DNA, 6 bp, Unknown
  misc_feature (1)..( 6): Result.003 file - promoters60/3436655
tattat

SEQ ID NO: 130012 - DNA, 6 bp, Unknown
  misc_feature (1)..( 6): Result.003 file - promoters60/3436655
tattat

SEQ ID NO: 130013 - DNA, 6 bp, Unknown
  misc_feature (1)..( 6): Result.003 file - promoters60/3436655
aaaaaa

SEQ ID NO: 130014 - DNA, 6 bp, Unknown
  misc_feature (1)..( 6): Result.003 file - promoters60/3436655
aaaaaa

SEQ ID NO: 130015 - DNA, 6 bp, Unknown
  misc_feature (1)..( 6): Result.003 file - promoters60/3436655
gtcaaa

SEQ ID NO: 130016 - DNA, 6 bp, Unknown
  misc_feature (1)..( 6): Result.003 file - promoters60/3436655
gtcaaa

SEQ ID NO: 130017 - DNA, 6 bp, Unknown
  misc_feature (1)..( 6): Result.003 file - promoters60/3436655
ggcgag

SEQ ID NO: 130018 - DNA, 6 bp, Unknown
  misc_feature (1)..( 6): Result.003 file - promoters60/3436655
ggcgag

SEQ ID NO: 130019 - DNA, 8 bp, Unknown
  misc_feature (1)..( 8): Result.003 file - promoters60/3436701
gtcgttct

SEQ ID NO: 130020 - DNA, 8 bp, Unknown
  misc_feature (1)..( 8): Result.003 file - promoters60/3436701
gtccttct

SEQ ID NO: 130021 - DNA, 6 bp, Unknown
  misc_feature (1)..( 6): Result.003 file - promoters60/3436701
acatta

SEQ ID NO: 130022 - DNA, 6 bp, Unknown
  misc_feature (1)..( 6): Result.003 file - promoters60/3436701
acatta

SEQ ID NO: 130023 - DNA, 7 bp, Unknown
  misc_feature (1)..( 7): Result.003 file - promoters60/3436701
tcagcat

SEQ ID NO: 130024 - DNA, 7 bp, Unknown
  misc_feature (1)..( 7): Result.003 file - promoters60/3436701
tcatcat

SEQ ID NO: 130025 - DNA, 7 bp, Unknown
  misc_feature (1)..( 7): Result.003 file - promoters60/3436701
tctaatt

SEQ ID NO: 130026 - DNA, 7 bp, Unknown
  misc_feature (1)..( 7): Result.003 file - promoters60/3436701
tcttatt

SEQ ID NO: 130027 - DNA, 6 bp, Unknown
  misc_feature (1)..( 6): Result.003 file - promoters60/3436701
agatca

SEQ ID NO: 130028 - DNA, 6 bp, Unknown
  misc_feature (1)..( 6): Result.003 file - promoters60/3436701
agatca

SEQ ID NO: 130029 - DNA, 9 bp, Unknown
  misc_feature (1)..( 9): Result.003 file - promoters60/3436701
caccactat

SEQ ID NO: 130030 - DNA, 9 bp, Unknown
  misc_feature (1)..( 9): Result.003 file - promoters60/3436701
cacaactat

SEQ ID NO: 130031 - DNA, 8 bp, Unknown
  misc_feature (1)..( 8): Result.003 file - promoters60/3436701
ggactttg

SEQ ID NO: 130032 - DNA, 8 bp, Unknown
  misc_feature (1)..( 8): Result.003 file - promoters60/3436701
ggacgttg

SEQ ID NO: 130033 - DNA, 7 bp, Unknown
  misc_feature (1)..( 7): Result.003 file - promoters60/3436701
ttcgttt

SEQ ID NO: 130034 - DNA, 7 bp, Unknown
  misc_feature (1)..( 7): Result.003 file - promoters60/3436701
ttcattt

SEQ ID NO: 130035 - DNA, 6 bp, Unknown
  misc_feature (1)..( 6): Result.003 file - promoters60/3436701
aaattg

SEQ ID NO: 130036 - DNA, 6 bp, Unknown
  misc_feature (1)..( 6): Result.003 file - promoters60/3436701
aaattg

SEQ ID NO: 130037 - DNA, 7 bp, Unknown
  misc_feature (1)..( 7): Result.003 file - promoters60/3436701
tgatgaa

SEQ ID NO: 130038 - DNA, 7 bp, Unknown
  misc_feature (1)..( 7): Result.003 file - promoters60/3436701
tgaggaa

SEQ ID NO: 130039 - DNA, 6 bp, Unknown
  misc_feature (1)..( 6): Result.003 file - promoters60/3436701
gaagag

SEQ ID NO: 130040 - DNA, 6 bp, Unknown
  misc_feature (1)..( 6): Result.003 file - promoters60/3436701
gaagag

SEQ ID NO: 130041 - DNA, 7 bp, Unknown
  misc_feature (1)..( 7): Result.003 file - promoters60/3436701
aaaggag

SEQ ID NO: 130042 - DNA, 7 bp, Unknown
  misc_feature (1)..( 7): Result.003 file - promoters60/3436701
aaaagag

SEQ ID NO: 130043 - DNA, 10 bp, Unknown
  misc_feature (1)..( 10): Result.003 file - promoters60/3437072
tttgtttttc

SEQ ID NO: 130044 - DNA, 10 bp, Unknown
  misc_feature (1)..( 10): Result.003 file - promoters60/3437072
tttttttttc

SEQ ID NO: 130045 - DNA, 7 bp, Unknown
  misc_feature (1)..( 7): Result.003 file - promoters60/3437072
tttgtta

SEQ ID NO: 130046 - DNA, 7 bp, Unknown
  misc_feature (1)..( 7): Result.003 file - promoters60/3437072
tttatta

SEQ ID NO: 130047 - DNA, 6 bp, Unknown
  misc_feature (1)..( 6): Result.003 file - promoters60/3437072
taaacc

SEQ ID NO: 130048 - DNA, 6 bp, Unknown
  misc_feature (1)..( 6): Result.003 file - promoters60/3437072
taaacc

SEQ ID NO: 130049 - DNA, 6 bp, Unknown
  misc_feature (1)..( 6): Result.003 file - promoters60/3437072
tttccc

SEQ ID NO: 130050 - DNA, 6 bp, Unknown
  misc_feature (1)..( 6): Result.003 file - promoters60/3437072
tttccc

SEQ ID NO: 130051 - DNA, 6 bp, Unknown
  misc_feature (1)..( 6): Result.003 file - promoters60/3437072
taaatt

SEQ ID NO: 130052 - DNA, 6 bp, Unknown
  misc_feature (1)..( 6): Result.003 file - promoters60/3437072
taaatt

SEQ ID NO: 130053 - DNA, 8 bp, Unknown
  misc_feature (1)..( 8): Result.003 file - promoters60/3437072
caaccaag

SEQ ID NO: 130054 - DNA, 8 bp, Unknown
  misc_feature (1)..( 8): Result.003 file - promoters60/3437072
caaacaag

SEQ ID NO: 130055 - DNA, 6 bp, Unknown
  misc_feature (1)..( 6): Result.003 file - promoters60/3437072
actttt

SEQ ID NO: 130056 - DNA, 6 bp, Unknown
  misc_feature (1)..( 6): Result.003 file - promoters60/3437072
actttt

SEQ ID NO: 130057 - DNA, 8 bp, Unknown
  misc_feature (1)..( 8): Result.003 file - promoters60/3437072
ttaaatta

SEQ ID NO: 130058 - DNA, 8 bp, Unknown
  misc_feature (1)..( 8): Result.003 file - promoters60/3437072
ttaattta

SEQ ID NO: 130059 - DNA, 6 bp, Unknown
  misc_feature (1)..( 6): Result.003 file - promoters60/3437072
atttgt

SEQ ID NO: 130060 - DNA, 6 bp, Unknown
  misc_feature (1)..( 6): Result.003 file - promoters60/3437072
atttgt

SEQ ID NO: 130061 - DNA, 6 bp, Unknown
  misc_feature (1)..( 6): Result.003 file - promoters60/3437072
tctttt

SEQ ID NO: 130062 - DNA, 6 bp, Unknown
  misc_feature (1)..( 6): Result.003 file - promoters60/3437072
tctttt

SEQ ID NO: 130063 - DNA, 7 bp, Unknown
  misc_feature (1)..( 7): Result.003 file - promoters60/3437072
ttctttt

SEQ ID NO: 130064 - DNA, 7 bp, Unknown
  misc_feature (1)..( 7): Result.003 file - promoters60/3437072
ttccttt

SEQ ID NO: 130065 - DNA, 8 bp, Unknown
  misc_feature (1)..( 8): Result.003 file - promoters60/3437072
agagaaat

SEQ ID NO: 130066 - DNA, 8 bp, Unknown
  misc_feature (1)..( 8): Result.003 file - promoters60/3437072
agagcaat

SEQ ID NO: 130067 - DNA, 9 bp, Unknown
  misc_feature (1)..( 9): Result.003 file - promoters60/3437072
aatcaattt

SEQ ID NO: 130068 - DNA, 9 bp, Unknown
  misc_feature (1)..( 9): Result.003 file - promoters60/3437072
aataaattt

SEQ ID NO: 130069 - DNA, 10 bp, Unknown
  misc_feature (1)..( 10): Result.003 file - promoters60/3437072
cgattttaac

SEQ ID NO: 130070 - DNA, 10 bp, Unknown
  misc_feature (1)..( 10): Result.003 file - promoters60/3437072
cgaatttaac

SEQ ID NO: 130071 - DNA, 8 bp, Unknown
  misc_feature (1)..( 8): Result.003 file - promoters60/3437072
ttgttgtt

SEQ ID NO: 130072 - DNA, 8 bp, Unknown
  misc_feature (1)..( 8): Result.003 file - promoters60/3437072
ttgatgtt

SEQ ID NO: 130073 - DNA, 9 bp, Unknown
  misc_feature (1)..( 9): Result.003 file - promoters60/3437087
tgaaagtga

SEQ ID NO: 130074 - DNA, 9 bp, Unknown
  misc_feature (1)..( 9): Result.003 file - promoters60/3437087
agaacgtga

SEQ ID NO: 130075 - DNA, 9 bp, Unknown
  misc_feature (1)..( 9): Result.003 file - promoters60/3437087
tgaaagata

SEQ ID NO: 130076 - DNA, 9 bp, Unknown
  misc_feature (1)..( 9): Result.003 file - promoters60/3437087
atggttgaa

SEQ ID NO: 130077 - DNA, 9 bp, Unknown
  misc_feature (1)..( 9): Result.003 file - promoters60/3437087
atggctgaa

SEQ ID NO: 130078 - DNA, 9 bp, Unknown
  misc_feature (1)..( 9): Result.003 file - promoters60/3437087
atggttgaa

SEQ ID NO: 130079 - DNA, 8 bp, Unknown
  misc_feature (1)..( 8): Result.003 file - promoters60/3437150
ggaatagt

SEQ ID NO: 130080 - DNA, 8 bp, Unknown
  misc_feature (1)..( 8): Result.003 file - promoters60/3437150
ggattagc

SEQ ID NO: 130081 - DNA, 8 bp, Unknown
  misc_feature (1)..( 8): Result.003 file - promoters60/3437150
agaataga

SEQ ID NO: 130082 - DNA, 8 bp, Unknown
  misc_feature (1)..( 8): Result.003 file - promoters60/3437150
tgaaaaga

SEQ ID NO: 130083 - DNA, 9 bp, Unknown
  misc_feature (1)..( 9): Result.003 file - promoters60/3437150
aaagaagag

SEQ ID NO: 130084 - DNA, 9 bp, Unknown
  misc_feature (1)..( 9): Result.003 file - promoters60/3437150
tttgaagag

SEQ ID NO: 130085 - DNA, 9 bp, Unknown
  misc_feature (1)..( 9): Result.003 file - promoters60/3437150
aaacaagac

SEQ ID NO: 130086 - DNA, 9 bp, Unknown
  misc_feature (1)..( 9): Result.003 file - promoters60/3437150
aaataagta

SEQ ID NO: 130087 - DNA, 8 bp, Unknown
  misc_feature (1)..( 8): Result.003 file - promoters60/3437150
aaagaaga

SEQ ID NO: 130088 - DNA, 8 bp, Unknown
  misc_feature (1)..( 8): Result.003 file - promoters60/3437150
aaaaaagg

SEQ ID NO: 130089 - DNA, 8 bp, Unknown
  misc_feature (1)..( 8): Result.003 file - promoters60/3437150
aaacaaga

SEQ ID NO: 130090 - DNA, 8 bp, Unknown
  misc_feature (1)..( 8): Result.003 file - promoters60/3437150
aaataagt

SEQ ID NO: 130091 - DNA, 8 bp, Unknown
  misc_feature (1)..( 8): Result.003 file - promoters60/3437150
aaaaatac

SEQ ID NO: 130092 - DNA, 9 bp, Unknown
  misc_feature (1)..( 9): Result.003 file - promoters60/3437150
gttataaaa

SEQ ID NO: 130093 - DNA, 9 bp, Unknown
  misc_feature (1)..( 9): Result.003 file - promoters60/3437150
atcataaaa

SEQ ID NO: 130094 - DNA, 9 bp, Unknown
  misc_feature (1)..( 9): Result.003 file - promoters60/3437150
ttgataaaa

SEQ ID NO: 130095 - DNA, 9 bp, Unknown
  misc_feature (1)..( 9): Result.003 file - promoters60/3437150
tatataaat

SEQ ID NO: 130096 - DNA, 15 bp, Unknown
  misc_feature (1)..( 15): Result.003 file - promoters60/3437150
tggattttgaatttt

SEQ ID NO: 130097 - DNA, 15 bp, Unknown
  misc_feature (1)..( 15): Result.003 file - promoters60/3437150
gtttatttgaattaa

SEQ ID NO: 130098 - DNA, 15 bp, Unknown
  misc_feature (1)..( 15): Result.003 file - promoters60/3437150
gagaacttgacttaa

SEQ ID NO: 130099 - DNA, 15 bp, Unknown
  misc_feature (1)..( 15): Result.003 file - promoters60/3437150
gtttatttgaacaaa

SEQ ID NO: 130100 - DNA, 9 bp, Unknown
  misc_feature (1)..( 9): Result.003 file - promoters60/3437193
ttgagttta

SEQ ID NO: 130101 - DNA, 9 bp, Unknown
  misc_feature (1)..( 9): Result.003 file - promoters60/3437193
ttgactttt

SEQ ID NO: 130102 - DNA, 10 bp, Unknown
  misc_feature (1)..( 10): Result.003 file - promoters60/3437193
ggatagttta

SEQ ID NO: 130103 - DNA, 9 bp, Unknown
  misc_feature (1)..( 9): Result.003 file - promoters60/3437193
ttggcttct

SEQ ID NO: 130104 - DNA, 9 bp, Unknown
  misc_feature (1)..( 9): Result.003 file - promoters60/3437193
tatattttt

SEQ ID NO: 130105 - DNA, 10 bp, Unknown
  misc_feature (1)..( 10): Result.003 file - promoters60/3437193
tatatgttta

SEQ ID NO: 130106 - DNA, 11 bp, Unknown
  misc_feature (1)..( 11): Result.003 file - promoters60/3437193
aaaacaaacgt

SEQ ID NO: 130107 - DNA, 11 bp, Unknown
  misc_feature (1)..( 11): Result.003 file - promoters60/3437193
ggaacaaaacc

SEQ ID NO: 130108 - DNA, 11 bp, Unknown
  misc_feature (1)..( 11): Result.003 file - promoters60/3437193
tgaaaaaaaaa

SEQ ID NO: 130109 - DNA, 11 bp, Unknown
  misc_feature (1)..( 11): Result.003 file - promoters60/3437193
ataaataaatt

SEQ ID NO: 130110 - DNA, 11 bp, Unknown
  misc_feature (1)..( 11): Result.003 file - promoters60/3437193
caaacaaatgt

SEQ ID NO: 130111 - DNA, 11 bp, Unknown
  misc_feature (1)..( 11): Result.003 file - promoters60/3437193
ttaaaaaaaga

SEQ ID NO: 130112 - DNA, 11 bp, Unknown
  misc_feature (1)..( 11): Result.003 file - promoters60/3437193
tcaaaacaatt

SEQ ID NO: 130113 - DNA, 9 bp, Unknown
  misc_feature (1)..( 9): Result.003 file - promoters60/3437193
aaaaataaa

SEQ ID NO: 130114 - DNA, 9 bp, Unknown
  misc_feature (1)..( 9): Result.003 file - promoters60/3437193
aaaaatata

SEQ ID NO: 130115 - DNA, 9 bp, Unknown
  misc_feature (1)..( 9): Result.003 file - promoters60/3437193
aaaattaat

SEQ ID NO: 130116 - DNA, 9 bp, Unknown
  misc_feature (1)..( 9): Result.003 file - promoters60/3437193
taaaataca

SEQ ID NO: 130117 - DNA, 9 bp, Unknown
  misc_feature (1)..( 9): Result.003 file - promoters60/3437193
aaaaattta

SEQ ID NO: 130118 - DNA, 9 bp, Unknown
  misc_feature (1)..( 9): Result.003 file - promoters60/3437193
gataatatt

SEQ ID NO: 130119 - DNA, 10 bp, Unknown
  misc_feature (1)..( 10): Result.003 file - promoters60/3437193
aaataaaagc

SEQ ID NO: 130120 - DNA, 10 bp, Unknown
  misc_feature (1)..( 10): Result.003 file - promoters60/3437193
atataaaaaa

SEQ ID NO: 130121 - DNA, 10 bp, Unknown
  misc_feature (1)..( 10): Result.003 file - promoters60/3437193
caataaaatt

SEQ ID NO: 130122 - DNA, 10 bp, Unknown
  misc_feature (1)..( 10): Result.003 file - promoters60/3437193
ttataaaata

SEQ ID NO: 130123 - DNA, 10 bp, Unknown
  misc_feature (1)..( 10): Result.003 file - promoters60/3437193
tattaaaata

SEQ ID NO: 130124 - DNA, 10 bp, Unknown
  misc_feature (1)..( 10): Result.003 file - promoters60/3437193
agataatatt

SEQ ID NO: 130125 - DNA, 9 bp, Unknown
  misc_feature (1)..( 9): Result.003 file - promoters60/3437193
gaaaaacaa

SEQ ID NO: 130126 - DNA, 9 bp, Unknown
  misc_feature (1)..( 9): Result.003 file - promoters60/3437193
aaaaaactc

SEQ ID NO: 130127 - DNA, 9 bp, Unknown
  misc_feature (1)..( 9): Result.003 file - promoters60/3437193
gaaaaaata

SEQ ID NO: 130128 - DNA, 10 bp, Unknown
  misc_feature (1)..( 10): Result.003 file - promoters60/3437193
ttcaaaacaa

SEQ ID NO: 130129 - DNA, 10 bp, Unknown
  misc_feature (1)..( 10): Result.003 file - promoters60/3437193
gaacaaaacc

SEQ ID NO: 130130 - DNA, 10 bp, Unknown
  misc_feature (1)..( 10): Result.003 file - promoters60/3437193
taaaaaatat

SEQ ID NO: 130131 - DNA, 11 bp, Unknown
  misc_feature (1)..( 11): Result.003 file - promoters60/3437193
cattatatata

SEQ ID NO: 130132 - DNA, 11 bp, Unknown
  misc_feature (1)..( 11): Result.003 file - promoters60/3437193
acatatataaa

SEQ ID NO: 130133 - DNA, 11 bp, Unknown
  misc_feature (1)..( 11): Result.003 file - promoters60/3437193
gcctatatata

SEQ ID NO: 130134 - DNA, 11 bp, Unknown
  misc_feature (1)..( 11): Result.003 file - promoters60/3437193
ttgtatatata

SEQ ID NO: 130135 - DNA, 11 bp, Unknown
  misc_feature (1)..( 11): Result.003 file - promoters60/3437193
ccttataaata

SEQ ID NO: 130136 - DNA, 11 bp, Unknown
  misc_feature (1)..( 11): Result.003 file - promoters60/3437193
ccatataaatt

SEQ ID NO: 130137 - DNA, 11 bp, Unknown
  misc_feature (1)..( 11): Result.003 file - promoters60/3437193
ccttaaaaacc

SEQ ID NO: 130138 - DNA, 16 bp, Unknown
  misc_feature (1)..( 16): Result.003 file - promoters60/3437244
aaaatattaaccttga

SEQ ID NO: 130139 - DNA, 16 bp, Unknown
  misc_feature (1)..( 16): Result.003 file - promoters60/3437244
taaaaattaaatgcta

SEQ ID NO: 130140 - DNA, 16 bp, Unknown
  misc_feature (1)..( 16): Result.003 file - promoters60/3437244
taaatattagtatttg

SEQ ID NO: 130141 - DNA, 16 bp, Unknown
  misc_feature (1)..( 16): Result.003 file - promoters60/3437244
ccaaaattgaccctga

SEQ ID NO: 130142 - DNA, 16 bp, Unknown
  misc_feature (1)..( 16): Result.003 file - promoters60/3437244
gtaaaatttcataacc

SEQ ID NO: 130143 - DNA, 16 bp, Unknown
  misc_feature (1)..( 16): Result.003 file - promoters60/3437244
taacaattctaatttt

SEQ ID NO: 130144 - DNA, 16 bp, Unknown
  misc_feature (1)..( 16): Result.003 file - promoters60/3437244
ccaaaattcattataa

SEQ ID NO: 130145 - DNA, 9 bp, Unknown
  misc_feature (1)..( 9): Result.003 file - promoters60/3437244
aaaaataaa

SEQ ID NO: 130146 - DNA, 9 bp, Unknown
  misc_feature (1)..( 9): Result.003 file - promoters60/3437244
aaaattaat

SEQ ID NO: 130147 - DNA, 9 bp, Unknown
  misc_feature (1)..( 9): Result.003 file - promoters60/3437244
taaaataca

SEQ ID NO: 130148 - DNA, 9 bp, Unknown
  misc_feature (1)..( 9): Result.003 file - promoters60/3437244
aaaaattta

SEQ ID NO: 130149 - DNA, 9 bp, Unknown
  misc_feature (1)..( 9): Result.003 file - promoters60/3437244
aaaaatcaa

SEQ ID NO: 130150 - DNA, 9 bp, Unknown
  misc_feature (1)..( 9): Result.003 file - promoters60/3437244
gataatatt

SEQ ID NO: 130151 - DNA, 13 bp, Unknown
  misc_feature (1)..( 13): Result.003 file - promoters60/3437244
aataaataaaagc

SEQ ID NO: 130152 - DNA, 13 bp, Unknown
  misc_feature (1)..( 13): Result.003 file - promoters60/3437244
aaacaataaaatt

SEQ ID NO: 130153 - DNA, 13 bp, Unknown
  misc_feature (1)..( 13): Result.003 file - promoters60/3437244
acattataaaata

SEQ ID NO: 130154 - DNA, 13 bp, Unknown
  misc_feature (1)..( 13): Result.003 file - promoters60/3437244
aggagataatatt

SEQ ID NO: 130155 - DNA, 13 bp, Unknown
  misc_feature (1)..( 13): Result.003 file - promoters60/3437244
aaaaaatcaaaat

SEQ ID NO: 130156 - DNA, 14 bp, Unknown
  misc_feature (1)..( 14): Result.003 file - promoters60/3437244
cacgcatctaaaga

SEQ ID NO: 130157 - DNA, 14 bp, Unknown
  misc_feature (1)..( 14): Result.003 file - promoters60/3437244
aaaatttacaaact

SEQ ID NO: 130158 - DNA, 8 bp, Unknown
  misc_feature (1)..( 8): Result.003 file - promoters60/3437244
aaaacaaa

SEQ ID NO: 130159 - DNA, 8 bp, Unknown
  misc_feature (1)..( 8): Result.003 file - promoters60/3437244
taaataaa

SEQ ID NO: 130160 - DNA, 8 bp, Unknown
  misc_feature (1)..( 8): Result.003 file - promoters60/3437244
caaacaaa

SEQ ID NO: 130161 - DNA, 8 bp, Unknown
  misc_feature (1)..( 8): Result.003 file - promoters60/3437244
taaaaaaa

SEQ ID NO: 130162 - DNA, 8 bp, Unknown
  misc_feature (1)..( 8): Result.003 file - promoters60/3437244
aaaacaat

SEQ ID NO: 130163 - DNA, 8 bp, Unknown
  misc_feature (1)..( 8): Result.003 file - promoters60/3437244
aaaatgaa

SEQ ID NO: 130164 - DNA, 10 bp, Unknown
  misc_feature (1)..( 10): Result.003 file - promoters60/3437244
atattattag

SEQ ID NO: 130165 - DNA, 10 bp, Unknown
  misc_feature (1)..( 10): Result.003 file - promoters60/3437244
atattattag

SEQ ID NO: 130166 - DNA, 10 bp, Unknown
  misc_feature (1)..( 10): Result.003 file - promoters60/3437244
ttattatatt

SEQ ID NO: 130167 - DNA, 10 bp, Unknown
  misc_feature (1)..( 10): Result.003 file - promoters60/3437244
gtatttttat

SEQ ID NO: 130168 - DNA, 10 bp, Unknown
  misc_feature (1)..( 10): Result.003 file - promoters60/3437244
atataattat

SEQ ID NO: 130169 - DNA, 11 bp, Unknown
  misc_feature (1)..( 11): Result.003 file - promoters60/3437244
aaatgaattta

SEQ ID NO: 130170 - DNA, 11 bp, Unknown
  misc_feature (1)..( 11): Result.003 file - promoters60/3437244
atgtttgttta

SEQ ID NO: 130171 - DNA, 11 bp, Unknown
  misc_feature (1)..( 11): Result.003 file - promoters60/3437244
ctttttatttc

SEQ ID NO: 130172 - DNA, 11 bp, Unknown
  misc_feature (1)..( 11): Result.003 file - promoters60/3437244
acttttgtttc

SEQ ID NO: 130173 - DNA, 11 bp, Unknown
  misc_feature (1)..( 11): Result.003 file - promoters60/3437244
acatttttttc

SEQ ID NO: 130174 - DNA, 11 bp, Unknown
  misc_feature (1)..( 11): Result.003 file - promoters60/3437244
ttaattctttt

SEQ ID NO: 130175 - DNA, 11 bp, Unknown
  misc_feature (1)..( 11): Result.003 file - promoters60/3437244
cttcttctttg

SEQ ID NO: 130176 - DNA, 15 bp, Unknown
  misc_feature (1)..( 15): Result.003 file - promoters60/3437244
caaccaactatccaa

SEQ ID NO: 130177 - DNA, 15 bp, Unknown
  misc_feature (1)..( 15): Result.003 file - promoters60/3437244
aaaccaatgtttatt

SEQ ID NO: 130178 - DNA, 15 bp, Unknown
  misc_feature (1)..( 15): Result.003 file - promoters60/3437244
aaatcaaatagtttt

SEQ ID NO: 130179 - DNA, 15 bp, Unknown
  misc_feature (1)..( 15): Result.003 file - promoters60/3437244
acatcatatacttta

SEQ ID NO: 130180 - DNA, 15 bp, Unknown
  misc_feature (1)..( 15): Result.003 file - promoters60/3437244
attaaccttactttt

SEQ ID NO: 130181 - DNA, 15 bp, Unknown
  misc_feature (1)..( 15): Result.003 file - promoters60/3437244
tttatttttacgttt

SEQ ID NO: 130182 - DNA, 11 bp, Unknown
  misc_feature (1)..( 11): Result.003 file - promoters60/3437244
aaattaaaatc

SEQ ID NO: 130183 - DNA, 11 bp, Unknown
  misc_feature (1)..( 11): Result.003 file - promoters60/3437244
ccgttaaaaat

SEQ ID NO: 130184 - DNA, 11 bp, Unknown
  misc_feature (1)..( 11): Result.003 file - promoters60/3437244
catataaaaat

SEQ ID NO: 130185 - DNA, 11 bp, Unknown
  misc_feature (1)..( 11): Result.003 file - promoters60/3437244
cgtttaaataa

SEQ ID NO: 130186 - DNA, 11 bp, Unknown
  misc_feature (1)..( 11): Result.003 file - promoters60/3437244
cgtttagtgtc

SEQ ID NO: 130187 - DNA, 11 bp, Unknown
  misc_feature (1)..( 11): Result.003 file - promoters60/3437244
accttactttt

SEQ ID NO: 130188 - DNA, 17 bp, Unknown
  misc_feature (1)..( 17): Result.003 file - promoters60/3437244
tatccaaaatgaaaaac

SEQ ID NO: 130189 - DNA, 17 bp, Unknown
  misc_feature (1)..( 17): Result.003 file - promoters60/3437244
gagccaaaatgaacctt

SEQ ID NO: 130190 - DNA, 17 bp, Unknown
  misc_feature (1)..( 17): Result.003 file - promoters60/3437244
attgtttaatgaaattc

SEQ ID NO: 130191 - DNA, 17 bp, Unknown
  misc_feature (1)..( 17): Result.003 file - promoters60/3437244
tatacaaactattcaaa

SEQ ID NO: 130192 - DNA, 17 bp, Unknown
  misc_feature (1)..( 17): Result.003 file - promoters60/3437244
tccaaccaatgatattc

SEQ ID NO: 130193 - DNA, 17 bp, Unknown
  misc_feature (1)..( 17): Result.003 file - promoters60/3437244
caacggttgtgatatac

SEQ ID NO: 130194 - DNA, 11 bp, Unknown
  misc_feature (1)..( 11): Result.003 file - promoters60/3437244
tatccaaaatt

SEQ ID NO: 130195 - DNA, 11 bp, Unknown
  misc_feature (1)..( 11): Result.003 file - promoters60/3437244
atataaaaatt

SEQ ID NO: 130196 - DNA, 11 bp, Unknown
  misc_feature (1)..( 11): Result.003 file - promoters60/3437244
cgttaaaaatc

SEQ ID NO: 130197 - DNA, 11 bp, Unknown
  misc_feature (1)..( 11): Result.003 file - promoters60/3437244
cgtttaaataa

SEQ ID NO: 130198 - DNA, 11 bp, Unknown
  misc_feature (1)..( 11): Result.003 file - promoters60/3437244
cgtttagtgtc

SEQ ID NO: 130199 - DNA, 11 bp, Unknown
  misc_feature (1)..( 11): Result.003 file - promoters60/3437244
accttactttt

SEQ ID NO: 130200 - DNA, 10 bp, Unknown
  misc_feature (1)..( 10): Result.003 file - promoters60/3437331
cgatttgtta

SEQ ID NO: 130201 - DNA, 10 bp, Unknown
  misc_feature (1)..( 10): Result.003 file - promoters60/3437331
gattttgttc

SEQ ID NO: 130202 - DNA, 10 bp, Unknown
  misc_feature (1)..( 10): Result.003 file - promoters60/3437331
ttatttgtgt

SEQ ID NO: 130203 - DNA, 10 bp, Unknown
  misc_feature (1)..( 10): Result.003 file - promoters60/3437331
ttacttgacg

SEQ ID NO: 130204 - DNA, 10 bp, Unknown
  misc_feature (1)..( 10): Result.003 file - promoters60/3437331
ttatatgtat

SEQ ID NO: 130205 - DNA, 10 bp, Unknown
  misc_feature (1)..( 10): Result.003 file - promoters60/3437331
ctatgtgtgt

SEQ ID NO: 130206 - DNA, 14 bp, Unknown
  misc_feature (1)..( 14): Result.003 file - promoters60/3437331
ccgaatttctccca

SEQ ID NO: 130207 - DNA, 14 bp, Unknown
  misc_feature (1)..( 14): Result.003 file - promoters60/3437331
tcgaatttgtccca

SEQ ID NO: 130208 - DNA, 14 bp, Unknown
  misc_feature (1)..( 14): Result.003 file - promoters60/3437331
ccgcattaatgggc

SEQ ID NO: 130209 - DNA, 14 bp, Unknown
  misc_feature (1)..( 14): Result.003 file - promoters60/3437331
aagaaattgagaaa

SEQ ID NO: 130210 - DNA, 15 bp, Unknown
  misc_feature (1)..( 15): Result.003 file - promoters60/3437331
cagatatttttggcg

SEQ ID NO: 130211 - DNA, 12 bp, Unknown
  misc_feature (1)..( 12): Result.003 file - promoters60/3437331
aaccagattaaa

SEQ ID NO: 130212 - DNA, 12 bp, Unknown
  misc_feature (1)..( 12): Result.003 file - promoters60/3437331
tcatagataaaa

SEQ ID NO: 130213 - DNA, 12 bp, Unknown
  misc_feature (1)..( 12): Result.003 file - promoters60/3437331
aaccaaattaca

SEQ ID NO: 130214 - DNA, 12 bp, Unknown
  misc_feature (1)..( 12): Result.003 file - promoters60/3437331
caaaagagaaag

SEQ ID NO: 130215 - DNA, 12 bp, Unknown
  misc_feature (1)..( 12): Result.003 file - promoters60/3437331
atataaaatacc

SEQ ID NO: 130216 - DNA, 9 bp, Unknown
  misc_feature (1)..( 9): Result.003 file - promoters60/3437367
tttacacaa

SEQ ID NO: 130217 - DNA, 9 bp, Unknown
  misc_feature (1)..( 9): Result.003 file - promoters60/3437367
ttttcactg

SEQ ID NO: 130218 - DNA, 9 bp, Unknown
  misc_feature (1)..( 9): Result.003 file - promoters60/3437367
atttgactg

SEQ ID NO: 130219 - DNA, 10 bp, Unknown
  misc_feature (1)..( 10): Result.003 file - promoters60/3437367
agtttttaag

SEQ ID NO: 130220 - DNA, 10 bp, Unknown
  misc_feature (1)..( 10): Result.003 file - promoters60/3437367
agtgtttgat

SEQ ID NO: 130221 - DNA, 10 bp, Unknown
  misc_feature (1)..( 10): Result.003 file - promoters60/3437367
catttttatt

SEQ ID NO: 130222 - DNA, 10 bp, Unknown
  misc_feature (1)..( 10): Result.003 file - promoters60/3437367
gattattatt

SEQ ID NO: 130223 - DNA, 8 bp, Unknown
  misc_feature (1)..( 8): Result.003 file - promoters60/3437367
acaaacta

SEQ ID NO: 130224 - DNA, 8 bp, Unknown
  misc_feature (1)..( 8): Result.003 file - promoters60/3437367
acaaacga

SEQ ID NO: 130225 - DNA, 8 bp, Unknown
  misc_feature (1)..( 8): Result.003 file - promoters60/3437367
aaaaaaaa

SEQ ID NO: 130226 - DNA, 13 bp, Unknown
  misc_feature (1)..( 13): Result.003 file - promoters60/3437367
aaaattattaaaa

SEQ ID NO: 130227 - DNA, 13 bp, Unknown
  misc_feature (1)..( 13): Result.003 file - promoters60/3437367
aaatttagtaagc

SEQ ID NO: 130228 - DNA, 13 bp, Unknown
  misc_feature (1)..( 13): Result.003 file - promoters60/3437367
tcaattactaaaa

SEQ ID NO: 130229 - DNA, 8 bp, Unknown
  misc_feature (1)..( 8): Result.003 file - promoters60/3437367
attttgaa

SEQ ID NO: 130230 - DNA, 8 bp, Unknown
  misc_feature (1)..( 8): Result.003 file - promoters60/3437367
attgtgag

SEQ ID NO: 130231 - DNA, 8 bp, Unknown
  misc_feature (1)..( 8): Result.003 file - promoters60/3437367
gtttcgaa

SEQ ID NO: 130232 - DNA, 7 bp, Unknown
  misc_feature (1)..( 7): Result.003 file - promoters60/3437367
tttttaa

SEQ ID NO: 130233 - DNA, 7 bp, Unknown
  misc_feature (1)..( 7): Result.003 file - promoters60/3437367
attttaa

SEQ ID NO: 130234 - DNA, 7 bp, Unknown
  misc_feature (1)..( 7): Result.003 file - promoters60/3437367
attttag

SEQ ID NO: 130235 - DNA, 6 bp, Unknown
  misc_feature (1)..( 6): Result.003 file - promoters60/3437367
aaaaaa

SEQ ID NO: 130236 - DNA, 6 bp, Unknown
  misc_feature (1)..( 6): Result.003 file - promoters60/3437367
aaaaaa

SEQ ID NO: 130237 - DNA, 6 bp, Unknown
  misc_feature (1)..( 6): Result.003 file - promoters60/3437367
aaaaaa

SEQ ID NO: 130238 - DNA, 17 bp, Unknown
  misc_feature (1)..( 17): Result.003 file - promoters60/3437375
gctctctcgtataattc

SEQ ID NO: 130239 - DNA, 17 bp, Unknown
  misc_feature (1)..( 17): Result.003 file - promoters60/3437375
ctccactcttatgattt

SEQ ID NO: 130240 - DNA, 17 bp, Unknown
  misc_feature (1)..( 17): Result.003 file - promoters60/3437375
tctacttcttattggaa

SEQ ID NO: 130241 - DNA, 18 bp, Unknown
  misc_feature (1)..( 18): Result.003 file - promoters60/3437375
caagaacttccatgtttt

SEQ ID NO: 130242 - DNA, 17 bp, Unknown
  misc_feature (1)..( 17): Result.003 file - promoters60/3437375
ctctactcttggaatat

SEQ ID NO: 130243 - DNA, 17 bp, Unknown
  misc_feature (1)..( 17): Result.003 file - promoters60/3437375
aaatgaacttctgatat

SEQ ID NO: 130244 - DNA, 18 bp, Unknown
  misc_feature (1)..( 18): Result.003 file - promoters60/3437375
tctatttctctattctca

SEQ ID NO: 130245 - DNA, 13 bp, Unknown
  misc_feature (1)..( 13): Result.003 file - promoters60/3437375
aaagtttttgtaa

SEQ ID NO: 130246 - DNA, 13 bp, Unknown
  misc_feature (1)..( 13): Result.003 file - promoters60/3437375
ttagttttgtaaa

SEQ ID NO: 130247 - DNA, 13 bp, Unknown
  misc_feature (1)..( 13): Result.003 file - promoters60/3437375
aaaatttcactag

SEQ ID NO: 130248 - DNA, 13 bp, Unknown
  misc_feature (1)..( 13): Result.003 file - promoters60/3437375
caagtttcctcta

SEQ ID NO: 130249 - DNA, 13 bp, Unknown
  misc_feature (1)..( 13): Result.003 file - promoters60/3437375
aatttttactttt

SEQ ID NO: 130250 - DNA, 13 bp, Unknown
  misc_feature (1)..( 13): Result.003 file - promoters60/3437375
tctgttttcttca

SEQ ID NO: 130251 - DNA, 11 bp, Unknown
  misc_feature (1)..( 11): Result.003 file - promoters60/3437660
aaaagatagca

SEQ ID NO: 130252 - DNA, 11 bp, Unknown
  misc_feature (1)..( 11): Result.003 file - promoters60/3437660
gaaatatataa

SEQ ID NO: 130253 - DNA, 11 bp, Unknown
  misc_feature (1)..( 11): Result.003 file - promoters60/3437660
gaaatagattg

SEQ ID NO: 130254 - DNA, 11 bp, Unknown
  misc_feature (1)..( 11): Result.003 file - promoters60/3437660
ttaatttatta

SEQ ID NO: 130255 - DNA, 11 bp, Unknown
  misc_feature (1)..( 11): Result.003 file - promoters60/3437660
atgattacttt

SEQ ID NO: 130256 - DNA, 8 bp, Unknown
  misc_feature (1)..( 8): Result.003 file - promoters60/3437671
atataata

SEQ ID NO: 130257 - DNA, 8 bp, Unknown
  misc_feature (1)..( 8): Result.003 file - promoters60/3437671
atatcata

SEQ ID NO: 130258 - DNA, 6 bp, Unknown
  misc_feature (1)..( 6): Result.003 file - promoters60/3437671
atttga

SEQ ID NO: 130259 - DNA, 6 bp, Unknown
  misc_feature (1)..( 6): Result.003 file - promoters60/3437671
atttga

SEQ ID NO: 130260 - DNA, 7 bp, Unknown
  misc_feature (1)..( 7): Result.003 file - promoters60/3437671
ttaggtc

SEQ ID NO: 130261 - DNA, 7 bp, Unknown
  misc_feature (1)..( 7): Result.003 file - promoters60/3437671
ttaggtg

SEQ ID NO: 130262 - DNA, 7 bp, Unknown
  misc_feature (1)..( 7): Result.003 file - promoters60/3437671
ttatgtg

SEQ ID NO: 130263 - DNA, 6 bp, Unknown
  misc_feature (1)..( 6): Result.003 file - promoters60/3437671
aaatgg

SEQ ID NO: 130264 - DNA, 6 bp, Unknown
  misc_feature (1)..( 6): Result.003 file - promoters60/3437671
aaatgg

SEQ ID NO: 130265 - DNA, 7 bp, Unknown
  misc_feature (1)..( 7): Result.003 file - promoters60/3437671
cacctaa

SEQ ID NO: 130266 - DNA, 7 bp, Unknown
  misc_feature (1)..( 7): Result.003 file - promoters60/3437671
cacttaa

SEQ ID NO: 130267 - DNA, 7 bp, Unknown
  misc_feature (1)..( 7): Result.003 file - promoters60/3437671
aaaacga

SEQ ID NO: 130268 - DNA, 7 bp, Unknown
  misc_feature (1)..( 7): Result.003 file - promoters60/3437671
aaaacga

SEQ ID NO: 130269 - DNA, 10 bp, Unknown
  misc_feature (1)..( 10): Result.003 file - promoters60/3437671
ttagataatt

SEQ ID NO: 130270 - DNA, 10 bp, Unknown
  misc_feature (1)..( 10): Result.003 file - promoters60/3437671
ttagataatt

SEQ ID NO: 130271 - DNA, 6 bp, Unknown
  misc_feature (1)..( 6): Result.003 file - promoters60/3437671
aaatta

SEQ ID NO: 130272 - DNA, 6 bp, Unknown
  misc_feature (1)..( 6): Result.003 file - promoters60/3437671
aaatta

SEQ ID NO: 130273 - DNA, 7 bp, Unknown
  misc_feature (1)..( 7): Result.003 file - promoters60/3437671
catctga

SEQ ID NO: 130274 - DNA, 7 bp, Unknown
  misc_feature (1)..( 7): Result.003 file - promoters60/3437671
catttga

SEQ ID NO: 130275 - DNA, 6 bp, Unknown
  misc_feature (1)..( 6): Result.003 file - promoters60/3437671
atttat

SEQ ID NO: 130276 - DNA, 6 bp, Unknown
  misc_feature (1)..( 6): Result.003 file - promoters60/3437671
atttat

SEQ ID NO: 130277 - DNA, 6 bp, Unknown
  misc_feature (1)..( 6): Result.003 file - promoters60/3437671
tcatat

SEQ ID NO: 130278 - DNA, 6 bp, Unknown
  misc_feature (1)..( 6): Result.003 file - promoters60/3437671
tcatat

SEQ ID NO: 130279 - DNA, 8 bp, Unknown
  misc_feature (1)..( 8): Result.003 file - promoters60/3437671
atatatac

SEQ ID NO: 130280 - DNA, 8 bp, Unknown
  misc_feature (1)..( 8): Result.003 file - promoters60/3437671
atacatac

SEQ ID NO: 130281 - DNA, 6 bp, Unknown
  misc_feature (1)..( 6): Result.003 file - promoters60/3437671
ttcaaa

SEQ ID NO: 130282 - DNA, 6 bp, Unknown
  misc_feature (1)..( 6): Result.003 file - promoters60/3437671
ttcaaa

SEQ ID NO: 130283 - DNA, 7 bp, Unknown
  misc_feature (1)..( 7): Result.003 file - promoters60/3437776
ctagatt

SEQ ID NO: 130284 - DNA, 7 bp, Unknown
  misc_feature (1)..( 7): Result.003 file - promoters60/3437776
ctacatt

SEQ ID NO: 130285 - DNA, 8 bp, Unknown
  misc_feature (1)..( 8): Result.003 file - promoters60/3437776
ttataaat

SEQ ID NO: 130286 - DNA, 8 bp, Unknown
  misc_feature (1)..( 8): Result.003 file - promoters60/3437776
ttataaat

SEQ ID NO: 130287 - DNA, 6 bp, Unknown
  misc_feature (1)..( 6): Result.003 file - promoters60/3437776
agattt

SEQ ID NO: 130288 - DNA, 6 bp, Unknown
  misc_feature (1)..( 6): Result.003 file - promoters60/3437776
agattt

SEQ ID NO: 130289 - DNA, 7 bp, Unknown
  misc_feature (1)..( 7): Result.003 file - promoters60/3437776
atttaca

SEQ ID NO: 130290 - DNA, 7 bp, Unknown
  misc_feature (1)..( 7): Result.003 file - promoters60/3437776
atttacc

SEQ ID NO: 130291 - DNA, 7 bp, Unknown
  misc_feature (1)..( 7): Result.003 file - promoters60/3437776
attaacc

SEQ ID NO: 130292 - DNA, 8 bp, Unknown
  misc_feature (1)..( 8): Result.003 file - promoters60/3437776
atatctga

SEQ ID NO: 130293 - DNA, 8 bp, Unknown
  misc_feature (1)..( 8): Result.003 file - promoters60/3437776
atatatga

SEQ ID NO: 130294 - DNA, 7 bp, Unknown
  misc_feature (1)..( 7): Result.003 file - promoters60/3437776
tttaata

SEQ ID NO: 130295 - DNA, 7 bp, Unknown
  misc_feature (1)..( 7): Result.003 file - promoters60/3437776
tttgata

SEQ ID NO: 130296 - DNA, 6 bp, Unknown
  misc_feature (1)..( 6): Result.003 file - promoters60/3437776
gtgtgt

SEQ ID NO: 130297 - DNA, 6 bp, Unknown
  misc_feature (1)..( 6): Result.003 file - promoters60/3437776
gtgtgt

SEQ ID NO: 130298 - DNA, 6 bp, Unknown
  misc_feature (1)..( 6): Result.003 file - promoters60/3437776
acagct

SEQ ID NO: 130299 - DNA, 6 bp, Unknown
  misc_feature (1)..( 6): Result.003 file - promoters60/3437776
acagct

SEQ ID NO: 130300 - DNA, 6 bp, Unknown
  misc_feature (1)..( 6): Result.003 file - promoters60/3437776
ccatat

SEQ ID NO: 130301 - DNA, 6 bp, Unknown
  misc_feature (1)..( 6): Result.003 file - promoters60/3437776
ccatat

SEQ ID NO: 130302 - DNA, 8 bp, Unknown
  misc_feature (1)..( 8): Result.003 file - promoters60/3437776
tgcgtcag

SEQ ID NO: 130303 - DNA, 8 bp, Unknown
  misc_feature (1)..( 8): Result.003 file - promoters60/3437776
tgcctcag

SEQ ID NO: 130304 - DNA, 7 bp, Unknown
  misc_feature (1)..( 7): Result.003 file - promoters60/3437776
ttctgtt

SEQ ID NO: 130305 - DNA, 7 bp, Unknown
  misc_feature (1)..( 7): Result.003 file - promoters60/3437776
ttcggtt

SEQ ID NO: 130306 - DNA, 8 bp, Unknown
  misc_feature (1)..( 8): Result.003 file - promoters60/3437776
gtgtgtat

SEQ ID NO: 130307 - DNA, 8 bp, Unknown
  misc_feature (1)..( 8): Result.003 file - promoters60/3437776
gtgggtat

SEQ ID NO: 130308 - DNA, 12 bp, Unknown
  misc_feature (1)..( 12): Result.003 file - promoters60/3437779
ctatttttacac

SEQ ID NO: 130309 - DNA, 12 bp, Unknown
  misc_feature (1)..( 12): Result.003 file - promoters60/3437779
ctaattttaatt

SEQ ID NO: 130310 - DNA, 12 bp, Unknown
  misc_feature (1)..( 12): Result.003 file - promoters60/3437779
ataattttagag

SEQ ID NO: 130311 - DNA, 12 bp, Unknown
  misc_feature (1)..( 12): Result.003 file - promoters60/3437779
ttagtttgagag

SEQ ID NO: 130312 - DNA, 9 bp, Unknown
  misc_feature (1)..( 9): Result.003 file - promoters60/3437779
tctgacaaa

SEQ ID NO: 130313 - DNA, 9 bp, Unknown
  misc_feature (1)..( 9): Result.003 file - promoters60/3437779
aatgacaat

SEQ ID NO: 130314 - DNA, 9 bp, Unknown
  misc_feature (1)..( 9): Result.003 file - promoters60/3437779
tctaacaaa

SEQ ID NO: 130315 - DNA, 9 bp, Unknown
  misc_feature (1)..( 9): Result.003 file - promoters60/3437779
tatgagaaa

SEQ ID NO: 130316 - DNA, 13 bp, Unknown
  misc_feature (1)..( 13): Result.003 file - promoters60/3437779
gaaatatacttac

SEQ ID NO: 130317 - DNA, 13 bp, Unknown
  misc_feature (1)..( 13): Result.003 file - promoters60/3437779
tgctaatatttac

SEQ ID NO: 130318 - DNA, 13 bp, Unknown
  misc_feature (1)..( 13): Result.003 file - promoters60/3437779
gaaaaatatttag

SEQ ID NO: 130319 - DNA, 13 bp, Unknown
  misc_feature (1)..( 13): Result.003 file - promoters60/3437779
taaaaaaattaag

SEQ ID NO: 130320 - DNA, 10 bp, Unknown
  misc_feature (1)..( 10): Result.003 file - promoters60/3437803
ttccaaaatt

SEQ ID NO: 130321 - DNA, 10 bp, Unknown
  misc_feature (1)..( 10): Result.003 file - promoters60/3437803
gaccaaaaaa

SEQ ID NO: 130322 - DNA, 10 bp, Unknown
  misc_feature (1)..( 10): Result.003 file - promoters60/3437803
ttctaaaaat

SEQ ID NO: 130323 - DNA, 10 bp, Unknown
  misc_feature (1)..( 10): Result.003 file - promoters60/3437803
gtccaaagat

SEQ ID NO: 130324 - DNA, 10 bp, Unknown
  misc_feature (1)..( 10): Result.003 file - promoters60/3437803
gaacaaaaaa

SEQ ID NO: 130325 - DNA, 10 bp, Unknown
  misc_feature (1)..( 10): Result.003 file - promoters60/3437803
ttctaagcac

SEQ ID NO: 130326 - DNA, 7 bp, Unknown
  misc_feature (1)..( 7): Result.003 file - promoters60/3437803
cattttc

SEQ ID NO: 130327 - DNA, 7 bp, Unknown
  misc_feature (1)..( 7): Result.003 file - promoters60/3437803
tattttc

SEQ ID NO: 130328 - DNA, 7 bp, Unknown
  misc_feature (1)..( 7): Result.003 file - promoters60/3437803
catttta

SEQ ID NO: 130329 - DNA, 7 bp, Unknown
  misc_feature (1)..( 7): Result.003 file - promoters60/3437803
gattttc

SEQ ID NO: 130330 - DNA, 10 bp, Unknown
  misc_feature (1)..( 10): Result.003 file - promoters60/3437803
atacacttta

SEQ ID NO: 130331 - DNA, 10 bp, Unknown
  misc_feature (1)..( 10): Result.003 file - promoters60/3437803
tcacactttt

SEQ ID NO: 130332 - DNA, 11 bp, Unknown
  misc_feature (1)..( 11): Result.003 file - promoters60/3437803
actttacttta

SEQ ID NO: 130333 - DNA, 11 bp, Unknown
  misc_feature (1)..( 11): Result.003 file - promoters60/3437803
tcacacctttt

SEQ ID NO: 130334 - DNA, 9 bp, Unknown
  misc_feature (1)..( 9): Result.003 file - promoters60/3437803
gttgtatat

SEQ ID NO: 130335 - DNA, 9 bp, Unknown
  misc_feature (1)..( 9): Result.003 file - promoters60/3437803
tttgtttat

SEQ ID NO: 130336 - DNA, 9 bp, Unknown
  misc_feature (1)..( 9): Result.003 file - promoters60/3437803
gttttatat

SEQ ID NO: 130337 - DNA, 9 bp, Unknown
  misc_feature (1)..( 9): Result.003 file - promoters60/3437803
attttataa

SEQ ID NO: 130338 - DNA, 12 bp, Unknown
  misc_feature (1)..( 12): Result.003 file - promoters60/3437803
tcctatttaaac

SEQ ID NO: 130339 - DNA, 12 bp, Unknown
  misc_feature (1)..( 12): Result.003 file - promoters60/3437803
tcctatttaaat

SEQ ID NO: 130340 - DNA, 12 bp, Unknown
  misc_feature (1)..( 12): Result.003 file - promoters60/3437803
ccctatataaag

SEQ ID NO: 130341 - DNA, 12 bp, Unknown
  misc_feature (1)..( 12): Result.003 file - promoters60/3437803
tttattttaaag

SEQ ID NO: 130342 - DNA, 12 bp, Unknown
  misc_feature (1)..( 12): Result.003 file - promoters60/3437803
gataatataaag

SEQ ID NO: 130343 - DNA, 9 bp, Unknown
  misc_feature (1)..( 9): Result.003 file - promoters60/3437803
tttacacta

SEQ ID NO: 130344 - DNA, 9 bp, Unknown
  misc_feature (1)..( 9): Result.003 file - promoters60/3437803
tttacaaga

SEQ ID NO: 130345 - DNA, 9 bp, Unknown
  misc_feature (1)..( 9): Result.003 file - promoters60/3437803
tttatactc

SEQ ID NO: 130346 - DNA, 9 bp, Unknown
  misc_feature (1)..( 9): Result.003 file - promoters60/3437803
attagaaga

SEQ ID NO: 130347 - DNA, 9 bp, Unknown
  misc_feature (1)..( 9): Result.003 file - promoters60/3437808
aagttttaa

SEQ ID NO: 130348 - DNA, 9 bp, Unknown
  misc_feature (1)..( 9): Result.003 file - promoters60/3437808
aagatttga

SEQ ID NO: 130349 - DNA, 9 bp, Unknown
  misc_feature (1)..( 9): Result.003 file - promoters60/3437808
aagctttaa

SEQ ID NO: 130350 - DNA, 9 bp, Unknown
  misc_feature (1)..( 9): Result.003 file - promoters60/3437808
tagaattgt

SEQ ID NO: 130351 - DNA, 13 bp, Unknown
  misc_feature (1)..( 13): Result.003 file - promoters60/3437871
catataagcaaac

SEQ ID NO: 130352 - DNA, 13 bp, Unknown
  misc_feature (1)..( 13): Result.003 file - promoters60/3437871
cataaaagaaaaa

SEQ ID NO: 130353 - DNA, 13 bp, Unknown
  misc_feature (1)..( 13): Result.003 file - promoters60/3437871
aatccgagaaaaa

SEQ ID NO: 130354 - DNA, 13 bp, Unknown
  misc_feature (1)..( 13): Result.003 file - promoters60/3437871
tgtcaaagaagaa

SEQ ID NO: 130355 - DNA, 12 bp, Unknown
  misc_feature (1)..( 12): Result.003 file - promoters60/3437871
aacgaaacacct

SEQ ID NO: 130356 - DNA, 12 bp, Unknown
  misc_feature (1)..( 12): Result.003 file - promoters60/3437871
ggacaaaaacct

SEQ ID NO: 130357 - DNA, 12 bp, Unknown
  misc_feature (1)..( 12): Result.003 file - promoters60/3437871
atggaaacaact

SEQ ID NO: 130358 - DNA, 12 bp, Unknown
  misc_feature (1)..( 12): Result.003 file - promoters60/3437871
gaccaaaagagc

SEQ ID NO: 130359 - DNA, 6 bp, Unknown
  misc_feature (1)..( 6): Result.003 file - promoters60/3437875
tataat

SEQ ID NO: 130360 - DNA, 6 bp, Unknown
  misc_feature (1)..( 6): Result.003 file - promoters60/3437875
tataat

SEQ ID NO: 130361 - DNA, 10 bp, Unknown
  misc_feature (1)..( 10): Result.003 file - promoters60/3437875
aattaaatta

SEQ ID NO: 130362 - DNA, 10 bp, Unknown
  misc_feature (1)..( 10): Result.003 file - promoters60/3437875
aataaaatta

SEQ ID NO: 130363 - DNA, 7 bp, Unknown
  misc_feature (1)..( 7): Result.003 file - promoters60/3437875
ttaatgt

SEQ ID NO: 130364 - DNA, 7 bp, Unknown
  misc_feature (1)..( 7): Result.003 file - promoters60/3437875
ttattgt

SEQ ID NO: 130365 - DNA, 7 bp, Unknown
  misc_feature (1)..( 7): Result.003 file - promoters60/3437875
gtgttgt

SEQ ID NO: 130366 - DNA, 7 bp, Unknown
  misc_feature (1)..( 7): Result.003 file - promoters60/3437875
gtgatgt

SEQ ID NO: 130367 - DNA, 7 bp, Unknown
  misc_feature (1)..( 7): Result.003 file - promoters60/3437875
agaccaa

SEQ ID NO: 130368 - DNA, 7 bp, Unknown
  misc_feature (1)..( 7): Result.003 file - promoters60/3437875
agagcaa

SEQ ID NO: 130369 - DNA, 9 bp, Unknown
  misc_feature (1)..( 9): Result.003 file - promoters60/3437875
tcagacttt

SEQ ID NO: 130370 - DNA, 9 bp, Unknown
  misc_feature (1)..( 9): Result.003 file - promoters60/3437875
tcagtcttt

SEQ ID NO: 130371 - DNA, 6 bp, Unknown
  misc_feature (1)..( 6): Result.003 file - promoters60/3437875
ttctca

SEQ ID NO: 130372 - DNA, 6 bp, Unknown
  misc_feature (1)..( 6): Result.003 file - promoters60/3437875
ttctca

SEQ ID NO: 130373 - DNA, 6 bp, Unknown
  misc_feature (1)..( 6): Result.003 file - promoters60/3437875
tgtttc

SEQ ID NO: 130374 - DNA, 6 bp, Unknown
  misc_feature (1)..( 6): Result.003 file - promoters60/3437875
tgtttc

SEQ ID NO: 130375 - DNA, 7 bp, Unknown
  misc_feature (1)..( 7): Result.003 file - promoters60/3437991
gatgaca

SEQ ID NO: 130376 - DNA, 7 bp, Unknown
  misc_feature (1)..( 7): Result.003 file - promoters60/3437991
gatgaca

SEQ ID NO: 130377 - DNA, 8 bp, Unknown
  misc_feature (1)..( 8): Result.003 file - promoters60/3437991
aaatcaaa

SEQ ID NO: 130378 - DNA, 8 bp, Unknown
  misc_feature (1)..( 8): Result.003 file - promoters60/3437991
aaatgaaa

SEQ ID NO: 130379 - DNA, 8 bp, Unknown
  misc_feature (1)..( 8): Result.003 file - promoters60/3437991
aaataatt

SEQ ID NO: 130380 - DNA, 8 bp, Unknown
  misc_feature (1)..( 8): Result.003 file - promoters60/3437991
aaagaatc

SEQ ID NO: 130381 - DNA, 8 bp, Unknown
  misc_feature (1)..( 8): Result.003 file - promoters60/3437991
gtataatt

SEQ ID NO: 130382 - DNA, 6 bp, Unknown
  misc_feature (1)..( 6): Result.003 file - promoters60/3437991
gagaga

SEQ ID NO: 130383 - DNA, 6 bp, Unknown
  misc_feature (1)..( 6): Result.003 file - promoters60/3437991
gagaga

SEQ ID NO: 130384 - DNA, 9 bp, Unknown
  misc_feature (1)..( 9): Result.003 file - promoters60/3437991
ttttgattt

SEQ ID NO: 130385 - DNA, 9 bp, Unknown
  misc_feature (1)..( 9): Result.003 file - promoters60/3437991
ttttcattt

SEQ ID NO: 130386 - DNA, 6 bp, Unknown
  misc_feature (1)..( 6): Result.003 file - promoters60/3437991
taaaaa

SEQ ID NO: 130387 - DNA, 6 bp, Unknown
  misc_feature (1)..( 6): Result.003 file - promoters60/3437991
taaaaa

SEQ ID NO: 130388 - DNA, 7 bp, Unknown
  misc_feature (1)..( 7): Result.003 file - promoters60/3437991
agaaaat

SEQ ID NO: 130389 - DNA, 7 bp, Unknown
  misc_feature (1)..( 7): Result.003 file - promoters60/3437991
agaaaat

SEQ ID NO: 130390 - DNA, 6 bp, Unknown
  misc_feature (1)..( 6): Result.003 file - promoters60/3437991
ttataa

SEQ ID NO: 130391 - DNA, 6 bp, Unknown
  misc_feature (1)..( 6): Result.003 file - promoters60/3437991
ttataa

SEQ ID NO: 130392 - DNA, 6 bp, Unknown
  misc_feature (1)..( 6): Result.003 file - promoters60/3437991
ttataa

SEQ ID NO: 130393 - DNA, 10 bp, Unknown
  misc_feature (1)..( 10): Result.003 file - promoters60/3437991
tgtaataatc

SEQ ID NO: 130394 - DNA, 10 bp, Unknown
  misc_feature (1)..( 10): Result.003 file - promoters60/3437991
atgaatgatc

SEQ ID NO: 130395 - DNA, 10 bp, Unknown
  misc_feature (1)..( 10): Result.003 file - promoters60/3437991
tgttataact

SEQ ID NO: 130396 - DNA, 11 bp, Unknown
  misc_feature (1)..( 11): Result.003 file - promoters60/3437991
aataaacaatt

SEQ ID NO: 130397 - DNA, 11 bp, Unknown
  misc_feature (1)..( 11): Result.003 file - promoters60/3437991
aatagacaatt

SEQ ID NO: 130398 - DNA, 8 bp, Unknown
  misc_feature (1)..( 8): Result.003 file - promoters60/3437991
tcaagccc

SEQ ID NO: 130399 - DNA, 8 bp, Unknown
  misc_feature (1)..( 8): Result.003 file - promoters60/3437991
tcaaaccc

SEQ ID NO: 130400 - DNA, 6 bp, Unknown
  misc_feature (1)..( 6): Result.003 file - promoters60/3437991
actaat

SEQ ID NO: 130401 - DNA, 6 bp, Unknown
  misc_feature (1)..( 6): Result.003 file - promoters60/3437991
actaat

SEQ ID NO: 130402 - DNA, 6 bp, Unknown
  misc_feature (1)..( 6): Result.003 file - promoters60/3437991
ctattc

SEQ ID NO: 130403 - DNA, 6 bp, Unknown
  misc_feature (1)..( 6): Result.003 file - promoters60/3437991
ctattc

SEQ ID NO: 130404 - DNA, 7 bp, Unknown
  misc_feature (1)..( 7): Result.003 file - promoters60/3437991
taattgt

SEQ ID NO: 130405 - DNA, 7 bp, Unknown
  misc_feature (1)..( 7): Result.003 file - promoters60/3437991
taaatgt

SEQ ID NO: 130406 - DNA, 6 bp, Unknown
  misc_feature (1)..( 6): Result.003 file - promoters60/3437991
aatatt

SEQ ID NO: 130407 - DNA, 6 bp, Unknown
  misc_feature (1)..( 6): Result.003 file - promoters60/3437991
aatatt

SEQ ID NO: 130408 - DNA, 7 bp, Unknown
  misc_feature (1)..( 7): Result.003 file - promoters60/3437991
agaaata

SEQ ID NO: 130409 - DNA, 7 bp, Unknown
  misc_feature (1)..( 7): Result.003 file - promoters60/3437991
agaaata

SEQ ID NO: 130410 - DNA, 6 bp, Unknown
  misc_feature (1)..( 6): Result.003 file - promoters60/3437991
tgattt

SEQ ID NO: 130411 - DNA, 6 bp, Unknown
  misc_feature (1)..( 6): Result.003 file - promoters60/3437991
tgattt

SEQ ID NO: 130412 - DNA, 6 bp, Unknown
  misc_feature (1)..( 6): Result.003 file - promoters60/3437991
ctaaac

SEQ ID NO: 130413 - DNA, 6 bp, Unknown
  misc_feature (1)..( 6): Result.003 file - promoters60/3437991
ctaaac

SEQ ID NO: 130414 - DNA, 6 bp, Unknown
  misc_feature (1)..( 6): Result.003 file - promoters60/3437991
attcaa

SEQ ID NO: 130415 - DNA, 6 bp, Unknown
  misc_feature (1)..( 6): Result.003 file - promoters60/3437991
attcaa

SEQ ID NO: 130416 - DNA, 8 bp, Unknown
  misc_feature (1)..( 8): Result.003 file - promoters60/3437991
attattca

SEQ ID NO: 130417 - DNA, 8 bp, Unknown
  misc_feature (1)..( 8): Result.003 file - promoters60/3437991
attattca

SEQ ID NO: 130418 - DNA, 8 bp, Unknown
  misc_feature (1)..( 8): Result.003 file - promoters60/3437991
gtccaaaa

SEQ ID NO: 130419 - DNA, 8 bp, Unknown
  misc_feature (1)..( 8): Result.003 file - promoters60/3437991
gtcctaaa

SEQ ID NO: 130420 - DNA, 7 bp, Unknown
  misc_feature (1)..( 7): Result.003 file - promoters60/3437991
taggatt

SEQ ID NO: 130421 - DNA, 7 bp, Unknown
  misc_feature (1)..( 7): Result.003 file - promoters60/3437991
tagaatt

SEQ ID NO: 130422 - DNA, 6 bp, Unknown
  misc_feature (1)..( 6): Result.003 file - promoters60/3437991
gtgatt

SEQ ID NO: 130423 - DNA, 6 bp, Unknown
  misc_feature (1)..( 6): Result.003 file - promoters60/3437991
gtgatt

SEQ ID NO: 130424 - DNA, 8 bp, Unknown
  misc_feature (1)..( 8): Result.003 file - promoters60/3437991
atattttt

SEQ ID NO: 130425 - DNA, 8 bp, Unknown
  misc_feature (1)..( 8): Result.003 file - promoters60/3437991
atatattt

SEQ ID NO: 130426 - DNA, 6 bp, Unknown
  misc_feature (1)..( 6): Result.003 file - promoters60/3437991
atttaa

SEQ ID NO: 130427 - DNA, 6 bp, Unknown
  misc_feature (1)..( 6): Result.003 file - promoters60/3437991
atttaa

SEQ ID NO: 130428 - DNA, 6 bp, Unknown
  misc_feature (1)..( 6): Result.003 file - promoters60/3437991
atttat

SEQ ID NO: 130429 - DNA, 6 bp, Unknown
  misc_feature (1)..( 6): Result.003 file - promoters60/3437991
atttat

SEQ ID NO: 130430 - DNA, 9 bp, Unknown
  misc_feature (1)..( 9): Result.003 file - promoters60/3437991
aatatatat

SEQ ID NO: 130431 - DNA, 9 bp, Unknown
  misc_feature (1)..( 9): Result.003 file - promoters60/3437991
aatatatat

SEQ ID NO: 130432 - DNA, 9 bp, Unknown
  misc_feature (1)..( 9): Result.003 file - promoters60/3437991
taaattaat

SEQ ID NO: 130433 - DNA, 9 bp, Unknown
  misc_feature (1)..( 9): Result.003 file - promoters60/3437991
taaaataat

SEQ ID NO: 130434 - DNA, 7 bp, Unknown
  misc_feature (1)..( 7): Result.003 file - promoters60/3437991
ttataca

SEQ ID NO: 130435 - DNA, 7 bp, Unknown
  misc_feature (1)..( 7): Result.003 file - promoters60/3437991
ttacaca

SEQ ID NO: 130436 - DNA, 6 bp, Unknown
  misc_feature (1)..( 6): Result.003 file - promoters60/3437991
aataaa

SEQ ID NO: 130437 - DNA, 6 bp, Unknown
  misc_feature (1)..( 6): Result.003 file - promoters60/3437991
aataaa

SEQ ID NO: 130438 - DNA, 7 bp, Unknown
  misc_feature (1)..( 7): Result.003 file - promoters60/3437991
tatgaaa

SEQ ID NO: 130439 - DNA, 7 bp, Unknown
  misc_feature (1)..( 7): Result.003 file - promoters60/3437991
tatcaaa

SEQ ID NO: 130440 - DNA, 6 bp, Unknown
  misc_feature (1)..( 6): Result.003 file - promoters60/3438046
tttttg

SEQ ID NO: 130441 - DNA, 6 bp, Unknown
  misc_feature (1)..( 6): Result.003 file - promoters60/3438046
tttttg

SEQ ID NO: 130442 - DNA, 10 bp, Unknown
  misc_feature (1)..( 10): Result.003 file - promoters60/3438046
atgtaagaaa

SEQ ID NO: 130443 - DNA, 10 bp, Unknown
  misc_feature (1)..( 10): Result.003 file - promoters60/3438046
atgaaagaca

SEQ ID NO: 130444 - DNA, 10 bp, Unknown
  misc_feature (1)..( 10): Result.003 file - promoters60/3438046
ttataacaaa

SEQ ID NO: 130445 - DNA, 11 bp, Unknown
  misc_feature (1)..( 11): Result.003 file - promoters60/3438046
cctatatttat

SEQ ID NO: 130446 - DNA, 11 bp, Unknown
  misc_feature (1)..( 11): Result.003 file - promoters60/3438046
cctaaatttac

SEQ ID NO: 130447 - DNA, 11 bp, Unknown
  misc_feature (1)..( 11): Result.003 file - promoters60/3438046
tgacgatttat

SEQ ID NO: 130448 - DNA, 6 bp, Unknown
  misc_feature (1)..( 6): Result.003 file - promoters60/3438046
atactt

SEQ ID NO: 130449 - DNA, 6 bp, Unknown
  misc_feature (1)..( 6): Result.003 file - promoters60/3438046
atactt

SEQ ID NO: 130450 - DNA, 6 bp, Unknown
  misc_feature (1)..( 6): Result.003 file - promoters60/3438046
ctatct

SEQ ID NO: 130451 - DNA, 6 bp, Unknown
  misc_feature (1)..( 6): Result.003 file - promoters60/3438046
ctatct

SEQ ID NO: 130452 - DNA, 9 bp, Unknown
  misc_feature (1)..( 9): Result.003 file - promoters60/3438046
gaatctaaa

SEQ ID NO: 130453 - DNA, 9 bp, Unknown
  misc_feature (1)..( 9): Result.003 file - promoters60/3438046
gaaactaaa

SEQ ID NO: 130454 - DNA, 8 bp, Unknown
  misc_feature (1)..( 8): Result.003 file - promoters60/3438046
gaatgcat

SEQ ID NO: 130455 - DNA, 8 bp, Unknown
  misc_feature (1)..( 8): Result.003 file - promoters60/3438046
gaatgcat

SEQ ID NO: 130456 - DNA, 7 bp, Unknown
  misc_feature (1)..( 7): Result.003 file - promoters60/3438046
aaacaat

SEQ ID NO: 130457 - DNA, 7 bp, Unknown
  misc_feature (1)..( 7): Result.003 file - promoters60/3438046
aaacaat

SEQ ID NO: 130458 - DNA, 9 bp, Unknown
  misc_feature (1)..( 9): Result.003 file - promoters60/3438046
tgtaaacac

SEQ ID NO: 130459 - DNA, 9 bp, Unknown
  misc_feature (1)..( 9): Result.003 file - promoters60/3438046
tgttaacac

SEQ ID NO: 130460 - DNA, 8 bp, Unknown
  misc_feature (1)..( 8): Result.003 file - promoters60/3438046
ttgtcgtg

SEQ ID NO: 130461 - DNA, 8 bp, Unknown
  misc_feature (1)..( 8): Result.003 file - promoters60/3438046
ttgtggtg

SEQ ID NO: 130462 - DNA, 7 bp, Unknown
  misc_feature (1)..( 7): Result.003 file - promoters60/3438046
tcacaaa

SEQ ID NO: 130463 - DNA, 7 bp, Unknown
  misc_feature (1)..( 7): Result.003 file - promoters60/3438046
tcaaaaa

SEQ ID NO: 130464 - DNA, 7 bp, Unknown
  misc_feature (1)..( 7): Result.003 file - promoters60/3438046
caaaaat

SEQ ID NO: 130465 - DNA, 7 bp, Unknown
  misc_feature (1)..( 7): Result.003 file - promoters60/3438046
caataat

SEQ ID NO: 130466 - DNA, 7 bp, Unknown
  misc_feature (1)..( 7): Result.003 file - promoters60/3438046
gggaaaa

SEQ ID NO: 130467 - DNA, 7 bp, Unknown
  misc_feature (1)..( 7): Result.003 file - promoters60/3438046
gggaaaa

SEQ ID NO: 130468 - DNA, 8 bp, Unknown
  misc_feature (1)..( 8): Result.003 file - promoters60/3438046
ttcttttc

SEQ ID NO: 130469 - DNA, 8 bp, Unknown
  misc_feature (1)..( 8): Result.003 file - promoters60/3438046
ttcgtttc

SEQ ID NO: 130470 - DNA, 7 bp, Unknown
  misc_feature (1)..( 7): Result.003 file - promoters60/3438069
agaaagg

SEQ ID NO: 130471 - DNA, 7 bp, Unknown
  misc_feature (1)..( 7): Result.003 file - promoters60/3438069
agaaagt

SEQ ID NO: 130472 - DNA, 7 bp, Unknown
  misc_feature (1)..( 7): Result.003 file - promoters60/3438069
agatagt

SEQ ID NO: 130473 - DNA, 8 bp, Unknown
  misc_feature (1)..( 8): Result.003 file - promoters60/3438069
gcataatg

SEQ ID NO: 130474 - DNA, 8 bp, Unknown
  misc_feature (1)..( 8): Result.003 file - promoters60/3438069
ttataatg

SEQ ID NO: 130475 - DNA, 8 bp, Unknown
  misc_feature (1)..( 8): Result.003 file - promoters60/3438069
ttaaaatc

SEQ ID NO: 130476 - DNA, 8 bp, Unknown
  misc_feature (1)..( 8): Result.003 file - promoters60/3438069
tcaaaatc

SEQ ID NO: 130477 - DNA, 8 bp, Unknown
  misc_feature (1)..( 8): Result.003 file - promoters60/3438069
gttaattg

SEQ ID NO: 130478 - DNA, 8 bp, Unknown
  misc_feature (1)..( 8): Result.003 file - promoters60/3438069
gttaattg

SEQ ID NO: 130479 - DNA, 8 bp, Unknown
  misc_feature (1)..( 8): Result.003 file - promoters60/3438069
attacttg

SEQ ID NO: 130480 - DNA, 13 bp, Unknown
  misc_feature (1)..( 13): Result.003 file - promoters60/3438171
tttaaaaattaaa

SEQ ID NO: 130481 - DNA, 13 bp, Unknown
  misc_feature (1)..( 13): Result.003 file - promoters60/3438171
tggtaaaatttca

SEQ ID NO: 130482 - DNA, 14 bp, Unknown
  misc_feature (1)..( 14): Result.003 file - promoters60/3438171
atctaataatttct

SEQ ID NO: 130483 - DNA, 14 bp, Unknown
  misc_feature (1)..( 14): Result.003 file - promoters60/3438171
gttaaaaaattgtc

SEQ ID NO: 130484 - DNA, 14 bp, Unknown
  misc_feature (1)..( 14): Result.003 file - promoters60/3438171
caaaaaaaatatag

SEQ ID NO: 130485 - DNA, 14 bp, Unknown
  misc_feature (1)..( 14): Result.003 file - promoters60/3438171
gttgagaaatttca

SEQ ID NO: 130486 - DNA, 13 bp, Unknown
  misc_feature (1)..( 13): Result.003 file - promoters60/3438171
caataaaattaat

SEQ ID NO: 130487 - DNA, 13 bp, Unknown
  misc_feature (1)..( 13): Result.003 file - promoters60/3438171
agataatatttca

SEQ ID NO: 130488 - DNA, 13 bp, Unknown
  misc_feature (1)..( 13): Result.003 file - promoters60/3438171
aaataaaattaaa

SEQ ID NO: 130489 - DNA, 13 bp, Unknown
  misc_feature (1)..( 13): Result.003 file - promoters60/3438171
caaaaaactttat

SEQ ID NO: 130490 - DNA, 13 bp, Unknown
  misc_feature (1)..( 13): Result.003 file - promoters60/3438171
tcgtaatgtttca

SEQ ID NO: 130491 - DNA, 13 bp, Unknown
  misc_feature (1)..( 13): Result.003 file - promoters60/3438171
ttttaatatgaag

SEQ ID NO: 130492 - DNA, 14 bp, Unknown
  misc_feature (1)..( 14): Result.003 file - promoters60/3438171
taaataaatttttg

SEQ ID NO: 130493 - DNA, 14 bp, Unknown
  misc_feature (1)..( 14): Result.003 file - promoters60/3438171
caaacaaatgtttg

SEQ ID NO: 130494 - DNA, 14 bp, Unknown
  misc_feature (1)..( 14): Result.003 file - promoters60/3438171
attatatattctgc

SEQ ID NO: 130495 - DNA, 14 bp, Unknown
  misc_feature (1)..( 14): Result.003 file - promoters60/3438171
tcaataaaaaaaaa

SEQ ID NO: 130496 - DNA, 14 bp, Unknown
  misc_feature (1)..( 14): Result.003 file - promoters60/3438171
taactaatttctta

SEQ ID NO: 130497 - DNA, 15 bp, Unknown
  misc_feature (1)..( 15): Result.003 file - promoters60/3438171
aaaatacaaaacgtt

SEQ ID NO: 130498 - DNA, 13 bp, Unknown
  misc_feature (1)..( 13): Result.003 file - promoters60/3438171
tttgaataaaagc

SEQ ID NO: 130499 - DNA, 13 bp, Unknown
  misc_feature (1)..( 13): Result.003 file - promoters60/3438171
atccaattaaaaa

SEQ ID NO: 130500 - DNA, 13 bp, Unknown
  misc_feature (1)..( 13): Result.003 file - promoters60/3438171
tttaaataaacaa

SEQ ID NO: 130501 - DNA, 13 bp, Unknown
  misc_feature (1)..( 13): Result.003 file - promoters60/3438171
tcagatttaaaga

SEQ ID NO: 130502 - DNA, 13 bp, Unknown
  misc_feature (1)..( 13): Result.003 file - promoters60/3438171
tcatgtttaaaac

SEQ ID NO: 130503 - DNA, 13 bp, Unknown
  misc_feature (1)..( 13): Result.003 file - promoters60/3438171
caaattttagata

SEQ ID NO: 130504 - DNA, 13 bp, Unknown
  misc_feature (1)..( 13): Result.003 file - promoters60/3438171
gaaaaagaaagac

SEQ ID NO: 130505 - DNA, 21 bp, Unknown
  misc_feature (1)..( 21): Result.003 file - promoters60/3438171
gcaaattattcacacatgttg

SEQ ID NO: 130506 - DNA, 21 bp, Unknown
  misc_feature (1)..( 21): Result.003 file - promoters60/3438171
ccaaaatatctaaacactaat

SEQ ID NO: 130507 - DNA, 21 bp, Unknown
  misc_feature (1)..( 21): Result.003 file - promoters60/3438171
attaattattcatacaagttg

SEQ ID NO: 130508 - DNA, 21 bp, Unknown
  misc_feature (1)..( 21): Result.003 file - promoters60/3438171
caaaattagcgagtaggataa

SEQ ID NO: 130509 - DNA, 21 bp, Unknown
  misc_feature (1)..( 21): Result.003 file - promoters60/3438171
ccaaaaacacttagctgtttt

SEQ ID NO: 130510 - DNA, 21 bp, Unknown
  misc_feature (1)..( 21): Result.003 file - promoters60/3438171
gcaaaaaaagaacagaaaaaa

SEQ ID NO: 130511 - DNA, 11 bp, Unknown
  misc_feature (1)..( 11): Result.003 file - promoters60/3438171
tggatatatca

SEQ ID NO: 130512 - DNA, 11 bp, Unknown
  misc_feature (1)..( 11): Result.003 file - promoters60/3438171
aatgtatgtca

SEQ ID NO: 130513 - DNA, 11 bp, Unknown
  misc_feature (1)..( 11): Result.003 file - promoters60/3438171
cacatacatct

SEQ ID NO: 130514 - DNA, 11 bp, Unknown
  misc_feature (1)..( 11): Result.003 file - promoters60/3438171
ttaatatatac

SEQ ID NO: 130515 - DNA, 11 bp, Unknown
  misc_feature (1)..( 11): Result.003 file - promoters60/3438171
ttcatatatta

SEQ ID NO: 130516 - DNA, 11 bp, Unknown
  misc_feature (1)..( 11): Result.003 file - promoters60/3438171
ttattatagat

SEQ ID NO: 130517 - DNA, 11 bp, Unknown
  misc_feature (1)..( 11): Result.003 file - promoters60/3438171
ttaatatttag

SEQ ID NO: 130518 - DNA, 11 bp, Unknown
  misc_feature (1)..( 11): Result.003 file - promoters60/3438171
gtaatgtttca

SEQ ID NO: 130519 - DNA, 11 bp, Unknown
  misc_feature (1)..( 11): Result.003 file - promoters60/3438171
ttaatatgaag

SEQ ID NO: 130520 - DNA, 11 bp, Unknown
  misc_feature (1)..( 11): Result.003 file - promoters60/3438171
ataaaattaaa

SEQ ID NO: 130521 - DNA, 11 bp, Unknown
  misc_feature (1)..( 11): Result.003 file - promoters60/3438171
ttattatagat

SEQ ID NO: 130522 - DNA, 11 bp, Unknown
  misc_feature (1)..( 11): Result.003 file - promoters60/3438171
ataatatttca

SEQ ID NO: 130523 - DNA, 11 bp, Unknown
  misc_feature (1)..( 11): Result.003 file - promoters60/3438171
acattacatga

SEQ ID NO: 130524 - DNA, 10 bp, Unknown
  misc_feature (1)..( 10): Result.003 file - promoters60/3438171
ctttttattt

SEQ ID NO: 130525 - DNA, 10 bp, Unknown
  misc_feature (1)..( 10): Result.003 file - promoters60/3438171
aattttatta

SEQ ID NO: 130526 - DNA, 10 bp, Unknown
  misc_feature (1)..( 10): Result.003 file - promoters60/3438171
atttttattg

SEQ ID NO: 130527 - DNA, 10 bp, Unknown
  misc_feature (1)..( 10): Result.003 file - promoters60/3438171
ttttttactc

SEQ ID NO: 130528 - DNA, 10 bp, Unknown
  misc_feature (1)..( 10): Result.003 file - promoters60/3438171
cattttataa

SEQ ID NO: 130529 - DNA, 10 bp, Unknown
  misc_feature (1)..( 10): Result.003 file - promoters60/3438171
ctggttatta

SEQ ID NO: 130530 - DNA, 10 bp, Unknown
  misc_feature (1)..( 10): Result.003 file - promoters60/3438171
catgttacta

SEQ ID NO: 130531 - DNA, 10 bp, Unknown
  misc_feature (1)..( 10): Result.003 file - promoters60/3438171
taaattttaa

SEQ ID NO: 130532 - DNA, 10 bp, Unknown
  misc_feature (1)..( 10): Result.003 file - promoters60/3438171
ttaattttcg

SEQ ID NO: 130533 - DNA, 10 bp, Unknown
  misc_feature (1)..( 10): Result.003 file - promoters60/3438171
aaaattataa

SEQ ID NO: 130534 - DNA, 10 bp, Unknown
  misc_feature (1)..( 10): Result.003 file - promoters60/3438171
gtaatgttca

SEQ ID NO: 130535 - DNA, 10 bp, Unknown
  misc_feature (1)..( 10): Result.003 file - promoters60/3438171
attatttttt

SEQ ID NO: 130536 - DNA, 10 bp, Unknown
  misc_feature (1)..( 10): Result.003 file - promoters60/3438171
aaaattaact

SEQ ID NO: 130537 - DNA, 12 bp, Unknown
  misc_feature (1)..( 12): Result.003 file - promoters60/3438171
caaacaaaaact

SEQ ID NO: 130538 - DNA, 12 bp, Unknown
  misc_feature (1)..( 12): Result.003 file - promoters60/3438171
aacgtaaagact

SEQ ID NO: 130539 - DNA, 12 bp, Unknown
  misc_feature (1)..( 12): Result.003 file - promoters60/3438171
aaaataaaaata

SEQ ID NO: 130540 - DNA, 12 bp, Unknown
  misc_feature (1)..( 12): Result.003 file - promoters60/3438171
caaacaaaaata

SEQ ID NO: 130541 - DNA, 12 bp, Unknown
  misc_feature (1)..( 12): Result.003 file - promoters60/3438171
caattaaaaagg

SEQ ID NO: 130542 - DNA, 12 bp, Unknown
  misc_feature (1)..( 12): Result.003 file - promoters60/3438171
caaccaaacctc

SEQ ID NO: 130543 - DNA, 10 bp, Unknown
  misc_feature (1)..( 10): Result.003 file - promoters60/3438171
ggatagttta

SEQ ID NO: 130544 - DNA, 10 bp, Unknown
  misc_feature (1)..( 10): Result.003 file - promoters60/3438171
taataatttc

SEQ ID NO: 130545 - DNA, 10 bp, Unknown
  misc_feature (1)..( 10): Result.003 file - promoters60/3438171
gtaaaatttc

SEQ ID NO: 130546 - DNA, 10 bp, Unknown
  misc_feature (1)..( 10): Result.003 file - promoters60/3438171
gagaaatttc

SEQ ID NO: 130547 - DNA, 10 bp, Unknown
  misc_feature (1)..( 10): Result.003 file - promoters60/3438171
tagacatttt

SEQ ID NO: 130548 - DNA, 10 bp, Unknown
  misc_feature (1)..( 10): Result.003 file - promoters60/3438171
tagacacata

SEQ ID NO: 130549 - DNA, 9 bp, Unknown
  misc_feature (1)..( 9): Result.003 file - promoters60/3438171
tacaaaaaa

SEQ ID NO: 130550 - DNA, 9 bp, Unknown
  misc_feature (1)..( 9): Result.003 file - promoters60/3438171
tagaaaaaa

SEQ ID NO: 130551 - DNA, 9 bp, Unknown
  misc_feature (1)..( 9): Result.003 file - promoters60/3438171
cacataaat

SEQ ID NO: 130552 - DNA, 9 bp, Unknown
  misc_feature (1)..( 9): Result.003 file - promoters60/3438171
aacaaaaaa

SEQ ID NO: 130553 - DNA, 9 bp, Unknown
  misc_feature (1)..( 9): Result.003 file - promoters60/3438171
gtcataaat

SEQ ID NO: 130554 - DNA, 9 bp, Unknown
  misc_feature (1)..( 9): Result.003 file - promoters60/3438171
aaccaaagt

SEQ ID NO: 130555 - DNA, 17 bp, Unknown
  misc_feature (1)..( 17): Result.003 file - promoters60/3438171
cgcctatatataaaaca

SEQ ID NO: 130556 - DNA, 17 bp, Unknown
  misc_feature (1)..( 17): Result.003 file - promoters60/3438171
aaaatataaataacaca

SEQ ID NO: 130557 - DNA, 17 bp, Unknown
  misc_feature (1)..( 17): Result.003 file - promoters60/3438171
cacttataaatacttat

SEQ ID NO: 130558 - DNA, 17 bp, Unknown
  misc_feature (1)..( 17): Result.003 file - promoters60/3438171
ttctcatatataacaca

SEQ ID NO: 130559 - DNA, 17 bp, Unknown
  misc_feature (1)..( 17): Result.003 file - promoters60/3438171
cctttataaactcatac

SEQ ID NO: 130560 - DNA, 17 bp, Unknown
  misc_feature (1)..( 17): Result.003 file - promoters60/3438171
gctatttaagtaaaatc

SEQ ID NO: 130561 - DNA, 17 bp, Unknown
  misc_feature (1)..( 17): Result.003 file - promoters60/3438171
cgtgtttatataagtgt

SEQ ID NO: 130562 - DNA, 8 bp, Unknown
  misc_feature (1)..( 8): Result.003 file - promoters60/3438222
attactta

SEQ ID NO: 130563 - DNA, 8 bp, Unknown
  misc_feature (1)..( 8): Result.003 file - promoters60/3438222
catactta

SEQ ID NO: 130564 - DNA, 8 bp, Unknown
  misc_feature (1)..( 8): Result.003 file - promoters60/3438222
attaatta

SEQ ID NO: 130565 - DNA, 8 bp, Unknown
  misc_feature (1)..( 8): Result.003 file - promoters60/3438222
ctacgcaa

SEQ ID NO: 130566 - DNA, 8 bp, Unknown
  misc_feature (1)..( 8): Result.003 file - promoters60/3438222
ctacacaa

SEQ ID NO: 130567 - DNA, 7 bp, Unknown
  misc_feature (1)..( 7): Result.003 file - promoters60/3438222
aagaaac

SEQ ID NO: 130568 - DNA, 7 bp, Unknown
  misc_feature (1)..( 7): Result.003 file - promoters60/3438222
aagtaac

SEQ ID NO: 130569 - DNA, 7 bp, Unknown
  misc_feature (1)..( 7): Result.003 file - promoters60/3438222
ggtggta

SEQ ID NO: 130570 - DNA, 7 bp, Unknown
  misc_feature (1)..( 7): Result.003 file - promoters60/3438222
ggttgta

SEQ ID NO: 130571 - DNA, 8 bp, Unknown
  misc_feature (1)..( 8): Result.003 file - promoters60/3438222
attgttgt

SEQ ID NO: 130572 - DNA, 8 bp, Unknown
  misc_feature (1)..( 8): Result.003 file - promoters60/3438222
attgatgt

SEQ ID NO: 130573 - DNA, 6 bp, Unknown
  misc_feature (1)..( 6): Result.003 file - promoters60/3438222
attact

SEQ ID NO: 130574 - DNA, 6 bp, Unknown
  misc_feature (1)..( 6): Result.003 file - promoters60/3438222
attact

SEQ ID NO: 130575 - DNA, 7 bp, Unknown
  misc_feature (1)..( 7): Result.003 file - promoters60/3438222
gatgttt

SEQ ID NO: 130576 - DNA, 7 bp, Unknown
  misc_feature (1)..( 7): Result.003 file - promoters60/3438222
gatcttt

SEQ ID NO: 130577 - DNA, 6 bp, Unknown
  misc_feature (1)..( 6): Result.003 file - promoters60/3438222
caactg

SEQ ID NO: 130578 - DNA, 6 bp, Unknown
  misc_feature (1)..( 6): Result.003 file - promoters60/3438222
caactg

SEQ ID NO: 130579 - DNA, 6 bp, Unknown
  misc_feature (1)..( 6): Result.003 file - promoters60/3438222
tgaaaa

SEQ ID NO: 130580 - DNA, 6 bp, Unknown
  misc_feature (1)..( 6): Result.003 file - promoters60/3438222
tgaaaa

SEQ ID NO: 130581 - DNA, 8 bp, Unknown
  misc_feature (1)..( 8): Result.003 file - promoters60/3438222
tatcaaat

SEQ ID NO: 130582 - DNA, 8 bp, Unknown
  misc_feature (1)..( 8): Result.003 file - promoters60/3438222
tattaaat

SEQ ID NO: 130583 - DNA, 6 bp, Unknown
  misc_feature (1)..( 6): Result.003 file - promoters60/3438222
taagag

SEQ ID NO: 130584 - DNA, 6 bp, Unknown
  misc_feature (1)..( 6): Result.003 file - promoters60/3438222
taagag

SEQ ID NO: 130585 - DNA, 6 bp, Unknown
  misc_feature (1)..( 6): Result.003 file - promoters60/3438222
taaaaa

SEQ ID NO: 130586 - DNA, 6 bp, Unknown
  misc_feature (1)..( 6): Result.003 file - promoters60/3438222
taaaaa

SEQ ID NO: 130587 - DNA, 6 bp, Unknown
  misc_feature (1)..( 6): Result.003 file - promoters60/3438222
caagtg

SEQ ID NO: 130588 - DNA, 6 bp, Unknown
  misc_feature (1)..( 6): Result.003 file - promoters60/3438222
caagtg

SEQ ID NO: 130589 - DNA, 8 bp, Unknown
  misc_feature (1)..( 8): Result.003 file - promoters60/3438222
aaaagatc

SEQ ID NO: 130590 - DNA, 8 bp, Unknown
  misc_feature (1)..( 8): Result.003 file - promoters60/3438222
aaaacatc

SEQ ID NO: 130591 - DNA, 7 bp, Unknown
  misc_feature (1)..( 7): Result.003 file - promoters60/3438222
aaaaaat

SEQ ID NO: 130592 - DNA, 7 bp, Unknown
  misc_feature (1)..( 7): Result.003 file - promoters60/3438222
aaacaat

SEQ ID NO: 130593 - DNA, 6 bp, Unknown
  misc_feature (1)..( 6): Result.003 file - promoters60/3438222
aacaat

SEQ ID NO: 130594 - DNA, 6 bp, Unknown
  misc_feature (1)..( 6): Result.003 file - promoters60/3438222
aacaat

SEQ ID NO: 130595 - DNA, 6 bp, Unknown
  misc_feature (1)..( 6): Result.003 file - promoters60/3438222
catgtt

SEQ ID NO: 130596 - DNA, 6 bp, Unknown
  misc_feature (1)..( 6): Result.003 file - promoters60/3438222
catgtt

SEQ ID NO: 130597 - DNA, 7 bp, Unknown
  misc_feature (1)..( 7): Result.003 file - promoters60/3438222
aaagtaa

SEQ ID NO: 130598 - DNA, 7 bp, Unknown
  misc_feature (1)..( 7): Result.003 file - promoters60/3438222
aaaataa

SEQ ID NO: 130599 - DNA, 6 bp, Unknown
  misc_feature (1)..( 6): Result.003 file - promoters60/3438222
ccacgt

SEQ ID NO: 130600 - DNA, 6 bp, Unknown
  misc_feature (1)..( 6): Result.003 file - promoters60/3438222
ccacgt

SEQ ID NO: 130601 - DNA, 6 bp, Unknown
  misc_feature (1)..( 6): Result.003 file - promoters60/3438222
tttctt

SEQ ID NO: 130602 - DNA, 6 bp, Unknown
  misc_feature (1)..( 6): Result.003 file - promoters60/3438222
tttctt

SEQ ID NO: 130603 - DNA, 8 bp, Unknown
  misc_feature (1)..( 8): Result.003 file - promoters60/3438236
attcaaat

SEQ ID NO: 130604 - DNA, 8 bp, Unknown
  misc_feature (1)..( 8): Result.003 file - promoters60/3438236
attcaact

SEQ ID NO: 130605 - DNA, 9 bp, Unknown
  misc_feature (1)..( 9): Result.003 file - promoters60/3438236
tttctaatg

SEQ ID NO: 130606 - DNA, 9 bp, Unknown
  misc_feature (1)..( 9): Result.003 file - promoters60/3438236
attctaatt

SEQ ID NO: 130607 - DNA, 9 bp, Unknown
  misc_feature (1)..( 9): Result.003 file - promoters60/3438236
ctgctaatt

SEQ ID NO: 130608 - DNA, 9 bp, Unknown
  misc_feature (1)..( 9): Result.003 file - promoters60/3438236
attctatat

SEQ ID NO: 130609 - DNA, 9 bp, Unknown
  misc_feature (1)..( 9): Result.003 file - promoters60/3438351
ttctatagt

SEQ ID NO: 130610 - DNA, 9 bp, Unknown
  misc_feature (1)..( 9): Result.003 file - promoters60/3438351
ttcaatagt

SEQ ID NO: 130611 - DNA, 6 bp, Unknown
  misc_feature (1)..( 6): Result.003 file - promoters60/3438351
attttt

SEQ ID NO: 130612 - DNA, 6 bp, Unknown
  misc_feature (1)..( 6): Result.003 file - promoters60/3438351
attttt

SEQ ID NO: 130613 - DNA, 7 bp, Unknown
  misc_feature (1)..( 7): Result.003 file - promoters60/3438351
caagaaa

SEQ ID NO: 130614 - DNA, 7 bp, Unknown
  misc_feature (1)..( 7): Result.003 file - promoters60/3438351
caaaaaa

SEQ ID NO: 130615 - DNA, 8 bp, Unknown
  misc_feature (1)..( 8): Result.003 file - promoters60/3438351
gaactaaa

SEQ ID NO: 130616 - DNA, 7 bp, Unknown
  misc_feature (1)..( 7): Result.003 file - promoters60/3438351
agaatca

SEQ ID NO: 130617 - DNA, 7 bp, Unknown
  misc_feature (1)..( 7): Result.003 file - promoters60/3438351
agaatca

SEQ ID NO: 130618 - DNA, 7 bp, Unknown
  misc_feature (1)..( 7): Result.003 file - promoters60/3438351
attacaa

SEQ ID NO: 130619 - DNA, 7 bp, Unknown
  misc_feature (1)..( 7): Result.003 file - promoters60/3438351
attacaa

SEQ ID NO: 130620 - DNA, 6 bp, Unknown
  misc_feature (1)..( 6): Result.003 file - promoters60/3438351
attatt

SEQ ID NO: 130621 - DNA, 6 bp, Unknown
  misc_feature (1)..( 6): Result.003 file - promoters60/3438351
attatt

SEQ ID NO: 130622 - DNA, 9 bp, Unknown
  misc_feature (1)..( 9): Result.003 file - promoters60/3438351
atcaagcta

SEQ ID NO: 130623 - DNA, 9 bp, Unknown
  misc_feature (1)..( 9): Result.003 file - promoters60/3438351
atcaaacta

SEQ ID NO: 130624 - DNA, 9 bp, Unknown
  misc_feature (1)..( 9): Result.003 file - promoters60/3438351
ttttatcct

SEQ ID NO: 130625 - DNA, 9 bp, Unknown
  misc_feature (1)..( 9): Result.003 file - promoters60/3438351
tttgatcct

SEQ ID NO: 130626 - DNA, 6 bp, Unknown
  misc_feature (1)..( 6): Result.003 file - promoters60/3438351
ttttaa

SEQ ID NO: 130627 - DNA, 6 bp, Unknown
  misc_feature (1)..( 6): Result.003 file - promoters60/3438351
ttttaa

SEQ ID NO: 130628 - DNA, 7 bp, Unknown
  misc_feature (1)..( 7): Result.003 file - promoters60/3438351
taaaaat

SEQ ID NO: 130629 - DNA, 7 bp, Unknown
  misc_feature (1)..( 7): Result.003 file - promoters60/3438351
taaaaat

SEQ ID NO: 130630 - DNA, 6 bp, Unknown
  misc_feature (1)..( 6): Result.003 file - promoters60/3438351
aaatca

SEQ ID NO: 130631 - DNA, 6 bp, Unknown
  misc_feature (1)..( 6): Result.003 file - promoters60/3438351
aaatca

SEQ ID NO: 130632 - DNA, 7 bp, Unknown
  misc_feature (1)..( 7): Result.003 file - promoters60/3438351
aaaagtc

SEQ ID NO: 130633 - DNA, 7 bp, Unknown
  misc_feature (1)..( 7): Result.003 file - promoters60/3438351
aaaggtc

SEQ ID NO: 130634 - DNA, 9 bp, Unknown
  misc_feature (1)..( 9): Result.003 file - promoters60/3438351
taaaagttt

SEQ ID NO: 130635 - DNA, 9 bp, Unknown
  misc_feature (1)..( 9): Result.003 file - promoters60/3438351
taaaaattt

SEQ ID NO: 130636 - DNA, 7 bp, Unknown
  misc_feature (1)..( 7): Result.003 file - promoters60/3438351
tcttctt

SEQ ID NO: 130637 - DNA, 7 bp, Unknown
  misc_feature (1)..( 7): Result.003 file - promoters60/3438351
tcttctt

SEQ ID NO: 130638 - DNA, 7 bp, Unknown
  misc_feature (1)..( 7): Result.003 file - promoters60/3438351
tcatatt

SEQ ID NO: 130639 - DNA, 7 bp, Unknown
  misc_feature (1)..( 7): Result.003 file - promoters60/3438351
tcagatt

SEQ ID NO: 130640 - DNA, 6 bp, Unknown
  misc_feature (1)..( 6): Result.003 file - promoters60/3438351
ttgttt

SEQ ID NO: 130641 - DNA, 6 bp, Unknown
  misc_feature (1)..( 6): Result.003 file - promoters60/3438351
ttgttt

SEQ ID NO: 130642 - DNA, 7 bp, Unknown
  misc_feature (1)..( 7): Result.003 file - promoters60/3438351
tttcttt

SEQ ID NO: 130643 - DNA, 7 bp, Unknown
  misc_feature (1)..( 7): Result.003 file - promoters60/3438351
tttgttt

SEQ ID NO: 130644 - DNA, 6 bp, Unknown
  misc_feature (1)..( 6): Result.003 file - promoters60/3438351
cttata

SEQ ID NO: 130645 - DNA, 6 bp, Unknown
  misc_feature (1)..( 6): Result.003 file - promoters60/3438351
cttata

SEQ ID NO: 130646 - DNA, 8 bp, Unknown
  misc_feature (1)..( 8): Result.003 file - promoters60/3438351
gtttgctt

SEQ ID NO: 130647 - DNA, 8 bp, Unknown
  misc_feature (1)..( 8): Result.003 file - promoters60/3438351
gttttctt

SEQ ID NO: 130648 - DNA, 7 bp, Unknown
  misc_feature (1)..( 7): Result.003 file - promoters60/3438351
tgagaaa

SEQ ID NO: 130649 - DNA, 7 bp, Unknown
  misc_feature (1)..( 7): Result.003 file - promoters60/3438351
tgacaaa

SEQ ID NO: 130650 - DNA, 8 bp, Unknown
  misc_feature (1)..( 8): Result.003 file - promoters60/3438369
aaagaaat

SEQ ID NO: 130651 - DNA, 8 bp, Unknown
  misc_feature (1)..( 8): Result.003 file - promoters60/3438369
aaataaaa

SEQ ID NO: 130652 - DNA, 9 bp, Unknown
  misc_feature (1)..( 9): Result.003 file - promoters60/3438369
aaatgaaat

SEQ ID NO: 130653 - DNA, 9 bp, Unknown
  misc_feature (1)..( 9): Result.003 file - promoters60/3438369
aaaataata

SEQ ID NO: 130654 - DNA, 9 bp, Unknown
  misc_feature (1)..( 9): Result.003 file - promoters60/3438369
tatataata

SEQ ID NO: 130655 - DNA, 7 bp, Unknown
  misc_feature (1)..( 7): Result.003 file - promoters60/3438373
ttgcttc

SEQ ID NO: 130656 - DNA, 7 bp, Unknown
  misc_feature (1)..( 7): Result.003 file - promoters60/3438373
ttgcttc

SEQ ID NO: 130657 - DNA, 7 bp, Unknown
  misc_feature (1)..( 7): Result.003 file - promoters60/3438373
ggaacaa

SEQ ID NO: 130658 - DNA, 7 bp, Unknown
  misc_feature (1)..( 7): Result.003 file - promoters60/3438373
ggaacaa

SEQ ID NO: 130659 - DNA, 7 bp, Unknown
  misc_feature (1)..( 7): Result.003 file - promoters60/3438373
acaagat

SEQ ID NO: 130660 - DNA, 7 bp, Unknown
  misc_feature (1)..( 7): Result.003 file - promoters60/3438373
acatgat

SEQ ID NO: 130661 - DNA, 7 bp, Unknown
  misc_feature (1)..( 7): Result.003 file - promoters60/3438373
attacat

SEQ ID NO: 130662 - DNA, 7 bp, Unknown
  misc_feature (1)..( 7): Result.003 file - promoters60/3438373
attacat

SEQ ID NO: 130663 - DNA, 6 bp, Unknown
  misc_feature (1)..( 6): Result.003 file - promoters60/3438373
ttgtaa

SEQ ID NO: 130664 - DNA, 6 bp, Unknown
  misc_feature (1)..( 6): Result.003 file - promoters60/3438373
ttgtaa

SEQ ID NO: 130665 - DNA, 6 bp, Unknown
  misc_feature (1)..( 6): Result.003 file - promoters60/3438373
gaaaat

SEQ ID NO: 130666 - DNA, 6 bp, Unknown
  misc_feature (1)..( 6): Result.003 file - promoters60/3438373
gaaaat

SEQ ID NO: 130667 - DNA, 8 bp, Unknown
  misc_feature (1)..( 8): Result.003 file - promoters60/3438373
gttcttaa

SEQ ID NO: 130668 - DNA, 8 bp, Unknown
  misc_feature (1)..( 8): Result.003 file - promoters60/3438373
gttcctaa

SEQ ID NO: 130669 - DNA, 7 bp, Unknown
  misc_feature (1)..( 7): Result.003 file - promoters60/3438373
aatcaat

SEQ ID NO: 130670 - DNA, 7 bp, Unknown
  misc_feature (1)..( 7): Result.003 file - promoters60/3438373
aattaat

SEQ ID NO: 130671 - DNA, 8 bp, Unknown
  misc_feature (1)..( 8): Result.003 file - promoters60/3438373
atatctta

SEQ ID NO: 130672 - DNA, 8 bp, Unknown
  misc_feature (1)..( 8): Result.003 file - promoters60/3438373
atatctta

SEQ ID NO: 130673 - DNA, 6 bp, Unknown
  misc_feature (1)..( 6): Result.003 file - promoters60/3438373
gttcgt

SEQ ID NO: 130674 - DNA, 6 bp, Unknown
  misc_feature (1)..( 6): Result.003 file - promoters60/3438373
gttcgt

SEQ ID NO: 130675 - DNA, 9 bp, Unknown
  misc_feature (1)..( 9): Result.003 file - promoters60/3438373
tgaatcgaa

SEQ ID NO: 130676 - DNA, 9 bp, Unknown
  misc_feature (1)..( 9): Result.003 file - promoters60/3438373
tgactcgaa

SEQ ID NO: 130677 - DNA, 7 bp, Unknown
  misc_feature (1)..( 7): Result.003 file - promoters60/3438373
agaaaaa

SEQ ID NO: 130678 - DNA, 7 bp, Unknown
  misc_feature (1)..( 7): Result.003 file - promoters60/3438373
agaaaaa

SEQ ID NO: 130679 - DNA, 6 bp, Unknown
  misc_feature (1)..( 6): Result.003 file - promoters60/3438373
agtaaa

SEQ ID NO: 130680 - DNA, 6 bp, Unknown
  misc_feature (1)..( 6): Result.003 file - promoters60/3438373
agtaaa

SEQ ID NO: 130681 - DNA, 7 bp, Unknown
  misc_feature (1)..( 7): Result.003 file - promoters60/3438373
aatcggg

SEQ ID NO: 130682 - DNA, 7 bp, Unknown
  misc_feature (1)..( 7): Result.003 file - promoters60/3438373
aattggg

SEQ ID NO: 130683 - DNA, 8 bp, Unknown
  misc_feature (1)..( 8): Result.003 file - promoters60/3438373
gaaagaaa

SEQ ID NO: 130684 - DNA, 8 bp, Unknown
  misc_feature (1)..( 8): Result.003 file - promoters60/3438373
gaaacaaa

SEQ ID NO: 130685 - DNA, 10 bp, Unknown
  misc_feature (1)..( 10): Result.003 file - promoters60/3438373
ggaaaagaaa

SEQ ID NO: 130686 - DNA, 10 bp, Unknown
  misc_feature (1)..( 10): Result.003 file - promoters60/3438373
ggaaatgaaa

SEQ ID NO: 130687 - DNA, 7 bp, Unknown
  misc_feature (1)..( 7): Result.003 file - promoters60/3438373
cccacta

SEQ ID NO: 130688 - DNA, 7 bp, Unknown
  misc_feature (1)..( 7): Result.003 file - promoters60/3438373
cccacta

SEQ ID NO: 130689 - DNA, 9 bp, Unknown
  misc_feature (1)..( 9): Result.003 file - promoters60/3438373
aaagaaaag

SEQ ID NO: 130690 - DNA, 9 bp, Unknown
  misc_feature (1)..( 9): Result.003 file - promoters60/3438373
aaagtaaag

SEQ ID NO: 130691 - DNA, 7 bp, Unknown
  misc_feature (1)..( 7): Result.003 file - promoters60/3438373
gtatata

SEQ ID NO: 130692 - DNA, 7 bp, Unknown
  misc_feature (1)..( 7): Result.003 file - promoters60/3438373
gtatata

SEQ ID NO: 130693 - DNA, 7 bp, Unknown
  misc_feature (1)..( 7): Result.003 file - promoters60/3438420
ttccttt

SEQ ID NO: 130694 - DNA, 7 bp, Unknown
  misc_feature (1)..( 7): Result.003 file - promoters60/3438420
ttctttt

SEQ ID NO: 130695 - DNA, 8 bp, Unknown
  misc_feature (1)..( 8): Result.003 file - promoters60/3438420
tttctctc

SEQ ID NO: 130696 - DNA, 8 bp, Unknown
  misc_feature (1)..( 8): Result.003 file - promoters60/3438420
tttgtctc

SEQ ID NO: 130697 - DNA, 8 bp, Unknown
  misc_feature (1)..( 8): Result.003 file - promoters60/3438420
tttattgt

SEQ ID NO: 130698 - DNA, 6 bp, Unknown
  misc_feature (1)..( 6): Result.003 file - promoters60/3438420
tctcaa

SEQ ID NO: 130699 - DNA, 6 bp, Unknown
  misc_feature (1)..( 6): Result.003 file - promoters60/3438420
tctcaa

SEQ ID NO: 130700 - DNA, 7 bp, Unknown
  misc_feature (1)..( 7): Result.003 file - promoters60/3438420
ttttaga

SEQ ID NO: 130701 - DNA, 7 bp, Unknown
  misc_feature (1)..( 7): Result.003 file - promoters60/3438420
ttttaga

SEQ ID NO: 130702 - DNA, 11 bp, Unknown
  misc_feature (1)..( 11): Result.003 file - promoters60/3438420
atcaaaatcat

SEQ ID NO: 130703 - DNA, 11 bp, Unknown
  misc_feature (1)..( 11): Result.003 file - promoters60/3438420
atccaaatcat

SEQ ID NO: 130704 - DNA, 9 bp, Unknown
  misc_feature (1)..( 9): Result.003 file - promoters60/3438420
ccagtattc

SEQ ID NO: 130705 - DNA, 9 bp, Unknown
  misc_feature (1)..( 9): Result.003 file - promoters60/3438420
ccattattc

SEQ ID NO: 130706 - DNA, 8 bp, Unknown
  misc_feature (1)..( 8): Result.003 file - promoters60/3438420
gattttgg

SEQ ID NO: 130707 - DNA, 8 bp, Unknown
  misc_feature (1)..( 8): Result.003 file - promoters60/3438420
gattttac

SEQ ID NO: 130708 - DNA, 8 bp, Unknown
  misc_feature (1)..( 8): Result.003 file - promoters60/3438420
cattttac

SEQ ID NO: 130709 - DNA, 6 bp, Unknown
  misc_feature (1)..( 6): Result.003 file - promoters60/3438420
ttttgg

SEQ ID NO: 130710 - DNA, 6 bp, Unknown
  misc_feature (1)..( 6): Result.003 file - promoters60/3438420
ttttgg

SEQ ID NO: 130711 - DNA, 7 bp, Unknown
  misc_feature (1)..( 7): Result.003 file - promoters60/3438420
ttttttt

SEQ ID NO: 130712 - DNA, 7 bp, Unknown
  misc_feature (1)..( 7): Result.003 file - promoters60/3438420
ttttttt

SEQ ID NO: 130713 - DNA, 6 bp, Unknown
  misc_feature (1)..( 6): Result.003 file - promoters60/3438420
tcactt

SEQ ID NO: 130714 - DNA, 6 bp, Unknown
  misc_feature (1)..( 6): Result.003 file - promoters60/3438420
tcactt

SEQ ID NO: 130715 - DNA, 6 bp, Unknown
  misc_feature (1)..( 6): Result.003 file - promoters60/3438420
ggtaaa

SEQ ID NO: 130716 - DNA, 6 bp, Unknown
  misc_feature (1)..( 6): Result.003 file - promoters60/3438420
ggtaaa

SEQ ID NO: 130717 - DNA, 6 bp, Unknown
  misc_feature (1)..( 6): Result.003 file - promoters60/3438420
tgtgtt

SEQ ID NO: 130718 - DNA, 6 bp, Unknown
  misc_feature (1)..( 6): Result.003 file - promoters60/3438420
tgtgtt

SEQ ID NO: 130719 - DNA, 6 bp, Unknown
  misc_feature (1)..( 6): Result.003 file - promoters60/3438420
tttttt

SEQ ID NO: 130720 - DNA, 6 bp, Unknown
  misc_feature (1)..( 6): Result.003 file - promoters60/3438420
tttttt

SEQ ID NO: 130721 - DNA, 6 bp, Unknown
  misc_feature (1)..( 6): Result.003 file - promoters60/3438420
cttttt

SEQ ID NO: 130722 - DNA, 6 bp, Unknown
  misc_feature (1)..( 6): Result.003 file - promoters60/3438420
cttttt

SEQ ID NO: 130723 - DNA, 8 bp, Unknown
  misc_feature (1)..( 8): Result.003 file - promoters60/3438420
aaatgtaa

SEQ ID NO: 130724 - DNA, 8 bp, Unknown
  misc_feature (1)..( 8): Result.003 file - promoters60/3438420
aaatttaa

SEQ ID NO: 130725 - DNA, 6 bp, Unknown
  misc_feature (1)..( 6): Result.003 file - promoters60/3438420
ttatat

SEQ ID NO: 130726 - DNA, 6 bp, Unknown
  misc_feature (1)..( 6): Result.003 file - promoters60/3438420
ttatat

SEQ ID NO: 130727 - DNA, 7 bp, Unknown
  misc_feature (1)..( 7): Result.003 file - promoters60/3438420
ttttaga

SEQ ID NO: 130728 - DNA, 7 bp, Unknown
  misc_feature (1)..( 7): Result.003 file - promoters60/3438420
ttttaga

SEQ ID NO: 130729 - DNA, 6 bp, Unknown
  misc_feature (1)..( 6): Result.003 file - promoters60/3438420
aaaata

SEQ ID NO: 130730 - DNA, 6 bp, Unknown
  misc_feature (1)..( 6): Result.003 file - promoters60/3438420
aaaata

SEQ ID NO: 130731 - DNA, 7 bp, Unknown
  misc_feature (1)..( 7): Result.003 file - promoters60/3438420
aaccaac

SEQ ID NO: 130732 - DNA, 7 bp, Unknown
  misc_feature (1)..( 7): Result.003 file - promoters60/3438420
aaccaac

SEQ ID NO: 130733 - DNA, 8 bp, Unknown
  misc_feature (1)..( 8): Result.003 file - promoters60/3438429
aacagaga

SEQ ID NO: 130734 - DNA, 8 bp, Unknown
  misc_feature (1)..( 8): Result.003 file - promoters60/3438429
aacagaga

SEQ ID NO: 130735 - DNA, 6 bp, Unknown
  misc_feature (1)..( 6): Result.003 file - promoters60/3438429
taaaaa

SEQ ID NO: 130736 - DNA, 6 bp, Unknown
  misc_feature (1)..( 6): Result.003 file - promoters60/3438429
taaaaa

SEQ ID NO: 130737 - DNA, 7 bp, Unknown
  misc_feature (1)..( 7): Result.003 file - promoters60/3438429
ttcatct

SEQ ID NO: 130738 - DNA, 7 bp, Unknown
  misc_feature (1)..( 7): Result.003 file - promoters60/3438429
ttcatct

SEQ ID NO: 130739 - DNA, 6 bp, Unknown
  misc_feature (1)..( 6): Result.003 file - promoters60/3438429
aaaatt

SEQ ID NO: 130740 - DNA, 6 bp, Unknown
  misc_feature (1)..( 6): Result.003 file - promoters60/3438429
aaaatt

SEQ ID NO: 130741 - DNA, 8 bp, Unknown
  misc_feature (1)..( 8): Result.003 file - promoters60/3438429
aaaacaaa

SEQ ID NO: 130742 - DNA, 8 bp, Unknown
  misc_feature (1)..( 8): Result.003 file - promoters60/3438429
aaaacagt

SEQ ID NO: 130743 - DNA, 8 bp, Unknown
  misc_feature (1)..( 8): Result.003 file - promoters60/3438429
aaaaaaat

SEQ ID NO: 130744 - DNA, 8 bp, Unknown
  misc_feature (1)..( 8): Result.003 file - promoters60/3438429
aaaatgag

SEQ ID NO: 130745 - DNA, 8 bp, Unknown
  misc_feature (1)..( 8): Result.003 file - promoters60/3438429
aaactgag

SEQ ID NO: 130746 - DNA, 7 bp, Unknown
  misc_feature (1)..( 7): Result.003 file - promoters60/3438429
tgatttt

SEQ ID NO: 130747 - DNA, 7 bp, Unknown
  misc_feature (1)..( 7): Result.003 file - promoters60/3438429
tgagttt

SEQ ID NO: 130748 - DNA, 8 bp, Unknown
  misc_feature (1)..( 8): Result.003 file - promoters60/3438429
agaaattg

SEQ ID NO: 130749 - DNA, 8 bp, Unknown
  misc_feature (1)..( 8): Result.003 file - promoters60/3438429
agaaattg

SEQ ID NO: 130750 - DNA, 10 bp, Unknown
  misc_feature (1)..( 10): Result.003 file - promoters60/3438429
ttgccactct

SEQ ID NO: 130751 - DNA, 10 bp, Unknown
  misc_feature (1)..( 10): Result.003 file - promoters60/3438429
ttggcactct

SEQ ID NO: 130752 - DNA, 6 bp, Unknown
  misc_feature (1)..( 6): Result.003 file - promoters60/3438429
tcttct

SEQ ID NO: 130753 - DNA, 6 bp, Unknown
  misc_feature (1)..( 6): Result.003 file - promoters60/3438429
tcttct

SEQ ID NO: 130754 - DNA, 7 bp, Unknown
  misc_feature (1)..( 7): Result.003 file - promoters60/3438429
ttctaaa

SEQ ID NO: 130755 - DNA, 7 bp, Unknown
  misc_feature (1)..( 7): Result.003 file - promoters60/3438429
ttccaaa

SEQ ID NO: 130756 - DNA, 6 bp, Unknown
  misc_feature (1)..( 6): Result.003 file - promoters60/3438429
agaaaa

SEQ ID NO: 130757 - DNA, 6 bp, Unknown
  misc_feature (1)..( 6): Result.003 file - promoters60/3438429
agaaaa

SEQ ID NO: 130758 - DNA, 6 bp, Unknown
  misc_feature (1)..( 6): Result.003 file - promoters60/3438429
aaaagt

SEQ ID NO: 130759 - DNA, 6 bp, Unknown
  misc_feature (1)..( 6): Result.003 file - promoters60/3438429
aaaagt

SEQ ID NO: 130760 - DNA, 8 bp, Unknown
  misc_feature (1)..( 8): Result.003 file - promoters60/3438429
tttaattt

SEQ ID NO: 130761 - DNA, 8 bp, Unknown
  misc_feature (1)..( 8): Result.003 file - promoters60/3438429
tttcattt

SEQ ID NO: 130762 - DNA, 8 bp, Unknown
  misc_feature (1)..( 8): Result.003 file - promoters60/3438429
tttagttt

SEQ ID NO: 130763 - DNA, 8 bp, Unknown
  misc_feature (1)..( 8): Result.003 file - promoters60/3438429
tttagttt

SEQ ID NO: 130764 - DNA, 7 bp, Unknown
  misc_feature (1)..( 7): Result.003 file - promoters60/3438429
tttattt

SEQ ID NO: 130765 - DNA, 7 bp, Unknown
  misc_feature (1)..( 7): Result.003 file - promoters60/3438429
tttattt

SEQ ID NO: 130766 - DNA, 6 bp, Unknown
  misc_feature (1)..( 6): Result.003 file - promoters60/3438429
caaacc

SEQ ID NO: 130767 - DNA, 6 bp, Unknown
  misc_feature (1)..( 6): Result.003 file - promoters60/3438429
caaacc

SEQ ID NO: 130768 - DNA, 7 bp, Unknown
  misc_feature (1)..( 7): Result.003 file - promoters60/3438429
tttaggt

SEQ ID NO: 130769 - DNA, 7 bp, Unknown
  misc_feature (1)..( 7): Result.003 file - promoters60/3438429
ttttggt

SEQ ID NO: 130770 - DNA, 6 bp, Unknown
  misc_feature (1)..( 6): Result.003 file - promoters60/3438429
ttcagt

SEQ ID NO: 130771 - DNA, 6 bp, Unknown
  misc_feature (1)..( 6): Result.003 file - promoters60/3438429
ttcagt

SEQ ID NO: 130772 - DNA, 6 bp, Unknown
  misc_feature (1)..( 6): Result.003 file - promoters60/3438494
ggagga

SEQ ID NO: 130773 - DNA, 6 bp, Unknown
  misc_feature (1)..( 6): Result.003 file - promoters60/3438494
ggagga

SEQ ID NO: 130774 - DNA, 6 bp, Unknown
  misc_feature (1)..( 6): Result.003 file - promoters60/3438494
ttaatt

SEQ ID NO: 130775 - DNA, 6 bp, Unknown
  misc_feature (1)..( 6): Result.003 file - promoters60/3438494
ttaatt

SEQ ID NO: 130776 - DNA, 7 bp, Unknown
  misc_feature (1)..( 7): Result.003 file - promoters60/3438494
caaagag

SEQ ID NO: 130777 - DNA, 7 bp, Unknown
  misc_feature (1)..( 7): Result.003 file - promoters60/3438494
caatgag

SEQ ID NO: 130778 - DNA, 7 bp, Unknown
  misc_feature (1)..( 7): Result.003 file - promoters60/3438494
tatcaaa

SEQ ID NO: 130779 - DNA, 7 bp, Unknown
  misc_feature (1)..( 7): Result.003 file - promoters60/3438494
tataaaa

SEQ ID NO: 130780 - DNA, 7 bp, Unknown
  misc_feature (1)..( 7): Result.003 file - promoters60/3438494
acaaaat

SEQ ID NO: 130781 - DNA, 7 bp, Unknown
  misc_feature (1)..( 7): Result.003 file - promoters60/3438494
acaaaat

SEQ ID NO: 130782 - DNA, 7 bp, Unknown
  misc_feature (1)..( 7): Result.003 file - promoters60/3438494
atgaaat

SEQ ID NO: 130783 - DNA, 7 bp, Unknown
  misc_feature (1)..( 7): Result.003 file - promoters60/3438494
atgaaat

SEQ ID NO: 130784 - DNA, 6 bp, Unknown
  misc_feature (1)..( 6): Result.003 file - promoters60/3438494
aagttg

SEQ ID NO: 130785 - DNA, 6 bp, Unknown
  misc_feature (1)..( 6): Result.003 file - promoters60/3438494
aagttg

SEQ ID NO: 130786 - DNA, 7 bp, Unknown
  misc_feature (1)..( 7): Result.003 file - promoters60/3438494
gttgaac

SEQ ID NO: 130787 - DNA, 7 bp, Unknown
  misc_feature (1)..( 7): Result.003 file - promoters60/3438494
gttgaac

SEQ ID NO: 130788 - DNA, 12 bp, Unknown
  misc_feature (1)..( 12): Result.003 file - promoters60/3438494
atatctataaag

SEQ ID NO: 130789 - DNA, 12 bp, Unknown
  misc_feature (1)..( 12): Result.003 file - promoters60/3438494
ctccttataaat

SEQ ID NO: 130790 - DNA, 12 bp, Unknown
  misc_feature (1)..( 12): Result.003 file - promoters60/3438494
atatatataaag

SEQ ID NO: 130791 - DNA, 8 bp, Unknown
  misc_feature (1)..( 8): Result.003 file - promoters60/3438494
tttgagtt

SEQ ID NO: 130792 - DNA, 8 bp, Unknown
  misc_feature (1)..( 8): Result.003 file - promoters60/3438494
tttaagtt

SEQ ID NO: 130793 - DNA, 9 bp, Unknown
  misc_feature (1)..( 9): Result.003 file - promoters60/3438494
acatggttt

SEQ ID NO: 130794 - DNA, 9 bp, Unknown
  misc_feature (1)..( 9): Result.003 file - promoters60/3438494
acatgtttt

SEQ ID NO: 130795 - DNA, 7 bp, Unknown
  misc_feature (1)..( 7): Result.003 file - promoters60/3438494
aaacata

SEQ ID NO: 130796 - DNA, 7 bp, Unknown
  misc_feature (1)..( 7): Result.003 file - promoters60/3438494
aaatata

SEQ ID NO: 130797 - DNA, 7 bp, Unknown
  misc_feature (1)..( 7): Result.003 file - promoters60/3438494
atataca

SEQ ID NO: 130798 - DNA, 7 bp, Unknown
  misc_feature (1)..( 7): Result.003 file - promoters60/3438494
atataca

SEQ ID NO: 130799 - DNA, 7 bp, Unknown
  misc_feature (1)..( 7): Result.003 file - promoters60/3438494
ttaagtt

SEQ ID NO: 130800 - DNA, 7 bp, Unknown
  misc_feature (1)..( 7): Result.003 file - promoters60/3438494
ttaagtt

SEQ ID NO: 130801 - DNA, 7 bp, Unknown
  misc_feature (1)..( 7): Result.003 file - promoters60/3438494
taaaact

SEQ ID NO: 130802 - DNA, 7 bp, Unknown
  misc_feature (1)..( 7): Result.003 file - promoters60/3438494
taacact

SEQ ID NO: 130803 - DNA, 6 bp, Unknown
  misc_feature (1)..( 6): Result.003 file - promoters60/3438494
gaaaaa

SEQ ID NO: 130804 - DNA, 6 bp, Unknown
  misc_feature (1)..( 6): Result.003 file - promoters60/3438494
gaaaaa

SEQ ID NO: 130805 - DNA, 6 bp, Unknown
  misc_feature (1)..( 6): Result.003 file - promoters60/3438494
aattca

SEQ ID NO: 130806 - DNA, 6 bp, Unknown
  misc_feature (1)..( 6): Result.003 file - promoters60/3438494
aattca

SEQ ID NO: 130807 - DNA, 8 bp, Unknown
  misc_feature (1)..( 8): Result.003 file - promoters60/3438494
agtatttt

SEQ ID NO: 130808 - DNA, 8 bp, Unknown
  misc_feature (1)..( 8): Result.003 file - promoters60/3438494
agtttttt

SEQ ID NO: 130809 - DNA, 7 bp, Unknown
  misc_feature (1)..( 7): Result.003 file - promoters60/3438494
attgaaa

SEQ ID NO: 130810 - DNA, 7 bp, Unknown
  misc_feature (1)..( 7): Result.003 file - promoters60/3438494
attaaaa

SEQ ID NO: 130811 - DNA, 7 bp, Unknown
  misc_feature (1)..( 7): Result.003 file - promoters60/3438505
gttcctt

SEQ ID NO: 130812 - DNA, 7 bp, Unknown
  misc_feature (1)..( 7): Result.003 file - promoters60/3438505
gtttctt

SEQ ID NO: 130813 - DNA, 7 bp, Unknown
  misc_feature (1)..( 7): Result.003 file - promoters60/3438505
gttcctc

SEQ ID NO: 130814 - DNA, 8 bp, Unknown
  misc_feature (1)..( 8): Result.003 file - promoters60/3438505
gttgattc

SEQ ID NO: 130815 - DNA, 8 bp, Unknown
  misc_feature (1)..( 8): Result.003 file - promoters60/3438505
gttgatga

SEQ ID NO: 130816 - DNA, 8 bp, Unknown
  misc_feature (1)..( 8): Result.003 file - promoters60/3438505
cttgattc

SEQ ID NO: 130817 - DNA, 8 bp, Unknown
  misc_feature (1)..( 8): Result.003 file - promoters60/3438505
cgacatgt

SEQ ID NO: 130818 - DNA, 8 bp, Unknown
  misc_feature (1)..( 8): Result.003 file - promoters60/3438505
cgacatta

SEQ ID NO: 130819 - DNA, 8 bp, Unknown
  misc_feature (1)..( 8): Result.003 file - promoters60/3438505
cgacatgt

SEQ ID NO: 130820 - DNA, 8 bp, Unknown
  misc_feature (1)..( 8): Result.003 file - promoters60/3438505
tacgcata

SEQ ID NO: 130821 - DNA, 8 bp, Unknown
  misc_feature (1)..( 8): Result.003 file - promoters60/3438505
tacccata

SEQ ID NO: 130822 - DNA, 8 bp, Unknown
  misc_feature (1)..( 8): Result.003 file - promoters60/3438505
ggcacatg

SEQ ID NO: 130823 - DNA, 13 bp, Unknown
  misc_feature (1)..( 13): Result.003 file - promoters60/3438512
acaatccaaaggg

SEQ ID NO: 130824 - DNA, 13 bp, Unknown
  misc_feature (1)..( 13): Result.003 file - promoters60/3438512
caaatcgaaatcg

SEQ ID NO: 130825 - DNA, 13 bp, Unknown
  misc_feature (1)..( 13): Result.003 file - promoters60/3438512
caaaaccaaagaa

SEQ ID NO: 130826 - DNA, 13 bp, Unknown
  misc_feature (1)..( 13): Result.003 file - promoters60/3438512
gcataacaaaaaa

SEQ ID NO: 130827 - DNA, 13 bp, Unknown
  misc_feature (1)..( 13): Result.003 file - promoters60/3438512
gagttggatagct

SEQ ID NO: 130828 - DNA, 13 bp, Unknown
  misc_feature (1)..( 13): Result.003 file - promoters60/3438512
tgagtggatattg

SEQ ID NO: 130829 - DNA, 13 bp, Unknown
  misc_feature (1)..( 13): Result.003 file - promoters60/3438512
tatgaggattttg

SEQ ID NO: 130830 - DNA, 12 bp, Unknown
  misc_feature (1)..( 12): Result.003 file - promoters60/3438512
caacaatgtaca

SEQ ID NO: 130831 - DNA, 12 bp, Unknown
  misc_feature (1)..( 12): Result.003 file - promoters60/3438512
caataatttaca

SEQ ID NO: 130832 - DNA, 12 bp, Unknown
  misc_feature (1)..( 12): Result.003 file - promoters60/3438512
ttacaatgttgc

SEQ ID NO: 130833 - DNA, 12 bp, Unknown
  misc_feature (1)..( 12): Result.003 file - promoters60/3438512
tcacaatgtgtt

SEQ ID NO: 130834 - DNA, 12 bp, Unknown
  misc_feature (1)..( 12): Result.003 file - promoters60/3438512
gtataattttat

SEQ ID NO: 130835 - DNA, 12 bp, Unknown
  misc_feature (1)..( 12): Result.003 file - promoters60/3438512
gcatagtttctc

SEQ ID NO: 130836 - DNA, 20 bp, Unknown
  misc_feature (1)..( 20): Result.003 file - promoters60/3438512
ttagtctttgcttacaattt

SEQ ID NO: 130837 - DNA, 20 bp, Unknown
  misc_feature (1)..( 20): Result.003 file - promoters60/3438512
aaaagttttacttttttttt

SEQ ID NO: 130838 - DNA, 20 bp, Unknown
  misc_feature (1)..( 20): Result.003 file - promoters60/3438512
aataaagttgtttatataaa

SEQ ID NO: 130839 - DNA, 20 bp, Unknown
  misc_feature (1)..( 20): Result.003 file - promoters60/3438512
ctcttacttgtttaaagata

SEQ ID NO: 130840 - DNA, 20 bp, Unknown
  misc_feature (1)..( 20): Result.003 file - promoters60/3438512
ctcacccttctttaaccatc

SEQ ID NO: 130841 - DNA, 21 bp, Unknown
  misc_feature (1)..( 21): Result.003 file - promoters60/3438512
aaaggttttacctttttacca

SEQ ID NO: 130842 - DNA, 21 bp, Unknown
  misc_feature (1)..( 21): Result.003 file - promoters60/3438512
caaaagacacgtttgtatgtt

SEQ ID NO: 130843 - DNA, 21 bp, Unknown
  misc_feature (1)..( 21): Result.003 file - promoters60/3438512
tttttgttaaacttacatgtt

SEQ ID NO: 130844 - DNA, 10 bp, Unknown
  misc_feature (1)..( 10): Result.003 file - promoters60/3438512
tttataaaac

SEQ ID NO: 130845 - DNA, 10 bp, Unknown
  misc_feature (1)..( 10): Result.003 file - promoters60/3438512
actattaaag

SEQ ID NO: 130846 - DNA, 10 bp, Unknown
  misc_feature (1)..( 10): Result.003 file - promoters60/3438512
tatataaatg

SEQ ID NO: 130847 - DNA, 10 bp, Unknown
  misc_feature (1)..( 10): Result.003 file - promoters60/3438512
actataaaac

SEQ ID NO: 130848 - DNA, 10 bp, Unknown
  misc_feature (1)..( 10): Result.003 file - promoters60/3438512
attatttaag

SEQ ID NO: 130849 - DNA, 10 bp, Unknown
  misc_feature (1)..( 10): Result.003 file - promoters60/3438512
ctcatttttt

SEQ ID NO: 130850 - DNA, 6 bp, Unknown
  misc_feature (1)..( 6): Result.003 file - promoters60/3438518
aaaata

SEQ ID NO: 130851 - DNA, 6 bp, Unknown
  misc_feature (1)..( 6): Result.003 file - promoters60/3438518
aaaata

SEQ ID NO: 130852 - DNA, 6 bp, Unknown
  misc_feature (1)..( 6): Result.003 file - promoters60/3438518
ttaaaa

SEQ ID NO: 130853 - DNA, 6 bp, Unknown
  misc_feature (1)..( 6): Result.003 file - promoters60/3438518
ttaaaa

SEQ ID NO: 130854 - DNA, 7 bp, Unknown
  misc_feature (1)..( 7): Result.003 file - promoters60/3438518
aaaatta

SEQ ID NO: 130855 - DNA, 7 bp, Unknown
  misc_feature (1)..( 7): Result.003 file - promoters60/3438518
aaaattt

SEQ ID NO: 130856 - DNA, 7 bp, Unknown
  misc_feature (1)..( 7): Result.003 file - promoters60/3438518
aaagtta

SEQ ID NO: 130857 - DNA, 9 bp, Unknown
  misc_feature (1)..( 9): Result.003 file - promoters60/3438518
aatacattt

SEQ ID NO: 130858 - DNA, 9 bp, Unknown
  misc_feature (1)..( 9): Result.003 file - promoters60/3438518
aatactttt

SEQ ID NO: 130859 - DNA, 6 bp, Unknown
  misc_feature (1)..( 6): Result.003 file - promoters60/3438518
tcctct

SEQ ID NO: 130860 - DNA, 6 bp, Unknown
  misc_feature (1)..( 6): Result.003 file - promoters60/3438518
tcctct

SEQ ID NO: 130861 - DNA, 8 bp, Unknown
  misc_feature (1)..( 8): Result.003 file - promoters60/3438518
tatatata

SEQ ID NO: 130862 - DNA, 8 bp, Unknown
  misc_feature (1)..( 8): Result.003 file - promoters60/3438518
tatatata

SEQ ID NO: 130863 - DNA, 6 bp, Unknown
  misc_feature (1)..( 6): Result.003 file - promoters60/3438518
aataaa

SEQ ID NO: 130864 - DNA, 6 bp, Unknown
  misc_feature (1)..( 6): Result.003 file - promoters60/3438518
aataaa

SEQ ID NO: 130865 - DNA, 6 bp, Unknown
  misc_feature (1)..( 6): Result.003 file - promoters60/3438518
ctaacc

SEQ ID NO: 130866 - DNA, 6 bp, Unknown
  misc_feature (1)..( 6): Result.003 file - promoters60/3438518
ctaacc

SEQ ID NO: 130867 - DNA, 6 bp, Unknown
  misc_feature (1)..( 6): Result.003 file - promoters60/3438518
attagt

SEQ ID NO: 130868 - DNA, 6 bp, Unknown
  misc_feature (1)..( 6): Result.003 file - promoters60/3438518
attagt

SEQ ID NO: 130869 - DNA, 6 bp, Unknown
  misc_feature (1)..( 6): Result.003 file - promoters60/3438518
ttaaca

SEQ ID NO: 130870 - DNA, 6 bp, Unknown
  misc_feature (1)..( 6): Result.003 file - promoters60/3438518
ttaaca

SEQ ID NO: 130871 - DNA, 6 bp, Unknown
  misc_feature (1)..( 6): Result.003 file - promoters60/3438518
taagaa

SEQ ID NO: 130872 - DNA, 6 bp, Unknown
  misc_feature (1)..( 6): Result.003 file - promoters60/3438518
taagaa

SEQ ID NO: 130873 - DNA, 6 bp, Unknown
  misc_feature (1)..( 6): Result.003 file - promoters60/3438518
gataga

SEQ ID NO: 130874 - DNA, 6 bp, Unknown
  misc_feature (1)..( 6): Result.003 file - promoters60/3438518
gataga

SEQ ID NO: 130875 - DNA, 9 bp, Unknown
  misc_feature (1)..( 9): Result.003 file - promoters60/3438518
gagttgagt

SEQ ID NO: 130876 - DNA, 9 bp, Unknown
  misc_feature (1)..( 9): Result.003 file - promoters60/3438518
gagtggagt

SEQ ID NO: 130877 - DNA, 8 bp, Unknown
  misc_feature (1)..( 8): Result.003 file - promoters60/3438518
gactaaaa

SEQ ID NO: 130878 - DNA, 8 bp, Unknown
  misc_feature (1)..( 8): Result.003 file - promoters60/3438518
gacgaaaa

SEQ ID NO: 130879 - DNA, 6 bp, Unknown
  misc_feature (1)..( 6): Result.003 file - promoters60/3438518
cgattt

SEQ ID NO: 130880 - DNA, 6 bp, Unknown
  misc_feature (1)..( 6): Result.003 file - promoters60/3438518
cgattt

SEQ ID NO: 130881 - DNA, 7 bp, Unknown
  misc_feature (1)..( 7): Result.003 file - promoters60/3438518
tcaattt

SEQ ID NO: 130882 - DNA, 7 bp, Unknown
  misc_feature (1)..( 7): Result.003 file - promoters60/3438518
tcaattt

SEQ ID NO: 130883 - DNA, 7 bp, Unknown
  misc_feature (1)..( 7): Result.003 file - promoters60/3438518
tttgaat

SEQ ID NO: 130884 - DNA, 7 bp, Unknown
  misc_feature (1)..( 7): Result.003 file - promoters60/3438518
ttttaat

SEQ ID NO: 130885 - DNA, 6 bp, Unknown
  misc_feature (1)..( 6): Result.003 file - promoters60/3438518
aataaa

SEQ ID NO: 130886 - DNA, 6 bp, Unknown
  misc_feature (1)..( 6): Result.003 file - promoters60/3438518
aataaa

SEQ ID NO: 130887 - DNA, 8 bp, Unknown
  misc_feature (1)..( 8): Result.003 file - promoters60/3438518
aaatagaa

SEQ ID NO: 130888 - DNA, 8 bp, Unknown
  misc_feature (1)..( 8): Result.003 file - promoters60/3438518
aaatcgaa

SEQ ID NO: 130889 - DNA, 7 bp, Unknown
  misc_feature (1)..( 7): Result.003 file - promoters60/3438518
aatattt

SEQ ID NO: 130890 - DNA, 7 bp, Unknown
  misc_feature (1)..( 7): Result.003 file - promoters60/3438518
aatgttt

SEQ ID NO: 130891 - DNA, 6 bp, Unknown
  misc_feature (1)..( 6): Result.003 file - promoters60/3438518
agcttc

SEQ ID NO: 130892 - DNA, 6 bp, Unknown
  misc_feature (1)..( 6): Result.003 file - promoters60/3438518
agcttc

SEQ ID NO: 130893 - DNA, 7 bp, Unknown
  misc_feature (1)..( 7): Result.003 file - promoters60/3438518
acacaaa

SEQ ID NO: 130894 - DNA, 7 bp, Unknown
  misc_feature (1)..( 7): Result.003 file - promoters60/3438518
acacaaa

SEQ ID NO: 130895 - DNA, 11 bp, Unknown
  misc_feature (1)..( 11): Result.003 file - promoters60/3438594
taaaaacttct

SEQ ID NO: 130896 - DNA, 11 bp, Unknown
  misc_feature (1)..( 11): Result.003 file - promoters60/3438594
taaaacctttt

SEQ ID NO: 130897 - DNA, 11 bp, Unknown
  misc_feature (1)..( 11): Result.003 file - promoters60/3438594
gaaaagcttct

SEQ ID NO: 130898 - DNA, 11 bp, Unknown
  misc_feature (1)..( 11): Result.003 file - promoters60/3438594
gaaaaacttta

SEQ ID NO: 130899 - DNA, 9 bp, Unknown
  misc_feature (1)..( 9): Result.003 file - promoters60/3438594
aaataaaaa

SEQ ID NO: 130900 - DNA, 9 bp, Unknown
  misc_feature (1)..( 9): Result.003 file - promoters60/3438594
aaacaaaag

SEQ ID NO: 130901 - DNA, 9 bp, Unknown
  misc_feature (1)..( 9): Result.003 file - promoters60/3438594
aattaaatt

SEQ ID NO: 130902 - DNA, 9 bp, Unknown
  misc_feature (1)..( 9): Result.003 file - promoters60/3438594
ctataaaaa

SEQ ID NO: 130903 - DNA, 9 bp, Unknown
  misc_feature (1)..( 9): Result.003 file - promoters60/3438594
tattaaaat

SEQ ID NO: 130904 - DNA, 11 bp, Unknown
  misc_feature (1)..( 11): Result.003 file - promoters60/3438594
taagtaaacaa

SEQ ID NO: 130905 - DNA, 11 bp, Unknown
  misc_feature (1)..( 11): Result.003 file - promoters60/3438594
gttttaaacag

SEQ ID NO: 130906 - DNA, 11 bp, Unknown
  misc_feature (1)..( 11): Result.003 file - promoters60/3438594
aaaataaaaat

SEQ ID NO: 130907 - DNA, 11 bp, Unknown
  misc_feature (1)..( 11): Result.003 file - promoters60/3438594
aaaagaaatgt

SEQ ID NO: 130908 - DNA, 11 bp, Unknown
  misc_feature (1)..( 11): Result.003 file - promoters60/3438594
aaaatagaaat

SEQ ID NO: 130909 - DNA, 9 bp, Unknown
  misc_feature (1)..( 9): Result.003 file - promoters60/3438594
aattaatta

SEQ ID NO: 130910 - DNA, 9 bp, Unknown
  misc_feature (1)..( 9): Result.003 file - promoters60/3438594
aatcaattt

SEQ ID NO: 130911 - DNA, 9 bp, Unknown
  misc_feature (1)..( 9): Result.003 file - promoters60/3438594
cgttattta

SEQ ID NO: 130912 - DNA, 9 bp, Unknown
  misc_feature (1)..( 9): Result.003 file - promoters60/3438594
tactattta

SEQ ID NO: 130913 - DNA, 9 bp, Unknown
  misc_feature (1)..( 9): Result.003 file - promoters60/3438594
taagtaaac

SEQ ID NO: 130914 - DNA, 9 bp, Unknown
  misc_feature (1)..( 9): Result.003 file - promoters60/3438594
aaagaaaat

SEQ ID NO: 130915 - DNA, 9 bp, Unknown
  misc_feature (1)..( 9): Result.003 file - promoters60/3438594
aaacaaaag

SEQ ID NO: 130916 - DNA, 9 bp, Unknown
  misc_feature (1)..( 9): Result.003 file - promoters60/3438594
aaagaaatg

SEQ ID NO: 130917 - DNA, 9 bp, Unknown
  misc_feature (1)..( 9): Result.003 file - promoters60/3438594
gtggaaaat

SEQ ID NO: 130918 - DNA, 12 bp, Unknown
  misc_feature (1)..( 12): Result.003 file - promoters60/3438594
aaaataagtaaa

SEQ ID NO: 130919 - DNA, 12 bp, Unknown
  misc_feature (1)..( 12): Result.003 file - promoters60/3438594
aaaataaaaatc

SEQ ID NO: 130920 - DNA, 12 bp, Unknown
  misc_feature (1)..( 12): Result.003 file - promoters60/3438594
aaaatagaaata

SEQ ID NO: 130921 - DNA, 12 bp, Unknown
  misc_feature (1)..( 12): Result.003 file - promoters60/3438594
caaataaagatc

SEQ ID NO: 130922 - DNA, 9 bp, Unknown
  misc_feature (1)..( 9): Result.003 file - promoters60/3438594
tagaaataa

SEQ ID NO: 130923 - DNA, 9 bp, Unknown
  misc_feature (1)..( 9): Result.003 file - promoters60/3438594
caaaaataa

SEQ ID NO: 130924 - DNA, 9 bp, Unknown
  misc_feature (1)..( 9): Result.003 file - promoters60/3438594
gccaaataa

SEQ ID NO: 130925 - DNA, 9 bp, Unknown
  misc_feature (1)..( 9): Result.003 file - promoters60/3438594
tagaaatat

SEQ ID NO: 130926 - DNA, 10 bp, Unknown
  misc_feature (1)..( 10): Result.003 file - promoters60/3438594
tcaaaactaa

SEQ ID NO: 130927 - DNA, 12 bp, Unknown
  misc_feature (1)..( 12): Result.003 file - promoters60/3438594
agtatacaatga

SEQ ID NO: 130928 - DNA, 12 bp, Unknown
  misc_feature (1)..( 12): Result.003 file - promoters60/3438594
agtaaacaaaag

SEQ ID NO: 130929 - DNA, 12 bp, Unknown
  misc_feature (1)..( 12): Result.003 file - promoters60/3438594
actaaacaaaat

SEQ ID NO: 130930 - DNA, 12 bp, Unknown
  misc_feature (1)..( 12): Result.003 file - promoters60/3438594
tgtttccaaaat

SEQ ID NO: 130931 - DNA, 11 bp, Unknown
  misc_feature (1)..( 11): Result.003 file - promoters60/3438594
aacaaaagatt

SEQ ID NO: 130932 - DNA, 11 bp, Unknown
  misc_feature (1)..( 11): Result.003 file - promoters60/3438594
aaataaagatc

SEQ ID NO: 130933 - DNA, 11 bp, Unknown
  misc_feature (1)..( 11): Result.003 file - promoters60/3438594
aaataaaaatc

SEQ ID NO: 130934 - DNA, 11 bp, Unknown
  misc_feature (1)..( 11): Result.003 file - promoters60/3438594
tccaaaatatc

SEQ ID NO: 130935 - DNA, 9 bp, Unknown
  misc_feature (1)..( 9): Result.003 file - promoters60/3438594
ttatttgaa

SEQ ID NO: 130936 - DNA, 9 bp, Unknown
  misc_feature (1)..( 9): Result.003 file - promoters60/3438594
ttatttatg

SEQ ID NO: 130937 - DNA, 9 bp, Unknown
  misc_feature (1)..( 9): Result.003 file - promoters60/3438594
ctatttagc

SEQ ID NO: 130938 - DNA, 9 bp, Unknown
  misc_feature (1)..( 9): Result.003 file - promoters60/3438594
atatatatg

SEQ ID NO: 130939 - DNA, 9 bp, Unknown
  misc_feature (1)..( 9): Result.003 file - promoters60/3438648
tcaataaac

SEQ ID NO: 130940 - DNA, 9 bp, Unknown
  misc_feature (1)..( 9): Result.003 file - promoters60/3438648
acaaaaaat

SEQ ID NO: 130941 - DNA, 9 bp, Unknown
  misc_feature (1)..( 9): Result.003 file - promoters60/3438648
ggaaaaaaa

SEQ ID NO: 130942 - DNA, 9 bp, Unknown
  misc_feature (1)..( 9): Result.003 file - promoters60/3438648
agaagaaaa

SEQ ID NO: 130943 - DNA, 9 bp, Unknown
  misc_feature (1)..( 9): Result.003 file - promoters60/3438648
agaagagac

SEQ ID NO: 130944 - DNA, 9 bp, Unknown
  misc_feature (1)..( 9): Result.003 file - promoters60/3438648
agaaacaat

SEQ ID NO: 130945 - DNA, 7 bp, Unknown
  misc_feature (1)..( 7): Result.003 file - promoters60/3438919
ggtctat

SEQ ID NO: 130946 - DNA, 7 bp, Unknown
  misc_feature (1)..( 7): Result.003 file - promoters60/3438919
ggtgtat

SEQ ID NO: 130947 - DNA, 9 bp, Unknown
  misc_feature (1)..( 9): Result.003 file - promoters60/3438919
cataatcaa

SEQ ID NO: 130948 - DNA, 9 bp, Unknown
  misc_feature (1)..( 9): Result.003 file - promoters60/3438919
tttaaacaa

SEQ ID NO: 130949 - DNA, 9 bp, Unknown
  misc_feature (1)..( 9): Result.003 file - promoters60/3438919
tttaatcaa

SEQ ID NO: 130950 - DNA, 6 bp, Unknown
  misc_feature (1)..( 6): Result.003 file - promoters60/3438919
taatta

SEQ ID NO: 130951 - DNA, 6 bp, Unknown
  misc_feature (1)..( 6): Result.003 file - promoters60/3438919
taatta

SEQ ID NO: 130952 - DNA, 6 bp, Unknown
  misc_feature (1)..( 6): Result.003 file - promoters60/3438919
ttaaaa

SEQ ID NO: 130953 - DNA, 6 bp, Unknown
  misc_feature (1)..( 6): Result.003 file - promoters60/3438919
ttaaaa

SEQ ID NO: 130954 - DNA, 6 bp, Unknown
  misc_feature (1)..( 6): Result.003 file - promoters60/3438919
aaaaaa

SEQ ID NO: 130955 - DNA, 6 bp, Unknown
  misc_feature (1)..( 6): Result.003 file - promoters60/3438919
aaaaaa

SEQ ID NO: 130956 - DNA, 9 bp, Unknown
  misc_feature (1)..( 9): Result.003 file - promoters60/3438919
tttcatctg

SEQ ID NO: 130957 - DNA, 9 bp, Unknown
  misc_feature (1)..( 9): Result.003 file - promoters60/3438919
tttaatcaa

SEQ ID NO: 130958 - DNA, 9 bp, Unknown
  misc_feature (1)..( 9): Result.003 file - promoters60/3438919
tttaaacaa

SEQ ID NO: 130959 - DNA, 6 bp, Unknown
  misc_feature (1)..( 6): Result.003 file - promoters60/3438919
gacgtg

SEQ ID NO: 130960 - DNA, 6 bp, Unknown
  misc_feature (1)..( 6): Result.003 file - promoters60/3438919
gacgtg

SEQ ID NO: 130961 - DNA, 7 bp, Unknown
  misc_feature (1)..( 7): Result.003 file - promoters60/3438919
tttttta

SEQ ID NO: 130962 - DNA, 7 bp, Unknown
  misc_feature (1)..( 7): Result.003 file - promoters60/3438919
tttatta

SEQ ID NO: 130963 - DNA, 7 bp, Unknown
  misc_feature (1)..( 7): Result.003 file - promoters60/3438919
attgggc

SEQ ID NO: 130964 - DNA, 7 bp, Unknown
  misc_feature (1)..( 7): Result.003 file - promoters60/3438919
attaggc

SEQ ID NO: 130965 - DNA, 7 bp, Unknown
  misc_feature (1)..( 7): Result.003 file - promoters60/3438919
ttacaaa

SEQ ID NO: 130966 - DNA, 7 bp, Unknown
  misc_feature (1)..( 7): Result.003 file - promoters60/3438919
ttaaaaa

SEQ ID NO: 130967 - DNA, 7 bp, Unknown
  misc_feature (1)..( 7): Result.003 file - promoters60/3438919
aatacat

SEQ ID NO: 130968 - DNA, 7 bp, Unknown
  misc_feature (1)..( 7): Result.003 file - promoters60/3438919
aattcat

SEQ ID NO: 130969 - DNA, 8 bp, Unknown
  misc_feature (1)..( 8): Result.003 file - promoters60/3438919
ctgacaaa

SEQ ID NO: 130970 - DNA, 8 bp, Unknown
  misc_feature (1)..( 8): Result.003 file - promoters60/3438919
ctgagaaa

SEQ ID NO: 130971 - DNA, 8 bp, Unknown
  misc_feature (1)..( 8): Result.003 file - promoters60/3438927
tgttgtgc

SEQ ID NO: 130972 - DNA, 8 bp, Unknown
  misc_feature (1)..( 8): Result.003 file - promoters60/3438927
tgttttgc

SEQ ID NO: 130973 - DNA, 12 bp, Unknown
  misc_feature (1)..( 12): Result.003 file - promoters60/3438927
tttcagggattc

SEQ ID NO: 130974 - DNA, 12 bp, Unknown
  misc_feature (1)..( 12): Result.003 file - promoters60/3438927
tttcaaggattc

SEQ ID NO: 130975 - DNA, 6 bp, Unknown
  misc_feature (1)..( 6): Result.003 file - promoters60/3438927
ttcata

SEQ ID NO: 130976 - DNA, 6 bp, Unknown
  misc_feature (1)..( 6): Result.003 file - promoters60/3438927
ttcata

SEQ ID NO: 130977 - DNA, 7 bp, Unknown
  misc_feature (1)..( 7): Result.003 file - promoters60/3438927
aaagaca

SEQ ID NO: 130978 - DNA, 7 bp, Unknown
  misc_feature (1)..( 7): Result.003 file - promoters60/3438927
aaagaca

SEQ ID NO: 130979 - DNA, 9 bp, Unknown
  misc_feature (1)..( 9): Result.003 file - promoters60/3438927
atatgtaaa

SEQ ID NO: 130980 - DNA, 9 bp, Unknown
  misc_feature (1)..( 9): Result.003 file - promoters60/3438927
ataagtaaa

SEQ ID NO: 130981 - DNA, 9 bp, Unknown
  misc_feature (1)..( 9): Result.003 file - promoters60/3438927
aagagtaaa

SEQ ID NO: 130982 - DNA, 8 bp, Unknown
  misc_feature (1)..( 8): Result.003 file - promoters60/3438927
tcatttta

SEQ ID NO: 130983 - DNA, 8 bp, Unknown
  misc_feature (1)..( 8): Result.003 file - promoters60/3438927
tcacttta

SEQ ID NO: 130984 - DNA, 10 bp, Unknown
  misc_feature (1)..( 10): Result.003 file - promoters60/3438927
ccaaaaaata

SEQ ID NO: 130985 - DNA, 10 bp, Unknown
  misc_feature (1)..( 10): Result.003 file - promoters60/3438927
aaagaaaata

SEQ ID NO: 130986 - DNA, 10 bp, Unknown
  misc_feature (1)..( 10): Result.003 file - promoters60/3438927
aaatgaaata

SEQ ID NO: 130987 - DNA, 6 bp, Unknown
  misc_feature (1)..( 6): Result.003 file - promoters60/3438927
gaagaa

SEQ ID NO: 130988 - DNA, 6 bp, Unknown
  misc_feature (1)..( 6): Result.003 file - promoters60/3438927
gaagaa

SEQ ID NO: 130989 - DNA, 8 bp, Unknown
  misc_feature (1)..( 8): Result.003 file - promoters60/3438927
attagttt

SEQ ID NO: 130990 - DNA, 8 bp, Unknown
  misc_feature (1)..( 8): Result.003 file - promoters60/3438927
atttgttt

SEQ ID NO: 130991 - DNA, 7 bp, Unknown
  misc_feature (1)..( 7): Result.003 file - promoters60/3438927
tattttt

SEQ ID NO: 130992 - DNA, 7 bp, Unknown
  misc_feature (1)..( 7): Result.003 file - promoters60/3438927
tattttt

SEQ ID NO: 130993 - DNA, 9 bp, Unknown
  misc_feature (1)..( 9): Result.003 file - promoters60/3438927
aaaaaaaaa

SEQ ID NO: 130994 - DNA, 9 bp, Unknown
  misc_feature (1)..( 9): Result.003 file - promoters60/3438927
aaaaagaaa

SEQ ID NO: 130995 - DNA, 9 bp, Unknown
  misc_feature (1)..( 9): Result.003 file - promoters60/3438927
aaaaaactt

SEQ ID NO: 130996 - DNA, 6 bp, Unknown
  misc_feature (1)..( 6): Result.003 file - promoters60/3438927
taaaac

SEQ ID NO: 130997 - DNA, 6 bp, Unknown
  misc_feature (1)..( 6): Result.003 file - promoters60/3438927
taaaac

SEQ ID NO: 130998 - DNA, 8 bp, Unknown
  misc_feature (1)..( 8): Result.003 file - promoters60/3438927
tgtacaaa

SEQ ID NO: 130999 - DNA, 8 bp, Unknown
  misc_feature (1)..( 8): Result.003 file - promoters60/3438927
agtaaaaa

SEQ ID NO: 131000 - DNA, 8 bp, Unknown
  misc_feature (1)..( 8): Result.003 file - promoters60/3438927
agtaaaga

SEQ ID NO: 131001 - DNA, 8 bp, Unknown
  misc_feature (1)..( 8): Result.003 file - promoters60/3438927
attatgtt

SEQ ID NO: 131002 - DNA, 8 bp, Unknown
  misc_feature (1)..( 8): Result.003 file - promoters60/3438927
attttgtt

SEQ ID NO: 131003 - DNA, 13 bp, Unknown
  misc_feature (1)..( 13): Result.003 file - promoters60/3438927
gaaaaatcttaac

SEQ ID NO: 131004 - DNA, 13 bp, Unknown
  misc_feature (1)..( 13): Result.003 file - promoters60/3438927
gaaatatcttaac

SEQ ID NO: 131005 - DNA, 13 bp, Unknown
  misc_feature (1)..( 13): Result.003 file - promoters60/3438927
aaaataaaataaa

SEQ ID NO: 131006 - DNA, 7 bp, Unknown
  misc_feature (1)..( 7): Result.003 file - promoters60/3438927
aacaaat

SEQ ID NO: 131007 - DNA, 7 bp, Unknown
  misc_feature (1)..( 7): Result.003 file - promoters60/3438927
aaccaat

SEQ ID NO: 131008 - DNA, 6 bp, Unknown
  misc_feature (1)..( 6): Result.003 file - promoters60/3438927
aagaaa

SEQ ID NO: 131009 - DNA, 6 bp, Unknown
  misc_feature (1)..( 6): Result.003 file - promoters60/3438927
aagaaa

SEQ ID NO: 131010 - DNA, 7 bp, Unknown
  misc_feature (1)..( 7): Result.003 file - promoters60/3438927
ttaatgt

SEQ ID NO: 131011 - DNA, 7 bp, Unknown
  misc_feature (1)..( 7): Result.003 file - promoters60/3438927
ttattgt

SEQ ID NO: 131012 - DNA, 7 bp, Unknown
  misc_feature (1)..( 7): Result.003 file - promoters60/3438927
aatcggg

SEQ ID NO: 131013 - DNA, 7 bp, Unknown
  misc_feature (1)..( 7): Result.003 file - promoters60/3438927
aattggg

SEQ ID NO: 131014 - DNA, 8 bp, Unknown
  misc_feature (1)..( 8): Result.003 file - promoters60/3438927
gaaagaaa

SEQ ID NO: 131015 - DNA, 8 bp, Unknown
  misc_feature (1)..( 8): Result.003 file - promoters60/3438927
gaaacaaa

SEQ ID NO: 131016 - DNA, 10 bp, Unknown
  misc_feature (1)..( 10): Result.003 file - promoters60/3438927
ggaaaagaaa

SEQ ID NO: 131017 - DNA, 10 bp, Unknown
  misc_feature (1)..( 10): Result.003 file - promoters60/3438927
ggaaatgaaa

SEQ ID NO: 131018 - DNA, 7 bp, Unknown
  misc_feature (1)..( 7): Result.003 file - promoters60/3438927
cccacta

SEQ ID NO: 131019 - DNA, 7 bp, Unknown
  misc_feature (1)..( 7): Result.003 file - promoters60/3438927
cccacta

SEQ ID NO: 131020 - DNA, 9 bp, Unknown
  misc_feature (1)..( 9): Result.003 file - promoters60/3438927
aaagaaaag

SEQ ID NO: 131021 - DNA, 9 bp, Unknown
  misc_feature (1)..( 9): Result.003 file - promoters60/3438927
aaagtaaag

SEQ ID NO: 131022 - DNA, 7 bp, Unknown
  misc_feature (1)..( 7): Result.003 file - promoters60/3438927
gtatata

SEQ ID NO: 131023 - DNA, 7 bp, Unknown
  misc_feature (1)..( 7): Result.003 file - promoters60/3438927
gtatata

SEQ ID NO: 131024 - DNA, 7 bp, Unknown
  misc_feature (1)..( 7): Result.003 file - promoters60/3438946
agaaagg

SEQ ID NO: 131025 - DNA, 7 bp, Unknown
  misc_feature (1)..( 7): Result.003 file - promoters60/3438946
agaaagt

SEQ ID NO: 131026 - DNA, 7 bp, Unknown
  misc_feature (1)..( 7): Result.003 file - promoters60/3438946
agatagt

SEQ ID NO: 131027 - DNA, 8 bp, Unknown
  misc_feature (1)..( 8): Result.003 file - promoters60/3438946
gcataatg

SEQ ID NO: 131028 - DNA, 8 bp, Unknown
  misc_feature (1)..( 8): Result.003 file - promoters60/3438946
ttataatg

SEQ ID NO: 131029 - DNA, 8 bp, Unknown
  misc_feature (1)..( 8): Result.003 file - promoters60/3438946
ttaaaatc

SEQ ID NO: 131030 - DNA, 8 bp, Unknown
  misc_feature (1)..( 8): Result.003 file - promoters60/3438946
tcaaaatc

SEQ ID NO: 131031 - DNA, 8 bp, Unknown
  misc_feature (1)..( 8): Result.003 file - promoters60/3438946
gttaattg

SEQ ID NO: 131032 - DNA, 8 bp, Unknown
  misc_feature (1)..( 8): Result.003 file - promoters60/3438946
gttaattg

SEQ ID NO: 131033 - DNA, 8 bp, Unknown
  misc_feature (1)..( 8): Result.003 file - promoters60/3438946
attacttg

SEQ ID NO: 131034 - DNA, 8 bp, Unknown
  misc_feature (1)..( 8): Result.003 file - promoters60/3438990
aaaattac

SEQ ID NO: 131035 - DNA, 8 bp, Unknown
  misc_feature (1)..( 8): Result.003 file - promoters60/3438990
aaacttac

SEQ ID NO: 131036 - DNA, 6 bp, Unknown
  misc_feature (1)..( 6): Result.003 file - promoters60/3438990
aacact

SEQ ID NO: 131037 - DNA, 6 bp, Unknown
  misc_feature (1)..( 6): Result.003 file - promoters60/3438990
aacact

SEQ ID NO: 131038 - DNA, 9 bp, Unknown
  misc_feature (1)..( 9): Result.003 file - promoters60/3438990
gcatatttt

SEQ ID NO: 131039 - DNA, 9 bp, Unknown
  misc_feature (1)..( 9): Result.003 file - promoters60/3438990
gcatagttt

SEQ ID NO: 131040 - DNA, 9 bp, Unknown
  misc_feature (1)..( 9): Result.003 file - promoters60/3438990
ctatattaa

SEQ ID NO: 131041 - DNA, 8 bp, Unknown
  misc_feature (1)..( 8): Result.003 file - promoters60/3438990
tattttat

SEQ ID NO: 131042 - DNA, 8 bp, Unknown
  misc_feature (1)..( 8): Result.003 file - promoters60/3438990
tcttttat

SEQ ID NO: 131043 - DNA, 8 bp, Unknown
  misc_feature (1)..( 8): Result.003 file - promoters60/3438990
tatattaa

SEQ ID NO: 131044 - DNA, 8 bp, Unknown
  misc_feature (1)..( 8): Result.003 file - promoters60/3438990
aaaaaaaa

SEQ ID NO: 131045 - DNA, 8 bp, Unknown
  misc_feature (1)..( 8): Result.003 file - promoters60/3438990
aaaataaa

SEQ ID NO: 131046 - DNA, 6 bp, Unknown
  misc_feature (1)..( 6): Result.003 file - promoters60/3438990
aataaa

SEQ ID NO: 131047 - DNA, 6 bp, Unknown
  misc_feature (1)..( 6): Result.003 file - promoters60/3438990
aataaa

SEQ ID NO: 131048 - DNA, 6 bp, Unknown
  misc_feature (1)..( 6): Result.003 file - promoters60/3438990
ttaagt

SEQ ID NO: 131049 - DNA, 6 bp, Unknown
  misc_feature (1)..( 6): Result.003 file - promoters60/3438990
ttaagt

SEQ ID NO: 131050 - DNA, 6 bp, Unknown
  misc_feature (1)..( 6): Result.003 file - promoters60/3438990
tatatt

SEQ ID NO: 131051 - DNA, 6 bp, Unknown
  misc_feature (1)..( 6): Result.003 file - promoters60/3438990
tatatt

SEQ ID NO: 131052 - DNA, 7 bp, Unknown
  misc_feature (1)..( 7): Result.003 file - promoters60/3438990
aaagtct

SEQ ID NO: 131053 - DNA, 7 bp, Unknown
  misc_feature (1)..( 7): Result.003 file - promoters60/3438990
aaaatct

SEQ ID NO: 131054 - DNA, 7 bp, Unknown
  misc_feature (1)..( 7): Result.003 file - promoters60/3438990
caagtaa

SEQ ID NO: 131055 - DNA, 7 bp, Unknown
  misc_feature (1)..( 7): Result.003 file - promoters60/3438990
caattaa

SEQ ID NO: 131056 - DNA, 7 bp, Unknown
  misc_feature (1)..( 7): Result.003 file - promoters60/3438990
tgttgaa

SEQ ID NO: 131057 - DNA, 7 bp, Unknown
  misc_feature (1)..( 7): Result.003 file - promoters60/3438990
tgttgaa

SEQ ID NO: 131058 - DNA, 6 bp, Unknown
  misc_feature (1)..( 6): Result.003 file - promoters60/3438990
ctaaaa

SEQ ID NO: 131059 - DNA, 6 bp, Unknown
  misc_feature (1)..( 6): Result.003 file - promoters60/3438990
ctaaaa

SEQ ID NO: 131060 - DNA, 10 bp, Unknown
  misc_feature (1)..( 10): Result.003 file - promoters60/3438990
aaaaccaaac

SEQ ID NO: 131061 - DNA, 10 bp, Unknown
  misc_feature (1)..( 10): Result.003 file - promoters60/3438990
aaagccaaac

SEQ ID NO: 131062 - DNA, 7 bp, Unknown
  misc_feature (1)..( 7): Result.003 file - promoters60/3438990
gcccaat

SEQ ID NO: 131063 - DNA, 7 bp, Unknown
  misc_feature (1)..( 7): Result.003 file - promoters60/3438990
gccgaat

SEQ ID NO: 131064 - DNA, 12 bp, Unknown
  misc_feature (1)..( 12): Result.003 file - promoters60/3439043
agagagaaagaa

SEQ ID NO: 131065 - DNA, 12 bp, Unknown
  misc_feature (1)..( 12): Result.003 file - promoters60/3439043
aaagaaaaaatt

SEQ ID NO: 131066 - DNA, 12 bp, Unknown
  misc_feature (1)..( 12): Result.003 file - promoters60/3439043
aaataaaacatt

SEQ ID NO: 131067 - DNA, 12 bp, Unknown
  misc_feature (1)..( 12): Result.003 file - promoters60/3439043
tacgaaaaaggt

SEQ ID NO: 131068 - DNA, 8 bp, Unknown
  misc_feature (1)..( 8): Result.003 file - promoters60/3439044
ataagttt

SEQ ID NO: 131069 - DNA, 8 bp, Unknown
  misc_feature (1)..( 8): Result.003 file - promoters60/3439044
ataagtct

SEQ ID NO: 131070 - DNA, 8 bp, Unknown
  misc_feature (1)..( 8): Result.003 file - promoters60/3439044
ttaagttc

SEQ ID NO: 131071 - DNA, 8 bp, Unknown
  misc_feature (1)..( 8): Result.003 file - promoters60/3439044
ttatgttt

SEQ ID NO: 131072 - DNA, 8 bp, Unknown
  misc_feature (1)..( 8): Result.003 file - promoters60/3439044
ttaattct

SEQ ID NO: 131073 - DNA, 8 bp, Unknown
  misc_feature (1)..( 8): Result.003 file - promoters60/3439044
gtaaatct

SEQ ID NO: 131074 - DNA, 8 bp, Unknown
  misc_feature (1)..( 8): Result.003 file - promoters60/3439044
aaaactta

SEQ ID NO: 131075 - DNA, 7 bp, Unknown
  misc_feature (1)..( 7): Result.003 file - promoters60/3439056
ttagctt

SEQ ID NO: 131076 - DNA, 7 bp, Unknown
  misc_feature (1)..( 7): Result.003 file - promoters60/3439056
ttatctt

SEQ ID NO: 131077 - DNA, 6 bp, Unknown
  misc_feature (1)..( 6): Result.003 file - promoters60/3439056
ctttat

SEQ ID NO: 131078 - DNA, 6 bp, Unknown
  misc_feature (1)..( 6): Result.003 file - promoters60/3439056
ctttat

SEQ ID NO: 131079 - DNA, 9 bp, Unknown
  misc_feature (1)..( 9): Result.003 file - promoters60/3439056
aaaaccaaa

SEQ ID NO: 131080 - DNA, 9 bp, Unknown
  misc_feature (1)..( 9): Result.003 file - promoters60/3439056
aaacccaaa

SEQ ID NO: 131081 - DNA, 7 bp, Unknown
  misc_feature (1)..( 7): Result.003 file - promoters60/3439056
atcgttt

SEQ ID NO: 131082 - DNA, 7 bp, Unknown
  misc_feature (1)..( 7): Result.003 file - promoters60/3439056
atcattt

SEQ ID NO: 131083 - DNA, 6 bp, Unknown
  misc_feature (1)..( 6): Result.003 file - promoters60/3439056
gcatgg

SEQ ID NO: 131084 - DNA, 6 bp, Unknown
  misc_feature (1)..( 6): Result.003 file - promoters60/3439056
gcatgg

SEQ ID NO: 131085 - DNA, 6 bp, Unknown
  misc_feature (1)..( 6): Result.003 file - promoters60/3439056
ttgata

SEQ ID NO: 131086 - DNA, 6 bp, Unknown
  misc_feature (1)..( 6): Result.003 file - promoters60/3439056
ttgata

SEQ ID NO: 131087 - DNA, 8 bp, Unknown
  misc_feature (1)..( 8): Result.003 file - promoters60/3439056
taaaatta

SEQ ID NO: 131088 - DNA, 8 bp, Unknown
  misc_feature (1)..( 8): Result.003 file - promoters60/3439056
taagatta

SEQ ID NO: 131089 - DNA, 6 bp, Unknown
  misc_feature (1)..( 6): Result.003 file - promoters60/3439056
ttggtc

SEQ ID NO: 131090 - DNA, 6 bp, Unknown
  misc_feature (1)..( 6): Result.003 file - promoters60/3439056
ttggtc

SEQ ID NO: 131091 - DNA, 8 bp, Unknown
  misc_feature (1)..( 8): Result.003 file - promoters60/3439056
ttttagat

SEQ ID NO: 131092 - DNA, 8 bp, Unknown
  misc_feature (1)..( 8): Result.003 file - promoters60/3439056
ttttagat

SEQ ID NO: 131093 - DNA, 8 bp, Unknown
  misc_feature (1)..( 8): Result.003 file - promoters60/3439056
caattttt

SEQ ID NO: 131094 - DNA, 8 bp, Unknown
  misc_feature (1)..( 8): Result.003 file - promoters60/3439056
caatattt

SEQ ID NO: 131095 - DNA, 6 bp, Unknown
  misc_feature (1)..( 6): Result.003 file - promoters60/3439056
aaattt

SEQ ID NO: 131096 - DNA, 6 bp, Unknown
  misc_feature (1)..( 6): Result.003 file - promoters60/3439056
aaattt

SEQ ID NO: 131097 - DNA, 6 bp, Unknown
  misc_feature (1)..( 6): Result.003 file - promoters60/3439056
catgtc

SEQ ID NO: 131098 - DNA, 6 bp, Unknown
  misc_feature (1)..( 6): Result.003 file - promoters60/3439056
catgtc

SEQ ID NO: 131099 - DNA, 7 bp, Unknown
  misc_feature (1)..( 7): Result.003 file - promoters60/3439056
ataattt

SEQ ID NO: 131100 - DNA, 7 bp, Unknown
  misc_feature (1)..( 7): Result.003 file - promoters60/3439056
ataattt

SEQ ID NO: 131101 - DNA, 7 bp, Unknown
  misc_feature (1)..( 7): Result.003 file - promoters60/3439056
agcgcta

SEQ ID NO: 131102 - DNA, 7 bp, Unknown
  misc_feature (1)..( 7): Result.003 file - promoters60/3439056
agcccta

SEQ ID NO: 131103 - DNA, 9 bp, Unknown
  misc_feature (1)..( 9): Result.003 file - promoters60/3439056
tttagcatg

SEQ ID NO: 131104 - DNA, 9 bp, Unknown
  misc_feature (1)..( 9): Result.003 file - promoters60/3439056
ttttgcatg

SEQ ID NO: 131105 - DNA, 7 bp, Unknown
  misc_feature (1)..( 7): Result.003 file - promoters60/3439056
atatata

SEQ ID NO: 131106 - DNA, 7 bp, Unknown
  misc_feature (1)..( 7): Result.003 file - promoters60/3439056
ataaata

SEQ ID NO: 131107 - DNA, 10 bp, Unknown
  misc_feature (1)..( 10): Result.003 file - promoters60/3439059
aataaaaatg

SEQ ID NO: 131108 - DNA, 10 bp, Unknown
  misc_feature (1)..( 10): Result.003 file - promoters60/3439059
tataataatt

SEQ ID NO: 131109 - DNA, 10 bp, Unknown
  misc_feature (1)..( 10): Result.003 file - promoters60/3439059
tataaatatg

SEQ ID NO: 131110 - DNA, 10 bp, Unknown
  misc_feature (1)..( 10): Result.003 file - promoters60/3439059
tatcataaat

SEQ ID NO: 131111 - DNA, 8 bp, Unknown
  misc_feature (1)..( 8): Result.003 file - promoters60/3439059
tcatatag

SEQ ID NO: 131112 - DNA, 8 bp, Unknown
  misc_feature (1)..( 8): Result.003 file - promoters60/3439059
gaatatag

SEQ ID NO: 131113 - DNA, 8 bp, Unknown
  misc_feature (1)..( 8): Result.003 file - promoters60/3439059
tcaaataa

SEQ ID NO: 131114 - DNA, 6 bp, Unknown
  misc_feature (1)..( 6): Result.003 file - promoters60/3439063
tttcta

SEQ ID NO: 131115 - DNA, 6 bp, Unknown
  misc_feature (1)..( 6): Result.003 file - promoters60/3439063
tttcta

SEQ ID NO: 131116 - DNA, 12 bp, Unknown
  misc_feature (1)..( 12): Result.003 file - promoters60/3439063
taaaaaaaaaaa

SEQ ID NO: 131117 - DNA, 12 bp, Unknown
  misc_feature (1)..( 12): Result.003 file - promoters60/3439063
taaacaaataaa

SEQ ID NO: 131118 - DNA, 7 bp, Unknown
  misc_feature (1)..( 7): Result.003 file - promoters60/3439063
tatatat

SEQ ID NO: 131119 - DNA, 7 bp, Unknown
  misc_feature (1)..( 7): Result.003 file - promoters60/3439063
tatgtat

SEQ ID NO: 131120 - DNA, 8 bp, Unknown
  misc_feature (1)..( 8): Result.003 file - promoters60/3439063
tatatata

SEQ ID NO: 131121 - DNA, 8 bp, Unknown
  misc_feature (1)..( 8): Result.003 file - promoters60/3439063
tatatata

SEQ ID NO: 131122 - DNA, 6 bp, Unknown
  misc_feature (1)..( 6): Result.003 file - promoters60/3439063
atgaat

SEQ ID NO: 131123 - DNA, 6 bp, Unknown
  misc_feature (1)..( 6): Result.003 file - promoters60/3439063
atgaat

SEQ ID NO: 131124 - DNA, 6 bp, Unknown
  misc_feature (1)..( 6): Result.003 file - promoters60/3439063
attgag

SEQ ID NO: 131125 - DNA, 6 bp, Unknown
  misc_feature (1)..( 6): Result.003 file - promoters60/3439063
attgag

SEQ ID NO: 131126 - DNA, 8 bp, Unknown
  misc_feature (1)..( 8): Result.003 file - promoters60/3439063
aagtcaaa

SEQ ID NO: 131127 - DNA, 8 bp, Unknown
  misc_feature (1)..( 8): Result.003 file - promoters60/3439063
aagttaaa

SEQ ID NO: 131128 - DNA, 9 bp, Unknown
  misc_feature (1)..( 9): Result.003 file - promoters60/3439063
tcaaaattt

SEQ ID NO: 131129 - DNA, 9 bp, Unknown
  misc_feature (1)..( 9): Result.003 file - promoters60/3439063
tcaacatta

SEQ ID NO: 131130 - DNA, 9 bp, Unknown
  misc_feature (1)..( 9): Result.003 file - promoters60/3439063
ctaacatta

SEQ ID NO: 131131 - DNA, 7 bp, Unknown
  misc_feature (1)..( 7): Result.003 file - promoters60/3439063
aagttta

SEQ ID NO: 131132 - DNA, 7 bp, Unknown
  misc_feature (1)..( 7): Result.003 file - promoters60/3439063
aagttta

SEQ ID NO: 131133 - DNA, 6 bp, Unknown
  misc_feature (1)..( 6): Result.003 file - promoters60/3439063
tttatt

SEQ ID NO: 131134 - DNA, 6 bp, Unknown
  misc_feature (1)..( 6): Result.003 file - promoters60/3439063
tttatt

SEQ ID NO: 131135 - DNA, 8 bp, Unknown
  misc_feature (1)..( 8): Result.003 file - promoters60/3439063
aaattctc

SEQ ID NO: 131136 - DNA, 8 bp, Unknown
  misc_feature (1)..( 8): Result.003 file - promoters60/3439063
aaatcctc

SEQ ID NO: 131137 - DNA, 7 bp, Unknown
  misc_feature (1)..( 7): Result.003 file - promoters60/3439063
tataaat

SEQ ID NO: 131138 - DNA, 7 bp, Unknown
  misc_feature (1)..( 7): Result.003 file - promoters60/3439063
tataaat

SEQ ID NO: 131139 - DNA, 12 bp, Unknown
  misc_feature (1)..( 12): Result.003 file - promoters60/3439063
aacttgttttag

SEQ ID NO: 131140 - DNA, 12 bp, Unknown
  misc_feature (1)..( 12): Result.003 file - promoters60/3439063
aacatgtcttag

SEQ ID NO: 131141 - DNA, 7 bp, Unknown
  misc_feature (1)..( 7): Result.003 file - promoters60/3439063
tttgatt

SEQ ID NO: 131142 - DNA, 7 bp, Unknown
  misc_feature (1)..( 7): Result.003 file - promoters60/3439063
tttaatt

SEQ ID NO: 131143 - DNA, 7 bp, Unknown
  misc_feature (1)..( 7): Result.003 file - promoters60/3439063
aacatat

SEQ ID NO: 131144 - DNA, 7 bp, Unknown
  misc_feature (1)..( 7): Result.003 file - promoters60/3439063
aacttat

SEQ ID NO: 131145 - DNA, 8 bp, Unknown
  misc_feature (1)..( 8): Result.003 file - promoters60/3439063
ttttctat

SEQ ID NO: 131146 - DNA, 8 bp, Unknown
  misc_feature (1)..( 8): Result.003 file - promoters60/3439063
ttttttat

SEQ ID NO: 131147 - DNA, 6 bp, Unknown
  misc_feature (1)..( 6): Result.003 file - promoters60/3439063
attaat

SEQ ID NO: 131148 - DNA, 6 bp, Unknown
  misc_feature (1)..( 6): Result.003 file - promoters60/3439063
attaat

SEQ ID NO: 131149 - DNA, 9 bp, Unknown
  misc_feature (1)..( 9): Result.003 file - promoters60/3439063
tcatcattt

SEQ ID NO: 131150 - DNA, 9 bp, Unknown
  misc_feature (1)..( 9): Result.003 file - promoters60/3439063
tcatccttt

SEQ ID NO: 131151 - DNA, 6 bp, Unknown
  misc_feature (1)..( 6): Result.003 file - promoters60/3439063
gataat

SEQ ID NO: 131152 - DNA, 6 bp, Unknown
  misc_feature (1)..( 6): Result.003 file - promoters60/3439063
gataat

SEQ ID NO: 131153 - DNA, 7 bp, Unknown
  misc_feature (1)..( 7): Result.003 file - promoters60/3439063
taagata

SEQ ID NO: 131154 - DNA, 7 bp, Unknown
  misc_feature (1)..( 7): Result.003 file - promoters60/3439063
taacata

SEQ ID NO: 131155 - DNA, 7 bp, Unknown
  misc_feature (1)..( 7): Result.003 file - promoters60/3439063
taaatat

SEQ ID NO: 131156 - DNA, 7 bp, Unknown
  misc_feature (1)..( 7): Result.003 file - promoters60/3439063
taattat

SEQ ID NO: 131157 - DNA, 10 bp, Unknown
  misc_feature (1)..( 10): Result.003 file - promoters60/3439063
tatattttta

SEQ ID NO: 131158 - DNA, 10 bp, Unknown
  misc_feature (1)..( 10): Result.003 file - promoters60/3439063
tattttttta

SEQ ID NO: 131159 - DNA, 8 bp, Unknown
  misc_feature (1)..( 8): Result.003 file - promoters60/3439063
tttacact

SEQ ID NO: 131160 - DNA, 8 bp, Unknown
  misc_feature (1)..( 8): Result.003 file - promoters60/3439063
tttagact

SEQ ID NO: 131161 - DNA, 7 bp, Unknown
  misc_feature (1)..( 7): Result.003 file - promoters60/3439063
taatcat

SEQ ID NO: 131162 - DNA, 7 bp, Unknown
  misc_feature (1)..( 7): Result.003 file - promoters60/3439063
taaacat

SEQ ID NO: 131163 - DNA, 7 bp, Unknown
  misc_feature (1)..( 7): Result.003 file - promoters60/3439063
atatcaa

SEQ ID NO: 131164 - DNA, 7 bp, Unknown
  misc_feature (1)..( 7): Result.003 file - promoters60/3439063
ataacaa

SEQ ID NO: 131165 - DNA, 10 bp, Unknown
  misc_feature (1)..( 10): Result.003 file - promoters60/3439184
ttctctactt

SEQ ID NO: 131166 - DNA, 10 bp, Unknown
  misc_feature (1)..( 10): Result.003 file - promoters60/3439184
ttctctgctt

SEQ ID NO: 131167 - DNA, 6 bp, Unknown
  misc_feature (1)..( 6): Result.003 file - promoters60/3439184
aattta

SEQ ID NO: 131168 - DNA, 6 bp, Unknown
  misc_feature (1)..( 6): Result.003 file - promoters60/3439184
aattta

SEQ ID NO: 131169 - DNA, 9 bp, Unknown
  misc_feature (1)..( 9): Result.003 file - promoters60/3439184
tataattta

SEQ ID NO: 131170 - DNA, 9 bp, Unknown
  misc_feature (1)..( 9): Result.003 file - promoters60/3439184
tattattta

SEQ ID NO: 131171 - DNA, 7 bp, Unknown
  misc_feature (1)..( 7): Result.003 file - promoters60/3439184
ctatgat

SEQ ID NO: 131172 - DNA, 7 bp, Unknown
  misc_feature (1)..( 7): Result.003 file - promoters60/3439184
ctaagat

SEQ ID NO: 131173 - DNA, 7 bp, Unknown
  misc_feature (1)..( 7): Result.003 file - promoters60/3439184
taatgtt

SEQ ID NO: 131174 - DNA, 7 bp, Unknown
  misc_feature (1)..( 7): Result.003 file - promoters60/3439184
taatgtt

SEQ ID NO: 131175 - DNA, 7 bp, Unknown
  misc_feature (1)..( 7): Result.003 file - promoters60/3439184
tgttttg

SEQ ID NO: 131176 - DNA, 7 bp, Unknown
  misc_feature (1)..( 7): Result.003 file - promoters60/3439184
tgtattg

SEQ ID NO: 131177 - DNA, 7 bp, Unknown
  misc_feature (1)..( 7): Result.003 file - promoters60/3439184
ttcacta

SEQ ID NO: 131178 - DNA, 7 bp, Unknown
  misc_feature (1)..( 7): Result.003 file - promoters60/3439184
ttctcta

SEQ ID NO: 131179 - DNA, 7 bp, Unknown
  misc_feature (1)..( 7): Result.003 file - promoters60/3439184
tctgttc

SEQ ID NO: 131180 - DNA, 7 bp, Unknown
  misc_feature (1)..( 7): Result.003 file - promoters60/3439184
tctgttc

SEQ ID NO: 131181 - DNA, 7 bp, Unknown
  misc_feature (1)..( 7): Result.003 file - promoters60/3439184
ttgcagc

SEQ ID NO: 131182 - DNA, 7 bp, Unknown
  misc_feature (1)..( 7): Result.003 file - promoters60/3439184
ttgaagc

SEQ ID NO: 131183 - DNA, 7 bp, Unknown
  misc_feature (1)..( 7): Result.003 file - promoters60/3439184
tttttac

SEQ ID NO: 131184 - DNA, 7 bp, Unknown
  misc_feature (1)..( 7): Result.003 file - promoters60/3439184
tttttac

SEQ ID NO: 131185 - DNA, 6 bp, Unknown
  misc_feature (1)..( 6): Result.003 file - promoters60/3439184
tgaatt

SEQ ID NO: 131186 - DNA, 6 bp, Unknown
  misc_feature (1)..( 6): Result.003 file - promoters60/3439184
tgaatt

SEQ ID NO: 131187 - DNA, 8 bp, Unknown
  misc_feature (1)..( 8): Result.003 file - promoters60/3439184
ttgtacat

SEQ ID NO: 131188 - DNA, 8 bp, Unknown
  misc_feature (1)..( 8): Result.003 file - promoters60/3439184
ttgttcat

SEQ ID NO: 131189 - DNA, 6 bp, Unknown
  misc_feature (1)..( 6): Result.003 file - promoters60/3439184
tttaac

SEQ ID NO: 131190 - DNA, 6 bp, Unknown
  misc_feature (1)..( 6): Result.003 file - promoters60/3439184
tttaac

SEQ ID NO: 131191 - DNA, 7 bp, Unknown
  misc_feature (1)..( 7): Result.003 file - promoters60/3439184
ggagcat

SEQ ID NO: 131192 - DNA, 7 bp, Unknown
  misc_feature (1)..( 7): Result.003 file - promoters60/3439184
ggaccat

SEQ ID NO: 131193 - DNA, 12 bp, Unknown
  misc_feature (1)..( 12): Result.003 file - promoters60/3439184
attaaagaccaa

SEQ ID NO: 131194 - DNA, 12 bp, Unknown
  misc_feature (1)..( 12): Result.003 file - promoters60/3439184
attcaagatcaa

SEQ ID NO: 131195 - DNA, 7 bp, Unknown
  misc_feature (1)..( 7): Result.003 file - promoters60/3439184
ctgcaac

SEQ ID NO: 131196 - DNA, 7 bp, Unknown
  misc_feature (1)..( 7): Result.003 file - promoters60/3439184
ctgtaac

SEQ ID NO: 131197 - DNA, 6 bp, Unknown
  misc_feature (1)..( 6): Result.003 file - promoters60/3439184
ttatat

SEQ ID NO: 131198 - DNA, 6 bp, Unknown
  misc_feature (1)..( 6): Result.003 file - promoters60/3439184
ttatat

SEQ ID NO: 131199 - DNA, 6 bp, Unknown
  misc_feature (1)..( 6): Result.003 file - promoters60/3439184
tcaatg

SEQ ID NO: 131200 - DNA, 6 bp, Unknown
  misc_feature (1)..( 6): Result.003 file - promoters60/3439184
tcaatg

SEQ ID NO: 131201 - DNA, 6 bp, Unknown
  misc_feature (1)..( 6): Result.003 file - promoters60/3439184
taacca

SEQ ID NO: 131202 - DNA, 6 bp, Unknown
  misc_feature (1)..( 6): Result.003 file - promoters60/3439184
taacca

SEQ ID NO: 131203 - DNA, 13 bp, Unknown
  misc_feature (1)..( 13): Result.003 file - promoters60/3439206
aagaaaattcttt

SEQ ID NO: 131204 - DNA, 13 bp, Unknown
  misc_feature (1)..( 13): Result.003 file - promoters60/3439206
aagaaagttcatc

SEQ ID NO: 131205 - DNA, 13 bp, Unknown
  misc_feature (1)..( 13): Result.003 file - promoters60/3439206
tagaatatttttt

SEQ ID NO: 131206 - DNA, 8 bp, Unknown
  misc_feature (1)..( 8): Result.003 file - promoters60/3439206
tttcttag

SEQ ID NO: 131207 - DNA, 8 bp, Unknown
  misc_feature (1)..( 8): Result.003 file - promoters60/3439206
tttattat

SEQ ID NO: 131208 - DNA, 9 bp, Unknown
  misc_feature (1)..( 9): Result.003 file - promoters60/3439206
tttgattat

SEQ ID NO: 131209 - DNA, 10 bp, Unknown
  misc_feature (1)..( 10): Result.003 file - promoters60/3439206
gtttggattg

SEQ ID NO: 131210 - DNA, 10 bp, Unknown
  misc_feature (1)..( 10): Result.003 file - promoters60/3439206
gttttgatta

SEQ ID NO: 131211 - DNA, 10 bp, Unknown
  misc_feature (1)..( 10): Result.003 file - promoters60/3439206
cttttattat

SEQ ID NO: 131212 - DNA, 9 bp, Unknown
  misc_feature (1)..( 9): Result.003 file - promoters60/3439213
attggttct

SEQ ID NO: 131213 - DNA, 9 bp, Unknown
  misc_feature (1)..( 9): Result.003 file - promoters60/3439213
tttggttac

SEQ ID NO: 131214 - DNA, 9 bp, Unknown
  misc_feature (1)..( 9): Result.003 file - promoters60/3439213
cttgtttat

SEQ ID NO: 131215 - DNA, 9 bp, Unknown
  misc_feature (1)..( 9): Result.003 file - promoters60/3439213
cgagtttat

SEQ ID NO: 131216 - DNA, 9 bp, Unknown
  misc_feature (1)..( 9): Result.003 file - promoters60/3439213
cttgtttac

SEQ ID NO: 131217 - DNA, 9 bp, Unknown
  misc_feature (1)..( 9): Result.003 file - promoters60/3439213
atttttttt

SEQ ID NO: 131218 - DNA, 8 bp, Unknown
  misc_feature (1)..( 8): Result.003 file - promoters60/3439224
tttgtttc

SEQ ID NO: 131219 - DNA, 8 bp, Unknown
  misc_feature (1)..( 8): Result.003 file - promoters60/3439224
tttgttgt

SEQ ID NO: 131220 - DNA, 8 bp, Unknown
  misc_feature (1)..( 8): Result.003 file - promoters60/3439224
tttcttgt

SEQ ID NO: 131221 - DNA, 13 bp, Unknown
  misc_feature (1)..( 13): Result.003 file - promoters60/3439224
attataaatagcc

SEQ ID NO: 131222 - DNA, 13 bp, Unknown
  misc_feature (1)..( 13): Result.003 file - promoters60/3439224
attatatgggcct

SEQ ID NO: 131223 - DNA, 13 bp, Unknown
  misc_feature (1)..( 13): Result.003 file - promoters60/3439224
cttatctgggcct

SEQ ID NO: 131224 - DNA, 7 bp, Unknown
  misc_feature (1)..( 7): Result.003 file - promoters60/3439242
taaacca

SEQ ID NO: 131225 - DNA, 7 bp, Unknown
  misc_feature (1)..( 7): Result.003 file - promoters60/3439242
taagcca

SEQ ID NO: 131226 - DNA, 8 bp, Unknown
  misc_feature (1)..( 8): Result.003 file - promoters60/3439242
tatcgtgt

SEQ ID NO: 131227 - DNA, 8 bp, Unknown
  misc_feature (1)..( 8): Result.003 file - promoters60/3439242
tatcgtgt

SEQ ID NO: 131228 - DNA, 7 bp, Unknown
  misc_feature (1)..( 7): Result.003 file - promoters60/3439242
tgtgttg

SEQ ID NO: 131229 - DNA, 7 bp, Unknown
  misc_feature (1)..( 7): Result.003 file - promoters60/3439242
tgttttg

SEQ ID NO: 131230 - DNA, 6 bp, Unknown
  misc_feature (1)..( 6): Result.003 file - promoters60/3439242
ttattt

SEQ ID NO: 131231 - DNA, 6 bp, Unknown
  misc_feature (1)..( 6): Result.003 file - promoters60/3439242
ttattt

SEQ ID NO: 131232 - DNA, 7 bp, Unknown
  misc_feature (1)..( 7): Result.003 file - promoters60/3439242
tgattat

SEQ ID NO: 131233 - DNA, 7 bp, Unknown
  misc_feature (1)..( 7): Result.003 file - promoters60/3439242
tgattat

SEQ ID NO: 131234 - DNA, 6 bp, Unknown
  misc_feature (1)..( 6): Result.003 file - promoters60/3439242
tgttaa

SEQ ID NO: 131235 - DNA, 6 bp, Unknown
  misc_feature (1)..( 6): Result.003 file - promoters60/3439242
tgttaa

SEQ ID NO: 131236 - DNA, 6 bp, Unknown
  misc_feature (1)..( 6): Result.003 file - promoters60/3439242
tttata

SEQ ID NO: 131237 - DNA, 6 bp, Unknown
  misc_feature (1)..( 6): Result.003 file - promoters60/3439242
tttata

SEQ ID NO: 131238 - DNA, 6 bp, Unknown
  misc_feature (1)..( 6): Result.003 file - promoters60/3439242
tcacat

SEQ ID NO: 131239 - DNA, 6 bp, Unknown
  misc_feature (1)..( 6): Result.003 file - promoters60/3439242
tcacat

SEQ ID NO: 131240 - DNA, 8 bp, Unknown
  misc_feature (1)..( 8): Result.003 file - promoters60/3439242
atcaaacc

SEQ ID NO: 131241 - DNA, 8 bp, Unknown
  misc_feature (1)..( 8): Result.003 file - promoters60/3439242
atcgaacc

SEQ ID NO: 131242 - DNA, 6 bp, Unknown
  misc_feature (1)..( 6): Result.003 file - promoters60/3439242
aactat

SEQ ID NO: 131243 - DNA, 6 bp, Unknown
  misc_feature (1)..( 6): Result.003 file - promoters60/3439242
aactat

SEQ ID NO: 131244 - DNA, 7 bp, Unknown
  misc_feature (1)..( 7): Result.003 file - promoters60/3439242
tcatttt

SEQ ID NO: 131245 - DNA, 7 bp, Unknown
  misc_feature (1)..( 7): Result.003 file - promoters60/3439242
tcaattt

SEQ ID NO: 131246 - DNA, 6 bp, Unknown
  misc_feature (1)..( 6): Result.003 file - promoters60/3439242
tttgct

SEQ ID NO: 131247 - DNA, 6 bp, Unknown
  misc_feature (1)..( 6): Result.003 file - promoters60/3439242
tttgct

SEQ ID NO: 131248 - DNA, 6 bp, Unknown
  misc_feature (1)..( 6): Result.003 file - promoters60/3439242
gttttc

SEQ ID NO: 131249 - DNA, 6 bp, Unknown
  misc_feature (1)..( 6): Result.003 file - promoters60/3439242
gttttc

SEQ ID NO: 131250 - DNA, 9 bp, Unknown
  misc_feature (1)..( 9): Result.003 file - promoters60/3439242
tttgacttt

SEQ ID NO: 131251 - DNA, 9 bp, Unknown
  misc_feature (1)..( 9): Result.003 file - promoters60/3439242
tttgtcttt

SEQ ID NO: 131252 - DNA, 9 bp, Unknown
  misc_feature (1)..( 9): Result.003 file - promoters60/3439242
gggttagaa

SEQ ID NO: 131253 - DNA, 9 bp, Unknown
  misc_feature (1)..( 9): Result.003 file - promoters60/3439242
ggggtagaa

SEQ ID NO: 131254 - DNA, 9 bp, Unknown
  misc_feature (1)..( 9): Result.003 file - promoters60/3439242
gtataaata

SEQ ID NO: 131255 - DNA, 9 bp, Unknown
  misc_feature (1)..( 9): Result.003 file - promoters60/3439242
gtataaata

SEQ ID NO: 131256 - DNA, 6 bp, Unknown
  misc_feature (1)..( 6): Result.003 file - promoters60/3439242
aaattg

SEQ ID NO: 131257 - DNA, 6 bp, Unknown
  misc_feature (1)..( 6): Result.003 file - promoters60/3439242
aaattg

SEQ ID NO: 131258 - DNA, 7 bp, Unknown
  misc_feature (1)..( 7): Result.003 file - promoters60/3439242
tgatgaa

SEQ ID NO: 131259 - DNA, 7 bp, Unknown
  misc_feature (1)..( 7): Result.003 file - promoters60/3439242
tgaggaa

SEQ ID NO: 131260 - DNA, 6 bp, Unknown
  misc_feature (1)..( 6): Result.003 file - promoters60/3439242
gaagag

SEQ ID NO: 131261 - DNA, 6 bp, Unknown
  misc_feature (1)..( 6): Result.003 file - promoters60/3439242
gaagag

SEQ ID NO: 131262 - DNA, 7 bp, Unknown
  misc_feature (1)..( 7): Result.003 file - promoters60/3439242
aaaggag

SEQ ID NO: 131263 - DNA, 7 bp, Unknown
  misc_feature (1)..( 7): Result.003 file - promoters60/3439242
aaaagag

SEQ ID NO: 131264 - DNA, 9 bp, Unknown
  misc_feature (1)..( 9): Result.003 file - promoters60/3439289
ttattttca

SEQ ID NO: 131265 - DNA, 9 bp, Unknown
  misc_feature (1)..( 9): Result.003 file - promoters60/3439289
atattttta

SEQ ID NO: 131266 - DNA, 9 bp, Unknown
  misc_feature (1)..( 9): Result.003 file - promoters60/3439289
ttatcttca

SEQ ID NO: 131267 - DNA, 9 bp, Unknown
  misc_feature (1)..( 9): Result.003 file - promoters60/3439289
ttatttcat

SEQ ID NO: 131268 - DNA, 8 bp, Unknown
  misc_feature (1)..( 8): Result.003 file - promoters60/3439289
atttaaaa

SEQ ID NO: 131269 - DNA, 8 bp, Unknown
  misc_feature (1)..( 8): Result.003 file - promoters60/3439289
atttaata

SEQ ID NO: 131270 - DNA, 8 bp, Unknown
  misc_feature (1)..( 8): Result.003 file - promoters60/3439289
attaaaaa

SEQ ID NO: 131271 - DNA, 8 bp, Unknown
  misc_feature (1)..( 8): Result.003 file - promoters60/3439289
ttttcata

SEQ ID NO: 131272 - DNA, 8 bp, Unknown
  misc_feature (1)..( 8): Result.003 file - promoters60/3439289
ttaaaaat

SEQ ID NO: 131273 - DNA, 8 bp, Unknown
  misc_feature (1)..( 8): Result.003 file - promoters60/3439289
ttacaaag

SEQ ID NO: 131274 - DNA, 8 bp, Unknown
  misc_feature (1)..( 8): Result.003 file - promoters60/3439289
ttaaaaac

SEQ ID NO: 131275 - DNA, 8 bp, Unknown
  misc_feature (1)..( 8): Result.003 file - promoters60/3439289
aaaaaaac

SEQ ID NO: 131276 - DNA, 8 bp, Unknown
  misc_feature (1)..( 8): Result.003 file - promoters60/3439289
aaaaatta

SEQ ID NO: 131277 - DNA, 8 bp, Unknown
  misc_feature (1)..( 8): Result.003 file - promoters60/3439289
caaaatta

SEQ ID NO: 131278 - DNA, 8 bp, Unknown
  misc_feature (1)..( 8): Result.003 file - promoters60/3439289
caatattt

SEQ ID NO: 131279 - DNA, 8 bp, Unknown
  misc_feature (1)..( 8): Result.003 file - promoters60/3439289
caatatac

SEQ ID NO: 131280 - DNA, 10 bp, Unknown
  misc_feature (1)..( 10): Result.003 file - promoters60/3439289
gaatataaga

SEQ ID NO: 131281 - DNA, 10 bp, Unknown
  misc_feature (1)..( 10): Result.003 file - promoters60/3439289
caatatacac

SEQ ID NO: 131282 - DNA, 10 bp, Unknown
  misc_feature (1)..( 10): Result.003 file - promoters60/3439289
ttatagaaga

SEQ ID NO: 131283 - DNA, 10 bp, Unknown
  misc_feature (1)..( 10): Result.003 file - promoters60/3439289
caatattttt

SEQ ID NO: 131284 - DNA, 10 bp, Unknown
  misc_feature (1)..( 10): Result.003 file - promoters60/3439289
gaacacaaaa

SEQ ID NO: 131285 - DNA, 13 bp, Unknown
  misc_feature (1)..( 13): Result.003 file - promoters60/3439289
acgttaaggcaaa

SEQ ID NO: 131286 - DNA, 13 bp, Unknown
  misc_feature (1)..( 13): Result.003 file - promoters60/3439289
ccataaaggaaaa

SEQ ID NO: 131287 - DNA, 13 bp, Unknown
  misc_feature (1)..( 13): Result.003 file - promoters60/3439289
tgtttatggaaaa

SEQ ID NO: 131288 - DNA, 13 bp, Unknown
  misc_feature (1)..( 13): Result.003 file - promoters60/3439289
ccaaaaaagaaat

SEQ ID NO: 131289 - DNA, 13 bp, Unknown
  misc_feature (1)..( 13): Result.003 file - promoters60/3439289
tacttcaacaata

SEQ ID NO: 131290 - DNA, 13 bp, Unknown
  misc_feature (1)..( 13): Result.003 file - promoters60/3439289
aaagcaaacaatg

SEQ ID NO: 131291 - DNA, 13 bp, Unknown
  misc_feature (1)..( 13): Result.003 file - promoters60/3439289
aatcacaacaaat

SEQ ID NO: 131292 - DNA, 13 bp, Unknown
  misc_feature (1)..( 13): Result.003 file - promoters60/3439289
aaaggaaagaatt

SEQ ID NO: 131293 - DNA, 13 bp, Unknown
  misc_feature (1)..( 13): Result.003 file - promoters60/3439289
gaaaaaaacaaat

SEQ ID NO: 131294 - DNA, 7 bp, Unknown
  misc_feature (1)..( 7): Result.003 file - promoters60/3439289
tttttac

SEQ ID NO: 131295 - DNA, 7 bp, Unknown
  misc_feature (1)..( 7): Result.003 file - promoters60/3439289
gttttac

SEQ ID NO: 131296 - DNA, 7 bp, Unknown
  misc_feature (1)..( 7): Result.003 file - promoters60/3439289
tttttat

SEQ ID NO: 131297 - DNA, 7 bp, Unknown
  misc_feature (1)..( 7): Result.003 file - promoters60/3439289
tttttat

SEQ ID NO: 131298 - DNA, 13 bp, Unknown
  misc_feature (1)..( 13): Result.003 file - promoters60/3439289
ctcctataaattg

SEQ ID NO: 131299 - DNA, 13 bp, Unknown
  misc_feature (1)..( 13): Result.003 file - promoters60/3439289
ggtgtataaattg

SEQ ID NO: 131300 - DNA, 13 bp, Unknown
  misc_feature (1)..( 13): Result.003 file - promoters60/3439289
ttagtataaataa

SEQ ID NO: 131301 - DNA, 13 bp, Unknown
  misc_feature (1)..( 13): Result.003 file - promoters60/3439289
ctcttatatattc

SEQ ID NO: 131302 - DNA, 11 bp, Unknown
  misc_feature (1)..( 11): Result.003 file - promoters60/3439289
aaatatgaaat

SEQ ID NO: 131303 - DNA, 11 bp, Unknown
  misc_feature (1)..( 11): Result.003 file - promoters60/3439289
aaatttgacct

SEQ ID NO: 131304 - DNA, 11 bp, Unknown
  misc_feature (1)..( 11): Result.003 file - promoters60/3439289
atataggaata

SEQ ID NO: 131305 - DNA, 11 bp, Unknown
  misc_feature (1)..( 11): Result.003 file - promoters60/3439289
agatagtaata

SEQ ID NO: 131306 - DNA, 7 bp, Unknown
  misc_feature (1)..( 7): Result.003 file - promoters60/3439330
attataa

SEQ ID NO: 131307 - DNA, 7 bp, Unknown
  misc_feature (1)..( 7): Result.003 file - promoters60/3439330
attttaa

SEQ ID NO: 131308 - DNA, 7 bp, Unknown
  misc_feature (1)..( 7): Result.003 file - promoters60/3439330
attttaa

SEQ ID NO: 131309 - DNA, 9 bp, Unknown
  misc_feature (1)..( 9): Result.003 file - promoters60/3439330
ttttaaaaa

SEQ ID NO: 131310 - DNA, 9 bp, Unknown
  misc_feature (1)..( 9): Result.003 file - promoters60/3439330
ttttacaaa

SEQ ID NO: 131311 - DNA, 6 bp, Unknown
  misc_feature (1)..( 6): Result.003 file - promoters60/3439330
aatcaa

SEQ ID NO: 131312 - DNA, 6 bp, Unknown
  misc_feature (1)..( 6): Result.003 file - promoters60/3439330
aatcaa

SEQ ID NO: 131313 - DNA, 6 bp, Unknown
  misc_feature (1)..( 6): Result.003 file - promoters60/3439330
aatttt

SEQ ID NO: 131314 - DNA, 6 bp, Unknown
  misc_feature (1)..( 6): Result.003 file - promoters60/3439330
aatttt

SEQ ID NO: 131315 - DNA, 6 bp, Unknown
  misc_feature (1)..( 6): Result.003 file - promoters60/3439330
catata

SEQ ID NO: 131316 - DNA, 6 bp, Unknown
  misc_feature (1)..( 6): Result.003 file - promoters60/3439330
catata

SEQ ID NO: 131317 - DNA, 8 bp, Unknown
  misc_feature (1)..( 8): Result.003 file - promoters60/3439330
atttctaa

SEQ ID NO: 131318 - DNA, 8 bp, Unknown
  misc_feature (1)..( 8): Result.003 file - promoters60/3439330
atttctaa

SEQ ID NO: 131319 - DNA, 7 bp, Unknown
  misc_feature (1)..( 7): Result.003 file - promoters60/3439330
tttattt

SEQ ID NO: 131320 - DNA, 7 bp, Unknown
  misc_feature (1)..( 7): Result.003 file - promoters60/3439330
tttattt

SEQ ID NO: 131321 - DNA, 11 bp, Unknown
  misc_feature (1)..( 11): Result.003 file - promoters60/3439330
aaaaaaaattt

SEQ ID NO: 131322 - DNA, 11 bp, Unknown
  misc_feature (1)..( 11): Result.003 file - promoters60/3439330
aaacaaaattt

SEQ ID NO: 131323 - DNA, 10 bp, Unknown
  misc_feature (1)..( 10): Result.003 file - promoters60/3439330
aataaaaaaa

SEQ ID NO: 131324 - DNA, 10 bp, Unknown
  misc_feature (1)..( 10): Result.003 file - promoters60/3439330
aataataaaa

SEQ ID NO: 131325 - DNA, 10 bp, Unknown
  misc_feature (1)..( 10): Result.003 file - promoters60/3439330
cggaaaaaag

SEQ ID NO: 131326 - DNA, 6 bp, Unknown
  misc_feature (1)..( 6): Result.003 file - promoters60/3439330
aatttt

SEQ ID NO: 131327 - DNA, 6 bp, Unknown
  misc_feature (1)..( 6): Result.003 file - promoters60/3439330
aatttt

SEQ ID NO: 131328 - DNA, 9 bp, Unknown
  misc_feature (1)..( 9): Result.003 file - promoters60/3439330
ttttcaaaa

SEQ ID NO: 131329 - DNA, 9 bp, Unknown
  misc_feature (1)..( 9): Result.003 file - promoters60/3439330
tttacaaaa

SEQ ID NO: 131330 - DNA, 6 bp, Unknown
  misc_feature (1)..( 6): Result.003 file - promoters60/3439330
ttctaa

SEQ ID NO: 131331 - DNA, 6 bp, Unknown
  misc_feature (1)..( 6): Result.003 file - promoters60/3439330
ttctaa

SEQ ID NO: 131332 - DNA, 7 bp, Unknown
  misc_feature (1)..( 7): Result.003 file - promoters60/3439330
ataaaaa

SEQ ID NO: 131333 - DNA, 7 bp, Unknown
  misc_feature (1)..( 7): Result.003 file - promoters60/3439330
atagaaa

SEQ ID NO: 131334 - DNA, 8 bp, Unknown
  misc_feature (1)..( 8): Result.003 file - promoters60/3439330
caaagagt

SEQ ID NO: 131335 - DNA, 8 bp, Unknown
  misc_feature (1)..( 8): Result.003 file - promoters60/3439330
aaaagagg

SEQ ID NO: 131336 - DNA, 8 bp, Unknown
  misc_feature (1)..( 8): Result.003 file - promoters60/3439330
aaaataga

SEQ ID NO: 131337 - DNA, 6 bp, Unknown
  misc_feature (1)..( 6): Result.003 file - promoters60/3439330
ttttgt

SEQ ID NO: 131338 - DNA, 6 bp, Unknown
  misc_feature (1)..( 6): Result.003 file - promoters60/3439330
ttttgt

SEQ ID NO: 131339 - DNA, 6 bp, Unknown
  misc_feature (1)..( 6): Result.003 file - promoters60/3439330
tgtttt

SEQ ID NO: 131340 - DNA, 6 bp, Unknown
  misc_feature (1)..( 6): Result.003 file - promoters60/3439330
tgtttt

SEQ ID NO: 131341 - DNA, 7 bp, Unknown
  misc_feature (1)..( 7): Result.003 file - promoters60/3439330
gtaatgt

SEQ ID NO: 131342 - DNA, 7 bp, Unknown
  misc_feature (1)..( 7): Result.003 file - promoters60/3439330
gtattgt

SEQ ID NO: 131343 - DNA, 6 bp, Unknown
  misc_feature (1)..( 6): Result.003 file - promoters60/3439330
ccccca

SEQ ID NO: 131344 - DNA, 6 bp, Unknown
  misc_feature (1)..( 6): Result.003 file - promoters60/3439330
ccccca

SEQ ID NO: 131345 - DNA, 6 bp, Unknown
  misc_feature (1)..( 6): Result.003 file - promoters60/3439353
aaccgt

SEQ ID NO: 131346 - DNA, 6 bp, Unknown
  misc_feature (1)..( 6): Result.003 file - promoters60/3439353
aaccgt

SEQ ID NO: 131347 - DNA, 8 bp, Unknown
  misc_feature (1)..( 8): Result.003 file - promoters60/3439353
ttttaaat

SEQ ID NO: 131348 - DNA, 8 bp, Unknown
  misc_feature (1)..( 8): Result.003 file - promoters60/3439353
tttaaaat

SEQ ID NO: 131349 - DNA, 8 bp, Unknown
  misc_feature (1)..( 8): Result.003 file - promoters60/3439353
tcagttaa

SEQ ID NO: 131350 - DNA, 8 bp, Unknown
  misc_feature (1)..( 8): Result.003 file - promoters60/3439353
tcaattaa

SEQ ID NO: 131351 - DNA, 6 bp, Unknown
  misc_feature (1)..( 6): Result.003 file - promoters60/3439353
tcatgt

SEQ ID NO: 131352 - DNA, 6 bp, Unknown
  misc_feature (1)..( 6): Result.003 file - promoters60/3439353
tcatgt

SEQ ID NO: 131353 - DNA, 8 bp, Unknown
  misc_feature (1)..( 8): Result.003 file - promoters60/3439353
taaacgca

SEQ ID NO: 131354 - DNA, 8 bp, Unknown
  misc_feature (1)..( 8): Result.003 file - promoters60/3439353
taaaagca

SEQ ID NO: 131355 - DNA, 9 bp, Unknown
  misc_feature (1)..( 9): Result.003 file - promoters60/3439353
gaaaataaa

SEQ ID NO: 131356 - DNA, 9 bp, Unknown
  misc_feature (1)..( 9): Result.003 file - promoters60/3439353
caaaaaaaa

SEQ ID NO: 131357 - DNA, 9 bp, Unknown
  misc_feature (1)..( 9): Result.003 file - promoters60/3439353
gaaaagaaa

SEQ ID NO: 131358 - DNA, 7 bp, Unknown
  misc_feature (1)..( 7): Result.003 file - promoters60/3439353
catttta

SEQ ID NO: 131359 - DNA, 7 bp, Unknown
  misc_feature (1)..( 7): Result.003 file - promoters60/3439353
catatta

SEQ ID NO: 131360 - DNA, 6 bp, Unknown
  misc_feature (1)..( 6): Result.003 file - promoters60/3439353
gataag

SEQ ID NO: 131361 - DNA, 6 bp, Unknown
  misc_feature (1)..( 6): Result.003 file - promoters60/3439353
gataag

SEQ ID NO: 131362 - DNA, 8 bp, Unknown
  misc_feature (1)..( 8): Result.003 file - promoters60/3439353
ttcctccg

SEQ ID NO: 131363 - DNA, 8 bp, Unknown
  misc_feature (1)..( 8): Result.003 file - promoters60/3439353
ttccaccg

SEQ ID NO: 131364 - DNA, 6 bp, Unknown
  misc_feature (1)..( 6): Result.003 file - promoters60/3439353
ttttgt

SEQ ID NO: 131365 - DNA, 6 bp, Unknown
  misc_feature (1)..( 6): Result.003 file - promoters60/3439353
ttttgt

SEQ ID NO: 131366 - DNA, 7 bp, Unknown
  misc_feature (1)..( 7): Result.003 file - promoters60/3439353
tacattt

SEQ ID NO: 131367 - DNA, 7 bp, Unknown
  misc_feature (1)..( 7): Result.003 file - promoters60/3439353
tacattt

SEQ ID NO: 131368 - DNA, 7 bp, Unknown
  misc_feature (1)..( 7): Result.003 file - promoters60/3439353
aaatcta

SEQ ID NO: 131369 - DNA, 7 bp, Unknown
  misc_feature (1)..( 7): Result.003 file - promoters60/3439353
aaatcta

SEQ ID NO: 131370 - DNA, 11 bp, Unknown
  misc_feature (1)..( 11): Result.003 file - promoters60/3439353
gtaaaagttta

SEQ ID NO: 131371 - DNA, 11 bp, Unknown
  misc_feature (1)..( 11): Result.003 file - promoters60/3439353
gtaaaagttta

SEQ ID NO: 131372 - DNA, 7 bp, Unknown
  misc_feature (1)..( 7): Result.003 file - promoters60/3439353
ttaaatt

SEQ ID NO: 131373 - DNA, 7 bp, Unknown
  misc_feature (1)..( 7): Result.003 file - promoters60/3439353
ttatatt

SEQ ID NO: 131374 - DNA, 6 bp, Unknown
  misc_feature (1)..( 6): Result.003 file - promoters60/3439353
attttc

SEQ ID NO: 131375 - DNA, 6 bp, Unknown
  misc_feature (1)..( 6): Result.003 file - promoters60/3439353
attttc

SEQ ID NO: 131376 - DNA, 6 bp, Unknown
  misc_feature (1)..( 6): Result.003 file - promoters60/3439353
caaaat

SEQ ID NO: 131377 - DNA, 6 bp, Unknown
  misc_feature (1)..( 6): Result.003 file - promoters60/3439353
caaaat

SEQ ID NO: 131378 - DNA, 10 bp, Unknown
  misc_feature (1)..( 10): Result.003 file - promoters60/3439353
acaacaatct

SEQ ID NO: 131379 - DNA, 10 bp, Unknown
  misc_feature (1)..( 10): Result.003 file - promoters60/3439353
acagcaatct

SEQ ID NO: 131380 - DNA, 6 bp, Unknown
  misc_feature (1)..( 6): Result.003 file - promoters60/3439353
cacaca

SEQ ID NO: 131381 - DNA, 6 bp, Unknown
  misc_feature (1)..( 6): Result.003 file - promoters60/3439353
cacaca

SEQ ID NO: 131382 - DNA, 10 bp, Unknown
  misc_feature (1)..( 10): Result.003 file - promoters60/3439364
ttttaacaaa

SEQ ID NO: 131383 - DNA, 10 bp, Unknown
  misc_feature (1)..( 10): Result.003 file - promoters60/3439364
atgtaaaaaa

SEQ ID NO: 131384 - DNA, 10 bp, Unknown
  misc_feature (1)..( 10): Result.003 file - promoters60/3439364
ttttaaaaaa

SEQ ID NO: 131385 - DNA, 10 bp, Unknown
  misc_feature (1)..( 10): Result.003 file - promoters60/3439364
tagtaaaaaa

SEQ ID NO: 131386 - DNA, 14 bp, Unknown
  misc_feature (1)..( 14): Result.003 file - promoters60/3439364
ttttttttaacaaa

SEQ ID NO: 131387 - DNA, 14 bp, Unknown
  misc_feature (1)..( 14): Result.003 file - promoters60/3439364
aaaactttaactat

SEQ ID NO: 131388 - DNA, 14 bp, Unknown
  misc_feature (1)..( 14): Result.003 file - promoters60/3439364
gtgattttaaaaaa

SEQ ID NO: 131389 - DNA, 14 bp, Unknown
  misc_feature (1)..( 14): Result.003 file - promoters60/3439364
atatttttataaat

SEQ ID NO: 131390 - DNA, 14 bp, Unknown
  misc_feature (1)..( 14): Result.003 file - promoters60/3439364
atatatttaatcag

SEQ ID NO: 131391 - DNA, 9 bp, Unknown
  misc_feature (1)..( 9): Result.003 file - promoters60/3439364
cacagtttc

SEQ ID NO: 131392 - DNA, 9 bp, Unknown
  misc_feature (1)..( 9): Result.003 file - promoters60/3439364
agcagtttc

SEQ ID NO: 131393 - DNA, 9 bp, Unknown
  misc_feature (1)..( 9): Result.003 file - promoters60/3439364
aacagtttt

SEQ ID NO: 131394 - DNA, 9 bp, Unknown
  misc_feature (1)..( 9): Result.003 file - promoters60/3439364
aacagtaat

SEQ ID NO: 131395 - DNA, 9 bp, Unknown
  misc_feature (1)..( 9): Result.003 file - promoters60/3439364
gtatttaga

SEQ ID NO: 131396 - DNA, 9 bp, Unknown
  misc_feature (1)..( 9): Result.003 file - promoters60/3439364
atatttaat

SEQ ID NO: 131397 - DNA, 9 bp, Unknown
  misc_feature (1)..( 9): Result.003 file - promoters60/3439364
atatttaat

SEQ ID NO: 131398 - DNA, 9 bp, Unknown
  misc_feature (1)..( 9): Result.003 file - promoters60/3439364
atattttta

SEQ ID NO: 131399 - DNA, 8 bp, Unknown
  misc_feature (1)..( 8): Result.003 file - promoters60/3439364
taataaac

SEQ ID NO: 131400 - DNA, 8 bp, Unknown
  misc_feature (1)..( 8): Result.003 file - promoters60/3439364
taataaaa

SEQ ID NO: 131401 - DNA, 9 bp, Unknown
  misc_feature (1)..( 9): Result.003 file - promoters60/3439364
aaattaaaa

SEQ ID NO: 131402 - DNA, 9 bp, Unknown
  misc_feature (1)..( 9): Result.003 file - promoters60/3439364
agtataaaa

SEQ ID NO: 131403 - DNA, 7 bp, Unknown
  misc_feature (1)..( 7): Result.003 file - promoters60/3439374
ttatatg

SEQ ID NO: 131404 - DNA, 7 bp, Unknown
  misc_feature (1)..( 7): Result.003 file - promoters60/3439374
ttacatg

SEQ ID NO: 131405 - DNA, 11 bp, Unknown
  misc_feature (1)..( 11): Result.003 file - promoters60/3439374
aaaagctatca

SEQ ID NO: 131406 - DNA, 11 bp, Unknown
  misc_feature (1)..( 11): Result.003 file - promoters60/3439374
ttgagcaatca

SEQ ID NO: 131407 - DNA, 11 bp, Unknown
  misc_feature (1)..( 11): Result.003 file - promoters60/3439374
aaatgctaaaa

SEQ ID NO: 131408 - DNA, 7 bp, Unknown
  misc_feature (1)..( 7): Result.003 file - promoters60/3439374
aaaatta

SEQ ID NO: 131409 - DNA, 7 bp, Unknown
  misc_feature (1)..( 7): Result.003 file - promoters60/3439374
aaaatta

SEQ ID NO: 131410 - DNA, 8 bp, Unknown
  misc_feature (1)..( 8): Result.003 file - promoters60/3439374
aaaaagca

SEQ ID NO: 131411 - DNA, 8 bp, Unknown
  misc_feature (1)..( 8): Result.003 file - promoters60/3439374
aaagagca

SEQ ID NO: 131412 - DNA, 9 bp, Unknown
  misc_feature (1)..( 9): Result.003 file - promoters60/3439374
aatttaata

SEQ ID NO: 131413 - DNA, 9 bp, Unknown
  misc_feature (1)..( 9): Result.003 file - promoters60/3439374
aattcaata

SEQ ID NO: 131414 - DNA, 7 bp, Unknown
  misc_feature (1)..( 7): Result.003 file - promoters60/3439374
ataagac

SEQ ID NO: 131415 - DNA, 7 bp, Unknown
  misc_feature (1)..( 7): Result.003 file - promoters60/3439374
atatgac

SEQ ID NO: 131416 - DNA, 8 bp, Unknown
  misc_feature (1)..( 8): Result.003 file - promoters60/3439374
tctaattt

SEQ ID NO: 131417 - DNA, 8 bp, Unknown
  misc_feature (1)..( 8): Result.003 file - promoters60/3439374
tctatttt

SEQ ID NO: 131418 - DNA, 7 bp, Unknown
  misc_feature (1)..( 7): Result.003 file - promoters60/3439374
gattttt

SEQ ID NO: 131419 - DNA, 7 bp, Unknown
  misc_feature (1)..( 7): Result.003 file - promoters60/3439374
gatattt

SEQ ID NO: 131420 - DNA, 7 bp, Unknown
  misc_feature (1)..( 7): Result.003 file - promoters60/3439374
aaaaagc

SEQ ID NO: 131421 - DNA, 7 bp, Unknown
  misc_feature (1)..( 7): Result.003 file - promoters60/3439374
aaaaagc

SEQ ID NO: 131422 - DNA, 9 bp, Unknown
  misc_feature (1)..( 9): Result.003 file - promoters60/3439374
taatttgaa

SEQ ID NO: 131423 - DNA, 9 bp, Unknown
  misc_feature (1)..( 9): Result.003 file - promoters60/3439374
taattagaa

SEQ ID NO: 131424 - DNA, 8 bp, Unknown
  misc_feature (1)..( 8): Result.003 file - promoters60/3439374
atccaacg

SEQ ID NO: 131425 - DNA, 8 bp, Unknown
  misc_feature (1)..( 8): Result.003 file - promoters60/3439374
atcctacg

SEQ ID NO: 131426 - DNA, 6 bp, Unknown
  misc_feature (1)..( 6): Result.003 file - promoters60/3439374
aataaa

SEQ ID NO: 131427 - DNA, 6 bp, Unknown
  misc_feature (1)..( 6): Result.003 file - promoters60/3439374
aataaa

SEQ ID NO: 131428 - DNA, 7 bp, Unknown
  misc_feature (1)..( 7): Result.003 file - promoters60/3439374
atataat

SEQ ID NO: 131429 - DNA, 7 bp, Unknown
  misc_feature (1)..( 7): Result.003 file - promoters60/3439374
ataaaat

SEQ ID NO: 131430 - DNA, 9 bp, Unknown
  misc_feature (1)..( 9): Result.003 file - promoters60/3439374
aattaaaat

SEQ ID NO: 131431 - DNA, 9 bp, Unknown
  misc_feature (1)..( 9): Result.003 file - promoters60/3439374
aataaaaat

SEQ ID NO: 131432 - DNA, 6 bp, Unknown
  misc_feature (1)..( 6): Result.003 file - promoters60/3439374
tttcta

SEQ ID NO: 131433 - DNA, 6 bp, Unknown
  misc_feature (1)..( 6): Result.003 file - promoters60/3439374
tttcta

SEQ ID NO: 131434 - DNA, 8 bp, Unknown
  misc_feature (1)..( 8): Result.003 file - promoters60/3439374
ctataaat

SEQ ID NO: 131435 - DNA, 8 bp, Unknown
  misc_feature (1)..( 8): Result.003 file - promoters60/3439374
ctataaat

SEQ ID NO: 131436 - DNA, 6 bp, Unknown
  misc_feature (1)..( 6): Result.003 file - promoters60/3439374
acctaa

SEQ ID NO: 131437 - DNA, 6 bp, Unknown
  misc_feature (1)..( 6): Result.003 file - promoters60/3439374
acctaa

SEQ ID NO: 131438 - DNA, 11 bp, Unknown
  misc_feature (1)..( 11): Result.003 file - promoters60/3439472
tcaaagaaaga

SEQ ID NO: 131439 - DNA, 11 bp, Unknown
  misc_feature (1)..( 11): Result.003 file - promoters60/3439472
tcaaacaaatc

SEQ ID NO: 131440 - DNA, 11 bp, Unknown
  misc_feature (1)..( 11): Result.003 file - promoters60/3439472
ccaaagaaagg

SEQ ID NO: 131441 - DNA, 11 bp, Unknown
  misc_feature (1)..( 11): Result.003 file - promoters60/3439472
acaaggaaaga

SEQ ID NO: 131442 - DNA, 11 bp, Unknown
  misc_feature (1)..( 11): Result.003 file - promoters60/3439472
acaacgaataa

SEQ ID NO: 131443 - DNA, 11 bp, Unknown
  misc_feature (1)..( 11): Result.003 file - promoters60/3439472
gaaaagaaaga

SEQ ID NO: 131444 - DNA, 11 bp, Unknown
  misc_feature (1)..( 11): Result.003 file - promoters60/3439472
caaaaaaaaac

SEQ ID NO: 131445 - DNA, 10 bp, Unknown
  misc_feature (1)..( 10): Result.003 file - promoters60/3439472
ctttttaaat

SEQ ID NO: 131446 - DNA, 10 bp, Unknown
  misc_feature (1)..( 10): Result.003 file - promoters60/3439472
ctttttgtgc

SEQ ID NO: 131447 - DNA, 10 bp, Unknown
  misc_feature (1)..( 10): Result.003 file - promoters60/3439472
atttataagg

SEQ ID NO: 131448 - DNA, 10 bp, Unknown
  misc_feature (1)..( 10): Result.003 file - promoters60/3439472
gtttttgtaa

SEQ ID NO: 131449 - DNA, 10 bp, Unknown
  misc_feature (1)..( 10): Result.003 file - promoters60/3439472
ttttgtgtta

SEQ ID NO: 131450 - DNA, 10 bp, Unknown
  misc_feature (1)..( 10): Result.003 file - promoters60/3439472
agttttgtaa

SEQ ID NO: 131451 - DNA, 15 bp, Unknown
  misc_feature (1)..( 15): Result.003 file - promoters60/3439472
caaatgggcctaatt

SEQ ID NO: 131452 - DNA, 15 bp, Unknown
  misc_feature (1)..( 15): Result.003 file - promoters60/3439472
cctaaaggcccaata

SEQ ID NO: 131453 - DNA, 15 bp, Unknown
  misc_feature (1)..( 15): Result.003 file - promoters60/3439472
ttaatgggccgaatt

SEQ ID NO: 131454 - DNA, 15 bp, Unknown
  misc_feature (1)..( 15): Result.003 file - promoters60/3439472
taaaaaggcccatta

SEQ ID NO: 131455 - DNA, 15 bp, Unknown
  misc_feature (1)..( 15): Result.003 file - promoters60/3439472
ccaaacggctaggat

SEQ ID NO: 131456 - DNA, 15 bp, Unknown
  misc_feature (1)..( 15): Result.003 file - promoters60/3439472
taaaagggcttcaag

SEQ ID NO: 131457 - DNA, 10 bp, Unknown
  misc_feature (1)..( 10): Result.003 file - promoters60/3439472
caaatcaaat

SEQ ID NO: 131458 - DNA, 10 bp, Unknown
  misc_feature (1)..( 10): Result.003 file - promoters60/3439472
aaaaccaaag

SEQ ID NO: 131459 - DNA, 10 bp, Unknown
  misc_feature (1)..( 10): Result.003 file - promoters60/3439472
gcagtcaaat

SEQ ID NO: 131460 - DNA, 10 bp, Unknown
  misc_feature (1)..( 10): Result.003 file - promoters60/3439472
aacaccaaag

SEQ ID NO: 131461 - DNA, 10 bp, Unknown
  misc_feature (1)..( 10): Result.003 file - promoters60/3439472
caagtaaaaa

SEQ ID NO: 131462 - DNA, 10 bp, Unknown
  misc_feature (1)..( 10): Result.003 file - promoters60/3439472
caaggaaaga

SEQ ID NO: 131463 - DNA, 8 bp, Unknown
  misc_feature (1)..( 8): Result.003 file - promoters60/3439482
attcgtta

SEQ ID NO: 131464 - DNA, 8 bp, Unknown
  misc_feature (1)..( 8): Result.003 file - promoters60/3439482
catcgtta

SEQ ID NO: 131465 - DNA, 8 bp, Unknown
  misc_feature (1)..( 8): Result.003 file - promoters60/3439482
attcttta

SEQ ID NO: 131466 - DNA, 8 bp, Unknown
  misc_feature (1)..( 8): Result.003 file - promoters60/3439482
aatcgttc

SEQ ID NO: 131467 - DNA, 6 bp, Unknown
  misc_feature (1)..( 6): Result.003 file - promoters60/3439506
tgtttt

SEQ ID NO: 131468 - DNA, 6 bp, Unknown
  misc_feature (1)..( 6): Result.003 file - promoters60/3439506
tgtttt

SEQ ID NO: 131469 - DNA, 8 bp, Unknown
  misc_feature (1)..( 8): Result.003 file - promoters60/3439506
tgaatatg

SEQ ID NO: 131470 - DNA, 8 bp, Unknown
  misc_feature (1)..( 8): Result.003 file - promoters60/3439506
tgaagatg

SEQ ID NO: 131471 - DNA, 6 bp, Unknown
  misc_feature (1)..( 6): Result.003 file - promoters60/3439506
atgtta

SEQ ID NO: 131472 - DNA, 6 bp, Unknown
  misc_feature (1)..( 6): Result.003 file - promoters60/3439506
atgtta

SEQ ID NO: 131473 - DNA, 6 bp, Unknown
  misc_feature (1)..( 6): Result.003 file - promoters60/3439506
aaggtt

SEQ ID NO: 131474 - DNA, 6 bp, Unknown
  misc_feature (1)..( 6): Result.003 file - promoters60/3439506
aaggtt

SEQ ID NO: 131475 - DNA, 6 bp, Unknown
  misc_feature (1)..( 6): Result.003 file - promoters60/3439506
ttcata

SEQ ID NO: 131476 - DNA, 6 bp, Unknown
  misc_feature (1)..( 6): Result.003 file - promoters60/3439506
ttcata

SEQ ID NO: 131477 - DNA, 7 bp, Unknown
  misc_feature (1)..( 7): Result.003 file - promoters60/3439506
tgggttg

SEQ ID NO: 131478 - DNA, 7 bp, Unknown
  misc_feature (1)..( 7): Result.003 file - promoters60/3439506
tggtttg

SEQ ID NO: 131479 - DNA, 8 bp, Unknown
  misc_feature (1)..( 8): Result.003 file - promoters60/3439506
aaactgaa

SEQ ID NO: 131480 - DNA, 8 bp, Unknown
  misc_feature (1)..( 8): Result.003 file - promoters60/3439506
aaattgaa

SEQ ID NO: 131481 - DNA, 8 bp, Unknown
  misc_feature (1)..( 8): Result.003 file - promoters60/3439506
aaattgtt

SEQ ID NO: 131482 - DNA, 7 bp, Unknown
  misc_feature (1)..( 7): Result.003 file - promoters60/3439506
tgtaaaa

SEQ ID NO: 131483 - DNA, 7 bp, Unknown
  misc_feature (1)..( 7): Result.003 file - promoters60/3439506
tgtaaaa

SEQ ID NO: 131484 - DNA, 7 bp, Unknown
  misc_feature (1)..( 7): Result.003 file - promoters60/3439506
agataaa

SEQ ID NO: 131485 - DNA, 7 bp, Unknown
  misc_feature (1)..( 7): Result.003 file - promoters60/3439506
agagaaa

SEQ ID NO: 131486 - DNA, 10 bp, Unknown
  misc_feature (1)..( 10): Result.003 file - promoters60/3439506
atgcttttgt

SEQ ID NO: 131487 - DNA, 10 bp, Unknown
  misc_feature (1)..( 10): Result.003 file - promoters60/3439506
atgcttttgt

SEQ ID NO: 131488 - DNA, 8 bp, Unknown
  misc_feature (1)..( 8): Result.003 file - promoters60/3439506
aaataaga

SEQ ID NO: 131489 - DNA, 8 bp, Unknown
  misc_feature (1)..( 8): Result.003 file - promoters60/3439506
aaaaaaga

SEQ ID NO: 131490 - DNA, 8 bp, Unknown
  misc_feature (1)..( 8): Result.003 file - promoters60/3439506
aaaggagg

SEQ ID NO: 131491 - DNA, 8 bp, Unknown
  misc_feature (1)..( 8): Result.003 file - promoters60/3439506
ttaatatt

SEQ ID NO: 131492 - DNA, 8 bp, Unknown
  misc_feature (1)..( 8): Result.003 file - promoters60/3439506
ttaatatt

SEQ ID NO: 131493 - DNA, 7 bp, Unknown
  misc_feature (1)..( 7): Result.003 file - promoters60/3439506
tgatgaa

SEQ ID NO: 131494 - DNA, 7 bp, Unknown
  misc_feature (1)..( 7): Result.003 file - promoters60/3439506
tgaggaa

SEQ ID NO: 131495 - DNA, 6 bp, Unknown
  misc_feature (1)..( 6): Result.003 file - promoters60/3439506
gaagag

SEQ ID NO: 131496 - DNA, 6 bp, Unknown
  misc_feature (1)..( 6): Result.003 file - promoters60/3439506
gaagag

SEQ ID NO: 131497 - DNA, 8 bp, Unknown
  misc_feature (1)..( 8): Result.003 file - promoters60/3439593
aggaattt

SEQ ID NO: 131498 - DNA, 8 bp, Unknown
  misc_feature (1)..( 8): Result.003 file - promoters60/3439593
tggatttt

SEQ ID NO: 131499 - DNA, 8 bp, Unknown
  misc_feature (1)..( 8): Result.003 file - promoters60/3439593
acgaattt

SEQ ID NO: 131500 - DNA, 8 bp, Unknown
  misc_feature (1)..( 8): Result.003 file - promoters60/3439593
tgggtttg

SEQ ID NO: 131501 - DNA, 7 bp, Unknown
  misc_feature (1)..( 7): Result.003 file - promoters60/3439595
aacaaaa

SEQ ID NO: 131502 - DNA, 7 bp, Unknown
  misc_feature (1)..( 7): Result.003 file - promoters60/3439595
aacgaaa

SEQ ID NO: 131503 - DNA, 7 bp, Unknown
  misc_feature (1)..( 7): Result.003 file - promoters60/3439595
gacgaaa

SEQ ID NO: 131504 - DNA, 7 bp, Unknown
  misc_feature (1)..( 7): Result.003 file - promoters60/3439595
taattca

SEQ ID NO: 131505 - DNA, 7 bp, Unknown
  misc_feature (1)..( 7): Result.003 file - promoters60/3439595
aaattca

SEQ ID NO: 131506 - DNA, 7 bp, Unknown
  misc_feature (1)..( 7): Result.003 file - promoters60/3439595
taattct

SEQ ID NO: 131507 - DNA, 12 bp, Unknown
  misc_feature (1)..( 12): Result.003 file - promoters60/3439595
tgacatgattta

SEQ ID NO: 131508 - DNA, 12 bp, Unknown
  misc_feature (1)..( 12): Result.003 file - promoters60/3439595
tgacatgatttt

SEQ ID NO: 131509 - DNA, 12 bp, Unknown
  misc_feature (1)..( 12): Result.003 file - promoters60/3439595
gaaagggatttt

SEQ ID NO: 131510 - DNA, 7 bp, Unknown
  misc_feature (1)..( 7): Result.003 file - promoters60/3439595
caaattg

SEQ ID NO: 131511 - DNA, 7 bp, Unknown
  misc_feature (1)..( 7): Result.003 file - promoters60/3439595
caaattt

SEQ ID NO: 131512 - DNA, 7 bp, Unknown
  misc_feature (1)..( 7): Result.003 file - promoters60/3439595
aaaattt

SEQ ID NO: 131513 - DNA, 11 bp, Unknown
  misc_feature (1)..( 11): Result.003 file - promoters60/3439595
cccatataaaa

SEQ ID NO: 131514 - DNA, 11 bp, Unknown
  misc_feature (1)..( 11): Result.003 file - promoters60/3439595
cccttataaaa

SEQ ID NO: 131515 - DNA, 11 bp, Unknown
  misc_feature (1)..( 11): Result.003 file - promoters60/3439595
tgcttatataa

SEQ ID NO: 131516 - DNA, 12 bp, Unknown
  misc_feature (1)..( 12): Result.003 file - promoters60/3439605
ttcgatttggcg

SEQ ID NO: 131517 - DNA, 12 bp, Unknown
  misc_feature (1)..( 12): Result.003 file - promoters60/3439605
ttccattttcta

SEQ ID NO: 131518 - DNA, 12 bp, Unknown
  misc_feature (1)..( 12): Result.003 file - promoters60/3439605
cagaatttgcga

SEQ ID NO: 131519 - DNA, 10 bp, Unknown
  misc_feature (1)..( 10): Result.003 file - promoters60/3439605
ctgaaaagga

SEQ ID NO: 131520 - DNA, 10 bp, Unknown
  misc_feature (1)..( 10): Result.003 file - promoters60/3439605
ctgaaacaaa

SEQ ID NO: 131521 - DNA, 10 bp, Unknown
  misc_feature (1)..( 10): Result.003 file - promoters60/3439605
atgaaaacaa

SEQ ID NO: 131522 - DNA, 10 bp, Unknown
  misc_feature (1)..( 10): Result.003 file - promoters60/3439605
gagaaaacaa

SEQ ID NO: 131523 - DNA, 12 bp, Unknown
  misc_feature (1)..( 12): Result.003 file - promoters60/3439605
tctattttaatt

SEQ ID NO: 131524 - DNA, 12 bp, Unknown
  misc_feature (1)..( 12): Result.003 file - promoters60/3439605
tctctttttttt

SEQ ID NO: 131525 - DNA, 12 bp, Unknown
  misc_feature (1)..( 12): Result.003 file - promoters60/3439605
agaatttaaatg

SEQ ID NO: 131526 - DNA, 12 bp, Unknown
  misc_feature (1)..( 12): Result.003 file - promoters60/3439605
agtgaataaatg

SEQ ID NO: 131527 - DNA, 7 bp, Unknown
  misc_feature (1)..( 7): Result.003 file - promoters60/3439605
taatttc

SEQ ID NO: 131528 - DNA, 7 bp, Unknown
  misc_feature (1)..( 7): Result.003 file - promoters60/3439605
taatttt

SEQ ID NO: 131529 - DNA, 7 bp, Unknown
  misc_feature (1)..( 7): Result.003 file - promoters60/3439605
taaattc

SEQ ID NO: 131530 - DNA, 9 bp, Unknown
  misc_feature (1)..( 9): Result.003 file - promoters60/3439605
cgattgaat

SEQ ID NO: 131531 - DNA, 9 bp, Unknown
  misc_feature (1)..( 9): Result.003 file - promoters60/3439605
cgattaaat

SEQ ID NO: 131532 - DNA, 9 bp, Unknown
  misc_feature (1)..( 9): Result.003 file - promoters60/3439605
atattaaat

SEQ ID NO: 131533 - DNA, 15 bp, Unknown
  misc_feature (1)..( 15): Result.003 file - promoters60/3439605
gattgaaatatttaa

SEQ ID NO: 131534 - DNA, 15 bp, Unknown
  misc_feature (1)..( 15): Result.003 file - promoters60/3439605
acatgaaatagttaa

SEQ ID NO: 131535 - DNA, 15 bp, Unknown
  misc_feature (1)..( 15): Result.003 file - promoters60/3439605
acataaaataaattt

SEQ ID NO: 131536 - DNA, 8 bp, Unknown
  misc_feature (1)..( 8): Result.003 file - promoters60/3439605
aaacaaag

SEQ ID NO: 131537 - DNA, 8 bp, Unknown
  misc_feature (1)..( 8): Result.003 file - promoters60/3439605
tcacaaag

SEQ ID NO: 131538 - DNA, 8 bp, Unknown
  misc_feature (1)..( 8): Result.003 file - promoters60/3439605
tcataaat

SEQ ID NO: 131539 - DNA, 11 bp, Unknown
  misc_feature (1)..( 11): Result.003 file - promoters60/3439605
taaattcgcca

SEQ ID NO: 131540 - DNA, 11 bp, Unknown
  misc_feature (1)..( 11): Result.003 file - promoters60/3439605
taaattctggg

SEQ ID NO: 131541 - DNA, 11 bp, Unknown
  misc_feature (1)..( 11): Result.003 file - promoters60/3439605
aaaattttggg

SEQ ID NO: 131542 - DNA, 8 bp, Unknown
  misc_feature (1)..( 8): Result.003 file - promoters60/3439605
ttttaatt

SEQ ID NO: 131543 - DNA, 8 bp, Unknown
  misc_feature (1)..( 8): Result.003 file - promoters60/3439605
attttatt

SEQ ID NO: 131544 - DNA, 8 bp, Unknown
  misc_feature (1)..( 8): Result.003 file - promoters60/3439605
attttaga

SEQ ID NO: 131545 - DNA, 7 bp, Unknown
  misc_feature (1)..( 7): Result.003 file - promoters60/3439605
catttat

SEQ ID NO: 131546 - DNA, 7 bp, Unknown
  misc_feature (1)..( 7): Result.003 file - promoters60/3439605
aatttat

SEQ ID NO: 131547 - DNA, 7 bp, Unknown
  misc_feature (1)..( 7): Result.003 file - promoters60/3439605
catttaa

SEQ ID NO: 131548 - DNA, 8 bp, Unknown
  misc_feature (1)..( 8): Result.003 file - promoters60/3439605
caaagcaa

SEQ ID NO: 131549 - DNA, 8 bp, Unknown
  misc_feature (1)..( 8): Result.003 file - promoters60/3439605
gaaaacaa

SEQ ID NO: 131550 - DNA, 8 bp, Unknown
  misc_feature (1)..( 8): Result.003 file - promoters60/3439605
gaaaacaa

SEQ ID NO: 131551 - DNA, 19 bp, Unknown
  misc_feature (1)..( 19): Result.003 file - promoters60/3439614
tctctcaaagatttttttg

SEQ ID NO: 131552 - DNA, 19 bp, Unknown
  misc_feature (1)..( 19): Result.003 file - promoters60/3439614
tctttcaaaatttgaaggc

SEQ ID NO: 131553 - DNA, 19 bp, Unknown
  misc_feature (1)..( 19): Result.003 file - promoters60/3439614
aatttcacagaaatagata

SEQ ID NO: 131554 - DNA, 19 bp, Unknown
  misc_feature (1)..( 19): Result.003 file - promoters60/3439614
cgtgtcaaataaattattt

SEQ ID NO: 131555 - DNA, 19 bp, Unknown
  misc_feature (1)..( 19): Result.003 file - promoters60/3439614
gcagtcaaatatagagttg

SEQ ID NO: 131556 - DNA, 19 bp, Unknown
  misc_feature (1)..( 19): Result.003 file - promoters60/3439614
gggtgagaatcattaatcc

SEQ ID NO: 131557 - DNA, 19 bp, Unknown
  misc_feature (1)..( 19): Result.003 file - promoters60/3439614
agtaaaaaagtataaaaac

SEQ ID NO: 131558 - DNA, 9 bp, Unknown
  misc_feature (1)..( 9): Result.003 file - promoters60/3439614
aaatatata

SEQ ID NO: 131559 - DNA, 9 bp, Unknown
  misc_feature (1)..( 9): Result.003 file - promoters60/3439614
gaatatata

SEQ ID NO: 131560 - DNA, 9 bp, Unknown
  misc_feature (1)..( 9): Result.003 file - promoters60/3439614
aaaaatact

SEQ ID NO: 131561 - DNA, 9 bp, Unknown
  misc_feature (1)..( 9): Result.003 file - promoters60/3439614
aaagatagt

SEQ ID NO: 131562 - DNA, 9 bp, Unknown
  misc_feature (1)..( 9): Result.003 file - promoters60/3439614
ggagagaga

SEQ ID NO: 131563 - DNA, 9 bp, Unknown
  misc_feature (1)..( 9): Result.003 file - promoters60/3439614
caaggtaga

SEQ ID NO: 131564 - DNA, 15 bp, Unknown
  misc_feature (1)..( 15): Result.003 file - promoters60/3439614
cacaaaaatacattt

SEQ ID NO: 131565 - DNA, 15 bp, Unknown
  misc_feature (1)..( 15): Result.003 file - promoters60/3439614
gtcaaatatagagtt

SEQ ID NO: 131566 - DNA, 15 bp, Unknown
  misc_feature (1)..( 15): Result.003 file - promoters60/3439614
aacaaaaaaaaacga

SEQ ID NO: 131567 - DNA, 15 bp, Unknown
  misc_feature (1)..( 15): Result.003 file - promoters60/3439614
cacaactatgcctac

SEQ ID NO: 131568 - DNA, 15 bp, Unknown
  misc_feature (1)..( 15): Result.003 file - promoters60/3439614
cgcaactatatctgc

SEQ ID NO: 131569 - DNA, 16 bp, Unknown
  misc_feature (1)..( 16): Result.003 file - promoters60/3439614
actaaaagaaaccaat

SEQ ID NO: 131570 - DNA, 16 bp, Unknown
  misc_feature (1)..( 16): Result.003 file - promoters60/3439614
tgaaacaacacaaaaa

SEQ ID NO: 131571 - DNA, 16 bp, Unknown
  misc_feature (1)..( 16): Result.003 file - promoters60/3439614
aaaaaaaacgaatggc

SEQ ID NO: 131572 - DNA, 16 bp, Unknown
  misc_feature (1)..( 16): Result.003 file - promoters60/3439614
ggaaaatgaattcttt

SEQ ID NO: 131573 - DNA, 16 bp, Unknown
  misc_feature (1)..( 16): Result.003 file - promoters60/3439614
gtcaaataaattattt

SEQ ID NO: 131574 - DNA, 16 bp, Unknown
  misc_feature (1)..( 16): Result.003 file - promoters60/3439614
ctaaaagaaaccaatt

SEQ ID NO: 131575 - DNA, 16 bp, Unknown
  misc_feature (1)..( 16): Result.003 file - promoters60/3439614
gtcaaatatagagttg

SEQ ID NO: 131576 - DNA, 16 bp, Unknown
  misc_feature (1)..( 16): Result.003 file - promoters60/3439614
tgggtgagaatcatta

SEQ ID NO: 131577 - DNA, 14 bp, Unknown
  misc_feature (1)..( 14): Result.003 file - promoters60/3439614
caaaatttacaaga

SEQ ID NO: 131578 - DNA, 14 bp, Unknown
  misc_feature (1)..( 14): Result.003 file - promoters60/3439614
caaaatttataagg

SEQ ID NO: 131579 - DNA, 14 bp, Unknown
  misc_feature (1)..( 14): Result.003 file - promoters60/3439614
gttgattgataggt

SEQ ID NO: 131580 - DNA, 15 bp, Unknown
  misc_feature (1)..( 15): Result.003 file - promoters60/3439614
acagcggcgataagg

SEQ ID NO: 131581 - DNA, 14 bp, Unknown
  misc_feature (1)..( 14): Result.003 file - promoters60/3439614
ataattttatatat

SEQ ID NO: 131582 - DNA, 15 bp, Unknown
  misc_feature (1)..( 15): Result.003 file - promoters60/3439614
actaattctataaca

SEQ ID NO: 131583 - DNA, 16 bp, Unknown
  misc_feature (1)..( 16): Result.003 file - promoters60/3439614
ggaaaatgaattcttt

SEQ ID NO: 131584 - DNA, 16 bp, Unknown
  misc_feature (1)..( 16): Result.003 file - promoters60/3439614
actaaaagaaaccaat

SEQ ID NO: 131585 - DNA, 16 bp, Unknown
  misc_feature (1)..( 16): Result.003 file - promoters60/3439614
aaaaaacgaatggcaa

SEQ ID NO: 131586 - DNA, 16 bp, Unknown
  misc_feature (1)..( 16): Result.003 file - promoters60/3439614
gtcaaataaattattt

SEQ ID NO: 131587 - DNA, 16 bp, Unknown
  misc_feature (1)..( 16): Result.003 file - promoters60/3439614
gtcaaatatagagttg

SEQ ID NO: 131588 - DNA, 16 bp, Unknown
  misc_feature (1)..( 16): Result.003 file - promoters60/3439614
tgagaatcattaatcc

SEQ ID NO: 131589 - DNA, 12 bp, Unknown
  misc_feature (1)..( 12): Result.003 file - promoters60/3439641
tattaaaatgca

SEQ ID NO: 131590 - DNA, 12 bp, Unknown
  misc_feature (1)..( 12): Result.003 file - promoters60/3439641
tataaaaagaaa

SEQ ID NO: 131591 - DNA, 12 bp, Unknown
  misc_feature (1)..( 12): Result.003 file - promoters60/3439641
tattaaaataga

SEQ ID NO: 131592 - DNA, 12 bp, Unknown
  misc_feature (1)..( 12): Result.003 file - promoters60/3439641
aagaaaaagaaa

SEQ ID NO: 131593 - DNA, 12 bp, Unknown
  misc_feature (1)..( 12): Result.003 file - promoters60/3439641
cagacaagcgag

SEQ ID NO: 131594 - DNA, 9 bp, Unknown
  misc_feature (1)..( 9): Result.003 file - promoters60/3439641
tttttttta

SEQ ID NO: 131595 - DNA, 9 bp, Unknown
  misc_feature (1)..( 9): Result.003 file - promoters60/3439641
ttttatttt

SEQ ID NO: 131596 - DNA, 9 bp, Unknown
  misc_feature (1)..( 9): Result.003 file - promoters60/3439641
ttatatttg

SEQ ID NO: 131597 - DNA, 9 bp, Unknown
  misc_feature (1)..( 9): Result.003 file - promoters60/3439641
ttagattat

SEQ ID NO: 131598 - DNA, 12 bp, Unknown
  misc_feature (1)..( 12): Result.003 file - promoters60/3439641
tgcatacgtttt

SEQ ID NO: 131599 - DNA, 12 bp, Unknown
  misc_feature (1)..( 12): Result.003 file - promoters60/3439641
aatcgtcgtttt

SEQ ID NO: 131600 - DNA, 12 bp, Unknown
  misc_feature (1)..( 12): Result.003 file - promoters60/3439641
gaaatatgtttc

SEQ ID NO: 131601 - DNA, 12 bp, Unknown
  misc_feature (1)..( 12): Result.003 file - promoters60/3439641
aaattatgttat

SEQ ID NO: 131602 - DNA, 12 bp, Unknown
  misc_feature (1)..( 12): Result.003 file - promoters60/3439641
gaagtatgtgtt

SEQ ID NO: 131603 - DNA, 11 bp, Unknown
  misc_feature (1)..( 11): Result.003 file - promoters60/3439641
ttttgtttcgt

SEQ ID NO: 131604 - DNA, 11 bp, Unknown
  misc_feature (1)..( 11): Result.003 file - promoters60/3439641
ttttgattcgt

SEQ ID NO: 131605 - DNA, 11 bp, Unknown
  misc_feature (1)..( 11): Result.003 file - promoters60/3439641
gtttgcttcga

SEQ ID NO: 131606 - DNA, 11 bp, Unknown
  misc_feature (1)..( 11): Result.003 file - promoters60/3439641
ggttggttcat

SEQ ID NO: 131607 - DNA, 11 bp, Unknown
  misc_feature (1)..( 11): Result.003 file - promoters60/3439641
taacaaatttt

SEQ ID NO: 131608 - DNA, 11 bp, Unknown
  misc_feature (1)..( 11): Result.003 file - promoters60/3439641
gagataatttt

SEQ ID NO: 131609 - DNA, 12 bp, Unknown
  misc_feature (1)..( 12): Result.003 file - promoters60/3439641
catgtaatgttt

SEQ ID NO: 131610 - DNA, 12 bp, Unknown
  misc_feature (1)..( 12): Result.003 file - promoters60/3439641
tgtctaattata

SEQ ID NO: 131611 - DNA, 9 bp, Unknown
  misc_feature (1)..( 9): Result.003 file - promoters60/3439641
ttatataaa

SEQ ID NO: 131612 - DNA, 9 bp, Unknown
  misc_feature (1)..( 9): Result.003 file - promoters60/3439641
ttatatttg

SEQ ID NO: 131613 - DNA, 9 bp, Unknown
  misc_feature (1)..( 9): Result.003 file - promoters60/3439641
ttatttttg

SEQ ID NO: 131614 - DNA, 9 bp, Unknown
  misc_feature (1)..( 9): Result.003 file - promoters60/3439641
ttagattat

SEQ ID NO: 131615 - DNA, 11 bp, Unknown
  misc_feature (1)..( 11): Result.003 file - promoters60/3439641
aagaaatgtag

SEQ ID NO: 131616 - DNA, 11 bp, Unknown
  misc_feature (1)..( 11): Result.003 file - promoters60/3439641
aagaaatttat

SEQ ID NO: 131617 - DNA, 11 bp, Unknown
  misc_feature (1)..( 11): Result.003 file - promoters60/3439641
tagaaatatgt

SEQ ID NO: 131618 - DNA, 11 bp, Unknown
  misc_feature (1)..( 11): Result.003 file - promoters60/3439641
tggaagtatgt

SEQ ID NO: 131619 - DNA, 10 bp, Unknown
  misc_feature (1)..( 10): Result.003 file - promoters60/3439662
agtttttgaa

SEQ ID NO: 131620 - DNA, 10 bp, Unknown
  misc_feature (1)..( 10): Result.003 file - promoters60/3439662
taattttgaa

SEQ ID NO: 131621 - DNA, 8 bp, Unknown
  misc_feature (1)..( 8): Result.003 file - promoters60/3439662
aatttgaa

SEQ ID NO: 131622 - DNA, 10 bp, Unknown
  misc_feature (1)..( 10): Result.003 file - promoters60/3439662
taatattggt

SEQ ID NO: 131623 - DNA, 10 bp, Unknown
  misc_feature (1)..( 10): Result.003 file - promoters60/3439662
tagatttgat

SEQ ID NO: 131624 - DNA, 7 bp, Unknown
  misc_feature (1)..( 7): Result.003 file - promoters60/3439905
aaataat

SEQ ID NO: 131625 - DNA, 7 bp, Unknown
  misc_feature (1)..( 7): Result.003 file - promoters60/3439905
taataat

SEQ ID NO: 131626 - DNA, 7 bp, Unknown
  misc_feature (1)..( 7): Result.003 file - promoters60/3439905
aaataaa

SEQ ID NO: 131627 - DNA, 8 bp, Unknown
  misc_feature (1)..( 8): Result.003 file - promoters60/3439905
tgaaatca

SEQ ID NO: 131628 - DNA, 8 bp, Unknown
  misc_feature (1)..( 8): Result.003 file - promoters60/3439905
tgacatca

SEQ ID NO: 131629 - DNA, 7 bp, Unknown
  misc_feature (1)..( 7): Result.003 file - promoters60/3439905
taaaaaa

SEQ ID NO: 131630 - DNA, 7 bp, Unknown
  misc_feature (1)..( 7): Result.003 file - promoters60/3439905
taaaaaa

SEQ ID NO: 131631 - DNA, 7 bp, Unknown
  misc_feature (1)..( 7): Result.003 file - promoters60/3439905
taaaaac

SEQ ID NO: 131632 - DNA, 6 bp, Unknown
  misc_feature (1)..( 6): Result.003 file - promoters60/3439905
aatgaa

SEQ ID NO: 131633 - DNA, 6 bp, Unknown
  misc_feature (1)..( 6): Result.003 file - promoters60/3439905
aatgaa

SEQ ID NO: 131634 - DNA, 6 bp, Unknown
  misc_feature (1)..( 6): Result.003 file - promoters60/3439905
ggaaat

SEQ ID NO: 131635 - DNA, 6 bp, Unknown
  misc_feature (1)..( 6): Result.003 file - promoters60/3439905
ggaaat

SEQ ID NO: 131636 - DNA, 6 bp, Unknown
  misc_feature (1)..( 6): Result.003 file - promoters60/3439905
aagaaa

SEQ ID NO: 131637 - DNA, 6 bp, Unknown
  misc_feature (1)..( 6): Result.003 file - promoters60/3439905
aagaaa

SEQ ID NO: 131638 - DNA, 7 bp, Unknown
  misc_feature (1)..( 7): Result.003 file - promoters60/3439905
aaagaat

SEQ ID NO: 131639 - DNA, 7 bp, Unknown
  misc_feature (1)..( 7): Result.003 file - promoters60/3439905
aaaaaat

SEQ ID NO: 131640 - DNA, 9 bp, Unknown
  misc_feature (1)..( 9): Result.003 file - promoters60/3439905
ttctttctc

SEQ ID NO: 131641 - DNA, 9 bp, Unknown
  misc_feature (1)..( 9): Result.003 file - promoters60/3439905
ttctctctc

SEQ ID NO: 131642 - DNA, 7 bp, Unknown
  misc_feature (1)..( 7): Result.003 file - promoters60/3439905
atttttc

SEQ ID NO: 131643 - DNA, 7 bp, Unknown
  misc_feature (1)..( 7): Result.003 file - promoters60/3439905
attcttc

SEQ ID NO: 131644 - DNA, 6 bp, Unknown
  misc_feature (1)..( 6): Result.003 file - promoters60/3439905
tataaa

SEQ ID NO: 131645 - DNA, 6 bp, Unknown
  misc_feature (1)..( 6): Result.003 file - promoters60/3439905
tataaa

SEQ ID NO: 131646 - DNA, 10 bp, Unknown
  misc_feature (1)..( 10): Result.003 file - promoters60/3442171
ttttttttta

SEQ ID NO: 131647 - DNA, 10 bp, Unknown
  misc_feature (1)..( 10): Result.003 file - promoters60/3442171
atttatttta

SEQ ID NO: 131648 - DNA, 10 bp, Unknown
  misc_feature (1)..( 10): Result.003 file - promoters60/3442171
ttttattcat

SEQ ID NO: 131649 - DNA, 10 bp, Unknown
  misc_feature (1)..( 10): Result.003 file - promoters60/3442171
ttttaaccaa

SEQ ID NO: 131650 - DNA, 10 bp, Unknown
  misc_feature (1)..( 10): Result.003 file - promoters60/3442171
aaataaagtt

SEQ ID NO: 131651 - DNA, 10 bp, Unknown
  misc_feature (1)..( 10): Result.003 file - promoters60/3442171
aaataaggtt

SEQ ID NO: 131652 - DNA, 10 bp, Unknown
  misc_feature (1)..( 10): Result.003 file - promoters60/3442171
caacaaagtt

SEQ ID NO: 131653 - DNA, 10 bp, Unknown
  misc_feature (1)..( 10): Result.003 file - promoters60/3442171
gttaaaagtt

SEQ ID NO: 131654 - DNA, 15 bp, Unknown
  misc_feature (1)..( 15): Result.003 file - promoters60/3445482
acaatgggctgggcc

SEQ ID NO: 131655 - DNA, 15 bp, Unknown
  misc_feature (1)..( 15): Result.003 file - promoters60/3445482
attttgggcttctta

SEQ ID NO: 131656 - DNA, 15 bp, Unknown
  misc_feature (1)..( 15): Result.003 file - promoters60/3445482
gaaataggcccaaca

SEQ ID NO: 131657 - DNA, 15 bp, Unknown
  misc_feature (1)..( 15): Result.003 file - promoters60/3445482
taattgggcttttta

SEQ ID NO: 131658 - DNA, 15 bp, Unknown
  misc_feature (1)..( 15): Result.003 file - promoters60/3445482
caattgggattattt

SEQ ID NO: 131659 - DNA, 15 bp, Unknown
  misc_feature (1)..( 15): Result.003 file - promoters60/3445482
taaaaaggcccatta

SEQ ID NO: 131660 - DNA, 15 bp, Unknown
  misc_feature (1)..( 15): Result.003 file - promoters60/3445482
taaaaaatatctgaa

SEQ ID NO: 131661 - DNA, 15 bp, Unknown
  misc_feature (1)..( 15): Result.003 file - promoters60/3445482
cctaaaggcccaata

SEQ ID NO: 131662 - DNA, 11 bp, Unknown
  misc_feature (1)..( 11): Result.003 file - promoters60/3445482
tcaagacctaa

SEQ ID NO: 131663 - DNA, 11 bp, Unknown
  misc_feature (1)..( 11): Result.003 file - promoters60/3445482
gcaaaaccaaa

SEQ ID NO: 131664 - DNA, 11 bp, Unknown
  misc_feature (1)..( 11): Result.003 file - promoters60/3445482
cctaaaccact

SEQ ID NO: 131665 - DNA, 11 bp, Unknown
  misc_feature (1)..( 11): Result.003 file - promoters60/3445482
aacaaatcaaa

SEQ ID NO: 131666 - DNA, 11 bp, Unknown
  misc_feature (1)..( 11): Result.003 file - promoters60/3445482
tcaaatataga

SEQ ID NO: 131667 - DNA, 11 bp, Unknown
  misc_feature (1)..( 11): Result.003 file - promoters60/3445482
acaaaactgaa

SEQ ID NO: 131668 - DNA, 10 bp, Unknown
  misc_feature (1)..( 10): Result.003 file - promoters60/3593205
aataataaac

SEQ ID NO: 131669 - DNA, 10 bp, Unknown
  misc_feature (1)..( 10): Result.003 file - promoters60/3593205
cgaaatcaac

SEQ ID NO: 131670 - DNA, 10 bp, Unknown
  misc_feature (1)..( 10): Result.003 file - promoters60/3593205
ataaataatt

SEQ ID NO: 131671 - DNA, 10 bp, Unknown
  misc_feature (1)..( 10): Result.003 file - promoters60/3593205
taaaatcaca

SEQ ID NO: 131672 - DNA, 13 bp, Unknown
  misc_feature (1)..( 13): Result.003 file - promoters60/3593205
tattgaatcatat

SEQ ID NO: 131673 - DNA, 13 bp, Unknown
  misc_feature (1)..( 13): Result.003 file - promoters60/3593205
aattggatccgaa

SEQ ID NO: 131674 - DNA, 13 bp, Unknown
  misc_feature (1)..( 13): Result.003 file - promoters60/3593205
aattagatttttt

SEQ ID NO: 131675 - DNA, 13 bp, Unknown
  misc_feature (1)..( 13): Result.003 file - promoters60/3593205
tattcgatctttt

SEQ ID NO: 131676 - DNA, 10 bp, Unknown
  misc_feature (1)..( 10): Result.003 file - promoters60/3593205
aactaaaact

SEQ ID NO: 131677 - DNA, 10 bp, Unknown
  misc_feature (1)..( 10): Result.003 file - promoters60/3593205
tactcaaata

SEQ ID NO: 131678 - DNA, 10 bp, Unknown
  misc_feature (1)..( 10): Result.003 file - promoters60/3593205
gaatctaata

SEQ ID NO: 131679 - DNA, 10 bp, Unknown
  misc_feature (1)..( 10): Result.003 file - promoters60/3593205
atttcttata

SEQ ID NO: 131680 - DNA, 11 bp, Unknown
  misc_feature (1)..( 11): Result.003 file - promoters60/3593205
acaataataaa

SEQ ID NO: 131681 - DNA, 11 bp, Unknown
  misc_feature (1)..( 11): Result.003 file - promoters60/3593205
tttataatata

SEQ ID NO: 131682 - DNA, 11 bp, Unknown
  misc_feature (1)..( 11): Result.003 file - promoters60/3593205
acaattatata

SEQ ID NO: 131683 - DNA, 11 bp, Unknown
  misc_feature (1)..( 11): Result.003 file - promoters60/3593205
cactttaaaat

SEQ ID NO: 131684 - DNA, 9 bp, Unknown
  misc_feature (1)..( 9): Result.003 file - promoters60/3593205
ctattttgt

SEQ ID NO: 131685 - DNA, 9 bp, Unknown
  misc_feature (1)..( 9): Result.003 file - promoters60/3593205
ttattttat

SEQ ID NO: 131686 - DNA, 9 bp, Unknown
  misc_feature (1)..( 9): Result.003 file - promoters60/3593205
ctaatttag

SEQ ID NO: 131687 - DNA, 9 bp, Unknown
  misc_feature (1)..( 9): Result.003 file - promoters60/3593205
atattttat

SEQ ID NO: 131688 - DNA, 13 bp, Unknown
  misc_feature (1)..( 13): Result.003 file - promoters60/3593205
tattatattgaat

SEQ ID NO: 131689 - DNA, 13 bp, Unknown
  misc_feature (1)..( 13): Result.003 file - promoters60/3593205
aattagatttttt

SEQ ID NO: 131690 - DNA, 13 bp, Unknown
  misc_feature (1)..( 13): Result.003 file - promoters60/3593205
aattggatccgaa

SEQ ID NO: 131691 - DNA, 13 bp, Unknown
  misc_feature (1)..( 13): Result.003 file - promoters60/3593205
tattcgatctttt

SEQ ID NO: 131692 - DNA, 11 bp, Unknown
  misc_feature (1)..( 11): Result.003 file - promoters60/3593230
attaataaagc

SEQ ID NO: 131693 - DNA, 11 bp, Unknown
  misc_feature (1)..( 11): Result.003 file - promoters60/3593230
gttaacaaaaa

SEQ ID NO: 131694 - DNA, 11 bp, Unknown
  misc_feature (1)..( 11): Result.003 file - promoters60/3593230
gtaaataaata

SEQ ID NO: 131695 - DNA, 11 bp, Unknown
  misc_feature (1)..( 11): Result.003 file - promoters60/3593230
ttacacaaatt

SEQ ID NO: 131696 - DNA, 11 bp, Unknown
  misc_feature (1)..( 11): Result.003 file - promoters60/3593230
gttatcaatta

SEQ ID NO: 131697 - DNA, 11 bp, Unknown
  misc_feature (1)..( 11): Result.003 file - promoters60/3593230
aatatcaatac

SEQ ID NO: 131698 - DNA, 11 bp, Unknown
  misc_feature (1)..( 11): Result.003 file - promoters60/3593230
cttgataaata

SEQ ID NO: 131699 - DNA, 6 bp, Unknown
  misc_feature (1)..( 6): Result.003 file - promoters60/3593243
attaaa

SEQ ID NO: 131700 - DNA, 6 bp, Unknown
  misc_feature (1)..( 6): Result.003 file - promoters60/3593243
attaaa

SEQ ID NO: 131701 - DNA, 10 bp, Unknown
  misc_feature (1)..( 10): Result.003 file - promoters60/3593243
aaagataaga

SEQ ID NO: 131702 - DNA, 10 bp, Unknown
  misc_feature (1)..( 10): Result.003 file - promoters60/3593243
aaacataatg

SEQ ID NO: 131703 - DNA, 10 bp, Unknown
  misc_feature (1)..( 10): Result.003 file - promoters60/3593243
cgtcattatg

SEQ ID NO: 131704 - DNA, 8 bp, Unknown
  misc_feature (1)..( 8): Result.003 file - promoters60/3593243
atatgttt

SEQ ID NO: 131705 - DNA, 8 bp, Unknown
  misc_feature (1)..( 8): Result.003 file - promoters60/3593243
atatcttt

SEQ ID NO: 131706 - DNA, 8 bp, Unknown
  misc_feature (1)..( 8): Result.003 file - promoters60/3593243
ttgtcttc

SEQ ID NO: 131707 - DNA, 8 bp, Unknown
  misc_feature (1)..( 8): Result.003 file - promoters60/3593243
ttgttttc

SEQ ID NO: 131708 - DNA, 8 bp, Unknown
  misc_feature (1)..( 8): Result.003 file - promoters60/3593243
ttgttttt

SEQ ID NO: 131709 - DNA, 6 bp, Unknown
  misc_feature (1)..( 6): Result.003 file - promoters60/3593243
cttcaa

SEQ ID NO: 131710 - DNA, 6 bp, Unknown
  misc_feature (1)..( 6): Result.003 file - promoters60/3593243
cttcaa

SEQ ID NO: 131711 - DNA, 6 bp, Unknown
  misc_feature (1)..( 6): Result.003 file - promoters60/3593243
cattta

SEQ ID NO: 131712 - DNA, 6 bp, Unknown
  misc_feature (1)..( 6): Result.003 file - promoters60/3593243
cattta

SEQ ID NO: 131713 - DNA, 6 bp, Unknown
  misc_feature (1)..( 6): Result.003 file - promoters60/3593243
caaaaa

SEQ ID NO: 131714 - DNA, 6 bp, Unknown
  misc_feature (1)..( 6): Result.003 file - promoters60/3593243
caaaaa

SEQ ID NO: 131715 - DNA, 6 bp, Unknown
  misc_feature (1)..( 6): Result.003 file - promoters60/3593243
aaatgc

SEQ ID NO: 131716 - DNA, 6 bp, Unknown
  misc_feature (1)..( 6): Result.003 file - promoters60/3593243
aaatgc

SEQ ID NO: 131717 - DNA, 9 bp, Unknown
  misc_feature (1)..( 9): Result.003 file - promoters60/3593243
taacacatg

SEQ ID NO: 131718 - DNA, 9 bp, Unknown
  misc_feature (1)..( 9): Result.003 file - promoters60/3593243
taatacata

SEQ ID NO: 131719 - DNA, 9 bp, Unknown
  misc_feature (1)..( 9): Result.003 file - promoters60/3593243
acatatata

SEQ ID NO: 131720 - DNA, 7 bp, Unknown
  misc_feature (1)..( 7): Result.003 file - promoters60/3593243
atactaa

SEQ ID NO: 131721 - DNA, 7 bp, Unknown
  misc_feature (1)..( 7): Result.003 file - promoters60/3593243
ataataa

SEQ ID NO: 131722 - DNA, 6 bp, Unknown
  misc_feature (1)..( 6): Result.003 file - promoters60/3593243
tttaag

SEQ ID NO: 131723 - DNA, 6 bp, Unknown
  misc_feature (1)..( 6): Result.003 file - promoters60/3593243
tttaag

SEQ ID NO: 131724 - DNA, 9 bp, Unknown
  misc_feature (1)..( 9): Result.003 file - promoters60/3593243
agtcttaat

SEQ ID NO: 131725 - DNA, 9 bp, Unknown
  misc_feature (1)..( 9): Result.003 file - promoters60/3593243
agtattaat

SEQ ID NO: 131726 - DNA, 9 bp, Unknown
  misc_feature (1)..( 9): Result.003 file - promoters60/3593243
agacaagtt

SEQ ID NO: 131727 - DNA, 9 bp, Unknown
  misc_feature (1)..( 9): Result.003 file - promoters60/3593243
agacaagtt

SEQ ID NO: 131728 - DNA, 7 bp, Unknown
  misc_feature (1)..( 7): Result.003 file - promoters60/3593243
ttacatg

SEQ ID NO: 131729 - DNA, 7 bp, Unknown
  misc_feature (1)..( 7): Result.003 file - promoters60/3593243
ttatatg

SEQ ID NO: 131730 - DNA, 7 bp, Unknown
  misc_feature (1)..( 7): Result.003 file - promoters60/3593243
tctctga

SEQ ID NO: 131731 - DNA, 7 bp, Unknown
  misc_feature (1)..( 7): Result.003 file - promoters60/3593243
tctctga

SEQ ID NO: 131732 - DNA, 9 bp, Unknown
  misc_feature (1)..( 9): Result.003 file - promoters60/3593243
aacacacat

SEQ ID NO: 131733 - DNA, 9 bp, Unknown
  misc_feature (1)..( 9): Result.003 file - promoters60/3593243
aacacacat

SEQ ID NO: 131734 - DNA, 6 bp, Unknown
  misc_feature (1)..( 6): Result.003 file - promoters60/3593243
atgtca

SEQ ID NO: 131735 - DNA, 6 bp, Unknown
  misc_feature (1)..( 6): Result.003 file - promoters60/3593243
atgtca

SEQ ID NO: 131736 - DNA, 9 bp, Unknown
  misc_feature (1)..( 9): Result.003 file - promoters60/3593243
gttaatctt

SEQ ID NO: 131737 - DNA, 9 bp, Unknown
  misc_feature (1)..( 9): Result.003 file - promoters60/3593243
gttaatctt

SEQ ID NO: 131738 - DNA, 7 bp, Unknown
  misc_feature (1)..( 7): Result.003 file - promoters60/3593243
aacttta

SEQ ID NO: 131739 - DNA, 7 bp, Unknown
  misc_feature (1)..( 7): Result.003 file - promoters60/3593243
aacatta

SEQ ID NO: 131740 - DNA, 6 bp, Unknown
  misc_feature (1)..( 6): Result.003 file - promoters60/3593243
aagaaa

SEQ ID NO: 131741 - DNA, 6 bp, Unknown
  misc_feature (1)..( 6): Result.003 file - promoters60/3593243
aagaaa

SEQ ID NO: 131742 - DNA, 6 bp, Unknown
  misc_feature (1)..( 6): Result.003 file - promoters60/3593243
cttctt

SEQ ID NO: 131743 - DNA, 6 bp, Unknown
  misc_feature (1)..( 6): Result.003 file - promoters60/3593243
cttctt

SEQ ID NO: 131744 - DNA, 6 bp, Unknown
  misc_feature (1)..( 6): Result.003 file - promoters60/3593243
tataaa

SEQ ID NO: 131745 - DNA, 6 bp, Unknown
  misc_feature (1)..( 6): Result.003 file - promoters60/3593243
tataaa

SEQ ID NO: 131746 - DNA, 7 bp, Unknown
  misc_feature (1)..( 7): Result.003 file - promoters60/3593264
gtttttg

SEQ ID NO: 131747 - DNA, 7 bp, Unknown
  misc_feature (1)..( 7): Result.003 file - promoters60/3593264
ttttttg

SEQ ID NO: 131748 - DNA, 7 bp, Unknown
  misc_feature (1)..( 7): Result.003 file - promoters60/3593264
gttcttg

SEQ ID NO: 131749 - DNA, 10 bp, Unknown
  misc_feature (1)..( 10): Result.003 file - promoters60/3593264
ttagattttt

SEQ ID NO: 131750 - DNA, 10 bp, Unknown
  misc_feature (1)..( 10): Result.003 file - promoters60/3593264
ttaaattaat

SEQ ID NO: 131751 - DNA, 10 bp, Unknown
  misc_feature (1)..( 10): Result.003 file - promoters60/3593264
caaaactaat

SEQ ID NO: 131752 - DNA, 10 bp, Unknown
  misc_feature (1)..( 10): Result.003 file - promoters60/3593264
aaaaaaattc

SEQ ID NO: 131753 - DNA, 10 bp, Unknown
  misc_feature (1)..( 10): Result.003 file - promoters60/3593264
acaaaacttc

SEQ ID NO: 131754 - DNA, 10 bp, Unknown
  misc_feature (1)..( 10): Result.003 file - promoters60/3593264
aaaaaacttc

SEQ ID NO: 131755 - DNA, 10 bp, Unknown
  misc_feature (1)..( 10): Result.003 file - promoters60/3593264
gcaaacattt

SEQ ID NO: 131756 - DNA, 8 bp, Unknown
  misc_feature (1)..( 8): Result.003 file - promoters60/3593264
cattttac

SEQ ID NO: 131757 - DNA, 8 bp, Unknown
  misc_feature (1)..( 8): Result.003 file - promoters60/3593264
acttttac

SEQ ID NO: 131758 - DNA, 8 bp, Unknown
  misc_feature (1)..( 8): Result.003 file - promoters60/3593264
catattaa

SEQ ID NO: 131759 - DNA, 13 bp, Unknown
  misc_feature (1)..( 13): Result.003 file - promoters60/3593264
aaacaaaaaaaaa

SEQ ID NO: 131760 - DNA, 13 bp, Unknown
  misc_feature (1)..( 13): Result.003 file - promoters60/3593264
taggaaaaaaaaa

SEQ ID NO: 131761 - DNA, 13 bp, Unknown
  misc_feature (1)..( 13): Result.003 file - promoters60/3593264
aaacaagaaaaac

SEQ ID NO: 131762 - DNA, 13 bp, Unknown
  misc_feature (1)..( 13): Result.003 file - promoters60/3593264
aatatataaaaat

SEQ ID NO: 131763 - DNA, 10 bp, Unknown
  misc_feature (1)..( 10): Result.003 file - promoters60/3593264
actcaaaaaa

SEQ ID NO: 131764 - DNA, 10 bp, Unknown
  misc_feature (1)..( 10): Result.003 file - promoters60/3593264
tagcaaaaaa

SEQ ID NO: 131765 - DNA, 10 bp, Unknown
  misc_feature (1)..( 10): Result.003 file - promoters60/3593264
tctcaaaaat

SEQ ID NO: 131766 - DNA, 10 bp, Unknown
  misc_feature (1)..( 10): Result.003 file - promoters60/3593264
tctgaaaaat

SEQ ID NO: 131767 - DNA, 12 bp, Unknown
  misc_feature (1)..( 12): Result.003 file - promoters60/3593264
ttgaattactca

SEQ ID NO: 131768 - DNA, 12 bp, Unknown
  misc_feature (1)..( 12): Result.003 file - promoters60/3593264
caaaatttctca

SEQ ID NO: 131769 - DNA, 12 bp, Unknown
  misc_feature (1)..( 12): Result.003 file - promoters60/3593264
caaaacttctct

SEQ ID NO: 131770 - DNA, 12 bp, Unknown
  misc_feature (1)..( 12): Result.003 file - promoters60/3593264
tttgaataataa

SEQ ID NO: 131771 - DNA, 12 bp, Unknown
  misc_feature (1)..( 12): Result.003 file - promoters60/3593264
tctgaaaaattc

SEQ ID NO: 131772 - DNA, 12 bp, Unknown
  misc_feature (1)..( 12): Result.003 file - promoters60/3593264
tctcaaaaataa

SEQ ID NO: 131773 - DNA, 12 bp, Unknown
  misc_feature (1)..( 12): Result.003 file - promoters60/3593264
gcaaaaaacttc

SEQ ID NO: 131774 - DNA, 15 bp, Unknown
  misc_feature (1)..( 15): Result.003 file - promoters60/3593264
ataataaaatttgaa

SEQ ID NO: 131775 - DNA, 15 bp, Unknown
  misc_feature (1)..( 15): Result.003 file - promoters60/3593264
gcaagaaaatctgaa

SEQ ID NO: 131776 - DNA, 15 bp, Unknown
  misc_feature (1)..( 15): Result.003 file - promoters60/3593264
tctcaaaaataaaag

SEQ ID NO: 131777 - DNA, 8 bp, Unknown
  misc_feature (1)..( 8): Result.003 file - promoters60/3593264
ctctattt

SEQ ID NO: 131778 - DNA, 8 bp, Unknown
  misc_feature (1)..( 8): Result.003 file - promoters60/3593264
ttctcttt

SEQ ID NO: 131779 - DNA, 8 bp, Unknown
  misc_feature (1)..( 8): Result.003 file - promoters60/3593264
ctcaattg

SEQ ID NO: 131780 - DNA, 8 bp, Unknown
  misc_feature (1)..( 8): Result.003 file - promoters60/3593264
tatataac

SEQ ID NO: 131781 - DNA, 8 bp, Unknown
  misc_feature (1)..( 8): Result.003 file - promoters60/3593264
tatataaa

SEQ ID NO: 131782 - DNA, 8 bp, Unknown
  misc_feature (1)..( 8): Result.003 file - promoters60/3593264
actataaa

SEQ ID NO: 131783 - DNA, 9 bp, Unknown
  misc_feature (1)..( 9): Result.003 file - promoters60/3593264
gttttgttt

SEQ ID NO: 131784 - DNA, 9 bp, Unknown
  misc_feature (1)..( 9): Result.003 file - promoters60/3593264
gtttggtta

SEQ ID NO: 131785 - DNA, 9 bp, Unknown
  misc_feature (1)..( 9): Result.003 file - promoters60/3593264
ttttgatta

SEQ ID NO: 131786 - DNA, 8 bp, Unknown
  misc_feature (1)..( 8): Result.003 file - promoters60/3593290
tatcagtt

SEQ ID NO: 131787 - DNA, 8 bp, Unknown
  misc_feature (1)..( 8): Result.003 file - promoters60/3593290
tatgagtt

SEQ ID NO: 131788 - DNA, 6 bp, Unknown
  misc_feature (1)..( 6): Result.003 file - promoters60/3593290
tttaga

SEQ ID NO: 131789 - DNA, 6 bp, Unknown
  misc_feature (1)..( 6): Result.003 file - promoters60/3593290
tttaga

SEQ ID NO: 131790 - DNA, 6 bp, Unknown
  misc_feature (1)..( 6): Result.003 file - promoters60/3593290
taactt

SEQ ID NO: 131791 - DNA, 6 bp, Unknown
  misc_feature (1)..( 6): Result.003 file - promoters60/3593290
taactt

SEQ ID NO: 131792 - DNA, 10 bp, Unknown
  misc_feature (1)..( 10): Result.003 file - promoters60/3593290
atatgttaga

SEQ ID NO: 131793 - DNA, 10 bp, Unknown
  misc_feature (1)..( 10): Result.003 file - promoters60/3593290
atatgtgaga

SEQ ID NO: 131794 - DNA, 8 bp, Unknown
  misc_feature (1)..( 8): Result.003 file - promoters60/3593290
tttttgtc

SEQ ID NO: 131795 - DNA, 8 bp, Unknown
  misc_feature (1)..( 8): Result.003 file - promoters60/3593290
tttttgtc

SEQ ID NO: 131796 - DNA, 6 bp, Unknown
  misc_feature (1)..( 6): Result.003 file - promoters60/3593290
tctttt

SEQ ID NO: 131797 - DNA, 6 bp, Unknown
  misc_feature (1)..( 6): Result.003 file - promoters60/3593290
tctttt

SEQ ID NO: 131798 - DNA, 6 bp, Unknown
  misc_feature (1)..( 6): Result.003 file - promoters60/3593290
tttctt

SEQ ID NO: 131799 - DNA, 6 bp, Unknown
  misc_feature (1)..( 6): Result.003 file - promoters60/3593290
tttctt

SEQ ID NO: 131800 - DNA, 7 bp, Unknown
  misc_feature (1)..( 7): Result.003 file - promoters60/3593290
tttattt

SEQ ID NO: 131801 - DNA, 7 bp, Unknown
  misc_feature (1)..( 7): Result.003 file - promoters60/3593290
tttgttt

SEQ ID NO: 131802 - DNA, 7 bp, Unknown
  misc_feature (1)..( 7): Result.003 file - promoters60/3593290
ctcggaa

SEQ ID NO: 131803 - DNA, 7 bp, Unknown
  misc_feature (1)..( 7): Result.003 file - promoters60/3593290
ctcagaa

SEQ ID NO: 131804 - DNA, 10 bp, Unknown
  misc_feature (1)..( 10): Result.003 file - promoters60/3593290
gctcgttgtg

SEQ ID NO: 131805 - DNA, 10 bp, Unknown
  misc_feature (1)..( 10): Result.003 file - promoters60/3593290
gattgttgtg

SEQ ID NO: 131806 - DNA, 10 bp, Unknown
  misc_feature (1)..( 10): Result.003 file - promoters60/3593290
gattgatgta

SEQ ID NO: 131807 - DNA, 9 bp, Unknown
  misc_feature (1)..( 9): Result.003 file - promoters60/3593290
gatcaggaa

SEQ ID NO: 131808 - DNA, 9 bp, Unknown
  misc_feature (1)..( 9): Result.003 file - promoters60/3593290
gatctggaa

SEQ ID NO: 131809 - DNA, 8 bp, Unknown
  misc_feature (1)..( 8): Result.003 file - promoters60/3593290
atttggac

SEQ ID NO: 131810 - DNA, 8 bp, Unknown
  misc_feature (1)..( 8): Result.003 file - promoters60/3593290
attttgac

SEQ ID NO: 131811 - DNA, 8 bp, Unknown
  misc_feature (1)..( 8): Result.003 file - promoters60/3593290
ctttagac

SEQ ID NO: 131812 - DNA, 8 bp, Unknown
  misc_feature (1)..( 8): Result.003 file - promoters60/3593290
ctttcgac

SEQ ID NO: 131813 - DNA, 7 bp, Unknown
  misc_feature (1)..( 7): Result.003 file - promoters60/3593290
gaaactt

SEQ ID NO: 131814 - DNA, 7 bp, Unknown
  misc_feature (1)..( 7): Result.003 file - promoters60/3593290
gaagctt

SEQ ID NO: 131815 - DNA, 7 bp, Unknown
  misc_feature (1)..( 7): Result.003 file - promoters60/3593290
tcatctg

SEQ ID NO: 131816 - DNA, 7 bp, Unknown
  misc_feature (1)..( 7): Result.003 file - promoters60/3593290
tcatctg

SEQ ID NO: 131817 - DNA, 7 bp, Unknown
  misc_feature (1)..( 7): Result.003 file - promoters60/3593290
ctttttg

SEQ ID NO: 131818 - DNA, 7 bp, Unknown
  misc_feature (1)..( 7): Result.003 file - promoters60/3593290
ctttttg

SEQ ID NO: 131819 - DNA, 9 bp, Unknown
  misc_feature (1)..( 9): Result.003 file - promoters60/3593340
tttaaagaa

SEQ ID NO: 131820 - DNA, 9 bp, Unknown
  misc_feature (1)..( 9): Result.003 file - promoters60/3593340
gttaaggaa

SEQ ID NO: 131821 - DNA, 9 bp, Unknown
  misc_feature (1)..( 9): Result.003 file - promoters60/3593340
tttgaagat

SEQ ID NO: 131822 - DNA, 12 bp, Unknown
  misc_feature (1)..( 12): Result.003 file - promoters60/3593340
aaaaatggtaat

SEQ ID NO: 131823 - DNA, 12 bp, Unknown
  misc_feature (1)..( 12): Result.003 file - promoters60/3593340
ctaaatgctaat

SEQ ID NO: 131824 - DNA, 12 bp, Unknown
  misc_feature (1)..( 12): Result.003 file - promoters60/3593340
aaaaaagatgta

SEQ ID NO: 131825 - DNA, 12 bp, Unknown
  misc_feature (1)..( 12): Result.003 file - promoters60/3593340
tgaaagggtata

SEQ ID NO: 131826 - DNA, 11 bp, Unknown
  misc_feature (1)..( 11): Result.003 file - promoters60/3593340
aaggcaaaaga

SEQ ID NO: 131827 - DNA, 11 bp, Unknown
  misc_feature (1)..( 11): Result.003 file - promoters60/3593340
tctgcagaaga

SEQ ID NO: 131828 - DNA, 11 bp, Unknown
  misc_feature (1)..( 11): Result.003 file - promoters60/3593340
aagacaaaact

SEQ ID NO: 131829 - DNA, 7 bp, Unknown
  misc_feature (1)..( 7): Result.003 file - promoters60/3593340
ataattt

SEQ ID NO: 131830 - DNA, 7 bp, Unknown
  misc_feature (1)..( 7): Result.003 file - promoters60/3593340
ttaattt

SEQ ID NO: 131831 - DNA, 7 bp, Unknown
  misc_feature (1)..( 7): Result.003 file - promoters60/3593340
ttaattg

SEQ ID NO: 131832 - DNA, 7 bp, Unknown
  misc_feature (1)..( 7): Result.003 file - promoters60/3593340
tttattg

SEQ ID NO: 131833 - DNA, 7 bp, Unknown
  misc_feature (1)..( 7): Result.003 file - promoters60/3593340
tttatta

SEQ ID NO: 131834 - DNA, 7 bp, Unknown
  misc_feature (1)..( 7): Result.003 file - promoters60/3593340
tttgtta

SEQ ID NO: 131835 - DNA, 9 bp, Unknown
  misc_feature (1)..( 9): Result.003 file - promoters60/3593340
tttttataa

SEQ ID NO: 131836 - DNA, 9 bp, Unknown
  misc_feature (1)..( 9): Result.003 file - promoters60/3593340
ttttaataa

SEQ ID NO: 131837 - DNA, 9 bp, Unknown
  misc_feature (1)..( 9): Result.003 file - promoters60/3593340
ttttaaagg

SEQ ID NO: 131838 - DNA, 11 bp, Unknown
  misc_feature (1)..( 11): Result.003 file - promoters60/3593340
gtaaataatag

SEQ ID NO: 131839 - DNA, 11 bp, Unknown
  misc_feature (1)..( 11): Result.003 file - promoters60/3593340
gtaaaaaatat

SEQ ID NO: 131840 - DNA, 11 bp, Unknown
  misc_feature (1)..( 11): Result.003 file - promoters60/3593340
tgaaaatatat

SEQ ID NO: 131841 - DNA, 8 bp, Unknown
  misc_feature (1)..( 8): Result.003 file - promoters60/3593346
aaaataat

SEQ ID NO: 131842 - DNA, 6 bp, Unknown
  misc_feature (1)..( 6): Result.003 file - promoters60/3593346
aataat

SEQ ID NO: 131843 - DNA, 8 bp, Unknown
  misc_feature (1)..( 8): Result.003 file - promoters60/3593346
aaaacaat

SEQ ID NO: 131844 - DNA, 7 bp, Unknown
  misc_feature (1)..( 7): Result.003 file - promoters60/3593346
aaacaaa

SEQ ID NO: 131845 - DNA, 7 bp, Unknown
  misc_feature (1)..( 7): Result.003 file - promoters60/3593346
aaacaat

SEQ ID NO: 131846 - DNA, 7 bp, Unknown
  misc_feature (1)..( 7): Result.003 file - promoters60/3593346
aaagaaa

SEQ ID NO: 131847 - DNA, 8 bp, Unknown
  misc_feature (1)..( 8): Result.003 file - promoters60/3593346
ctatcttt

SEQ ID NO: 131848 - DNA, 8 bp, Unknown
  misc_feature (1)..( 8): Result.003 file - promoters60/3593346
aaatcttt

SEQ ID NO: 131849 - DNA, 8 bp, Unknown
  misc_feature (1)..( 8): Result.003 file - promoters60/3593346
aaagctta

SEQ ID NO: 131850 - DNA, 9 bp, Unknown
  misc_feature (1)..( 9): Result.003 file - promoters60/3594312
ccctcaaaa

SEQ ID NO: 131851 - DNA, 9 bp, Unknown
  misc_feature (1)..( 9): Result.003 file - promoters60/3594312
ctttcaaaa

SEQ ID NO: 131852 - DNA, 9 bp, Unknown
  misc_feature (1)..( 9): Result.003 file - promoters60/3594312
tttttaaaa

SEQ ID NO: 131853 - DNA, 10 bp, Unknown
  misc_feature (1)..( 10): Result.003 file - promoters60/3594312
gttttagaaa

SEQ ID NO: 131854 - DNA, 10 bp, Unknown
  misc_feature (1)..( 10): Result.003 file - promoters60/3594312
tttttattaa

SEQ ID NO: 131855 - DNA, 10 bp, Unknown
  misc_feature (1)..( 10): Result.003 file - promoters60/3594312
cctttgattc

SEQ ID NO: 131856 - DNA, 10 bp, Unknown
  misc_feature (1)..( 10): Result.003 file - promoters60/3594312
cacataaaca

SEQ ID NO: 131857 - DNA, 10 bp, Unknown
  misc_feature (1)..( 10): Result.003 file - promoters60/3594312
ttcataaatc

SEQ ID NO: 131858 - DNA, 10 bp, Unknown
  misc_feature (1)..( 10): Result.003 file - promoters60/3594312
aaaatataca

SEQ ID NO: 131859 - DNA, 10 bp, Unknown
  misc_feature (1)..( 10): Result.003 file - promoters60/3594312
tacataaaac

SEQ ID NO: 131860 - DNA, 10 bp, Unknown
  misc_feature (1)..( 10): Result.003 file - promoters60/3594312
gccattaatg

SEQ ID NO: 131861 - DNA, 10 bp, Unknown
  misc_feature (1)..( 10): Result.003 file - promoters60/3594312
tgaattaatt

SEQ ID NO: 131862 - DNA, 10 bp, Unknown
  misc_feature (1)..( 10): Result.003 file - promoters60/3594312
ttcttaaaag

SEQ ID NO: 131863 - DNA, 16 bp, Unknown
  misc_feature (1)..( 16): Result.003 file - promoters60/3594312
gattcggcccaaattt

SEQ ID NO: 131864 - DNA, 16 bp, Unknown
  misc_feature (1)..( 16): Result.003 file - promoters60/3594312
caaaaggcccaataaa

SEQ ID NO: 131865 - DNA, 16 bp, Unknown
  misc_feature (1)..( 16): Result.003 file - promoters60/3594312
ttgaaggcccataaat

SEQ ID NO: 131866 - DNA, 16 bp, Unknown
  misc_feature (1)..( 16): Result.003 file - promoters60/3594312
aaataggcccaacaaa

SEQ ID NO: 131867 - DNA, 16 bp, Unknown
  misc_feature (1)..( 16): Result.003 file - promoters60/3594312
aaatgggcctagcgaa

SEQ ID NO: 131868 - DNA, 16 bp, Unknown
  misc_feature (1)..( 16): Result.003 file - promoters60/3594312
ctcaaagcccaataaa

SEQ ID NO: 131869 - DNA, 9 bp, Unknown
  misc_feature (1)..( 9): Result.003 file - promoters60/3594312
attctttca

SEQ ID NO: 131870 - DNA, 9 bp, Unknown
  misc_feature (1)..( 9): Result.003 file - promoters60/3594312
attcttaaa

SEQ ID NO: 131871 - DNA, 9 bp, Unknown
  misc_feature (1)..( 9): Result.003 file - promoters60/3594312
atttttttt

SEQ ID NO: 131872 - DNA, 9 bp, Unknown
  misc_feature (1)..( 9): Result.003 file - promoters60/3594312
attcttgaa

SEQ ID NO: 131873 - DNA, 9 bp, Unknown
  misc_feature (1)..( 9): Result.003 file - promoters60/3594312
atttttgta

SEQ ID NO: 131874 - DNA, 9 bp, Unknown
  misc_feature (1)..( 9): Result.003 file - promoters60/3594312
cttcataaa

SEQ ID NO: 131875 - DNA, 16 bp, Unknown
  misc_feature (1)..( 16): Result.003 file - promoters60/3597145
ccgaatcgatagctga

SEQ ID NO: 131876 - DNA, 16 bp, Unknown
  misc_feature (1)..( 16): Result.003 file - promoters60/3597145
acaaatctataaatat

SEQ ID NO: 131877 - DNA, 16 bp, Unknown
  misc_feature (1)..( 16): Result.003 file - promoters60/3597145
gtaaatctttaattat

SEQ ID NO: 131878 - DNA, 16 bp, Unknown
  misc_feature (1)..( 16): Result.003 file - promoters60/3597145
tttgattgttatggtg

SEQ ID NO: 131879 - DNA, 16 bp, Unknown
  misc_feature (1)..( 16): Result.003 file - promoters60/3597145
aaaaatcttcgaatat

SEQ ID NO: 131880 - DNA, 16 bp, Unknown
  misc_feature (1)..( 16): Result.003 file - promoters60/3597145
tagtcactaaaaaggt

SEQ ID NO: 131881 - DNA, 6 bp, Unknown
  misc_feature (1)..( 6): Result.003 file - promoters60/3597158
aatact

SEQ ID NO: 131882 - DNA, 6 bp, Unknown
  misc_feature (1)..( 6): Result.003 file - promoters60/3597158
aatact

SEQ ID NO: 131883 - DNA, 7 bp, Unknown
  misc_feature (1)..( 7): Result.003 file - promoters60/3597158
tttgtaa

SEQ ID NO: 131884 - DNA, 7 bp, Unknown
  misc_feature (1)..( 7): Result.003 file - promoters60/3597158
tttgtaa

SEQ ID NO: 131885 - DNA, 7 bp, Unknown
  misc_feature (1)..( 7): Result.003 file - promoters60/3597158
aaagttg

SEQ ID NO: 131886 - DNA, 7 bp, Unknown
  misc_feature (1)..( 7): Result.003 file - promoters60/3597158
aaatttg

SEQ ID NO: 131887 - DNA, 6 bp, Unknown
  misc_feature (1)..( 6): Result.003 file - promoters60/3597158
attaaa

SEQ ID NO: 131888 - DNA, 6 bp, Unknown
  misc_feature (1)..( 6): Result.003 file - promoters60/3597158
attaaa

SEQ ID NO: 131889 - DNA, 8 bp, Unknown
  misc_feature (1)..( 8): Result.003 file - promoters60/3597158
gtttcctc

SEQ ID NO: 131890 - DNA, 8 bp, Unknown
  misc_feature (1)..( 8): Result.003 file - promoters60/3597158
gttttctc

SEQ ID NO: 131891 - DNA, 9 bp, Unknown
  misc_feature (1)..( 9): Result.003 file - promoters60/3597158
tcttcttct

SEQ ID NO: 131892 - DNA, 9 bp, Unknown
  misc_feature (1)..( 9): Result.003 file - promoters60/3597158
tctttttct

SEQ ID NO: 131893 - DNA, 8 bp, Unknown
  misc_feature (1)..( 8): Result.003 file - promoters60/3597158
tcacatca

SEQ ID NO: 131894 - DNA, 8 bp, Unknown
  misc_feature (1)..( 8): Result.003 file - promoters60/3597158
tcacatag

SEQ ID NO: 131895 - DNA, 8 bp, Unknown
  misc_feature (1)..( 8): Result.003 file - promoters60/3597158
acacttag

SEQ ID NO: 131896 - DNA, 9 bp, Unknown
  misc_feature (1)..( 9): Result.003 file - promoters60/3597158
aaagaaaaa

SEQ ID NO: 131897 - DNA, 9 bp, Unknown
  misc_feature (1)..( 9): Result.003 file - promoters60/3597158
aaagcaaaa

SEQ ID NO: 131898 - DNA, 7 bp, Unknown
  misc_feature (1)..( 7): Result.003 file - promoters60/3597158
aaaaatt

SEQ ID NO: 131899 - DNA, 7 bp, Unknown
  misc_feature (1)..( 7): Result.003 file - promoters60/3597158
aaacatt

SEQ ID NO: 131900 - DNA, 7 bp, Unknown
  misc_feature (1)..( 7): Result.003 file - promoters60/3597158
aaacaac

SEQ ID NO: 131901 - DNA, 7 bp, Unknown
  misc_feature (1)..( 7): Result.003 file - promoters60/3597158
aaacaac

SEQ ID NO: 131902 - DNA, 6 bp, Unknown
  misc_feature (1)..( 6): Result.003 file - promoters60/3597158
actctc

SEQ ID NO: 131903 - DNA, 6 bp, Unknown
  misc_feature (1)..( 6): Result.003 file - promoters60/3597158
actctc

SEQ ID NO: 131904 - DNA, 8 bp, Unknown
  misc_feature (1)..( 8): Result.003 file - promoters60/3597158
tgtcattt

SEQ ID NO: 131905 - DNA, 8 bp, Unknown
  misc_feature (1)..( 8): Result.003 file - promoters60/3597158
tgtcattt

SEQ ID NO: 131906 - DNA, 7 bp, Unknown
  misc_feature (1)..( 7): Result.003 file - promoters60/3597158
aattttc

SEQ ID NO: 131907 - DNA, 7 bp, Unknown
  misc_feature (1)..( 7): Result.003 file - promoters60/3597158
aatcttc

SEQ ID NO: 131908 - DNA, 6 bp, Unknown
  misc_feature (1)..( 6): Result.003 file - promoters60/3597158
ttggta

SEQ ID NO: 131909 - DNA, 6 bp, Unknown
  misc_feature (1)..( 6): Result.003 file - promoters60/3597158
ttggta

SEQ ID NO: 131910 - DNA, 6 bp, Unknown
  misc_feature (1)..( 6): Result.003 file - promoters60/3597158
aaccaa

SEQ ID NO: 131911 - DNA, 6 bp, Unknown
  misc_feature (1)..( 6): Result.003 file - promoters60/3597158
aaccaa

SEQ ID NO: 131912 - DNA, 9 bp, Unknown
  misc_feature (1)..( 9): Result.003 file - promoters60/3597158
tttcaaaag

SEQ ID NO: 131913 - DNA, 9 bp, Unknown
  misc_feature (1)..( 9): Result.003 file - promoters60/3597158
tttccaaag

SEQ ID NO: 131914 - DNA, 6 bp, Unknown
  misc_feature (1)..( 6): Result.003 file - promoters60/3597158
aagaaa

SEQ ID NO: 131915 - DNA, 6 bp, Unknown
  misc_feature (1)..( 6): Result.003 file - promoters60/3597158
aagaaa

SEQ ID NO: 131916 - DNA, 6 bp, Unknown
  misc_feature (1)..( 6): Result.003 file - promoters60/3597158
tagtta

SEQ ID NO: 131917 - DNA, 6 bp, Unknown
  misc_feature (1)..( 6): Result.003 file - promoters60/3597158
tagtta

SEQ ID NO: 131918 - DNA, 8 bp, Unknown
  misc_feature (1)..( 8): Result.003 file - promoters60/3597158
agtttcac

SEQ ID NO: 131919 - DNA, 8 bp, Unknown
  misc_feature (1)..( 8): Result.003 file - promoters60/3597158
agttccac

SEQ ID NO: 131920 - DNA, 7 bp, Unknown
  misc_feature (1)..( 7): Result.003 file - promoters60/3597158
atcccat

SEQ ID NO: 131921 - DNA, 7 bp, Unknown
  misc_feature (1)..( 7): Result.003 file - promoters60/3597158
atcacat

SEQ ID NO: 131922 - DNA, 6 bp, Unknown
  misc_feature (1)..( 6): Result.003 file - promoters60/3597158
aaacat

SEQ ID NO: 131923 - DNA, 6 bp, Unknown
  misc_feature (1)..( 6): Result.003 file - promoters60/3597158
aaacat

SEQ ID NO: 131924 - DNA, 7 bp, Unknown
  misc_feature (1)..( 7): Result.003 file - promoters60/3597158
ttctctc

SEQ ID NO: 131925 - DNA, 7 bp, Unknown
  misc_feature (1)..( 7): Result.003 file - promoters60/3597158
ttctctc

SEQ ID NO: 131926 - DNA, 9 bp, Unknown
  misc_feature (1)..( 9): Result.003 file - promoters60/3597162
ctcatttta

SEQ ID NO: 131927 - DNA, 9 bp, Unknown
  misc_feature (1)..( 9): Result.003 file - promoters60/3597162
ttcaattta

SEQ ID NO: 131928 - DNA, 9 bp, Unknown
  misc_feature (1)..( 9): Result.003 file - promoters60/3597162
ttcaataga

SEQ ID NO: 131929 - DNA, 6 bp, Unknown
  misc_feature (1)..( 6): Result.003 file - promoters60/3597162
atcaac

SEQ ID NO: 131930 - DNA, 6 bp, Unknown
  misc_feature (1)..( 6): Result.003 file - promoters60/3597162
atcaac

SEQ ID NO: 131931 - DNA, 7 bp, Unknown
  misc_feature (1)..( 7): Result.003 file - promoters60/3597162
tgacttg

SEQ ID NO: 131932 - DNA, 7 bp, Unknown
  misc_feature (1)..( 7): Result.003 file - promoters60/3597162
tgaattg

SEQ ID NO: 131933 - DNA, 7 bp, Unknown
  misc_feature (1)..( 7): Result.003 file - promoters60/3597162
tgacttt

SEQ ID NO: 131934 - DNA, 8 bp, Unknown
  misc_feature (1)..( 8): Result.003 file - promoters60/3597162
agataaaa

SEQ ID NO: 131935 - DNA, 8 bp, Unknown
  misc_feature (1)..( 8): Result.003 file - promoters60/3597162
agataaat

SEQ ID NO: 131936 - DNA, 8 bp, Unknown
  misc_feature (1)..( 8): Result.003 file - promoters60/3597162
agaaaaaa

SEQ ID NO: 131937 - DNA, 7 bp, Unknown
  misc_feature (1)..( 7): Result.003 file - promoters60/3597162
acaattt

SEQ ID NO: 131938 - DNA, 7 bp, Unknown
  misc_feature (1)..( 7): Result.003 file - promoters60/3597162
acaattt

SEQ ID NO: 131939 - DNA, 8 bp, Unknown
  misc_feature (1)..( 8): Result.003 file - promoters60/3597162
agaaaatt

SEQ ID NO: 131940 - DNA, 8 bp, Unknown
  misc_feature (1)..( 8): Result.003 file - promoters60/3597162
agaaaatt

SEQ ID NO: 131941 - DNA, 6 bp, Unknown
  misc_feature (1)..( 6): Result.003 file - promoters60/3597162
ttggtt

SEQ ID NO: 131942 - DNA, 6 bp, Unknown
  misc_feature (1)..( 6): Result.003 file - promoters60/3597162
ttggtt

SEQ ID NO: 131943 - DNA, 6 bp, Unknown
  misc_feature (1)..( 6): Result.003 file - promoters60/3597162
aacttt

SEQ ID NO: 131944 - DNA, 6 bp, Unknown
  misc_feature (1)..( 6): Result.003 file - promoters60/3597162
aacttt

SEQ ID NO: 131945 - DNA, 6 bp, Unknown
  misc_feature (1)..( 6): Result.003 file - promoters60/3597162
aattga

SEQ ID NO: 131946 - DNA, 6 bp, Unknown
  misc_feature (1)..( 6): Result.003 file - promoters60/3597162
aattga

SEQ ID NO: 131947 - DNA, 7 bp, Unknown
  misc_feature (1)..( 7): Result.003 file - promoters60/3597162
aattgat

SEQ ID NO: 131948 - DNA, 7 bp, Unknown
  misc_feature (1)..( 7): Result.003 file - promoters60/3597162
aatagat

SEQ ID NO: 131949 - DNA, 7 bp, Unknown
  misc_feature (1)..( 7): Result.003 file - promoters60/3597162
aatagaa

SEQ ID NO: 131950 - DNA, 6 bp, Unknown
  misc_feature (1)..( 6): Result.003 file - promoters60/3597162
taccat

SEQ ID NO: 131951 - DNA, 6 bp, Unknown
  misc_feature (1)..( 6): Result.003 file - promoters60/3597162
taccat

SEQ ID NO: 131952 - DNA, 7 bp, Unknown
  misc_feature (1)..( 7): Result.003 file - promoters60/3597162
ataatat

SEQ ID NO: 131953 - DNA, 7 bp, Unknown
  misc_feature (1)..( 7): Result.003 file - promoters60/3597162
atagtat

SEQ ID NO: 131954 - DNA, 13 bp, Unknown
  misc_feature (1)..( 13): Result.003 file - promoters60/3597162
taaatagaaaacg

SEQ ID NO: 131955 - DNA, 13 bp, Unknown
  misc_feature (1)..( 13): Result.003 file - promoters60/3597162
tctatataaatcc

SEQ ID NO: 131956 - DNA, 13 bp, Unknown
  misc_feature (1)..( 13): Result.003 file - promoters60/3597162
tctatatatatcc

SEQ ID NO: 131957 - DNA, 7 bp, Unknown
  misc_feature (1)..( 7): Result.003 file - promoters60/3597162
ttagaat

SEQ ID NO: 131958 - DNA, 7 bp, Unknown
  misc_feature (1)..( 7): Result.003 file - promoters60/3597162
ttaaaat

SEQ ID NO: 131959 - DNA, 6 bp, Unknown
  misc_feature (1)..( 6): Result.003 file - promoters60/3597162
attcaa

SEQ ID NO: 131960 - DNA, 6 bp, Unknown
  misc_feature (1)..( 6): Result.003 file - promoters60/3597162
attcaa

SEQ ID NO: 131961 - DNA, 9 bp, Unknown
  misc_feature (1)..( 9): Result.003 file - promoters60/3597162
ttttttttt

SEQ ID NO: 131962 - DNA, 9 bp, Unknown
  misc_feature (1)..( 9): Result.003 file - promoters60/3597162
ttttatttt

SEQ ID NO: 131963 - DNA, 7 bp, Unknown
  misc_feature (1)..( 7): Result.003 file - promoters60/3597162
tcttata

SEQ ID NO: 131964 - DNA, 7 bp, Unknown
  misc_feature (1)..( 7): Result.003 file - promoters60/3597162
tctcata

SEQ ID NO: 131965 - DNA, 6 bp, Unknown
  misc_feature (1)..( 6): Result.003 file - promoters60/3597162
aattta

SEQ ID NO: 131966 - DNA, 6 bp, Unknown
  misc_feature (1)..( 6): Result.003 file - promoters60/3597162
aattta

SEQ ID NO: 131967 - DNA, 9 bp, Unknown
  misc_feature (1)..( 9): Result.003 file - promoters60/3597162
taaacttaa

SEQ ID NO: 131968 - DNA, 9 bp, Unknown
  misc_feature (1)..( 9): Result.003 file - promoters60/3597162
taaacttaa

SEQ ID NO: 131969 - DNA, 7 bp, Unknown
  misc_feature (1)..( 7): Result.003 file - promoters60/3597162
actctca

SEQ ID NO: 131970 - DNA, 7 bp, Unknown
  misc_feature (1)..( 7): Result.003 file - promoters60/3597162
actttca

SEQ ID NO: 131971 - DNA, 8 bp, Unknown
  misc_feature (1)..( 8): Result.003 file - promoters60/3597175
tttattca

SEQ ID NO: 131972 - DNA, 8 bp, Unknown
  misc_feature (1)..( 8): Result.003 file - promoters60/3597175
tttattct

SEQ ID NO: 131973 - DNA, 8 bp, Unknown
  misc_feature (1)..( 8): Result.003 file - promoters60/3597175
tttatttc

SEQ ID NO: 131974 - DNA, 8 bp, Unknown
  misc_feature (1)..( 8): Result.003 file - promoters60/3597175
tttcttct

SEQ ID NO: 131975 - DNA, 8 bp, Unknown
  misc_feature (1)..( 8): Result.003 file - promoters60/3597175
tttattta

SEQ ID NO: 131976 - DNA, 13 bp, Unknown
  misc_feature (1)..( 13): Result.003 file - promoters60/3597175
tttcatttattta

SEQ ID NO: 131977 - DNA, 13 bp, Unknown
  misc_feature (1)..( 13): Result.003 file - promoters60/3597175
attcttttccatc

SEQ ID NO: 131978 - DNA, 13 bp, Unknown
  misc_feature (1)..( 13): Result.003 file - promoters60/3597175
ttttattataaag

SEQ ID NO: 131979 - DNA, 13 bp, Unknown
  misc_feature (1)..( 13): Result.003 file - promoters60/3597175
cattattttttac

SEQ ID NO: 131980 - DNA, 13 bp, Unknown
  misc_feature (1)..( 13): Result.003 file - promoters60/3597175
ttaaatttaaaaa

SEQ ID NO: 131981 - DNA, 13 bp, Unknown
  misc_feature (1)..( 13): Result.003 file - promoters60/3597175
tttttgttagaaa

SEQ ID NO: 131982 - DNA, 10 bp, Unknown
  misc_feature (1)..( 10): Result.003 file - promoters60/3597175
agaattaaaa

SEQ ID NO: 131983 - DNA, 10 bp, Unknown
  misc_feature (1)..( 10): Result.003 file - promoters60/3597175
ctaattaacc

SEQ ID NO: 131984 - DNA, 10 bp, Unknown
  misc_feature (1)..( 10): Result.003 file - promoters60/3597175
ttaattaaaa

SEQ ID NO: 131985 - DNA, 10 bp, Unknown
  misc_feature (1)..( 10): Result.003 file - promoters60/3597175
tgaattacca

SEQ ID NO: 131986 - DNA, 10 bp, Unknown
  misc_feature (1)..( 10): Result.003 file - promoters60/3597175
ctaattactg

SEQ ID NO: 131987 - DNA, 16 bp, Unknown
  misc_feature (1)..( 16): Result.003 file - promoters60/3597175
tttaactttattcttc

SEQ ID NO: 131988 - DNA, 16 bp, Unknown
  misc_feature (1)..( 16): Result.003 file - promoters60/3597175
aaaaactttttacggc

SEQ ID NO: 131989 - DNA, 16 bp, Unknown
  misc_feature (1)..( 16): Result.003 file - promoters60/3597175
catgactttcttcttc

SEQ ID NO: 131990 - DNA, 16 bp, Unknown
  misc_feature (1)..( 16): Result.003 file - promoters60/3597175
ttcatttttattctat

SEQ ID NO: 131991 - DNA, 16 bp, Unknown
  misc_feature (1)..( 16): Result.003 file - promoters60/3597175
aaaaagtttttatttc

SEQ ID NO: 131992 - DNA, 15 bp, Unknown
  misc_feature (1)..( 15): Result.003 file - promoters60/3597175
gtctcctataataaa

SEQ ID NO: 131993 - DNA, 15 bp, Unknown
  misc_feature (1)..( 15): Result.003 file - promoters60/3597175
gtagcctttaaaaaa

SEQ ID NO: 131994 - DNA, 15 bp, Unknown
  misc_feature (1)..( 15): Result.003 file - promoters60/3597175
acaaaatataaataa

SEQ ID NO: 131995 - DNA, 15 bp, Unknown
  misc_feature (1)..( 15): Result.003 file - promoters60/3597175
tcttctcatatataa

SEQ ID NO: 131996 - DNA, 15 bp, Unknown
  misc_feature (1)..( 15): Result.003 file - promoters60/3597175
gtctcttatatattc

SEQ ID NO: 131997 - DNA, 15 bp, Unknown
  misc_feature (1)..( 15): Result.003 file - promoters60/3597175
cacctatattctttt

SEQ ID NO: 131998 - DNA, 15 bp, Unknown
  misc_feature (1)..( 15): Result.003 file - promoters60/3597175
tctatagtttcattt

SEQ ID NO: 131999 - DNA, 15 bp, Unknown
  misc_feature (1)..( 15): Result.003 file - promoters60/3597175
actgatttttcatta

SEQ ID NO: 132000 - DNA, 15 bp, Unknown
  misc_feature (1)..( 15): Result.003 file - promoters60/3597175
aaaaagtttttattt

SEQ ID NO: 132001 - DNA, 15 bp, Unknown
  misc_feature (1)..( 15): Result.003 file - promoters60/3597175
aaaaactttttacgg

SEQ ID NO: 132002 - DNA, 17 bp, Unknown
  misc_feature (1)..( 17): Result.003 file - promoters60/3597175
tataacccaaaattgac

SEQ ID NO: 132003 - DNA, 17 bp, Unknown
  misc_feature (1)..( 17): Result.003 file - promoters60/3597175
taaatcgtaaaattttt

SEQ ID NO: 132004 - DNA, 17 bp, Unknown
  misc_feature (1)..( 17): Result.003 file - promoters60/3597175
ttttgtcataaatttgt

SEQ ID NO: 132005 - DNA, 17 bp, Unknown
  misc_feature (1)..( 17): Result.003 file - promoters60/3597175
tataaccaaaaataata

SEQ ID NO: 132006 - DNA, 17 bp, Unknown
  misc_feature (1)..( 17): Result.003 file - promoters60/3597175
aacactggaaactttat

SEQ ID NO: 132007 - DNA, 17 bp, Unknown
  misc_feature (1)..( 17): Result.003 file - promoters60/3597175
taccgccaaaaaaaata

SEQ ID NO: 132008 - DNA, 10 bp, Unknown
  misc_feature (1)..( 10): Result.003 file - promoters60/3597175
aaataaatcg

SEQ ID NO: 132009 - DNA, 10 bp, Unknown
  misc_feature (1)..( 10): Result.003 file - promoters60/3597175
acataaatct

SEQ ID NO: 132010 - DNA, 10 bp, Unknown
  misc_feature (1)..( 10): Result.003 file - promoters60/3597175
aaataaacta

SEQ ID NO: 132011 - DNA, 10 bp, Unknown
  misc_feature (1)..( 10): Result.003 file - promoters60/3597175
tcataaattt

SEQ ID NO: 132012 - DNA, 10 bp, Unknown
  misc_feature (1)..( 10): Result.003 file - promoters60/3597175
taataagttt

SEQ ID NO: 132013 - DNA, 8 bp, Unknown
  misc_feature (1)..( 8): Result.003 file - promoters60/3600084
atttttat

SEQ ID NO: 132014 - DNA, 8 bp, Unknown
  misc_feature (1)..( 8): Result.003 file - promoters60/3600084
atttttat

SEQ ID NO: 132015 - DNA, 7 bp, Unknown
  misc_feature (1)..( 7): Result.003 file - promoters60/3600084
tccaaaa

SEQ ID NO: 132016 - DNA, 7 bp, Unknown
  misc_feature (1)..( 7): Result.003 file - promoters60/3600084
tccaaac

SEQ ID NO: 132017 - DNA, 7 bp, Unknown
  misc_feature (1)..( 7): Result.003 file - promoters60/3600084
tccaaaa

SEQ ID NO: 132018 - DNA, 7 bp, Unknown
  misc_feature (1)..( 7): Result.003 file - promoters60/3600084
ctaaaaa

SEQ ID NO: 132019 - DNA, 7 bp, Unknown
  misc_feature (1)..( 7): Result.003 file - promoters60/3600084
ttaaaaa

SEQ ID NO: 132020 - DNA, 7 bp, Unknown
  misc_feature (1)..( 7): Result.003 file - promoters60/3600084
ttacaaa

SEQ ID NO: 132021 - DNA, 6 bp, Unknown
  misc_feature (1)..( 6): Result.003 file - promoters60/3600084
aaaaca

SEQ ID NO: 132022 - DNA, 6 bp, Unknown
  misc_feature (1)..( 6): Result.003 file - promoters60/3600084
aaaaca

SEQ ID NO: 132023 - DNA, 6 bp, Unknown
  misc_feature (1)..( 6): Result.003 file - promoters60/3600084
aattac

SEQ ID NO: 132024 - DNA, 6 bp, Unknown
  misc_feature (1)..( 6): Result.003 file - promoters60/3600084
aattac

SEQ ID NO: 132025 - DNA, 7 bp, Unknown
  misc_feature (1)..( 7): Result.003 file - promoters60/3600084
aagtagt

SEQ ID NO: 132026 - DNA, 7 bp, Unknown
  misc_feature (1)..( 7): Result.003 file - promoters60/3600084
aagaagt

SEQ ID NO: 132027 - DNA, 8 bp, Unknown
  misc_feature (1)..( 8): Result.003 file - promoters60/3600084
tttttttt

SEQ ID NO: 132028 - DNA, 8 bp, Unknown
  misc_feature (1)..( 8): Result.003 file - promoters60/3600084
tttttttt

SEQ ID NO: 132029 - DNA, 10 bp, Unknown
  misc_feature (1)..( 10): Result.003 file - promoters60/3600084
attgatgttc

SEQ ID NO: 132030 - DNA, 10 bp, Unknown
  misc_feature (1)..( 10): Result.003 file - promoters60/3600084
attaatgttc

SEQ ID NO: 132031 - DNA, 6 bp, Unknown
  misc_feature (1)..( 6): Result.003 file - promoters60/3600084
taaaat

SEQ ID NO: 132032 - DNA, 6 bp, Unknown
  misc_feature (1)..( 6): Result.003 file - promoters60/3600084
taaaat

SEQ ID NO: 132033 - DNA, 7 bp, Unknown
  misc_feature (1)..( 7): Result.003 file - promoters60/3600084
tcctaaa

SEQ ID NO: 132034 - DNA, 7 bp, Unknown
  misc_feature (1)..( 7): Result.003 file - promoters60/3600084
tccaaaa

SEQ ID NO: 132035 - DNA, 9 bp, Unknown
  misc_feature (1)..( 9): Result.003 file - promoters60/3600084
ttcctctca

SEQ ID NO: 132036 - DNA, 9 bp, Unknown
  misc_feature (1)..( 9): Result.003 file - promoters60/3600084
ttcatctca

SEQ ID NO: 132037 - DNA, 6 bp, Unknown
  misc_feature (1)..( 6): Result.003 file - promoters60/3600084
catcct

SEQ ID NO: 132038 - DNA, 6 bp, Unknown
  misc_feature (1)..( 6): Result.003 file - promoters60/3600084
catcct

SEQ ID NO: 132039 - DNA, 7 bp, Unknown
  misc_feature (1)..( 7): Result.003 file - promoters60/3600084
actgaaa

SEQ ID NO: 132040 - DNA, 7 bp, Unknown
  misc_feature (1)..( 7): Result.003 file - promoters60/3600084
actgaaa

SEQ ID NO: 132041 - DNA, 8 bp, Unknown
  misc_feature (1)..( 8): Result.003 file - promoters60/3600084
aaaacaaa

SEQ ID NO: 132042 - DNA, 8 bp, Unknown
  misc_feature (1)..( 8): Result.003 file - promoters60/3600084
aaaccaaa

SEQ ID NO: 132043 - DNA, 7 bp, Unknown
  misc_feature (1)..( 7): Result.003 file - promoters60/3600084
gtcaaaa

SEQ ID NO: 132044 - DNA, 7 bp, Unknown
  misc_feature (1)..( 7): Result.003 file - promoters60/3600084
gtcgaaa

SEQ ID NO: 132045 - DNA, 7 bp, Unknown
  misc_feature (1)..( 7): Result.003 file - promoters60/3611292
atataat

SEQ ID NO: 132046 - DNA, 7 bp, Unknown
  misc_feature (1)..( 7): Result.003 file - promoters60/3611292
ataaaat

SEQ ID NO: 132047 - DNA, 7 bp, Unknown
  misc_feature (1)..( 7): Result.003 file - promoters60/3611292
gtataat

SEQ ID NO: 132048 - DNA, 7 bp, Unknown
  misc_feature (1)..( 7): Result.003 file - promoters60/3611292
ttaaaat

SEQ ID NO: 132049 - DNA, 7 bp, Unknown
  misc_feature (1)..( 7): Result.003 file - promoters60/3611292
ttaaaag

SEQ ID NO: 132050 - DNA, 9 bp, Unknown
  misc_feature (1)..( 9): Result.003 file - promoters60/3611292
ttacaaaaa

SEQ ID NO: 132051 - DNA, 9 bp, Unknown
  misc_feature (1)..( 9): Result.003 file - promoters60/3611292
ttactaaaa

SEQ ID NO: 132052 - DNA, 10 bp, Unknown
  misc_feature (1)..( 10): Result.003 file - promoters60/3611292
aaacataaaa

SEQ ID NO: 132053 - DNA, 10 bp, Unknown
  misc_feature (1)..( 10): Result.003 file - promoters60/3611292
gaactaaact

SEQ ID NO: 132054 - DNA, 7 bp, Unknown
  misc_feature (1)..( 7): Result.003 file - promoters60/3611292
tcttttt

SEQ ID NO: 132055 - DNA, 7 bp, Unknown
  misc_feature (1)..( 7): Result.003 file - promoters60/3611292
tcttttg

SEQ ID NO: 132056 - DNA, 7 bp, Unknown
  misc_feature (1)..( 7): Result.003 file - promoters60/3611292
ccttttt

SEQ ID NO: 132057 - DNA, 8 bp, Unknown
  misc_feature (1)..( 8): Result.003 file - promoters60/3611292
acttgttt

SEQ ID NO: 132058 - DNA, 11 bp, Unknown
  misc_feature (1)..( 11): Result.003 file - promoters60/3611292
taaacaaacga

SEQ ID NO: 132059 - DNA, 11 bp, Unknown
  misc_feature (1)..( 11): Result.003 file - promoters60/3611292
aaaaaaaaaag

SEQ ID NO: 132060 - DNA, 11 bp, Unknown
  misc_feature (1)..( 11): Result.003 file - promoters60/3611292
caaaaaaatca

SEQ ID NO: 132061 - DNA, 11 bp, Unknown
  misc_feature (1)..( 11): Result.003 file - promoters60/3611292
caagaaattca

SEQ ID NO: 132062 - DNA, 8 bp, Unknown
  misc_feature (1)..( 8): Result.003 file - promoters60/3646410
aaaaaaaa

SEQ ID NO: 132063 - DNA, 8 bp, Unknown
  misc_feature (1)..( 8): Result.003 file - promoters60/3646410
aaaaaaaa

SEQ ID NO: 132064 - DNA, 8 bp, Unknown
  misc_feature (1)..( 8): Result.003 file - promoters60/3646410
aaagaaga

SEQ ID NO: 132065 - DNA, 9 bp, Unknown
  misc_feature (1)..( 9): Result.003 file - promoters60/3646410
gaaaggttt

SEQ ID NO: 132066 - DNA, 9 bp, Unknown
  misc_feature (1)..( 9): Result.003 file - promoters60/3646410
aaaagattt

SEQ ID NO: 132067 - DNA, 9 bp, Unknown
  misc_feature (1)..( 9): Result.003 file - promoters60/3646410
aaaagacgc

SEQ ID NO: 132068 - DNA, 9 bp, Unknown
  misc_feature (1)..( 9): Result.003 file - promoters60/3646410
gaaagtctt

SEQ ID NO: 132069 - DNA, 9 bp, Unknown
  misc_feature (1)..( 9): Result.003 file - promoters60/3646410
aaaattctt

SEQ ID NO: 132070 - DNA, 9 bp, Unknown
  misc_feature (1)..( 9): Result.003 file - promoters60/3646410
gaaagtgga

SEQ ID NO: 132071 - DNA, 7 bp, Unknown
  misc_feature (1)..( 7): Result.003 file - promoters60/3659211
aatttag

SEQ ID NO: 132072 - DNA, 7 bp, Unknown
  misc_feature (1)..( 7): Result.003 file - promoters60/3659211
aatgtag

SEQ ID NO: 132073 - DNA, 8 bp, Unknown
  misc_feature (1)..( 8): Result.003 file - promoters60/3659211
aatatttt

SEQ ID NO: 132074 - DNA, 8 bp, Unknown
  misc_feature (1)..( 8): Result.003 file - promoters60/3659211
aatttttt

SEQ ID NO: 132075 - DNA, 7 bp, Unknown
  misc_feature (1)..( 7): Result.003 file - promoters60/3659211
actggtg

SEQ ID NO: 132076 - DNA, 7 bp, Unknown
  misc_feature (1)..( 7): Result.003 file - promoters60/3659211
acttgtg

SEQ ID NO: 132077 - DNA, 6 bp, Unknown
  misc_feature (1)..( 6): Result.003 file - promoters60/3659211
aaaaga

SEQ ID NO: 132078 - DNA, 6 bp, Unknown
  misc_feature (1)..( 6): Result.003 file - promoters60/3659211
aaaaga

SEQ ID NO: 132079 - DNA, 8 bp, Unknown
  misc_feature (1)..( 8): Result.003 file - promoters60/3659211
atttagtt

SEQ ID NO: 132080 - DNA, 8 bp, Unknown
  misc_feature (1)..( 8): Result.003 file - promoters60/3659211
atttggtt

SEQ ID NO: 132081 - DNA, 7 bp, Unknown
  misc_feature (1)..( 7): Result.003 file - promoters60/3659211
tacgatt

SEQ ID NO: 132082 - DNA, 7 bp, Unknown
  misc_feature (1)..( 7): Result.003 file - promoters60/3659211
tacaatt

SEQ ID NO: 132083 - DNA, 6 bp, Unknown
  misc_feature (1)..( 6): Result.003 file - promoters60/3659211
gaatca

SEQ ID NO: 132084 - DNA, 6 bp, Unknown
  misc_feature (1)..( 6): Result.003 file - promoters60/3659211
gaatca

SEQ ID NO: 132085 - DNA, 8 bp, Unknown
  misc_feature (1)..( 8): Result.003 file - promoters60/3659211
ataaatta

SEQ ID NO: 132086 - DNA, 8 bp, Unknown
  misc_feature (1)..( 8): Result.003 file - promoters60/3659211
ataaatag

SEQ ID NO: 132087 - DNA, 8 bp, Unknown
  misc_feature (1)..( 8): Result.003 file - promoters60/3659211
ataaatta

SEQ ID NO: 132088 - DNA, 7 bp, Unknown
  misc_feature (1)..( 7): Result.003 file - promoters60/3659211
aaaaaag

SEQ ID NO: 132089 - DNA, 7 bp, Unknown
  misc_feature (1)..( 7): Result.003 file - promoters60/3659211
aaagaag

SEQ ID NO: 132090 - DNA, 10 bp, Unknown
  misc_feature (1)..( 10): Result.003 file - promoters60/3659211
gcaaacacaa

SEQ ID NO: 132091 - DNA, 10 bp, Unknown
  misc_feature (1)..( 10): Result.003 file - promoters60/3659211
gcaaaaacaa

SEQ ID NO: 132092 - DNA, 7 bp, Unknown
  misc_feature (1)..( 7): Result.003 file - promoters60/3659211
gaatatt

SEQ ID NO: 132093 - DNA, 7 bp, Unknown
  misc_feature (1)..( 7): Result.003 file - promoters60/3659211
gaaaatt

SEQ ID NO: 132094 - DNA, 6 bp, Unknown
  misc_feature (1)..( 6): Result.003 file - promoters60/3659211
cgtttt

SEQ ID NO: 132095 - DNA, 6 bp, Unknown
  misc_feature (1)..( 6): Result.003 file - promoters60/3659211
cgtttt

SEQ ID NO: 132096 - DNA, 7 bp, Unknown
  misc_feature (1)..( 7): Result.003 file - promoters60/3659211
cgagaat

SEQ ID NO: 132097 - DNA, 7 bp, Unknown
  misc_feature (1)..( 7): Result.003 file - promoters60/3659211
cgagaat

SEQ ID NO: 132098 - DNA, 6 bp, Unknown
  misc_feature (1)..( 6): Result.003 file - promoters60/3659211
gaatca

SEQ ID NO: 132099 - DNA, 6 bp, Unknown
  misc_feature (1)..( 6): Result.003 file - promoters60/3659211
gaatca

SEQ ID NO: 132100 - DNA, 7 bp, Unknown
  misc_feature (1)..( 7): Result.003 file - promoters60/3659211
tccggtt

SEQ ID NO: 132101 - DNA, 7 bp, Unknown
  misc_feature (1)..( 7): Result.003 file - promoters60/3659211
tccagtt

SEQ ID NO: 132102 - DNA, 6 bp, Unknown
  misc_feature (1)..( 6): Result.003 file - promoters60/3659211
tttccg

SEQ ID NO: 132103 - DNA, 6 bp, Unknown
  misc_feature (1)..( 6): Result.003 file - promoters60/3659211
tttccg

SEQ ID NO: 132104 - DNA, 6 bp, Unknown
  misc_feature (1)..( 6): Result.003 file - promoters60/3659211
aaccct

SEQ ID NO: 132105 - DNA, 6 bp, Unknown
  misc_feature (1)..( 6): Result.003 file - promoters60/3659211
aaccct

SEQ ID NO: 132106 - DNA, 11 bp, Unknown
  misc_feature (1)..( 11): Result.003 file - promoters60/3659426
gaaggaagaag

SEQ ID NO: 132107 - DNA, 11 bp, Unknown
  misc_feature (1)..( 11): Result.003 file - promoters60/3659426
cgaggaagaag

SEQ ID NO: 132108 - DNA, 11 bp, Unknown
  misc_feature (1)..( 11): Result.003 file - promoters60/3659426
aaaggaactat

SEQ ID NO: 132109 - DNA, 11 bp, Unknown
  misc_feature (1)..( 11): Result.003 file - promoters60/3659426
aaaagaacaaa

SEQ ID NO: 132110 - DNA, 11 bp, Unknown
  misc_feature (1)..( 11): Result.003 file - promoters60/4254292
aggaataagac

SEQ ID NO: 132111 - DNA, 11 bp, Unknown
  misc_feature (1)..( 11): Result.003 file - promoters60/4254292
agcaataagaa

SEQ ID NO: 132112 - DNA, 11 bp, Unknown
  misc_feature (1)..( 11): Result.003 file - promoters60/4254292
aggaagaagac

SEQ ID NO: 132113 - DNA, 11 bp, Unknown
  misc_feature (1)..( 11): Result.003 file - promoters60/4254292
tagaataaaac

SEQ ID NO: 132114 - DNA, 11 bp, Unknown
  misc_feature (1)..( 11): Result.003 file - promoters60/4254292
tttaaaaaaga

SEQ ID NO: 132115 - DNA, 11 bp, Unknown
  misc_feature (1)..( 11): Result.003 file - promoters60/4254292
cattaaaataa

SEQ ID NO: 132116 - DNA, 9 bp, Unknown
  misc_feature (1)..( 9): Result.003 file - promoters60/4254292
tcccaaaaa

SEQ ID NO: 132117 - DNA, 9 bp, Unknown
  misc_feature (1)..( 9): Result.003 file - promoters60/4254292
tcctaaaat

SEQ ID NO: 132118 - DNA, 9 bp, Unknown
  misc_feature (1)..( 9): Result.003 file - promoters60/4254292
acccaaaat

SEQ ID NO: 132119 - DNA, 9 bp, Unknown
  misc_feature (1)..( 9): Result.003 file - promoters60/4254292
tcccaacac

SEQ ID NO: 132120 - DNA, 8 bp, Unknown
  misc_feature (1)..( 8): Result.003 file - promoters60/4254292
tttaaaat

SEQ ID NO: 132121 - DNA, 9 bp, Unknown
  misc_feature (1)..( 9): Result.003 file - promoters60/4254292
tactaaaaa

SEQ ID NO: 132122 - DNA, 16 bp, Unknown
  misc_feature (1)..( 16): Result.003 file - promoters60/4254292
ttcgtagattgcgtga

SEQ ID NO: 132123 - DNA, 16 bp, Unknown
  misc_feature (1)..( 16): Result.003 file - promoters60/4254292
tttttagtttgtgtgc

SEQ ID NO: 132124 - DNA, 16 bp, Unknown
  misc_feature (1)..( 16): Result.003 file - promoters60/4254292
taaaaatctcgtgtgc

SEQ ID NO: 132125 - DNA, 16 bp, Unknown
  misc_feature (1)..( 16): Result.003 file - promoters60/4254292
tttttattttttattg

SEQ ID NO: 132126 - DNA, 16 bp, Unknown
  misc_feature (1)..( 16): Result.003 file - promoters60/4254292
ccattactttactctt

SEQ ID NO: 132127 - DNA, 16 bp, Unknown
  misc_feature (1)..( 16): Result.003 file - promoters60/4254292
gtctttgattagcaaa

SEQ ID NO: 132128 - DNA, 16 bp, Unknown
  misc_feature (1)..( 16): Result.003 file - promoters60/4254292
caacaactatacaatg

SEQ ID NO: 132129 - DNA, 12 bp, Unknown
  misc_feature (1)..( 12): Result.003 file - promoters60/4254292
tgttattatatt

SEQ ID NO: 132130 - DNA, 12 bp, Unknown
  misc_feature (1)..( 12): Result.003 file - promoters60/4254292
attaattaaatt

SEQ ID NO: 132131 - DNA, 12 bp, Unknown
  misc_feature (1)..( 12): Result.003 file - promoters60/4254292
gaggattaaagg

SEQ ID NO: 132132 - DNA, 12 bp, Unknown
  misc_feature (1)..( 12): Result.003 file - promoters60/4254292
actaattaatgg

SEQ ID NO: 132133 - DNA, 12 bp, Unknown
  misc_feature (1)..( 12): Result.003 file - promoters60/4254292
actgatttttca

SEQ ID NO: 132134 - DNA, 12 bp, Unknown
  misc_feature (1)..( 12): Result.003 file - promoters60/4254292
gccgatgaaagt

SEQ ID NO: 132135 - DNA, 9 bp, Unknown
  misc_feature (1)..( 9): Result.003 file - promoters60/4254426
aacttctaa

SEQ ID NO: 132136 - DNA, 9 bp, Unknown
  misc_feature (1)..( 9): Result.003 file - promoters60/4254426
tccttataa

SEQ ID NO: 132137 - DNA, 9 bp, Unknown
  misc_feature (1)..( 9): Result.003 file - promoters60/4254426
ttcttctat

SEQ ID NO: 132138 - DNA, 9 bp, Unknown
  misc_feature (1)..( 9): Result.003 file - promoters60/4254426
tccctatct

SEQ ID NO: 132139 - DNA, 11 bp, Unknown
  misc_feature (1)..( 11): Result.003 file - promoters60/4254807
tagatttgcta

SEQ ID NO: 132140 - DNA, 11 bp, Unknown
  misc_feature (1)..( 11): Result.003 file - promoters60/4254807
aagaattgagt

SEQ ID NO: 132141 - DNA, 11 bp, Unknown
  misc_feature (1)..( 11): Result.003 file - promoters60/4254807
gccaattcagt

SEQ ID NO: 132142 - DNA, 11 bp, Unknown
  misc_feature (1)..( 11): Result.003 file - promoters60/4254807
aagtattagaa

SEQ ID NO: 132143 - DNA, 11 bp, Unknown
  misc_feature (1)..( 11): Result.003 file - promoters60/4254807
tacaattcggc

SEQ ID NO: 132144 - DNA, 11 bp, Unknown
  misc_feature (1)..( 11): Result.003 file - promoters60/4254807
tggtattaata

SEQ ID NO: 132145 - DNA, 7 bp, Unknown
  misc_feature (1)..( 7): Result.003 file - promoters60/4256562
tttgtta

SEQ ID NO: 132146 - DNA, 7 bp, Unknown
  misc_feature (1)..( 7): Result.003 file - promoters60/4256562
tttatta

SEQ ID NO: 132147 - DNA, 7 bp, Unknown
  misc_feature (1)..( 7): Result.003 file - promoters60/4256562
tttattt

SEQ ID NO: 132148 - DNA, 7 bp, Unknown
  misc_feature (1)..( 7): Result.003 file - promoters60/4256562
attgtta

SEQ ID NO: 132149 - DNA, 7 bp, Unknown
  misc_feature (1)..( 7): Result.003 file - promoters60/4256562
attatta

SEQ ID NO: 132150 - DNA, 7 bp, Unknown
  misc_feature (1)..( 7): Result.003 file - promoters60/4256562
attctta

SEQ ID NO: 132151 - DNA, 12 bp, Unknown
  misc_feature (1)..( 12): Result.003 file - promoters60/4256562
tagataaaacag

SEQ ID NO: 132152 - DNA, 12 bp, Unknown
  misc_feature (1)..( 12): Result.003 file - promoters60/4256562
tagaaaaaaact

SEQ ID NO: 132153 - DNA, 12 bp, Unknown
  misc_feature (1)..( 12): Result.003 file - promoters60/4256562
tggttaaaacag

SEQ ID NO: 132154 - DNA, 12 bp, Unknown
  misc_feature (1)..( 12): Result.003 file - promoters60/4256562
cggaaagaacta

SEQ ID NO: 132155 - DNA, 12 bp, Unknown
  misc_feature (1)..( 12): Result.003 file - promoters60/4256562
ccaaacattaca

SEQ ID NO: 132156 - DNA, 12 bp, Unknown
  misc_feature (1)..( 12): Result.003 file - promoters60/4256562
acaaacgttact

SEQ ID NO: 132157 - DNA, 12 bp, Unknown
  misc_feature (1)..( 12): Result.003 file - promoters60/4256562
ttcagcattaca

SEQ ID NO: 132158 - DNA, 12 bp, Unknown
  misc_feature (1)..( 12): Result.003 file - promoters60/4256562
acaaaggttgtt

SEQ ID NO: 132159 - DNA, 9 bp, Unknown
  misc_feature (1)..( 9): Result.003 file - promoters60/4256562
tcgataaaa

SEQ ID NO: 132160 - DNA, 9 bp, Unknown
  misc_feature (1)..( 9): Result.003 file - promoters60/4256562
cctataaaa

SEQ ID NO: 132161 - DNA, 9 bp, Unknown
  misc_feature (1)..( 9): Result.003 file - promoters60/4256562
tcgttaaaa

SEQ ID NO: 132162 - DNA, 13 bp, Unknown
  misc_feature (1)..( 13): Result.003 file - promoters60/4262222
tttgtaataaatt

SEQ ID NO: 132163 - DNA, 13 bp, Unknown
  misc_feature (1)..( 13): Result.003 file - promoters60/4262222
ctctttatatatt

SEQ ID NO: 132164 - DNA, 13 bp, Unknown
  misc_feature (1)..( 13): Result.003 file - promoters60/4262222
aaaactatacatt

SEQ ID NO: 132165 - DNA, 13 bp, Unknown
  misc_feature (1)..( 13): Result.003 file - promoters60/4262222
aaactcatatccg

SEQ ID NO: 132166 - DNA, 13 bp, Unknown
  misc_feature (1)..( 13): Result.003 file - promoters60/4262222
aatttaatcaatt

SEQ ID NO: 132167 - DNA, 9 bp, Unknown
  misc_feature (1)..( 9): Result.003 file - promoters60/4262222
atattataa

SEQ ID NO: 132168 - DNA, 9 bp, Unknown
  misc_feature (1)..( 9): Result.003 file - promoters60/4262222
aaattatag

SEQ ID NO: 132169 - DNA, 9 bp, Unknown
  misc_feature (1)..( 9): Result.003 file - promoters60/4262222
ttattaaat

SEQ ID NO: 132170 - DNA, 9 bp, Unknown
  misc_feature (1)..( 9): Result.003 file - promoters60/4262222
tttttaaat

SEQ ID NO: 132171 - DNA, 10 bp, Unknown
  misc_feature (1)..( 10): Result.003 file - promoters60/4262222
acatattact

SEQ ID NO: 132172 - DNA, 10 bp, Unknown
  misc_feature (1)..( 10): Result.003 file - promoters60/4262222
ccattttaac

SEQ ID NO: 132173 - DNA, 10 bp, Unknown
  misc_feature (1)..( 10): Result.003 file - promoters60/4262222
acatgttaga

SEQ ID NO: 132174 - DNA, 10 bp, Unknown
  misc_feature (1)..( 10): Result.003 file - promoters60/4262222
aattgttaga

SEQ ID NO: 132175 - DNA, 6 bp, Unknown
  misc_feature (1)..( 6): Result.003 file - promoters60/4262416
aatata

SEQ ID NO: 132176 - DNA, 6 bp, Unknown
  misc_feature (1)..( 6): Result.003 file - promoters60/4262416
aatata

SEQ ID NO: 132177 - DNA, 7 bp, Unknown
  misc_feature (1)..( 7): Result.003 file - promoters60/4262416
ttattat

SEQ ID NO: 132178 - DNA, 7 bp, Unknown
  misc_feature (1)..( 7): Result.003 file - promoters60/4262416
ttaatat

SEQ ID NO: 132179 - DNA, 6 bp, Unknown
  misc_feature (1)..( 6): Result.003 file - promoters60/4262416
tattaa

SEQ ID NO: 132180 - DNA, 6 bp, Unknown
  misc_feature (1)..( 6): Result.003 file - promoters60/4262416
tattaa

SEQ ID NO: 132181 - DNA, 6 bp, Unknown
  misc_feature (1)..( 6): Result.003 file - promoters60/4262416
tatatt

SEQ ID NO: 132182 - DNA, 6 bp, Unknown
  misc_feature (1)..( 6): Result.003 file - promoters60/4262416
tatatt

SEQ ID NO: 132183 - DNA, 7 bp, Unknown
  misc_feature (1)..( 7): Result.003 file - promoters60/4262416
attatca

SEQ ID NO: 132184 - DNA, 7 bp, Unknown
  misc_feature (1)..( 7): Result.003 file - promoters60/4262416
attatca

SEQ ID NO: 132185 - DNA, 6 bp, Unknown
  misc_feature (1)..( 6): Result.003 file - promoters60/4262416
aataaa

SEQ ID NO: 132186 - DNA, 6 bp, Unknown
  misc_feature (1)..( 6): Result.003 file - promoters60/4262416
aataaa

SEQ ID NO: 132187 - DNA, 11 bp, Unknown
  misc_feature (1)..( 11): Result.003 file - promoters60/4262416
ataaactcaaa

SEQ ID NO: 132188 - DNA, 11 bp, Unknown
  misc_feature (1)..( 11): Result.003 file - promoters60/4262416
ataaacgcaaa

SEQ ID NO: 132189 - DNA, 8 bp, Unknown
  misc_feature (1)..( 8): Result.003 file - promoters60/4262416
ctgaaata

SEQ ID NO: 132190 - DNA, 8 bp, Unknown
  misc_feature (1)..( 8): Result.003 file - promoters60/4262416
ctgaaata

SEQ ID NO: 132191 - DNA, 6 bp, Unknown
  misc_feature (1)..( 6): Result.003 file - promoters60/4262416
aaacct

SEQ ID NO: 132192 - DNA, 6 bp, Unknown
  misc_feature (1)..( 6): Result.003 file - promoters60/4262416
aaacct

SEQ ID NO: 132193 - DNA, 6 bp, Unknown
  misc_feature (1)..( 6): Result.003 file - promoters60/4262416
aaatag

SEQ ID NO: 132194 - DNA, 6 bp, Unknown
  misc_feature (1)..( 6): Result.003 file - promoters60/4262416
aaatag

SEQ ID NO: 132195 - DNA, 6 bp, Unknown
  misc_feature (1)..( 6): Result.003 file - promoters60/4262416
aacacg

SEQ ID NO: 132196 - DNA, 6 bp, Unknown
  misc_feature (1)..( 6): Result.003 file - promoters60/4262416
aacacg

SEQ ID NO: 132197 - DNA, 9 bp, Unknown
  misc_feature (1)..( 9): Result.003 file - promoters60/4262416
aatactttg

SEQ ID NO: 132198 - DNA, 9 bp, Unknown
  misc_feature (1)..( 9): Result.003 file - promoters60/4262416
aattctttg

SEQ ID NO: 132199 - DNA, 7 bp, Unknown
  misc_feature (1)..( 7): Result.003 file - promoters60/4262416
acagaaa

SEQ ID NO: 132200 - DNA, 7 bp, Unknown
  misc_feature (1)..( 7): Result.003 file - promoters60/4262416
acaaaaa

SEQ ID NO: 132201 - DNA, 7 bp, Unknown
  misc_feature (1)..( 7): Result.003 file - promoters60/4262416
gtccaat

SEQ ID NO: 132202 - DNA, 7 bp, Unknown
  misc_feature (1)..( 7): Result.003 file - promoters60/4262416
gtctaat

SEQ ID NO: 132203 - DNA, 7 bp, Unknown
  misc_feature (1)..( 7): Result.003 file - promoters60/4262416
aattcat

SEQ ID NO: 132204 - DNA, 7 bp, Unknown
  misc_feature (1)..( 7): Result.003 file - promoters60/4262416
aattcat

SEQ ID NO: 132205 - DNA, 6 bp, Unknown
  misc_feature (1)..( 6): Result.003 file - promoters60/4262416
acagaa

SEQ ID NO: 132206 - DNA, 6 bp, Unknown
  misc_feature (1)..( 6): Result.003 file - promoters60/4262416
acagaa

SEQ ID NO: 132207 - DNA, 9 bp, Unknown
  misc_feature (1)..( 9): Result.003 file - promoters60/4262420
ataatttga

SEQ ID NO: 132208 - DNA, 9 bp, Unknown
  misc_feature (1)..( 9): Result.003 file - promoters60/4262420
ctaattttg

SEQ ID NO: 132209 - DNA, 9 bp, Unknown
  misc_feature (1)..( 9): Result.003 file - promoters60/4262420
atattttta

SEQ ID NO: 132210 - DNA, 9 bp, Unknown
  misc_feature (1)..( 9): Result.003 file - promoters60/4262420
gtaatttga

SEQ ID NO: 132211 - DNA, 10 bp, Unknown
  misc_feature (1)..( 10): Result.003 file - promoters60/4262420
ggattcttac

SEQ ID NO: 132212 - DNA, 10 bp, Unknown
  misc_feature (1)..( 10): Result.003 file - promoters60/4262420
agattctaga

SEQ ID NO: 132213 - DNA, 10 bp, Unknown
  misc_feature (1)..( 10): Result.003 file - promoters60/4262420
tcattcgtac

SEQ ID NO: 132214 - DNA, 11 bp, Unknown
  misc_feature (1)..( 11): Result.003 file - promoters60/4262422
tagtgttaaga

SEQ ID NO: 132215 - DNA, 11 bp, Unknown
  misc_feature (1)..( 11): Result.003 file - promoters60/4262422
tagagttcatt

SEQ ID NO: 132216 - DNA, 11 bp, Unknown
  misc_feature (1)..( 11): Result.003 file - promoters60/4262422
tagttttatcc

SEQ ID NO: 132217 - DNA, 11 bp, Unknown
  misc_feature (1)..( 11): Result.003 file - promoters60/4262422
agtctttgatc

SEQ ID NO: 132218 - DNA, 9 bp, Unknown
  misc_feature (1)..( 9): Result.003 file - promoters60/4262422
gcgattaga

SEQ ID NO: 132219 - DNA, 9 bp, Unknown
  misc_feature (1)..( 9): Result.003 file - promoters60/4262422
atgataaga

SEQ ID NO: 132220 - DNA, 9 bp, Unknown
  misc_feature (1)..( 9): Result.003 file - promoters60/4262422
tggataagt

SEQ ID NO: 132221 - DNA, 9 bp, Unknown
  misc_feature (1)..( 9): Result.003 file - promoters60/4262422
tggataaaa

SEQ ID NO: 132222 - DNA, 12 bp, Unknown
  misc_feature (1)..( 12): Result.003 file - promoters60/4262422
taatttcatttg

SEQ ID NO: 132223 - DNA, 12 bp, Unknown
  misc_feature (1)..( 12): Result.003 file - promoters60/4262422
taatttaatttg

SEQ ID NO: 132224 - DNA, 12 bp, Unknown
  misc_feature (1)..( 12): Result.003 file - promoters60/4262422
tgagttgattat

SEQ ID NO: 132225 - DNA, 12 bp, Unknown
  misc_feature (1)..( 12): Result.003 file - promoters60/4262422
tggtttaatcat

SEQ ID NO: 132226 - DNA, 9 bp, Unknown
  misc_feature (1)..( 9): Result.003 file - promoters60/4262428
aatttaaat

SEQ ID NO: 132227 - DNA, 9 bp, Unknown
  misc_feature (1)..( 9): Result.003 file - promoters60/4262428
tatttaagc

SEQ ID NO: 132228 - DNA, 9 bp, Unknown
  misc_feature (1)..( 9): Result.003 file - promoters60/4262428
aatataaat

SEQ ID NO: 132229 - DNA, 9 bp, Unknown
  misc_feature (1)..( 9): Result.003 file - promoters60/4262428
aataaaaat

SEQ ID NO: 132230 - DNA, 9 bp, Unknown
  misc_feature (1)..( 9): Result.003 file - promoters60/4262428
ttttataaa

SEQ ID NO: 132231 - DNA, 9 bp, Unknown
  misc_feature (1)..( 9): Result.003 file - promoters60/4262428
ttttttaat

SEQ ID NO: 132232 - DNA, 9 bp, Unknown
  misc_feature (1)..( 9): Result.003 file - promoters60/4262428
aaatataaa

SEQ ID NO: 132233 - DNA, 9 bp, Unknown
  misc_feature (1)..( 9): Result.003 file - promoters60/4262428
caatataaa

SEQ ID NO: 132234 - DNA, 14 bp, Unknown
  misc_feature (1)..( 14): Result.003 file - promoters60/4262446
cgaagtttattaat

SEQ ID NO: 132235 - DNA, 14 bp, Unknown
  misc_feature (1)..( 14): Result.003 file - promoters60/4262446
cgaatttttttaag

SEQ ID NO: 132236 - DNA, 14 bp, Unknown
  misc_feature (1)..( 14): Result.003 file - promoters60/4262446
agatcctttttaaa

SEQ ID NO: 132237 - DNA, 14 bp, Unknown
  misc_feature (1)..( 14): Result.003 file - promoters60/4262446
ataaaaatttgaaa

SEQ ID NO: 132238 - DNA, 11 bp, Unknown
  misc_feature (1)..( 11): Result.003 file - promoters60/4262446
ttatttctatt

SEQ ID NO: 132239 - DNA, 11 bp, Unknown
  misc_feature (1)..( 11): Result.003 file - promoters60/4262446
ttatctctatt

SEQ ID NO: 132240 - DNA, 11 bp, Unknown
  misc_feature (1)..( 11): Result.003 file - promoters60/4262446
caatttatatt

SEQ ID NO: 132241 - DNA, 11 bp, Unknown
  misc_feature (1)..( 11): Result.003 file - promoters60/4262446
aaatttctcct

SEQ ID NO: 132242 - DNA, 12 bp, Unknown
  misc_feature (1)..( 12): Result.003 file - promoters60/4262446
tcattaacaaat

SEQ ID NO: 132243 - DNA, 12 bp, Unknown
  misc_feature (1)..( 12): Result.003 file - promoters60/4262446
tttttaaaaaat

SEQ ID NO: 132244 - DNA, 12 bp, Unknown
  misc_feature (1)..( 12): Result.003 file - promoters60/4262446
tataaaacaaaa

SEQ ID NO: 132245 - DNA, 12 bp, Unknown
  misc_feature (1)..( 12): Result.003 file - promoters60/4262446
attaggacaaat

SEQ ID NO: 132246 - DNA, 12 bp, Unknown
  misc_feature (1)..( 12): Result.003 file - promoters60/4262446
tttttaaatttc

SEQ ID NO: 132247 - DNA, 14 bp, Unknown
  misc_feature (1)..( 14): Result.003 file - promoters60/4262446
attttgaaatcatg

SEQ ID NO: 132248 - DNA, 14 bp, Unknown
  misc_feature (1)..( 14): Result.003 file - promoters60/4262446
ttttttaaagttcc

SEQ ID NO: 132249 - DNA, 14 bp, Unknown
  misc_feature (1)..( 14): Result.003 file - promoters60/4262446
attttgacatcata

SEQ ID NO: 132250 - DNA, 14 bp, Unknown
  misc_feature (1)..( 14): Result.003 file - promoters60/4262446
atttataagcaatc

SEQ ID NO: 132251 - DNA, 14 bp, Unknown
  misc_feature (1)..( 14): Result.003 file - promoters60/4262446
caatatacatcata

SEQ ID NO: 132252 - DNA, 14 bp, Unknown
  misc_feature (1)..( 14): Result.003 file - promoters60/4262446
attttgaaatcatg

SEQ ID NO: 132253 - DNA, 14 bp, Unknown
  misc_feature (1)..( 14): Result.003 file - promoters60/4262446
tccaaccaatcata

SEQ ID NO: 132254 - DNA, 14 bp, Unknown
  misc_feature (1)..( 14): Result.003 file - promoters60/4262446
attttgacatcata

SEQ ID NO: 132255 - DNA, 14 bp, Unknown
  misc_feature (1)..( 14): Result.003 file - promoters60/4262446
caatatacatcata

SEQ ID NO: 132256 - DNA, 8 bp, Unknown
  misc_feature (1)..( 8): Result.003 file - promoters60/4262446
taaacttt

SEQ ID NO: 132257 - DNA, 8 bp, Unknown
  misc_feature (1)..( 8): Result.003 file - promoters60/4262446
aaaaattt

SEQ ID NO: 132258 - DNA, 8 bp, Unknown
  misc_feature (1)..( 8): Result.003 file - promoters60/4262446
gaacatta

SEQ ID NO: 132259 - DNA, 8 bp, Unknown
  misc_feature (1)..( 8): Result.003 file - promoters60/4262446
aaaaatgt

SEQ ID NO: 132260 - DNA, 8 bp, Unknown
  misc_feature (1)..( 8): Result.003 file - promoters60/4262446
ttaaattt

SEQ ID NO: 132261 - DNA, 11 bp, Unknown
  misc_feature (1)..( 11): Result.003 file - promoters60/4262446
caaataaaaca

SEQ ID NO: 132262 - DNA, 11 bp, Unknown
  misc_feature (1)..( 11): Result.003 file - promoters60/4262446
attataaaaca

SEQ ID NO: 132263 - DNA, 11 bp, Unknown
  misc_feature (1)..( 11): Result.003 file - promoters60/4262446
gaaaaaaaaaa

SEQ ID NO: 132264 - DNA, 11 bp, Unknown
  misc_feature (1)..( 11): Result.003 file - promoters60/4262446
tttttaaaaaa

SEQ ID NO: 132265 - DNA, 11 bp, Unknown
  misc_feature (1)..( 11): Result.003 file - promoters60/4262446
tttttaaattt

SEQ ID NO: 132266 - DNA, 13 bp, Unknown
  misc_feature (1)..( 13): Result.003 file - promoters60/4262446
tttattaaaacaa

SEQ ID NO: 132267 - DNA, 13 bp, Unknown
  misc_feature (1)..( 13): Result.003 file - promoters60/4262446
tttattaaaatat

SEQ ID NO: 132268 - DNA, 13 bp, Unknown
  misc_feature (1)..( 13): Result.003 file - promoters60/4262446
tatataaaaagaa

SEQ ID NO: 132269 - DNA, 13 bp, Unknown
  misc_feature (1)..( 13): Result.003 file - promoters60/4262446
cttttaaaaagaa

SEQ ID NO: 132270 - DNA, 9 bp, Unknown
  misc_feature (1)..( 9): Result.003 file - promoters60/4262446
caaaaatta

SEQ ID NO: 132271 - DNA, 9 bp, Unknown
  misc_feature (1)..( 9): Result.003 file - promoters60/4262446
ttaaattta

SEQ ID NO: 132272 - DNA, 10 bp, Unknown
  misc_feature (1)..( 10): Result.003 file - promoters60/4262446
ccaataataa

SEQ ID NO: 132273 - DNA, 10 bp, Unknown
  misc_feature (1)..( 10): Result.003 file - promoters60/4262446
cttatattat

SEQ ID NO: 132274 - DNA, 8 bp, Unknown
  misc_feature (1)..( 8): Result.003 file - promoters60/4262562
gagaatct

SEQ ID NO: 132275 - DNA, 8 bp, Unknown
  misc_feature (1)..( 8): Result.003 file - promoters60/4262562
tagattct

SEQ ID NO: 132276 - DNA, 8 bp, Unknown
  misc_feature (1)..( 8): Result.003 file - promoters60/4262562
gagattct

SEQ ID NO: 132277 - DNA, 13 bp, Unknown
  misc_feature (1)..( 13): Result.003 file - promoters60/4262562
agttttgactttt

SEQ ID NO: 132278 - DNA, 13 bp, Unknown
  misc_feature (1)..( 13): Result.003 file - promoters60/4262562
taatttaactttt

SEQ ID NO: 132279 - DNA, 13 bp, Unknown
  misc_feature (1)..( 13): Result.003 file - promoters60/4262562
taattaaacttgg

SEQ ID NO: 132280 - DNA, 9 bp, Unknown
  misc_feature (1)..( 9): Result.003 file - promoters60/4262562
gagtgacaa

SEQ ID NO: 132281 - DNA, 9 bp, Unknown
  misc_feature (1)..( 9): Result.003 file - promoters60/4262562
gagtgacaa

SEQ ID NO: 132282 - DNA, 9 bp, Unknown
  misc_feature (1)..( 9): Result.003 file - promoters60/4262562
atgtgacaa

SEQ ID NO: 132283 - DNA, 8 bp, Unknown
  misc_feature (1)..( 8): Result.003 file - promoters60/4262562
taatcgaa

SEQ ID NO: 132284 - DNA, 8 bp, Unknown
  misc_feature (1)..( 8): Result.003 file - promoters60/4262562
atatcgaa

SEQ ID NO: 132285 - DNA, 8 bp, Unknown
  misc_feature (1)..( 8): Result.003 file - promoters60/4262562
ataccgaa

SEQ ID NO: 132286 - DNA, 8 bp, Unknown
  misc_feature (1)..( 8): Result.003 file - promoters60/4262562
atcgaaat

SEQ ID NO: 132287 - DNA, 8 bp, Unknown
  misc_feature (1)..( 8): Result.003 file - promoters60/4262562
tacgaaat

SEQ ID NO: 132288 - DNA, 8 bp, Unknown
  misc_feature (1)..( 8): Result.003 file - promoters60/4262562
taccaaaa

SEQ ID NO: 132289 - DNA, 8 bp, Unknown
  misc_feature (1)..( 8): Result.003 file - promoters60/4262562
atacttat

SEQ ID NO: 132290 - DNA, 8 bp, Unknown
  misc_feature (1)..( 8): Result.003 file - promoters60/4262562
ataattat

SEQ ID NO: 132291 - DNA, 8 bp, Unknown
  misc_feature (1)..( 8): Result.003 file - promoters60/4262562
atacatat

SEQ ID NO: 132292 - DNA, 7 bp, Unknown
  misc_feature (1)..( 7): Result.003 file - promoters60/4262562
atagatt

SEQ ID NO: 132293 - DNA, 7 bp, Unknown
  misc_feature (1)..( 7): Result.003 file - promoters60/4262562
ctagatt

SEQ ID NO: 132294 - DNA, 7 bp, Unknown
  misc_feature (1)..( 7): Result.003 file - promoters60/4262562
atatatt

SEQ ID NO: 132295 - DNA, 10 bp, Unknown
  misc_feature (1)..( 10): Result.003 file - promoters60/4265699
tttgtctgtt

SEQ ID NO: 132296 - DNA, 10 bp, Unknown
  misc_feature (1)..( 10): Result.003 file - promoters60/4265699
tttgtcggct

SEQ ID NO: 132297 - DNA, 11 bp, Unknown
  misc_feature (1)..( 11): Result.003 file - promoters60/4265699
tttagtcaaaa

SEQ ID NO: 132298 - DNA, 11 bp, Unknown
  misc_feature (1)..( 11): Result.003 file - promoters60/4265699
attagtaaaaa

SEQ ID NO: 132299 - DNA, 9 bp, Unknown
  misc_feature (1)..( 9): Result.003 file - promoters60/4265699
aaaagaggc

SEQ ID NO: 132300 - DNA, 9 bp, Unknown
  misc_feature (1)..( 9): Result.003 file - promoters60/4265699
aaaagaaaa

SEQ ID NO: 132301 - DNA, 9 bp, Unknown
  misc_feature (1)..( 9): Result.003 file - promoters60/4265699
taaataaat

SEQ ID NO: 132302 - DNA, 9 bp, Unknown
  misc_feature (1)..( 9): Result.003 file - promoters60/4265699
aatataaat

SEQ ID NO: 132303 - DNA, 14 bp, Unknown
  misc_feature (1)..( 14): Result.003 file - promoters60/4267125
cttgtcccaataac

SEQ ID NO: 132304 - DNA, 14 bp, Unknown
  misc_feature (1)..( 14): Result.003 file - promoters60/4267125
cttttcccaaaagt

SEQ ID NO: 132305 - DNA, 14 bp, Unknown
  misc_feature (1)..( 14): Result.003 file - promoters60/4267125
ggactcccaagaac

SEQ ID NO: 132306 - DNA, 14 bp, Unknown
  misc_feature (1)..( 14): Result.003 file - promoters60/4267125
gttttccgattcaa

SEQ ID NO: 132307 - DNA, 14 bp, Unknown
  misc_feature (1)..( 14): Result.003 file - promoters60/4267125
tttttcctttacaa

SEQ ID NO: 132308 - DNA, 14 bp, Unknown
  misc_feature (1)..( 14): Result.003 file - promoters60/4267125
cagaagctaagaac

SEQ ID NO: 132309 - DNA, 8 bp, Unknown
  misc_feature (1)..( 8): Result.003 file - promoters60/4270131
ttaataac

SEQ ID NO: 132310 - DNA, 8 bp, Unknown
  misc_feature (1)..( 8): Result.003 file - promoters60/4270131
ttaataac

SEQ ID NO: 132311 - DNA, 8 bp, Unknown
  misc_feature (1)..( 8): Result.003 file - promoters60/4270131
ataataat

SEQ ID NO: 132312 - DNA, 7 bp, Unknown
  misc_feature (1)..( 7): Result.003 file - promoters60/4270131
gcttaga

SEQ ID NO: 132313 - DNA, 7 bp, Unknown
  misc_feature (1)..( 7): Result.003 file - promoters60/4270131
gctgaga

SEQ ID NO: 132314 - DNA, 6 bp, Unknown
  misc_feature (1)..( 6): Result.003 file - promoters60/4270131
tttttt

SEQ ID NO: 132315 - DNA, 6 bp, Unknown
  misc_feature (1)..( 6): Result.003 file - promoters60/4270131
tttttt

SEQ ID NO: 132316 - DNA, 7 bp, Unknown
  misc_feature (1)..( 7): Result.003 file - promoters60/4270131
ttttttt

SEQ ID NO: 132317 - DNA, 7 bp, Unknown
  misc_feature (1)..( 7): Result.003 file - promoters60/4270131
tttgttt

SEQ ID NO: 132318 - DNA, 7 bp, Unknown
  misc_feature (1)..( 7): Result.003 file - promoters60/4270131
tttcttt

SEQ ID NO: 132319 - DNA, 7 bp, Unknown
  misc_feature (1)..( 7): Result.003 file - promoters60/4270131
tttattt

SEQ ID NO: 132320 - DNA, 7 bp, Unknown
  misc_feature (1)..( 7): Result.003 file - promoters60/4270131
ctaattt

SEQ ID NO: 132321 - DNA, 7 bp, Unknown
  misc_feature (1)..( 7): Result.003 file - promoters60/4270131
ctagttt

SEQ ID NO: 132322 - DNA, 9 bp, Unknown
  misc_feature (1)..( 9): Result.003 file - promoters60/4270131
ccgaatttt

SEQ ID NO: 132323 - DNA, 9 bp, Unknown
  misc_feature (1)..( 9): Result.003 file - promoters60/4270131
ccgactttt

SEQ ID NO: 132324 - DNA, 6 bp, Unknown
  misc_feature (1)..( 6): Result.003 file - promoters60/4270131
tttatc

SEQ ID NO: 132325 - DNA, 6 bp, Unknown
  misc_feature (1)..( 6): Result.003 file - promoters60/4270131
tttatc

SEQ ID NO: 132326 - DNA, 6 bp, Unknown
  misc_feature (1)..( 6): Result.003 file - promoters60/4270131
agcaaa

SEQ ID NO: 132327 - DNA, 6 bp, Unknown
  misc_feature (1)..( 6): Result.003 file - promoters60/4270131
agcaaa

SEQ ID NO: 132328 - DNA, 7 bp, Unknown
  misc_feature (1)..( 7): Result.003 file - promoters60/4270131
atgaaca

SEQ ID NO: 132329 - DNA, 7 bp, Unknown
  misc_feature (1)..( 7): Result.003 file - promoters60/4270131
atgtaca

SEQ ID NO: 132330 - DNA, 6 bp, Unknown
  misc_feature (1)..( 6): Result.003 file - promoters60/4270131
tgtttc

SEQ ID NO: 132331 - DNA, 6 bp, Unknown
  misc_feature (1)..( 6): Result.003 file - promoters60/4270131
tgtttc

SEQ ID NO: 132332 - DNA, 6 bp, Unknown
  misc_feature (1)..( 6): Result.003 file - promoters60/4270131
tataaa

SEQ ID NO: 132333 - DNA, 6 bp, Unknown
  misc_feature (1)..( 6): Result.003 file - promoters60/4270131
tataaa

SEQ ID NO: 132334 - DNA, 6 bp, Unknown
  misc_feature (1)..( 6): Result.003 file - promoters60/4270131
tataaa

SEQ ID NO: 132335 - DNA, 6 bp, Unknown
  misc_feature (1)..( 6): Result.003 file - promoters60/4270131
tataaa

SEQ ID NO: 132336 - DNA, 9 bp, Unknown
  misc_feature (1)..( 9): Result.003 file - promoters60/4281576
caaaaaaaa

SEQ ID NO: 132337 - DNA, 9 bp, Unknown
  misc_feature (1)..( 9): Result.003 file - promoters60/4281576
gaaaaaaaa

SEQ ID NO: 132338 - DNA, 9 bp, Unknown
  misc_feature (1)..( 9): Result.003 file - promoters60/4281576
taaaagaaa

SEQ ID NO: 132339 - DNA, 9 bp, Unknown
  misc_feature (1)..( 9): Result.003 file - promoters60/4281576
caacaaatc

SEQ ID NO: 132340 - DNA, 12 bp, Unknown
  misc_feature (1)..( 12): Result.003 file - promoters60/4281576
ttactttctgta

SEQ ID NO: 132341 - DNA, 12 bp, Unknown
  misc_feature (1)..( 12): Result.003 file - promoters60/4281576
ttcttttttgta

SEQ ID NO: 132342 - DNA, 12 bp, Unknown
  misc_feature (1)..( 12): Result.003 file - promoters60/4281576
taattttttggt

SEQ ID NO: 132343 - DNA, 12 bp, Unknown
  misc_feature (1)..( 12): Result.003 file - promoters60/4281576
taatatttttca

SEQ ID NO: 132344 - DNA, 12 bp, Unknown
  misc_feature (1)..( 12): Result.003 file - promoters60/4281576
aaattcttttat

SEQ ID NO: 132345 - DNA, 12 bp, Unknown
  misc_feature (1)..( 12): Result.003 file - promoters60/4281576
gtattatttcag

SEQ ID NO: 132346 - DNA, 13 bp, Unknown
  misc_feature (1)..( 13): Result.003 file - promoters60/4281576
agattctcttatt

SEQ ID NO: 132347 - DNA, 13 bp, Unknown
  misc_feature (1)..( 13): Result.003 file - promoters60/4281576
atattataggaaa

SEQ ID NO: 132348 - DNA, 13 bp, Unknown
  misc_feature (1)..( 13): Result.003 file - promoters60/4281576
ataatattctgct

SEQ ID NO: 132349 - DNA, 9 bp, Unknown
  misc_feature (1)..( 9): Result.003 file - promoters60/4281576
taacaaaac

SEQ ID NO: 132350 - DNA, 9 bp, Unknown
  misc_feature (1)..( 9): Result.003 file - promoters60/4281576
cttcaaaac

SEQ ID NO: 132351 - DNA, 9 bp, Unknown
  misc_feature (1)..( 9): Result.003 file - promoters60/4281576
taataaaat

SEQ ID NO: 132352 - DNA, 9 bp, Unknown
  misc_feature (1)..( 9): Result.003 file - promoters60/4281576
tcataaaaa

SEQ ID NO: 132353 - DNA, 8 bp, Unknown
  misc_feature (1)..( 8): Result.003 file - promoters60/4281576
gtctttct

SEQ ID NO: 132354 - DNA, 8 bp, Unknown
  misc_feature (1)..( 8): Result.003 file - promoters60/4281576
gtccttct

SEQ ID NO: 132355 - DNA, 8 bp, Unknown
  misc_feature (1)..( 8): Result.003 file - promoters60/4281576
gtttttct

SEQ ID NO: 132356 - DNA, 8 bp, Unknown
  misc_feature (1)..( 8): Result.003 file - promoters60/4281576
gtttttgt

SEQ ID NO: 132357 - DNA, 6 bp, Unknown
  misc_feature (1)..( 6): Result.003 file - promoters60/4281645
tatttt

SEQ ID NO: 132358 - DNA, 6 bp, Unknown
  misc_feature (1)..( 6): Result.003 file - promoters60/4281645
tatttt

SEQ ID NO: 132359 - DNA, 7 bp, Unknown
  misc_feature (1)..( 7): Result.003 file - promoters60/4281645
aaaacat

SEQ ID NO: 132360 - DNA, 7 bp, Unknown
  misc_feature (1)..( 7): Result.003 file - promoters60/4281645
aaaccat

SEQ ID NO: 132361 - DNA, 8 bp, Unknown
  misc_feature (1)..( 8): Result.003 file - promoters60/4281645
aatatgat

SEQ ID NO: 132362 - DNA, 8 bp, Unknown
  misc_feature (1)..( 8): Result.003 file - promoters60/4281645
aatgtgat

SEQ ID NO: 132363 - DNA, 8 bp, Unknown
  misc_feature (1)..( 8): Result.003 file - promoters60/4281645
aatatgcc

SEQ ID NO: 132364 - DNA, 7 bp, Unknown
  misc_feature (1)..( 7): Result.003 file - promoters60/4281645
gatgaat

SEQ ID NO: 132365 - DNA, 7 bp, Unknown
  misc_feature (1)..( 7): Result.003 file - promoters60/4281645
gatcaat

SEQ ID NO: 132366 - DNA, 6 bp, Unknown
  misc_feature (1)..( 6): Result.003 file - promoters60/4281645
aaattt

SEQ ID NO: 132367 - DNA, 6 bp, Unknown
  misc_feature (1)..( 6): Result.003 file - promoters60/4281645
aaattt

SEQ ID NO: 132368 - DNA, 6 bp, Unknown
  misc_feature (1)..( 6): Result.003 file - promoters60/4281645
agaaaa

SEQ ID NO: 132369 - DNA, 6 bp, Unknown
  misc_feature (1)..( 6): Result.003 file - promoters60/4281645
agaaaa

SEQ ID NO: 132370 - DNA, 8 bp, Unknown
  misc_feature (1)..( 8): Result.003 file - promoters60/4281645
agaaaatt

SEQ ID NO: 132371 - DNA, 8 bp, Unknown
  misc_feature (1)..( 8): Result.003 file - promoters60/4281645
agaatatt

SEQ ID NO: 132372 - DNA, 10 bp, Unknown
  misc_feature (1)..( 10): Result.003 file - promoters60/4281645
aacaataaaa

SEQ ID NO: 132373 - DNA, 10 bp, Unknown
  misc_feature (1)..( 10): Result.003 file - promoters60/4281645
aacaaaaaaa

SEQ ID NO: 132374 - DNA, 6 bp, Unknown
  misc_feature (1)..( 6): Result.003 file - promoters60/4281645
tgaaaa

SEQ ID NO: 132375 - DNA, 6 bp, Unknown
  misc_feature (1)..( 6): Result.003 file - promoters60/4281645
tgaaaa

SEQ ID NO: 132376 - DNA, 7 bp, Unknown
  misc_feature (1)..( 7): Result.003 file - promoters60/4281645
tgttata

SEQ ID NO: 132377 - DNA, 7 bp, Unknown
  misc_feature (1)..( 7): Result.003 file - promoters60/4281645
tgtgata

SEQ ID NO: 132378 - DNA, 7 bp, Unknown
  misc_feature (1)..( 7): Result.003 file - promoters60/4281645
aaagaac

SEQ ID NO: 132379 - DNA, 7 bp, Unknown
  misc_feature (1)..( 7): Result.003 file - promoters60/4281645
aaacaac

SEQ ID NO: 132380 - DNA, 8 bp, Unknown
  misc_feature (1)..( 8): Result.003 file - promoters60/4281645
ccggagaa

SEQ ID NO: 132381 - DNA, 8 bp, Unknown
  misc_feature (1)..( 8): Result.003 file - promoters60/4281645
ccggcgaa

SEQ ID NO: 132382 - DNA, 7 bp, Unknown
  misc_feature (1)..( 7): Result.003 file - promoters60/4281645
gtaactc

SEQ ID NO: 132383 - DNA, 7 bp, Unknown
  misc_feature (1)..( 7): Result.003 file - promoters60/4281645
gtaactc

SEQ ID NO: 132384 - DNA, 7 bp, Unknown
  misc_feature (1)..( 7): Result.003 file - promoters60/4281645
gtttatg

SEQ ID NO: 132385 - DNA, 7 bp, Unknown
  misc_feature (1)..( 7): Result.003 file - promoters60/4281645
gtttatg

SEQ ID NO: 132386 - DNA, 8 bp, Unknown
  misc_feature (1)..( 8): Result.003 file - promoters60/4281645
aactgaaa

SEQ ID NO: 132387 - DNA, 8 bp, Unknown
  misc_feature (1)..( 8): Result.003 file - promoters60/4281645
aacttaaa

SEQ ID NO: 132388 - DNA, 6 bp, Unknown
  misc_feature (1)..( 6): Result.003 file - promoters60/4281645
caaaaa

SEQ ID NO: 132389 - DNA, 6 bp, Unknown
  misc_feature (1)..( 6): Result.003 file - promoters60/4281645
caaaaa

SEQ ID NO: 132390 - DNA, 7 bp, Unknown
  misc_feature (1)..( 7): Result.003 file - promoters60/4281645
aaaatat

SEQ ID NO: 132391 - DNA, 7 bp, Unknown
  misc_feature (1)..( 7): Result.003 file - promoters60/4281645
aaaatat

SEQ ID NO: 132392 - DNA, 7 bp, Unknown
  misc_feature (1)..( 7): Result.003 file - promoters60/4281645
gtctctc

SEQ ID NO: 132393 - DNA, 7 bp, Unknown
  misc_feature (1)..( 7): Result.003 file - promoters60/4281645
gtctctc

SEQ ID NO: 132394 - DNA, 10 bp, Unknown
  misc_feature (1)..( 10): Result.003 file - promoters60/4281662
actttttaaa

SEQ ID NO: 132395 - DNA, 10 bp, Unknown
  misc_feature (1)..( 10): Result.003 file - promoters60/4281662
actttataat

SEQ ID NO: 132396 - DNA, 10 bp, Unknown
  misc_feature (1)..( 10): Result.003 file - promoters60/4281662
acattaaaat

SEQ ID NO: 132397 - DNA, 10 bp, Unknown
  misc_feature (1)..( 10): Result.003 file - promoters60/4281662
acttcataga

SEQ ID NO: 132398 - DNA, 8 bp, Unknown
  misc_feature (1)..( 8): Result.003 file - promoters60/4281662
aagataat

SEQ ID NO: 132399 - DNA, 8 bp, Unknown
  misc_feature (1)..( 8): Result.003 file - promoters60/4281662
aagatagt

SEQ ID NO: 132400 - DNA, 8 bp, Unknown
  misc_feature (1)..( 8): Result.003 file - promoters60/4281662
aagaaagt

SEQ ID NO: 132401 - DNA, 8 bp, Unknown
  misc_feature (1)..( 8): Result.003 file - promoters60/4281662
attttgtg

SEQ ID NO: 132402 - DNA, 8 bp, Unknown
  misc_feature (1)..( 8): Result.003 file - promoters60/4281662
attatgtc

SEQ ID NO: 132403 - DNA, 8 bp, Unknown
  misc_feature (1)..( 8): Result.003 file - promoters60/4281662
cttatgtc

SEQ ID NO: 132404 - DNA, 9 bp, Unknown
  misc_feature (1)..( 9): Result.003 file - promoters60/4281662
ttttaaaat

SEQ ID NO: 132405 - DNA, 9 bp, Unknown
  misc_feature (1)..( 9): Result.003 file - promoters60/4281662
cattaaaat

SEQ ID NO: 132406 - DNA, 9 bp, Unknown
  misc_feature (1)..( 9): Result.003 file - promoters60/4281662
ctttataat

SEQ ID NO: 132407 - DNA, 10 bp, Unknown
  misc_feature (1)..( 10): Result.003 file - promoters60/4281662
acttcataga

SEQ ID NO: 132408 - DNA, 7 bp, Unknown
  misc_feature (1)..( 7): Result.003 file - promoters60/4281662
tccattg

SEQ ID NO: 132409 - DNA, 7 bp, Unknown
  misc_feature (1)..( 7): Result.003 file - promoters60/4281662
tccattt

SEQ ID NO: 132410 - DNA, 7 bp, Unknown
  misc_feature (1)..( 7): Result.003 file - promoters60/4281662
accattt

SEQ ID NO: 132411 - DNA, 7 bp, Unknown
  misc_feature (1)..( 7): Result.003 file - promoters60/4281683
aacttat

SEQ ID NO: 132412 - DNA, 7 bp, Unknown
  misc_feature (1)..( 7): Result.003 file - promoters60/4281683
aacctat

SEQ ID NO: 132413 - DNA, 6 bp, Unknown
  misc_feature (1)..( 6): Result.003 file - promoters60/4281683
cttttc

SEQ ID NO: 132414 - DNA, 6 bp, Unknown
  misc_feature (1)..( 6): Result.003 file - promoters60/4281683
cttttc

SEQ ID NO: 132415 - DNA, 6 bp, Unknown
  misc_feature (1)..( 6): Result.003 file - promoters60/4281683
cttgaa

SEQ ID NO: 132416 - DNA, 6 bp, Unknown
  misc_feature (1)..( 6): Result.003 file - promoters60/4281683
cttgaa

SEQ ID NO: 132417 - DNA, 9 bp, Unknown
  misc_feature (1)..( 9): Result.003 file - promoters60/4281683
cacaatccc

SEQ ID NO: 132418 - DNA, 9 bp, Unknown
  misc_feature (1)..( 9): Result.003 file - promoters60/4281683
cacattccc

SEQ ID NO: 132419 - DNA, 6 bp, Unknown
  misc_feature (1)..( 6): Result.003 file - promoters60/4281683
agaaaa

SEQ ID NO: 132420 - DNA, 6 bp, Unknown
  misc_feature (1)..( 6): Result.003 file - promoters60/4281683
agaaaa

SEQ ID NO: 132421 - DNA, 12 bp, Unknown
  misc_feature (1)..( 12): Result.003 file - promoters60/4281683
cttttctatttc

SEQ ID NO: 132422 - DNA, 12 bp, Unknown
  misc_feature (1)..( 12): Result.003 file - promoters60/4281683
cttttcaatttc

SEQ ID NO: 132423 - DNA, 7 bp, Unknown
  misc_feature (1)..( 7): Result.003 file - promoters60/4281683
ctacatt

SEQ ID NO: 132424 - DNA, 7 bp, Unknown
  misc_feature (1)..( 7): Result.003 file - promoters60/4281683
ctatatt

SEQ ID NO: 132425 - DNA, 7 bp, Unknown
  misc_feature (1)..( 7): Result.003 file - promoters60/4281683
tttgtat

SEQ ID NO: 132426 - DNA, 7 bp, Unknown
  misc_feature (1)..( 7): Result.003 file - promoters60/4281683
tttgtat

SEQ ID NO: 132427 - DNA, 6 bp, Unknown
  misc_feature (1)..( 6): Result.003 file - promoters60/4281683
atttaa

SEQ ID NO: 132428 - DNA, 6 bp, Unknown
  misc_feature (1)..( 6): Result.003 file - promoters60/4281683
atttaa

SEQ ID NO: 132429 - DNA, 6 bp, Unknown
  misc_feature (1)..( 6): Result.003 file - promoters60/4281683
aactat

SEQ ID NO: 132430 - DNA, 6 bp, Unknown
  misc_feature (1)..( 6): Result.003 file - promoters60/4281683
aactat

SEQ ID NO: 132431 - DNA, 7 bp, Unknown
  misc_feature (1)..( 7): Result.003 file - promoters60/4281683
attcggt

SEQ ID NO: 132432 - DNA, 7 bp, Unknown
  misc_feature (1)..( 7): Result.003 file - promoters60/4281683
attcggt

SEQ ID NO: 132433 - DNA, 6 bp, Unknown
  misc_feature (1)..( 6): Result.003 file - promoters60/4281683
caacca

SEQ ID NO: 132434 - DNA, 6 bp, Unknown
  misc_feature (1)..( 6): Result.003 file - promoters60/4281683
caacca

SEQ ID NO: 132435 - DNA, 6 bp, Unknown
  misc_feature (1)..( 6): Result.003 file - promoters60/4281683
ggctga

SEQ ID NO: 132436 - DNA, 6 bp, Unknown
  misc_feature (1)..( 6): Result.003 file - promoters60/4281683
ggctga

SEQ ID NO: 132437 - DNA, 11 bp, Unknown
  misc_feature (1)..( 11): Result.003 file - promoters60/4281683
aggttctcaga

SEQ ID NO: 132438 - DNA, 11 bp, Unknown
  misc_feature (1)..( 11): Result.003 file - promoters60/4281683
agggtctgaga

SEQ ID NO: 132439 - DNA, 6 bp, Unknown
  misc_feature (1)..( 6): Result.003 file - promoters60/4281683
agattt

SEQ ID NO: 132440 - DNA, 6 bp, Unknown
  misc_feature (1)..( 6): Result.003 file - promoters60/4281683
agattt

SEQ ID NO: 132441 - DNA, 10 bp, Unknown
  misc_feature (1)..( 10): Result.003 file - promoters60/4281690
acaacaaagt

SEQ ID NO: 132442 - DNA, 10 bp, Unknown
  misc_feature (1)..( 10): Result.003 file - promoters60/4281690
aaaacaaacg

SEQ ID NO: 132443 - DNA, 10 bp, Unknown
  misc_feature (1)..( 10): Result.003 file - promoters60/4281690
ggaaaaaaaa

SEQ ID NO: 132444 - DNA, 10 bp, Unknown
  misc_feature (1)..( 10): Result.003 file - promoters60/4281690
ttaaaaaaag

SEQ ID NO: 132445 - DNA, 10 bp, Unknown
  misc_feature (1)..( 10): Result.003 file - promoters60/4281690
aaaacaattc

SEQ ID NO: 132446 - DNA, 10 bp, Unknown
  misc_feature (1)..( 10): Result.003 file - promoters60/4281690
caaacaaatg

SEQ ID NO: 132447 - DNA, 10 bp, Unknown
  misc_feature (1)..( 10): Result.003 file - promoters60/4281690
ataaaaaata

SEQ ID NO: 132448 - DNA, 10 bp, Unknown
  misc_feature (1)..( 10): Result.003 file - promoters60/4281690
ccactatata

SEQ ID NO: 132449 - DNA, 10 bp, Unknown
  misc_feature (1)..( 10): Result.003 file - promoters60/4281690
ccattatata

SEQ ID NO: 132450 - DNA, 10 bp, Unknown
  misc_feature (1)..( 10): Result.003 file - promoters60/4281690
cttttatata

SEQ ID NO: 132451 - DNA, 10 bp, Unknown
  misc_feature (1)..( 10): Result.003 file - promoters60/4281690
cttgtatata

SEQ ID NO: 132452 - DNA, 10 bp, Unknown
  misc_feature (1)..( 10): Result.003 file - promoters60/4281690
cgcctatata

SEQ ID NO: 132453 - DNA, 10 bp, Unknown
  misc_feature (1)..( 10): Result.003 file - promoters60/4281690
tccctataaa

SEQ ID NO: 132454 - DNA, 11 bp, Unknown
  misc_feature (1)..( 11): Result.003 file - promoters60/4281690
aacgaaaaata

SEQ ID NO: 132455 - DNA, 11 bp, Unknown
  misc_feature (1)..( 11): Result.003 file - promoters60/4281690
attataaaata

SEQ ID NO: 132456 - DNA, 11 bp, Unknown
  misc_feature (1)..( 11): Result.003 file - promoters60/4281690
tataaaaaatt

SEQ ID NO: 132457 - DNA, 11 bp, Unknown
  misc_feature (1)..( 11): Result.003 file - promoters60/4281690
attagaaaatt

SEQ ID NO: 132458 - DNA, 11 bp, Unknown
  misc_feature (1)..( 11): Result.003 file - promoters60/4281690
aggagataata

SEQ ID NO: 132459 - DNA, 11 bp, Unknown
  misc_feature (1)..( 11): Result.003 file - promoters60/4281690
catctaacata

SEQ ID NO: 132460 - DNA, 12 bp, Unknown
  misc_feature (1)..( 12): Result.003 file - promoters60/4281690
taaataaaagca

SEQ ID NO: 132461 - DNA, 12 bp, Unknown
  misc_feature (1)..( 12): Result.003 file - promoters60/4281690
attataaaatac

SEQ ID NO: 132462 - DNA, 12 bp, Unknown
  misc_feature (1)..( 12): Result.003 file - promoters60/4281690
attagaaaattt

SEQ ID NO: 132463 - DNA, 12 bp, Unknown
  misc_feature (1)..( 12): Result.003 file - promoters60/4281690
tttacaaacttt

SEQ ID NO: 132464 - DNA, 12 bp, Unknown
  misc_feature (1)..( 12): Result.003 file - promoters60/4281690
aggagataatat

SEQ ID NO: 132465 - DNA, 12 bp, Unknown
  misc_feature (1)..( 12): Result.003 file - promoters60/4281690
ctaacataggca

SEQ ID NO: 132466 - DNA, 8 bp, Unknown
  misc_feature (1)..( 8): Result.003 file - promoters60/4281711
taattaaa

SEQ ID NO: 132467 - DNA, 8 bp, Unknown
  misc_feature (1)..( 8): Result.003 file - promoters60/4281711
gaataaaa

SEQ ID NO: 132468 - DNA, 8 bp, Unknown
  misc_feature (1)..( 8): Result.003 file - promoters60/4281711
taataaac

SEQ ID NO: 132469 - DNA, 8 bp, Unknown
  misc_feature (1)..( 8): Result.003 file - promoters60/4281711
gaagaaat

SEQ ID NO: 132470 - DNA, 9 bp, Unknown
  misc_feature (1)..( 9): Result.003 file - promoters60/4281737
aactaaaat

SEQ ID NO: 132471 - DNA, 9 bp, Unknown
  misc_feature (1)..( 9): Result.003 file - promoters60/4281737
aacaaaaaa

SEQ ID NO: 132472 - DNA, 9 bp, Unknown
  misc_feature (1)..( 9): Result.003 file - promoters60/4281737
aattaaaat

SEQ ID NO: 132473 - DNA, 9 bp, Unknown
  misc_feature (1)..( 9): Result.003 file - promoters60/4281737
cacacaaag

SEQ ID NO: 132474 - DNA, 9 bp, Unknown
  misc_feature (1)..( 9): Result.003 file - promoters60/4281737
gacatagta

SEQ ID NO: 132475 - DNA, 9 bp, Unknown
  misc_feature (1)..( 9): Result.003 file - promoters60/4281737
ttttgtatt

SEQ ID NO: 132476 - DNA, 9 bp, Unknown
  misc_feature (1)..( 9): Result.003 file - promoters60/4281737
ccttgtatt

SEQ ID NO: 132477 - DNA, 9 bp, Unknown
  misc_feature (1)..( 9): Result.003 file - promoters60/4281737
aaatgtatt

SEQ ID NO: 132478 - DNA, 9 bp, Unknown
  misc_feature (1)..( 9): Result.003 file - promoters60/4281737
taatatata

SEQ ID NO: 132479 - DNA, 9 bp, Unknown
  misc_feature (1)..( 9): Result.003 file - promoters60/4281737
aaaagtatt

SEQ ID NO: 132480 - DNA, 9 bp, Unknown
  misc_feature (1)..( 9): Result.003 file - promoters60/4281737
aagtttttg

SEQ ID NO: 132481 - DNA, 9 bp, Unknown
  misc_feature (1)..( 9): Result.003 file - promoters60/4281737
gggtttttt

SEQ ID NO: 132482 - DNA, 9 bp, Unknown
  misc_feature (1)..( 9): Result.003 file - promoters60/4281737
ttgttgttg

SEQ ID NO: 132483 - DNA, 9 bp, Unknown
  misc_feature (1)..( 9): Result.003 file - promoters60/4281737
atgtttttg

SEQ ID NO: 132484 - DNA, 9 bp, Unknown
  misc_feature (1)..( 9): Result.003 file - promoters60/4281737
gggttttag

SEQ ID NO: 132485 - DNA, 9 bp, Unknown
  misc_feature (1)..( 9): Result.003 file - promoters60/4281737
tagttgttc

SEQ ID NO: 132486 - DNA, 14 bp, Unknown
  misc_feature (1)..( 14): Result.003 file - promoters60/4281737
attatcaatgggat

SEQ ID NO: 132487 - DNA, 14 bp, Unknown
  misc_feature (1)..( 14): Result.003 file - promoters60/4281737
tttataaatgtatt

SEQ ID NO: 132488 - DNA, 14 bp, Unknown
  misc_feature (1)..( 14): Result.003 file - promoters60/4281737
aatatatattctga

SEQ ID NO: 132489 - DNA, 14 bp, Unknown
  misc_feature (1)..( 14): Result.003 file - promoters60/4281737
aatttaaaaagaat

SEQ ID NO: 132490 - DNA, 14 bp, Unknown
  misc_feature (1)..( 14): Result.003 file - promoters60/4281737
tattgaaaagtatt

SEQ ID NO: 132491 - DNA, 18 bp, Unknown
  misc_feature (1)..( 18): Result.003 file - promoters60/4281737
cgtaagaaaaaaaaaaaa

SEQ ID NO: 132492 - DNA, 18 bp, Unknown
  misc_feature (1)..( 18): Result.003 file - promoters60/4281737
ttctataaaaaatatcgt

SEQ ID NO: 132493 - DNA, 18 bp, Unknown
  misc_feature (1)..( 18): Result.003 file - promoters60/4281737
atatacaaaaatgtaatt

SEQ ID NO: 132494 - DNA, 18 bp, Unknown
  misc_feature (1)..( 18): Result.003 file - promoters60/4281737
acagaggaaaatttaatt

SEQ ID NO: 132495 - DNA, 18 bp, Unknown
  misc_feature (1)..( 18): Result.003 file - promoters60/4281737
ctatataaaaccaagacg

SEQ ID NO: 132496 - DNA, 18 bp, Unknown
  misc_feature (1)..( 18): Result.003 file - promoters60/4281737
acctattaaagtagagat

SEQ ID NO: 132497 - DNA, 18 bp, Unknown
  misc_feature (1)..( 18): Result.003 file - promoters60/4281737
tagttttaataatgggcc

SEQ ID NO: 132498 - DNA, 17 bp, Unknown
  misc_feature (1)..( 17): Result.003 file - promoters60/4281737
cgggtccaaaggcttcg

SEQ ID NO: 132499 - DNA, 17 bp, Unknown
  misc_feature (1)..( 17): Result.003 file - promoters60/4281737
attttccaaagctcatt

SEQ ID NO: 132500 - DNA, 17 bp, Unknown
  misc_feature (1)..( 17): Result.003 file - promoters60/4281737
ttgcatcaatgcttatt

SEQ ID NO: 132501 - DNA, 17 bp, Unknown
  misc_feature (1)..( 17): Result.003 file - promoters60/4281737
ttagtactacatatgta

SEQ ID NO: 132502 - DNA, 17 bp, Unknown
  misc_feature (1)..( 17): Result.003 file - promoters60/4281737
atggtattactctcatt

SEQ ID NO: 132503 - DNA, 14 bp, Unknown
  misc_feature (1)..( 14): Result.003 file - promoters60/4281737
cacacctcgttttc

SEQ ID NO: 132504 - DNA, 14 bp, Unknown
  misc_feature (1)..( 14): Result.003 file - promoters60/4281737
caaagctcatttaa

SEQ ID NO: 132505 - DNA, 14 bp, Unknown
  misc_feature (1)..( 14): Result.003 file - promoters60/4281737
caatgcttattact

SEQ ID NO: 132506 - DNA, 14 bp, Unknown
  misc_feature (1)..( 14): Result.003 file - promoters60/4281737
cttgttttagtact

SEQ ID NO: 132507 - DNA, 14 bp, Unknown
  misc_feature (1)..( 14): Result.003 file - promoters60/4281737
tgaacctcattcaa

SEQ ID NO: 132508 - DNA, 13 bp, Unknown
  misc_feature (1)..( 13): Result.003 file - promoters60/4281737
aaaatgtaatttt

SEQ ID NO: 132509 - DNA, 13 bp, Unknown
  misc_feature (1)..( 13): Result.003 file - promoters60/4281737
ggatggtagtttt

SEQ ID NO: 132510 - DNA, 13 bp, Unknown
  misc_feature (1)..( 13): Result.003 file - promoters60/4281737
aaaatttaattcc

SEQ ID NO: 132511 - DNA, 13 bp, Unknown
  misc_feature (1)..( 13): Result.003 file - promoters60/4281737
tagagataatttt

SEQ ID NO: 132512 - DNA, 13 bp, Unknown
  misc_feature (1)..( 13): Result.003 file - promoters60/4281737
ttgatttaataaa

SEQ ID NO: 132513 - DNA, 10 bp, Unknown
  misc_feature (1)..( 10): Result.003 file - promoters60/4281744
gaaaaagata

SEQ ID NO: 132514 - DNA, 10 bp, Unknown
  misc_feature (1)..( 10): Result.003 file - promoters60/4281744
gaaatagatt

SEQ ID NO: 132515 - DNA, 10 bp, Unknown
  misc_feature (1)..( 10): Result.003 file - promoters60/4281744
ttagtagatt

SEQ ID NO: 132516 - DNA, 10 bp, Unknown
  misc_feature (1)..( 10): Result.003 file - promoters60/4281744
tatataaatt

SEQ ID NO: 132517 - DNA, 9 bp, Unknown
  misc_feature (1)..( 9): Result.003 file - promoters60/4281773
catataaag

SEQ ID NO: 132518 - DNA, 9 bp, Unknown
  misc_feature (1)..( 9): Result.003 file - promoters60/4281773
catatatac

SEQ ID NO: 132519 - DNA, 9 bp, Unknown
  misc_feature (1)..( 9): Result.003 file - promoters60/4281773
aataaaaag

SEQ ID NO: 132520 - DNA, 9 bp, Unknown
  misc_feature (1)..( 9): Result.003 file - promoters60/4281773
tatataaac

SEQ ID NO: 132521 - DNA, 9 bp, Unknown
  misc_feature (1)..( 9): Result.003 file - promoters60/4281773
tatatatat

SEQ ID NO: 132522 - DNA, 9 bp, Unknown
  misc_feature (1)..( 9): Result.003 file - promoters60/4281773
tatagataa

SEQ ID NO: 132523 - DNA, 12 bp, Unknown
  misc_feature (1)..( 12): Result.003 file - promoters60/4281773
gcaaataaatta

SEQ ID NO: 132524 - DNA, 12 bp, Unknown
  misc_feature (1)..( 12): Result.003 file - promoters60/4281773
ttaaaaaaagta

SEQ ID NO: 132525 - DNA, 12 bp, Unknown
  misc_feature (1)..( 12): Result.003 file - promoters60/4281773
tataatacattt

SEQ ID NO: 132526 - DNA, 12 bp, Unknown
  misc_feature (1)..( 12): Result.003 file - promoters60/4281773
gagaatacatac

SEQ ID NO: 132527 - DNA, 12 bp, Unknown
  misc_feature (1)..( 12): Result.003 file - promoters60/4281773
acataaacattt

SEQ ID NO: 132528 - DNA, 12 bp, Unknown
  misc_feature (1)..( 12): Result.003 file - promoters60/4281773
tataagacagta

SEQ ID NO: 132529 - DNA, 7 bp, Unknown
  misc_feature (1)..( 7): Result.003 file - promoters60/4281799
gcaaaag

SEQ ID NO: 132530 - DNA, 7 bp, Unknown
  misc_feature (1)..( 7): Result.003 file - promoters60/4281799
gcaaaag

SEQ ID NO: 132531 - DNA, 8 bp, Unknown
  misc_feature (1)..( 8): Result.003 file - promoters60/4281799
taaccccg

SEQ ID NO: 132532 - DNA, 8 bp, Unknown
  misc_feature (1)..( 8): Result.003 file - promoters60/4281799
taaacccg

SEQ ID NO: 132533 - DNA, 8 bp, Unknown
  misc_feature (1)..( 8): Result.003 file - promoters60/4281799
acaaattt

SEQ ID NO: 132534 - DNA, 8 bp, Unknown
  misc_feature (1)..( 8): Result.003 file - promoters60/4281799
acacattt

SEQ ID NO: 132535 - DNA, 6 bp, Unknown
  misc_feature (1)..( 6): Result.003 file - promoters60/4281799
ccatta

SEQ ID NO: 132536 - DNA, 6 bp, Unknown
  misc_feature (1)..( 6): Result.003 file - promoters60/4281799
ccatta

SEQ ID NO: 132537 - DNA, 7 bp, Unknown
  misc_feature (1)..( 7): Result.003 file - promoters60/4281799
attctta

SEQ ID NO: 132538 - DNA, 7 bp, Unknown
  misc_feature (1)..( 7): Result.003 file - promoters60/4281799
attatta

SEQ ID NO: 132539 - DNA, 8 bp, Unknown
  misc_feature (1)..( 8): Result.003 file - promoters60/4281799
actcaaaa

SEQ ID NO: 132540 - DNA, 8 bp, Unknown
  misc_feature (1)..( 8): Result.003 file - promoters60/4281799
actaaaaa

SEQ ID NO: 132541 - DNA, 7 bp, Unknown
  misc_feature (1)..( 7): Result.003 file - promoters60/4281799
atatatt

SEQ ID NO: 132542 - DNA, 7 bp, Unknown
  misc_feature (1)..( 7): Result.003 file - promoters60/4281799
atagatt

SEQ ID NO: 132543 - DNA, 6 bp, Unknown
  misc_feature (1)..( 6): Result.003 file - promoters60/4281799
agcaaa

SEQ ID NO: 132544 - DNA, 6 bp, Unknown
  misc_feature (1)..( 6): Result.003 file - promoters60/4281799
agcaaa

SEQ ID NO: 132545 - DNA, 7 bp, Unknown
  misc_feature (1)..( 7): Result.003 file - promoters60/4281799
aaagctt

SEQ ID NO: 132546 - DNA, 7 bp, Unknown
  misc_feature (1)..( 7): Result.003 file - promoters60/4281799
aaaactt

SEQ ID NO: 132547 - DNA, 7 bp, Unknown
  misc_feature (1)..( 7): Result.003 file - promoters60/4281799
aatgtgg

SEQ ID NO: 132548 - DNA, 7 bp, Unknown
  misc_feature (1)..( 7): Result.003 file - promoters60/4281799
aatttgg

SEQ ID NO: 132549 - DNA, 10 bp, Unknown
  misc_feature (1)..( 10): Result.003 file - promoters60/4281799
atgatattca

SEQ ID NO: 132550 - DNA, 10 bp, Unknown
  misc_feature (1)..( 10): Result.003 file - promoters60/4281799
ttgaaattca

SEQ ID NO: 132551 - DNA, 10 bp, Unknown
  misc_feature (1)..( 10): Result.003 file - promoters60/4281799
ttgaaaaagc

SEQ ID NO: 132552 - DNA, 11 bp, Unknown
  misc_feature (1)..( 11): Result.003 file - promoters60/4281799
gttttaataaa

SEQ ID NO: 132553 - DNA, 11 bp, Unknown
  misc_feature (1)..( 11): Result.003 file - promoters60/4281799
gttttattaaa

SEQ ID NO: 132554 - DNA, 9 bp, Unknown
  misc_feature (1)..( 9): Result.003 file - promoters60/4281799
aaatcattt

SEQ ID NO: 132555 - DNA, 9 bp, Unknown
  misc_feature (1)..( 9): Result.003 file - promoters60/4281799
aaatgattt

SEQ ID NO: 132556 - DNA, 7 bp, Unknown
  misc_feature (1)..( 7): Result.003 file - promoters60/4281799
ttttgta

SEQ ID NO: 132557 - DNA, 7 bp, Unknown
  misc_feature (1)..( 7): Result.003 file - promoters60/4281799
ttttgta

SEQ ID NO: 132558 - DNA, 7 bp, Unknown
  misc_feature (1)..( 7): Result.003 file - promoters60/4281799
tgttaat

SEQ ID NO: 132559 - DNA, 7 bp, Unknown
  misc_feature (1)..( 7): Result.003 file - promoters60/4281799
tgtaaat

SEQ ID NO: 132560 - DNA, 7 bp, Unknown
  misc_feature (1)..( 7): Result.003 file - promoters60/4281799
ttttgta

SEQ ID NO: 132561 - DNA, 7 bp, Unknown
  misc_feature (1)..( 7): Result.003 file - promoters60/4281799
tttggta

SEQ ID NO: 132562 - DNA, 7 bp, Unknown
  misc_feature (1)..( 7): Result.003 file - promoters60/4281799
aaataga

SEQ ID NO: 132563 - DNA, 7 bp, Unknown
  misc_feature (1)..( 7): Result.003 file - promoters60/4281799
aaataga

SEQ ID NO: 132564 - DNA, 7 bp, Unknown
  misc_feature (1)..( 7): Result.003 file - promoters60/4281799
tttccaa

SEQ ID NO: 132565 - DNA, 7 bp, Unknown
  misc_feature (1)..( 7): Result.003 file - promoters60/4281799
ttttcaa

SEQ ID NO: 132566 - DNA, 6 bp, Unknown
  misc_feature (1)..( 6): Result.003 file - promoters60/4281799
aaaaat

SEQ ID NO: 132567 - DNA, 6 bp, Unknown
  misc_feature (1)..( 6): Result.003 file - promoters60/4281799
aaaaat

SEQ ID NO: 132568 - DNA, 9 bp, Unknown
  misc_feature (1)..( 9): Result.003 file - promoters60/4281799
aaaagccct

SEQ ID NO: 132569 - DNA, 9 bp, Unknown
  misc_feature (1)..( 9): Result.003 file - promoters60/4281799
aaaatccct

SEQ ID NO: 132570 - DNA, 9 bp, Unknown
  misc_feature (1)..( 9): Result.003 file - promoters60/4281799
tattggaac

SEQ ID NO: 132571 - DNA, 9 bp, Unknown
  misc_feature (1)..( 9): Result.003 file - promoters60/4281799
tattgaaac

SEQ ID NO: 132572 - DNA, 9 bp, Unknown
  misc_feature (1)..( 9): Result.003 file - promoters60/4281837
gtttaatct

SEQ ID NO: 132573 - DNA, 9 bp, Unknown
  misc_feature (1)..( 9): Result.003 file - promoters60/4281837
ttttaatct

SEQ ID NO: 132574 - DNA, 10 bp, Unknown
  misc_feature (1)..( 10): Result.003 file - promoters60/4281837
cttgtaaatg

SEQ ID NO: 132575 - DNA, 10 bp, Unknown
  misc_feature (1)..( 10): Result.003 file - promoters60/4281837
cttgtaatca

SEQ ID NO: 132576 - DNA, 13 bp, Unknown
  misc_feature (1)..( 13): Result.003 file - promoters60/4281837
tatattactctat

SEQ ID NO: 132577 - DNA, 13 bp, Unknown
  misc_feature (1)..( 13): Result.003 file - promoters60/4281837
ttttttactcagc

SEQ ID NO: 132578 - DNA, 13 bp, Unknown
  misc_feature (1)..( 13): Result.003 file - promoters60/4281837
tataatactaatt

SEQ ID NO: 132579 - DNA, 13 bp, Unknown
  misc_feature (1)..( 13): Result.003 file - promoters60/4281837
gtgtctactttat

SEQ ID NO: 132580 - DNA, 9 bp, Unknown
  misc_feature (1)..( 9): Result.003 file - promoters60/4281837
ttgtctgtt

SEQ ID NO: 132581 - DNA, 9 bp, Unknown
  misc_feature (1)..( 9): Result.003 file - promoters60/4281837
ttgtctgtg

SEQ ID NO: 132582 - DNA, 9 bp, Unknown
  misc_feature (1)..( 9): Result.003 file - promoters60/4281837
tcctctgtt

SEQ ID NO: 132583 - DNA, 9 bp, Unknown
  misc_feature (1)..( 9): Result.003 file - promoters60/4281837
aagtcggtg

SEQ ID NO: 132584 - DNA, 10 bp, Unknown
  misc_feature (1)..( 10): Result.003 file - promoters60/4281837
gaaaaaaata

SEQ ID NO: 132585 - DNA, 10 bp, Unknown
  misc_feature (1)..( 10): Result.003 file - promoters60/4281837
caaaaacata

SEQ ID NO: 132586 - DNA, 10 bp, Unknown
  misc_feature (1)..( 10): Result.003 file - promoters60/4281837
taaaaaagtt

SEQ ID NO: 132587 - DNA, 10 bp, Unknown
  misc_feature (1)..( 10): Result.003 file - promoters60/4281837
taaaaaatca

SEQ ID NO: 132588 - DNA, 12 bp, Unknown
  misc_feature (1)..( 12): Result.003 file - promoters60/4281837
ctctatattact

SEQ ID NO: 132589 - DNA, 12 bp, Unknown
  misc_feature (1)..( 12): Result.003 file - promoters60/4281837
ttctatataagg

SEQ ID NO: 132590 - DNA, 12 bp, Unknown
  misc_feature (1)..( 12): Result.003 file - promoters60/4281837
gattataatact

SEQ ID NO: 132591 - DNA, 12 bp, Unknown
  misc_feature (1)..( 12): Result.003 file - promoters60/4281837
tactttattgtc

SEQ ID NO: 132592 - DNA, 9 bp, Unknown
  misc_feature (1)..( 9): Result.003 file - promoters60/4281837
gaaacaaaa

SEQ ID NO: 132593 - DNA, 9 bp, Unknown
  misc_feature (1)..( 9): Result.003 file - promoters60/4281837
aaaaaaaaa

SEQ ID NO: 132594 - DNA, 9 bp, Unknown
  misc_feature (1)..( 9): Result.003 file - promoters60/4281837
gaaccaacc

SEQ ID NO: 132595 - DNA, 9 bp, Unknown
  misc_feature (1)..( 9): Result.003 file - promoters60/4281837
taaatagat

SEQ ID NO: 132596 - DNA, 9 bp, Unknown
  misc_feature (1)..( 9): Result.003 file - promoters60/4281837
ttatttttt

SEQ ID NO: 132597 - DNA, 9 bp, Unknown
  misc_feature (1)..( 9): Result.003 file - promoters60/4281837
ttatcttta

SEQ ID NO: 132598 - DNA, 9 bp, Unknown
  misc_feature (1)..( 9): Result.003 file - promoters60/4281837
atattttag

SEQ ID NO: 132599 - DNA, 10 bp, Unknown
  misc_feature (1)..( 10): Result.003 file - promoters60/4281837
tgatttctta

SEQ ID NO: 132600 - DNA, 10 bp, Unknown
  misc_feature (1)..( 10): Result.003 file - promoters60/4281876
aataaattaa

SEQ ID NO: 132601 - DNA, 10 bp, Unknown
  misc_feature (1)..( 10): Result.003 file - promoters60/4281876
aatacattca

SEQ ID NO: 132602 - DNA, 10 bp, Unknown
  misc_feature (1)..( 10): Result.003 file - promoters60/4281876
aaaaaaagta

SEQ ID NO: 132603 - DNA, 10 bp, Unknown
  misc_feature (1)..( 10): Result.003 file - promoters60/4281876
aatcaatatt

SEQ ID NO: 132604 - DNA, 10 bp, Unknown
  misc_feature (1)..( 10): Result.003 file - promoters60/4281876
aataaaaatg

SEQ ID NO: 132605 - DNA, 10 bp, Unknown
  misc_feature (1)..( 10): Result.003 file - promoters60/4281876
aatacataca

SEQ ID NO: 132606 - DNA, 10 bp, Unknown
  misc_feature (1)..( 10): Result.003 file - promoters60/4281876
aatacacaaa

SEQ ID NO: 132607 - DNA, 10 bp, Unknown
  misc_feature (1)..( 10): Result.003 file - promoters60/4281876
gatcaagatt

SEQ ID NO: 132608 - DNA, 11 bp, Unknown
  misc_feature (1)..( 11): Result.003 file - promoters60/4281925
aaattaaaaca

SEQ ID NO: 132609 - DNA, 11 bp, Unknown
  misc_feature (1)..( 11): Result.003 file - promoters60/4281925
aaaataacaca

SEQ ID NO: 132610 - DNA, 11 bp, Unknown
  misc_feature (1)..( 11): Result.003 file - promoters60/4281925
taatcaaactc

SEQ ID NO: 132611 - DNA, 11 bp, Unknown
  misc_feature (1)..( 11): Result.003 file - promoters60/4281925
caataaaaatg

SEQ ID NO: 132612 - DNA, 11 bp, Unknown
  misc_feature (1)..( 11): Result.003 file - promoters60/4281925
aaattattatg

SEQ ID NO: 132613 - DNA, 10 bp, Unknown
  misc_feature (1)..( 10): Result.003 file - promoters60/4281925
taattttttt

SEQ ID NO: 132614 - DNA, 10 bp, Unknown
  misc_feature (1)..( 10): Result.003 file - promoters60/4281925
taaattttat

SEQ ID NO: 132615 - DNA, 10 bp, Unknown
  misc_feature (1)..( 10): Result.003 file - promoters60/4281925
aaattttgtt

SEQ ID NO: 132616 - DNA, 10 bp, Unknown
  misc_feature (1)..( 10): Result.003 file - promoters60/4281925
ttattttttt

SEQ ID NO: 132617 - DNA, 10 bp, Unknown
  misc_feature (1)..( 10): Result.003 file - promoters60/4281925
tacaagatag

SEQ ID NO: 132618 - DNA, 10 bp, Unknown
  misc_feature (1)..( 10): Result.003 file - promoters60/4281925
tacatgattt

SEQ ID NO: 132619 - DNA, 10 bp, Unknown
  misc_feature (1)..( 10): Result.003 file - promoters60/4281925
cacatgacat

SEQ ID NO: 132620 - DNA, 10 bp, Unknown
  misc_feature (1)..( 10): Result.003 file - promoters60/4281925
ttcatgattt

SEQ ID NO: 132621 - DNA, 11 bp, Unknown
  misc_feature (1)..( 11): Result.003 file - promoters60/4281925
ttataaatgta

SEQ ID NO: 132622 - DNA, 11 bp, Unknown
  misc_feature (1)..( 11): Result.003 file - promoters60/4281925
ctataaatatg

SEQ ID NO: 132623 - DNA, 11 bp, Unknown
  misc_feature (1)..( 11): Result.003 file - promoters60/4281925
atctaaaagta

SEQ ID NO: 132624 - DNA, 11 bp, Unknown
  misc_feature (1)..( 11): Result.003 file - promoters60/4281925
ttataaaaaac

SEQ ID NO: 132625 - DNA, 15 bp, Unknown
  misc_feature (1)..( 15): Result.003 file - promoters60/4281925
aaatttataaatgta

SEQ ID NO: 132626 - DNA, 15 bp, Unknown
  misc_feature (1)..( 15): Result.003 file - promoters60/4281925
taatttacatatcta

SEQ ID NO: 132627 - DNA, 15 bp, Unknown
  misc_feature (1)..( 15): Result.003 file - promoters60/4281925
tattttacttttcat

SEQ ID NO: 132628 - DNA, 15 bp, Unknown
  misc_feature (1)..( 15): Result.003 file - promoters60/4281925
aaattttttacaaga

SEQ ID NO: 132629 - DNA, 17 bp, Unknown
  misc_feature (1)..( 17): Result.003 file - promoters60/4281925
gtgtaatttttttctat

SEQ ID NO: 132630 - DNA, 17 bp, Unknown
  misc_feature (1)..( 17): Result.003 file - promoters60/4281925
aaattttgttttactat

SEQ ID NO: 132631 - DNA, 17 bp, Unknown
  misc_feature (1)..( 17): Result.003 file - promoters60/4281925
aatcattattttttttt

SEQ ID NO: 132632 - DNA, 17 bp, Unknown
  misc_feature (1)..( 17): Result.003 file - promoters60/4281925
atcattaatttgtttat

SEQ ID NO: 132633 - DNA, 11 bp, Unknown
  misc_feature (1)..( 11): Result.003 file - promoters60/4281925
caccatttttc

SEQ ID NO: 132634 - DNA, 11 bp, Unknown
  misc_feature (1)..( 11): Result.003 file - promoters60/4281925
tgaaatttttt

SEQ ID NO: 132635 - DNA, 11 bp, Unknown
  misc_feature (1)..( 11): Result.003 file - promoters60/4281925
aaatattttac

SEQ ID NO: 132636 - DNA, 11 bp, Unknown
  misc_feature (1)..( 11): Result.003 file - promoters60/4281925
aaaaatgttta

SEQ ID NO: 132637 - DNA, 12 bp, Unknown
  misc_feature (1)..( 12): Result.003 file - promoters60/4281961
tagataaaacag

SEQ ID NO: 132638 - DNA, 12 bp, Unknown
  misc_feature (1)..( 12): Result.003 file - promoters60/4281961
tagaaaaaaact

SEQ ID NO: 132639 - DNA, 12 bp, Unknown
  misc_feature (1)..( 12): Result.003 file - promoters60/4281961
tggttaaaacag

SEQ ID NO: 132640 - DNA, 12 bp, Unknown
  misc_feature (1)..( 12): Result.003 file - promoters60/4281961
cggaaagaacta

SEQ ID NO: 132641 - DNA, 12 bp, Unknown
  misc_feature (1)..( 12): Result.003 file - promoters60/4281961
ccaaacattaca

SEQ ID NO: 132642 - DNA, 12 bp, Unknown
  misc_feature (1)..( 12): Result.003 file - promoters60/4281961
acaaacgttact

SEQ ID NO: 132643 - DNA, 12 bp, Unknown
  misc_feature (1)..( 12): Result.003 file - promoters60/4281961
ttcagcattaca

SEQ ID NO: 132644 - DNA, 12 bp, Unknown
  misc_feature (1)..( 12): Result.003 file - promoters60/4281961
acaaaggttgtt

SEQ ID NO: 132645 - DNA, 10 bp, Unknown
  misc_feature (1)..( 10): Result.003 file - promoters60/4281961
tcgataaaat

SEQ ID NO: 132646 - DNA, 10 bp, Unknown
  misc_feature (1)..( 10): Result.003 file - promoters60/4281961
cctataaaag

SEQ ID NO: 132647 - DNA, 10 bp, Unknown
  misc_feature (1)..( 10): Result.003 file - promoters60/4281961
tcgttaaaag

SEQ ID NO: 132648 - DNA, 10 bp, Unknown
  misc_feature (1)..( 10): Result.003 file - promoters60/4281961
tttttaaaat

SEQ ID NO: 132649 - DNA, 10 bp, Unknown
  misc_feature (1)..( 10): Result.003 file - promoters60/4281961
ttcttaaaaa

SEQ ID NO: 132650 - DNA, 6 bp, Unknown
  misc_feature (1)..( 6): Result.003 file - promoters60/4281994
aatttt

SEQ ID NO: 132651 - DNA, 6 bp, Unknown
  misc_feature (1)..( 6): Result.003 file - promoters60/4281994
aatttt

SEQ ID NO: 132652 - DNA, 6 bp, Unknown
  misc_feature (1)..( 6): Result.003 file - promoters60/4281994
ttcaaa

SEQ ID NO: 132653 - DNA, 6 bp, Unknown
  misc_feature (1)..( 6): Result.003 file - promoters60/4281994
ttcaaa

SEQ ID NO: 132654 - DNA, 7 bp, Unknown
  misc_feature (1)..( 7): Result.003 file - promoters60/4281994
attcaaa

SEQ ID NO: 132655 - DNA, 7 bp, Unknown
  misc_feature (1)..( 7): Result.003 file - promoters60/4281994
atttaaa

SEQ ID NO: 132656 - DNA, 7 bp, Unknown
  misc_feature (1)..( 7): Result.003 file - promoters60/4281994
aaacaaa

SEQ ID NO: 132657 - DNA, 7 bp, Unknown
  misc_feature (1)..( 7): Result.003 file - promoters60/4281994
aaataaa

SEQ ID NO: 132658 - DNA, 7 bp, Unknown
  misc_feature (1)..( 7): Result.003 file - promoters60/4281994
aatattt

SEQ ID NO: 132659 - DNA, 7 bp, Unknown
  misc_feature (1)..( 7): Result.003 file - promoters60/4281994
tatattt

SEQ ID NO: 132660 - DNA, 7 bp, Unknown
  misc_feature (1)..( 7): Result.003 file - promoters60/4281994
aatatta

SEQ ID NO: 132661 - DNA, 8 bp, Unknown
  misc_feature (1)..( 8): Result.003 file - promoters60/4281994
agtagaat

SEQ ID NO: 132662 - DNA, 8 bp, Unknown
  misc_feature (1)..( 8): Result.003 file - promoters60/4281994
agtataat

SEQ ID NO: 132663 - DNA, 6 bp, Unknown
  misc_feature (1)..( 6): Result.003 file - promoters60/4281994
tttaaa

SEQ ID NO: 132664 - DNA, 6 bp, Unknown
  misc_feature (1)..( 6): Result.003 file - promoters60/4281994
tttaaa

SEQ ID NO: 132665 - DNA, 9 bp, Unknown
  misc_feature (1)..( 9): Result.003 file - promoters60/4281994
ataaaaatt

SEQ ID NO: 132666 - DNA, 9 bp, Unknown
  misc_feature (1)..( 9): Result.003 file - promoters60/4281994
ataaaatta

SEQ ID NO: 132667 - DNA, 9 bp, Unknown
  misc_feature (1)..( 9): Result.003 file - promoters60/4281994
ataatatta

SEQ ID NO: 132668 - DNA, 9 bp, Unknown
  misc_feature (1)..( 9): Result.003 file - promoters60/4281994
taaaaattt

SEQ ID NO: 132669 - DNA, 9 bp, Unknown
  misc_feature (1)..( 9): Result.003 file - promoters60/4281994
ataaaatta

SEQ ID NO: 132670 - DNA, 9 bp, Unknown
  misc_feature (1)..( 9): Result.003 file - promoters60/4281994
ataatatta

SEQ ID NO: 132671 - DNA, 9 bp, Unknown
  misc_feature (1)..( 9): Result.003 file - promoters60/4281994
attttaaag

SEQ ID NO: 132672 - DNA, 9 bp, Unknown
  misc_feature (1)..( 9): Result.003 file - promoters60/4281994
attttaatt

SEQ ID NO: 132673 - DNA, 9 bp, Unknown
  misc_feature (1)..( 9): Result.003 file - promoters60/4281994
atttcaaag

SEQ ID NO: 132674 - DNA, 7 bp, Unknown
  misc_feature (1)..( 7): Result.003 file - promoters60/4281994
ataatta

SEQ ID NO: 132675 - DNA, 7 bp, Unknown
  misc_feature (1)..( 7): Result.003 file - promoters60/4281994
atattta

SEQ ID NO: 132676 - DNA, 9 bp, Unknown
  misc_feature (1)..( 9): Result.003 file - promoters60/4281994
attaaatta

SEQ ID NO: 132677 - DNA, 9 bp, Unknown
  misc_feature (1)..( 9): Result.003 file - promoters60/4281994
tataactta

SEQ ID NO: 132678 - DNA, 9 bp, Unknown
  misc_feature (1)..( 9): Result.003 file - promoters60/4281994
tataaaact

SEQ ID NO: 132679 - DNA, 6 bp, Unknown
  misc_feature (1)..( 6): Result.003 file - promoters60/4281994
aaatta

SEQ ID NO: 132680 - DNA, 6 bp, Unknown
  misc_feature (1)..( 6): Result.003 file - promoters60/4281994
aaatta

SEQ ID NO: 132681 - DNA, 8 bp, Unknown
  misc_feature (1)..( 8): Result.003 file - promoters60/4281994
tattcata

SEQ ID NO: 132682 - DNA, 8 bp, Unknown
  misc_feature (1)..( 8): Result.003 file - promoters60/4281994
tattaata

SEQ ID NO: 132683 - DNA, 9 bp, Unknown
  misc_feature (1)..( 9): Result.003 file - promoters60/4281994
ataacttat

SEQ ID NO: 132684 - DNA, 9 bp, Unknown
  misc_feature (1)..( 9): Result.003 file - promoters60/4281994
ataatttat

SEQ ID NO: 132685 - DNA, 8 bp, Unknown
  misc_feature (1)..( 8): Result.003 file - promoters60/4281994
aaaaagaa

SEQ ID NO: 132686 - DNA, 8 bp, Unknown
  misc_feature (1)..( 8): Result.003 file - promoters60/4281994
aaaaagaa

SEQ ID NO: 132687 - DNA, 6 bp, Unknown
  misc_feature (1)..( 6): Result.003 file - promoters60/4281994
agtaaa

SEQ ID NO: 132688 - DNA, 6 bp, Unknown
  misc_feature (1)..( 6): Result.003 file - promoters60/4281994
agtaaa

SEQ ID NO: 132689 - DNA, 6 bp, Unknown
  misc_feature (1)..( 6): Result.003 file - promoters60/4281994
aaaaat

SEQ ID NO: 132690 - DNA, 6 bp, Unknown
  misc_feature (1)..( 6): Result.003 file - promoters60/4281994
aaaaat

SEQ ID NO: 132691 - DNA, 6 bp, Unknown
  misc_feature (1)..( 6): Result.003 file - promoters60/4281994
aataaa

SEQ ID NO: 132692 - DNA, 6 bp, Unknown
  misc_feature (1)..( 6): Result.003 file - promoters60/4281994
aataaa

SEQ ID NO: 132693 - DNA, 6 bp, Unknown
  misc_feature (1)..( 6): Result.003 file - promoters60/4281994
taattt

SEQ ID NO: 132694 - DNA, 6 bp, Unknown
  misc_feature (1)..( 6): Result.003 file - promoters60/4281994
taattt

SEQ ID NO: 132695 - DNA, 7 bp, Unknown
  misc_feature (1)..( 7): Result.003 file - promoters60/4281994
attcata

SEQ ID NO: 132696 - DNA, 7 bp, Unknown
  misc_feature (1)..( 7): Result.003 file - promoters60/4281994
attcata

SEQ ID NO: 132697 - DNA, 6 bp, Unknown
  misc_feature (1)..( 6): Result.003 file - promoters60/4281994
ctatat

SEQ ID NO: 132698 - DNA, 6 bp, Unknown
  misc_feature (1)..( 6): Result.003 file - promoters60/4281994
ctatat

SEQ ID NO: 132699 - DNA, 6 bp, Unknown
  misc_feature (1)..( 6): Result.003 file - promoters60/4281994
tatata

SEQ ID NO: 132700 - DNA, 6 bp, Unknown
  misc_feature (1)..( 6): Result.003 file - promoters60/4281994
tatata

SEQ ID NO: 132701 - DNA, 6 bp, Unknown
  misc_feature (1)..( 6): Result.003 file - promoters60/4281994
ttagaa

SEQ ID NO: 132702 - DNA, 6 bp, Unknown
  misc_feature (1)..( 6): Result.003 file - promoters60/4281994
ttagaa

SEQ ID NO: 132703 - DNA, 19 bp, Unknown
  misc_feature (1)..( 19): Result.003 file - promoters60/4281997
aacaaactacaaaagttta

SEQ ID NO: 132704 - DNA, 13 bp, Unknown
  misc_feature (1)..( 13): Result.003 file - promoters60/4281997
cagaaaatgtttt

SEQ ID NO: 132705 - DNA, 19 bp, Unknown
  misc_feature (1)..( 19): Result.003 file - promoters60/4281997
agtttagggaaaatggatc

SEQ ID NO: 132706 - DNA, 19 bp, Unknown
  misc_feature (1)..( 19): Result.003 file - promoters60/4281997
ccaacacattcaatatttt

SEQ ID NO: 132707 - DNA, 15 bp, Unknown
  misc_feature (1)..( 15): Result.003 file - promoters60/4281997
atcactgatccaaca

SEQ ID NO: 132708 - DNA, 15 bp, Unknown
  misc_feature (1)..( 15): Result.003 file - promoters60/4281997
atcactgatccaaca

SEQ ID NO: 132709 - DNA, 15 bp, Unknown
  misc_feature (1)..( 15): Result.003 file - promoters60/4281997
atcactgatccaaca

SEQ ID NO: 132710 - DNA, 7 bp, Unknown
  misc_feature (1)..( 7): Result.003 file - promoters60/4281997
aattatc

SEQ ID NO: 132711 - DNA, 7 bp, Unknown
  misc_feature (1)..( 7): Result.003 file - promoters60/4281997
cattatc

SEQ ID NO: 132712 - DNA, 7 bp, Unknown
  misc_feature (1)..( 7): Result.003 file - promoters60/4281997
cattata

SEQ ID NO: 132713 - DNA, 7 bp, Unknown
  misc_feature (1)..( 7): Result.003 file - promoters60/4281997
aattatc

SEQ ID NO: 132714 - DNA, 10 bp, Unknown
  misc_feature (1)..( 10): Result.003 file - promoters60/4282072
ctataatgaa

SEQ ID NO: 132715 - DNA, 10 bp, Unknown
  misc_feature (1)..( 10): Result.003 file - promoters60/4282072
ctatgatgaa

SEQ ID NO: 132716 - DNA, 6 bp, Unknown
  misc_feature (1)..( 6): Result.003 file - promoters60/4282072
atttgt

SEQ ID NO: 132717 - DNA, 6 bp, Unknown
  misc_feature (1)..( 6): Result.003 file - promoters60/4282072
atttgt

SEQ ID NO: 132718 - DNA, 8 bp, Unknown
  misc_feature (1)..( 8): Result.003 file - promoters60/4282072
tatgtttg

SEQ ID NO: 132719 - DNA, 8 bp, Unknown
  misc_feature (1)..( 8): Result.003 file - promoters60/4282072
tatgtttg

SEQ ID NO: 132720 - DNA, 6 bp, Unknown
  misc_feature (1)..( 6): Result.003 file - promoters60/4282072
actata

SEQ ID NO: 132721 - DNA, 6 bp, Unknown
  misc_feature (1)..( 6): Result.003 file - promoters60/4282072
actata

SEQ ID NO: 132722 - DNA, 7 bp, Unknown
  misc_feature (1)..( 7): Result.003 file - promoters60/4282072
caaaaac

SEQ ID NO: 132723 - DNA, 7 bp, Unknown
  misc_feature (1)..( 7): Result.003 file - promoters60/4282072
caacaac

SEQ ID NO: 132724 - DNA, 7 bp, Unknown
  misc_feature (1)..( 7): Result.003 file - promoters60/4282072
caaaatc

SEQ ID NO: 132725 - DNA, 7 bp, Unknown
  misc_feature (1)..( 7): Result.003 file - promoters60/4282072
caacatc

SEQ ID NO: 132726 - DNA, 9 bp, Unknown
  misc_feature (1)..( 9): Result.003 file - promoters60/4282072
actacaaac

SEQ ID NO: 132727 - DNA, 9 bp, Unknown
  misc_feature (1)..( 9): Result.003 file - promoters60/4282072
actccaaac

SEQ ID NO: 132728 - DNA, 6 bp, Unknown
  misc_feature (1)..( 6): Result.003 file - promoters60/4282072
aaaact

SEQ ID NO: 132729 - DNA, 6 bp, Unknown
  misc_feature (1)..( 6): Result.003 file - promoters60/4282072
aaaact

SEQ ID NO: 132730 - DNA, 8 bp, Unknown
  misc_feature (1)..( 8): Result.003 file - promoters60/4282072
aacaatat

SEQ ID NO: 132731 - DNA, 8 bp, Unknown
  misc_feature (1)..( 8): Result.003 file - promoters60/4282072
aaccatat

SEQ ID NO: 132732 - DNA, 8 bp, Unknown
  misc_feature (1)..( 8): Result.003 file - promoters60/4282072
aggcaaat

SEQ ID NO: 132733 - DNA, 8 bp, Unknown
  misc_feature (1)..( 8): Result.003 file - promoters60/4282072
agggaaat

SEQ ID NO: 132734 - DNA, 10 bp, Unknown
  misc_feature (1)..( 10): Result.003 file - promoters60/4282072
cagtttcgga

SEQ ID NO: 132735 - DNA, 10 bp, Unknown
  misc_feature (1)..( 10): Result.003 file - promoters60/4282072
cagtgtcgga

SEQ ID NO: 132736 - DNA, 9 bp, Unknown
  misc_feature (1)..( 9): Result.003 file - promoters60/4282072
ttttgatta

SEQ ID NO: 132737 - DNA, 9 bp, Unknown
  misc_feature (1)..( 9): Result.003 file - promoters60/4282072
ttttgttta

SEQ ID NO: 132738 - DNA, 6 bp, Unknown
  misc_feature (1)..( 6): Result.003 file - promoters60/4282072
taaaca

SEQ ID NO: 132739 - DNA, 6 bp, Unknown
  misc_feature (1)..( 6): Result.003 file - promoters60/4282072
taaaca

SEQ ID NO: 132740 - DNA, 7 bp, Unknown
  misc_feature (1)..( 7): Result.003 file - promoters60/4282072
taaatct

SEQ ID NO: 132741 - DNA, 7 bp, Unknown
  misc_feature (1)..( 7): Result.003 file - promoters60/4282072
taaatct

SEQ ID NO: 132742 - DNA, 8 bp, Unknown
  misc_feature (1)..( 8): Result.003 file - promoters60/4282072
tacttact

SEQ ID NO: 132743 - DNA, 8 bp, Unknown
  misc_feature (1)..( 8): Result.003 file - promoters60/4282072
tactaact

SEQ ID NO: 132744 - DNA, 10 bp, Unknown
  misc_feature (1)..( 10): Result.003 file - promoters60/4282072
aaaaatgaag

SEQ ID NO: 132745 - DNA, 10 bp, Unknown
  misc_feature (1)..( 10): Result.003 file - promoters60/4282072
aaaaataaag

SEQ ID NO: 132746 - DNA, 7 bp, Unknown
  misc_feature (1)..( 7): Result.003 file - promoters60/4282072
agaaaag

SEQ ID NO: 132747 - DNA, 7 bp, Unknown
  misc_feature (1)..( 7): Result.003 file - promoters60/4282072
agaaaag

SEQ ID NO: 132748 - DNA, 9 bp, Unknown
  misc_feature (1)..( 9): Result.003 file - promoters60/4282072
caaagaaga

SEQ ID NO: 132749 - DNA, 9 bp, Unknown
  misc_feature (1)..( 9): Result.003 file - promoters60/4282072
caaaaaaga

SEQ ID NO: 132750 - DNA, 10 bp, Unknown
  misc_feature (1)..( 10): Result.003 file - promoters60/4282072
attaaaaaaa

SEQ ID NO: 132751 - DNA, 10 bp, Unknown
  misc_feature (1)..( 10): Result.003 file - promoters60/4282072
attaaaaaaa

SEQ ID NO: 132752 - DNA, 7 bp, Unknown
  misc_feature (1)..( 7): Result.003 file - promoters60/4282126
tctgcaa

SEQ ID NO: 132753 - DNA, 7 bp, Unknown
  misc_feature (1)..( 7): Result.003 file - promoters60/4282126
tcttcaa

SEQ ID NO: 132754 - DNA, 8 bp, Unknown
  misc_feature (1)..( 8): Result.003 file - promoters60/4282126
catataca

SEQ ID NO: 132755 - DNA, 8 bp, Unknown
  misc_feature (1)..( 8): Result.003 file - promoters60/4282126
cataaaca

SEQ ID NO: 132756 - DNA, 8 bp, Unknown
  misc_feature (1)..( 8): Result.003 file - promoters60/4282126
tacgattt

SEQ ID NO: 132757 - DNA, 8 bp, Unknown
  misc_feature (1)..( 8): Result.003 file - promoters60/4282126
tacaattt

SEQ ID NO: 132758 - DNA, 6 bp, Unknown
  misc_feature (1)..( 6): Result.003 file - promoters60/4282126
aaacat

SEQ ID NO: 132759 - DNA, 6 bp, Unknown
  misc_feature (1)..( 6): Result.003 file - promoters60/4282126
aaacat

SEQ ID NO: 132760 - DNA, 6 bp, Unknown
  misc_feature (1)..( 6): Result.003 file - promoters60/4282126
taattg

SEQ ID NO: 132761 - DNA, 6 bp, Unknown
  misc_feature (1)..( 6): Result.003 file - promoters60/4282126
taattg

SEQ ID NO: 132762 - DNA, 7 bp, Unknown
  misc_feature (1)..( 7): Result.003 file - promoters60/4282126
ttagcat

SEQ ID NO: 132763 - DNA, 7 bp, Unknown
  misc_feature (1)..( 7): Result.003 file - promoters60/4282126
ttatcat

SEQ ID NO: 132764 - DNA, 11 bp, Unknown
  misc_feature (1)..( 11): Result.003 file - promoters60/4282126
aatttattgtt

SEQ ID NO: 132765 - DNA, 11 bp, Unknown
  misc_feature (1)..( 11): Result.003 file - promoters60/4282126
aatttatagtt

SEQ ID NO: 132766 - DNA, 11 bp, Unknown
  misc_feature (1)..( 11): Result.003 file - promoters60/4282126
tctttatttcc

SEQ ID NO: 132767 - DNA, 8 bp, Unknown
  misc_feature (1)..( 8): Result.003 file - promoters60/4282126
tttgtaat

SEQ ID NO: 132768 - DNA, 8 bp, Unknown
  misc_feature (1)..( 8): Result.003 file - promoters60/4282126
tttctaat

SEQ ID NO: 132769 - DNA, 8 bp, Unknown
  misc_feature (1)..( 8): Result.003 file - promoters60/4282126
tttgcaat

SEQ ID NO: 132770 - DNA, 9 bp, Unknown
  misc_feature (1)..( 9): Result.003 file - promoters60/4282126
aagctaatc

SEQ ID NO: 132771 - DNA, 9 bp, Unknown
  misc_feature (1)..( 9): Result.003 file - promoters60/4282126
aagcaaatc

SEQ ID NO: 132772 - DNA, 7 bp, Unknown
  misc_feature (1)..( 7): Result.003 file - promoters60/4282126
ttttttt

SEQ ID NO: 132773 - DNA, 7 bp, Unknown
  misc_feature (1)..( 7): Result.003 file - promoters60/4282126
tttgttt

SEQ ID NO: 132774 - DNA, 7 bp, Unknown
  misc_feature (1)..( 7): Result.003 file - promoters60/4282126
tttagat

SEQ ID NO: 132775 - DNA, 7 bp, Unknown
  misc_feature (1)..( 7): Result.003 file - promoters60/4282126
ttttgat

SEQ ID NO: 132776 - DNA, 8 bp, Unknown
  misc_feature (1)..( 8): Result.003 file - promoters60/4282126
aagttaga

SEQ ID NO: 132777 - DNA, 8 bp, Unknown
  misc_feature (1)..( 8): Result.003 file - promoters60/4282126
aagtcaga

SEQ ID NO: 132778 - DNA, 7 bp, Unknown
  misc_feature (1)..( 7): Result.003 file - promoters60/4282126
aaattta

SEQ ID NO: 132779 - DNA, 7 bp, Unknown
  misc_feature (1)..( 7): Result.003 file - promoters60/4282126
aaagtta

SEQ ID NO: 132780 - DNA, 7 bp, Unknown
  misc_feature (1)..( 7): Result.003 file - promoters60/4282126
ctcagac

SEQ ID NO: 132781 - DNA, 7 bp, Unknown
  misc_feature (1)..( 7): Result.003 file - promoters60/4282126
ctccgac

SEQ ID NO: 132782 - DNA, 6 bp, Unknown
  misc_feature (1)..( 6): Result.003 file - promoters60/4282126
cgagag

SEQ ID NO: 132783 - DNA, 6 bp, Unknown
  misc_feature (1)..( 6): Result.003 file - promoters60/4282126
cgagag

SEQ ID NO: 132784 - DNA, 8 bp, Unknown
  misc_feature (1)..( 8): Result.003 file - promoters60/4282126
ttgggaga

SEQ ID NO: 132785 - DNA, 8 bp, Unknown
  misc_feature (1)..( 8): Result.003 file - promoters60/4282126
ttgggaga

SEQ ID NO: 132786 - DNA, 6 bp, Unknown
  misc_feature (1)..( 6): Result.003 file - promoters60/4282126
gtgaca

SEQ ID NO: 132787 - DNA, 6 bp, Unknown
  misc_feature (1)..( 6): Result.003 file - promoters60/4282126
gtgaca

SEQ ID NO: 132788 - DNA, 7 bp, Unknown
  misc_feature (1)..( 7): Result.003 file - promoters60/4282126
agaccaa

SEQ ID NO: 132789 - DNA, 7 bp, Unknown
  misc_feature (1)..( 7): Result.003 file - promoters60/4282126
agagcaa

SEQ ID NO: 132790 - DNA, 9 bp, Unknown
  misc_feature (1)..( 9): Result.003 file - promoters60/4282126
aaagtaaac

SEQ ID NO: 132791 - DNA, 9 bp, Unknown
  misc_feature (1)..( 9): Result.003 file - promoters60/4282126
aaactaaac

SEQ ID NO: 132792 - DNA, 7 bp, Unknown
  misc_feature (1)..( 7): Result.003 file - promoters60/4282126
agaggaa

SEQ ID NO: 132793 - DNA, 7 bp, Unknown
  misc_feature (1)..( 7): Result.003 file - promoters60/4282126
agaagaa

SEQ ID NO: 132794 - DNA, 7 bp, Unknown
  misc_feature (1)..( 7): Result.003 file - promoters60/4282145
tcaaatg

SEQ ID NO: 132795 - DNA, 7 bp, Unknown
  misc_feature (1)..( 7): Result.003 file - promoters60/4282145
tcaaatg

SEQ ID NO: 132796 - DNA, 6 bp, Unknown
  misc_feature (1)..( 6): Result.003 file - promoters60/4282145
cataat

SEQ ID NO: 132797 - DNA, 6 bp, Unknown
  misc_feature (1)..( 6): Result.003 file - promoters60/4282145
cataat

SEQ ID NO: 132798 - DNA, 10 bp, Unknown
  misc_feature (1)..( 10): Result.003 file - promoters60/4282145
agagatgatt

SEQ ID NO: 132799 - DNA, 10 bp, Unknown
  misc_feature (1)..( 10): Result.003 file - promoters60/4282145
gaaaatgatt

SEQ ID NO: 132800 - DNA, 10 bp, Unknown
  misc_feature (1)..( 10): Result.003 file - promoters60/4282145
gaaactgata

SEQ ID NO: 132801 - DNA, 8 bp, Unknown
  misc_feature (1)..( 8): Result.003 file - promoters60/4282145
attatacg

SEQ ID NO: 132802 - DNA, 8 bp, Unknown
  misc_feature (1)..( 8): Result.003 file - promoters60/4282145
attagacg

SEQ ID NO: 132803 - DNA, 6 bp, Unknown
  misc_feature (1)..( 6): Result.003 file - promoters60/4282145
caaaaa

SEQ ID NO: 132804 - DNA, 6 bp, Unknown
  misc_feature (1)..( 6): Result.003 file - promoters60/4282145
caaaaa

SEQ ID NO: 132805 - DNA, 8 bp, Unknown
  misc_feature (1)..( 8): Result.003 file - promoters60/4282145
aaattaat

SEQ ID NO: 132806 - DNA, 8 bp, Unknown
  misc_feature (1)..( 8): Result.003 file - promoters60/4282145
aaactaat

SEQ ID NO: 132807 - DNA, 7 bp, Unknown
  misc_feature (1)..( 7): Result.003 file - promoters60/4282145
gttaaac

SEQ ID NO: 132808 - DNA, 7 bp, Unknown
  misc_feature (1)..( 7): Result.003 file - promoters60/4282145
gtttaac

SEQ ID NO: 132809 - DNA, 7 bp, Unknown
  misc_feature (1)..( 7): Result.003 file - promoters60/4282145
attttat

SEQ ID NO: 132810 - DNA, 7 bp, Unknown
  misc_feature (1)..( 7): Result.003 file - promoters60/4282145
attttat

SEQ ID NO: 132811 - DNA, 7 bp, Unknown
  misc_feature (1)..( 7): Result.003 file - promoters60/4282145
tttaaaa

SEQ ID NO: 132812 - DNA, 7 bp, Unknown
  misc_feature (1)..( 7): Result.003 file - promoters60/4282145
tttaaaa

SEQ ID NO: 132813 - DNA, 6 bp, Unknown
  misc_feature (1)..( 6): Result.003 file - promoters60/4282145
aatttg

SEQ ID NO: 132814 - DNA, 6 bp, Unknown
  misc_feature (1)..( 6): Result.003 file - promoters60/4282145
aatttg

SEQ ID NO: 132815 - DNA, 7 bp, Unknown
  misc_feature (1)..( 7): Result.003 file - promoters60/4282145
ttagtaa

SEQ ID NO: 132816 - DNA, 7 bp, Unknown
  misc_feature (1)..( 7): Result.003 file - promoters60/4282145
ttaataa

SEQ ID NO: 132817 - DNA, 7 bp, Unknown
  misc_feature (1)..( 7): Result.003 file - promoters60/4282145
tacgata

SEQ ID NO: 132818 - DNA, 7 bp, Unknown
  misc_feature (1)..( 7): Result.003 file - promoters60/4282145
tacaata

SEQ ID NO: 132819 - DNA, 8 bp, Unknown
  misc_feature (1)..( 8): Result.003 file - promoters60/4282145
acacaaca

SEQ ID NO: 132820 - DNA, 8 bp, Unknown
  misc_feature (1)..( 8): Result.003 file - promoters60/4282145
acaaaaca

SEQ ID NO: 132821 - DNA, 6 bp, Unknown
  misc_feature (1)..( 6): Result.003 file - promoters60/4282145
gacaaa

SEQ ID NO: 132822 - DNA, 6 bp, Unknown
  misc_feature (1)..( 6): Result.003 file - promoters60/4282145
gacaaa

SEQ ID NO: 132823 - DNA, 7 bp, Unknown
  misc_feature (1)..( 7): Result.003 file - promoters60/4282145
atactaa

SEQ ID NO: 132824 - DNA, 7 bp, Unknown
  misc_feature (1)..( 7): Result.003 file - promoters60/4282145
ataataa

SEQ ID NO: 132825 - DNA, 6 bp, Unknown
  misc_feature (1)..( 6): Result.003 file - promoters60/4282145
cttata

SEQ ID NO: 132826 - DNA, 6 bp, Unknown
  misc_feature (1)..( 6): Result.003 file - promoters60/4282145
cttata

SEQ ID NO: 132827 - DNA, 9 bp, Unknown
  misc_feature (1)..( 9): Result.003 file - promoters60/4282145
attttaaaa

SEQ ID NO: 132828 - DNA, 9 bp, Unknown
  misc_feature (1)..( 9): Result.003 file - promoters60/4282145
attttaaaa

SEQ ID NO: 132829 - DNA, 8 bp, Unknown
  misc_feature (1)..( 8): Result.003 file - promoters60/4282145
taataaaa

SEQ ID NO: 132830 - DNA, 8 bp, Unknown
  misc_feature (1)..( 8): Result.003 file - promoters60/4282145
aaattaaa

SEQ ID NO: 132831 - DNA, 8 bp, Unknown
  misc_feature (1)..( 8): Result.003 file - promoters60/4282145
aaagtaat

SEQ ID NO: 132832 - DNA, 6 bp, Unknown
  misc_feature (1)..( 6): Result.003 file - promoters60/4282145
ctacat

SEQ ID NO: 132833 - DNA, 6 bp, Unknown
  misc_feature (1)..( 6): Result.003 file - promoters60/4282145
ctacat

SEQ ID NO: 132834 - DNA, 6 bp, Unknown
  misc_feature (1)..( 6): Result.003 file - promoters60/4282145
aaatta

SEQ ID NO: 132835 - DNA, 6 bp, Unknown
  misc_feature (1)..( 6): Result.003 file - promoters60/4282145
aaatta

SEQ ID NO: 132836 - DNA, 9 bp, Unknown
  misc_feature (1)..( 9): Result.003 file - promoters60/4282145
atccatata

SEQ ID NO: 132837 - DNA, 9 bp, Unknown
  misc_feature (1)..( 9): Result.003 file - promoters60/4282145
atccttata

SEQ ID NO: 132838 - DNA, 7 bp, Unknown
  misc_feature (1)..( 7): Result.003 file - promoters60/4282145
tatgaaa

SEQ ID NO: 132839 - DNA, 7 bp, Unknown
  misc_feature (1)..( 7): Result.003 file - promoters60/4282145
tataaaa

SEQ ID NO: 132840 - DNA, 12 bp, Unknown
  misc_feature (1)..( 12): Result.003 file - promoters60/4282186
ccgagcttgtgc

SEQ ID NO: 132841 - DNA, 12 bp, Unknown
  misc_feature (1)..( 12): Result.003 file - promoters60/4282186
ccgatcttgtat

SEQ ID NO: 132842 - DNA, 12 bp, Unknown
  misc_feature (1)..( 12): Result.003 file - promoters60/4282186
tttgtcttatgc

SEQ ID NO: 132843 - DNA, 6 bp, Unknown
  misc_feature (1)..( 6): Result.003 file - promoters60/4282186
gcgtca

SEQ ID NO: 132844 - DNA, 6 bp, Unknown
  misc_feature (1)..( 6): Result.003 file - promoters60/4282186
gcgtca

SEQ ID NO: 132845 - DNA, 7 bp, Unknown
  misc_feature (1)..( 7): Result.003 file - promoters60/4282186
caaacta

SEQ ID NO: 132846 - DNA, 7 bp, Unknown
  misc_feature (1)..( 7): Result.003 file - promoters60/4282186
caaactt

SEQ ID NO: 132847 - DNA, 7 bp, Unknown
  misc_feature (1)..( 7): Result.003 file - promoters60/4282186
aaaactt

SEQ ID NO: 132848 - DNA, 8 bp, Unknown
  misc_feature (1)..( 8): Result.003 file - promoters60/4282186
caaactct

SEQ ID NO: 132849 - DNA, 8 bp, Unknown
  misc_feature (1)..( 8): Result.003 file - promoters60/4282186
caaaatct

SEQ ID NO: 132850 - DNA, 6 bp, Unknown
  misc_feature (1)..( 6): Result.003 file - promoters60/4282186
tacaca

SEQ ID NO: 132851 - DNA, 6 bp, Unknown
  misc_feature (1)..( 6): Result.003 file - promoters60/4282186
tacaca

SEQ ID NO: 132852 - DNA, 7 bp, Unknown
  misc_feature (1)..( 7): Result.003 file - promoters60/4282186
ttggttt

SEQ ID NO: 132853 - DNA, 7 bp, Unknown
  misc_feature (1)..( 7): Result.003 file - promoters60/4282186
ttgtttt

SEQ ID NO: 132854 - DNA, 6 bp, Unknown
  misc_feature (1)..( 6): Result.003 file - promoters60/4282186
ttggtt

SEQ ID NO: 132855 - DNA, 6 bp, Unknown
  misc_feature (1)..( 6): Result.003 file - promoters60/4282186
ttggtt

SEQ ID NO: 132856 - DNA, 9 bp, Unknown
  misc_feature (1)..( 9): Result.003 file - promoters60/4282186
agccaatca

SEQ ID NO: 132857 - DNA, 9 bp, Unknown
  misc_feature (1)..( 9): Result.003 file - promoters60/4282186
agctaatca

SEQ ID NO: 132858 - DNA, 6 bp, Unknown
  misc_feature (1)..( 6): Result.003 file - promoters60/4282186
tgttta

SEQ ID NO: 132859 - DNA, 6 bp, Unknown
  misc_feature (1)..( 6): Result.003 file - promoters60/4282186
tgttta

SEQ ID NO: 132860 - DNA, 6 bp, Unknown
  misc_feature (1)..( 6): Result.003 file - promoters60/4282186
tgaatt

SEQ ID NO: 132861 - DNA, 6 bp, Unknown
  misc_feature (1)..( 6): Result.003 file - promoters60/4282186
tgaatt

SEQ ID NO: 132862 - DNA, 8 bp, Unknown
  misc_feature (1)..( 8): Result.003 file - promoters60/4282186
ttaacaga

SEQ ID NO: 132863 - DNA, 8 bp, Unknown
  misc_feature (1)..( 8): Result.003 file - promoters60/4282186
ttaaaaga

SEQ ID NO: 132864 - DNA, 8 bp, Unknown
  misc_feature (1)..( 8): Result.003 file - promoters60/4282186
tgtctttc

SEQ ID NO: 132865 - DNA, 8 bp, Unknown
  misc_feature (1)..( 8): Result.003 file - promoters60/4282186
tgtcgttc

SEQ ID NO: 132866 - DNA, 8 bp, Unknown
  misc_feature (1)..( 8): Result.003 file - promoters60/4282186
caaagaaa

SEQ ID NO: 132867 - DNA, 8 bp, Unknown
  misc_feature (1)..( 8): Result.003 file - promoters60/4282186
caaataaa

SEQ ID NO: 132868 - DNA, 6 bp, Unknown
  misc_feature (1)..( 6): Result.003 file - promoters60/4282186
gaaagt

SEQ ID NO: 132869 - DNA, 6 bp, Unknown
  misc_feature (1)..( 6): Result.003 file - promoters60/4282186
gaaagt

SEQ ID NO: 132870 - DNA, 15 bp, Unknown
  misc_feature (1)..( 15): Result.003 file - promoters60/4282186
atcaaattagaaaat

SEQ ID NO: 132871 - DNA, 15 bp, Unknown
  misc_feature (1)..( 15): Result.003 file - promoters60/4282186
atcaaaatagacaat

SEQ ID NO: 132872 - DNA, 7 bp, Unknown
  misc_feature (1)..( 7): Result.003 file - promoters60/4282186
gaaccaa

SEQ ID NO: 132873 - DNA, 7 bp, Unknown
  misc_feature (1)..( 7): Result.003 file - promoters60/4282186
gaaacaa

SEQ ID NO: 132874 - DNA, 8 bp, Unknown
  misc_feature (1)..( 8): Result.003 file - promoters60/4282186
tataaaaa

SEQ ID NO: 132875 - DNA, 8 bp, Unknown
  misc_feature (1)..( 8): Result.003 file - promoters60/4282186
tatataaa

SEQ ID NO: 132876 - DNA, 8 bp, Unknown
  misc_feature (1)..( 8): Result.003 file - promoters60/4282186
tctaatct

SEQ ID NO: 132877 - DNA, 8 bp, Unknown
  misc_feature (1)..( 8): Result.003 file - promoters60/4282186
tctattct

SEQ ID NO: 132878 - DNA, 7 bp, Unknown
  misc_feature (1)..( 7): Result.003 file - promoters60/4282186
aataaaa

SEQ ID NO: 132879 - DNA, 7 bp, Unknown
  misc_feature (1)..( 7): Result.003 file - promoters60/4282186
aattaaa

SEQ ID NO: 132880 - DNA, 9 bp, Unknown
  misc_feature (1)..( 9): Result.003 file - promoters60/4282202
gaagttttg

SEQ ID NO: 132881 - DNA, 9 bp, Unknown
  misc_feature (1)..( 9): Result.003 file - promoters60/4282202
aaagtgttg

SEQ ID NO: 132882 - DNA, 9 bp, Unknown
  misc_feature (1)..( 9): Result.003 file - promoters60/4282202
aaactgttc

SEQ ID NO: 132883 - DNA, 6 bp, Unknown
  misc_feature (1)..( 6): Result.003 file - promoters60/4282202
gagaat

SEQ ID NO: 132884 - DNA, 6 bp, Unknown
  misc_feature (1)..( 6): Result.003 file - promoters60/4282202
gagaat

SEQ ID NO: 132885 - DNA, 8 bp, Unknown
  misc_feature (1)..( 8): Result.003 file - promoters60/4282202
tctaatgg

SEQ ID NO: 132886 - DNA, 8 bp, Unknown
  misc_feature (1)..( 8): Result.003 file - promoters60/4282202
tctaatgg

SEQ ID NO: 132887 - DNA, 8 bp, Unknown
  misc_feature (1)..( 8): Result.003 file - promoters60/4282202
caatttgt

SEQ ID NO: 132888 - DNA, 8 bp, Unknown
  misc_feature (1)..( 8): Result.003 file - promoters60/4282202
taatatgt

SEQ ID NO: 132889 - DNA, 8 bp, Unknown
  misc_feature (1)..( 8): Result.003 file - promoters60/4282202
caatttca

SEQ ID NO: 132890 - DNA, 15 bp, Unknown
  misc_feature (1)..( 15): Result.003 file - promoters60/4282202
aaataaaaaacaaaa

SEQ ID NO: 132891 - DNA, 15 bp, Unknown
  misc_feature (1)..( 15): Result.003 file - promoters60/4282202
aaatagaaaacatac

SEQ ID NO: 132892 - DNA, 15 bp, Unknown
  misc_feature (1)..( 15): Result.003 file - promoters60/4282202
caaccaaaaccatac

SEQ ID NO: 132893 - DNA, 6 bp, Unknown
  misc_feature (1)..( 6): Result.003 file - promoters60/4282202
cctcca

SEQ ID NO: 132894 - DNA, 6 bp, Unknown
  misc_feature (1)..( 6): Result.003 file - promoters60/4282202
cctcca

SEQ ID NO: 132895 - DNA, 6 bp, Unknown
  misc_feature (1)..( 6): Result.003 file - promoters60/4282202
gttttc

SEQ ID NO: 132896 - DNA, 6 bp, Unknown
  misc_feature (1)..( 6): Result.003 file - promoters60/4282202
gttttc

SEQ ID NO: 132897 - DNA, 11 bp, Unknown
  misc_feature (1)..( 11): Result.003 file - promoters60/4282202
agacaactttt

SEQ ID NO: 132898 - DNA, 11 bp, Unknown
  misc_feature (1)..( 11): Result.003 file - promoters60/4282202
agaaaactgtt

SEQ ID NO: 132899 - DNA, 11 bp, Unknown
  misc_feature (1)..( 11): Result.003 file - promoters60/4282202
cagaaagtgtt

SEQ ID NO: 132900 - DNA, 8 bp, Unknown
  misc_feature (1)..( 8): Result.003 file - promoters60/4282202
ttatcgta

SEQ ID NO: 132901 - DNA, 8 bp, Unknown
  misc_feature (1)..( 8): Result.003 file - promoters60/4282202
ttaacgta

SEQ ID NO: 132902 - DNA, 6 bp, Unknown
  misc_feature (1)..( 6): Result.003 file - promoters60/4282202
ttgatt

SEQ ID NO: 132903 - DNA, 6 bp, Unknown
  misc_feature (1)..( 6): Result.003 file - promoters60/4282202
ttgatt

SEQ ID NO: 132904 - DNA, 7 bp, Unknown
  misc_feature (1)..( 7): Result.003 file - promoters60/4282202
gtttttg

SEQ ID NO: 132905 - DNA, 7 bp, Unknown
  misc_feature (1)..( 7): Result.003 file - promoters60/4282202
gttgttg

SEQ ID NO: 132906 - DNA, 6 bp, Unknown
  misc_feature (1)..( 6): Result.003 file - promoters60/4282202
aaatta

SEQ ID NO: 132907 - DNA, 6 bp, Unknown
  misc_feature (1)..( 6): Result.003 file - promoters60/4282202
aaatta

SEQ ID NO: 132908 - DNA, 8 bp, Unknown
  misc_feature (1)..( 8): Result.003 file - promoters60/4282202
tttgatta

SEQ ID NO: 132909 - DNA, 8 bp, Unknown
  misc_feature (1)..( 8): Result.003 file - promoters60/4282202
tttaatta

SEQ ID NO: 132910 - DNA, 6 bp, Unknown
  misc_feature (1)..( 6): Result.003 file - promoters60/4282202
caaaac

SEQ ID NO: 132911 - DNA, 6 bp, Unknown
  misc_feature (1)..( 6): Result.003 file - promoters60/4282202
caaaac

SEQ ID NO: 132912 - DNA, 6 bp, Unknown
  misc_feature (1)..( 6): Result.003 file - promoters60/4282202
ttctta

SEQ ID NO: 132913 - DNA, 6 bp, Unknown
  misc_feature (1)..( 6): Result.003 file - promoters60/4282202
ttctta

SEQ ID NO: 132914 - DNA, 6 bp, Unknown
  misc_feature (1)..( 6): Result.003 file - promoters60/4282202
aacctc

SEQ ID NO: 132915 - DNA, 6 bp, Unknown
  misc_feature (1)..( 6): Result.003 file - promoters60/4282202
aacctc

SEQ ID NO: 132916 - DNA, 6 bp, Unknown
  misc_feature (1)..( 6): Result.003 file - promoters60/4282202
ttggat

SEQ ID NO: 132917 - DNA, 6 bp, Unknown
  misc_feature (1)..( 6): Result.003 file - promoters60/4282202
ttggat

SEQ ID NO: 132918 - DNA, 6 bp, Unknown
  misc_feature (1)..( 6): Result.003 file - promoters60/4282202
tcaaca

SEQ ID NO: 132919 - DNA, 6 bp, Unknown
  misc_feature (1)..( 6): Result.003 file - promoters60/4282202
tcaaca

SEQ ID NO: 132920 - DNA, 6 bp, Unknown
  misc_feature (1)..( 6): Result.003 file - promoters60/4282202
gtttgt

SEQ ID NO: 132921 - DNA, 6 bp, Unknown
  misc_feature (1)..( 6): Result.003 file - promoters60/4282202
gtttgt

SEQ ID NO: 132922 - DNA, 6 bp, Unknown
  misc_feature (1)..( 6): Result.003 file - promoters60/4282202
cttcac

SEQ ID NO: 132923 - DNA, 6 bp, Unknown
  misc_feature (1)..( 6): Result.003 file - promoters60/4282202
cttcac

SEQ ID NO: 132924 - DNA, 9 bp, Unknown
  misc_feature (1)..( 9): Result.003 file - promoters60/4282308
taatattat

SEQ ID NO: 132925 - DNA, 9 bp, Unknown
  misc_feature (1)..( 9): Result.003 file - promoters60/4282308
taatcttat

SEQ ID NO: 132926 - DNA, 8 bp, Unknown
  misc_feature (1)..( 8): Result.003 file - promoters60/4282308
gttacaat

SEQ ID NO: 132927 - DNA, 8 bp, Unknown
  misc_feature (1)..( 8): Result.003 file - promoters60/4282308
gttccaat

SEQ ID NO: 132928 - DNA, 8 bp, Unknown
  misc_feature (1)..( 8): Result.003 file - promoters60/4282308
gttacaag

SEQ ID NO: 132929 - DNA, 7 bp, Unknown
  misc_feature (1)..( 7): Result.003 file - promoters60/4282308
ggaaatt

SEQ ID NO: 132930 - DNA, 7 bp, Unknown
  misc_feature (1)..( 7): Result.003 file - promoters60/4282308
ggatatt

SEQ ID NO: 132931 - DNA, 10 bp, Unknown
  misc_feature (1)..( 10): Result.003 file - promoters60/4282308
caattaatac

SEQ ID NO: 132932 - DNA, 10 bp, Unknown
  misc_feature (1)..( 10): Result.003 file - promoters60/4282308
tgattattac

SEQ ID NO: 132933 - DNA, 10 bp, Unknown
  misc_feature (1)..( 10): Result.003 file - promoters60/4282308
tgattattgc

SEQ ID NO: 132934 - DNA, 14 bp, Unknown
  misc_feature (1)..( 14): Result.003 file - promoters60/4282308
aatgagtaatatac

SEQ ID NO: 132935 - DNA, 14 bp, Unknown
  misc_feature (1)..( 14): Result.003 file - promoters60/4282308
aataagttatatac

SEQ ID NO: 132936 - DNA, 14 bp, Unknown
  misc_feature (1)..( 14): Result.003 file - promoters60/4282308
cctaatttatcatt

SEQ ID NO: 132937 - DNA, 8 bp, Unknown
  misc_feature (1)..( 8): Result.003 file - promoters60/4282308
acaacaca

SEQ ID NO: 132938 - DNA, 8 bp, Unknown
  misc_feature (1)..( 8): Result.003 file - promoters60/4282308
acaagaca

SEQ ID NO: 132939 - DNA, 6 bp, Unknown
  misc_feature (1)..( 6): Result.003 file - promoters60/4282308
tttttt

SEQ ID NO: 132940 - DNA, 6 bp, Unknown
  misc_feature (1)..( 6): Result.003 file - promoters60/4282308
tttttt

SEQ ID NO: 132941 - DNA, 6 bp, Unknown
  misc_feature (1)..( 6): Result.003 file - promoters60/4282308
tcaaaa

SEQ ID NO: 132942 - DNA, 6 bp, Unknown
  misc_feature (1)..( 6): Result.003 file - promoters60/4282308
tcaaaa

SEQ ID NO: 132943 - DNA, 6 bp, Unknown
  misc_feature (1)..( 6): Result.003 file - promoters60/4282308
tcaaaa

SEQ ID NO: 132944 - DNA, 6 bp, Unknown
  misc_feature (1)..( 6): Result.003 file - promoters60/4282308
aagact

SEQ ID NO: 132945 - DNA, 6 bp, Unknown
  misc_feature (1)..( 6): Result.003 file - promoters60/4282308
aagact

SEQ ID NO: 132946 - DNA, 8 bp, Unknown
  misc_feature (1)..( 8): Result.003 file - promoters60/4282308
aatctctc

SEQ ID NO: 132947 - DNA, 8 bp, Unknown
  misc_feature (1)..( 8): Result.003 file - promoters60/4282308
aatttctc

SEQ ID NO: 132948 - DNA, 8 bp, Unknown
  misc_feature (1)..( 8): Result.003 file - promoters60/4282308
ttgcaatg

SEQ ID NO: 132949 - DNA, 8 bp, Unknown
  misc_feature (1)..( 8): Result.003 file - promoters60/4282308
ttgaaatg

SEQ ID NO: 132950 - DNA, 7 bp, Unknown
  misc_feature (1)..( 7): Result.003 file - promoters60/4282308
aaataaa

SEQ ID NO: 132951 - DNA, 7 bp, Unknown
  misc_feature (1)..( 7): Result.003 file - promoters60/4282308
aaataaa

SEQ ID NO: 132952 - DNA, 7 bp, Unknown
  misc_feature (1)..( 7): Result.003 file - promoters60/4282308
atcatgt

SEQ ID NO: 132953 - DNA, 7 bp, Unknown
  misc_feature (1)..( 7): Result.003 file - promoters60/4282308
atcgtgt

SEQ ID NO: 132954 - DNA, 11 bp, Unknown
  misc_feature (1)..( 11): Result.003 file - promoters60/4282308
ttcctcaaaca

SEQ ID NO: 132955 - DNA, 11 bp, Unknown
  misc_feature (1)..( 11): Result.003 file - promoters60/4282308
ttcttcaaaca

SEQ ID NO: 132956 - DNA, 7 bp, Unknown
  misc_feature (1)..( 7): Result.003 file - promoters60/4282308
tccctca

SEQ ID NO: 132957 - DNA, 7 bp, Unknown
  misc_feature (1)..( 7): Result.003 file - promoters60/4282308
tccatca

SEQ ID NO: 132958 - DNA, 6 bp, Unknown
  misc_feature (1)..( 6): Result.003 file - promoters60/4282308
attcat

SEQ ID NO: 132959 - DNA, 6 bp, Unknown
  misc_feature (1)..( 6): Result.003 file - promoters60/4282308
attcat

SEQ ID NO: 132960 - DNA, 7 bp, Unknown
  misc_feature (1)..( 7): Result.003 file - promoters60/4282308
acctaat

SEQ ID NO: 132961 - DNA, 7 bp, Unknown
  misc_feature (1)..( 7): Result.003 file - promoters60/4282308
acctaat

SEQ ID NO: 132962 - DNA, 8 bp, Unknown
  misc_feature (1)..( 8): Result.003 file - promoters60/4282308
ttctggtt

SEQ ID NO: 132963 - DNA, 8 bp, Unknown
  misc_feature (1)..( 8): Result.003 file - promoters60/4282308
ttctagtt

SEQ ID NO: 132964 - DNA, 8 bp, Unknown
  misc_feature (1)..( 8): Result.003 file - promoters60/4282308
tttaccaa

SEQ ID NO: 132965 - DNA, 8 bp, Unknown
  misc_feature (1)..( 8): Result.003 file - promoters60/4282308
ttttccaa

SEQ ID NO: 132966 - DNA, 6 bp, Unknown
  misc_feature (1)..( 6): Result.003 file - promoters60/4282308
caactt

SEQ ID NO: 132967 - DNA, 6 bp, Unknown
  misc_feature (1)..( 6): Result.003 file - promoters60/4282308
caactt

SEQ ID NO: 132968 - DNA, 7 bp, Unknown
  misc_feature (1)..( 7): Result.003 file - promoters60/4282308
gtcaaaa

SEQ ID NO: 132969 - DNA, 7 bp, Unknown
  misc_feature (1)..( 7): Result.003 file - promoters60/4282308
gtcaaaa

SEQ ID NO: 132970 - DNA, 7 bp, Unknown
  misc_feature (1)..( 7): Result.003 file - promoters60/4282308
aaattga

SEQ ID NO: 132971 - DNA, 7 bp, Unknown
  misc_feature (1)..( 7): Result.003 file - promoters60/4282308
aaattga

SEQ ID NO: 132972 - DNA, 7 bp, Unknown
  misc_feature (1)..( 7): Result.003 file - promoters60/4282308
catcagg

SEQ ID NO: 132973 - DNA, 7 bp, Unknown
  misc_feature (1)..( 7): Result.003 file - promoters60/4282308
catgagg

SEQ ID NO: 132974 - DNA, 19 bp, Unknown
  misc_feature (1)..( 19): Result.003 file - promoters60/4282316
aacaaactacaaaagttta

SEQ ID NO: 132975 - DNA, 13 bp, Unknown
  misc_feature (1)..( 13): Result.003 file - promoters60/4282316
cagaaaatgtttt

SEQ ID NO: 132976 - DNA, 19 bp, Unknown
  misc_feature (1)..( 19): Result.003 file - promoters60/4282316
agtttagggaaaatggatc

SEQ ID NO: 132977 - DNA, 19 bp, Unknown
  misc_feature (1)..( 19): Result.003 file - promoters60/4282316
ccaacacattcaatatttt

SEQ ID NO: 132978 - DNA, 15 bp, Unknown
  misc_feature (1)..( 15): Result.003 file - promoters60/4282316
atcactgatccaaca

SEQ ID NO: 132979 - DNA, 15 bp, Unknown
  misc_feature (1)..( 15): Result.003 file - promoters60/4282316
atcactgatccaaca

SEQ ID NO: 132980 - DNA, 15 bp, Unknown
  misc_feature (1)..( 15): Result.003 file - promoters60/4282316
atcactgatccaaca

SEQ ID NO: 132981 - DNA, 7 bp, Unknown
  misc_feature (1)..( 7): Result.003 file - promoters60/4282316
aattatc

SEQ ID NO: 132982 - DNA, 7 bp, Unknown
  misc_feature (1)..( 7): Result.003 file - promoters60/4282316
cattatc

SEQ ID NO: 132983 - DNA, 7 bp, Unknown
  misc_feature (1)..( 7): Result.003 file - promoters60/4282316
cattata

SEQ ID NO: 132984 - DNA, 7 bp, Unknown
  misc_feature (1)..( 7): Result.003 file - promoters60/4282316
aattatc

SEQ ID NO: 132985 - DNA, 6 bp, Unknown
  misc_feature (1)..( 6): Result.003 file - promoters60/4282320
tgtggc

SEQ ID NO: 132986 - DNA, 6 bp, Unknown
  misc_feature (1)..( 6): Result.003 file - promoters60/4282320
tgtggc

SEQ ID NO: 132987 - DNA, 7 bp, Unknown
  misc_feature (1)..( 7): Result.003 file - promoters60/4282320
gagaaaa

SEQ ID NO: 132988 - DNA, 7 bp, Unknown
  misc_feature (1)..( 7): Result.003 file - promoters60/4282320
gagcaaa

SEQ ID NO: 132989 - DNA, 7 bp, Unknown
  misc_feature (1)..( 7): Result.003 file - promoters60/4282320
aagcaga

SEQ ID NO: 132990 - DNA, 7 bp, Unknown
  misc_feature (1)..( 7): Result.003 file - promoters60/4282320
aagaaga

SEQ ID NO: 132991 - DNA, 9 bp, Unknown
  misc_feature (1)..( 9): Result.003 file - promoters60/4282320
cagaggaag

SEQ ID NO: 132992 - DNA, 9 bp, Unknown
  misc_feature (1)..( 9): Result.003 file - promoters60/4282320
cagagaaag

SEQ ID NO: 132993 - DNA, 6 bp, Unknown
  misc_feature (1)..( 6): Result.003 file - promoters60/4282320
aatgga

SEQ ID NO: 132994 - DNA, 6 bp, Unknown
  misc_feature (1)..( 6): Result.003 file - promoters60/4282320
aatgga

SEQ ID NO: 132995 - DNA, 7 bp, Unknown
  misc_feature (1)..( 7): Result.003 file - promoters60/4282320
atatcat

SEQ ID NO: 132996 - DNA, 7 bp, Unknown
  misc_feature (1)..( 7): Result.003 file - promoters60/4282320
atatcat

SEQ ID NO: 132997 - DNA, 7 bp, Unknown
  misc_feature (1)..( 7): Result.003 file - promoters60/4282320
aagattt

SEQ ID NO: 132998 - DNA, 7 bp, Unknown
  misc_feature (1)..( 7): Result.003 file - promoters60/4282320
aagcttt

SEQ ID NO: 132999 - DNA, 7 bp, Unknown
  misc_feature (1)..( 7): Result.003 file - promoters60/4282320
ttaccag

SEQ ID NO: 133000 - DNA, 7 bp, Unknown
  misc_feature (1)..( 7): Result.003 file - promoters60/4282320
ttaacag

SEQ ID NO: 133001 - DNA, 7 bp, Unknown
  misc_feature (1)..( 7): Result.003 file - promoters60/4282320
actggaa

SEQ ID NO: 133002 - DNA, 7 bp, Unknown
  misc_feature (1)..( 7): Result.003 file - promoters60/4282320
actggaa

SEQ ID NO: 133003 - DNA, 6 bp, Unknown
  misc_feature (1)..( 6): Result.003 file - promoters60/4282320
ttctca

SEQ ID NO: 133004 - DNA, 6 bp, Unknown
  misc_feature (1)..( 6): Result.003 file - promoters60/4282320
ttctca

SEQ ID NO: 133005 - DNA, 7 bp, Unknown
  misc_feature (1)..( 7): Result.003 file - promoters60/4282320
ctgaagt

SEQ ID NO: 133006 - DNA, 7 bp, Unknown
  misc_feature (1)..( 7): Result.003 file - promoters60/4282320
ttgaagt

SEQ ID NO: 133007 - DNA, 7 bp, Unknown
  misc_feature (1)..( 7): Result.003 file - promoters60/4282320
ttgaaga

SEQ ID NO: 133008 - DNA, 6 bp, Unknown
  misc_feature (1)..( 6): Result.003 file - promoters60/4282320
atggaa

SEQ ID NO: 133009 - DNA, 6 bp, Unknown
  misc_feature (1)..( 6): Result.003 file - promoters60/4282320
atggaa

SEQ ID NO: 133010 - DNA, 6 bp, Unknown
  misc_feature (1)..( 6): Result.003 file - promoters60/4282320
aaagaa

SEQ ID NO: 133011 - DNA, 6 bp, Unknown
  misc_feature (1)..( 6): Result.003 file - promoters60/4282320
aaagaa

SEQ ID NO: 133012 - DNA, 7 bp, Unknown
  misc_feature (1)..( 7): Result.003 file - promoters60/4282320
tagagaa

SEQ ID NO: 133013 - DNA, 7 bp, Unknown
  misc_feature (1)..( 7): Result.003 file - promoters60/4282320
tagagaa

SEQ ID NO: 133014 - DNA, 7 bp, Unknown
  misc_feature (1)..( 7): Result.003 file - promoters60/4282320
aaggaga

SEQ ID NO: 133015 - DNA, 7 bp, Unknown
  misc_feature (1)..( 7): Result.003 file - promoters60/4282320
aagtaga

SEQ ID NO: 133016 - DNA, 7 bp, Unknown
  misc_feature (1)..( 7): Result.003 file - promoters60/4282320
aaagaag

SEQ ID NO: 133017 - DNA, 7 bp, Unknown
  misc_feature (1)..( 7): Result.003 file - promoters60/4282320
aaagaag

SEQ ID NO: 133018 - DNA, 6 bp, Unknown
  misc_feature (1)..( 6): Result.003 file - promoters60/4282320
caaaag

SEQ ID NO: 133019 - DNA, 6 bp, Unknown
  misc_feature (1)..( 6): Result.003 file - promoters60/4282320
caaaag

SEQ ID NO: 133020 - DNA, 6 bp, Unknown
  misc_feature (1)..( 6): Result.003 file - promoters60/4282320
caacac

SEQ ID NO: 133021 - DNA, 6 bp, Unknown
  misc_feature (1)..( 6): Result.003 file - promoters60/4282320
caacac

SEQ ID NO: 133022 - DNA, 7 bp, Unknown
  misc_feature (1)..( 7): Result.003 file - promoters60/4282320
ctctatt

SEQ ID NO: 133023 - DNA, 7 bp, Unknown
  misc_feature (1)..( 7): Result.003 file - promoters60/4282320
ctccatt

SEQ ID NO: 133024 - DNA, 10 bp, Unknown
  misc_feature (1)..( 10): Result.003 file - promoters60/4282324
tcataattac

SEQ ID NO: 133025 - DNA, 10 bp, Unknown
  misc_feature (1)..( 10): Result.003 file - promoters60/4282324
tcaaaattcg

SEQ ID NO: 133026 - DNA, 10 bp, Unknown
  misc_feature (1)..( 10): Result.003 file - promoters60/4282324
caataattat

SEQ ID NO: 133027 - DNA, 10 bp, Unknown
  misc_feature (1)..( 10): Result.003 file - promoters60/4282324
atctaactat

SEQ ID NO: 133028 - DNA, 10 bp, Unknown
  misc_feature (1)..( 10): Result.003 file - promoters60/4282324
actactaaac

SEQ ID NO: 133029 - DNA, 10 bp, Unknown
  misc_feature (1)..( 10): Result.003 file - promoters60/4282324
aacactaaaa

SEQ ID NO: 133030 - DNA, 10 bp, Unknown
  misc_feature (1)..( 10): Result.003 file - promoters60/4282324
aacaccaaaa

SEQ ID NO: 133031 - DNA, 12 bp, Unknown
  misc_feature (1)..( 12): Result.003 file - promoters60/4282324
taaaattcattt

SEQ ID NO: 133032 - DNA, 10 bp, Unknown
  misc_feature (1)..( 10): Result.003 file - promoters60/4282324
ttattcgttt

SEQ ID NO: 133033 - DNA, 12 bp, Unknown
  misc_feature (1)..( 12): Result.003 file - promoters60/4282324
taaaaatcagac

SEQ ID NO: 133034 - DNA, 16 bp, Unknown
  misc_feature (1)..( 16): Result.003 file - promoters60/4282324
aaaatttctactaaag

SEQ ID NO: 133035 - DNA, 16 bp, Unknown
  misc_feature (1)..( 16): Result.003 file - promoters60/4282324
agattttttaccaaac

SEQ ID NO: 133036 - DNA, 16 bp, Unknown
  misc_feature (1)..( 16): Result.003 file - promoters60/4282324
gttaggtaaactaaag

SEQ ID NO: 133037 - DNA, 16 bp, Unknown
  misc_feature (1)..( 16): Result.003 file - promoters60/4282324
agatttgttagagaga

SEQ ID NO: 133038 - DNA, 7 bp, Unknown
  misc_feature (1)..( 7): Result.003 file - promoters60/4282324
aaaacaa

SEQ ID NO: 133039 - DNA, 7 bp, Unknown
  misc_feature (1)..( 7): Result.003 file - promoters60/4282324
aaaacaa

SEQ ID NO: 133040 - DNA, 7 bp, Unknown
  misc_feature (1)..( 7): Result.003 file - promoters60/4282324
aaaacag

SEQ ID NO: 133041 - DNA, 11 bp, Unknown
  misc_feature (1)..( 11): Result.003 file - promoters60/4282324
ctacaaatcca

SEQ ID NO: 133042 - DNA, 11 bp, Unknown
  misc_feature (1)..( 11): Result.003 file - promoters60/4282324
tataaaatccc

SEQ ID NO: 133043 - DNA, 11 bp, Unknown
  misc_feature (1)..( 11): Result.003 file - promoters60/4282324
ctataaatccc

SEQ ID NO: 133044 - DNA, 11 bp, Unknown
  misc_feature (1)..( 11): Result.003 file - promoters60/4282324
atttaaatccc

SEQ ID NO: 133045 - DNA, 7 bp, Unknown
  misc_feature (1)..( 7): Result.003 file - promoters60/4282327
aaattaa

SEQ ID NO: 133046 - DNA, 7 bp, Unknown
  misc_feature (1)..( 7): Result.003 file - promoters60/4282327
aaagtaa

SEQ ID NO: 133047 - DNA, 7 bp, Unknown
  misc_feature (1)..( 7): Result.003 file - promoters60/4282327
aattagt

SEQ ID NO: 133048 - DNA, 7 bp, Unknown
  misc_feature (1)..( 7): Result.003 file - promoters60/4282327
aataagt

SEQ ID NO: 133049 - DNA, 6 bp, Unknown
  misc_feature (1)..( 6): Result.003 file - promoters60/4282327
gaaaag

SEQ ID NO: 133050 - DNA, 6 bp, Unknown
  misc_feature (1)..( 6): Result.003 file - promoters60/4282327
gaaaag

SEQ ID NO: 133051 - DNA, 6 bp, Unknown
  misc_feature (1)..( 6): Result.003 file - promoters60/4282327
aaaaat

SEQ ID NO: 133052 - DNA, 6 bp, Unknown
  misc_feature (1)..( 6): Result.003 file - promoters60/4282327
aaaaat

SEQ ID NO: 133053 - DNA, 6 bp, Unknown
  misc_feature (1)..( 6): Result.003 file - promoters60/4282327
gtttaa

SEQ ID NO: 133054 - DNA, 6 bp, Unknown
  misc_feature (1)..( 6): Result.003 file - promoters60/4282327
gtttaa

SEQ ID NO: 133055 - DNA, 8 bp, Unknown
  misc_feature (1)..( 8): Result.003 file - promoters60/4282327
gcaacatt

SEQ ID NO: 133056 - DNA, 8 bp, Unknown
  misc_feature (1)..( 8): Result.003 file - promoters60/4282327
gcaagatt

SEQ ID NO: 133057 - DNA, 7 bp, Unknown
  misc_feature (1)..( 7): Result.003 file - promoters60/4282327
attcgtc

SEQ ID NO: 133058 - DNA, 7 bp, Unknown
  misc_feature (1)..( 7): Result.003 file - promoters60/4282327
attggtc

SEQ ID NO: 133059 - DNA, 7 bp, Unknown
  misc_feature (1)..( 7): Result.003 file - promoters60/4282327
aataatt

SEQ ID NO: 133060 - DNA, 7 bp, Unknown
  misc_feature (1)..( 7): Result.003 file - promoters60/4282327
aatgatt

SEQ ID NO: 133061 - DNA, 8 bp, Unknown
  misc_feature (1)..( 8): Result.003 file - promoters60/4282327
tatataaa

SEQ ID NO: 133062 - DNA, 8 bp, Unknown
  misc_feature (1)..( 8): Result.003 file - promoters60/4282327
tatttaaa

SEQ ID NO: 133063 - DNA, 7 bp, Unknown
  misc_feature (1)..( 7): Result.003 file - promoters60/4282327
tatggaa

SEQ ID NO: 133064 - DNA, 7 bp, Unknown
  misc_feature (1)..( 7): Result.003 file - promoters60/4282327
tattgaa

SEQ ID NO: 133065 - DNA, 8 bp, Unknown
  misc_feature (1)..( 8): Result.003 file - promoters60/4282327
attggtta

SEQ ID NO: 133066 - DNA, 8 bp, Unknown
  misc_feature (1)..( 8): Result.003 file - promoters60/4282327
atttgtta

SEQ ID NO: 133067 - DNA, 7 bp, Unknown
  misc_feature (1)..( 7): Result.003 file - promoters60/4282327
tttgtgc

SEQ ID NO: 133068 - DNA, 7 bp, Unknown
  misc_feature (1)..( 7): Result.003 file - promoters60/4282327
tttatgc

SEQ ID NO: 133069 - DNA, 7 bp, Unknown
  misc_feature (1)..( 7): Result.003 file - promoters60/4282327
gacgtat

SEQ ID NO: 133070 - DNA, 7 bp, Unknown
  misc_feature (1)..( 7): Result.003 file - promoters60/4282327
gacttat

SEQ ID NO: 133071 - DNA, 11 bp, Unknown
  misc_feature (1)..( 11): Result.003 file - promoters60/4282327
tttcagtgtaa

SEQ ID NO: 133072 - DNA, 11 bp, Unknown
  misc_feature (1)..( 11): Result.003 file - promoters60/4282327
tttgagtataa

SEQ ID NO: 133073 - DNA, 7 bp, Unknown
  misc_feature (1)..( 7): Result.003 file - promoters60/4282327
aagaaga

SEQ ID NO: 133074 - DNA, 7 bp, Unknown
  misc_feature (1)..( 7): Result.003 file - promoters60/4282327
aaggaga

SEQ ID NO: 133075 - DNA, 13 bp, Unknown
  misc_feature (1)..( 13): Result.003 file - promoters60/4282395
attctgaggagag

SEQ ID NO: 133076 - DNA, 13 bp, Unknown
  misc_feature (1)..( 13): Result.003 file - promoters60/4282395
agttggagtagaa

SEQ ID NO: 133077 - DNA, 13 bp, Unknown
  misc_feature (1)..( 13): Result.003 file - promoters60/4282395
tttcttaggaaag

SEQ ID NO: 133078 - DNA, 13 bp, Unknown
  misc_feature (1)..( 13): Result.003 file - promoters60/4282395
gcccatagtagac

SEQ ID NO: 133079 - DNA, 13 bp, Unknown
  misc_feature (1)..( 13): Result.003 file - promoters60/4282395
aatttttgtagac

SEQ ID NO: 133080 - DNA, 13 bp, Unknown
  misc_feature (1)..( 13): Result.003 file - promoters60/4282395
ttttttaatttgt

SEQ ID NO: 133081 - DNA, 9 bp, Unknown
  misc_feature (1)..( 9): Result.003 file - promoters60/4282395
cacaaaaca

SEQ ID NO: 133082 - DNA, 9 bp, Unknown
  misc_feature (1)..( 9): Result.003 file - promoters60/4282395
cacaaagta

SEQ ID NO: 133083 - DNA, 9 bp, Unknown
  misc_feature (1)..( 9): Result.003 file - promoters60/4282395
cacaaagac

SEQ ID NO: 133084 - DNA, 9 bp, Unknown
  misc_feature (1)..( 9): Result.003 file - promoters60/4282395
aacaaaaac

SEQ ID NO: 133085 - DNA, 9 bp, Unknown
  misc_feature (1)..( 9): Result.003 file - promoters60/4282395
taaaaactc

SEQ ID NO: 133086 - DNA, 9 bp, Unknown
  misc_feature (1)..( 9): Result.003 file - promoters60/4282395
gaaagactt

SEQ ID NO: 133087 - DNA, 12 bp, Unknown
  misc_feature (1)..( 12): Result.003 file - promoters60/4282395
gggtgttaccag

SEQ ID NO: 133088 - DNA, 12 bp, Unknown
  misc_feature (1)..( 12): Result.003 file - promoters60/4282395
gggagttattac

SEQ ID NO: 133089 - DNA, 12 bp, Unknown
  misc_feature (1)..( 12): Result.003 file - promoters60/4282395
tggagttattta

SEQ ID NO: 133090 - DNA, 12 bp, Unknown
  misc_feature (1)..( 12): Result.003 file - promoters60/4282395
tgggattatttt

SEQ ID NO: 133091 - DNA, 12 bp, Unknown
  misc_feature (1)..( 12): Result.003 file - promoters60/4282395
aaaaattatttt

SEQ ID NO: 133092 - DNA, 12 bp, Unknown
  misc_feature (1)..( 12): Result.003 file - promoters60/4282395
ccaaattattga

SEQ ID NO: 133093 - DNA, 11 bp, Unknown
  misc_feature (1)..( 11): Result.003 file - promoters60/4282395
gaaattatttt

SEQ ID NO: 133094 - DNA, 11 bp, Unknown
  misc_feature (1)..( 11): Result.003 file - promoters60/4282395
ggagttattta

SEQ ID NO: 133095 - DNA, 11 bp, Unknown
  misc_feature (1)..( 11): Result.003 file - promoters60/4282395
ggagttattac

SEQ ID NO: 133096 - DNA, 11 bp, Unknown
  misc_feature (1)..( 11): Result.003 file - promoters60/4282395
gggattatttt

SEQ ID NO: 133097 - DNA, 11 bp, Unknown
  misc_feature (1)..( 11): Result.003 file - promoters60/4282395
aaaattatttt

SEQ ID NO: 133098 - DNA, 11 bp, Unknown
  misc_feature (1)..( 11): Result.003 file - promoters60/4282395
caaattattga

SEQ ID NO: 133099 - DNA, 9 bp, Unknown
  misc_feature (1)..( 9): Result.003 file - promoters60/4282414
cagaaatac

SEQ ID NO: 133100 - DNA, 9 bp, Unknown
  misc_feature (1)..( 9): Result.003 file - promoters60/4282414
cagaaactt

SEQ ID NO: 133101 - DNA, 9 bp, Unknown
  misc_feature (1)..( 9): Result.003 file - promoters60/4282414
cagtaatac

SEQ ID NO: 133102 - DNA, 12 bp, Unknown
  misc_feature (1)..( 12): Result.003 file - promoters60/4282414
caaacatgaacc

SEQ ID NO: 133103 - DNA, 12 bp, Unknown
  misc_feature (1)..( 12): Result.003 file - promoters60/4282414
caagcattaacc

SEQ ID NO: 133104 - DNA, 12 bp, Unknown
  misc_feature (1)..( 12): Result.003 file - promoters60/4282414
aaggcagtaact

SEQ ID NO: 133105 - DNA, 9 bp, Unknown
  misc_feature (1)..( 9): Result.003 file - promoters60/4282418
aaactaaaa

SEQ ID NO: 133106 - DNA, 9 bp, Unknown
  misc_feature (1)..( 9): Result.003 file - promoters60/4282418
aaaataaaa

SEQ ID NO: 133107 - DNA, 9 bp, Unknown
  misc_feature (1)..( 9): Result.003 file - promoters60/4282418
aaagtaaac

SEQ ID NO: 133108 - DNA, 9 bp, Unknown
  misc_feature (1)..( 9): Result.003 file - promoters60/4282418
aaacaaaat

SEQ ID NO: 133109 - DNA, 10 bp, Unknown
  misc_feature (1)..( 10): Result.003 file - promoters60/4282418
taaaataaaa

SEQ ID NO: 133110 - DNA, 10 bp, Unknown
  misc_feature (1)..( 10): Result.003 file - promoters60/4282418
aaaaataaaa

SEQ ID NO: 133111 - DNA, 10 bp, Unknown
  misc_feature (1)..( 10): Result.003 file - promoters60/4282418
taatatatta

SEQ ID NO: 133112 - DNA, 13 bp, Unknown
  misc_feature (1)..( 13): Result.003 file - promoters60/4282418
aaaataatatcat

SEQ ID NO: 133113 - DNA, 13 bp, Unknown
  misc_feature (1)..( 13): Result.003 file - promoters60/4282418
aaactaatatcat

SEQ ID NO: 133114 - DNA, 13 bp, Unknown
  misc_feature (1)..( 13): Result.003 file - promoters60/4282418
ttattaaaatcaa

SEQ ID NO: 133115 - DNA, 9 bp, Unknown
  misc_feature (1)..( 9): Result.003 file - promoters60/4282418
taagtaaac

SEQ ID NO: 133116 - DNA, 9 bp, Unknown
  misc_feature (1)..( 9): Result.003 file - promoters60/4282418
taattaaac

SEQ ID NO: 133117 - DNA, 9 bp, Unknown
  misc_feature (1)..( 9): Result.003 file - promoters60/4282418
gaagaaaaa

SEQ ID NO: 133118 - DNA, 7 bp, Unknown
  misc_feature (1)..( 7): Result.003 file - promoters60/4282418
ataaaaa

SEQ ID NO: 133119 - DNA, 7 bp, Unknown
  misc_feature (1)..( 7): Result.003 file - promoters60/4282418
atataaa

SEQ ID NO: 133120 - DNA, 7 bp, Unknown
  misc_feature (1)..( 7): Result.003 file - promoters60/4282418
ttaaaaa

SEQ ID NO: 133121 - DNA, 6 bp, Unknown
  misc_feature (1)..( 6): Result.003 file - promoters60/4282421
tttaat

SEQ ID NO: 133122 - DNA, 6 bp, Unknown
  misc_feature (1)..( 6): Result.003 file - promoters60/4282421
tttaat

SEQ ID NO: 133123 - DNA, 7 bp, Unknown
  misc_feature (1)..( 7): Result.003 file - promoters60/4282421
gctttct

SEQ ID NO: 133124 - DNA, 7 bp, Unknown
  misc_feature (1)..( 7): Result.003 file - promoters60/4282421
gctttct

SEQ ID NO: 133125 - DNA, 8 bp, Unknown
  misc_feature (1)..( 8): Result.003 file - promoters60/4282421
tctattct

SEQ ID NO: 133126 - DNA, 8 bp, Unknown
  misc_feature (1)..( 8): Result.003 file - promoters60/4282421
tctaatct

SEQ ID NO: 133127 - DNA, 6 bp, Unknown
  misc_feature (1)..( 6): Result.003 file - promoters60/4282421
aaaaat

SEQ ID NO: 133128 - DNA, 6 bp, Unknown
  misc_feature (1)..( 6): Result.003 file - promoters60/4282421
aaaaat

SEQ ID NO: 133129 - DNA, 7 bp, Unknown
  misc_feature (1)..( 7): Result.003 file - promoters60/4282421
attagta

SEQ ID NO: 133130 - DNA, 7 bp, Unknown
  misc_feature (1)..( 7): Result.003 file - promoters60/4282421
attagta

SEQ ID NO: 133131 - DNA, 7 bp, Unknown
  misc_feature (1)..( 7): Result.003 file - promoters60/4282421
ttttcat

SEQ ID NO: 133132 - DNA, 7 bp, Unknown
  misc_feature (1)..( 7): Result.003 file - promoters60/4282421
ttttcat

SEQ ID NO: 133133 - DNA, 6 bp, Unknown
  misc_feature (1)..( 6): Result.003 file - promoters60/4282421
atttgt

SEQ ID NO: 133134 - DNA, 6 bp, Unknown
  misc_feature (1)..( 6): Result.003 file - promoters60/4282421
atttgt

SEQ ID NO: 133135 - DNA, 7 bp, Unknown
  misc_feature (1)..( 7): Result.003 file - promoters60/4282421
tactaaa

SEQ ID NO: 133136 - DNA, 7 bp, Unknown
  misc_feature (1)..( 7): Result.003 file - promoters60/4282421
taccaaa

SEQ ID NO: 133137 - DNA, 7 bp, Unknown
  misc_feature (1)..( 7): Result.003 file - promoters60/4282421
cttttta

SEQ ID NO: 133138 - DNA, 7 bp, Unknown
  misc_feature (1)..( 7): Result.003 file - promoters60/4282421
cttctta

SEQ ID NO: 133139 - DNA, 6 bp, Unknown
  misc_feature (1)..( 6): Result.003 file - promoters60/4282421
tgtatt

SEQ ID NO: 133140 - DNA, 6 bp, Unknown
  misc_feature (1)..( 6): Result.003 file - promoters60/4282421
tgtatt

SEQ ID NO: 133141 - DNA, 7 bp, Unknown
  misc_feature (1)..( 7): Result.003 file - promoters60/4282421
tgtatat

SEQ ID NO: 133142 - DNA, 7 bp, Unknown
  misc_feature (1)..( 7): Result.003 file - promoters60/4282421
tgtctat

SEQ ID NO: 133143 - DNA, 8 bp, Unknown
  misc_feature (1)..( 8): Result.003 file - promoters60/4282421
tctggttt

SEQ ID NO: 133144 - DNA, 8 bp, Unknown
  misc_feature (1)..( 8): Result.003 file - promoters60/4282421
tctggttt

SEQ ID NO: 133145 - DNA, 7 bp, Unknown
  misc_feature (1)..( 7): Result.003 file - promoters60/4282421
tttactt

SEQ ID NO: 133146 - DNA, 7 bp, Unknown
  misc_feature (1)..( 7): Result.003 file - promoters60/4282421
tttgctt

SEQ ID NO: 133147 - DNA, 8 bp, Unknown
  misc_feature (1)..( 8): Result.003 file - promoters60/4282421
cttttctc

SEQ ID NO: 133148 - DNA, 8 bp, Unknown
  misc_feature (1)..( 8): Result.003 file - promoters60/4282421
cttgtctc

SEQ ID NO: 133149 - DNA, 7 bp, Unknown
  misc_feature (1)..( 7): Result.003 file - promoters60/4282421
ttgaagc

SEQ ID NO: 133150 - DNA, 7 bp, Unknown
  misc_feature (1)..( 7): Result.003 file - promoters60/4282421
ttgaagc

SEQ ID NO: 133151 - DNA, 6 bp, Unknown
  misc_feature (1)..( 6): Result.003 file - promoters60/4282421
cctttt

SEQ ID NO: 133152 - DNA, 6 bp, Unknown
  misc_feature (1)..( 6): Result.003 file - promoters60/4282421
cctttt

SEQ ID NO: 133153 - DNA, 7 bp, Unknown
  misc_feature (1)..( 7): Result.003 file - promoters60/4282421
ttttttt

SEQ ID NO: 133154 - DNA, 7 bp, Unknown
  misc_feature (1)..( 7): Result.003 file - promoters60/4282421
ttttttt

SEQ ID NO: 133155 - DNA, 7 bp, Unknown
  misc_feature (1)..( 7): Result.003 file - promoters60/4282421
ggcctat

SEQ ID NO: 133156 - DNA, 7 bp, Unknown
  misc_feature (1)..( 7): Result.003 file - promoters60/4282421
ggcctat

SEQ ID NO: 133157 - DNA, 8 bp, Unknown
  misc_feature (1)..( 8): Result.003 file - promoters60/4282436
caataaaa

SEQ ID NO: 133158 - DNA, 8 bp, Unknown
  misc_feature (1)..( 8): Result.003 file - promoters60/4282436
caaaaaaa

SEQ ID NO: 133159 - DNA, 6 bp, Unknown
  misc_feature (1)..( 6): Result.003 file - promoters60/4282436
aaaaca

SEQ ID NO: 133160 - DNA, 6 bp, Unknown
  misc_feature (1)..( 6): Result.003 file - promoters60/4282436
aaaaca

SEQ ID NO: 133161 - DNA, 8 bp, Unknown
  misc_feature (1)..( 8): Result.003 file - promoters60/4282436
gaattaaa

SEQ ID NO: 133162 - DNA, 8 bp, Unknown
  misc_feature (1)..( 8): Result.003 file - promoters60/4282436
gaaataaa

SEQ ID NO: 133163 - DNA, 7 bp, Unknown
  misc_feature (1)..( 7): Result.003 file - promoters60/4282436
caaattt

SEQ ID NO: 133164 - DNA, 7 bp, Unknown
  misc_feature (1)..( 7): Result.003 file - promoters60/4282436
caatttt

SEQ ID NO: 133165 - DNA, 6 bp, Unknown
  misc_feature (1)..( 6): Result.003 file - promoters60/4282436
ttaaaa

SEQ ID NO: 133166 - DNA, 6 bp, Unknown
  misc_feature (1)..( 6): Result.003 file - promoters60/4282436
ttaaaa

SEQ ID NO: 133167 - DNA, 6 bp, Unknown
  misc_feature (1)..( 6): Result.003 file - promoters60/4282436
gtaacg

SEQ ID NO: 133168 - DNA, 6 bp, Unknown
  misc_feature (1)..( 6): Result.003 file - promoters60/4282436
gtaacg

SEQ ID NO: 133169 - DNA, 7 bp, Unknown
  misc_feature (1)..( 7): Result.003 file - promoters60/4282436
gtggtta

SEQ ID NO: 133170 - DNA, 7 bp, Unknown
  misc_feature (1)..( 7): Result.003 file - promoters60/4282436
gtgttta

SEQ ID NO: 133171 - DNA, 10 bp, Unknown
  misc_feature (1)..( 10): Result.003 file - promoters60/4282436
tacgtgtcaa

SEQ ID NO: 133172 - DNA, 10 bp, Unknown
  misc_feature (1)..( 10): Result.003 file - promoters60/4282436
cacgtgtcat

SEQ ID NO: 133173 - DNA, 10 bp, Unknown
  misc_feature (1)..( 10): Result.003 file - promoters60/4282436
tacgtgtcaa

SEQ ID NO: 133174 - DNA, 20 bp, Unknown
  misc_feature (1)..( 20): Result.003 file - promoters60/4282436
ttggttattgcttcaccgcc

SEQ ID NO: 133175 - DNA, 20 bp, Unknown
  misc_feature (1)..( 20): Result.003 file - promoters60/4282436
ttagctattgcttcaccgcc

SEQ ID NO: 133176 - DNA, 20 bp, Unknown
  misc_feature (1)..( 20): Result.003 file - promoters60/4282436
ttggctattgcttccacgcc

SEQ ID NO: 133177 - DNA, 22 bp, Unknown
  misc_feature (1)..( 22): Result.003 file - promoters60/4282436
tctcgtgaccgactcgtcctcg

SEQ ID NO: 133178 - DNA, 22 bp, Unknown
  misc_feature (1)..( 22): Result.003 file - promoters60/4282436
gacctagtcgtcctcgtctttt

SEQ ID NO: 133179 - DNA, 22 bp, Unknown
  misc_feature (1)..( 22): Result.003 file - promoters60/4282436
gaccgagtcgtcctcgtctttt

SEQ ID NO: 133180 - DNA, 19 bp, Unknown
  misc_feature (1)..( 19): Result.003 file - promoters60/4282436
ttcttcttctataaattaa

SEQ ID NO: 133181 - DNA, 19 bp, Unknown
  misc_feature (1)..( 19): Result.003 file - promoters60/4282436
ttcttcttctataaaacaa

SEQ ID NO: 133182 - DNA, 19 bp, Unknown
  misc_feature (1)..( 19): Result.003 file - promoters60/4282436
ttttgcttctataaatcaa

SEQ ID NO: 133183 - DNA, 6 bp, Unknown
  misc_feature (1)..( 6): Result.003 file - promoters60/4282436
gcttct

SEQ ID NO: 133184 - DNA, 6 bp, Unknown
  misc_feature (1)..( 6): Result.003 file - promoters60/4282436
gcttct

SEQ ID NO: 133185 - DNA, 8 bp, Unknown
  misc_feature (1)..( 8): Result.003 file - promoters60/4282436
ttctggcc

SEQ ID NO: 133186 - DNA, 8 bp, Unknown
  misc_feature (1)..( 8): Result.003 file - promoters60/4282436
ttcttgcc

SEQ ID NO: 133187 - DNA, 7 bp, Unknown
  misc_feature (1)..( 7): Result.003 file - promoters60/4282436
tacatat

SEQ ID NO: 133188 - DNA, 7 bp, Unknown
  misc_feature (1)..( 7): Result.003 file - promoters60/4282436
tacttat

SEQ ID NO: 133189 - DNA, 15 bp, Unknown
  misc_feature (1)..( 15): Result.003 file - promoters60/4282436
cgccttagctttctc

SEQ ID NO: 133190 - DNA, 15 bp, Unknown
  misc_feature (1)..( 15): Result.003 file - promoters60/4282436
cgccttagctttctc

SEQ ID NO: 133191 - DNA, 15 bp, Unknown
  misc_feature (1)..( 15): Result.003 file - promoters60/4282436
cgccttagctttctc

SEQ ID NO: 133192 - DNA, 6 bp, Unknown
  misc_feature (1)..( 6): Result.003 file - promoters60/4282436
tttttt

SEQ ID NO: 133193 - DNA, 6 bp, Unknown
  misc_feature (1)..( 6): Result.003 file - promoters60/4282436
tttttt

SEQ ID NO: 133194 - DNA, 9 bp, Unknown
  misc_feature (1)..( 9): Result.003 file - promoters60/4282436
acaaaaagg

SEQ ID NO: 133195 - DNA, 9 bp, Unknown
  misc_feature (1)..( 9): Result.003 file - promoters60/4282436
acacaaagg

SEQ ID NO: 133196 - DNA, 7 bp, Unknown
  misc_feature (1)..( 7): Result.003 file - promoters60/4282436
acgaaga

SEQ ID NO: 133197 - DNA, 7 bp, Unknown
  misc_feature (1)..( 7): Result.003 file - promoters60/4282436
acgcaga

SEQ ID NO: 133198 - DNA, 6 bp, Unknown
  misc_feature (1)..( 6): Result.003 file - promoters60/4282436
gttcaa

SEQ ID NO: 133199 - DNA, 6 bp, Unknown
  misc_feature (1)..( 6): Result.003 file - promoters60/4282436
gttcaa

SEQ ID NO: 133200 - DNA, 6 bp, Unknown
  misc_feature (1)..( 6): Result.003 file - promoters60/4282436
gtatat

SEQ ID NO: 133201 - DNA, 6 bp, Unknown
  misc_feature (1)..( 6): Result.003 file - promoters60/4282436
gtatat

SEQ ID NO: 133202 - DNA, 9 bp, Unknown
  misc_feature (1)..( 9): Result.003 file - promoters60/4282436
atcttatga

SEQ ID NO: 133203 - DNA, 9 bp, Unknown
  misc_feature (1)..( 9): Result.003 file - promoters60/4282436
atctaatga

SEQ ID NO: 133204 - DNA, 6 bp, Unknown
  misc_feature (1)..( 6): Result.003 file - promoters60/4282436
tcagta

SEQ ID NO: 133205 - DNA, 6 bp, Unknown
  misc_feature (1)..( 6): Result.003 file - promoters60/4282436
tcagta

SEQ ID NO: 133206 - DNA, 6 bp, Unknown
  misc_feature (1)..( 6): Result.003 file - promoters60/4282436
aacaac

SEQ ID NO: 133207 - DNA, 6 bp, Unknown
  misc_feature (1)..( 6): Result.003 file - promoters60/4282436
aacaac

SEQ ID NO: 133208 - DNA, 15 bp, Unknown
  misc_feature (1)..( 15): Result.003 file - promoters60/4282436
aatacccaaagagct

SEQ ID NO: 133209 - DNA, 15 bp, Unknown
  misc_feature (1)..( 15): Result.003 file - promoters60/4282436
aatacccaaagagct

SEQ ID NO: 133210 - DNA, 7 bp, Unknown
  misc_feature (1)..( 7): Result.003 file - promoters60/4282450
aatgata

SEQ ID NO: 133211 - DNA, 7 bp, Unknown
  misc_feature (1)..( 7): Result.003 file - promoters60/4282450
aataata

SEQ ID NO: 133212 - DNA, 8 bp, Unknown
  misc_feature (1)..( 8): Result.003 file - promoters60/4282450
aatcataa

SEQ ID NO: 133213 - DNA, 8 bp, Unknown
  misc_feature (1)..( 8): Result.003 file - promoters60/4282450
aataataa

SEQ ID NO: 133214 - DNA, 7 bp, Unknown
  misc_feature (1)..( 7): Result.003 file - promoters60/4282450
tataaaa

SEQ ID NO: 133215 - DNA, 7 bp, Unknown
  misc_feature (1)..( 7): Result.003 file - promoters60/4282450
tataaaa

SEQ ID NO: 133216 - DNA, 7 bp, Unknown
  misc_feature (1)..( 7): Result.003 file - promoters60/4282450
cggagct

SEQ ID NO: 133217 - DNA, 7 bp, Unknown
  misc_feature (1)..( 7): Result.003 file - promoters60/4282450
cggagct

SEQ ID NO: 133218 - DNA, 6 bp, Unknown
  misc_feature (1)..( 6): Result.003 file - promoters60/4282450
cattga

SEQ ID NO: 133219 - DNA, 6 bp, Unknown
  misc_feature (1)..( 6): Result.003 file - promoters60/4282450
cattga

SEQ ID NO: 133220 - DNA, 8 bp, Unknown
  misc_feature (1)..( 8): Result.003 file - promoters60/4282450
tatctaaa

SEQ ID NO: 133221 - DNA, 8 bp, Unknown
  misc_feature (1)..( 8): Result.003 file - promoters60/4282450
tatttaaa

SEQ ID NO: 133222 - DNA, 6 bp, Unknown
  misc_feature (1)..( 6): Result.003 file - promoters60/4282450
tgtttc

SEQ ID NO: 133223 - DNA, 6 bp, Unknown
  misc_feature (1)..( 6): Result.003 file - promoters60/4282450
tgtttc

SEQ ID NO: 133224 - DNA, 6 bp, Unknown
  misc_feature (1)..( 6): Result.003 file - promoters60/4282487
aaattg

SEQ ID NO: 133225 - DNA, 6 bp, Unknown
  misc_feature (1)..( 6): Result.003 file - promoters60/4282487
aaattg

SEQ ID NO: 133226 - DNA, 7 bp, Unknown
  misc_feature (1)..( 7): Result.003 file - promoters60/4282487
taatcgt

SEQ ID NO: 133227 - DNA, 7 bp, Unknown
  misc_feature (1)..( 7): Result.003 file - promoters60/4282487
taagcgt

SEQ ID NO: 133228 - DNA, 6 bp, Unknown
  misc_feature (1)..( 6): Result.003 file - promoters60/4282487
tttagt

SEQ ID NO: 133229 - DNA, 6 bp, Unknown
  misc_feature (1)..( 6): Result.003 file - promoters60/4282487
tttagt

SEQ ID NO: 133230 - DNA, 6 bp, Unknown
  misc_feature (1)..( 6): Result.003 file - promoters60/4282487
tttagt

SEQ ID NO: 133231 - DNA, 7 bp, Unknown
  misc_feature (1)..( 7): Result.003 file - promoters60/4282487
tttgatg

SEQ ID NO: 133232 - DNA, 7 bp, Unknown
  misc_feature (1)..( 7): Result.003 file - promoters60/4282487
tttcatg

SEQ ID NO: 133233 - DNA, 7 bp, Unknown
  misc_feature (1)..( 7): Result.003 file - promoters60/4282487
taatcgt

SEQ ID NO: 133234 - DNA, 7 bp, Unknown
  misc_feature (1)..( 7): Result.003 file - promoters60/4282487
taagcgt

SEQ ID NO: 133235 - DNA, 11 bp, Unknown
  misc_feature (1)..( 11): Result.003 file - promoters60/4282487
tagttgattcg

SEQ ID NO: 133236 - DNA, 11 bp, Unknown
  misc_feature (1)..( 11): Result.003 file - promoters60/4282487
tagtttattcg

SEQ ID NO: 133237 - DNA, 7 bp, Unknown
  misc_feature (1)..( 7): Result.003 file - promoters60/4282487
attaatg

SEQ ID NO: 133238 - DNA, 7 bp, Unknown
  misc_feature (1)..( 7): Result.003 file - promoters60/4282487
gttaatg

SEQ ID NO: 133239 - DNA, 7 bp, Unknown
  misc_feature (1)..( 7): Result.003 file - promoters60/4282487
gttaatt

SEQ ID NO: 133240 - DNA, 10 bp, Unknown
  misc_feature (1)..( 10): Result.003 file - promoters60/4282487
tgaagccaaa

SEQ ID NO: 133241 - DNA, 10 bp, Unknown
  misc_feature (1)..( 10): Result.003 file - promoters60/4282487
tgaaaccaac

SEQ ID NO: 133242 - DNA, 10 bp, Unknown
  misc_feature (1)..( 10): Result.003 file - promoters60/4282487
aagaacaaac

SEQ ID NO: 133243 - DNA, 7 bp, Unknown
  misc_feature (1)..( 7): Result.003 file - promoters60/4282487
caaaaga

SEQ ID NO: 133244 - DNA, 7 bp, Unknown
  misc_feature (1)..( 7): Result.003 file - promoters60/4282487
caaaaga

SEQ ID NO: 133245 - DNA, 6 bp, Unknown
  misc_feature (1)..( 6): Result.003 file - promoters60/4282487
taataa

SEQ ID NO: 133246 - DNA, 6 bp, Unknown
  misc_feature (1)..( 6): Result.003 file - promoters60/4282487
taataa

SEQ ID NO: 133247 - DNA, 6 bp, Unknown
  misc_feature (1)..( 6): Result.003 file - promoters60/4282487
cggttt

SEQ ID NO: 133248 - DNA, 6 bp, Unknown
  misc_feature (1)..( 6): Result.003 file - promoters60/4282487
cggttt

SEQ ID NO: 133249 - DNA, 9 bp, Unknown
  misc_feature (1)..( 9): Result.003 file - promoters60/4282487
cttttaatt

SEQ ID NO: 133250 - DNA, 9 bp, Unknown
  misc_feature (1)..( 9): Result.003 file - promoters60/4282487
cttttgatt

SEQ ID NO: 133251 - DNA, 6 bp, Unknown
  misc_feature (1)..( 6): Result.003 file - promoters60/4282487
aattgt

SEQ ID NO: 133252 - DNA, 6 bp, Unknown
  misc_feature (1)..( 6): Result.003 file - promoters60/4282487
aattgt

SEQ ID NO: 133253 - DNA, 6 bp, Unknown
  misc_feature (1)..( 6): Result.003 file - promoters60/4282487
tatgaa

SEQ ID NO: 133254 - DNA, 6 bp, Unknown
  misc_feature (1)..( 6): Result.003 file - promoters60/4282487
tatgaa

SEQ ID NO: 133255 - DNA, 7 bp, Unknown
  misc_feature (1)..( 7): Result.003 file - promoters60/4282487
aatgttt

SEQ ID NO: 133256 - DNA, 7 bp, Unknown
  misc_feature (1)..( 7): Result.003 file - promoters60/4282487
aatgttt

SEQ ID NO: 133257 - DNA, 6 bp, Unknown
  misc_feature (1)..( 6): Result.003 file - promoters60/4282487
taatat

SEQ ID NO: 133258 - DNA, 6 bp, Unknown
  misc_feature (1)..( 6): Result.003 file - promoters60/4282487
taatat

SEQ ID NO: 133259 - DNA, 7 bp, Unknown
  misc_feature (1)..( 7): Result.003 file - promoters60/4282487
aaattga

SEQ ID NO: 133260 - DNA, 7 bp, Unknown
  misc_feature (1)..( 7): Result.003 file - promoters60/4282487
aaaatga

SEQ ID NO: 133261 - DNA, 7 bp, Unknown
  misc_feature (1)..( 7): Result.003 file - promoters60/4282487
ttttaga

SEQ ID NO: 133262 - DNA, 7 bp, Unknown
  misc_feature (1)..( 7): Result.003 file - promoters60/4282487
tttaaga

SEQ ID NO: 133263 - DNA, 8 bp, Unknown
  misc_feature (1)..( 8): Result.003 file - promoters60/4282487
gaaaacgc

SEQ ID NO: 133264 - DNA, 8 bp, Unknown
  misc_feature (1)..( 8): Result.003 file - promoters60/4282487
gaatacgc

SEQ ID NO: 133265 - DNA, 6 bp, Unknown
  misc_feature (1)..( 6): Result.003 file - promoters60/4282503
agaaat

SEQ ID NO: 133266 - DNA, 6 bp, Unknown
  misc_feature (1)..( 6): Result.003 file - promoters60/4282503
agaaat

SEQ ID NO: 133267 - DNA, 7 bp, Unknown
  misc_feature (1)..( 7): Result.003 file - promoters60/4282503
aagatta

SEQ ID NO: 133268 - DNA, 7 bp, Unknown
  misc_feature (1)..( 7): Result.003 file - promoters60/4282503
aaggtta

SEQ ID NO: 133269 - DNA, 7 bp, Unknown
  misc_feature (1)..( 7): Result.003 file - promoters60/4282503
tttgcaa

SEQ ID NO: 133270 - DNA, 7 bp, Unknown
  misc_feature (1)..( 7): Result.003 file - promoters60/4282503
ttttcaa

SEQ ID NO: 133271 - DNA, 7 bp, Unknown
  misc_feature (1)..( 7): Result.003 file - promoters60/4282503
taaaatt

SEQ ID NO: 133272 - DNA, 7 bp, Unknown
  misc_feature (1)..( 7): Result.003 file - promoters60/4282503
taaaatc

SEQ ID NO: 133273 - DNA, 7 bp, Unknown
  misc_feature (1)..( 7): Result.003 file - promoters60/4282503
caaaatc

SEQ ID NO: 133274 - DNA, 6 bp, Unknown
  misc_feature (1)..( 6): Result.003 file - promoters60/4282503
tataaa

SEQ ID NO: 133275 - DNA, 6 bp, Unknown
  misc_feature (1)..( 6): Result.003 file - promoters60/4282503
tataaa

SEQ ID NO: 133276 - DNA, 6 bp, Unknown
  misc_feature (1)..( 6): Result.003 file - promoters60/4282503
tcaaag

SEQ ID NO: 133277 - DNA, 6 bp, Unknown
  misc_feature (1)..( 6): Result.003 file - promoters60/4282503
tcaaag

SEQ ID NO: 133278 - DNA, 7 bp, Unknown
  misc_feature (1)..( 7): Result.003 file - promoters60/4282503
aaacttt

SEQ ID NO: 133279 - DNA, 7 bp, Unknown
  misc_feature (1)..( 7): Result.003 file - promoters60/4282503
aaaattt

SEQ ID NO: 133280 - DNA, 10 bp, Unknown
  misc_feature (1)..( 10): Result.003 file - promoters60/4282503
tttgaatgcc

SEQ ID NO: 133281 - DNA, 10 bp, Unknown
  misc_feature (1)..( 10): Result.003 file - promoters60/4282503
ttttaataac

SEQ ID NO: 133282 - DNA, 10 bp, Unknown
  misc_feature (1)..( 10): Result.003 file - promoters60/4282503
ttttactaac

SEQ ID NO: 133283 - DNA, 11 bp, Unknown
  misc_feature (1)..( 11): Result.003 file - promoters60/4282503
ccaattatatg

SEQ ID NO: 133284 - DNA, 11 bp, Unknown
  misc_feature (1)..( 11): Result.003 file - promoters60/4282503
tttattaaatg

SEQ ID NO: 133285 - DNA, 11 bp, Unknown
  misc_feature (1)..( 11): Result.003 file - promoters60/4282503
tttactaactt

SEQ ID NO: 133286 - DNA, 6 bp, Unknown
  misc_feature (1)..( 6): Result.003 file - promoters60/4282503
tatata

SEQ ID NO: 133287 - DNA, 6 bp, Unknown
  misc_feature (1)..( 6): Result.003 file - promoters60/4282503
tatata

SEQ ID NO: 133288 - DNA, 6 bp, Unknown
  misc_feature (1)..( 6): Result.003 file - promoters60/4282503
ttatat

SEQ ID NO: 133289 - DNA, 6 bp, Unknown
  misc_feature (1)..( 6): Result.003 file - promoters60/4282503
ttatat

SEQ ID NO: 133290 - DNA, 6 bp, Unknown
  misc_feature (1)..( 6): Result.003 file - promoters60/4282503
tcatat

SEQ ID NO: 133291 - DNA, 6 bp, Unknown
  misc_feature (1)..( 6): Result.003 file - promoters60/4282503
tcatat

SEQ ID NO: 133292 - DNA, 7 bp, Unknown
  misc_feature (1)..( 7): Result.003 file - promoters60/4282503
ttatgtc

SEQ ID NO: 133293 - DNA, 7 bp, Unknown
  misc_feature (1)..( 7): Result.003 file - promoters60/4282503
ttatgtc

SEQ ID NO: 133294 - DNA, 7 bp, Unknown
  misc_feature (1)..( 7): Result.003 file - promoters60/4282503
attggta

SEQ ID NO: 133295 - DNA, 7 bp, Unknown
  misc_feature (1)..( 7): Result.003 file - promoters60/4282503
attagta

SEQ ID NO: 133296 - DNA, 7 bp, Unknown
  misc_feature (1)..( 7): Result.003 file - promoters60/4282503
gattcag

SEQ ID NO: 133297 - DNA, 7 bp, Unknown
  misc_feature (1)..( 7): Result.003 file - promoters60/4282503
gattcag

SEQ ID NO: 133298 - DNA, 7 bp, Unknown
  misc_feature (1)..( 7): Result.003 file - promoters60/4282503
gatggat

SEQ ID NO: 133299 - DNA, 7 bp, Unknown
  misc_feature (1)..( 7): Result.003 file - promoters60/4282503
gatcgat

SEQ ID NO: 133300 - DNA, 7 bp, Unknown
  misc_feature (1)..( 7): Result.003 file - promoters60/4282506
gtggttg

SEQ ID NO: 133301 - DNA, 7 bp, Unknown
  misc_feature (1)..( 7): Result.003 file - promoters60/4282506
gtgattg

SEQ ID NO: 133302 - DNA, 7 bp, Unknown
  misc_feature (1)..( 7): Result.003 file - promoters60/4282506
agaggag

SEQ ID NO: 133303 - DNA, 7 bp, Unknown
  misc_feature (1)..( 7): Result.003 file - promoters60/4282506
agaggag

SEQ ID NO: 133304 - DNA, 6 bp, Unknown
  misc_feature (1)..( 6): Result.003 file - promoters60/4282506
tctttc

SEQ ID NO: 133305 - DNA, 6 bp, Unknown
  misc_feature (1)..( 6): Result.003 file - promoters60/4282506
tctttc

SEQ ID NO: 133306 - DNA, 8 bp, Unknown
  misc_feature (1)..( 8): Result.003 file - promoters60/4282506
cttcttct

SEQ ID NO: 133307 - DNA, 8 bp, Unknown
  misc_feature (1)..( 8): Result.003 file - promoters60/4282506
cttcttct

SEQ ID NO: 133308 - DNA, 6 bp, Unknown
  misc_feature (1)..( 6): Result.003 file - promoters60/4282506
ttctct

SEQ ID NO: 133309 - DNA, 6 bp, Unknown
  misc_feature (1)..( 6): Result.003 file - promoters60/4282506
ttctct

SEQ ID NO: 133310 - DNA, 10 bp, Unknown
  misc_feature (1)..( 10): Result.003 file - promoters60/4282506
caataaactt

SEQ ID NO: 133311 - DNA, 10 bp, Unknown
  misc_feature (1)..( 10): Result.003 file - promoters60/4282506
caataaccaa

SEQ ID NO: 133312 - DNA, 10 bp, Unknown
  misc_feature (1)..( 10): Result.003 file - promoters60/4282506
aaattaccaa

SEQ ID NO: 133313 - DNA, 7 bp, Unknown
  misc_feature (1)..( 7): Result.003 file - promoters60/4282506
tttctaa

SEQ ID NO: 133314 - DNA, 7 bp, Unknown
  misc_feature (1)..( 7): Result.003 file - promoters60/4282506
tttataa

SEQ ID NO: 133315 - DNA, 6 bp, Unknown
  misc_feature (1)..( 6): Result.003 file - promoters60/4282506
tattct

SEQ ID NO: 133316 - DNA, 6 bp, Unknown
  misc_feature (1)..( 6): Result.003 file - promoters60/4282506
tattct

SEQ ID NO: 133317 - DNA, 7 bp, Unknown
  misc_feature (1)..( 7): Result.003 file - promoters60/4282506
ttcttct

SEQ ID NO: 133318 - DNA, 7 bp, Unknown
  misc_feature (1)..( 7): Result.003 file - promoters60/4282506
ttcatct

SEQ ID NO: 133319 - DNA, 7 bp, Unknown
  misc_feature (1)..( 7): Result.003 file - promoters60/4282506
gtatcaa

SEQ ID NO: 133320 - DNA, 7 bp, Unknown
  misc_feature (1)..( 7): Result.003 file - promoters60/4282506
gtatcaa

SEQ ID NO: 133321 - DNA, 8 bp, Unknown
  misc_feature (1)..( 8): Result.003 file - promoters60/4282506
cagctatt

SEQ ID NO: 133322 - DNA, 8 bp, Unknown
  misc_feature (1)..( 8): Result.003 file - promoters60/4282506
cagttatt

SEQ ID NO: 133323 - DNA, 7 bp, Unknown
  misc_feature (1)..( 7): Result.003 file - promoters60/4282506
attgttg

SEQ ID NO: 133324 - DNA, 7 bp, Unknown
  misc_feature (1)..( 7): Result.003 file - promoters60/4282506
atttttg

SEQ ID NO: 133325 - DNA, 8 bp, Unknown
  misc_feature (1)..( 8): Result.003 file - promoters60/4282506
catataaa

SEQ ID NO: 133326 - DNA, 8 bp, Unknown
  misc_feature (1)..( 8): Result.003 file - promoters60/4282506
cataaaaa

SEQ ID NO: 133327 - DNA, 7 bp, Unknown
  misc_feature (1)..( 7): Result.003 file - promoters60/4282506
acagatt

SEQ ID NO: 133328 - DNA, 7 bp, Unknown
  misc_feature (1)..( 7): Result.003 file - promoters60/4282506
acatatt

SEQ ID NO: 133329 - DNA, 7 bp, Unknown
  misc_feature (1)..( 7): Result.003 file - promoters60/4282506
tttagtt

SEQ ID NO: 133330 - DNA, 7 bp, Unknown
  misc_feature (1)..( 7): Result.003 file - promoters60/4282506
ttttgtt

SEQ ID NO: 133331 - DNA, 8 bp, Unknown
  misc_feature (1)..( 8): Result.003 file - promoters60/4282506
ttcacaaa

SEQ ID NO: 133332 - DNA, 8 bp, Unknown
  misc_feature (1)..( 8): Result.003 file - promoters60/4282506
ttcaaaaa

SEQ ID NO: 133333 - DNA, 7 bp, Unknown
  misc_feature (1)..( 7): Result.003 file - promoters60/4282564
attacaa

SEQ ID NO: 133334 - DNA, 7 bp, Unknown
  misc_feature (1)..( 7): Result.003 file - promoters60/4282564
attacaa

SEQ ID NO: 133335 - DNA, 9 bp, Unknown
  misc_feature (1)..( 9): Result.003 file - promoters60/4282564
ttcattcat

SEQ ID NO: 133336 - DNA, 9 bp, Unknown
  misc_feature (1)..( 9): Result.003 file - promoters60/4282564
ttcaatcat

SEQ ID NO: 133337 - DNA, 10 bp, Unknown
  misc_feature (1)..( 10): Result.003 file - promoters60/4282564
aatcaacaaa

SEQ ID NO: 133338 - DNA, 10 bp, Unknown
  misc_feature (1)..( 10): Result.003 file - promoters60/4282564
aatcaataaa

SEQ ID NO: 133339 - DNA, 8 bp, Unknown
  misc_feature (1)..( 8): Result.003 file - promoters60/4282564
ataaaacc

SEQ ID NO: 133340 - DNA, 8 bp, Unknown
  misc_feature (1)..( 8): Result.003 file - promoters60/4282564
ataaaacc

SEQ ID NO: 133341 - DNA, 6 bp, Unknown
  misc_feature (1)..( 6): Result.003 file - promoters60/4282564
attgga

SEQ ID NO: 133342 - DNA, 6 bp, Unknown
  misc_feature (1)..( 6): Result.003 file - promoters60/4282564
attgga

SEQ ID NO: 133343 - DNA, 6 bp, Unknown
  misc_feature (1)..( 6): Result.003 file - promoters60/4282564
aactaa

SEQ ID NO: 133344 - DNA, 6 bp, Unknown
  misc_feature (1)..( 6): Result.003 file - promoters60/4282564
aactaa

SEQ ID NO: 133345 - DNA, 6 bp, Unknown
  misc_feature (1)..( 6): Result.003 file - promoters60/4282564
tgtttc

SEQ ID NO: 133346 - DNA, 6 bp, Unknown
  misc_feature (1)..( 6): Result.003 file - promoters60/4282564
tgtttc

SEQ ID NO: 133347 - DNA, 12 bp, Unknown
  misc_feature (1)..( 12): Result.003 file - promoters60/4282580
ttggttgtttga

SEQ ID NO: 133348 - DNA, 12 bp, Unknown
  misc_feature (1)..( 12): Result.003 file - promoters60/4282580
ttgattgattga

SEQ ID NO: 133349 - DNA, 12 bp, Unknown
  misc_feature (1)..( 12): Result.003 file - promoters60/4282580
ataatttattta

SEQ ID NO: 133350 - DNA, 12 bp, Unknown
  misc_feature (1)..( 12): Result.003 file - promoters60/4282580
atcatttttttc

SEQ ID NO: 133351 - DNA, 8 bp, Unknown
  misc_feature (1)..( 8): Result.003 file - promoters60/4282580
ttttgtag

SEQ ID NO: 133352 - DNA, 8 bp, Unknown
  misc_feature (1)..( 8): Result.003 file - promoters60/4282580
ttttttag

SEQ ID NO: 133353 - DNA, 8 bp, Unknown
  misc_feature (1)..( 8): Result.003 file - promoters60/4282580
tgttttag

SEQ ID NO: 133354 - DNA, 8 bp, Unknown
  misc_feature (1)..( 8): Result.003 file - promoters60/4282580
atttttac

SEQ ID NO: 133355 - DNA, 10 bp, Unknown
  misc_feature (1)..( 10): Result.003 file - promoters60/4282580
tatcttcaaa

SEQ ID NO: 133356 - DNA, 10 bp, Unknown
  misc_feature (1)..( 10): Result.003 file - promoters60/4282580
tattttcagt

SEQ ID NO: 133357 - DNA, 10 bp, Unknown
  misc_feature (1)..( 10): Result.003 file - promoters60/4282580
gattttcatt

SEQ ID NO: 133358 - DNA, 10 bp, Unknown
  misc_feature (1)..( 10): Result.003 file - promoters60/4282580
ttgtttgatt

SEQ ID NO: 133359 - DNA, 8 bp, Unknown
  misc_feature (1)..( 8): Result.003 file - promoters60/4282580
caattttg

SEQ ID NO: 133360 - DNA, 8 bp, Unknown
  misc_feature (1)..( 8): Result.003 file - promoters60/4282580
tgattttg

SEQ ID NO: 133361 - DNA, 8 bp, Unknown
  misc_feature (1)..( 8): Result.003 file - promoters60/4282580
taatttta

SEQ ID NO: 133362 - DNA, 8 bp, Unknown
  misc_feature (1)..( 8): Result.003 file - promoters60/4282580
tgattttg

SEQ ID NO: 133363 - DNA, 10 bp, Unknown
  misc_feature (1)..( 10): Result.003 file - promoters60/4282580
gtttaattga

SEQ ID NO: 133364 - DNA, 10 bp, Unknown
  misc_feature (1)..( 10): Result.003 file - promoters60/4282580
gtttgattgt

SEQ ID NO: 133365 - DNA, 10 bp, Unknown
  misc_feature (1)..( 10): Result.003 file - promoters60/4282580
atttgatttt

SEQ ID NO: 133366 - DNA, 11 bp, Unknown
  misc_feature (1)..( 11): Result.003 file - promoters60/4282580
ataaaatatga

SEQ ID NO: 133367 - DNA, 9 bp, Unknown
  misc_feature (1)..( 9): Result.003 file - promoters60/4282580
atttagatt

SEQ ID NO: 133368 - DNA, 9 bp, Unknown
  misc_feature (1)..( 9): Result.003 file - promoters60/4282580
aattagatc

SEQ ID NO: 133369 - DNA, 9 bp, Unknown
  misc_feature (1)..( 9): Result.003 file - promoters60/4282580
atttatatt

SEQ ID NO: 133370 - DNA, 9 bp, Unknown
  misc_feature (1)..( 9): Result.003 file - promoters60/4282580
tcttatatc

SEQ ID NO: 133371 - DNA, 8 bp, Unknown
  misc_feature (1)..( 8): Result.003 file - promoters60/4282588
aacaaaat

SEQ ID NO: 133372 - DNA, 8 bp, Unknown
  misc_feature (1)..( 8): Result.003 file - promoters60/4282588
aacacaat

SEQ ID NO: 133373 - DNA, 6 bp, Unknown
  misc_feature (1)..( 6): Result.003 file - promoters60/4282588
aatgtg

SEQ ID NO: 133374 - DNA, 6 bp, Unknown
  misc_feature (1)..( 6): Result.003 file - promoters60/4282588
aatgtg

SEQ ID NO: 133375 - DNA, 6 bp, Unknown
  misc_feature (1)..( 6): Result.003 file - promoters60/4282588
acacat

SEQ ID NO: 133376 - DNA, 6 bp, Unknown
  misc_feature (1)..( 6): Result.003 file - promoters60/4282588
acacat

SEQ ID NO: 133377 - DNA, 7 bp, Unknown
  misc_feature (1)..( 7): Result.003 file - promoters60/4282588
caataaa

SEQ ID NO: 133378 - DNA, 7 bp, Unknown
  misc_feature (1)..( 7): Result.003 file - promoters60/4282588
caataat

SEQ ID NO: 133379 - DNA, 7 bp, Unknown
  misc_feature (1)..( 7): Result.003 file - promoters60/4282588
taataaa

SEQ ID NO: 133380 - DNA, 8 bp, Unknown
  misc_feature (1)..( 8): Result.003 file - promoters60/4282588
agaaaaat

SEQ ID NO: 133381 - DNA, 8 bp, Unknown
  misc_feature (1)..( 8): Result.003 file - promoters60/4282588
caaaaaat

SEQ ID NO: 133382 - DNA, 8 bp, Unknown
  misc_feature (1)..( 8): Result.003 file - promoters60/4282588
agaaaaaa

SEQ ID NO: 133383 - DNA, 9 bp, Unknown
  misc_feature (1)..( 9): Result.003 file - promoters60/4282588
aatgaagta

SEQ ID NO: 133384 - DNA, 9 bp, Unknown
  misc_feature (1)..( 9): Result.003 file - promoters60/4282588
aatgacgta

SEQ ID NO: 133385 - DNA, 10 bp, Unknown
  misc_feature (1)..( 10): Result.003 file - promoters60/4282588
gaaaaatcta

SEQ ID NO: 133386 - DNA, 10 bp, Unknown
  misc_feature (1)..( 10): Result.003 file - promoters60/4282588
gaaatatcta

SEQ ID NO: 133387 - DNA, 9 bp, Unknown
  misc_feature (1)..( 9): Result.003 file - promoters60/4282588
ctataaata

SEQ ID NO: 133388 - DNA, 9 bp, Unknown
  misc_feature (1)..( 9): Result.003 file - promoters60/4282588
ctatatata

SEQ ID NO: 133389 - DNA, 9 bp, Unknown
  misc_feature (1)..( 9): Result.003 file - promoters60/4282588
atataaacc

SEQ ID NO: 133390 - DNA, 7 bp, Unknown
  misc_feature (1)..( 7): Result.003 file - promoters60/4282588
tttttaa

SEQ ID NO: 133391 - DNA, 7 bp, Unknown
  misc_feature (1)..( 7): Result.003 file - promoters60/4282588
tttgtaa

SEQ ID NO: 133392 - DNA, 7 bp, Unknown
  misc_feature (1)..( 7): Result.003 file - promoters60/4282588
aataatg

SEQ ID NO: 133393 - DNA, 7 bp, Unknown
  misc_feature (1)..( 7): Result.003 file - promoters60/4282588
aataata

SEQ ID NO: 133394 - DNA, 7 bp, Unknown
  misc_feature (1)..( 7): Result.003 file - promoters60/4282588
cataata

SEQ ID NO: 133395 - DNA, 10 bp, Unknown
  misc_feature (1)..( 10): Result.003 file - promoters60/4282588
gtaaaaacta

SEQ ID NO: 133396 - DNA, 10 bp, Unknown
  misc_feature (1)..( 10): Result.003 file - promoters60/4282588
ataataacta

SEQ ID NO: 133397 - DNA, 10 bp, Unknown
  misc_feature (1)..( 10): Result.003 file - promoters60/4282588
ataataggct

SEQ ID NO: 133398 - DNA, 6 bp, Unknown
  misc_feature (1)..( 6): Result.003 file - promoters60/4282588
aataaa

SEQ ID NO: 133399 - DNA, 6 bp, Unknown
  misc_feature (1)..( 6): Result.003 file - promoters60/4282588
aataaa

SEQ ID NO: 133400 - DNA, 6 bp, Unknown
  misc_feature (1)..( 6): Result.003 file - promoters60/4282588
aaaaac

SEQ ID NO: 133401 - DNA, 6 bp, Unknown
  misc_feature (1)..( 6): Result.003 file - promoters60/4282588
aaaaac

SEQ ID NO: 133402 - DNA, 7 bp, Unknown
  misc_feature (1)..( 7): Result.003 file - promoters60/4282588
aaaaaaa

SEQ ID NO: 133403 - DNA, 7 bp, Unknown
  misc_feature (1)..( 7): Result.003 file - promoters60/4282588
aaataaa

SEQ ID NO: 133404 - DNA, 10 bp, Unknown
  misc_feature (1)..( 10): Result.003 file - promoters60/4282588
aagatatttt

SEQ ID NO: 133405 - DNA, 10 bp, Unknown
  misc_feature (1)..( 10): Result.003 file - promoters60/4282588
ttgatttttt

SEQ ID NO: 133406 - DNA, 10 bp, Unknown
  misc_feature (1)..( 10): Result.003 file - promoters60/4282588
ttgatttttg

SEQ ID NO: 133407 - DNA, 7 bp, Unknown
  misc_feature (1)..( 7): Result.003 file - promoters60/4282588
tttaaaa

SEQ ID NO: 133408 - DNA, 7 bp, Unknown
  misc_feature (1)..( 7): Result.003 file - promoters60/4282588
tttaaaa

SEQ ID NO: 133409 - DNA, 7 bp, Unknown
  misc_feature (1)..( 7): Result.003 file - promoters60/4282588
tttaaac

SEQ ID NO: 133410 - DNA, 7 bp, Unknown
  misc_feature (1)..( 7): Result.003 file - promoters60/4282588
tttaaac

SEQ ID NO: 133411 - DNA, 7 bp, Unknown
  misc_feature (1)..( 7): Result.003 file - promoters60/4282588
actcata

SEQ ID NO: 133412 - DNA, 7 bp, Unknown
  misc_feature (1)..( 7): Result.003 file - promoters60/4282588
actaata

SEQ ID NO: 133413 - DNA, 8 bp, Unknown
  misc_feature (1)..( 8): Result.003 file - promoters60/4282588
tttgaact

SEQ ID NO: 133414 - DNA, 8 bp, Unknown
  misc_feature (1)..( 8): Result.003 file - promoters60/4282588
tttaaact

SEQ ID NO: 133415 - DNA, 6 bp, Unknown
  misc_feature (1)..( 6): Result.003 file - promoters60/4282588
gcataa

SEQ ID NO: 133416 - DNA, 6 bp, Unknown
  misc_feature (1)..( 6): Result.003 file - promoters60/4282588
gcataa

SEQ ID NO: 133417 - DNA, 11 bp, Unknown
  misc_feature (1)..( 11): Result.003 file - promoters60/4282588
aatatttttct

SEQ ID NO: 133418 - DNA, 11 bp, Unknown
  misc_feature (1)..( 11): Result.003 file - promoters60/4282588
aatttttttct

SEQ ID NO: 133419 - DNA, 7 bp, Unknown
  misc_feature (1)..( 7): Result.003 file - promoters60/4282588
aaattta

SEQ ID NO: 133420 - DNA, 7 bp, Unknown
  misc_feature (1)..( 7): Result.003 file - promoters60/4282588
aaaatta

SEQ ID NO: 133421 - DNA, 7 bp, Unknown
  misc_feature (1)..( 7): Result.003 file - promoters60/4282588
aaatata

SEQ ID NO: 133422 - DNA, 7 bp, Unknown
  misc_feature (1)..( 7): Result.003 file - promoters60/4282588
aaaaata

SEQ ID NO: 133423 - DNA, 6 bp, Unknown
  misc_feature (1)..( 6): Result.003 file - promoters60/4282588
tttgac

SEQ ID NO: 133424 - DNA, 6 bp, Unknown
  misc_feature (1)..( 6): Result.003 file - promoters60/4282588
tttgac

SEQ ID NO: 133425 - DNA, 7 bp, Unknown
  misc_feature (1)..( 7): Result.003 file - promoters60/4282588
aaagaag

SEQ ID NO: 133426 - DNA, 7 bp, Unknown
  misc_feature (1)..( 7): Result.003 file - promoters60/4282588
aaaaaag

SEQ ID NO: 133427 - DNA, 9 bp, Unknown
  misc_feature (1)..( 9): Result.003 file - promoters60/4282588
aaaggactc

SEQ ID NO: 133428 - DNA, 9 bp, Unknown
  misc_feature (1)..( 9): Result.003 file - promoters60/4282588
aaaagactc

SEQ ID NO: 133429 - DNA, 6 bp, Unknown
  misc_feature (1)..( 6): Result.003 file - promoters60/4282588
cagccg

SEQ ID NO: 133430 - DNA, 6 bp, Unknown
  misc_feature (1)..( 6): Result.003 file - promoters60/4282588
cagccg

SEQ ID NO: 133431 - DNA, 6 bp, Unknown
  misc_feature (1)..( 6): Result.003 file - promoters60/4282588
tctcct

SEQ ID NO: 133432 - DNA, 6 bp, Unknown
  misc_feature (1)..( 6): Result.003 file - promoters60/4282588
tctcct

SEQ ID NO: 133433 - DNA, 8 bp, Unknown
  misc_feature (1)..( 8): Result.003 file - promoters60/4282611
tttgattc

SEQ ID NO: 133434 - DNA, 8 bp, Unknown
  misc_feature (1)..( 8): Result.003 file - promoters60/4282611
attgattc

SEQ ID NO: 133435 - DNA, 8 bp, Unknown
  misc_feature (1)..( 8): Result.003 file - promoters60/4282611
tttgtttc

SEQ ID NO: 133436 - DNA, 7 bp, Unknown
  misc_feature (1)..( 7): Result.003 file - promoters60/4282611
tacaaat

SEQ ID NO: 133437 - DNA, 7 bp, Unknown
  misc_feature (1)..( 7): Result.003 file - promoters60/4282611
aacaaat

SEQ ID NO: 133438 - DNA, 7 bp, Unknown
  misc_feature (1)..( 7): Result.003 file - promoters60/4282611
aacaaac

SEQ ID NO: 133439 - DNA, 9 bp, Unknown
  misc_feature (1)..( 9): Result.003 file - promoters60/4282611
taagtaaaa

SEQ ID NO: 133440 - DNA, 9 bp, Unknown
  misc_feature (1)..( 9): Result.003 file - promoters60/4282611
taactaaaa

SEQ ID NO: 133441 - DNA, 9 bp, Unknown
  misc_feature (1)..( 9): Result.003 file - promoters60/4282611
taatgactt

SEQ ID NO: 133442 - DNA, 8 bp, Unknown
  misc_feature (1)..( 8): Result.003 file - promoters60/4282611
taaaaacc

SEQ ID NO: 133443 - DNA, 8 bp, Unknown
  misc_feature (1)..( 8): Result.003 file - promoters60/4282611
taataact

SEQ ID NO: 133444 - DNA, 8 bp, Unknown
  misc_feature (1)..( 8): Result.003 file - promoters60/4282611
taatgact

SEQ ID NO: 133445 - DNA, 9 bp, Unknown
  misc_feature (1)..( 9): Result.003 file - promoters60/4282614
gagattcat

SEQ ID NO: 133446 - DNA, 9 bp, Unknown
  misc_feature (1)..( 9): Result.003 file - promoters60/4282614
tttattcat

SEQ ID NO: 133447 - DNA, 9 bp, Unknown
  misc_feature (1)..( 9): Result.003 file - promoters60/4282614
tttcttcac

SEQ ID NO: 133448 - DNA, 9 bp, Unknown
  misc_feature (1)..( 9): Result.003 file - promoters60/4282614
tttcttcac

SEQ ID NO: 133449 - DNA, 9 bp, Unknown
  misc_feature (1)..( 9): Result.003 file - promoters60/4282614
gatttgttt

SEQ ID NO: 133450 - DNA, 9 bp, Unknown
  misc_feature (1)..( 9): Result.003 file - promoters60/4282614
tttttgttg

SEQ ID NO: 133451 - DNA, 9 bp, Unknown
  misc_feature (1)..( 9): Result.003 file - promoters60/4282614
aatttattt

SEQ ID NO: 133452 - DNA, 9 bp, Unknown
  misc_feature (1)..( 9): Result.003 file - promoters60/4282614
gatttgttt

SEQ ID NO: 133453 - DNA, 10 bp, Unknown
  misc_feature (1)..( 10): Result.003 file - promoters60/4282614
aaaatggtaa

SEQ ID NO: 133454 - DNA, 10 bp, Unknown
  misc_feature (1)..( 10): Result.003 file - promoters60/4282614
aaaatgtttt

SEQ ID NO: 133455 - DNA, 10 bp, Unknown
  misc_feature (1)..( 10): Result.003 file - promoters60/4282614
gaaatatttt

SEQ ID NO: 133456 - DNA, 10 bp, Unknown
  misc_feature (1)..( 10): Result.003 file - promoters60/4282614
gaaatatctc

SEQ ID NO: 133457 - DNA, 9 bp, Unknown
  misc_feature (1)..( 9): Result.003 file - promoters60/4282614
actatcata

SEQ ID NO: 133458 - DNA, 9 bp, Unknown
  misc_feature (1)..( 9): Result.003 file - promoters60/4282614
tcaatcata

SEQ ID NO: 133459 - DNA, 9 bp, Unknown
  misc_feature (1)..( 9): Result.003 file - promoters60/4282614
aatatgata

SEQ ID NO: 133460 - DNA, 9 bp, Unknown
  misc_feature (1)..( 9): Result.003 file - promoters60/4282614
tcaaccata

SEQ ID NO: 133461 - DNA, 9 bp, Unknown
  misc_feature (1)..( 9): Result.003 file - promoters60/4282614
aaatttcat

SEQ ID NO: 133462 - DNA, 9 bp, Unknown
  misc_feature (1)..( 9): Result.003 file - promoters60/4282614
taatttcat

SEQ ID NO: 133463 - DNA, 9 bp, Unknown
  misc_feature (1)..( 9): Result.003 file - promoters60/4282614
taatttatt

SEQ ID NO: 133464 - DNA, 9 bp, Unknown
  misc_feature (1)..( 9): Result.003 file - promoters60/4282614
taatctcat

SEQ ID NO: 133465 - DNA, 8 bp, Unknown
  misc_feature (1)..( 8): Result.003 file - promoters60/4282614
caaagaaa

SEQ ID NO: 133466 - DNA, 8 bp, Unknown
  misc_feature (1)..( 8): Result.003 file - promoters60/4282614
aaaagaat

SEQ ID NO: 133467 - DNA, 9 bp, Unknown
  misc_feature (1)..( 9): Result.003 file - promoters60/4282614
tttaagaaa

SEQ ID NO: 133468 - DNA, 9 bp, Unknown
  misc_feature (1)..( 9): Result.003 file - promoters60/4282614
aaatagaac

SEQ ID NO: 133469 - DNA, 12 bp, Unknown
  misc_feature (1)..( 12): Result.003 file - promoters60/4282614
aaaatatgtata

SEQ ID NO: 133470 - DNA, 12 bp, Unknown
  misc_feature (1)..( 12): Result.003 file - promoters60/4282614
aaaatgtgtgtt

SEQ ID NO: 133471 - DNA, 12 bp, Unknown
  misc_feature (1)..( 12): Result.003 file - promoters60/4282614
ttcctatttatt

SEQ ID NO: 133472 - DNA, 12 bp, Unknown
  misc_feature (1)..( 12): Result.003 file - promoters60/4282614
ttgaactttatt

SEQ ID NO: 133473 - DNA, 12 bp, Unknown
  misc_feature (1)..( 12): Result.003 file - promoters60/4282614
aacaaaaagaaa

SEQ ID NO: 133474 - DNA, 12 bp, Unknown
  misc_feature (1)..( 12): Result.003 file - promoters60/4282614
agactaaataaa

SEQ ID NO: 133475 - DNA, 12 bp, Unknown
  misc_feature (1)..( 12): Result.003 file - promoters60/4282614
aacaaaaagaaa

SEQ ID NO: 133476 - DNA, 12 bp, Unknown
  misc_feature (1)..( 12): Result.003 file - promoters60/4282614
ccacacaacaac

SEQ ID NO: 133477 - DNA, 7 bp, Unknown
  misc_feature (1)..( 7): Result.003 file - promoters60/4282626
ataaaaa

SEQ ID NO: 133478 - DNA, 7 bp, Unknown
  misc_feature (1)..( 7): Result.003 file - promoters60/4282626
ataaaaa

SEQ ID NO: 133479 - DNA, 15 bp, Unknown
  misc_feature (1)..( 15): Result.003 file - promoters60/4282626
taaaattaaaatata

SEQ ID NO: 133480 - DNA, 15 bp, Unknown
  misc_feature (1)..( 15): Result.003 file - promoters60/4282626
aaccattgaaagata

SEQ ID NO: 133481 - DNA, 15 bp, Unknown
  misc_feature (1)..( 15): Result.003 file - promoters60/4282626
ataaattaatctgat

SEQ ID NO: 133482 - DNA, 7 bp, Unknown
  misc_feature (1)..( 7): Result.003 file - promoters60/4282626
tagaaag

SEQ ID NO: 133483 - DNA, 7 bp, Unknown
  misc_feature (1)..( 7): Result.003 file - promoters60/4282626
tagaaag

SEQ ID NO: 133484 - DNA, 8 bp, Unknown
  misc_feature (1)..( 8): Result.003 file - promoters60/4282626
gtgtattt

SEQ ID NO: 133485 - DNA, 8 bp, Unknown
  misc_feature (1)..( 8): Result.003 file - promoters60/4282626
gtgtcttt

SEQ ID NO: 133486 - DNA, 7 bp, Unknown
  misc_feature (1)..( 7): Result.003 file - promoters60/4282626
aaattca

SEQ ID NO: 133487 - DNA, 7 bp, Unknown
  misc_feature (1)..( 7): Result.003 file - promoters60/4282626
aaaatca

SEQ ID NO: 133488 - DNA, 8 bp, Unknown
  misc_feature (1)..( 8): Result.003 file - promoters60/4282626
ctttgttg

SEQ ID NO: 133489 - DNA, 8 bp, Unknown
  misc_feature (1)..( 8): Result.003 file - promoters60/4282626
cttagttg

SEQ ID NO: 133490 - DNA, 9 bp, Unknown
  misc_feature (1)..( 9): Result.003 file - promoters60/4282626
aagtaaaaa

SEQ ID NO: 133491 - DNA, 9 bp, Unknown
  misc_feature (1)..( 9): Result.003 file - promoters60/4282626
aagtaaaaa

SEQ ID NO: 133492 - DNA, 9 bp, Unknown
  misc_feature (1)..( 9): Result.003 file - promoters60/4282626
aaaaaataa

SEQ ID NO: 133493 - DNA, 9 bp, Unknown
  misc_feature (1)..( 9): Result.003 file - promoters60/4282626
aaaaactaa

SEQ ID NO: 133494 - DNA, 10 bp, Unknown
  misc_feature (1)..( 10): Result.003 file - promoters60/4282626
aaaaattatt

SEQ ID NO: 133495 - DNA, 10 bp, Unknown
  misc_feature (1)..( 10): Result.003 file - promoters60/4282626
aaaatttatt

SEQ ID NO: 133496 - DNA, 6 bp, Unknown
  misc_feature (1)..( 6): Result.003 file - promoters60/4282626
tattta

SEQ ID NO: 133497 - DNA, 6 bp, Unknown
  misc_feature (1)..( 6): Result.003 file - promoters60/4282626
tattta

SEQ ID NO: 133498 - DNA, 6 bp, Unknown
  misc_feature (1)..( 6): Result.003 file - promoters60/4282626
aaaagt

SEQ ID NO: 133499 - DNA, 6 bp, Unknown
  misc_feature (1)..( 6): Result.003 file - promoters60/4282626
aaaagt

SEQ ID NO: 133500 - DNA, 6 bp, Unknown
  misc_feature (1)..( 6): Result.003 file - promoters60/4282626
gaataa

SEQ ID NO: 133501 - DNA, 6 bp, Unknown
  misc_feature (1)..( 6): Result.003 file - promoters60/4282626
gaataa

SEQ ID NO: 133502 - DNA, 8 bp, Unknown
  misc_feature (1)..( 8): Result.003 file - promoters60/4282626
atatttta

SEQ ID NO: 133503 - DNA, 8 bp, Unknown
  misc_feature (1)..( 8): Result.003 file - promoters60/4282626
ataatttg

SEQ ID NO: 133504 - DNA, 8 bp, Unknown
  misc_feature (1)..( 8): Result.003 file - promoters60/4282626
caaatttg

SEQ ID NO: 133505 - DNA, 8 bp, Unknown
  misc_feature (1)..( 8): Result.003 file - promoters60/4282626
ttaacttg

SEQ ID NO: 133506 - DNA, 8 bp, Unknown
  misc_feature (1)..( 8): Result.003 file - promoters60/4282626
ttaatttg

SEQ ID NO: 133507 - DNA, 6 bp, Unknown
  misc_feature (1)..( 6): Result.003 file - promoters60/4282626
tgtttc

SEQ ID NO: 133508 - DNA, 6 bp, Unknown
  misc_feature (1)..( 6): Result.003 file - promoters60/4282626
tgtttc

SEQ ID NO: 133509 - DNA, 7 bp, Unknown
  misc_feature (1)..( 7): Result.003 file - promoters60/4282626
cgtcttc

SEQ ID NO: 133510 - DNA, 7 bp, Unknown
  misc_feature (1)..( 7): Result.003 file - promoters60/4282626
cgttttc

SEQ ID NO: 133511 - DNA, 7 bp, Unknown
  misc_feature (1)..( 7): Result.003 file - promoters60/4282626
gtattat

SEQ ID NO: 133512 - DNA, 7 bp, Unknown
  misc_feature (1)..( 7): Result.003 file - promoters60/4282626
gtattat

SEQ ID NO: 133513 - DNA, 6 bp, Unknown
  misc_feature (1)..( 6): Result.003 file - promoters60/4282626
aatttg

SEQ ID NO: 133514 - DNA, 6 bp, Unknown
  misc_feature (1)..( 6): Result.003 file - promoters60/4282626
aatttg

SEQ ID NO: 133515 - DNA, 8 bp, Unknown
  misc_feature (1)..( 8): Result.003 file - promoters60/4282641
ttaagaaa

SEQ ID NO: 133516 - DNA, 8 bp, Unknown
  misc_feature (1)..( 8): Result.003 file - promoters60/4282641
ttaagaat

SEQ ID NO: 133517 - DNA, 8 bp, Unknown
  misc_feature (1)..( 8): Result.003 file - promoters60/4282641
aaaagaaa

SEQ ID NO: 133518 - DNA, 7 bp, Unknown
  misc_feature (1)..( 7): Result.003 file - promoters60/4282641
agatttt

SEQ ID NO: 133519 - DNA, 7 bp, Unknown
  misc_feature (1)..( 7): Result.003 file - promoters60/4282641
agaattt

SEQ ID NO: 133520 - DNA, 7 bp, Unknown
  misc_feature (1)..( 7): Result.003 file - promoters60/4282641
tgatttt

SEQ ID NO: 133521 - DNA, 9 bp, Unknown
  misc_feature (1)..( 9): Result.003 file - promoters60/4282641
attttatga

SEQ ID NO: 133522 - DNA, 9 bp, Unknown
  misc_feature (1)..( 9): Result.003 file - promoters60/4282641
cttttttga

SEQ ID NO: 133523 - DNA, 9 bp, Unknown
  misc_feature (1)..( 9): Result.003 file - promoters60/4282641
atttaatgt

SEQ ID NO: 133524 - DNA, 8 bp, Unknown
  misc_feature (1)..( 8): Result.003 file - promoters60/4282641
gttttctt

SEQ ID NO: 133525 - DNA, 8 bp, Unknown
  misc_feature (1)..( 8): Result.003 file - promoters60/4282641
cttttctc

SEQ ID NO: 133526 - DNA, 8 bp, Unknown
  misc_feature (1)..( 8): Result.003 file - promoters60/4282641
cttgtctc

SEQ ID NO: 133527 - DNA, 7 bp, Unknown
  misc_feature (1)..( 7): Result.003 file - promoters60/4282641
tcacttg

SEQ ID NO: 133528 - DNA, 7 bp, Unknown
  misc_feature (1)..( 7): Result.003 file - promoters60/4282641
tcatttg

SEQ ID NO: 133529 - DNA, 7 bp, Unknown
  misc_feature (1)..( 7): Result.003 file - promoters60/4282641
ccatttg

SEQ ID NO: 133530 - DNA, 9 bp, Unknown
  misc_feature (1)..( 9): Result.003 file - promoters60/4282647
atcgtatat

SEQ ID NO: 133531 - DNA, 9 bp, Unknown
  misc_feature (1)..( 9): Result.003 file - promoters60/4282647
atcctatat

SEQ ID NO: 133532 - DNA, 6 bp, Unknown
  misc_feature (1)..( 6): Result.003 file - promoters60/4282647
ttgaat

SEQ ID NO: 133533 - DNA, 6 bp, Unknown
  misc_feature (1)..( 6): Result.003 file - promoters60/4282647
ttgaat

SEQ ID NO: 133534 - DNA, 13 bp, Unknown
  misc_feature (1)..( 13): Result.003 file - promoters60/4282647
ttaatcaagattt

SEQ ID NO: 133535 - DNA, 13 bp, Unknown
  misc_feature (1)..( 13): Result.003 file - promoters60/4282647
ttagtcaaaattt

SEQ ID NO: 133536 - DNA, 9 bp, Unknown
  misc_feature (1)..( 9): Result.003 file - promoters60/4282647
ttttgattt

SEQ ID NO: 133537 - DNA, 9 bp, Unknown
  misc_feature (1)..( 9): Result.003 file - promoters60/4282647
atttgatag

SEQ ID NO: 133538 - DNA, 9 bp, Unknown
  misc_feature (1)..( 9): Result.003 file - promoters60/4282647
ttttggttt

SEQ ID NO: 133539 - DNA, 6 bp, Unknown
  misc_feature (1)..( 6): Result.003 file - promoters60/4282647
ttgatt

SEQ ID NO: 133540 - DNA, 6 bp, Unknown
  misc_feature (1)..( 6): Result.003 file - promoters60/4282647
ttgatt

SEQ ID NO: 133541 - DNA, 7 bp, Unknown
  misc_feature (1)..( 7): Result.003 file - promoters60/4282647
cttcttt

SEQ ID NO: 133542 - DNA, 7 bp, Unknown
  misc_feature (1)..( 7): Result.003 file - promoters60/4282647
cttgttt

SEQ ID NO: 133543 - DNA, 8 bp, Unknown
  misc_feature (1)..( 8): Result.003 file - promoters60/4282647
tatcattt

SEQ ID NO: 133544 - DNA, 8 bp, Unknown
  misc_feature (1)..( 8): Result.003 file - promoters60/4282647
tatcattt

SEQ ID NO: 133545 - DNA, 7 bp, Unknown
  misc_feature (1)..( 7): Result.003 file - promoters60/4282647
ttgtaat

SEQ ID NO: 133546 - DNA, 7 bp, Unknown
  misc_feature (1)..( 7): Result.003 file - promoters60/4282647
ttgaaat

SEQ ID NO: 133547 - DNA, 6 bp, Unknown
  misc_feature (1)..( 6): Result.003 file - promoters60/4282647
aaatat

SEQ ID NO: 133548 - DNA, 6 bp, Unknown
  misc_feature (1)..( 6): Result.003 file - promoters60/4282647
aaatat

SEQ ID NO: 133549 - DNA, 12 bp, Unknown
  misc_feature (1)..( 12): Result.003 file - promoters60/4282647
aacaaacacaac

SEQ ID NO: 133550 - DNA, 12 bp, Unknown
  misc_feature (1)..( 12): Result.003 file - promoters60/4282647
tccaaactcaac

SEQ ID NO: 133551 - DNA, 12 bp, Unknown
  misc_feature (1)..( 12): Result.003 file - promoters60/4282647
aacaatcactct

SEQ ID NO: 133552 - DNA, 8 bp, Unknown
  misc_feature (1)..( 8): Result.003 file - promoters60/4282647
ctaaattt

SEQ ID NO: 133553 - DNA, 8 bp, Unknown
  misc_feature (1)..( 8): Result.003 file - promoters60/4282647
ctaatttt

SEQ ID NO: 133554 - DNA, 10 bp, Unknown
  misc_feature (1)..( 10): Result.003 file - promoters60/4282647
taaaaacctg

SEQ ID NO: 133555 - DNA, 10 bp, Unknown
  misc_feature (1)..( 10): Result.003 file - promoters60/4282647
ataaaatctg

SEQ ID NO: 133556 - DNA, 10 bp, Unknown
  misc_feature (1)..( 10): Result.003 file - promoters60/4282647
taaaaacact

SEQ ID NO: 133557 - DNA, 8 bp, Unknown
  misc_feature (1)..( 8): Result.003 file - promoters60/4282647
gacaactt

SEQ ID NO: 133558 - DNA, 8 bp, Unknown
  misc_feature (1)..( 8): Result.003 file - promoters60/4282647
gactactt

SEQ ID NO: 133559 - DNA, 7 bp, Unknown
  misc_feature (1)..( 7): Result.003 file - promoters60/4282647
atttttt

SEQ ID NO: 133560 - DNA, 7 bp, Unknown
  misc_feature (1)..( 7): Result.003 file - promoters60/4282647
atttttt

SEQ ID NO: 133561 - DNA, 7 bp, Unknown
  misc_feature (1)..( 7): Result.003 file - promoters60/4282647
gtttttt

SEQ ID NO: 133562 - DNA, 8 bp, Unknown
  misc_feature (1)..( 8): Result.003 file - promoters60/4282647
tcagtaat

SEQ ID NO: 133563 - DNA, 8 bp, Unknown
  misc_feature (1)..( 8): Result.003 file - promoters60/4282647
tcattaat

SEQ ID NO: 133564 - DNA, 6 bp, Unknown
  misc_feature (1)..( 6): Result.003 file - promoters60/4282647
tctatt

SEQ ID NO: 133565 - DNA, 6 bp, Unknown
  misc_feature (1)..( 6): Result.003 file - promoters60/4282647
tctatt

SEQ ID NO: 133566 - DNA, 7 bp, Unknown
  misc_feature (1)..( 7): Result.003 file - promoters60/4282647
caacatt

SEQ ID NO: 133567 - DNA, 7 bp, Unknown
  misc_feature (1)..( 7): Result.003 file - promoters60/4282647
caaaatt

SEQ ID NO: 133568 - DNA, 7 bp, Unknown
  misc_feature (1)..( 7): Result.003 file - promoters60/4282647
taccaaa

SEQ ID NO: 133569 - DNA, 7 bp, Unknown
  misc_feature (1)..( 7): Result.003 file - promoters60/4282647
tacaaaa

SEQ ID NO: 133570 - DNA, 7 bp, Unknown
  misc_feature (1)..( 7): Result.003 file - promoters60/4282647
aataaaa

SEQ ID NO: 133571 - DNA, 7 bp, Unknown
  misc_feature (1)..( 7): Result.003 file - promoters60/4282647
aattaaa

SEQ ID NO: 133572 - DNA, 7 bp, Unknown
  misc_feature (1)..( 7): Result.003 file - promoters60/4282647
atataat

SEQ ID NO: 133573 - DNA, 7 bp, Unknown
  misc_feature (1)..( 7): Result.003 file - promoters60/4282647
atataat

SEQ ID NO: 133574 - DNA, 8 bp, Unknown
  misc_feature (1)..( 8): Result.003 file - promoters60/4282647
gttaatac

SEQ ID NO: 133575 - DNA, 8 bp, Unknown
  misc_feature (1)..( 8): Result.003 file - promoters60/4282647
gttcatac

SEQ ID NO: 133576 - DNA, 8 bp, Unknown
  misc_feature (1)..( 8): Result.003 file - promoters60/4282647
tatttttt

SEQ ID NO: 133577 - DNA, 8 bp, Unknown
  misc_feature (1)..( 8): Result.003 file - promoters60/4282647
tattcttt

SEQ ID NO: 133578 - DNA, 8 bp, Unknown
  misc_feature (1)..( 8): Result.003 file - promoters60/4282647
cttttttc

SEQ ID NO: 133579 - DNA, 8 bp, Unknown
  misc_feature (1)..( 8): Result.003 file - promoters60/4282647
ctttattc

SEQ ID NO: 133580 - DNA, 8 bp, Unknown
  misc_feature (1)..( 8): Result.003 file - promoters60/4282647
ttgtggta

SEQ ID NO: 133581 - DNA, 8 bp, Unknown
  misc_feature (1)..( 8): Result.003 file - promoters60/4282647
ttgtcgta

SEQ ID NO: 133582 - DNA, 8 bp, Unknown
  misc_feature (1)..( 8): Result.003 file - promoters60/4282647
cattcatg

SEQ ID NO: 133583 - DNA, 8 bp, Unknown
  misc_feature (1)..( 8): Result.003 file - promoters60/4282647
cattaatg

SEQ ID NO: 133584 - DNA, 6 bp, Unknown
  misc_feature (1)..( 6): Result.003 file - promoters60/4282647
actctc

SEQ ID NO: 133585 - DNA, 6 bp, Unknown
  misc_feature (1)..( 6): Result.003 file - promoters60/4282647
actctc

SEQ ID NO: 133586 - DNA, 15 bp, Unknown
  misc_feature (1)..( 15): Result.003 file - promoters60/4282667
taatatttaaacgta

SEQ ID NO: 133587 - DNA, 15 bp, Unknown
  misc_feature (1)..( 15): Result.003 file - promoters60/4282667
gaatttttgcgagca

SEQ ID NO: 133588 - DNA, 15 bp, Unknown
  misc_feature (1)..( 15): Result.003 file - promoters60/4282667
aggtttttgttttct

SEQ ID NO: 133589 - DNA, 15 bp, Unknown
  misc_feature (1)..( 15): Result.003 file - promoters60/4282667
gaagtttctggtggt

SEQ ID NO: 133590 - DNA, 15 bp, Unknown
  misc_feature (1)..( 15): Result.003 file - promoters60/4282667
taacgtttggttttg

SEQ ID NO: 133591 - DNA, 15 bp, Unknown
  misc_feature (1)..( 15): Result.003 file - promoters60/4282667
ccggcgttggatttg

SEQ ID NO: 133592 - DNA, 10 bp, Unknown
  misc_feature (1)..( 10): Result.003 file - promoters60/4282695
acttcaaaaa

SEQ ID NO: 133593 - DNA, 10 bp, Unknown
  misc_feature (1)..( 10): Result.003 file - promoters60/4282695
acttcaaaaa

SEQ ID NO: 133594 - DNA, 9 bp, Unknown
  misc_feature (1)..( 9): Result.003 file - promoters60/4282695
tctcaaact

SEQ ID NO: 133595 - DNA, 9 bp, Unknown
  misc_feature (1)..( 9): Result.003 file - promoters60/4282695
tctaaaaag

SEQ ID NO: 133596 - DNA, 9 bp, Unknown
  misc_feature (1)..( 9): Result.003 file - promoters60/4282695
tatcatact

SEQ ID NO: 133597 - DNA, 7 bp, Unknown
  misc_feature (1)..( 7): Result.003 file - promoters60/4282695
ttgcaga

SEQ ID NO: 133598 - DNA, 7 bp, Unknown
  misc_feature (1)..( 7): Result.003 file - promoters60/4282695
ttggaga

SEQ ID NO: 133599 - DNA, 8 bp, Unknown
  misc_feature (1)..( 8): Result.003 file - promoters60/4282695
gagcaaaa

SEQ ID NO: 133600 - DNA, 8 bp, Unknown
  misc_feature (1)..( 8): Result.003 file - promoters60/4282695
gagaaaaa

SEQ ID NO: 133601 - DNA, 8 bp, Unknown
  misc_feature (1)..( 8): Result.003 file - promoters60/4282695
aaaagatt

SEQ ID NO: 133602 - DNA, 8 bp, Unknown
  misc_feature (1)..( 8): Result.003 file - promoters60/4282695
aaaaaatt

SEQ ID NO: 133603 - DNA, 7 bp, Unknown
  misc_feature (1)..( 7): Result.003 file - promoters60/4282695
aataatt

SEQ ID NO: 133604 - DNA, 7 bp, Unknown
  misc_feature (1)..( 7): Result.003 file - promoters60/4282695
aattatt

SEQ ID NO: 133605 - DNA, 7 bp, Unknown
  misc_feature (1)..( 7): Result.003 file - promoters60/4282695
atgttgg

SEQ ID NO: 133606 - DNA, 7 bp, Unknown
  misc_feature (1)..( 7): Result.003 file - promoters60/4282695
atggtgg

SEQ ID NO: 133607 - DNA, 7 bp, Unknown
  misc_feature (1)..( 7): Result.003 file - promoters60/4282695
ctcatca

SEQ ID NO: 133608 - DNA, 7 bp, Unknown
  misc_feature (1)..( 7): Result.003 file - promoters60/4282695
ctcgtca

SEQ ID NO: 133609 - DNA, 8 bp, Unknown
  misc_feature (1)..( 8): Result.003 file - promoters60/4282695
ccattcag

SEQ ID NO: 133610 - DNA, 8 bp, Unknown
  misc_feature (1)..( 8): Result.003 file - promoters60/4282695
ccaatcag

SEQ ID NO: 133611 - DNA, 9 bp, Unknown
  misc_feature (1)..( 9): Result.003 file - promoters60/4282695
aatcaatgt

SEQ ID NO: 133612 - DNA, 9 bp, Unknown
  misc_feature (1)..( 9): Result.003 file - promoters60/4282695
aattaatgt

SEQ ID NO: 133613 - DNA, 8 bp, Unknown
  misc_feature (1)..( 8): Result.003 file - promoters60/4282695
catagtca

SEQ ID NO: 133614 - DNA, 8 bp, Unknown
  misc_feature (1)..( 8): Result.003 file - promoters60/4282695
cataatca

SEQ ID NO: 133615 - DNA, 9 bp, Unknown
  misc_feature (1)..( 9): Result.003 file - promoters60/4282695
aaaaaaatg

SEQ ID NO: 133616 - DNA, 9 bp, Unknown
  misc_feature (1)..( 9): Result.003 file - promoters60/4282695
aaaataatg

SEQ ID NO: 133617 - DNA, 8 bp, Unknown
  misc_feature (1)..( 8): Result.003 file - promoters60/4282695
aaaaggaa

SEQ ID NO: 133618 - DNA, 8 bp, Unknown
  misc_feature (1)..( 8): Result.003 file - promoters60/4282695
aaaatgaa

SEQ ID NO: 133619 - DNA, 10 bp, Unknown
  misc_feature (1)..( 10): Result.003 file - promoters60/4282695
aaaaaaagga

SEQ ID NO: 133620 - DNA, 10 bp, Unknown
  misc_feature (1)..( 10): Result.003 file - promoters60/4282695
aaaataagga

SEQ ID NO: 133621 - DNA, 13 bp, Unknown
  misc_feature (1)..( 13): Result.003 file - promoters60/4282744
tttatgaaatttt

SEQ ID NO: 133622 - DNA, 13 bp, Unknown
  misc_feature (1)..( 13): Result.003 file - promoters60/4282744
tttttgaaatcta

SEQ ID NO: 133623 - DNA, 13 bp, Unknown
  misc_feature (1)..( 13): Result.003 file - promoters60/4282744
atagtgacatcta

SEQ ID NO: 133624 - DNA, 10 bp, Unknown
  misc_feature (1)..( 10): Result.003 file - promoters60/4282744
aaaactgtaa

SEQ ID NO: 133625 - DNA, 10 bp, Unknown
  misc_feature (1)..( 10): Result.003 file - promoters60/4282744
aaaactgaag

SEQ ID NO: 133626 - DNA, 10 bp, Unknown
  misc_feature (1)..( 10): Result.003 file - promoters60/4282744
aaaactataa

SEQ ID NO: 133627 - DNA, 9 bp, Unknown
  misc_feature (1)..( 9): Result.003 file - promoters60/4282744
aacaaaaac

SEQ ID NO: 133628 - DNA, 9 bp, Unknown
  misc_feature (1)..( 9): Result.003 file - promoters60/4282744
aacataaac

SEQ ID NO: 133629 - DNA, 9 bp, Unknown
  misc_feature (1)..( 9): Result.003 file - promoters60/4282744
aactaaacc

SEQ ID NO: 133630 - DNA, 8 bp, Unknown
  misc_feature (1)..( 8): Result.003 file - promoters60/4282744
aaataata

SEQ ID NO: 133631 - DNA, 8 bp, Unknown
  misc_feature (1)..( 8): Result.003 file - promoters60/4282744
taataata

SEQ ID NO: 133632 - DNA, 8 bp, Unknown
  misc_feature (1)..( 8): Result.003 file - promoters60/4282744
taaaaatc

SEQ ID NO: 133633 - DNA, 8 bp, Unknown
  misc_feature (1)..( 8): Result.003 file - promoters60/4282744
caaactcc

SEQ ID NO: 133634 - DNA, 8 bp, Unknown
  misc_feature (1)..( 8): Result.003 file - promoters60/4282744
aaaaatcc

SEQ ID NO: 133635 - DNA, 8 bp, Unknown
  misc_feature (1)..( 8): Result.003 file - promoters60/4282744
aaaaattt

SEQ ID NO: 133636 - DNA, 12 bp, Unknown
  misc_feature (1)..( 12): Result.003 file - promoters60/4282748
ttcgtggacaca

SEQ ID NO: 133637 - DNA, 12 bp, Unknown
  misc_feature (1)..( 12): Result.003 file - promoters60/4282748
gatttggagaca

SEQ ID NO: 133638 - DNA, 12 bp, Unknown
  misc_feature (1)..( 12): Result.003 file - promoters60/4282748
ttcgttgactaa

SEQ ID NO: 133639 - DNA, 7 bp, Unknown
  misc_feature (1)..( 7): Result.003 file - promoters60/4282748
ggactat

SEQ ID NO: 133640 - DNA, 7 bp, Unknown
  misc_feature (1)..( 7): Result.003 file - promoters60/4282748
tgactat

SEQ ID NO: 133641 - DNA, 7 bp, Unknown
  misc_feature (1)..( 7): Result.003 file - promoters60/4282748
tgattat

SEQ ID NO: 133642 - DNA, 6 bp, Unknown
  misc_feature (1)..( 6): Result.003 file - promoters60/4282748
gtcaat

SEQ ID NO: 133643 - DNA, 6 bp, Unknown
  misc_feature (1)..( 6): Result.003 file - promoters60/4282748
gtcaat

SEQ ID NO: 133644 - DNA, 9 bp, Unknown
  misc_feature (1)..( 9): Result.003 file - promoters60/4282748
tttattgtt

SEQ ID NO: 133645 - DNA, 9 bp, Unknown
  misc_feature (1)..( 9): Result.003 file - promoters60/4282748
tttcttgtt

SEQ ID NO: 133646 - DNA, 6 bp, Unknown
  misc_feature (1)..( 6): Result.003 file - promoters60/4282748
attgta

SEQ ID NO: 133647 - DNA, 6 bp, Unknown
  misc_feature (1)..( 6): Result.003 file - promoters60/4282748
attgta

SEQ ID NO: 133648 - DNA, 8 bp, Unknown
  misc_feature (1)..( 8): Result.003 file - promoters60/4282748
caaataat

SEQ ID NO: 133649 - DNA, 8 bp, Unknown
  misc_feature (1)..( 8): Result.003 file - promoters60/4282748
caaataat

SEQ ID NO: 133650 - DNA, 6 bp, Unknown
  misc_feature (1)..( 6): Result.003 file - promoters60/4282748
tacaaa

SEQ ID NO: 133651 - DNA, 6 bp, Unknown
  misc_feature (1)..( 6): Result.003 file - promoters60/4282748
tacaaa

SEQ ID NO: 133652 - DNA, 9 bp, Unknown
  misc_feature (1)..( 9): Result.003 file - promoters60/4282748
cataaattc

SEQ ID NO: 133653 - DNA, 9 bp, Unknown
  misc_feature (1)..( 9): Result.003 file - promoters60/4282748
cataaattt

SEQ ID NO: 133654 - DNA, 9 bp, Unknown
  misc_feature (1)..( 9): Result.003 file - promoters60/4282748
tatatattt

SEQ ID NO: 133655 - DNA, 6 bp, Unknown
  misc_feature (1)..( 6): Result.003 file - promoters60/4282748
ttatat

SEQ ID NO: 133656 - DNA, 6 bp, Unknown
  misc_feature (1)..( 6): Result.003 file - promoters60/4282748
ttatat

SEQ ID NO: 133657 - DNA, 6 bp, Unknown
  misc_feature (1)..( 6): Result.003 file - promoters60/4282748
ggtttg

SEQ ID NO: 133658 - DNA, 6 bp, Unknown
  misc_feature (1)..( 6): Result.003 file - promoters60/4282748
ggtttg

SEQ ID NO: 133659 - DNA, 6 bp, Unknown
  misc_feature (1)..( 6): Result.003 file - promoters60/4282748
ggttga

SEQ ID NO: 133660 - DNA, 6 bp, Unknown
  misc_feature (1)..( 6): Result.003 file - promoters60/4282748
ggttga

SEQ ID NO: 133661 - DNA, 6 bp, Unknown
  misc_feature (1)..( 6): Result.003 file - promoters60/4282748
ttattg

SEQ ID NO: 133662 - DNA, 6 bp, Unknown
  misc_feature (1)..( 6): Result.003 file - promoters60/4282748
ttattg

SEQ ID NO: 133663 - DNA, 7 bp, Unknown
  misc_feature (1)..( 7): Result.003 file - promoters60/4282748
ttgtatg

SEQ ID NO: 133664 - DNA, 7 bp, Unknown
  misc_feature (1)..( 7): Result.003 file - promoters60/4282748
ttgtatg

SEQ ID NO: 133665 - DNA, 6 bp, Unknown
  misc_feature (1)..( 6): Result.003 file - promoters60/4282748
cgtgtc

SEQ ID NO: 133666 - DNA, 6 bp, Unknown
  misc_feature (1)..( 6): Result.003 file - promoters60/4282748
cgtgtc

SEQ ID NO: 133667 - DNA, 7 bp, Unknown
  misc_feature (1)..( 7): Result.003 file - promoters60/4282748
aatatat

SEQ ID NO: 133668 - DNA, 7 bp, Unknown
  misc_feature (1)..( 7): Result.003 file - promoters60/4282748
aatttat

SEQ ID NO: 133669 - DNA, 6 bp, Unknown
  misc_feature (1)..( 6): Result.003 file - promoters60/4282788
aaaaaa

SEQ ID NO: 133670 - DNA, 6 bp, Unknown
  misc_feature (1)..( 6): Result.003 file - promoters60/4282788
aaaaaa

SEQ ID NO: 133671 - DNA, 8 bp, Unknown
  misc_feature (1)..( 8): Result.003 file - promoters60/4282788
tgtaaaat

SEQ ID NO: 133672 - DNA, 8 bp, Unknown
  misc_feature (1)..( 8): Result.003 file - promoters60/4282788
tgtgaaat

SEQ ID NO: 133673 - DNA, 6 bp, Unknown
  misc_feature (1)..( 6): Result.003 file - promoters60/4282788
gtaaac

SEQ ID NO: 133674 - DNA, 6 bp, Unknown
  misc_feature (1)..( 6): Result.003 file - promoters60/4282788
gtaaac

SEQ ID NO: 133675 - DNA, 8 bp, Unknown
  misc_feature (1)..( 8): Result.003 file - promoters60/4282788
gataagag

SEQ ID NO: 133676 - DNA, 8 bp, Unknown
  misc_feature (1)..( 8): Result.003 file - promoters60/4282788
gattagag

SEQ ID NO: 133677 - DNA, 6 bp, Unknown
  misc_feature (1)..( 6): Result.003 file - promoters60/4282788
agagtt

SEQ ID NO: 133678 - DNA, 6 bp, Unknown
  misc_feature (1)..( 6): Result.003 file - promoters60/4282788
agagtt

SEQ ID NO: 133679 - DNA, 6 bp, Unknown
  misc_feature (1)..( 6): Result.003 file - promoters60/4282788
tgtctc

SEQ ID NO: 133680 - DNA, 6 bp, Unknown
  misc_feature (1)..( 6): Result.003 file - promoters60/4282788
tgtctc

SEQ ID NO: 133681 - DNA, 8 bp, Unknown
  misc_feature (1)..( 8): Result.003 file - promoters60/4282788
gttgcttt

SEQ ID NO: 133682 - DNA, 8 bp, Unknown
  misc_feature (1)..( 8): Result.003 file - promoters60/4282788
tttgattt

SEQ ID NO: 133683 - DNA, 8 bp, Unknown
  misc_feature (1)..( 8): Result.003 file - promoters60/4282788
tttgattg

SEQ ID NO: 133684 - DNA, 7 bp, Unknown
  misc_feature (1)..( 7): Result.003 file - promoters60/4282788
tctctaa

SEQ ID NO: 133685 - DNA, 7 bp, Unknown
  misc_feature (1)..( 7): Result.003 file - promoters60/4282788
tctgtaa

SEQ ID NO: 133686 - DNA, 6 bp, Unknown
  misc_feature (1)..( 6): Result.003 file - promoters60/4282788
tgtttc

SEQ ID NO: 133687 - DNA, 6 bp, Unknown
  misc_feature (1)..( 6): Result.003 file - promoters60/4282788
tgtttc

SEQ ID NO: 133688 - DNA, 7 bp, Unknown
  misc_feature (1)..( 7): Result.003 file - promoters60/4282788
gttttct

SEQ ID NO: 133689 - DNA, 7 bp, Unknown
  misc_feature (1)..( 7): Result.003 file - promoters60/4282788
gttgtct

SEQ ID NO: 133690 - DNA, 7 bp, Unknown
  misc_feature (1)..( 7): Result.003 file - promoters60/4282788
tatcatt

SEQ ID NO: 133691 - DNA, 7 bp, Unknown
  misc_feature (1)..( 7): Result.003 file - promoters60/4282788
tatgatt

SEQ ID NO: 133692 - DNA, 7 bp, Unknown
  misc_feature (1)..( 7): Result.003 file - promoters60/4282788
gaatttg

SEQ ID NO: 133693 - DNA, 7 bp, Unknown
  misc_feature (1)..( 7): Result.003 file - promoters60/4282788
gaatttg

SEQ ID NO: 133694 - DNA, 7 bp, Unknown
  misc_feature (1)..( 7): Result.003 file - promoters60/4282788
ttagatc

SEQ ID NO: 133695 - DNA, 7 bp, Unknown
  misc_feature (1)..( 7): Result.003 file - promoters60/4282788
ttatatc

SEQ ID NO: 133696 - DNA, 6 bp, Unknown
  misc_feature (1)..( 6): Result.003 file - promoters60/4282788
catttg

SEQ ID NO: 133697 - DNA, 6 bp, Unknown
  misc_feature (1)..( 6): Result.003 file - promoters60/4282788
catttg

SEQ ID NO: 133698 - DNA, 9 bp, Unknown
  misc_feature (1)..( 9): Result.003 file - promoters60/4282795
taatcgttt

SEQ ID NO: 133699 - DNA, 9 bp, Unknown
  misc_feature (1)..( 9): Result.003 file - promoters60/4282795
taagcgtag

SEQ ID NO: 133700 - DNA, 9 bp, Unknown
  misc_feature (1)..( 9): Result.003 file - promoters60/4282795
caatccttt

SEQ ID NO: 133701 - DNA, 7 bp, Unknown
  misc_feature (1)..( 7): Result.003 file - promoters60/4282795
ttttagt

SEQ ID NO: 133702 - DNA, 7 bp, Unknown
  misc_feature (1)..( 7): Result.003 file - promoters60/4282795
gtttagt

SEQ ID NO: 133703 - DNA, 7 bp, Unknown
  misc_feature (1)..( 7): Result.003 file - promoters60/4282795
atttagt

SEQ ID NO: 133704 - DNA, 7 bp, Unknown
  misc_feature (1)..( 7): Result.003 file - promoters60/4282795
ttttaga

SEQ ID NO: 133705 - DNA, 7 bp, Unknown
  misc_feature (1)..( 7): Result.003 file - promoters60/4282795
attaatg

SEQ ID NO: 133706 - DNA, 7 bp, Unknown
  misc_feature (1)..( 7): Result.003 file - promoters60/4282795
gttaatg

SEQ ID NO: 133707 - DNA, 7 bp, Unknown
  misc_feature (1)..( 7): Result.003 file - promoters60/4282795
gttaatt

SEQ ID NO: 133708 - DNA, 11 bp, Unknown
  misc_feature (1)..( 11): Result.003 file - promoters60/4282795
gtgaagccaaa

SEQ ID NO: 133709 - DNA, 11 bp, Unknown
  misc_feature (1)..( 11): Result.003 file - promoters60/4282795
atgaaaccaac

SEQ ID NO: 133710 - DNA, 11 bp, Unknown
  misc_feature (1)..( 11): Result.003 file - promoters60/4282795
aaagaacaaac

SEQ ID NO: 133711 - DNA, 11 bp, Unknown
  misc_feature (1)..( 11): Result.003 file - promoters60/4282795
atgaaaagcta

SEQ ID NO: 133712 - DNA, 12 bp, Unknown
  misc_feature (1)..( 12): Result.003 file - promoters60/4282795
cgggtttatgtt

SEQ ID NO: 133713 - DNA, 12 bp, Unknown
  misc_feature (1)..( 12): Result.003 file - promoters60/4282795
aacctttatgta

SEQ ID NO: 133714 - DNA, 12 bp, Unknown
  misc_feature (1)..( 12): Result.003 file - promoters60/4282795
aacttttaagta

SEQ ID NO: 133715 - DNA, 8 bp, Unknown
  misc_feature (1)..( 8): Result.003 file - promoters60/4282795
cggtttgg

SEQ ID NO: 133716 - DNA, 8 bp, Unknown
  misc_feature (1)..( 8): Result.003 file - promoters60/4282795
cggtttaa

SEQ ID NO: 133717 - DNA, 8 bp, Unknown
  misc_feature (1)..( 8): Result.003 file - promoters60/4282795
tggtctgg

SEQ ID NO: 133718 - DNA, 11 bp, Unknown
  misc_feature (1)..( 11): Result.003 file - promoters60/4282795
tcttttaattg

SEQ ID NO: 133719 - DNA, 11 bp, Unknown
  misc_feature (1)..( 11): Result.003 file - promoters60/4282795
gcttttgattt

SEQ ID NO: 133720 - DNA, 11 bp, Unknown
  misc_feature (1)..( 11): Result.003 file - promoters60/4282795
tgttttgtttt

SEQ ID NO: 133721 - DNA, 9 bp, Unknown
  misc_feature (1)..( 9): Result.003 file - promoters60/4282795
acataatat

SEQ ID NO: 133722 - DNA, 9 bp, Unknown
  misc_feature (1)..( 9): Result.003 file - promoters60/4282795
tattaatat

SEQ ID NO: 133723 - DNA, 9 bp, Unknown
  misc_feature (1)..( 9): Result.003 file - promoters60/4282795
tattgataa

SEQ ID NO: 133724 - DNA, 9 bp, Unknown
  misc_feature (1)..( 9): Result.003 file - promoters60/4282795
ttttagaaa

SEQ ID NO: 133725 - DNA, 9 bp, Unknown
  misc_feature (1)..( 9): Result.003 file - promoters60/4282795
tttaagact

SEQ ID NO: 133726 - DNA, 9 bp, Unknown
  misc_feature (1)..( 9): Result.003 file - promoters60/4282795
aattacaaa

SEQ ID NO: 133727 - DNA, 6 bp, Unknown
  misc_feature (1)..( 6): Result.003 file - promoters60/4282795
tttctt

SEQ ID NO: 133728 - DNA, 6 bp, Unknown
  misc_feature (1)..( 6): Result.003 file - promoters60/4282795
tttctt

SEQ ID NO: 133729 - DNA, 6 bp, Unknown
  misc_feature (1)..( 6): Result.003 file - promoters60/4282795
tttctt

SEQ ID NO: 133730 - DNA, 12 bp, Unknown
  misc_feature (1)..( 12): Result.003 file - promoters60/4282795
aaccaactaaca

SEQ ID NO: 133731 - DNA, 12 bp, Unknown
  misc_feature (1)..( 12): Result.003 file - promoters60/4282795
ttttaactaaca

SEQ ID NO: 133732 - DNA, 12 bp, Unknown
  misc_feature (1)..( 12): Result.003 file - promoters60/4282795
ttttcactaatg

SEQ ID NO: 133733 - DNA, 7 bp, Unknown
  misc_feature (1)..( 7): Result.003 file - promoters60/4282832
aaattta

SEQ ID NO: 133734 - DNA, 7 bp, Unknown
  misc_feature (1)..( 7): Result.003 file - promoters60/4282832
aaattta

SEQ ID NO: 133735 - DNA, 7 bp, Unknown
  misc_feature (1)..( 7): Result.003 file - promoters60/4282832
aaagaaa

SEQ ID NO: 133736 - DNA, 7 bp, Unknown
  misc_feature (1)..( 7): Result.003 file - promoters60/4282832
aaataaa

SEQ ID NO: 133737 - DNA, 7 bp, Unknown
  misc_feature (1)..( 7): Result.003 file - promoters60/4282832
aagaaaa

SEQ ID NO: 133738 - DNA, 7 bp, Unknown
  misc_feature (1)..( 7): Result.003 file - promoters60/4282832
aagaaaa

SEQ ID NO: 133739 - DNA, 7 bp, Unknown
  misc_feature (1)..( 7): Result.003 file - promoters60/4282832
ttagatc

SEQ ID NO: 133740 - DNA, 7 bp, Unknown
  misc_feature (1)..( 7): Result.003 file - promoters60/4282832
ttaaatc

SEQ ID NO: 133741 - DNA, 7 bp, Unknown
  misc_feature (1)..( 7): Result.003 file - promoters60/4282832
aaagtcc

SEQ ID NO: 133742 - DNA, 7 bp, Unknown
  misc_feature (1)..( 7): Result.003 file - promoters60/4282832
aaaatcc

SEQ ID NO: 133743 - DNA, 6 bp, Unknown
  misc_feature (1)..( 6): Result.003 file - promoters60/4282832
agagaa

SEQ ID NO: 133744 - DNA, 6 bp, Unknown
  misc_feature (1)..( 6): Result.003 file - promoters60/4282832
agagaa

SEQ ID NO: 133745 - DNA, 8 bp, Unknown
  misc_feature (1)..( 8): Result.003 file - promoters60/4282832
gttgtgaa

SEQ ID NO: 133746 - DNA, 8 bp, Unknown
  misc_feature (1)..( 8): Result.003 file - promoters60/4282832
gttctgaa

SEQ ID NO: 133747 - DNA, 7 bp, Unknown
  misc_feature (1)..( 7): Result.003 file - promoters60/4282832
ccctgtg

SEQ ID NO: 133748 - DNA, 7 bp, Unknown
  misc_feature (1)..( 7): Result.003 file - promoters60/4282832
ccctgtg

SEQ ID NO: 133749 - DNA, 7 bp, Unknown
  misc_feature (1)..( 7): Result.003 file - promoters60/4282832
ttctcat

SEQ ID NO: 133750 - DNA, 7 bp, Unknown
  misc_feature (1)..( 7): Result.003 file - promoters60/4282832
ttctcat

SEQ ID NO: 133751 - DNA, 8 bp, Unknown
  misc_feature (1)..( 8): Result.003 file - promoters60/4282832
tttagctt

SEQ ID NO: 133752 - DNA, 8 bp, Unknown
  misc_feature (1)..( 8): Result.003 file - promoters60/4282832
tttatctt

SEQ ID NO: 133753 - DNA, 6 bp, Unknown
  misc_feature (1)..( 6): Result.003 file - promoters60/4282832
gaatta

SEQ ID NO: 133754 - DNA, 6 bp, Unknown
  misc_feature (1)..( 6): Result.003 file - promoters60/4282832
gaatta

SEQ ID NO: 133755 - DNA, 6 bp, Unknown
  misc_feature (1)..( 6): Result.003 file - promoters60/4282832
gcggaa

SEQ ID NO: 133756 - DNA, 6 bp, Unknown
  misc_feature (1)..( 6): Result.003 file - promoters60/4282832
gcggaa

SEQ ID NO: 133757 - DNA, 6 bp, Unknown
  misc_feature (1)..( 6): Result.003 file - promoters60/4282832
aaagaa

SEQ ID NO: 133758 - DNA, 6 bp, Unknown
  misc_feature (1)..( 6): Result.003 file - promoters60/4282832
aaagaa

SEQ ID NO: 133759 - DNA, 7 bp, Unknown
  misc_feature (1)..( 7): Result.003 file - promoters60/4282832
tattttc

SEQ ID NO: 133760 - DNA, 7 bp, Unknown
  misc_feature (1)..( 7): Result.003 file - promoters60/4282832
tatcttc

SEQ ID NO: 133761 - DNA, 6 bp, Unknown
  misc_feature (1)..( 6): Result.003 file - promoters60/4282832
tccttg

SEQ ID NO: 133762 - DNA, 6 bp, Unknown
  misc_feature (1)..( 6): Result.003 file - promoters60/4282832
tccttg

SEQ ID NO: 133763 - DNA, 7 bp, Unknown
  misc_feature (1)..( 7): Result.003 file - promoters60/4282832
gatatat

SEQ ID NO: 133764 - DNA, 7 bp, Unknown
  misc_feature (1)..( 7): Result.003 file - promoters60/4282832
gatgtat

SEQ ID NO: 133765 - DNA, 9 bp, Unknown
  misc_feature (1)..( 9): Result.003 file - promoters60/4282859
tctatctga

SEQ ID NO: 133766 - DNA, 9 bp, Unknown
  misc_feature (1)..( 9): Result.003 file - promoters60/4282859
tctctctga

SEQ ID NO: 133767 - DNA, 6 bp, Unknown
  misc_feature (1)..( 6): Result.003 file - promoters60/4282859
gaaaat

SEQ ID NO: 133768 - DNA, 6 bp, Unknown
  misc_feature (1)..( 6): Result.003 file - promoters60/4282859
gaaaat

SEQ ID NO: 133769 - DNA, 7 bp, Unknown
  misc_feature (1)..( 7): Result.003 file - promoters60/4282859
tgaaaaa

SEQ ID NO: 133770 - DNA, 7 bp, Unknown
  misc_feature (1)..( 7): Result.003 file - promoters60/4282859
tgaaaaa

SEQ ID NO: 133771 - DNA, 7 bp, Unknown
  misc_feature (1)..( 7): Result.003 file - promoters60/4282859
atggctc

SEQ ID NO: 133772 - DNA, 7 bp, Unknown
  misc_feature (1)..( 7): Result.003 file - promoters60/4282859
atgactc

SEQ ID NO: 133773 - DNA, 7 bp, Unknown
  misc_feature (1)..( 7): Result.003 file - promoters60/4282859
attctta

SEQ ID NO: 133774 - DNA, 7 bp, Unknown
  misc_feature (1)..( 7): Result.003 file - promoters60/4282859
attttta

SEQ ID NO: 133775 - DNA, 6 bp, Unknown
  misc_feature (1)..( 6): Result.003 file - promoters60/4282859
atttaa

SEQ ID NO: 133776 - DNA, 6 bp, Unknown
  misc_feature (1)..( 6): Result.003 file - promoters60/4282859
atttaa

SEQ ID NO: 133777 - DNA, 6 bp, Unknown
  misc_feature (1)..( 6): Result.003 file - promoters60/4282859
aaaatt

SEQ ID NO: 133778 - DNA, 6 bp, Unknown
  misc_feature (1)..( 6): Result.003 file - promoters60/4282859
aaaatt

SEQ ID NO: 133779 - DNA, 6 bp, Unknown
  misc_feature (1)..( 6): Result.003 file - promoters60/4282859
aaggaa

SEQ ID NO: 133780 - DNA, 6 bp, Unknown
  misc_feature (1)..( 6): Result.003 file - promoters60/4282859
aaggaa

SEQ ID NO: 133781 - DNA, 16 bp, Unknown
  misc_feature (1)..( 16): Result.003 file - promoters60/4282877
caaattgggcccaata

SEQ ID NO: 133782 - DNA, 16 bp, Unknown
  misc_feature (1)..( 16): Result.003 file - promoters60/4282877
aacattaggctttaat

SEQ ID NO: 133783 - DNA, 16 bp, Unknown
  misc_feature (1)..( 16): Result.003 file - promoters60/4282877
acaaatgggcctaatt

SEQ ID NO: 133784 - DNA, 16 bp, Unknown
  misc_feature (1)..( 16): Result.003 file - promoters60/4282877
ataattgggcttttta

SEQ ID NO: 133785 - DNA, 16 bp, Unknown
  misc_feature (1)..( 16): Result.003 file - promoters60/4282877
caaattgggcctaata

SEQ ID NO: 133786 - DNA, 16 bp, Unknown
  misc_feature (1)..( 16): Result.003 file - promoters60/4282877
aagtttgggccaactt

SEQ ID NO: 133787 - DNA, 16 bp, Unknown
  misc_feature (1)..( 16): Result.003 file - promoters60/4282877
gcaaataggcccaatt

SEQ ID NO: 133788 - DNA, 11 bp, Unknown
  misc_feature (1)..( 11): Result.003 file - promoters60/4282877
acagatgcagc

SEQ ID NO: 133789 - DNA, 11 bp, Unknown
  misc_feature (1)..( 11): Result.003 file - promoters60/4282877
ttagatacaga

SEQ ID NO: 133790 - DNA, 11 bp, Unknown
  misc_feature (1)..( 11): Result.003 file - promoters60/4282877
cgaaatgaagc

SEQ ID NO: 133791 - DNA, 11 bp, Unknown
  misc_feature (1)..( 11): Result.003 file - promoters60/4282877
ttatatagtca

SEQ ID NO: 133792 - DNA, 11 bp, Unknown
  misc_feature (1)..( 11): Result.003 file - promoters60/4282877
tgaaatgaaag

SEQ ID NO: 133793 - DNA, 11 bp, Unknown
  misc_feature (1)..( 11): Result.003 file - promoters60/4282877
cttaatcaaat

SEQ ID NO: 133794 - DNA, 12 bp, Unknown
  misc_feature (1)..( 12): Result.003 file - promoters60/4282877
tgaagaagaaga

SEQ ID NO: 133795 - DNA, 12 bp, Unknown
  misc_feature (1)..( 12): Result.003 file - promoters60/4282877
acaagtagaaga

SEQ ID NO: 133796 - DNA, 12 bp, Unknown
  misc_feature (1)..( 12): Result.003 file - promoters60/4282877
gaaagaagggat

SEQ ID NO: 133797 - DNA, 12 bp, Unknown
  misc_feature (1)..( 12): Result.003 file - promoters60/4282877
ccaagaagaaaa

SEQ ID NO: 133798 - DNA, 12 bp, Unknown
  misc_feature (1)..( 12): Result.003 file - promoters60/4282877
acaagtaaaatt

SEQ ID NO: 133799 - DNA, 12 bp, Unknown
  misc_feature (1)..( 12): Result.003 file - promoters60/4282877
aaaagaaataaa

SEQ ID NO: 133800 - DNA, 10 bp, Unknown
  misc_feature (1)..( 10): Result.003 file - promoters60/4282915
tgtttttgtg

SEQ ID NO: 133801 - DNA, 10 bp, Unknown
  misc_feature (1)..( 10): Result.003 file - promoters60/4282915
gatttttgta

SEQ ID NO: 133802 - DNA, 10 bp, Unknown
  misc_feature (1)..( 10): Result.003 file - promoters60/4282915
tgtttttgtg

SEQ ID NO: 133803 - DNA, 10 bp, Unknown
  misc_feature (1)..( 10): Result.003 file - promoters60/4282915
gattttttct

SEQ ID NO: 133804 - DNA, 8 bp, Unknown
  misc_feature (1)..( 8): Result.003 file - promoters60/4282915
tttacaaa

SEQ ID NO: 133805 - DNA, 8 bp, Unknown
  misc_feature (1)..( 8): Result.003 file - promoters60/4282915
gttaaaaa

SEQ ID NO: 133806 - DNA, 9 bp, Unknown
  misc_feature (1)..( 9): Result.003 file - promoters60/4282915
tttcacaat

SEQ ID NO: 133807 - DNA, 9 bp, Unknown
  misc_feature (1)..( 9): Result.003 file - promoters60/4282915
gaatacaaa

SEQ ID NO: 133808 - DNA, 6 bp, Unknown
  misc_feature (1)..( 6): Result.003 file - promoters60/4282915
ccaaaa

SEQ ID NO: 133809 - DNA, 6 bp, Unknown
  misc_feature (1)..( 6): Result.003 file - promoters60/4282915
ccaaaa

SEQ ID NO: 133810 - DNA, 6 bp, Unknown
  misc_feature (1)..( 6): Result.003 file - promoters60/4282915
ccaaaa

SEQ ID NO: 133811 - DNA, 6 bp, Unknown
  misc_feature (1)..( 6): Result.003 file - promoters60/4282915
ccaaaa

SEQ ID NO: 133812 - DNA, 8 bp, Unknown
  misc_feature (1)..( 8): Result.003 file - promoters60/4282915
atttgtta

SEQ ID NO: 133813 - DNA, 8 bp, Unknown
  misc_feature (1)..( 8): Result.003 file - promoters60/4282915
atttgtgt

SEQ ID NO: 133814 - DNA, 8 bp, Unknown
  misc_feature (1)..( 8): Result.003 file - promoters60/4282915
atttgttt

SEQ ID NO: 133815 - DNA, 8 bp, Unknown
  misc_feature (1)..( 8): Result.003 file - promoters60/4282915
atttattt

SEQ ID NO: 133816 - DNA, 10 bp, Unknown
  misc_feature (1)..( 10): Result.003 file - promoters60/4282915
tataatttta

SEQ ID NO: 133817 - DNA, 10 bp, Unknown
  misc_feature (1)..( 10): Result.003 file - promoters60/4282915
tttaatttta

SEQ ID NO: 133818 - DNA, 10 bp, Unknown
  misc_feature (1)..( 10): Result.003 file - promoters60/4282915
tttgattgaa

SEQ ID NO: 133819 - DNA, 10 bp, Unknown
  misc_feature (1)..( 10): Result.003 file - promoters60/4282915
aatgagtgat

SEQ ID NO: 133820 - DNA, 10 bp, Unknown
  misc_feature (1)..( 10): Result.003 file - promoters60/4282915
aaataatgaa

SEQ ID NO: 133821 - DNA, 10 bp, Unknown
  misc_feature (1)..( 10): Result.003 file - promoters60/4282915
gaatactgaa

SEQ ID NO: 133822 - DNA, 10 bp, Unknown
  misc_feature (1)..( 10): Result.003 file - promoters60/4282915
aaataataaa

SEQ ID NO: 133823 - DNA, 10 bp, Unknown
  misc_feature (1)..( 10): Result.003 file - promoters60/4282915
aaatcatatt

SEQ ID NO: 133824 - DNA, 6 bp, Unknown
  misc_feature (1)..( 6): Result.003 file - promoters60/4282939
aagaga

SEQ ID NO: 133825 - DNA, 6 bp, Unknown
  misc_feature (1)..( 6): Result.003 file - promoters60/4282939
aagaga

SEQ ID NO: 133826 - DNA, 6 bp, Unknown
  misc_feature (1)..( 6): Result.003 file - promoters60/4282939
gatcat

SEQ ID NO: 133827 - DNA, 6 bp, Unknown
  misc_feature (1)..( 6): Result.003 file - promoters60/4282939
gatcat

SEQ ID NO: 133828 - DNA, 7 bp, Unknown
  misc_feature (1)..( 7): Result.003 file - promoters60/4282939
tcttcat

SEQ ID NO: 133829 - DNA, 7 bp, Unknown
  misc_feature (1)..( 7): Result.003 file - promoters60/4282939
tctacat

SEQ ID NO: 133830 - DNA, 8 bp, Unknown
  misc_feature (1)..( 8): Result.003 file - promoters60/4282939
attacaaa

SEQ ID NO: 133831 - DNA, 8 bp, Unknown
  misc_feature (1)..( 8): Result.003 file - promoters60/4282939
tttagaaa

SEQ ID NO: 133832 - DNA, 8 bp, Unknown
  misc_feature (1)..( 8): Result.003 file - promoters60/4282939
ttttgaat

SEQ ID NO: 133833 - DNA, 8 bp, Unknown
  misc_feature (1)..( 8): Result.003 file - promoters60/4282939
taaaatta

SEQ ID NO: 133834 - DNA, 8 bp, Unknown
  misc_feature (1)..( 8): Result.003 file - promoters60/4282939
taatatta

SEQ ID NO: 133835 - DNA, 8 bp, Unknown
  misc_feature (1)..( 8): Result.003 file - promoters60/4282939
aattaata

SEQ ID NO: 133836 - DNA, 8 bp, Unknown
  misc_feature (1)..( 8): Result.003 file - promoters60/4282939
aataaata

SEQ ID NO: 133837 - DNA, 10 bp, Unknown
  misc_feature (1)..( 10): Result.003 file - promoters60/4282939
ctataataat

SEQ ID NO: 133838 - DNA, 10 bp, Unknown
  misc_feature (1)..( 10): Result.003 file - promoters60/4282939
ctatattaat

SEQ ID NO: 133839 - DNA, 7 bp, Unknown
  misc_feature (1)..( 7): Result.003 file - promoters60/4282939
ttgtctc

SEQ ID NO: 133840 - DNA, 7 bp, Unknown
  misc_feature (1)..( 7): Result.003 file - promoters60/4282939
ttgcctc

SEQ ID NO: 133841 - DNA, 8 bp, Unknown
  misc_feature (1)..( 8): Result.003 file - promoters60/4282939
agaaaaga

SEQ ID NO: 133842 - DNA, 8 bp, Unknown
  misc_feature (1)..( 8): Result.003 file - promoters60/4282939
agaacaga

SEQ ID NO: 133843 - DNA, 7 bp, Unknown
  misc_feature (1)..( 7): Result.003 file - promoters60/4282939
cataccc

SEQ ID NO: 133844 - DNA, 7 bp, Unknown
  misc_feature (1)..( 7): Result.003 file - promoters60/4282939
catgccc

SEQ ID NO: 133845 - DNA, 7 bp, Unknown
  misc_feature (1)..( 7): Result.003 file - promoters60/4282939
ctgggaa

SEQ ID NO: 133846 - DNA, 7 bp, Unknown
  misc_feature (1)..( 7): Result.003 file - promoters60/4282939
ctgtgaa

SEQ ID NO: 133847 - DNA, 8 bp, Unknown
  misc_feature (1)..( 8): Result.003 file - promoters60/4282939
gttaactc

SEQ ID NO: 133848 - DNA, 8 bp, Unknown
  misc_feature (1)..( 8): Result.003 file - promoters60/4282939
gttatctc

SEQ ID NO: 133849 - DNA, 8 bp, Unknown
  misc_feature (1)..( 8): Result.003 file - promoters60/4282941
ttttaaag

SEQ ID NO: 133850 - DNA, 8 bp, Unknown
  misc_feature (1)..( 8): Result.003 file - promoters60/4282941
atttaaag

SEQ ID NO: 133851 - DNA, 8 bp, Unknown
  misc_feature (1)..( 8): Result.003 file - promoters60/4282941
atttaatt

SEQ ID NO: 133852 - DNA, 8 bp, Unknown
  misc_feature (1)..( 8): Result.003 file - promoters60/4282941
tataattt

SEQ ID NO: 133853 - DNA, 8 bp, Unknown
  misc_feature (1)..( 8): Result.003 file - promoters60/4282941
tatgattt

SEQ ID NO: 133854 - DNA, 8 bp, Unknown
  misc_feature (1)..( 8): Result.003 file - promoters60/4282941
tataatca

SEQ ID NO: 133855 - DNA, 8 bp, Unknown
  misc_feature (1)..( 8): Result.003 file - promoters60/4282941
tgagttcg

SEQ ID NO: 133856 - DNA, 8 bp, Unknown
  misc_feature (1)..( 8): Result.003 file - promoters60/4282941
tgagttcg

SEQ ID NO: 133857 - DNA, 9 bp, Unknown
  misc_feature (1)..( 9): Result.003 file - promoters60/4282941
taaaaattg

SEQ ID NO: 133858 - DNA, 9 bp, Unknown
  misc_feature (1)..( 9): Result.003 file - promoters60/4282941
taaaaattg

SEQ ID NO: 133859 - DNA, 6 bp, Unknown
  misc_feature (1)..( 6): Result.003 file - promoters60/4282941
attggg

SEQ ID NO: 133860 - DNA, 6 bp, Unknown
  misc_feature (1)..( 6): Result.003 file - promoters60/4282941
attggg

SEQ ID NO: 133861 - DNA, 6 bp, Unknown
  misc_feature (1)..( 6): Result.003 file - promoters60/4282941
tgagat

SEQ ID NO: 133862 - DNA, 6 bp, Unknown
  misc_feature (1)..( 6): Result.003 file - promoters60/4282941
tgagat

SEQ ID NO: 133863 - DNA, 12 bp, Unknown
  misc_feature (1)..( 12): Result.003 file - promoters60/4282941
tatttacttttt

SEQ ID NO: 133864 - DNA, 12 bp, Unknown
  misc_feature (1)..( 12): Result.003 file - promoters60/4282941
tatttaattttt

SEQ ID NO: 133865 - DNA, 12 bp, Unknown
  misc_feature (1)..( 12): Result.003 file - promoters60/4282941
catttaaagcat

SEQ ID NO: 133866 - DNA, 9 bp, Unknown
  misc_feature (1)..( 9): Result.003 file - promoters60/4282941
aatataaat

SEQ ID NO: 133867 - DNA, 9 bp, Unknown
  misc_feature (1)..( 9): Result.003 file - promoters60/4282941
aatttaaat

SEQ ID NO: 133868 - DNA, 9 bp, Unknown
  misc_feature (1)..( 9): Result.003 file - promoters60/4282941
taattataa

SEQ ID NO: 133869 - DNA, 9 bp, Unknown
  misc_feature (1)..( 9): Result.003 file - promoters60/4282941
taaatattc

SEQ ID NO: 133870 - DNA, 9 bp, Unknown
  misc_feature (1)..( 9): Result.003 file - promoters60/4282941
cgaatattc

SEQ ID NO: 133871 - DNA, 7 bp, Unknown
  misc_feature (1)..( 7): Result.003 file - promoters60/4282941
ttaaaat

SEQ ID NO: 133872 - DNA, 7 bp, Unknown
  misc_feature (1)..( 7): Result.003 file - promoters60/4282941
ttataat

SEQ ID NO: 133873 - DNA, 6 bp, Unknown
  misc_feature (1)..( 6): Result.003 file - promoters60/4282941
aaataa

SEQ ID NO: 133874 - DNA, 6 bp, Unknown
  misc_feature (1)..( 6): Result.003 file - promoters60/4282941
aaataa

SEQ ID NO: 133875 - DNA, 7 bp, Unknown
  misc_feature (1)..( 7): Result.003 file - promoters60/4282941
cataaaa

SEQ ID NO: 133876 - DNA, 7 bp, Unknown
  misc_feature (1)..( 7): Result.003 file - promoters60/4282941
catgaaa

SEQ ID NO: 133877 - DNA, 6 bp, Unknown
  misc_feature (1)..( 6): Result.003 file - promoters60/4282941
aaaatt

SEQ ID NO: 133878 - DNA, 6 bp, Unknown
  misc_feature (1)..( 6): Result.003 file - promoters60/4282941
aaaatt

SEQ ID NO: 133879 - DNA, 9 bp, Unknown
  misc_feature (1)..( 9): Result.003 file - promoters60/4282941
tttatatta

SEQ ID NO: 133880 - DNA, 9 bp, Unknown
  misc_feature (1)..( 9): Result.003 file - promoters60/4282941
tttatatta

SEQ ID NO: 133881 - DNA, 14 bp, Unknown
  misc_feature (1)..( 14): Result.003 file - promoters60/4282941
aatacaacttatat

SEQ ID NO: 133882 - DNA, 14 bp, Unknown
  misc_feature (1)..( 14): Result.003 file - promoters60/4282941
aattcaaattatat

SEQ ID NO: 133883 - DNA, 6 bp, Unknown
  misc_feature (1)..( 6): Result.003 file - promoters60/4282941
atatta

SEQ ID NO: 133884 - DNA, 6 bp, Unknown
  misc_feature (1)..( 6): Result.003 file - promoters60/4282941
atatta

SEQ ID NO: 133885 - DNA, 8 bp, Unknown
  misc_feature (1)..( 8): Result.003 file - promoters60/4282941
tatgaaac

SEQ ID NO: 133886 - DNA, 8 bp, Unknown
  misc_feature (1)..( 8): Result.003 file - promoters60/4282941
tattaaac

SEQ ID NO: 133887 - DNA, 8 bp, Unknown
  misc_feature (1)..( 8): Result.003 file - promoters60/4282941
tttagaag

SEQ ID NO: 133888 - DNA, 8 bp, Unknown
  misc_feature (1)..( 8): Result.003 file - promoters60/4282941
tttaaaag

SEQ ID NO: 133889 - DNA, 7 bp, Unknown
  misc_feature (1)..( 7): Result.003 file - promoters60/4282941
aatctaa

SEQ ID NO: 133890 - DNA, 7 bp, Unknown
  misc_feature (1)..( 7): Result.003 file - promoters60/4282941
aatgtaa

SEQ ID NO: 133891 - DNA, 9 bp, Unknown
  misc_feature (1)..( 9): Result.003 file - promoters60/4282941
atatttttt

SEQ ID NO: 133892 - DNA, 9 bp, Unknown
  misc_feature (1)..( 9): Result.003 file - promoters60/4282941
atatatttt

SEQ ID NO: 133893 - DNA, 6 bp, Unknown
  misc_feature (1)..( 6): Result.003 file - promoters60/4282941
taaaaa

SEQ ID NO: 133894 - DNA, 6 bp, Unknown
  misc_feature (1)..( 6): Result.003 file - promoters60/4282941
taaaaa

SEQ ID NO: 133895 - DNA, 7 bp, Unknown
  misc_feature (1)..( 7): Result.003 file - promoters60/4282941
atatttt

SEQ ID NO: 133896 - DNA, 7 bp, Unknown
  misc_feature (1)..( 7): Result.003 file - promoters60/4282941
atatttt

SEQ ID NO: 133897 - DNA, 7 bp, Unknown
  misc_feature (1)..( 7): Result.003 file - promoters60/4282941
aatacaa

SEQ ID NO: 133898 - DNA, 7 bp, Unknown
  misc_feature (1)..( 7): Result.003 file - promoters60/4282941
aattcaa

SEQ ID NO: 133899 - DNA, 11 bp, Unknown
  misc_feature (1)..( 11): Result.003 file - promoters60/4283003
aataatttgta

SEQ ID NO: 133900 - DNA, 11 bp, Unknown
  misc_feature (1)..( 11): Result.003 file - promoters60/4283003
aatattttagg

SEQ ID NO: 133901 - DNA, 11 bp, Unknown
  misc_feature (1)..( 11): Result.003 file - promoters60/4283003
aattattggta

SEQ ID NO: 133902 - DNA, 7 bp, Unknown
  misc_feature (1)..( 7): Result.003 file - promoters60/4283003
ttgtaac

SEQ ID NO: 133903 - DNA, 7 bp, Unknown
  misc_feature (1)..( 7): Result.003 file - promoters60/4283003
ttgtaac

SEQ ID NO: 133904 - DNA, 7 bp, Unknown
  misc_feature (1)..( 7): Result.003 file - promoters60/4283003
atagaaa

SEQ ID NO: 133905 - DNA, 7 bp, Unknown
  misc_feature (1)..( 7): Result.003 file - promoters60/4283003
atacaaa

SEQ ID NO: 133906 - DNA, 6 bp, Unknown
  misc_feature (1)..( 6): Result.003 file - promoters60/4283003
aaaaaa

SEQ ID NO: 133907 - DNA, 6 bp, Unknown
  misc_feature (1)..( 6): Result.003 file - promoters60/4283003
aaaaaa

SEQ ID NO: 133908 - DNA, 9 bp, Unknown
  misc_feature (1)..( 9): Result.003 file - promoters60/4283003
atcaatcat

SEQ ID NO: 133909 - DNA, 9 bp, Unknown
  misc_feature (1)..( 9): Result.003 file - promoters60/4283003
atctatcat

SEQ ID NO: 133910 - DNA, 8 bp, Unknown
  misc_feature (1)..( 8): Result.003 file - promoters60/4283003
ttagttta

SEQ ID NO: 133911 - DNA, 8 bp, Unknown
  misc_feature (1)..( 8): Result.003 file - promoters60/4283003
ttagttta

SEQ ID NO: 133912 - DNA, 7 bp, Unknown
  misc_feature (1)..( 7): Result.003 file - promoters60/4283003
aacagaa

SEQ ID NO: 133913 - DNA, 7 bp, Unknown
  misc_feature (1)..( 7): Result.003 file - promoters60/4283003
aacagaa

SEQ ID NO: 133914 - DNA, 6 bp, Unknown
  misc_feature (1)..( 6): Result.003 file - promoters60/4283003
ctctta

SEQ ID NO: 133915 - DNA, 6 bp, Unknown
  misc_feature (1)..( 6): Result.003 file - promoters60/4283003
ctctta

SEQ ID NO: 133916 - DNA, 6 bp, Unknown
  misc_feature (1)..( 6): Result.003 file - promoters60/4283003
atcatt

SEQ ID NO: 133917 - DNA, 6 bp, Unknown
  misc_feature (1)..( 6): Result.003 file - promoters60/4283003
atcatt

SEQ ID NO: 133918 - DNA, 6 bp, Unknown
  misc_feature (1)..( 6): Result.003 file - promoters60/4283003
cattat

SEQ ID NO: 133919 - DNA, 6 bp, Unknown
  misc_feature (1)..( 6): Result.003 file - promoters60/4283003
cattat

SEQ ID NO: 133920 - DNA, 7 bp, Unknown
  misc_feature (1)..( 7): Result.003 file - promoters60/4283003
gaacaaa

SEQ ID NO: 133921 - DNA, 7 bp, Unknown
  misc_feature (1)..( 7): Result.003 file - promoters60/4283003
gaaaaaa

SEQ ID NO: 133922 - DNA, 8 bp, Unknown
  misc_feature (1)..( 8): Result.003 file - promoters60/4283003
aacagtta

SEQ ID NO: 133923 - DNA, 8 bp, Unknown
  misc_feature (1)..( 8): Result.003 file - promoters60/4283003
aacggtta

SEQ ID NO: 133924 - DNA, 11 bp, Unknown
  misc_feature (1)..( 11): Result.003 file - promoters60/4283003
actaaccaaat

SEQ ID NO: 133925 - DNA, 11 bp, Unknown
  misc_feature (1)..( 11): Result.003 file - promoters60/4283003
actgacccaat

SEQ ID NO: 133926 - DNA, 7 bp, Unknown
  misc_feature (1)..( 7): Result.003 file - promoters60/4283003
ttattaa

SEQ ID NO: 133927 - DNA, 7 bp, Unknown
  misc_feature (1)..( 7): Result.003 file - promoters60/4283003
ttagtaa

SEQ ID NO: 133928 - DNA, 6 bp, Unknown
  misc_feature (1)..( 6): Result.003 file - promoters60/4283003
tttatt

SEQ ID NO: 133929 - DNA, 6 bp, Unknown
  misc_feature (1)..( 6): Result.003 file - promoters60/4283003
tttatt

SEQ ID NO: 133930 - DNA, 7 bp, Unknown
  misc_feature (1)..( 7): Result.003 file - promoters60/4283003
aaacaaa

SEQ ID NO: 133931 - DNA, 7 bp, Unknown
  misc_feature (1)..( 7): Result.003 file - promoters60/4283003
aaataaa

SEQ ID NO: 133932 - DNA, 6 bp, Unknown
  misc_feature (1)..( 6): Result.003 file - promoters60/4283003
catgaa

SEQ ID NO: 133933 - DNA, 6 bp, Unknown
  misc_feature (1)..( 6): Result.003 file - promoters60/4283003
catgaa

SEQ ID NO: 133934 - DNA, 6 bp, Unknown
  misc_feature (1)..( 6): Result.003 file - promoters60/4283003
tcccaa

SEQ ID NO: 133935 - DNA, 6 bp, Unknown
  misc_feature (1)..( 6): Result.003 file - promoters60/4283003
tcccaa

SEQ ID NO: 133936 - DNA, 6 bp, Unknown
  misc_feature (1)..( 6): Result.003 file - promoters60/4283003
agaaaa

SEQ ID NO: 133937 - DNA, 6 bp, Unknown
  misc_feature (1)..( 6): Result.003 file - promoters60/4283003
agaaaa

SEQ ID NO: 133938 - DNA, 8 bp, Unknown
  misc_feature (1)..( 8): Result.003 file - promoters60/4283003
gcatccaa

SEQ ID NO: 133939 - DNA, 8 bp, Unknown
  misc_feature (1)..( 8): Result.003 file - promoters60/4283003
gcattcaa

SEQ ID NO: 133940 - DNA, 14 bp, Unknown
  misc_feature (1)..( 14): Result.003 file - promoters60/4283005
ttgagtttaggccg

SEQ ID NO: 133941 - DNA, 14 bp, Unknown
  misc_feature (1)..( 14): Result.003 file - promoters60/4283005
ttaagtctagtaac

SEQ ID NO: 133942 - DNA, 14 bp, Unknown
  misc_feature (1)..( 14): Result.003 file - promoters60/4283005
ataagtttaacgaa

SEQ ID NO: 133943 - DNA, 14 bp, Unknown
  misc_feature (1)..( 14): Result.003 file - promoters60/4283005
ttgattttaaacta

SEQ ID NO: 133944 - DNA, 14 bp, Unknown
  misc_feature (1)..( 14): Result.003 file - promoters60/4283005
aagtttctaggaac

SEQ ID NO: 133945 - DNA, 16 bp, Unknown
  misc_feature (1)..( 16): Result.003 file - promoters60/4283005
aaaaaaaataagaatg

SEQ ID NO: 133946 - DNA, 16 bp, Unknown
  misc_feature (1)..( 16): Result.003 file - promoters60/4283005
ctagactttaacaata

SEQ ID NO: 133947 - DNA, 16 bp, Unknown
  misc_feature (1)..( 16): Result.003 file - promoters60/4283005
aaagaaaataataata

SEQ ID NO: 133948 - DNA, 16 bp, Unknown
  misc_feature (1)..( 16): Result.003 file - promoters60/4283005
cgtcaaaaaaaaaata

SEQ ID NO: 133949 - DNA, 8 bp, Unknown
  misc_feature (1)..( 8): Result.003 file - promoters60/4283005
caaaatta

SEQ ID NO: 133950 - DNA, 8 bp, Unknown
  misc_feature (1)..( 8): Result.003 file - promoters60/4283005
aaaaattt

SEQ ID NO: 133951 - DNA, 9 bp, Unknown
  misc_feature (1)..( 9): Result.003 file - promoters60/4283005
aaaaactta

SEQ ID NO: 133952 - DNA, 9 bp, Unknown
  misc_feature (1)..( 9): Result.003 file - promoters60/4283005
ctaaacttc

SEQ ID NO: 133953 - DNA, 12 bp, Unknown
  misc_feature (1)..( 12): Result.003 file - promoters60/4283005
acaaaaaaaata

SEQ ID NO: 133954 - DNA, 12 bp, Unknown
  misc_feature (1)..( 12): Result.003 file - promoters60/4283005
tcaaaaaaaaaa

SEQ ID NO: 133955 - DNA, 12 bp, Unknown
  misc_feature (1)..( 12): Result.003 file - promoters60/4283005
ccaaataaaata

SEQ ID NO: 133956 - DNA, 12 bp, Unknown
  misc_feature (1)..( 12): Result.003 file - promoters60/4283005
ccaaaaaaagaa

SEQ ID NO: 133957 - DNA, 35 bp, Unknown
  misc_feature (1)..( 35): Result.003 file - promoters60/4283005
agaagccgagttgagtctaaagactaaaaagtaaa

SEQ ID NO: 133958 - DNA, 35 bp, Unknown
  misc_feature (1)..( 35): Result.003 file - promoters60/4283005
tttcatttttctgagtctcctaagtgttacgcgtg

SEQ ID NO: 133959 - DNA, 35 bp, Unknown
  misc_feature (1)..( 35): Result.003 file - promoters60/4283005
tttcatttttcttagtctcataagtgttacgcgtg

SEQ ID NO: 133960 - DNA, 35 bp, Unknown
  misc_feature (1)..( 35): Result.003 file - promoters60/4283005
acataacccgttttttccttcttttaccccttatc

SEQ ID NO: 133961 - DNA, 9 bp, Unknown
  misc_feature (1)..( 9): Result.003 file - promoters60/4283005
tatatatag

SEQ ID NO: 133962 - DNA, 9 bp, Unknown
  misc_feature (1)..( 9): Result.003 file - promoters60/4283005
tatataaat

SEQ ID NO: 133963 - DNA, 9 bp, Unknown
  misc_feature (1)..( 9): Result.003 file - promoters60/4283005
tataaatat

SEQ ID NO: 133964 - DNA, 9 bp, Unknown
  misc_feature (1)..( 9): Result.003 file - promoters60/4283005
tatatatag

SEQ ID NO: 133965 - DNA, 9 bp, Unknown
  misc_feature (1)..( 9): Result.003 file - promoters60/4283005
tatacaaat

SEQ ID NO: 133966 - DNA, 9 bp, Unknown
  misc_feature (1)..( 9): Result.003 file - promoters60/4283005
aagaataca

SEQ ID NO: 133967 - DNA, 9 bp, Unknown
  misc_feature (1)..( 9): Result.003 file - promoters60/4283005
gagaaaaca

SEQ ID NO: 133968 - DNA, 9 bp, Unknown
  misc_feature (1)..( 9): Result.003 file - promoters60/4283005
gagaaagat

SEQ ID NO: 133969 - DNA, 9 bp, Unknown
  misc_feature (1)..( 9): Result.003 file - promoters60/4283005
gagaaaaac

SEQ ID NO: 133970 - DNA, 11 bp, Unknown
  misc_feature (1)..( 11): Result.003 file - promoters60/4283005
tttactaagct

SEQ ID NO: 133971 - DNA, 11 bp, Unknown
  misc_feature (1)..( 11): Result.003 file - promoters60/4283005
attaataactt

SEQ ID NO: 133972 - DNA, 11 bp, Unknown
  misc_feature (1)..( 11): Result.003 file - promoters60/4283005
tttgctacttt

SEQ ID NO: 133973 - DNA, 11 bp, Unknown
  misc_feature (1)..( 11): Result.003 file - promoters60/4283005
taaaatatctt

SEQ ID NO: 133974 - DNA, 12 bp, Unknown
  misc_feature (1)..( 12): Result.003 file - promoters60/4283005
aaaaatttaatt

SEQ ID NO: 133975 - DNA, 12 bp, Unknown
  misc_feature (1)..( 12): Result.003 file - promoters60/4283005
actaatttaatt

SEQ ID NO: 133976 - DNA, 12 bp, Unknown
  misc_feature (1)..( 12): Result.003 file - promoters60/4283005
aaaaacttacca

SEQ ID NO: 133977 - DNA, 12 bp, Unknown
  misc_feature (1)..( 12): Result.003 file - promoters60/4283005
cagattttaata

SEQ ID NO: 133978 - DNA, 7 bp, Unknown
  misc_feature (1)..( 7): Result.003 file - promoters60/4283013
cgcagca

SEQ ID NO: 133979 - DNA, 7 bp, Unknown
  misc_feature (1)..( 7): Result.003 file - promoters60/4283013
cgcagca

SEQ ID NO: 133980 - DNA, 7 bp, Unknown
  misc_feature (1)..( 7): Result.003 file - promoters60/4283013
atatata

SEQ ID NO: 133981 - DNA, 7 bp, Unknown
  misc_feature (1)..( 7): Result.003 file - promoters60/4283013
atagata

SEQ ID NO: 133982 - DNA, 7 bp, Unknown
  misc_feature (1)..( 7): Result.003 file - promoters60/4283013
caaagtt

SEQ ID NO: 133983 - DNA, 7 bp, Unknown
  misc_feature (1)..( 7): Result.003 file - promoters60/4283013
caaggtt

SEQ ID NO: 133984 - DNA, 6 bp, Unknown
  misc_feature (1)..( 6): Result.003 file - promoters60/4283013
atatta

SEQ ID NO: 133985 - DNA, 6 bp, Unknown
  misc_feature (1)..( 6): Result.003 file - promoters60/4283013
atatta

SEQ ID NO: 133986 - DNA, 9 bp, Unknown
  misc_feature (1)..( 9): Result.003 file - promoters60/4283013
gttttgttc

SEQ ID NO: 133987 - DNA, 9 bp, Unknown
  misc_feature (1)..( 9): Result.003 file - promoters60/4283013
gttatgtca

SEQ ID NO: 133988 - DNA, 9 bp, Unknown
  misc_feature (1)..( 9): Result.003 file - promoters60/4283013
attatttca

SEQ ID NO: 133989 - DNA, 7 bp, Unknown
  misc_feature (1)..( 7): Result.003 file - promoters60/4283013
tacaata

SEQ ID NO: 133990 - DNA, 7 bp, Unknown
  misc_feature (1)..( 7): Result.003 file - promoters60/4283013
tacgata

SEQ ID NO: 133991 - DNA, 7 bp, Unknown
  misc_feature (1)..( 7): Result.003 file - promoters60/4283013
atggaga

SEQ ID NO: 133992 - DNA, 7 bp, Unknown
  misc_feature (1)..( 7): Result.003 file - promoters60/4283013
atgaaga

SEQ ID NO: 133993 - DNA, 7 bp, Unknown
  misc_feature (1)..( 7): Result.003 file - promoters60/4283013
tcgtcat

SEQ ID NO: 133994 - DNA, 7 bp, Unknown
  misc_feature (1)..( 7): Result.003 file - promoters60/4283013
tcgtcat

SEQ ID NO: 133995 - DNA, 7 bp, Unknown
  misc_feature (1)..( 7): Result.003 file - promoters60/4283013
caacttg

SEQ ID NO: 133996 - DNA, 7 bp, Unknown
  misc_feature (1)..( 7): Result.003 file - promoters60/4283013
caagttg

SEQ ID NO: 133997 - DNA, 7 bp, Unknown
  misc_feature (1)..( 7): Result.003 file - promoters60/4283013
atataca

SEQ ID NO: 133998 - DNA, 7 bp, Unknown
  misc_feature (1)..( 7): Result.003 file - promoters60/4283013
ataaaca

SEQ ID NO: 133999 - DNA, 7 bp, Unknown
  misc_feature (1)..( 7): Result.003 file - promoters60/4283013
ataaacc

SEQ ID NO: 134000 - DNA, 7 bp, Unknown
  misc_feature (1)..( 7): Result.003 file - promoters60/4283013
ctttcct

SEQ ID NO: 134001 - DNA, 7 bp, Unknown
  misc_feature (1)..( 7): Result.003 file - promoters60/4283013
ctttcct

SEQ ID NO: 134002 - DNA, 7 bp, Unknown
  misc_feature (1)..( 7): Result.003 file - promoters60/4283013
tcataat

SEQ ID NO: 134003 - DNA, 7 bp, Unknown
  misc_feature (1)..( 7): Result.003 file - promoters60/4283013
tcacaat

SEQ ID NO: 134004 - DNA, 8 bp, Unknown
  misc_feature (1)..( 8): Result.003 file - promoters60/4283013
tcaattat

SEQ ID NO: 134005 - DNA, 8 bp, Unknown
  misc_feature (1)..( 8): Result.003 file - promoters60/4283013
tcaattat

SEQ ID NO: 134006 - DNA, 9 bp, Unknown
  misc_feature (1)..( 9): Result.003 file - promoters60/4283017
ttattaaat

SEQ ID NO: 134007 - DNA, 9 bp, Unknown
  misc_feature (1)..( 9): Result.003 file - promoters60/4283017
ttattcaat

SEQ ID NO: 134008 - DNA, 9 bp, Unknown
  misc_feature (1)..( 9): Result.003 file - promoters60/4283017
gcattcaat

SEQ ID NO: 134009 - DNA, 6 bp, Unknown
  misc_feature (1)..( 6): Result.003 file - promoters60/4283017
tcccac

SEQ ID NO: 134010 - DNA, 6 bp, Unknown
  misc_feature (1)..( 6): Result.003 file - promoters60/4283017
tcccac

SEQ ID NO: 134011 - DNA, 7 bp, Unknown
  misc_feature (1)..( 7): Result.003 file - promoters60/4283017
taatcat

SEQ ID NO: 134012 - DNA, 7 bp, Unknown
  misc_feature (1)..( 7): Result.003 file - promoters60/4283017
taaccat

SEQ ID NO: 134013 - DNA, 6 bp, Unknown
  misc_feature (1)..( 6): Result.003 file - promoters60/4283017
attttc

SEQ ID NO: 134014 - DNA, 6 bp, Unknown
  misc_feature (1)..( 6): Result.003 file - promoters60/4283017
attttc

SEQ ID NO: 134015 - DNA, 6 bp, Unknown
  misc_feature (1)..( 6): Result.003 file - promoters60/4283017
tgaatt

SEQ ID NO: 134016 - DNA, 6 bp, Unknown
  misc_feature (1)..( 6): Result.003 file - promoters60/4283017
tgaatt

SEQ ID NO: 134017 - DNA, 6 bp, Unknown
  misc_feature (1)..( 6): Result.003 file - promoters60/4283017
gattat

SEQ ID NO: 134018 - DNA, 6 bp, Unknown
  misc_feature (1)..( 6): Result.003 file - promoters60/4283017
gattat

SEQ ID NO: 134019 - DNA, 6 bp, Unknown
  misc_feature (1)..( 6): Result.003 file - promoters60/4283017
tgtatt

SEQ ID NO: 134020 - DNA, 6 bp, Unknown
  misc_feature (1)..( 6): Result.003 file - promoters60/4283017
tgtatt

SEQ ID NO: 134021 - DNA, 7 bp, Unknown
  misc_feature (1)..( 7): Result.003 file - promoters60/4283017
tattaac

SEQ ID NO: 134022 - DNA, 7 bp, Unknown
  misc_feature (1)..( 7): Result.003 file - promoters60/4283017
tataaac

SEQ ID NO: 134023 - DNA, 9 bp, Unknown
  misc_feature (1)..( 9): Result.003 file - promoters60/4283017
aaaatatct

SEQ ID NO: 134024 - DNA, 9 bp, Unknown
  misc_feature (1)..( 9): Result.003 file - promoters60/4283017
aaaagatct

SEQ ID NO: 134025 - DNA, 6 bp, Unknown
  misc_feature (1)..( 6): Result.003 file - promoters60/4283017
atcttc

SEQ ID NO: 134026 - DNA, 6 bp, Unknown
  misc_feature (1)..( 6): Result.003 file - promoters60/4283017
atcttc

SEQ ID NO: 134027 - DNA, 6 bp, Unknown
  misc_feature (1)..( 6): Result.003 file - promoters60/4283041
cattca

SEQ ID NO: 134028 - DNA, 6 bp, Unknown
  misc_feature (1)..( 6): Result.003 file - promoters60/4283041
cattca

SEQ ID NO: 134029 - DNA, 6 bp, Unknown
  misc_feature (1)..( 6): Result.003 file - promoters60/4283041
tcacaa

SEQ ID NO: 134030 - DNA, 6 bp, Unknown
  misc_feature (1)..( 6): Result.003 file - promoters60/4283041
tcacaa

SEQ ID NO: 134031 - DNA, 7 bp, Unknown
  misc_feature (1)..( 7): Result.003 file - promoters60/4283041
ttattta

SEQ ID NO: 134032 - DNA, 7 bp, Unknown
  misc_feature (1)..( 7): Result.003 file - promoters60/4283041
ttattta

SEQ ID NO: 134033 - DNA, 13 bp, Unknown
  misc_feature (1)..( 13): Result.003 file - promoters60/4283041
aaaaaaagaaaaa

SEQ ID NO: 134034 - DNA, 13 bp, Unknown
  misc_feature (1)..( 13): Result.003 file - promoters60/4283041
gccaaaagagtaa

SEQ ID NO: 134035 - DNA, 13 bp, Unknown
  misc_feature (1)..( 13): Result.003 file - promoters60/4283041
aaaaaaagaaaaa

SEQ ID NO: 134036 - DNA, 7 bp, Unknown
  misc_feature (1)..( 7): Result.003 file - promoters60/4283041
aagtgaa

SEQ ID NO: 134037 - DNA, 7 bp, Unknown
  misc_feature (1)..( 7): Result.003 file - promoters60/4283041
aagggaa

SEQ ID NO: 134038 - DNA, 6 bp, Unknown
  misc_feature (1)..( 6): Result.003 file - promoters60/4283041
tcgaaa

SEQ ID NO: 134039 - DNA, 6 bp, Unknown
  misc_feature (1)..( 6): Result.003 file - promoters60/4283041
tcgaaa

SEQ ID NO: 134040 - DNA, 11 bp, Unknown
  misc_feature (1)..( 11): Result.003 file - promoters60/4283041
aacacaccaaa

SEQ ID NO: 134041 - DNA, 11 bp, Unknown
  misc_feature (1)..( 11): Result.003 file - promoters60/4283041
aacccactaaa

SEQ ID NO: 134042 - DNA, 7 bp, Unknown
  misc_feature (1)..( 7): Result.003 file - promoters60/4283041
aaaaaaa

SEQ ID NO: 134043 - DNA, 7 bp, Unknown
  misc_feature (1)..( 7): Result.003 file - promoters60/4283041
aaaaaaa

SEQ ID NO: 134044 - DNA, 7 bp, Unknown
  misc_feature (1)..( 7): Result.003 file - promoters60/4283041
aatcaaa

SEQ ID NO: 134045 - DNA, 7 bp, Unknown
  misc_feature (1)..( 7): Result.003 file - promoters60/4283041
aataaaa

SEQ ID NO: 134046 - DNA, 6 bp, Unknown
  misc_feature (1)..( 6): Result.003 file - promoters60/4283041
agtaaa

SEQ ID NO: 134047 - DNA, 6 bp, Unknown
  misc_feature (1)..( 6): Result.003 file - promoters60/4283041
agtaaa

SEQ ID NO: 134048 - DNA, 7 bp, Unknown
  misc_feature (1)..( 7): Result.003 file - promoters60/4283041
aatcggg

SEQ ID NO: 134049 - DNA, 7 bp, Unknown
  misc_feature (1)..( 7): Result.003 file - promoters60/4283041
aattggg

SEQ ID NO: 134050 - DNA, 8 bp, Unknown
  misc_feature (1)..( 8): Result.003 file - promoters60/4283041
gaaagaaa

SEQ ID NO: 134051 - DNA, 8 bp, Unknown
  misc_feature (1)..( 8): Result.003 file - promoters60/4283041
gaaacaaa

SEQ ID NO: 134052 - DNA, 10 bp, Unknown
  misc_feature (1)..( 10): Result.003 file - promoters60/4283041
ggaaaagaaa

SEQ ID NO: 134053 - DNA, 10 bp, Unknown
  misc_feature (1)..( 10): Result.003 file - promoters60/4283041
ggaaatgaaa

SEQ ID NO: 134054 - DNA, 7 bp, Unknown
  misc_feature (1)..( 7): Result.003 file - promoters60/4283041
cccacta

SEQ ID NO: 134055 - DNA, 7 bp, Unknown
  misc_feature (1)..( 7): Result.003 file - promoters60/4283041
cccacta

SEQ ID NO: 134056 - DNA, 9 bp, Unknown
  misc_feature (1)..( 9): Result.003 file - promoters60/4283041
aaagaaaag

SEQ ID NO: 134057 - DNA, 9 bp, Unknown
  misc_feature (1)..( 9): Result.003 file - promoters60/4283041
aaagtaaag

SEQ ID NO: 134058 - DNA, 7 bp, Unknown
  misc_feature (1)..( 7): Result.003 file - promoters60/4283041
gtatata

SEQ ID NO: 134059 - DNA, 7 bp, Unknown
  misc_feature (1)..( 7): Result.003 file - promoters60/4283041
gtatata

SEQ ID NO: 134060 - DNA, 9 bp, Unknown
  misc_feature (1)..( 9): Result.003 file - promoters60/4283105
atacgatag

SEQ ID NO: 134061 - DNA, 9 bp, Unknown
  misc_feature (1)..( 9): Result.003 file - promoters60/4283105
atactatag

SEQ ID NO: 134062 - DNA, 7 bp, Unknown
  misc_feature (1)..( 7): Result.003 file - promoters60/4283105
actattt

SEQ ID NO: 134063 - DNA, 7 bp, Unknown
  misc_feature (1)..( 7): Result.003 file - promoters60/4283105
actattt

SEQ ID NO: 134064 - DNA, 9 bp, Unknown
  misc_feature (1)..( 9): Result.003 file - promoters60/4283105
ttaatctaa

SEQ ID NO: 134065 - DNA, 9 bp, Unknown
  misc_feature (1)..( 9): Result.003 file - promoters60/4283105
ttaatctaa

SEQ ID NO: 134066 - DNA, 10 bp, Unknown
  misc_feature (1)..( 10): Result.003 file - promoters60/4283105
attcgttttc

SEQ ID NO: 134067 - DNA, 10 bp, Unknown
  misc_feature (1)..( 10): Result.003 file - promoters60/4283105
atttgttttc

SEQ ID NO: 134068 - DNA, 7 bp, Unknown
  misc_feature (1)..( 7): Result.003 file - promoters60/4283105
tttcaca

SEQ ID NO: 134069 - DNA, 7 bp, Unknown
  misc_feature (1)..( 7): Result.003 file - promoters60/4283105
tttaaca

SEQ ID NO: 134070 - DNA, 7 bp, Unknown
  misc_feature (1)..( 7): Result.003 file - promoters60/4283105
acaaatt

SEQ ID NO: 134071 - DNA, 7 bp, Unknown
  misc_feature (1)..( 7): Result.003 file - promoters60/4283105
acagatt

SEQ ID NO: 134072 - DNA, 7 bp, Unknown
  misc_feature (1)..( 7): Result.003 file - promoters60/4283105
cattaaa

SEQ ID NO: 134073 - DNA, 7 bp, Unknown
  misc_feature (1)..( 7): Result.003 file - promoters60/4283105
cataaaa

SEQ ID NO: 134074 - DNA, 7 bp, Unknown
  misc_feature (1)..( 7): Result.003 file - promoters60/4283105
tcaaaac

SEQ ID NO: 134075 - DNA, 7 bp, Unknown
  misc_feature (1)..( 7): Result.003 file - promoters60/4283105
tcaaaac

SEQ ID NO: 134076 - DNA, 8 bp, Unknown
  misc_feature (1)..( 8): Result.003 file - promoters60/4283105
accaatca

SEQ ID NO: 134077 - DNA, 8 bp, Unknown
  misc_feature (1)..( 8): Result.003 file - promoters60/4283105
accattca

SEQ ID NO: 134078 - DNA, 6 bp, Unknown
  misc_feature (1)..( 6): Result.003 file - promoters60/4283105
agaaag

SEQ ID NO: 134079 - DNA, 6 bp, Unknown
  misc_feature (1)..( 6): Result.003 file - promoters60/4283105
agaaag

SEQ ID NO: 134080 - DNA, 6 bp, Unknown
  misc_feature (1)..( 6): Result.003 file - promoters60/4283105
aataat

SEQ ID NO: 134081 - DNA, 6 bp, Unknown
  misc_feature (1)..( 6): Result.003 file - promoters60/4283105
aataat

SEQ ID NO: 134082 - DNA, 8 bp, Unknown
  misc_feature (1)..( 8): Result.003 file - promoters60/4283105
tctactaa

SEQ ID NO: 134083 - DNA, 8 bp, Unknown
  misc_feature (1)..( 8): Result.003 file - promoters60/4283105
tcttctaa

SEQ ID NO: 134084 - DNA, 7 bp, Unknown
  misc_feature (1)..( 7): Result.003 file - promoters60/4283105
tgataca

SEQ ID NO: 134085 - DNA, 7 bp, Unknown
  misc_feature (1)..( 7): Result.003 file - promoters60/4283105
tgaaaca

SEQ ID NO: 134086 - DNA, 7 bp, Unknown
  misc_feature (1)..( 7): Result.003 file - promoters60/4283105
tagtgaa

SEQ ID NO: 134087 - DNA, 7 bp, Unknown
  misc_feature (1)..( 7): Result.003 file - promoters60/4283105
tagagaa

SEQ ID NO: 134088 - DNA, 6 bp, Unknown
  misc_feature (1)..( 6): Result.003 file - promoters60/4283105
aacact

SEQ ID NO: 134089 - DNA, 6 bp, Unknown
  misc_feature (1)..( 6): Result.003 file - promoters60/4283105
aacact

SEQ ID NO: 134090 - DNA, 6 bp, Unknown
  misc_feature (1)..( 6): Result.003 file - promoters60/4283105
ttctta

SEQ ID NO: 134091 - DNA, 6 bp, Unknown
  misc_feature (1)..( 6): Result.003 file - promoters60/4283105
ttctta

SEQ ID NO: 134092 - DNA, 6 bp, Unknown
  misc_feature (1)..( 6): Result.003 file - promoters60/4283105
gtcata

SEQ ID NO: 134093 - DNA, 6 bp, Unknown
  misc_feature (1)..( 6): Result.003 file - promoters60/4283105
gtcata

SEQ ID NO: 134094 - DNA, 8 bp, Unknown
  misc_feature (1)..( 8): Result.003 file - promoters60/4283105
caaaacaa

SEQ ID NO: 134095 - DNA, 8 bp, Unknown
  misc_feature (1)..( 8): Result.003 file - promoters60/4283105
caacacaa

SEQ ID NO: 134096 - DNA, 7 bp, Unknown
  misc_feature (1)..( 7): Result.003 file - promoters60/4283105
ttacaca

SEQ ID NO: 134097 - DNA, 7 bp, Unknown
  misc_feature (1)..( 7): Result.003 file - promoters60/4283105
ttaaaca

SEQ ID NO: 134098 - DNA, 6 bp, Unknown
  misc_feature (1)..( 6): Result.003 file - promoters60/4283105
attctt

SEQ ID NO: 134099 - DNA, 6 bp, Unknown
  misc_feature (1)..( 6): Result.003 file - promoters60/4283105
attctt

SEQ ID NO: 134100 - DNA, 9 bp, Unknown
  misc_feature (1)..( 9): Result.003 file - promoters60/4283218
tatttaaac

SEQ ID NO: 134101 - DNA, 9 bp, Unknown
  misc_feature (1)..( 9): Result.003 file - promoters60/4283218
tatataata

SEQ ID NO: 134102 - DNA, 9 bp, Unknown
  misc_feature (1)..( 9): Result.003 file - promoters60/4283218
tatataatg

SEQ ID NO: 134103 - DNA, 9 bp, Unknown
  misc_feature (1)..( 9): Result.003 file - promoters60/4283218
tatataaac

SEQ ID NO: 134104 - DNA, 9 bp, Unknown
  misc_feature (1)..( 9): Result.003 file - promoters60/4283218
tttttacat

SEQ ID NO: 134105 - DNA, 9 bp, Unknown
  misc_feature (1)..( 9): Result.003 file - promoters60/4283218
ttttttcat

SEQ ID NO: 134106 - DNA, 9 bp, Unknown
  misc_feature (1)..( 9): Result.003 file - promoters60/4283218
ttttttggt

SEQ ID NO: 134107 - DNA, 9 bp, Unknown
  misc_feature (1)..( 9): Result.003 file - promoters60/4283218
gattttcac

SEQ ID NO: 134108 - DNA, 7 bp, Unknown
  misc_feature (1)..( 7): Result.003 file - promoters60/4283222
tttactt

SEQ ID NO: 134109 - DNA, 7 bp, Unknown
  misc_feature (1)..( 7): Result.003 file - promoters60/4283222
tttactt

SEQ ID NO: 134110 - DNA, 9 bp, Unknown
  misc_feature (1)..( 9): Result.003 file - promoters60/4283222
aaatacaaa

SEQ ID NO: 134111 - DNA, 9 bp, Unknown
  misc_feature (1)..( 9): Result.003 file - promoters60/4283222
tcataaaaa

SEQ ID NO: 134112 - DNA, 9 bp, Unknown
  misc_feature (1)..( 9): Result.003 file - promoters60/4283222
gaaaacaca

SEQ ID NO: 134113 - DNA, 9 bp, Unknown
  misc_feature (1)..( 9): Result.003 file - promoters60/4283222
aaatatttt

SEQ ID NO: 134114 - DNA, 9 bp, Unknown
  misc_feature (1)..( 9): Result.003 file - promoters60/4283222
aaagatttt

SEQ ID NO: 134115 - DNA, 9 bp, Unknown
  misc_feature (1)..( 9): Result.003 file - promoters60/4283222
aaatattta

SEQ ID NO: 134116 - DNA, 6 bp, Unknown
  misc_feature (1)..( 6): Result.003 file - promoters60/4283222
ttttat

SEQ ID NO: 134117 - DNA, 6 bp, Unknown
  misc_feature (1)..( 6): Result.003 file - promoters60/4283222
ttttat

SEQ ID NO: 134118 - DNA, 6 bp, Unknown
  misc_feature (1)..( 6): Result.003 file - promoters60/4283222
aataat

SEQ ID NO: 134119 - DNA, 6 bp, Unknown
  misc_feature (1)..( 6): Result.003 file - promoters60/4283222
aataat

SEQ ID NO: 134120 - DNA, 6 bp, Unknown
  misc_feature (1)..( 6): Result.003 file - promoters60/4283222
aataat

SEQ ID NO: 134121 - DNA, 9 bp, Unknown
  misc_feature (1)..( 9): Result.003 file - promoters60/4283222
aaaagattt

SEQ ID NO: 134122 - DNA, 9 bp, Unknown
  misc_feature (1)..( 9): Result.003 file - promoters60/4283222
taaaaattt

SEQ ID NO: 134123 - DNA, 9 bp, Unknown
  misc_feature (1)..( 9): Result.003 file - promoters60/4283222
taataatgt

SEQ ID NO: 134124 - DNA, 7 bp, Unknown
  misc_feature (1)..( 7): Result.003 file - promoters60/4283222
atttatt

SEQ ID NO: 134125 - DNA, 7 bp, Unknown
  misc_feature (1)..( 7): Result.003 file - promoters60/4283222
atttata

SEQ ID NO: 134126 - DNA, 7 bp, Unknown
  misc_feature (1)..( 7): Result.003 file - promoters60/4283222
attaatt

SEQ ID NO: 134127 - DNA, 6 bp, Unknown
  misc_feature (1)..( 6): Result.003 file - promoters60/4283222
acaaaa

SEQ ID NO: 134128 - DNA, 6 bp, Unknown
  misc_feature (1)..( 6): Result.003 file - promoters60/4283222
acaaaa

SEQ ID NO: 134129 - DNA, 6 bp, Unknown
  misc_feature (1)..( 6): Result.003 file - promoters60/4283222
atacaa

SEQ ID NO: 134130 - DNA, 6 bp, Unknown
  misc_feature (1)..( 6): Result.003 file - promoters60/4283222
atacaa

SEQ ID NO: 134131 - DNA, 9 bp, Unknown
  misc_feature (1)..( 9): Result.003 file - promoters60/4283222
taaacattg

SEQ ID NO: 134132 - DNA, 9 bp, Unknown
  misc_feature (1)..( 9): Result.003 file - promoters60/4283222
taaaaattg

SEQ ID NO: 134133 - DNA, 9 bp, Unknown
  misc_feature (1)..( 9): Result.003 file - promoters60/4283222
taaacttga

SEQ ID NO: 134134 - DNA, 6 bp, Unknown
  misc_feature (1)..( 6): Result.003 file - promoters60/4283222
ccaaat

SEQ ID NO: 134135 - DNA, 6 bp, Unknown
  misc_feature (1)..( 6): Result.003 file - promoters60/4283222
ccaaat

SEQ ID NO: 134136 - DNA, 8 bp, Unknown
  misc_feature (1)..( 8): Result.003 file - promoters60/4283222
aaattgaa

SEQ ID NO: 134137 - DNA, 8 bp, Unknown
  misc_feature (1)..( 8): Result.003 file - promoters60/4283222
aaattgaa

SEQ ID NO: 134138 - DNA, 6 bp, Unknown
  misc_feature (1)..( 6): Result.003 file - promoters60/4283222
attttt

SEQ ID NO: 134139 - DNA, 6 bp, Unknown
  misc_feature (1)..( 6): Result.003 file - promoters60/4283222
attttt

SEQ ID NO: 134140 - DNA, 6 bp, Unknown
  misc_feature (1)..( 6): Result.003 file - promoters60/4283222
ttacta

SEQ ID NO: 134141 - DNA, 6 bp, Unknown
  misc_feature (1)..( 6): Result.003 file - promoters60/4283222
ttacta

SEQ ID NO: 134142 - DNA, 6 bp, Unknown
  misc_feature (1)..( 6): Result.003 file - promoters60/4283222
atttgc

SEQ ID NO: 134143 - DNA, 6 bp, Unknown
  misc_feature (1)..( 6): Result.003 file - promoters60/4283222
atttgc

SEQ ID NO: 134144 - DNA, 7 bp, Unknown
  misc_feature (1)..( 7): Result.003 file - promoters60/4283222
tttgtcg

SEQ ID NO: 134145 - DNA, 7 bp, Unknown
  misc_feature (1)..( 7): Result.003 file - promoters60/4283222
tttatcg

SEQ ID NO: 134146 - DNA, 6 bp, Unknown
  misc_feature (1)..( 6): Result.003 file - promoters60/4283222
attttt

SEQ ID NO: 134147 - DNA, 6 bp, Unknown
  misc_feature (1)..( 6): Result.003 file - promoters60/4283222
attttt

SEQ ID NO: 134148 - DNA, 6 bp, Unknown
  misc_feature (1)..( 6): Result.003 file - promoters60/4283222
tccatt

SEQ ID NO: 134149 - DNA, 6 bp, Unknown
  misc_feature (1)..( 6): Result.003 file - promoters60/4283222
tccatt

SEQ ID NO: 134150 - DNA, 6 bp, Unknown
  misc_feature (1)..( 6): Result.003 file - promoters60/4283222
aattat

SEQ ID NO: 134151 - DNA, 6 bp, Unknown
  misc_feature (1)..( 6): Result.003 file - promoters60/4283222
aattat

SEQ ID NO: 134152 - DNA, 8 bp, Unknown
  misc_feature (1)..( 8): Result.003 file - promoters60/4283222
tgtgtaga

SEQ ID NO: 134153 - DNA, 8 bp, Unknown
  misc_feature (1)..( 8): Result.003 file - promoters60/4283222
tgtggaga

SEQ ID NO: 134154 - DNA, 6 bp, Unknown
  misc_feature (1)..( 6): Result.003 file - promoters60/4283222
agacta

SEQ ID NO: 134155 - DNA, 6 bp, Unknown
  misc_feature (1)..( 6): Result.003 file - promoters60/4283222
agacta

SEQ ID NO: 134156 - DNA, 7 bp, Unknown
  misc_feature (1)..( 7): Result.003 file - promoters60/4283222
aaatatc

SEQ ID NO: 134157 - DNA, 7 bp, Unknown
  misc_feature (1)..( 7): Result.003 file - promoters60/4283222
aaagatc

SEQ ID NO: 134158 - DNA, 6 bp, Unknown
  misc_feature (1)..( 6): Result.003 file - promoters60/4283222
agtgat

SEQ ID NO: 134159 - DNA, 6 bp, Unknown
  misc_feature (1)..( 6): Result.003 file - promoters60/4283222
agtgat

SEQ ID NO: 134160 - DNA, 7 bp, Unknown
  misc_feature (1)..( 7): Result.003 file - promoters60/4283222
ttcttta

SEQ ID NO: 134161 - DNA, 7 bp, Unknown
  misc_feature (1)..( 7): Result.003 file - promoters60/4283222
ttcgtta

SEQ ID NO: 134162 - DNA, 6 bp, Unknown
  misc_feature (1)..( 6): Result.003 file - promoters60/4283222
ttgcca

SEQ ID NO: 134163 - DNA, 6 bp, Unknown
  misc_feature (1)..( 6): Result.003 file - promoters60/4283222
ttgcca

SEQ ID NO: 134164 - DNA, 6 bp, Unknown
  misc_feature (1)..( 6): Result.003 file - promoters60/4283222
aatatt

SEQ ID NO: 134165 - DNA, 6 bp, Unknown
  misc_feature (1)..( 6): Result.003 file - promoters60/4283222
aatatt

SEQ ID NO: 134166 - DNA, 9 bp, Unknown
  misc_feature (1)..( 9): Result.003 file - promoters60/4283222
aaaacaatt

SEQ ID NO: 134167 - DNA, 9 bp, Unknown
  misc_feature (1)..( 9): Result.003 file - promoters60/4283222
aaaataatt

SEQ ID NO: 134168 - DNA, 7 bp, Unknown
  misc_feature (1)..( 7): Result.003 file - promoters60/4283222
aagttat

SEQ ID NO: 134169 - DNA, 7 bp, Unknown
  misc_feature (1)..( 7): Result.003 file - promoters60/4283222
aagatat

SEQ ID NO: 134170 - DNA, 9 bp, Unknown
  misc_feature (1)..( 9): Result.003 file - promoters60/4283222
atttttgct

SEQ ID NO: 134171 - DNA, 9 bp, Unknown
  misc_feature (1)..( 9): Result.003 file - promoters60/4283222
attcttgct

SEQ ID NO: 134172 - DNA, 8 bp, Unknown
  misc_feature (1)..( 8): Result.003 file - promoters60/4283240
aaatcttg

SEQ ID NO: 134173 - DNA, 8 bp, Unknown
  misc_feature (1)..( 8): Result.003 file - promoters60/4283240
taattttg

SEQ ID NO: 134174 - DNA, 8 bp, Unknown
  misc_feature (1)..( 8): Result.003 file - promoters60/4283240
taatttat

SEQ ID NO: 134175 - DNA, 8 bp, Unknown
  misc_feature (1)..( 8): Result.003 file - promoters60/4283240
aaatttaa

SEQ ID NO: 134176 - DNA, 9 bp, Unknown
  misc_feature (1)..( 9): Result.003 file - promoters60/4283240
aaatataaa

SEQ ID NO: 134177 - DNA, 9 bp, Unknown
  misc_feature (1)..( 9): Result.003 file - promoters60/4283240
aaatattat

SEQ ID NO: 134178 - DNA, 9 bp, Unknown
  misc_feature (1)..( 9): Result.003 file - promoters60/4283240
aaatttaag

SEQ ID NO: 134179 - DNA, 10 bp, Unknown
  misc_feature (1)..( 10): Result.003 file - promoters60/4283240
aaagtataaa

SEQ ID NO: 134180 - DNA, 10 bp, Unknown
  misc_feature (1)..( 10): Result.003 file - promoters60/4283240
ctaatttatt

SEQ ID NO: 134181 - DNA, 8 bp, Unknown
  misc_feature (1)..( 8): Result.003 file - promoters60/4283240
aatattta

SEQ ID NO: 134182 - DNA, 8 bp, Unknown
  misc_feature (1)..( 8): Result.003 file - promoters60/4283240
gatatttt

SEQ ID NO: 134183 - DNA, 8 bp, Unknown
  misc_feature (1)..( 8): Result.003 file - promoters60/4283240
gatatttt

SEQ ID NO: 134184 - DNA, 8 bp, Unknown
  misc_feature (1)..( 8): Result.003 file - promoters60/4283240
gatttttt

SEQ ID NO: 134185 - DNA, 8 bp, Unknown
  misc_feature (1)..( 8): Result.003 file - promoters60/4283293
tttctttc

SEQ ID NO: 134186 - DNA, 8 bp, Unknown
  misc_feature (1)..( 8): Result.003 file - promoters60/4283293
tttatttc

SEQ ID NO: 134187 - DNA, 8 bp, Unknown
  misc_feature (1)..( 8): Result.003 file - promoters60/4283293
cttatttt

SEQ ID NO: 134188 - DNA, 7 bp, Unknown
  misc_feature (1)..( 7): Result.003 file - promoters60/4283293
aatttaa

SEQ ID NO: 134189 - DNA, 7 bp, Unknown
  misc_feature (1)..( 7): Result.003 file - promoters60/4283293
tatttaa

SEQ ID NO: 134190 - DNA, 7 bp, Unknown
  misc_feature (1)..( 7): Result.003 file - promoters60/4283293
tatttaa

SEQ ID NO: 134191 - DNA, 8 bp, Unknown
  misc_feature (1)..( 8): Result.003 file - promoters60/4283297
caaagaaa

SEQ ID NO: 134192 - DNA, 8 bp, Unknown
  misc_feature (1)..( 8): Result.003 file - promoters60/4283297
taaataaa

SEQ ID NO: 134193 - DNA, 8 bp, Unknown
  misc_feature (1)..( 8): Result.003 file - promoters60/4283297
caatgaag

SEQ ID NO: 134194 - DNA, 8 bp, Unknown
  misc_feature (1)..( 8): Result.003 file - promoters60/4283297
aaaataaa

SEQ ID NO: 134195 - DNA, 9 bp, Unknown
  misc_feature (1)..( 9): Result.003 file - promoters60/4283297
ctaaatcat

SEQ ID NO: 134196 - DNA, 9 bp, Unknown
  misc_feature (1)..( 9): Result.003 file - promoters60/4283297
taaaatcat

SEQ ID NO: 134197 - DNA, 9 bp, Unknown
  misc_feature (1)..( 9): Result.003 file - promoters60/4283297
taaaatcta

SEQ ID NO: 134198 - DNA, 11 bp, Unknown
  misc_feature (1)..( 11): Result.003 file - promoters60/4283297
aaatatggaaa

SEQ ID NO: 134199 - DNA, 11 bp, Unknown
  misc_feature (1)..( 11): Result.003 file - promoters60/4283297
aaatattggac

SEQ ID NO: 134200 - DNA, 11 bp, Unknown
  misc_feature (1)..( 11): Result.003 file - promoters60/4283297
caatatggaaa

SEQ ID NO: 134201 - DNA, 12 bp, Unknown
  misc_feature (1)..( 12): Result.003 file - promoters60/4283338
ttaccattgaaa

SEQ ID NO: 134202 - DNA, 12 bp, Unknown
  misc_feature (1)..( 12): Result.003 file - promoters60/4283338
acccaattgaac

SEQ ID NO: 134203 - DNA, 12 bp, Unknown
  misc_feature (1)..( 12): Result.003 file - promoters60/4283338
acccaattgaac

SEQ ID NO: 134204 - DNA, 12 bp, Unknown
  misc_feature (1)..( 12): Result.003 file - promoters60/4283338
taaccgttgagc

SEQ ID NO: 134205 - DNA, 12 bp, Unknown
  misc_feature (1)..( 12): Result.003 file - promoters60/4283338
taatcgttaatt

SEQ ID NO: 134206 - DNA, 12 bp, Unknown
  misc_feature (1)..( 12): Result.003 file - promoters60/4283338
accggattaaac

SEQ ID NO: 134207 - DNA, 12 bp, Unknown
  misc_feature (1)..( 12): Result.003 file - promoters60/4283338
gaaaaaatcaaa

SEQ ID NO: 134208 - DNA, 12 bp, Unknown
  misc_feature (1)..( 12): Result.003 file - promoters60/4283338
gaaaaatgtaaa

SEQ ID NO: 134209 - DNA, 12 bp, Unknown
  misc_feature (1)..( 12): Result.003 file - promoters60/4283338
caaaaaataaat

SEQ ID NO: 134210 - DNA, 12 bp, Unknown
  misc_feature (1)..( 12): Result.003 file - promoters60/4283338
gaacaaaggagg

SEQ ID NO: 134211 - DNA, 12 bp, Unknown
  misc_feature (1)..( 12): Result.003 file - promoters60/4283338
gaagaaattttt

SEQ ID NO: 134212 - DNA, 12 bp, Unknown
  misc_feature (1)..( 12): Result.003 file - promoters60/4283338
acacaaaaggag

SEQ ID NO: 134213 - DNA, 12 bp, Unknown
  misc_feature (1)..( 12): Result.003 file - promoters60/4283338
attgaaatataa

SEQ ID NO: 134214 - DNA, 14 bp, Unknown
  misc_feature (1)..( 14): Result.003 file - promoters60/4283378
tgcattagttcttc

SEQ ID NO: 134215 - DNA, 14 bp, Unknown
  misc_feature (1)..( 14): Result.003 file - promoters60/4283378
taaatttgttatgt

SEQ ID NO: 134216 - DNA, 14 bp, Unknown
  misc_feature (1)..( 14): Result.003 file - promoters60/4283378
gttattagttaacc

SEQ ID NO: 134217 - DNA, 14 bp, Unknown
  misc_feature (1)..( 14): Result.003 file - promoters60/4283378
gttattagttaacc

SEQ ID NO: 134218 - DNA, 14 bp, Unknown
  misc_feature (1)..( 14): Result.003 file - promoters60/4283378
taaattttttaaaa

SEQ ID NO: 134219 - DNA, 14 bp, Unknown
  misc_feature (1)..( 14): Result.003 file - promoters60/4283378
tatacgttttaaaa

SEQ ID NO: 134220 - DNA, 14 bp, Unknown
  misc_feature (1)..( 14): Result.003 file - promoters60/4283378
gaaatttcctcgct

SEQ ID NO: 134221 - DNA, 16 bp, Unknown
  misc_feature (1)..( 16): Result.003 file - promoters60/4283378
attcgaatttttcaat

SEQ ID NO: 134222 - DNA, 16 bp, Unknown
  misc_feature (1)..( 16): Result.003 file - promoters60/4283378
tttagtctattttaat

SEQ ID NO: 134223 - DNA, 16 bp, Unknown
  misc_feature (1)..( 16): Result.003 file - promoters60/4283378
atttgaaattttcata

SEQ ID NO: 134224 - DNA, 16 bp, Unknown
  misc_feature (1)..( 16): Result.003 file - promoters60/4283378
caatcccaattctaac

SEQ ID NO: 134225 - DNA, 16 bp, Unknown
  misc_feature (1)..( 16): Result.003 file - promoters60/4283378
tagaaaagaatgaaat

SEQ ID NO: 134226 - DNA, 16 bp, Unknown
  misc_feature (1)..( 16): Result.003 file - promoters60/4283378
atttgaaaatttcata

SEQ ID NO: 134227 - DNA, 11 bp, Unknown
  misc_feature (1)..( 11): Result.003 file - promoters60/4283378
ttttgaagaat

SEQ ID NO: 134228 - DNA, 11 bp, Unknown
  misc_feature (1)..( 11): Result.003 file - promoters60/4283378
ttttgatgaat

SEQ ID NO: 134229 - DNA, 11 bp, Unknown
  misc_feature (1)..( 11): Result.003 file - promoters60/4283378
gtttgaatcgt

SEQ ID NO: 134230 - DNA, 11 bp, Unknown
  misc_feature (1)..( 11): Result.003 file - promoters60/4283378
atttgctgaat

SEQ ID NO: 134231 - DNA, 11 bp, Unknown
  misc_feature (1)..( 11): Result.003 file - promoters60/4283378
aaaagatgaag

SEQ ID NO: 134232 - DNA, 11 bp, Unknown
  misc_feature (1)..( 11): Result.003 file - promoters60/4283378
tttcgatgtat

SEQ ID NO: 134233 - DNA, 21 bp, Unknown
  misc_feature (1)..( 21): Result.003 file - promoters60/4283378
ccataaaaatgttagatagga

SEQ ID NO: 134234 - DNA, 21 bp, Unknown
  misc_feature (1)..( 21): Result.003 file - promoters60/4283378
tttcataaattttaaaattat

SEQ ID NO: 134235 - DNA, 21 bp, Unknown
  misc_feature (1)..( 21): Result.003 file - promoters60/4283378
tgtgttaaatatgaatattac

SEQ ID NO: 134236 - DNA, 22 bp, Unknown
  misc_feature (1)..( 22): Result.003 file - promoters60/4283378
ttatgtaaattttgaaataatt

SEQ ID NO: 134237 - DNA, 22 bp, Unknown
  misc_feature (1)..( 22): Result.003 file - promoters60/4283378
tctgagaaatagatttgaaaaa

SEQ ID NO: 134238 - DNA, 22 bp, Unknown
  misc_feature (1)..( 22): Result.003 file - promoters60/4283378
atttttaaattttttaaaatat

SEQ ID NO: 134239 - DNA, 23 bp, Unknown
  misc_feature (1)..( 23): Result.003 file - promoters60/4283378
attgtgaaataattttgttttat

SEQ ID NO: 134240 - DNA, 11 bp, Unknown
  misc_feature (1)..( 11): Result.003 file - promoters60/4283378
cttatataaac

SEQ ID NO: 134241 - DNA, 11 bp, Unknown
  misc_feature (1)..( 11): Result.003 file - promoters60/4283378
tatatataata

SEQ ID NO: 134242 - DNA, 11 bp, Unknown
  misc_feature (1)..( 11): Result.003 file - promoters60/4283378
agtatataaac

SEQ ID NO: 134243 - DNA, 11 bp, Unknown
  misc_feature (1)..( 11): Result.003 file - promoters60/4283378
tataaataaaa

SEQ ID NO: 134244 - DNA, 11 bp, Unknown
  misc_feature (1)..( 11): Result.003 file - promoters60/4283378
tgtatataaat

SEQ ID NO: 134245 - DNA, 11 bp, Unknown
  misc_feature (1)..( 11): Result.003 file - promoters60/4283378
tgtatataaat

SEQ ID NO: 134246 - DNA, 11 bp, Unknown
  misc_feature (1)..( 11): Result.003 file - promoters60/4283378
gataaatatcc

SEQ ID NO: 134247 - DNA, 12 bp, Unknown
  misc_feature (1)..( 12): Result.003 file - promoters60/4283378
tatataaacaaa

SEQ ID NO: 134248 - DNA, 12 bp, Unknown
  misc_feature (1)..( 12): Result.003 file - promoters60/4283378
ataataaccaaa

SEQ ID NO: 134249 - DNA, 12 bp, Unknown
  misc_feature (1)..( 12): Result.003 file - promoters60/4283378
tatataaactct

SEQ ID NO: 134250 - DNA, 12 bp, Unknown
  misc_feature (1)..( 12): Result.003 file - promoters60/4283378
tttataaataaa

SEQ ID NO: 134251 - DNA, 12 bp, Unknown
  misc_feature (1)..( 12): Result.003 file - promoters60/4283378
tatataaatgac

SEQ ID NO: 134252 - DNA, 12 bp, Unknown
  misc_feature (1)..( 12): Result.003 file - promoters60/4283378
tatataaatgac

SEQ ID NO: 134253 - DNA, 10 bp, Unknown
  misc_feature (1)..( 10): Result.003 file - promoters60/4283378
caaaatttgt

SEQ ID NO: 134254 - DNA, 10 bp, Unknown
  misc_feature (1)..( 10): Result.003 file - promoters60/4283378
caatatttta

SEQ ID NO: 134255 - DNA, 10 bp, Unknown
  misc_feature (1)..( 10): Result.003 file - promoters60/4283378
gaatatgttt

SEQ ID NO: 134256 - DNA, 10 bp, Unknown
  misc_feature (1)..( 10): Result.003 file - promoters60/4283378
aattatttta

SEQ ID NO: 134257 - DNA, 11 bp, Unknown
  misc_feature (1)..( 11): Result.003 file - promoters60/4283378
atttagtttga

SEQ ID NO: 134258 - DNA, 11 bp, Unknown
  misc_feature (1)..( 11): Result.003 file - promoters60/4283378
agatagtatat

SEQ ID NO: 134259 - DNA, 11 bp, Unknown
  misc_feature (1)..( 11): Result.003 file - promoters60/4283378
agatagtatat

SEQ ID NO: 134260 - DNA, 6 bp, Unknown
  misc_feature (1)..( 6): Result.003 file - promoters60/4283390
tctcga

SEQ ID NO: 134261 - DNA, 6 bp, Unknown
  misc_feature (1)..( 6): Result.003 file - promoters60/4283390
tctcga

SEQ ID NO: 134262 - DNA, 9 bp, Unknown
  misc_feature (1)..( 9): Result.003 file - promoters60/4283390
gccattgct

SEQ ID NO: 134263 - DNA, 9 bp, Unknown
  misc_feature (1)..( 9): Result.003 file - promoters60/4283390
gccatggct

SEQ ID NO: 134264 - DNA, 6 bp, Unknown
  misc_feature (1)..( 6): Result.003 file - promoters60/4283390
aaaagc

SEQ ID NO: 134265 - DNA, 6 bp, Unknown
  misc_feature (1)..( 6): Result.003 file - promoters60/4283390
aaaagc

SEQ ID NO: 134266 - DNA, 8 bp, Unknown
  misc_feature (1)..( 8): Result.003 file - promoters60/4283390
aatagatt

SEQ ID NO: 134267 - DNA, 8 bp, Unknown
  misc_feature (1)..( 8): Result.003 file - promoters60/4283390
aataaatt

SEQ ID NO: 134268 - DNA, 8 bp, Unknown
  misc_feature (1)..( 8): Result.003 file - promoters60/4283390
tctaaatt

SEQ ID NO: 134269 - DNA, 9 bp, Unknown
  misc_feature (1)..( 9): Result.003 file - promoters60/4283390
attatgtat

SEQ ID NO: 134270 - DNA, 9 bp, Unknown
  misc_feature (1)..( 9): Result.003 file - promoters60/4283390
attttgtat

SEQ ID NO: 134271 - DNA, 6 bp, Unknown
  misc_feature (1)..( 6): Result.003 file - promoters60/4283390
aaactt

SEQ ID NO: 134272 - DNA, 6 bp, Unknown
  misc_feature (1)..( 6): Result.003 file - promoters60/4283390
aaactt

SEQ ID NO: 134273 - DNA, 11 bp, Unknown
  misc_feature (1)..( 11): Result.003 file - promoters60/4283390
aagtgaagaac

SEQ ID NO: 134274 - DNA, 11 bp, Unknown
  misc_feature (1)..( 11): Result.003 file - promoters60/4283390
aagcgaacaac

SEQ ID NO: 134275 - DNA, 6 bp, Unknown
  misc_feature (1)..( 6): Result.003 file - promoters60/4283390
aaatta

SEQ ID NO: 134276 - DNA, 6 bp, Unknown
  misc_feature (1)..( 6): Result.003 file - promoters60/4283390
aaatta

SEQ ID NO: 134277 - DNA, 7 bp, Unknown
  misc_feature (1)..( 7): Result.003 file - promoters60/4283390
attacaa

SEQ ID NO: 134278 - DNA, 7 bp, Unknown
  misc_feature (1)..( 7): Result.003 file - promoters60/4283390
atttcaa

SEQ ID NO: 134279 - DNA, 6 bp, Unknown
  misc_feature (1)..( 6): Result.003 file - promoters60/4283390
acattc

SEQ ID NO: 134280 - DNA, 6 bp, Unknown
  misc_feature (1)..( 6): Result.003 file - promoters60/4283390
acattc

SEQ ID NO: 134281 - DNA, 8 bp, Unknown
  misc_feature (1)..( 8): Result.003 file - promoters60/4283390
aaagagtt

SEQ ID NO: 134282 - DNA, 8 bp, Unknown
  misc_feature (1)..( 8): Result.003 file - promoters60/4283390
aaagtgtt

SEQ ID NO: 134283 - DNA, 7 bp, Unknown
  misc_feature (1)..( 7): Result.003 file - promoters60/4283397
attataa

SEQ ID NO: 134284 - DNA, 7 bp, Unknown
  misc_feature (1)..( 7): Result.003 file - promoters60/4283397
attttaa

SEQ ID NO: 134285 - DNA, 7 bp, Unknown
  misc_feature (1)..( 7): Result.003 file - promoters60/4283397
attttaa

SEQ ID NO: 134286 - DNA, 9 bp, Unknown
  misc_feature (1)..( 9): Result.003 file - promoters60/4283397
ttttaaaaa

SEQ ID NO: 134287 - DNA, 9 bp, Unknown
  misc_feature (1)..( 9): Result.003 file - promoters60/4283397
ttttacaaa

SEQ ID NO: 134288 - DNA, 6 bp, Unknown
  misc_feature (1)..( 6): Result.003 file - promoters60/4283397
aatcaa

SEQ ID NO: 134289 - DNA, 6 bp, Unknown
  misc_feature (1)..( 6): Result.003 file - promoters60/4283397
aatcaa

SEQ ID NO: 134290 - DNA, 6 bp, Unknown
  misc_feature (1)..( 6): Result.003 file - promoters60/4283397
aatttt

SEQ ID NO: 134291 - DNA, 6 bp, Unknown
  misc_feature (1)..( 6): Result.003 file - promoters60/4283397
aatttt

SEQ ID NO: 134292 - DNA, 6 bp, Unknown
  misc_feature (1)..( 6): Result.003 file - promoters60/4283397
catata

SEQ ID NO: 134293 - DNA, 6 bp, Unknown
  misc_feature (1)..( 6): Result.003 file - promoters60/4283397
catata

SEQ ID NO: 134294 - DNA, 8 bp, Unknown
  misc_feature (1)..( 8): Result.003 file - promoters60/4283397
atttctaa

SEQ ID NO: 134295 - DNA, 8 bp, Unknown
  misc_feature (1)..( 8): Result.003 file - promoters60/4283397
atttctaa

SEQ ID NO: 134296 - DNA, 7 bp, Unknown
  misc_feature (1)..( 7): Result.003 file - promoters60/4283397
tttattt

SEQ ID NO: 134297 - DNA, 7 bp, Unknown
  misc_feature (1)..( 7): Result.003 file - promoters60/4283397
tttattt

SEQ ID NO: 134298 - DNA, 11 bp, Unknown
  misc_feature (1)..( 11): Result.003 file - promoters60/4283397
aaaaaaaattt

SEQ ID NO: 134299 - DNA, 11 bp, Unknown
  misc_feature (1)..( 11): Result.003 file - promoters60/4283397
aaacaaaattt

SEQ ID NO: 134300 - DNA, 10 bp, Unknown
  misc_feature (1)..( 10): Result.003 file - promoters60/4283397
aataaaaaaa

SEQ ID NO: 134301 - DNA, 10 bp, Unknown
  misc_feature (1)..( 10): Result.003 file - promoters60/4283397
aataataaaa

SEQ ID NO: 134302 - DNA, 10 bp, Unknown
  misc_feature (1)..( 10): Result.003 file - promoters60/4283397
cggaaaaaag

SEQ ID NO: 134303 - DNA, 6 bp, Unknown
  misc_feature (1)..( 6): Result.003 file - promoters60/4283397
aatttt

SEQ ID NO: 134304 - DNA, 6 bp, Unknown
  misc_feature (1)..( 6): Result.003 file - promoters60/4283397
aatttt

SEQ ID NO: 134305 - DNA, 9 bp, Unknown
  misc_feature (1)..( 9): Result.003 file - promoters60/4283397
ttttcaaaa

SEQ ID NO: 134306 - DNA, 9 bp, Unknown
  misc_feature (1)..( 9): Result.003 file - promoters60/4283397
tttacaaaa

SEQ ID NO: 134307 - DNA, 6 bp, Unknown
  misc_feature (1)..( 6): Result.003 file - promoters60/4283397
ttctaa

SEQ ID NO: 134308 - DNA, 6 bp, Unknown
  misc_feature (1)..( 6): Result.003 file - promoters60/4283397
ttctaa

SEQ ID NO: 134309 - DNA, 7 bp, Unknown
  misc_feature (1)..( 7): Result.003 file - promoters60/4283397
ataaaaa

SEQ ID NO: 134310 - DNA, 7 bp, Unknown
  misc_feature (1)..( 7): Result.003 file - promoters60/4283397
atagaaa

SEQ ID NO: 134311 - DNA, 8 bp, Unknown
  misc_feature (1)..( 8): Result.003 file - promoters60/4283397
caaagagt

SEQ ID NO: 134312 - DNA, 8 bp, Unknown
  misc_feature (1)..( 8): Result.003 file - promoters60/4283397
aaaagagg

SEQ ID NO: 134313 - DNA, 8 bp, Unknown
  misc_feature (1)..( 8): Result.003 file - promoters60/4283397
aaaataga

SEQ ID NO: 134314 - DNA, 6 bp, Unknown
  misc_feature (1)..( 6): Result.003 file - promoters60/4283397
ttttgt

SEQ ID NO: 134315 - DNA, 6 bp, Unknown
  misc_feature (1)..( 6): Result.003 file - promoters60/4283397
ttttgt

SEQ ID NO: 134316 - DNA, 6 bp, Unknown
  misc_feature (1)..( 6): Result.003 file - promoters60/4283397
tgtttt

SEQ ID NO: 134317 - DNA, 6 bp, Unknown
  misc_feature (1)..( 6): Result.003 file - promoters60/4283397
tgtttt

SEQ ID NO: 134318 - DNA, 7 bp, Unknown
  misc_feature (1)..( 7): Result.003 file - promoters60/4283397
gtaatgt

SEQ ID NO: 134319 - DNA, 7 bp, Unknown
  misc_feature (1)..( 7): Result.003 file - promoters60/4283397
gtattgt

SEQ ID NO: 134320 - DNA, 6 bp, Unknown
  misc_feature (1)..( 6): Result.003 file - promoters60/4283397
ccccca

SEQ ID NO: 134321 - DNA, 6 bp, Unknown
  misc_feature (1)..( 6): Result.003 file - promoters60/4283397
ccccca

SEQ ID NO: 134322 - DNA, 6 bp, Unknown
  misc_feature (1)..( 6): Result.003 file - promoters60/4283425
tcttct

SEQ ID NO: 134323 - DNA, 6 bp, Unknown
  misc_feature (1)..( 6): Result.003 file - promoters60/4283425
tcttct

SEQ ID NO: 134324 - DNA, 9 bp, Unknown
  misc_feature (1)..( 9): Result.003 file - promoters60/4283425
ccaaaaata

SEQ ID NO: 134325 - DNA, 9 bp, Unknown
  misc_feature (1)..( 9): Result.003 file - promoters60/4283425
ccaaaaaaa

SEQ ID NO: 134326 - DNA, 9 bp, Unknown
  misc_feature (1)..( 9): Result.003 file - promoters60/4283425
aaaaacata

SEQ ID NO: 134327 - DNA, 6 bp, Unknown
  misc_feature (1)..( 6): Result.003 file - promoters60/4283425
cataga

SEQ ID NO: 134328 - DNA, 6 bp, Unknown
  misc_feature (1)..( 6): Result.003 file - promoters60/4283425
cataga

SEQ ID NO: 134329 - DNA, 6 bp, Unknown
  misc_feature (1)..( 6): Result.003 file - promoters60/4283425
gaaaaa

SEQ ID NO: 134330 - DNA, 6 bp, Unknown
  misc_feature (1)..( 6): Result.003 file - promoters60/4283425
gaaaaa

SEQ ID NO: 134331 - DNA, 9 bp, Unknown
  misc_feature (1)..( 9): Result.003 file - promoters60/4283425
ggtctaaag

SEQ ID NO: 134332 - DNA, 9 bp, Unknown
  misc_feature (1)..( 9): Result.003 file - promoters60/4283425
agtcttaag

SEQ ID NO: 134333 - DNA, 9 bp, Unknown
  misc_feature (1)..( 9): Result.003 file - promoters60/4283425
ggtcaaaaa

SEQ ID NO: 134334 - DNA, 8 bp, Unknown
  misc_feature (1)..( 8): Result.003 file - promoters60/4283425
tataatat

SEQ ID NO: 134335 - DNA, 8 bp, Unknown
  misc_feature (1)..( 8): Result.003 file - promoters60/4283425
tatattat

SEQ ID NO: 134336 - DNA, 10 bp, Unknown
  misc_feature (1)..( 10): Result.003 file - promoters60/4283425
agttagattt

SEQ ID NO: 134337 - DNA, 10 bp, Unknown
  misc_feature (1)..( 10): Result.003 file - promoters60/4283425
agttggattt

SEQ ID NO: 134338 - DNA, 9 bp, Unknown
  misc_feature (1)..( 9): Result.003 file - promoters60/4283425
tatacatgt

SEQ ID NO: 134339 - DNA, 9 bp, Unknown
  misc_feature (1)..( 9): Result.003 file - promoters60/4283425
tatacatgt

SEQ ID NO: 134340 - DNA, 11 bp, Unknown
  misc_feature (1)..( 11): Result.003 file - promoters60/4283425
aaaccatatta

SEQ ID NO: 134341 - DNA, 11 bp, Unknown
  misc_feature (1)..( 11): Result.003 file - promoters60/4283425
aaaccatatta

SEQ ID NO: 134342 - DNA, 6 bp, Unknown
  misc_feature (1)..( 6): Result.003 file - promoters60/4283425
gacaaa

SEQ ID NO: 134343 - DNA, 6 bp, Unknown
  misc_feature (1)..( 6): Result.003 file - promoters60/4283425
gacaaa

SEQ ID NO: 134344 - DNA, 6 bp, Unknown
  misc_feature (1)..( 6): Result.003 file - promoters60/4283425
aaaaaa

SEQ ID NO: 134345 - DNA, 6 bp, Unknown
  misc_feature (1)..( 6): Result.003 file - promoters60/4283425
aaaaaa

SEQ ID NO: 134346 - DNA, 6 bp, Unknown
  misc_feature (1)..( 6): Result.003 file - promoters60/4283425
agacaa

SEQ ID NO: 134347 - DNA, 6 bp, Unknown
  misc_feature (1)..( 6): Result.003 file - promoters60/4283425
agacaa

SEQ ID NO: 134348 - DNA, 6 bp, Unknown
  misc_feature (1)..( 6): Result.003 file - promoters60/4283425
agagac

SEQ ID NO: 134349 - DNA, 6 bp, Unknown
  misc_feature (1)..( 6): Result.003 file - promoters60/4283425
agagac

SEQ ID NO: 134350 - DNA, 7 bp, Unknown
  misc_feature (1)..( 7): Result.003 file - promoters60/4283425
tcttatt

SEQ ID NO: 134351 - DNA, 7 bp, Unknown
  misc_feature (1)..( 7): Result.003 file - promoters60/4283425
tcttatt

SEQ ID NO: 134352 - DNA, 6 bp, Unknown
  misc_feature (1)..( 6): Result.003 file - promoters60/4283425
catatt

SEQ ID NO: 134353 - DNA, 6 bp, Unknown
  misc_feature (1)..( 6): Result.003 file - promoters60/4283425
catatt

SEQ ID NO: 134354 - DNA, 6 bp, Unknown
  misc_feature (1)..( 6): Result.003 file - promoters60/4283425
tatttt

SEQ ID NO: 134355 - DNA, 6 bp, Unknown
  misc_feature (1)..( 6): Result.003 file - promoters60/4283425
tatttt

SEQ ID NO: 134356 - DNA, 7 bp, Unknown
  misc_feature (1)..( 7): Result.003 file - promoters60/4283425
ttttttt

SEQ ID NO: 134357 - DNA, 7 bp, Unknown
  misc_feature (1)..( 7): Result.003 file - promoters60/4283425
ttttttt

SEQ ID NO: 134358 - DNA, 9 bp, Unknown
  misc_feature (1)..( 9): Result.003 file - promoters60/4283425
caatatttt

SEQ ID NO: 134359 - DNA, 9 bp, Unknown
  misc_feature (1)..( 9): Result.003 file - promoters60/4283425
caatctttt

SEQ ID NO: 134360 - DNA, 8 bp, Unknown
  misc_feature (1)..( 8): Result.003 file - promoters60/4283425
caacaaaa

SEQ ID NO: 134361 - DNA, 8 bp, Unknown
  misc_feature (1)..( 8): Result.003 file - promoters60/4283425
caagaaaa

SEQ ID NO: 134362 - DNA, 6 bp, Unknown
  misc_feature (1)..( 6): Result.003 file - promoters60/4283425
aaaaaa

SEQ ID NO: 134363 - DNA, 6 bp, Unknown
  misc_feature (1)..( 6): Result.003 file - promoters60/4283425
aaaaaa

SEQ ID NO: 134364 - DNA, 11 bp, Unknown
  misc_feature (1)..( 11): Result.003 file - promoters60/4283425
ttcttattttt

SEQ ID NO: 134365 - DNA, 11 bp, Unknown
  misc_feature (1)..( 11): Result.003 file - promoters60/4283425
ttcatatcttt

SEQ ID NO: 134366 - DNA, 7 bp, Unknown
  misc_feature (1)..( 7): Result.003 file - promoters60/4283425
cactgtt

SEQ ID NO: 134367 - DNA, 7 bp, Unknown
  misc_feature (1)..( 7): Result.003 file - promoters60/4283425
cacagtt

SEQ ID NO: 134368 - DNA, 8 bp, Unknown
  misc_feature (1)..( 8): Result.003 file - promoters60/4283425
gcgtaaat

SEQ ID NO: 134369 - DNA, 8 bp, Unknown
  misc_feature (1)..( 8): Result.003 file - promoters60/4283425
gcgaaaat

SEQ ID NO: 134370 - DNA, 7 bp, Unknown
  misc_feature (1)..( 7): Result.003 file - promoters60/4283425
ataaata

SEQ ID NO: 134371 - DNA, 7 bp, Unknown
  misc_feature (1)..( 7): Result.003 file - promoters60/4283425
atacata

SEQ ID NO: 134372 - DNA, 10 bp, Unknown
  misc_feature (1)..( 10): Result.003 file - promoters60/4283425
tatatatata

SEQ ID NO: 134373 - DNA, 10 bp, Unknown
  misc_feature (1)..( 10): Result.003 file - promoters60/4283425
tataaatata

SEQ ID NO: 134374 - DNA, 6 bp, Unknown
  misc_feature (1)..( 6): Result.003 file - promoters60/4283510
tagctc

SEQ ID NO: 134375 - DNA, 6 bp, Unknown
  misc_feature (1)..( 6): Result.003 file - promoters60/4283510
tagctc

SEQ ID NO: 134376 - DNA, 6 bp, Unknown
  misc_feature (1)..( 6): Result.003 file - promoters60/4283510
tagctc

SEQ ID NO: 134377 - DNA, 9 bp, Unknown
  misc_feature (1)..( 9): Result.003 file - promoters60/4283510
tttcttttc

SEQ ID NO: 134378 - DNA, 9 bp, Unknown
  misc_feature (1)..( 9): Result.003 file - promoters60/4283510
tttctcttc

SEQ ID NO: 134379 - DNA, 9 bp, Unknown
  misc_feature (1)..( 9): Result.003 file - promoters60/4283510
tttctcgac

SEQ ID NO: 134380 - DNA, 8 bp, Unknown
  misc_feature (1)..( 8): Result.003 file - promoters60/4283510
atttttca

SEQ ID NO: 134381 - DNA, 8 bp, Unknown
  misc_feature (1)..( 8): Result.003 file - promoters60/4283510
atttttca

SEQ ID NO: 134382 - DNA, 8 bp, Unknown
  misc_feature (1)..( 8): Result.003 file - promoters60/4283510
ttttatca

SEQ ID NO: 134383 - DNA, 8 bp, Unknown
  misc_feature (1)..( 8): Result.003 file - promoters60/4283614
tatattat

SEQ ID NO: 134384 - DNA, 8 bp, Unknown
  misc_feature (1)..( 8): Result.003 file - promoters60/4283614
tattttat

SEQ ID NO: 134385 - DNA, 6 bp, Unknown
  misc_feature (1)..( 6): Result.003 file - promoters60/4283614
acatgg

SEQ ID NO: 134386 - DNA, 6 bp, Unknown
  misc_feature (1)..( 6): Result.003 file - promoters60/4283614
acatgg

SEQ ID NO: 134387 - DNA, 7 bp, Unknown
  misc_feature (1)..( 7): Result.003 file - promoters60/4283614
ttgatga

SEQ ID NO: 134388 - DNA, 7 bp, Unknown
  misc_feature (1)..( 7): Result.003 file - promoters60/4283614
ttgatga

SEQ ID NO: 134389 - DNA, 9 bp, Unknown
  misc_feature (1)..( 9): Result.003 file - promoters60/4283614
gaccataaa

SEQ ID NO: 134390 - DNA, 9 bp, Unknown
  misc_feature (1)..( 9): Result.003 file - promoters60/4283614
aaccctaaa

SEQ ID NO: 134391 - DNA, 9 bp, Unknown
  misc_feature (1)..( 9): Result.003 file - promoters60/4283614
aaccctcac

SEQ ID NO: 134392 - DNA, 8 bp, Unknown
  misc_feature (1)..( 8): Result.003 file - promoters60/4283614
tactaacg

SEQ ID NO: 134393 - DNA, 8 bp, Unknown
  misc_feature (1)..( 8): Result.003 file - promoters60/4283614
tacaaacg

SEQ ID NO: 134394 - DNA, 6 bp, Unknown
  misc_feature (1)..( 6): Result.003 file - promoters60/4283614
tgaaaa

SEQ ID NO: 134395 - DNA, 6 bp, Unknown
  misc_feature (1)..( 6): Result.003 file - promoters60/4283614
tgaaaa

SEQ ID NO: 134396 - DNA, 7 bp, Unknown
  misc_feature (1)..( 7): Result.003 file - promoters60/4283614
aacctga

SEQ ID NO: 134397 - DNA, 7 bp, Unknown
  misc_feature (1)..( 7): Result.003 file - promoters60/4283614
aacctga

SEQ ID NO: 134398 - DNA, 8 bp, Unknown
  misc_feature (1)..( 8): Result.003 file - promoters60/4283614
atgacaat

SEQ ID NO: 134399 - DNA, 8 bp, Unknown
  misc_feature (1)..( 8): Result.003 file - promoters60/4283614
atgaaaat

SEQ ID NO: 134400 - DNA, 7 bp, Unknown
  misc_feature (1)..( 7): Result.003 file - promoters60/4283614
tctatcc

SEQ ID NO: 134401 - DNA, 7 bp, Unknown
  misc_feature (1)..( 7): Result.003 file - promoters60/4283614
tctctcc

SEQ ID NO: 134402 - DNA, 7 bp, Unknown
  misc_feature (1)..( 7): Result.003 file - promoters60/4283614
caaacta

SEQ ID NO: 134403 - DNA, 7 bp, Unknown
  misc_feature (1)..( 7): Result.003 file - promoters60/4283614
caaacta

SEQ ID NO: 134404 - DNA, 6 bp, Unknown
  misc_feature (1)..( 6): Result.003 file - promoters60/4283614
aaaaat

SEQ ID NO: 134405 - DNA, 6 bp, Unknown
  misc_feature (1)..( 6): Result.003 file - promoters60/4283614
aaaaat

SEQ ID NO: 134406 - DNA, 6 bp, Unknown
  misc_feature (1)..( 6): Result.003 file - promoters60/4283614
aaatta

SEQ ID NO: 134407 - DNA, 6 bp, Unknown
  misc_feature (1)..( 6): Result.003 file - promoters60/4283614
aaatta

SEQ ID NO: 134408 - DNA, 7 bp, Unknown
  misc_feature (1)..( 7): Result.003 file - promoters60/4283614
cttcttt

SEQ ID NO: 134409 - DNA, 7 bp, Unknown
  misc_feature (1)..( 7): Result.003 file - promoters60/4283614
ctttttt

SEQ ID NO: 134410 - DNA, 6 bp, Unknown
  misc_feature (1)..( 6): Result.003 file - promoters60/4283614
gaatca

SEQ ID NO: 134411 - DNA, 6 bp, Unknown
  misc_feature (1)..( 6): Result.003 file - promoters60/4283614
gaatca

SEQ ID NO: 134412 - DNA, 7 bp, Unknown
  misc_feature (1)..( 7): Result.003 file - promoters60/4283614
tccggtt

SEQ ID NO: 134413 - DNA, 7 bp, Unknown
  misc_feature (1)..( 7): Result.003 file - promoters60/4283614
tccagtt

SEQ ID NO: 134414 - DNA, 6 bp, Unknown
  misc_feature (1)..( 6): Result.003 file - promoters60/4283614
tttccg

SEQ ID NO: 134415 - DNA, 6 bp, Unknown
  misc_feature (1)..( 6): Result.003 file - promoters60/4283614
tttccg

SEQ ID NO: 134416 - DNA, 6 bp, Unknown
  misc_feature (1)..( 6): Result.003 file - promoters60/4283614
ataaat

SEQ ID NO: 134417 - DNA, 6 bp, Unknown
  misc_feature (1)..( 6): Result.003 file - promoters60/4283614
ataaat

SEQ ID NO: 134418 - DNA, 9 bp, Unknown
  misc_feature (1)..( 9): Result.003 file - promoters60/4283616
tatgtttgc

SEQ ID NO: 134419 - DNA, 9 bp, Unknown
  misc_feature (1)..( 9): Result.003 file - promoters60/4283616
tatctttta

SEQ ID NO: 134420 - DNA, 9 bp, Unknown
  misc_feature (1)..( 9): Result.003 file - promoters60/4283616
atcgtttgt

SEQ ID NO: 134421 - DNA, 9 bp, Unknown
  misc_feature (1)..( 9): Result.003 file - promoters60/4283616
tctcttttt

SEQ ID NO: 134422 - DNA, 12 bp, Unknown
  misc_feature (1)..( 12): Result.003 file - promoters60/4283616
aactcaccgtgc

SEQ ID NO: 134423 - DNA, 12 bp, Unknown
  misc_feature (1)..( 12): Result.003 file - promoters60/4283616
tactctccgttt

SEQ ID NO: 134424 - DNA, 12 bp, Unknown
  misc_feature (1)..( 12): Result.003 file - promoters60/4283616
tacgctcacttt

SEQ ID NO: 134425 - DNA, 12 bp, Unknown
  misc_feature (1)..( 12): Result.003 file - promoters60/4283616
tgtaatcctttt

SEQ ID NO: 134426 - DNA, 17 bp, Unknown
  misc_feature (1)..( 17): Result.003 file - promoters60/4283616
taaaaataaactagtaa

SEQ ID NO: 134427 - DNA, 17 bp, Unknown
  misc_feature (1)..( 17): Result.003 file - promoters60/4283616
acaaattaaacaagtaa

SEQ ID NO: 134428 - DNA, 17 bp, Unknown
  misc_feature (1)..( 17): Result.003 file - promoters60/4283616
taaaaattataccaaga

SEQ ID NO: 134429 - DNA, 17 bp, Unknown
  misc_feature (1)..( 17): Result.003 file - promoters60/4283616
aagaattaaaacgcgtc

SEQ ID NO: 134430 - DNA, 8 bp, Unknown
  misc_feature (1)..( 8): Result.003 file - promoters60/4283616
tagggttt

SEQ ID NO: 134431 - DNA, 8 bp, Unknown
  misc_feature (1)..( 8): Result.003 file - promoters60/4283616
tagggttt

SEQ ID NO: 134432 - DNA, 8 bp, Unknown
  misc_feature (1)..( 8): Result.003 file - promoters60/4283616
tagagttt

SEQ ID NO: 134433 - DNA, 8 bp, Unknown
  misc_feature (1)..( 8): Result.003 file - promoters60/4283616
aagtgttg

SEQ ID NO: 134434 - DNA, 9 bp, Unknown
  misc_feature (1)..( 9): Result.003 file - promoters60/4283616
gacaaaaga

SEQ ID NO: 134435 - DNA, 9 bp, Unknown
  misc_feature (1)..( 9): Result.003 file - promoters60/4283616
gactaaaga

SEQ ID NO: 134436 - DNA, 9 bp, Unknown
  misc_feature (1)..( 9): Result.003 file - promoters60/4283616
gaccaaaga

SEQ ID NO: 134437 - DNA, 9 bp, Unknown
  misc_feature (1)..( 9): Result.003 file - promoters60/4283616
gactacaga

SEQ ID NO: 134438 - DNA, 8 bp, Unknown
  misc_feature (1)..( 8): Result.003 file - promoters60/4283624
tttgcatt

SEQ ID NO: 134439 - DNA, 8 bp, Unknown
  misc_feature (1)..( 8): Result.003 file - promoters60/4283624
attgcata

SEQ ID NO: 134440 - DNA, 8 bp, Unknown
  misc_feature (1)..( 8): Result.003 file - promoters60/4283624
tttgaatt

SEQ ID NO: 134441 - DNA, 11 bp, Unknown
  misc_feature (1)..( 11): Result.003 file - promoters60/4283624
tatttttaaaa

SEQ ID NO: 134442 - DNA, 11 bp, Unknown
  misc_feature (1)..( 11): Result.003 file - promoters60/4283624
aatttctaaaa

SEQ ID NO: 134443 - DNA, 11 bp, Unknown
  misc_feature (1)..( 11): Result.003 file - promoters60/4283624
tatttttcaat

SEQ ID NO: 134444 - DNA, 11 bp, Unknown
  misc_feature (1)..( 11): Result.003 file - promoters60/4283624
gcagtttaata

SEQ ID NO: 134445 - DNA, 11 bp, Unknown
  misc_feature (1)..( 11): Result.003 file - promoters60/4283624
aaactttaata

SEQ ID NO: 134446 - DNA, 11 bp, Unknown
  misc_feature (1)..( 11): Result.003 file - promoters60/4283624
aaattttaaaa

SEQ ID NO: 134447 - DNA, 7 bp, Unknown
  misc_feature (1)..( 7): Result.003 file - promoters60/4283624
ccactta

SEQ ID NO: 134448 - DNA, 7 bp, Unknown
  misc_feature (1)..( 7): Result.003 file - promoters60/4283624
tcactta

SEQ ID NO: 134449 - DNA, 7 bp, Unknown
  misc_feature (1)..( 7): Result.003 file - promoters60/4283624
tcaatta

SEQ ID NO: 134450 - DNA, 15 bp, Unknown
  misc_feature (1)..( 15): Result.003 file - promoters60/4304982
ataaagtaatttaat

SEQ ID NO: 134451 - DNA, 15 bp, Unknown
  misc_feature (1)..( 15): Result.003 file - promoters60/4304982
aaacagtagtttcca

SEQ ID NO: 134452 - DNA, 15 bp, Unknown
  misc_feature (1)..( 15): Result.003 file - promoters60/4304982
ataaattaattaatt

SEQ ID NO: 134453 - DNA, 15 bp, Unknown
  misc_feature (1)..( 15): Result.003 file - promoters60/4304982
tttgttgagtttcga

SEQ ID NO: 134454 - DNA, 15 bp, Unknown
  misc_feature (1)..( 15): Result.003 file - promoters60/4304982
acgattctgtttcga

SEQ ID NO: 134455 - DNA, 15 bp, Unknown
  misc_feature (1)..( 15): Result.003 file - promoters60/4304982
tcaagataaataaat

SEQ ID NO: 134456 - DNA, 15 bp, Unknown
  misc_feature (1)..( 15): Result.003 file - promoters60/4304982
tacgaaaaaaaaaaa

SEQ ID NO: 134457 - DNA, 11 bp, Unknown
  misc_feature (1)..( 11): Result.003 file - promoters60/4378608
tttttaaattt

SEQ ID NO: 134458 - DNA, 11 bp, Unknown
  misc_feature (1)..( 11): Result.003 file - promoters60/4378608
tttttaaccgt

SEQ ID NO: 134459 - DNA, 11 bp, Unknown
  misc_feature (1)..( 11): Result.003 file - promoters60/4378608
attttacattt

SEQ ID NO: 134460 - DNA, 11 bp, Unknown
  misc_feature (1)..( 11): Result.003 file - promoters60/4378608
tgtttaacaaa

SEQ ID NO: 134461 - DNA, 11 bp, Unknown
  misc_feature (1)..( 11): Result.003 file - promoters60/4378608
gataagtaaag

SEQ ID NO: 134462 - DNA, 11 bp, Unknown
  misc_feature (1)..( 11): Result.003 file - promoters60/4378608
gataagcaaaa

SEQ ID NO: 134463 - DNA, 11 bp, Unknown
  misc_feature (1)..( 11): Result.003 file - promoters60/4378608
tctttgtaaag

SEQ ID NO: 134464 - DNA, 11 bp, Unknown
  misc_feature (1)..( 11): Result.003 file - promoters60/4378608
aaccagaaaag

SEQ ID NO: 134465 - DNA, 9 bp, Unknown
  misc_feature (1)..( 9): Result.003 file - promoters60/4378608
catttcaat

SEQ ID NO: 134466 - DNA, 9 bp, Unknown
  misc_feature (1)..( 9): Result.003 file - promoters60/4378608
cattccaat

SEQ ID NO: 134467 - DNA, 9 bp, Unknown
  misc_feature (1)..( 9): Result.003 file - promoters60/4378608
gtcttcaat

SEQ ID NO: 134468 - DNA, 9 bp, Unknown
  misc_feature (1)..( 9): Result.003 file - promoters60/4378608
gtatccaat

SEQ ID NO: 134469 - DNA, 9 bp, Unknown
  misc_feature (1)..( 9): Result.003 file - promoters60/4378608
ctctccaag

SEQ ID NO: 134470 - DNA, 9 bp, Unknown
  misc_feature (1)..( 9): Result.003 file - promoters60/4378608
aattttcaa

SEQ ID NO: 134471 - DNA, 9 bp, Unknown
  misc_feature (1)..( 9): Result.003 file - promoters60/4378608
aattttttt

SEQ ID NO: 134472 - DNA, 9 bp, Unknown
  misc_feature (1)..( 9): Result.003 file - promoters60/4378608
gatttacaa

SEQ ID NO: 134473 - DNA, 9 bp, Unknown
  misc_feature (1)..( 9): Result.003 file - promoters60/4378608
attttacat

SEQ ID NO: 134474 - DNA, 11 bp, Unknown
  misc_feature (1)..( 11): Result.003 file - promoters60/4577400
ccagaattaag

SEQ ID NO: 134475 - DNA, 11 bp, Unknown
  misc_feature (1)..( 11): Result.003 file - promoters60/4577400
ccataattagt

SEQ ID NO: 134476 - DNA, 11 bp, Unknown
  misc_feature (1)..( 11): Result.003 file - promoters60/4577400
atgtaattaag

SEQ ID NO: 134477 - DNA, 11 bp, Unknown
  misc_feature (1)..( 11): Result.003 file - promoters60/4577400
atatatttata

SEQ ID NO: 134478 - DNA, 11 bp, Unknown
  misc_feature (1)..( 11): Result.003 file - promoters60/4577400
aaaacattaag

SEQ ID NO: 134479 - DNA, 9 bp, Unknown
  misc_feature (1)..( 9): Result.003 file - promoters60/4577400
gtaaaaata

SEQ ID NO: 134480 - DNA, 9 bp, Unknown
  misc_feature (1)..( 9): Result.003 file - promoters60/4577400
ctaataatt

SEQ ID NO: 134481 - DNA, 9 bp, Unknown
  misc_feature (1)..( 9): Result.003 file - promoters60/4577400
gtaaaatta

SEQ ID NO: 134482 - DNA, 9 bp, Unknown
  misc_feature (1)..( 9): Result.003 file - promoters60/4577400
tacataatt

SEQ ID NO: 134483 - DNA, 11 bp, Unknown
  misc_feature (1)..( 11): Result.003 file - promoters60/4607678
tttatattaag

SEQ ID NO: 134484 - DNA, 11 bp, Unknown
  misc_feature (1)..( 11): Result.003 file - promoters60/4607678
cttatattaga

SEQ ID NO: 134485 - DNA, 11 bp, Unknown
  misc_feature (1)..( 11): Result.003 file - promoters60/4607678
tttaaatttta

SEQ ID NO: 134486 - DNA, 11 bp, Unknown
  misc_feature (1)..( 11): Result.003 file - promoters60/4607678
ataatataaag

SEQ ID NO: 134487 - DNA, 11 bp, Unknown
  misc_feature (1)..( 11): Result.003 file - promoters60/4607678
cctatataaag

SEQ ID NO: 134488 - DNA, 11 bp, Unknown
  misc_feature (1)..( 11): Result.003 file - promoters60/4607678
tttaaagcttt

SEQ ID NO: 134489 - DNA, 10 bp, Unknown
  misc_feature (1)..( 10): Result.003 file - promoters60/4607678
ttcaatttca

SEQ ID NO: 134490 - DNA, 10 bp, Unknown
  misc_feature (1)..( 10): Result.003 file - promoters60/4607678
aaaaatctca

SEQ ID NO: 134491 - DNA, 10 bp, Unknown
  misc_feature (1)..( 10): Result.003 file - promoters60/4607678
ttctatttct

SEQ ID NO: 134492 - DNA, 10 bp, Unknown
  misc_feature (1)..( 10): Result.003 file - promoters60/4607678
ttctatttat

SEQ ID NO: 134493 - DNA, 10 bp, Unknown
  misc_feature (1)..( 10): Result.003 file - promoters60/4607678
ttctattcga

SEQ ID NO: 134494 - DNA, 8 bp, Unknown
  misc_feature (1)..( 8): Result.003 file - promoters60/4607678
ttcaattg

SEQ ID NO: 134495 - DNA, 8 bp, Unknown
  misc_feature (1)..( 8): Result.003 file - promoters60/4607678
ttctattc

SEQ ID NO: 134496 - DNA, 8 bp, Unknown
  misc_feature (1)..( 8): Result.003 file - promoters60/4607678
gacaattg

SEQ ID NO: 134497 - DNA, 8 bp, Unknown
  misc_feature (1)..( 8): Result.003 file - promoters60/4607678
ttctattt

SEQ ID NO: 134498 - DNA, 13 bp, Unknown
  misc_feature (1)..( 13): Result.003 file - promoters60/4607678
tcactttcagcat

SEQ ID NO: 134499 - DNA, 13 bp, Unknown
  misc_feature (1)..( 13): Result.003 file - promoters60/4607678
tcattttaaaaac

SEQ ID NO: 134500 - DNA, 13 bp, Unknown
  misc_feature (1)..( 13): Result.003 file - promoters60/4607678
atattttcaaaag

SEQ ID NO: 134501 - DNA, 13 bp, Unknown
  misc_feature (1)..( 13): Result.003 file - promoters60/4607678
tgattttcacaag

SEQ ID NO: 134502 - DNA, 14 bp, Unknown
  misc_feature (1)..( 14): Result.003 file - promoters60/4607678
aataatttgaatgg

SEQ ID NO: 134503 - DNA, 14 bp, Unknown
  misc_feature (1)..( 14): Result.003 file - promoters60/4607678
aatattttcaaaag

SEQ ID NO: 134504 - DNA, 14 bp, Unknown
  misc_feature (1)..( 14): Result.003 file - promoters60/4607678
gtcattttaaaaac

SEQ ID NO: 134505 - DNA, 14 bp, Unknown
  misc_feature (1)..( 14): Result.003 file - promoters60/4607678
atgattttcacaag

SEQ ID NO: 134506 - DNA, 12 bp, Unknown
  misc_feature (1)..( 12): Result.003 file - promoters60/4607678
caatgatgattt

SEQ ID NO: 134507 - DNA, 12 bp, Unknown
  misc_feature (1)..( 12): Result.003 file - promoters60/4607678
aaataatgtttt

SEQ ID NO: 134508 - DNA, 12 bp, Unknown
  misc_feature (1)..( 12): Result.003 file - promoters60/4607678
caattatgtgat

SEQ ID NO: 134509 - DNA, 12 bp, Unknown
  misc_feature (1)..( 12): Result.003 file - promoters60/4607678
caatatttacac

SEQ ID NO: 134510 - DNA, 9 bp, Unknown
  misc_feature (1)..( 9): Result.003 file - promoters60/4607678
tttgaaaat

SEQ ID NO: 134511 - DNA, 11 bp, Unknown
  misc_feature (1)..( 11): Result.003 file - promoters60/4607678
cattttaaaaa

SEQ ID NO: 134512 - DNA, 11 bp, Unknown
  misc_feature (1)..( 11): Result.003 file - promoters60/4607678
attttcaaaag

SEQ ID NO: 134513 - DNA, 11 bp, Unknown
  misc_feature (1)..( 11): Result.003 file - promoters60/4607678
attttcacaag

SEQ ID NO: 134514 - DNA, 15 bp, Unknown
  misc_feature (1)..( 15): Result.003 file - promoters60/4607678
taagttttccaacat

SEQ ID NO: 134515 - DNA, 15 bp, Unknown
  misc_feature (1)..( 15): Result.003 file - promoters60/4607678
cacaaactccatcat

SEQ ID NO: 134516 - DNA, 15 bp, Unknown
  misc_feature (1)..( 15): Result.003 file - promoters60/4607678
tttggtttacaagta

SEQ ID NO: 134517 - DNA, 15 bp, Unknown
  misc_feature (1)..( 15): Result.003 file - promoters60/4607678
tttgggttacaattt

SEQ ID NO: 134518 - DNA, 9 bp, Unknown
  misc_feature (1)..( 9): Result.003 file - promoters60/4607678
tttacacta

SEQ ID NO: 134519 - DNA, 9 bp, Unknown
  misc_feature (1)..( 9): Result.003 file - promoters60/4607678
tttacaaga

SEQ ID NO: 134520 - DNA, 9 bp, Unknown
  misc_feature (1)..( 9): Result.003 file - promoters60/4607678
tttatactc

SEQ ID NO: 134521 - DNA, 9 bp, Unknown
  misc_feature (1)..( 9): Result.003 file - promoters60/4607678
attagaaga

SEQ ID NO: 134522 - DNA, 8 bp, Unknown
  misc_feature (1)..( 8): Result.003 file - promoters60/4607692
aaaaatta

SEQ ID NO: 134523 - DNA, 8 bp, Unknown
  misc_feature (1)..( 8): Result.003 file - promoters60/4607692
taaaattt

SEQ ID NO: 134524 - DNA, 9 bp, Unknown
  misc_feature (1)..( 9): Result.003 file - promoters60/4607692
caaagatta

SEQ ID NO: 134525 - DNA, 9 bp, Unknown
  misc_feature (1)..( 9): Result.003 file - promoters60/4607692
ctaaaattt

SEQ ID NO: 134526 - DNA, 9 bp, Unknown
  misc_feature (1)..( 9): Result.003 file - promoters60/4607692
gtataatag

SEQ ID NO: 134527 - DNA, 9 bp, Unknown
  misc_feature (1)..( 9): Result.003 file - promoters60/4607692
gaaaatatc

SEQ ID NO: 134528 - DNA, 9 bp, Unknown
  misc_feature (1)..( 9): Result.003 file - promoters60/4607692
ttaaatatg

SEQ ID NO: 134529 - DNA, 9 bp, Unknown
  misc_feature (1)..( 9): Result.003 file - promoters60/4607692
ttaaagatc

SEQ ID NO: 134530 - DNA, 9 bp, Unknown
  misc_feature (1)..( 9): Result.003 file - promoters60/4607692
ttatatata

SEQ ID NO: 134531 - DNA, 10 bp, Unknown
  misc_feature (1)..( 10): Result.003 file - promoters60/4607692
tttatttctt

SEQ ID NO: 134532 - DNA, 10 bp, Unknown
  misc_feature (1)..( 10): Result.003 file - promoters60/4607692
tttacttcaa

SEQ ID NO: 134533 - DNA, 10 bp, Unknown
  misc_feature (1)..( 10): Result.003 file - promoters60/4607692
tttgtatcta

SEQ ID NO: 134534 - DNA, 10 bp, Unknown
  misc_feature (1)..( 10): Result.003 file - promoters60/4607692
ataacttgta

SEQ ID NO: 134535 - DNA, 12 bp, Unknown
  misc_feature (1)..( 12): Result.003 file - promoters60/4607692
taaaaaaactaa

SEQ ID NO: 134536 - DNA, 12 bp, Unknown
  misc_feature (1)..( 12): Result.003 file - promoters60/4607692
taaataaattaa

SEQ ID NO: 134537 - DNA, 12 bp, Unknown
  misc_feature (1)..( 12): Result.003 file - promoters60/4607692
aagaaaaacgtt

SEQ ID NO: 134538 - DNA, 12 bp, Unknown
  misc_feature (1)..( 12): Result.003 file - promoters60/4607692
gaaaaacacgtg

SEQ ID NO: 134539 - DNA, 11 bp, Unknown
  misc_feature (1)..( 11): Result.003 file - promoters60/4607692
aataaaattaa

SEQ ID NO: 134540 - DNA, 11 bp, Unknown
  misc_feature (1)..( 11): Result.003 file - promoters60/4607692
tatataatatt

SEQ ID NO: 134541 - DNA, 11 bp, Unknown
  misc_feature (1)..( 11): Result.003 file - promoters60/4607692
aattaaattaa

SEQ ID NO: 134542 - DNA, 11 bp, Unknown
  misc_feature (1)..( 11): Result.003 file - promoters60/4607692
aagaaaattaa

SEQ ID NO: 134543 - DNA, 11 bp, Unknown
  misc_feature (1)..( 11): Result.003 file - promoters60/4607692
gattaaatatg

SEQ ID NO: 134544 - DNA, 9 bp, Unknown
  misc_feature (1)..( 9): Result.003 file - promoters60/4607692
gaataaaag

SEQ ID NO: 134545 - DNA, 9 bp, Unknown
  misc_feature (1)..( 9): Result.003 file - promoters60/4607692
aaataaaaa

SEQ ID NO: 134546 - DNA, 9 bp, Unknown
  misc_feature (1)..( 9): Result.003 file - promoters60/4607692
tactaaaaa

SEQ ID NO: 134547 - DNA, 9 bp, Unknown
  misc_feature (1)..( 9): Result.003 file - promoters60/4607692
aaataagaa

SEQ ID NO: 134548 - DNA, 9 bp, Unknown
  misc_feature (1)..( 9): Result.003 file - promoters60/4607692
tgataagaa

SEQ ID NO: 134549 - DNA, 11 bp, Unknown
  misc_feature (1)..( 11): Result.003 file - promoters60/4607692
acaaatttatt

SEQ ID NO: 134550 - DNA, 11 bp, Unknown
  misc_feature (1)..( 11): Result.003 file - promoters60/4607692
acacatttttt

SEQ ID NO: 134551 - DNA, 11 bp, Unknown
  misc_feature (1)..( 11): Result.003 file - promoters60/4607692
tccaattaatt

SEQ ID NO: 134552 - DNA, 11 bp, Unknown
  misc_feature (1)..( 11): Result.003 file - promoters60/4607692
taaaatttcgt

SEQ ID NO: 134553 - DNA, 8 bp, Unknown
  misc_feature (1)..( 8): Result.003 file - promoters60/4607692
aaaaagaa

SEQ ID NO: 134554 - DNA, 8 bp, Unknown
  misc_feature (1)..( 8): Result.003 file - promoters60/4607692
aaaaagtt

SEQ ID NO: 134555 - DNA, 9 bp, Unknown
  misc_feature (1)..( 9): Result.003 file - promoters60/4607692
aaataagaa

SEQ ID NO: 134556 - DNA, 9 bp, Unknown
  misc_feature (1)..( 9): Result.003 file - promoters60/4607692
tgataagaa

SEQ ID NO: 134557 - DNA, 9 bp, Unknown
  misc_feature (1)..( 9): Result.003 file - promoters60/4608096
catataaag

SEQ ID NO: 134558 - DNA, 9 bp, Unknown
  misc_feature (1)..( 9): Result.003 file - promoters60/4608096
catatatac

SEQ ID NO: 134559 - DNA, 9 bp, Unknown
  misc_feature (1)..( 9): Result.003 file - promoters60/4608096
aataaaaag

SEQ ID NO: 134560 - DNA, 9 bp, Unknown
  misc_feature (1)..( 9): Result.003 file - promoters60/4608096
tatatatat

SEQ ID NO: 134561 - DNA, 9 bp, Unknown
  misc_feature (1)..( 9): Result.003 file - promoters60/4608096
tatagataa

SEQ ID NO: 134562 - DNA, 9 bp, Unknown
  misc_feature (1)..( 9): Result.003 file - promoters60/4608096
tataaaacc

SEQ ID NO: 134563 - DNA, 10 bp, Unknown
  misc_feature (1)..( 10): Result.003 file - promoters60/4608104
aaaacgaaga

SEQ ID NO: 134564 - DNA, 10 bp, Unknown
  misc_feature (1)..( 10): Result.003 file - promoters60/4608104
taaaagaaat

SEQ ID NO: 134565 - DNA, 10 bp, Unknown
  misc_feature (1)..( 10): Result.003 file - promoters60/4608104
tgtaagaaaa

SEQ ID NO: 134566 - DNA, 10 bp, Unknown
  misc_feature (1)..( 10): Result.003 file - promoters60/4608104
tatgagaaaa

SEQ ID NO: 134567 - DNA, 11 bp, Unknown
  misc_feature (1)..( 11): Result.003 file - promoters60/4608104
taattgacaaa

SEQ ID NO: 134568 - DNA, 11 bp, Unknown
  misc_feature (1)..( 11): Result.003 file - promoters60/4608104
tttaagtaaat

SEQ ID NO: 134569 - DNA, 11 bp, Unknown
  misc_feature (1)..( 11): Result.003 file - promoters60/4608104
gttaggtaaac

SEQ ID NO: 134570 - DNA, 11 bp, Unknown
  misc_feature (1)..( 11): Result.003 file - promoters60/4608104
tttatgtaact

SEQ ID NO: 134571 - DNA, 16 bp, Unknown
  misc_feature (1)..( 16): Result.003 file - promoters60/4608104
gaactaatagccagtg

SEQ ID NO: 134572 - DNA, 16 bp, Unknown
  misc_feature (1)..( 16): Result.003 file - promoters60/4608104
aaacaaatagaaaaag

SEQ ID NO: 134573 - DNA, 16 bp, Unknown
  misc_feature (1)..( 16): Result.003 file - promoters60/4608104
attttaatagacacat

SEQ ID NO: 134574 - DNA, 16 bp, Unknown
  misc_feature (1)..( 16): Result.003 file - promoters60/4608104
ctacatataccgagaa

SEQ ID NO: 134575 - DNA, 16 bp, Unknown
  misc_feature (1)..( 16): Result.003 file - promoters60/4608104
aaacagaaaatatgca

SEQ ID NO: 134576 - DNA, 16 bp, Unknown
  misc_feature (1)..( 16): Result.003 file - promoters60/4608104
agaattatgttactag

SEQ ID NO: 134577 - DNA, 16 bp, Unknown
  misc_feature (1)..( 16): Result.003 file - promoters60/4608104
gattttatagagaagg

SEQ ID NO: 134578 - DNA, 12 bp, Unknown
  misc_feature (1)..( 12): Result.003 file - promoters60/4608104
aacgaagaggaa

SEQ ID NO: 134579 - DNA, 12 bp, Unknown
  misc_feature (1)..( 12): Result.003 file - promoters60/4608104
taagaaaaggat

SEQ ID NO: 134580 - DNA, 13 bp, Unknown
  misc_feature (1)..( 13): Result.003 file - promoters60/4608104
gggccaagatgaa

SEQ ID NO: 134581 - DNA, 12 bp, Unknown
  misc_feature (1)..( 12): Result.003 file - promoters60/4608104
tgagaaaactat

SEQ ID NO: 134582 - DNA, 13 bp, Unknown
  misc_feature (1)..( 13): Result.003 file - promoters60/4608104
attgacaaatata

SEQ ID NO: 134583 - DNA, 13 bp, Unknown
  misc_feature (1)..( 13): Result.003 file - promoters60/4608104
taagtaaattttc

SEQ ID NO: 134584 - DNA, 13 bp, Unknown
  misc_feature (1)..( 13): Result.003 file - promoters60/4608104
aatgaattaatta

SEQ ID NO: 134585 - DNA, 9 bp, Unknown
  misc_feature (1)..( 9): Result.003 file - promoters60/4608104
aaaaatttc

SEQ ID NO: 134586 - DNA, 9 bp, Unknown
  misc_feature (1)..( 9): Result.003 file - promoters60/4608104
taaaattaa

SEQ ID NO: 134587 - DNA, 9 bp, Unknown
  misc_feature (1)..( 9): Result.003 file - promoters60/4608104
aaaaatgaa

SEQ ID NO: 134588 - DNA, 9 bp, Unknown
  misc_feature (1)..( 9): Result.003 file - promoters60/4608104
gaaaataac

SEQ ID NO: 134589 - DNA, 9 bp, Unknown
  misc_feature (1)..( 9): Result.003 file - promoters60/4608104
aaaaaaact

SEQ ID NO: 134590 - DNA, 9 bp, Unknown
  misc_feature (1)..( 9): Result.003 file - promoters60/4608104
gaaaccttc

SEQ ID NO: 134591 - DNA, 10 bp, Unknown
  misc_feature (1)..( 10): Result.003 file - promoters60/4608104
cgagaaaaat

SEQ ID NO: 134592 - DNA, 10 bp, Unknown
  misc_feature (1)..( 10): Result.003 file - promoters60/4608104
tgagaaaata

SEQ ID NO: 134593 - DNA, 10 bp, Unknown
  misc_feature (1)..( 10): Result.003 file - promoters60/4608104
caagaaaaaa

SEQ ID NO: 134594 - DNA, 10 bp, Unknown
  misc_feature (1)..( 10): Result.003 file - promoters60/4608104
cacgaaaaag

SEQ ID NO: 134595 - DNA, 11 bp, Unknown
  misc_feature (1)..( 11): Result.003 file - promoters60/4608104
aataaaataat

SEQ ID NO: 134596 - DNA, 11 bp, Unknown
  misc_feature (1)..( 11): Result.003 file - promoters60/4608104
tgagaaacaga

SEQ ID NO: 134597 - DNA, 11 bp, Unknown
  misc_feature (1)..( 11): Result.003 file - promoters60/4608104
aaaacaaaacc

SEQ ID NO: 134598 - DNA, 11 bp, Unknown
  misc_feature (1)..( 11): Result.003 file - promoters60/4608104
aaaagaaaaaa

SEQ ID NO: 134599 - DNA, 11 bp, Unknown
  misc_feature (1)..( 11): Result.003 file - promoters60/4608104
aaaataaaata

SEQ ID NO: 134600 - DNA, 11 bp, Unknown
  misc_feature (1)..( 11): Result.003 file - promoters60/4608104
atgagaaaata

SEQ ID NO: 134601 - DNA, 11 bp, Unknown
  misc_feature (1)..( 11): Result.003 file - promoters60/4608104
ttgagaaacag

SEQ ID NO: 134602 - DNA, 11 bp, Unknown
  misc_feature (1)..( 11): Result.003 file - promoters60/4608104
acaagaaaaaa

SEQ ID NO: 134603 - DNA, 8 bp, Unknown
  misc_feature (1)..( 8): Result.003 file - promoters60/4608140
tgtttttg

SEQ ID NO: 134604 - DNA, 8 bp, Unknown
  misc_feature (1)..( 8): Result.003 file - promoters60/4608140
catttttg

SEQ ID NO: 134605 - DNA, 8 bp, Unknown
  misc_feature (1)..( 8): Result.003 file - promoters60/4608140
catatttg

SEQ ID NO: 134606 - DNA, 7 bp, Unknown
  misc_feature (1)..( 7): Result.003 file - promoters60/4608140
ttgttaa

SEQ ID NO: 134607 - DNA, 7 bp, Unknown
  misc_feature (1)..( 7): Result.003 file - promoters60/4608140
ttgctaa

SEQ ID NO: 134608 - DNA, 7 bp, Unknown
  misc_feature (1)..( 7): Result.003 file - promoters60/4608140
ttggtaa

SEQ ID NO: 134609 - DNA, 10 bp, Unknown
  misc_feature (1)..( 10): Result.003 file - promoters60/4608140
tgtaaaaatt

SEQ ID NO: 134610 - DNA, 10 bp, Unknown
  misc_feature (1)..( 10): Result.003 file - promoters60/4608140
gctaaaaatc

SEQ ID NO: 134611 - DNA, 10 bp, Unknown
  misc_feature (1)..( 10): Result.003 file - promoters60/4608140
tgtaaaaatt

SEQ ID NO: 134612 - DNA, 7 bp, Unknown
  misc_feature (1)..( 7): Result.003 file - promoters60/4608140
aaaattt

SEQ ID NO: 134613 - DNA, 7 bp, Unknown
  misc_feature (1)..( 7): Result.003 file - promoters60/4608140
aaaatta

SEQ ID NO: 134614 - DNA, 7 bp, Unknown
  misc_feature (1)..( 7): Result.003 file - promoters60/4608140
aaagtta

SEQ ID NO: 134615 - DNA, 8 bp, Unknown
  misc_feature (1)..( 8): Result.003 file - promoters60/4608140
aaaacaat

SEQ ID NO: 134616 - DNA, 8 bp, Unknown
  misc_feature (1)..( 8): Result.003 file - promoters60/4608140
aaaagaat

SEQ ID NO: 134617 - DNA, 8 bp, Unknown
  misc_feature (1)..( 8): Result.003 file - promoters60/4608140
gaaacaaa

SEQ ID NO: 134618 - DNA, 10 bp, Unknown
  misc_feature (1)..( 10): Result.003 file - promoters60/4608140
agagacaaat

SEQ ID NO: 134619 - DNA, 10 bp, Unknown
  misc_feature (1)..( 10): Result.003 file - promoters60/4608140
agatacaaaa

SEQ ID NO: 134620 - DNA, 10 bp, Unknown
  misc_feature (1)..( 10): Result.003 file - promoters60/4608140
attgactaat

SEQ ID NO: 134621 - DNA, 9 bp, Unknown
  misc_feature (1)..( 9): Result.003 file - promoters60/4608140
tctttggat

SEQ ID NO: 134622 - DNA, 9 bp, Unknown
  misc_feature (1)..( 9): Result.003 file - promoters60/4608140
tgtttggaa

SEQ ID NO: 134623 - DNA, 9 bp, Unknown
  misc_feature (1)..( 9): Result.003 file - promoters60/4608140
tctttagat

SEQ ID NO: 134624 - DNA, 8 bp, Unknown
  misc_feature (1)..( 8): Result.003 file - promoters60/4608140
catgtttt

SEQ ID NO: 134625 - DNA, 8 bp, Unknown
  misc_feature (1)..( 8): Result.003 file - promoters60/4608140
catatttg

SEQ ID NO: 134626 - DNA, 8 bp, Unknown
  misc_feature (1)..( 8): Result.003 file - promoters60/4608140
catttttg

SEQ ID NO: 134627 - DNA, 8 bp, Unknown
  misc_feature (1)..( 8): Result.003 file - promoters60/4608140
gttttttt

SEQ ID NO: 134628 - DNA, 8 bp, Unknown
  misc_feature (1)..( 8): Result.003 file - promoters60/4608140
attttttt

SEQ ID NO: 134629 - DNA, 8 bp, Unknown
  misc_feature (1)..( 8): Result.003 file - promoters60/4608140
atttttat

SEQ ID NO: 134630 - DNA, 11 bp, Unknown
  misc_feature (1)..( 11): Result.003 file - promoters60/4608961
aactattttga

SEQ ID NO: 134631 - DNA, 11 bp, Unknown
  misc_feature (1)..( 11): Result.003 file - promoters60/4608961
gcatattttat

SEQ ID NO: 134632 - DNA, 11 bp, Unknown
  misc_feature (1)..( 11): Result.003 file - promoters60/4608961
atgcattttta

SEQ ID NO: 134633 - DNA, 11 bp, Unknown
  misc_feature (1)..( 11): Result.003 file - promoters60/4608961
aactattatat

SEQ ID NO: 134634 - DNA, 11 bp, Unknown
  misc_feature (1)..( 11): Result.003 file - promoters60/4608961
atgcttttaat

SEQ ID NO: 134635 - DNA, 11 bp, Unknown
  misc_feature (1)..( 11): Result.003 file - promoters60/4608961
atatatgatac

SEQ ID NO: 134636 - DNA, 12 bp, Unknown
  misc_feature (1)..( 12): Result.003 file - promoters60/4608961
ctttgcttacaa

SEQ ID NO: 134637 - DNA, 12 bp, Unknown
  misc_feature (1)..( 12): Result.003 file - promoters60/4608961
agttgtttatat

SEQ ID NO: 134638 - DNA, 12 bp, Unknown
  misc_feature (1)..( 12): Result.003 file - promoters60/4608961
tcatgtttaatc

SEQ ID NO: 134639 - DNA, 12 bp, Unknown
  misc_feature (1)..( 12): Result.003 file - promoters60/4608961
cattttttatcc

SEQ ID NO: 134640 - DNA, 12 bp, Unknown
  misc_feature (1)..( 12): Result.003 file - promoters60/4608961
atgcttttaatc

SEQ ID NO: 134641 - DNA, 12 bp, Unknown
  misc_feature (1)..( 12): Result.003 file - promoters60/4608961
ttttgtttcgtt

SEQ ID NO: 134642 - DNA, 12 bp, Unknown
  misc_feature (1)..( 12): Result.003 file - promoters60/4608961
tgttattcaagt

SEQ ID NO: 134643 - DNA, 10 bp, Unknown
  misc_feature (1)..( 10): Result.003 file - promoters60/4608961
tatctatatg

SEQ ID NO: 134644 - DNA, 10 bp, Unknown
  misc_feature (1)..( 10): Result.003 file - promoters60/4608961
tgattatatg

SEQ ID NO: 134645 - DNA, 10 bp, Unknown
  misc_feature (1)..( 10): Result.003 file - promoters60/4608961
tgagtatatt

SEQ ID NO: 134646 - DNA, 10 bp, Unknown
  misc_feature (1)..( 10): Result.003 file - promoters60/4608961
tgactatgca

SEQ ID NO: 134647 - DNA, 10 bp, Unknown
  misc_feature (1)..( 10): Result.003 file - promoters60/4608961
aaagtataat

SEQ ID NO: 134648 - DNA, 10 bp, Unknown
  misc_feature (1)..( 10): Result.003 file - promoters60/4608961
gtactatgta

SEQ ID NO: 134649 - DNA, 10 bp, Unknown
  misc_feature (1)..( 10): Result.003 file - promoters60/4608961
atatgcagaa

SEQ ID NO: 134650 - DNA, 10 bp, Unknown
  misc_feature (1)..( 10): Result.003 file - promoters60/4608961
ctatgtagat

SEQ ID NO: 134651 - DNA, 10 bp, Unknown
  misc_feature (1)..( 10): Result.003 file - promoters60/4608961
ctatgcattt

SEQ ID NO: 134652 - DNA, 10 bp, Unknown
  misc_feature (1)..( 10): Result.003 file - promoters60/4608961
tcatgctttt

SEQ ID NO: 134653 - DNA, 10 bp, Unknown
  misc_feature (1)..( 10): Result.003 file - promoters60/4608961
atatgtacaa

SEQ ID NO: 134654 - DNA, 10 bp, Unknown
  misc_feature (1)..( 10): Result.003 file - promoters60/4608961
ttatttgtta

SEQ ID NO: 134655 - DNA, 13 bp, Unknown
  misc_feature (1)..( 13): Result.003 file - promoters60/4608961
catgtttaatctg

SEQ ID NO: 134656 - DNA, 13 bp, Unknown
  misc_feature (1)..( 13): Result.003 file - promoters60/4608961
tgcttttaatctc

SEQ ID NO: 134657 - DNA, 13 bp, Unknown
  misc_feature (1)..( 13): Result.003 file - promoters60/4608961
cattttttatcca

SEQ ID NO: 134658 - DNA, 13 bp, Unknown
  misc_feature (1)..( 13): Result.003 file - promoters60/4608961
agttgtttatata

SEQ ID NO: 134659 - DNA, 13 bp, Unknown
  misc_feature (1)..( 13): Result.003 file - promoters60/4608961
acatgttattcaa

SEQ ID NO: 134660 - DNA, 13 bp, Unknown
  misc_feature (1)..( 13): Result.003 file - promoters60/4608961
cattttgtttcgt

SEQ ID NO: 134661 - DNA, 13 bp, Unknown
  misc_feature (1)..( 13): Result.003 file - promoters60/4608965
agacaaagtatct

SEQ ID NO: 134662 - DNA, 13 bp, Unknown
  misc_feature (1)..( 13): Result.003 file - promoters60/4608965
taaaaaattatct

SEQ ID NO: 134663 - DNA, 12 bp, Unknown
  misc_feature (1)..( 12): Result.003 file - promoters60/4608965
cacaaagttccc

SEQ ID NO: 134664 - DNA, 13 bp, Unknown
  misc_feature (1)..( 13): Result.003 file - promoters60/4608965
acttaaatttacg

SEQ ID NO: 134665 - DNA, 12 bp, Unknown
  misc_feature (1)..( 12): Result.003 file - promoters60/4608965
taaaaattatac

SEQ ID NO: 134666 - DNA, 12 bp, Unknown
  misc_feature (1)..( 12): Result.003 file - promoters60/4608965
tccaatgttaac

SEQ ID NO: 134667 - DNA, 13 bp, Unknown
  misc_feature (1)..( 13): Result.003 file - promoters60/4608965
taaataattaatc

SEQ ID NO: 134668 - DNA, 9 bp, Unknown
  misc_feature (1)..( 9): Result.003 file - promoters60/4608985
gaaaatatt

SEQ ID NO: 134669 - DNA, 9 bp, Unknown
  misc_feature (1)..( 9): Result.003 file - promoters60/4608985
aaaaataag

SEQ ID NO: 134670 - DNA, 9 bp, Unknown
  misc_feature (1)..( 9): Result.003 file - promoters60/4608985
aaaaattaa

SEQ ID NO: 134671 - DNA, 9 bp, Unknown
  misc_feature (1)..( 9): Result.003 file - promoters60/4608985
tcaaatatt

SEQ ID NO: 134672 - DNA, 9 bp, Unknown
  misc_feature (1)..( 9): Result.003 file - promoters60/4608985
aaacatatt

SEQ ID NO: 134673 - DNA, 9 bp, Unknown
  misc_feature (1)..( 9): Result.003 file - promoters60/4608985
taaaatttc

SEQ ID NO: 134674 - DNA, 9 bp, Unknown
  misc_feature (1)..( 9): Result.003 file - promoters60/4608985
caaaattca

SEQ ID NO: 134675 - DNA, 12 bp, Unknown
  misc_feature (1)..( 12): Result.003 file - promoters60/4608985
aaaataaataaa

SEQ ID NO: 134676 - DNA, 12 bp, Unknown
  misc_feature (1)..( 12): Result.003 file - promoters60/4608985
ttaataaagcta

SEQ ID NO: 134677 - DNA, 12 bp, Unknown
  misc_feature (1)..( 12): Result.003 file - promoters60/4608985
aaaattaatatt

SEQ ID NO: 134678 - DNA, 12 bp, Unknown
  misc_feature (1)..( 12): Result.003 file - promoters60/4608985
gaccttaaaaaa

SEQ ID NO: 134679 - DNA, 12 bp, Unknown
  misc_feature (1)..( 12): Result.003 file - promoters60/4608985
gagataatattt

SEQ ID NO: 134680 - DNA, 12 bp, Unknown
  misc_feature (1)..( 12): Result.003 file - promoters60/4608985
attataaaatac

SEQ ID NO: 134681 - DNA, 12 bp, Unknown
  misc_feature (1)..( 12): Result.003 file - promoters60/4608985
catctaacatag

SEQ ID NO: 134682 - DNA, 12 bp, Unknown
  misc_feature (1)..( 12): Result.003 file - promoters60/4608985
aaatttacaaac

SEQ ID NO: 134683 - DNA, 10 bp, Unknown
  misc_feature (1)..( 10): Result.003 file - promoters60/4608985
aaaacaaacg

SEQ ID NO: 134684 - DNA, 10 bp, Unknown
  misc_feature (1)..( 10): Result.003 file - promoters60/4608985
aaaaaaaaga

SEQ ID NO: 134685 - DNA, 10 bp, Unknown
  misc_feature (1)..( 10): Result.003 file - promoters60/4608985
taaataaatt

SEQ ID NO: 134686 - DNA, 10 bp, Unknown
  misc_feature (1)..( 10): Result.003 file - promoters60/4608985
caaacaaatg

SEQ ID NO: 134687 - DNA, 10 bp, Unknown
  misc_feature (1)..( 10): Result.003 file - promoters60/4608985
taaaaaaaga

SEQ ID NO: 134688 - DNA, 10 bp, Unknown
  misc_feature (1)..( 10): Result.003 file - promoters60/4608985
aaaacaattc

SEQ ID NO: 134689 - DNA, 10 bp, Unknown
  misc_feature (1)..( 10): Result.003 file - promoters60/4608985
gaaagaagac

SEQ ID NO: 134690 - DNA, 12 bp, Unknown
  misc_feature (1)..( 12): Result.003 file - promoters60/4608985
ttacaaaactac

SEQ ID NO: 134691 - DNA, 12 bp, Unknown
  misc_feature (1)..( 12): Result.003 file - promoters60/4608985
atacaaaaaaag

SEQ ID NO: 134692 - DNA, 12 bp, Unknown
  misc_feature (1)..( 12): Result.003 file - promoters60/4608985
tcccaaaaataa

SEQ ID NO: 134693 - DNA, 12 bp, Unknown
  misc_feature (1)..( 12): Result.003 file - promoters60/4608985
ttcctaaaatca

SEQ ID NO: 134694 - DNA, 12 bp, Unknown
  misc_feature (1)..( 12): Result.003 file - promoters60/4608985
aaacataagttt

SEQ ID NO: 134695 - DNA, 12 bp, Unknown
  misc_feature (1)..( 12): Result.003 file - promoters60/4608985
aaacatattgag

SEQ ID NO: 134696 - DNA, 12 bp, Unknown
  misc_feature (1)..( 12): Result.003 file - promoters60/4608985
ttatatatgttt

SEQ ID NO: 134697 - DNA, 12 bp, Unknown
  misc_feature (1)..( 12): Result.003 file - promoters60/4608985
ttgagtttaggc

SEQ ID NO: 134698 - DNA, 12 bp, Unknown
  misc_feature (1)..( 12): Result.003 file - promoters60/4608985
gatagtttaaaa

SEQ ID NO: 134699 - DNA, 12 bp, Unknown
  misc_feature (1)..( 12): Result.003 file - promoters60/4608985
ataagtttcaaa

SEQ ID NO: 134700 - DNA, 12 bp, Unknown
  misc_feature (1)..( 12): Result.003 file - promoters60/4608985
tgaagtatcatc

SEQ ID NO: 134701 - DNA, 13 bp, Unknown
  misc_feature (1)..( 13): Result.003 file - promoters60/4608985
aacaattctaatt

SEQ ID NO: 134702 - DNA, 13 bp, Unknown
  misc_feature (1)..( 13): Result.003 file - promoters60/4608985
atatgtttatatg

SEQ ID NO: 134703 - DNA, 13 bp, Unknown
  misc_feature (1)..( 13): Result.003 file - promoters60/4608985
aataaataaaagc

SEQ ID NO: 134704 - DNA, 13 bp, Unknown
  misc_feature (1)..( 13): Result.003 file - promoters60/4608985
aaacaataaaatt

SEQ ID NO: 134705 - DNA, 13 bp, Unknown
  misc_feature (1)..( 13): Result.003 file - promoters60/4608985
acattataaaata

SEQ ID NO: 134706 - DNA, 13 bp, Unknown
  misc_feature (1)..( 13): Result.003 file - promoters60/4608985
aaacagtaaaacc

SEQ ID NO: 134707 - DNA, 13 bp, Unknown
  misc_feature (1)..( 13): Result.003 file - promoters60/4608985
aggagataatatt

SEQ ID NO: 134708 - DNA, 13 bp, Unknown
  misc_feature (1)..( 13): Result.003 file - promoters60/4608985
aaaaaatcaaaat

SEQ ID NO: 134709 - DNA, 13 bp, Unknown
  misc_feature (1)..( 13): Result.003 file - promoters60/4608985
accatctaacata

SEQ ID NO: 134710 - DNA, 14 bp, Unknown
  misc_feature (1)..( 14): Result.003 file - promoters60/4608985
aaaatttacaaact

SEQ ID NO: 134711 - DNA, 9 bp, Unknown
  misc_feature (1)..( 9): Result.003 file - promoters60/4608985
gtttgttta

SEQ ID NO: 134712 - DNA, 9 bp, Unknown
  misc_feature (1)..( 9): Result.003 file - promoters60/4608985
ttttatttc

SEQ ID NO: 134713 - DNA, 9 bp, Unknown
  misc_feature (1)..( 9): Result.003 file - promoters60/4608985
ttttgtttc

SEQ ID NO: 134714 - DNA, 9 bp, Unknown
  misc_feature (1)..( 9): Result.003 file - promoters60/4608985
atttttttc

SEQ ID NO: 134715 - DNA, 9 bp, Unknown
  misc_feature (1)..( 9): Result.003 file - promoters60/4608985
ttttctttc

SEQ ID NO: 134716 - DNA, 9 bp, Unknown
  misc_feature (1)..( 9): Result.003 file - promoters60/4608985
ttttatttt

SEQ ID NO: 134717 - DNA, 11 bp, Unknown
  misc_feature (1)..( 11): Result.003 file - promoters60/4608985
gtttccaatat

SEQ ID NO: 134718 - DNA, 11 bp, Unknown
  misc_feature (1)..( 11): Result.003 file - promoters60/4608985
gtttcaaatac

SEQ ID NO: 134719 - DNA, 12 bp, Unknown
  misc_feature (1)..( 12): Result.003 file - promoters60/4608985
gagatcaaatag

SEQ ID NO: 134720 - DNA, 11 bp, Unknown
  misc_feature (1)..( 11): Result.003 file - promoters60/4608985
ttttcaacttt

SEQ ID NO: 134721 - DNA, 12 bp, Unknown
  misc_feature (1)..( 12): Result.003 file - promoters60/4608985
gcctggaaatag

SEQ ID NO: 134722 - DNA, 12 bp, Unknown
  misc_feature (1)..( 12): Result.003 file - promoters60/4608985
atttacaactga

SEQ ID NO: 134723 - DNA, 10 bp, Unknown
  misc_feature (1)..( 10): Result.003 file - promoters60/4608985
acgaaaaata

SEQ ID NO: 134724 - DNA, 10 bp, Unknown
  misc_feature (1)..( 10): Result.003 file - promoters60/4608985
ttataaaata

SEQ ID NO: 134725 - DNA, 9 bp, Unknown
  misc_feature (1)..( 9): Result.003 file - promoters60/4608985
taaaaaatt

SEQ ID NO: 134726 - DNA, 9 bp, Unknown
  misc_feature (1)..( 9): Result.003 file - promoters60/4608985
taaaaaatc

SEQ ID NO: 134727 - DNA, 10 bp, Unknown
  misc_feature (1)..( 10): Result.003 file - promoters60/4608985
ttaataaagc

SEQ ID NO: 134728 - DNA, 10 bp, Unknown
  misc_feature (1)..( 10): Result.003 file - promoters60/4608985
tcaaacaata

SEQ ID NO: 134729 - DNA, 11 bp, Unknown
  misc_feature (1)..( 11): Result.003 file - promoters60/4608985
catctaacata

SEQ ID NO: 134730 - DNA, 10 bp, Unknown
  misc_feature (1)..( 10): Result.003 file - promoters60/4608985
tgaaaaacaa

SEQ ID NO: 134731 - DNA, 10 bp, Unknown
  misc_feature (1)..( 10): Result.003 file - promoters60/4608985
agaaaaaata

SEQ ID NO: 134732 - DNA, 10 bp, Unknown
  misc_feature (1)..( 10): Result.003 file - promoters60/4608985
tgaaaatctc

SEQ ID NO: 134733 - DNA, 10 bp, Unknown
  misc_feature (1)..( 10): Result.003 file - promoters60/4608985
ggaaaaaaaa

SEQ ID NO: 134734 - DNA, 10 bp, Unknown
  misc_feature (1)..( 10): Result.003 file - promoters60/4608985
ttaaaaaata

SEQ ID NO: 134735 - DNA, 10 bp, Unknown
  misc_feature (1)..( 10): Result.003 file - promoters60/4608985
ccaaaatata

SEQ ID NO: 134736 - DNA, 10 bp, Unknown
  misc_feature (1)..( 10): Result.003 file - promoters60/4608985
caaaacaatt

SEQ ID NO: 134737 - DNA, 9 bp, Unknown
  misc_feature (1)..( 9): Result.003 file - promoters60/4610292
caattaaat

SEQ ID NO: 134738 - DNA, 9 bp, Unknown
  misc_feature (1)..( 9): Result.003 file - promoters60/4610292
caaataaaa

SEQ ID NO: 134739 - DNA, 9 bp, Unknown
  misc_feature (1)..( 9): Result.003 file - promoters60/4610292
gaattaaat

SEQ ID NO: 134740 - DNA, 13 bp, Unknown
  misc_feature (1)..( 13): Result.003 file - promoters60/4610551
tatgggccgtaat

SEQ ID NO: 134741 - DNA, 13 bp, Unknown
  misc_feature (1)..( 13): Result.003 file - promoters60/4610551
aatgggcctaatt

SEQ ID NO: 134742 - DNA, 13 bp, Unknown
  misc_feature (1)..( 13): Result.003 file - promoters60/4610551
aatgggctgggcc

SEQ ID NO: 134743 - DNA, 13 bp, Unknown
  misc_feature (1)..( 13): Result.003 file - promoters60/4610551
tttgggcttctta

SEQ ID NO: 134744 - DNA, 13 bp, Unknown
  misc_feature (1)..( 13): Result.003 file - promoters60/4610551
aataggcccaaca

SEQ ID NO: 134745 - DNA, 13 bp, Unknown
  misc_feature (1)..( 13): Result.003 file - promoters60/4610551
attgggcttttta

SEQ ID NO: 134746 - DNA, 6 bp, Unknown
  misc_feature (1)..( 6): Result.003 file - promoters60/4610628
aaaaca

SEQ ID NO: 134747 - DNA, 6 bp, Unknown
  misc_feature (1)..( 6): Result.003 file - promoters60/4610628
aaaaca

SEQ ID NO: 134748 - DNA, 7 bp, Unknown
  misc_feature (1)..( 7): Result.003 file - promoters60/4610628
atcatga

SEQ ID NO: 134749 - DNA, 7 bp, Unknown
  misc_feature (1)..( 7): Result.003 file - promoters60/4610628
atcttga

SEQ ID NO: 134750 - DNA, 6 bp, Unknown
  misc_feature (1)..( 6): Result.003 file - promoters60/4610628
gtttta

SEQ ID NO: 134751 - DNA, 6 bp, Unknown
  misc_feature (1)..( 6): Result.003 file - promoters60/4610628
gtttta

SEQ ID NO: 134752 - DNA, 7 bp, Unknown
  misc_feature (1)..( 7): Result.003 file - promoters60/4610628
tttatgt

SEQ ID NO: 134753 - DNA, 7 bp, Unknown
  misc_feature (1)..( 7): Result.003 file - promoters60/4610628
tttatgt

SEQ ID NO: 134754 - DNA, 7 bp, Unknown
  misc_feature (1)..( 7): Result.003 file - promoters60/4610628
ttaaaac

SEQ ID NO: 134755 - DNA, 7 bp, Unknown
  misc_feature (1)..( 7): Result.003 file - promoters60/4610628
ttataac

SEQ ID NO: 134756 - DNA, 8 bp, Unknown
  misc_feature (1)..( 8): Result.003 file - promoters60/4610628
tctgtttg

SEQ ID NO: 134757 - DNA, 8 bp, Unknown
  misc_feature (1)..( 8): Result.003 file - promoters60/4610628
tctgtttg

SEQ ID NO: 134758 - DNA, 8 bp, Unknown
  misc_feature (1)..( 8): Result.003 file - promoters60/4610628
tctgttgt

SEQ ID NO: 134759 - DNA, 8 bp, Unknown
  misc_feature (1)..( 8): Result.003 file - promoters60/4610628
aaaaacat

SEQ ID NO: 134760 - DNA, 8 bp, Unknown
  misc_feature (1)..( 8): Result.003 file - promoters60/4610628
aaaaacat

SEQ ID NO: 134761 - DNA, 7 bp, Unknown
  misc_feature (1)..( 7): Result.003 file - promoters60/4610628
aaccaat

SEQ ID NO: 134762 - DNA, 7 bp, Unknown
  misc_feature (1)..( 7): Result.003 file - promoters60/4610628
aaccaat

SEQ ID NO: 134763 - DNA, 6 bp, Unknown
  misc_feature (1)..( 6): Result.003 file - promoters60/4610628
cctata

SEQ ID NO: 134764 - DNA, 6 bp, Unknown
  misc_feature (1)..( 6): Result.003 file - promoters60/4610628
cctata

SEQ ID NO: 134765 - DNA, 15 bp, Unknown
  misc_feature (1)..( 15): Result.003 file - promoters60/4610628
aaggcaggctgtcac

SEQ ID NO: 134766 - DNA, 15 bp, Unknown
  misc_feature (1)..( 15): Result.003 file - promoters60/4610628
aaggcaggctgtcac

SEQ ID NO: 134767 - DNA, 27 bp, Unknown
  misc_feature (1)..( 27): Result.003 file - promoters60/4610628
tggcggaccccaacaaattatcaaatc

SEQ ID NO: 134768 - DNA, 27 bp, Unknown
  misc_feature (1)..( 27): Result.003 file - promoters60/4610628
tggcggaccccaaccaattatcaaatc

SEQ ID NO: 134769 - DNA, 8 bp, Unknown
  misc_feature (1)..( 8): Result.003 file - promoters60/4610628
aataaatt

SEQ ID NO: 134770 - DNA, 8 bp, Unknown
  misc_feature (1)..( 8): Result.003 file - promoters60/4610628
aatcaatt

SEQ ID NO: 134771 - DNA, 8 bp, Unknown
  misc_feature (1)..( 8): Result.003 file - promoters60/4610628
ccatccat

SEQ ID NO: 134772 - DNA, 8 bp, Unknown
  misc_feature (1)..( 8): Result.003 file - promoters60/4610628
ccatgcat

SEQ ID NO: 134773 - DNA, 8 bp, Unknown
  misc_feature (1)..( 8): Result.003 file - promoters60/4610628
tatagtat

SEQ ID NO: 134774 - DNA, 8 bp, Unknown
  misc_feature (1)..( 8): Result.003 file - promoters60/4610628
tatattat

SEQ ID NO: 134775 - DNA, 7 bp, Unknown
  misc_feature (1)..( 7): Result.003 file - promoters60/4610628
aaacgtg

SEQ ID NO: 134776 - DNA, 7 bp, Unknown
  misc_feature (1)..( 7): Result.003 file - promoters60/4610628
aaatgtg

SEQ ID NO: 134777 - DNA, 6 bp, Unknown
  misc_feature (1)..( 6): Result.003 file - promoters60/4610628
caaaaa

SEQ ID NO: 134778 - DNA, 6 bp, Unknown
  misc_feature (1)..( 6): Result.003 file - promoters60/4610628
caaaaa

SEQ ID NO: 134779 - DNA, 8 bp, Unknown
  misc_feature (1)..( 8): Result.003 file - promoters60/4610628
caataagt

SEQ ID NO: 134780 - DNA, 8 bp, Unknown
  misc_feature (1)..( 8): Result.003 file - promoters60/4610628
caatgagt

SEQ ID NO: 134781 - DNA, 7 bp, Unknown
  misc_feature (1)..( 7): Result.003 file - promoters60/4610628
tccaatt

SEQ ID NO: 134782 - DNA, 7 bp, Unknown
  misc_feature (1)..( 7): Result.003 file - promoters60/4610628
tcccatt

SEQ ID NO: 134783 - DNA, 6 bp, Unknown
  misc_feature (1)..( 6): Result.003 file - promoters60/4610628
ttttta

SEQ ID NO: 134784 - DNA, 6 bp, Unknown
  misc_feature (1)..( 6): Result.003 file - promoters60/4610628
ttttta

SEQ ID NO: 134785 - DNA, 8 bp, Unknown
  misc_feature (1)..( 8): Result.003 file - promoters60/4610628
gtaagtta

SEQ ID NO: 134786 - DNA, 8 bp, Unknown
  misc_feature (1)..( 8): Result.003 file - promoters60/4610628
gtaagtta

SEQ ID NO: 134787 - DNA, 7 bp, Unknown
  misc_feature (1)..( 7): Result.003 file - promoters60/4610628
aatcaaa

SEQ ID NO: 134788 - DNA, 7 bp, Unknown
  misc_feature (1)..( 7): Result.003 file - promoters60/4610628
aatgaaa

SEQ ID NO: 134789 - DNA, 8 bp, Unknown
  misc_feature (1)..( 8): Result.003 file - promoters60/4611225
tgtttgta

SEQ ID NO: 134790 - DNA, 8 bp, Unknown
  misc_feature (1)..( 8): Result.003 file - promoters60/4611225
tgtctgta

SEQ ID NO: 134791 - DNA, 7 bp, Unknown
  misc_feature (1)..( 7): Result.003 file - promoters60/4611225
attcttt

SEQ ID NO: 134792 - DNA, 7 bp, Unknown
  misc_feature (1)..( 7): Result.003 file - promoters60/4611225
attattt

SEQ ID NO: 134793 - DNA, 6 bp, Unknown
  misc_feature (1)..( 6): Result.003 file - promoters60/4611225
tcgttt

SEQ ID NO: 134794 - DNA, 6 bp, Unknown
  misc_feature (1)..( 6): Result.003 file - promoters60/4611225
tcgttt

SEQ ID NO: 134795 - DNA, 8 bp, Unknown
  misc_feature (1)..( 8): Result.003 file - promoters60/4611225
gtttactt

SEQ ID NO: 134796 - DNA, 8 bp, Unknown
  misc_feature (1)..( 8): Result.003 file - promoters60/4611225
gttgactt

SEQ ID NO: 134797 - DNA, 6 bp, Unknown
  misc_feature (1)..( 6): Result.003 file - promoters60/4611225
tttcaa

SEQ ID NO: 134798 - DNA, 6 bp, Unknown
  misc_feature (1)..( 6): Result.003 file - promoters60/4611225
tttcaa

SEQ ID NO: 134799 - DNA, 6 bp, Unknown
  misc_feature (1)..( 6): Result.003 file - promoters60/4611225
tctttc

SEQ ID NO: 134800 - DNA, 6 bp, Unknown
  misc_feature (1)..( 6): Result.003 file - promoters60/4611225
tctttc

SEQ ID NO: 134801 - DNA, 9 bp, Unknown
  misc_feature (1)..( 9): Result.003 file - promoters60/4611225
caaaaaaac

SEQ ID NO: 134802 - DNA, 9 bp, Unknown
  misc_feature (1)..( 9): Result.003 file - promoters60/4611225
caaaataac

SEQ ID NO: 134803 - DNA, 6 bp, Unknown
  misc_feature (1)..( 6): Result.003 file - promoters60/4611225
aacaaa

SEQ ID NO: 134804 - DNA, 6 bp, Unknown
  misc_feature (1)..( 6): Result.003 file - promoters60/4611225
aacaaa

SEQ ID NO: 134805 - DNA, 12 bp, Unknown
  misc_feature (1)..( 12): Result.003 file - promoters60/4611225
tcatcaattttt

SEQ ID NO: 134806 - DNA, 12 bp, Unknown
  misc_feature (1)..( 12): Result.003 file - promoters60/4611225
tcatcaatcttt

SEQ ID NO: 134807 - DNA, 7 bp, Unknown
  misc_feature (1)..( 7): Result.003 file - promoters60/4611225
aacaaaa

SEQ ID NO: 134808 - DNA, 7 bp, Unknown
  misc_feature (1)..( 7): Result.003 file - promoters60/4611225
aacaaaa

SEQ ID NO: 134809 - DNA, 7 bp, Unknown
  misc_feature (1)..( 7): Result.003 file - promoters60/4611225
tattcat

SEQ ID NO: 134810 - DNA, 7 bp, Unknown
  misc_feature (1)..( 7): Result.003 file - promoters60/4611225
tatgcat

SEQ ID NO: 134811 - DNA, 7 bp, Unknown
  misc_feature (1)..( 7): Result.003 file - promoters60/4611225
acatatc

SEQ ID NO: 134812 - DNA, 7 bp, Unknown
  misc_feature (1)..( 7): Result.003 file - promoters60/4611225
acagatc

SEQ ID NO: 134813 - DNA, 6 bp, Unknown
  misc_feature (1)..( 6): Result.003 file - promoters60/4611225
tattta

SEQ ID NO: 134814 - DNA, 6 bp, Unknown
  misc_feature (1)..( 6): Result.003 file - promoters60/4611225
tattta

SEQ ID NO: 134815 - DNA, 7 bp, Unknown
  misc_feature (1)..( 7): Result.003 file - promoters60/4611225
cttattc

SEQ ID NO: 134816 - DNA, 7 bp, Unknown
  misc_feature (1)..( 7): Result.003 file - promoters60/4611225
cttcttc

SEQ ID NO: 134817 - DNA, 6 bp, Unknown
  misc_feature (1)..( 6): Result.003 file - promoters60/4611225
aatatc

SEQ ID NO: 134818 - DNA, 6 bp, Unknown
  misc_feature (1)..( 6): Result.003 file - promoters60/4611225
aatatc

SEQ ID NO: 134819 - DNA, 7 bp, Unknown
  misc_feature (1)..( 7): Result.003 file - promoters60/4611225
caggaaa

SEQ ID NO: 134820 - DNA, 7 bp, Unknown
  misc_feature (1)..( 7): Result.003 file - promoters60/4611225
cagaaaa

SEQ ID NO: 134821 - DNA, 6 bp, Unknown
  misc_feature (1)..( 6): Result.003 file - promoters60/4611225
aataaa

SEQ ID NO: 134822 - DNA, 6 bp, Unknown
  misc_feature (1)..( 6): Result.003 file - promoters60/4611225
aataaa

SEQ ID NO: 134823 - DNA, 10 bp, Unknown
  misc_feature (1)..( 10): Result.003 file - promoters60/4701809
tccatcgaat

SEQ ID NO: 134824 - DNA, 10 bp, Unknown
  misc_feature (1)..( 10): Result.003 file - promoters60/4701809
caaatcaaat

SEQ ID NO: 134825 - DNA, 10 bp, Unknown
  misc_feature (1)..( 10): Result.003 file - promoters60/4701809
tccctcgaac

SEQ ID NO: 134826 - DNA, 10 bp, Unknown
  misc_feature (1)..( 10): Result.003 file - promoters60/4701809
gtaatcaatc

SEQ ID NO: 134827 - DNA, 10 bp, Unknown
  misc_feature (1)..( 10): Result.003 file - promoters60/4701809
aaaaccaaag

SEQ ID NO: 134828 - DNA, 10 bp, Unknown
  misc_feature (1)..( 10): Result.003 file - promoters60/4701809
gggtccaaag

SEQ ID NO: 134829 - DNA, 9 bp, Unknown
  misc_feature (1)..( 9): Result.003 file - promoters60/4701809
gtaatcaat

SEQ ID NO: 134830 - DNA, 9 bp, Unknown
  misc_feature (1)..( 9): Result.003 file - promoters60/4701809
aaaatgaat

SEQ ID NO: 134831 - DNA, 9 bp, Unknown
  misc_feature (1)..( 9): Result.003 file - promoters60/4701809
caaatcaaa

SEQ ID NO: 134832 - DNA, 9 bp, Unknown
  misc_feature (1)..( 9): Result.003 file - promoters60/4701809
tgcatcaat

SEQ ID NO: 134833 - DNA, 9 bp, Unknown
  misc_feature (1)..( 9): Result.003 file - promoters60/4701809
aaaacgaat

SEQ ID NO: 134834 - DNA, 9 bp, Unknown
  misc_feature (1)..( 9): Result.003 file - promoters60/4701809
aaaaccaaa

SEQ ID NO: 134835 - DNA, 11 bp, Unknown
  misc_feature (1)..( 11): Result.003 file - promoters60/4766314
caacgaagtaa

SEQ ID NO: 134836 - DNA, 11 bp, Unknown
  misc_feature (1)..( 11): Result.003 file - promoters60/4766314
atacgaagaat

SEQ ID NO: 134837 - DNA, 11 bp, Unknown
  misc_feature (1)..( 11): Result.003 file - promoters60/4766314
aatcgaattaa

SEQ ID NO: 134838 - DNA, 11 bp, Unknown
  misc_feature (1)..( 11): Result.003 file - promoters60/4766314
cgacgaaatac

SEQ ID NO: 134839 - DNA, 8 bp, Unknown
  misc_feature (1)..( 8): Result.003 file - promoters60/4766314
aaatcgat

SEQ ID NO: 134840 - DNA, 8 bp, Unknown
  misc_feature (1)..( 8): Result.003 file - promoters60/4766314
aaaacgac

SEQ ID NO: 134841 - DNA, 8 bp, Unknown
  misc_feature (1)..( 8): Result.003 file - promoters60/4766314
aaaaagac

SEQ ID NO: 134842 - DNA, 10 bp, Unknown
  misc_feature (1)..( 10): Result.003 file - promoters60/4766314
aattagattt

SEQ ID NO: 134843 - DNA, 10 bp, Unknown
  misc_feature (1)..( 10): Result.003 file - promoters60/4766314
aatgagattt

SEQ ID NO: 134844 - DNA, 10 bp, Unknown
  misc_feature (1)..( 10): Result.003 file - promoters60/4766314
aatgacattt

SEQ ID NO: 134845 - DNA, 8 bp, Unknown
  misc_feature (1)..( 8): Result.003 file - promoters60/4766314
aatggtat

SEQ ID NO: 134846 - DNA, 8 bp, Unknown
  misc_feature (1)..( 8): Result.003 file - promoters60/4766314
tatgttat

SEQ ID NO: 134847 - DNA, 8 bp, Unknown
  misc_feature (1)..( 8): Result.003 file - promoters60/4766314
tatgttaa

SEQ ID NO: 134848 - DNA, 8 bp, Unknown
  misc_feature (1)..( 8): Result.003 file - promoters60/4766314
aaaactat

SEQ ID NO: 134849 - DNA, 8 bp, Unknown
  misc_feature (1)..( 8): Result.003 file - promoters60/4766314
aaaaatat

SEQ ID NO: 134850 - DNA, 8 bp, Unknown
  misc_feature (1)..( 8): Result.003 file - promoters60/4766314
aacaatga

SEQ ID NO: 134851 - DNA, 14 bp, Unknown
  misc_feature (1)..( 14): Result.003 file - promoters60/4766320
ttaatttcaatctt

SEQ ID NO: 134852 - DNA, 14 bp, Unknown
  misc_feature (1)..( 14): Result.003 file - promoters60/4766320
ttaatttggaatct

SEQ ID NO: 134853 - DNA, 14 bp, Unknown
  misc_feature (1)..( 14): Result.003 file - promoters60/4766320
aaaatttcaaatga

SEQ ID NO: 134854 - DNA, 14 bp, Unknown
  misc_feature (1)..( 14): Result.003 file - promoters60/4766320
ctaatttccaaaga

SEQ ID NO: 134855 - DNA, 14 bp, Unknown
  misc_feature (1)..( 14): Result.003 file - promoters60/4766320
ctattttccaatga

SEQ ID NO: 134856 - DNA, 10 bp, Unknown
  misc_feature (1)..( 10): Result.003 file - promoters60/4766320
tatttggtta

SEQ ID NO: 134857 - DNA, 10 bp, Unknown
  misc_feature (1)..( 10): Result.003 file - promoters60/4766320
cattttgtta

SEQ ID NO: 134858 - DNA, 10 bp, Unknown
  misc_feature (1)..( 10): Result.003 file - promoters60/4766320
cattttgaca

SEQ ID NO: 134859 - DNA, 10 bp, Unknown
  misc_feature (1)..( 10): Result.003 file - promoters60/4766320
acttttgaga

SEQ ID NO: 134860 - DNA, 10 bp, Unknown
  misc_feature (1)..( 10): Result.003 file - promoters60/4766320
caatcttatc

SEQ ID NO: 134861 - DNA, 10 bp, Unknown
  misc_feature (1)..( 10): Result.003 file - promoters60/4766320
caatcttatc

SEQ ID NO: 134862 - DNA, 10 bp, Unknown
  misc_feature (1)..( 10): Result.003 file - promoters60/4766320
aaattttaac

SEQ ID NO: 134863 - DNA, 10 bp, Unknown
  misc_feature (1)..( 10): Result.003 file - promoters60/4766320
aaatttgtca

SEQ ID NO: 134864 - DNA, 7 bp, Unknown
  misc_feature (1)..( 7): Result.003 file - promoters60/4766320
ttaaaaa

SEQ ID NO: 134865 - DNA, 7 bp, Unknown
  misc_feature (1)..( 7): Result.003 file - promoters60/4766320
ttaaaat

SEQ ID NO: 134866 - DNA, 7 bp, Unknown
  misc_feature (1)..( 7): Result.003 file - promoters60/4766320
gtaaaat

SEQ ID NO: 134867 - DNA, 7 bp, Unknown
  misc_feature (1)..( 7): Result.003 file - promoters60/4766320
ttaaaaa

SEQ ID NO: 134868 - DNA, 7 bp, Unknown
  misc_feature (1)..( 7): Result.003 file - promoters60/4766324
actggag

SEQ ID NO: 134869 - DNA, 7 bp, Unknown
  misc_feature (1)..( 7): Result.003 file - promoters60/4766324
actcgag

SEQ ID NO: 134870 - DNA, 7 bp, Unknown
  misc_feature (1)..( 7): Result.003 file - promoters60/4766324
actcgaa

SEQ ID NO: 134871 - DNA, 8 bp, Unknown
  misc_feature (1)..( 8): Result.003 file - promoters60/4766324
caatcaaa

SEQ ID NO: 134872 - DNA, 8 bp, Unknown
  misc_feature (1)..( 8): Result.003 file - promoters60/4766324
caattaaa

SEQ ID NO: 134873 - DNA, 8 bp, Unknown
  misc_feature (1)..( 8): Result.003 file - promoters60/4766324
aaatcaat

SEQ ID NO: 134874 - DNA, 9 bp, Unknown
  misc_feature (1)..( 9): Result.003 file - promoters60/4766324
actatatat

SEQ ID NO: 134875 - DNA, 9 bp, Unknown
  misc_feature (1)..( 9): Result.003 file - promoters60/4766324
tctatataa

SEQ ID NO: 134876 - DNA, 9 bp, Unknown
  misc_feature (1)..( 9): Result.003 file - promoters60/4766324
actatataa

SEQ ID NO: 134877 - DNA, 9 bp, Unknown
  misc_feature (1)..( 9): Result.003 file - promoters60/4766324
ctaatataa

SEQ ID NO: 134878 - DNA, 8 bp, Unknown
  misc_feature (1)..( 8): Result.003 file - promoters60/4766324
cattttta

SEQ ID NO: 134879 - DNA, 8 bp, Unknown
  misc_feature (1)..( 8): Result.003 file - promoters60/4766324
catttttt

SEQ ID NO: 134880 - DNA, 8 bp, Unknown
  misc_feature (1)..( 8): Result.003 file - promoters60/4766324
tttttttt

SEQ ID NO: 134881 - DNA, 8 bp, Unknown
  misc_feature (1)..( 8): Result.003 file - promoters60/4766324
attgtaag

SEQ ID NO: 134882 - DNA, 8 bp, Unknown
  misc_feature (1)..( 8): Result.003 file - promoters60/4766324
attttaaa

SEQ ID NO: 134883 - DNA, 8 bp, Unknown
  misc_feature (1)..( 8): Result.003 file - promoters60/4766324
cgtttaaa

SEQ ID NO: 134884 - DNA, 7 bp, Unknown
  misc_feature (1)..( 7): Result.003 file - promoters60/4766324
tttaata

SEQ ID NO: 134885 - DNA, 7 bp, Unknown
  misc_feature (1)..( 7): Result.003 file - promoters60/4766324
ttttata

SEQ ID NO: 134886 - DNA, 7 bp, Unknown
  misc_feature (1)..( 7): Result.003 file - promoters60/4766324
tttaatt

SEQ ID NO: 134887 - DNA, 7 bp, Unknown
  misc_feature (1)..( 7): Result.003 file - promoters60/4766335
taattaa

SEQ ID NO: 134888 - DNA, 7 bp, Unknown
  misc_feature (1)..( 7): Result.003 file - promoters60/4766335
taactaa

SEQ ID NO: 134889 - DNA, 6 bp, Unknown
  misc_feature (1)..( 6): Result.003 file - promoters60/4766335
aatgta

SEQ ID NO: 134890 - DNA, 6 bp, Unknown
  misc_feature (1)..( 6): Result.003 file - promoters60/4766335
aatgta

SEQ ID NO: 134891 - DNA, 9 bp, Unknown
  misc_feature (1)..( 9): Result.003 file - promoters60/4766335
accttaaac

SEQ ID NO: 134892 - DNA, 9 bp, Unknown
  misc_feature (1)..( 9): Result.003 file - promoters60/4766335
accttaaac

SEQ ID NO: 134893 - DNA, 7 bp, Unknown
  misc_feature (1)..( 7): Result.003 file - promoters60/4766335
atctagt

SEQ ID NO: 134894 - DNA, 7 bp, Unknown
  misc_feature (1)..( 7): Result.003 file - promoters60/4766335
atcaagt

SEQ ID NO: 134895 - DNA, 12 bp, Unknown
  misc_feature (1)..( 12): Result.003 file - promoters60/4766335
tagttaaatgaa

SEQ ID NO: 134896 - DNA, 12 bp, Unknown
  misc_feature (1)..( 12): Result.003 file - promoters60/4766335
tagtcaaagctg

SEQ ID NO: 134897 - DNA, 12 bp, Unknown
  misc_feature (1)..( 12): Result.003 file - promoters60/4766335
caattacatgaa

SEQ ID NO: 134898 - DNA, 9 bp, Unknown
  misc_feature (1)..( 9): Result.003 file - promoters60/4766335
ttaaatgaa

SEQ ID NO: 134899 - DNA, 9 bp, Unknown
  misc_feature (1)..( 9): Result.003 file - promoters60/4766335
agaaatgat

SEQ ID NO: 134900 - DNA, 9 bp, Unknown
  misc_feature (1)..( 9): Result.003 file - promoters60/4766335
ttacatgaa

SEQ ID NO: 134901 - DNA, 7 bp, Unknown
  misc_feature (1)..( 7): Result.003 file - promoters60/4766335
aataatt

SEQ ID NO: 134902 - DNA, 7 bp, Unknown
  misc_feature (1)..( 7): Result.003 file - promoters60/4766335
aatcatt

SEQ ID NO: 134903 - DNA, 9 bp, Unknown
  misc_feature (1)..( 9): Result.003 file - promoters60/4766335
ttggagcct

SEQ ID NO: 134904 - DNA, 9 bp, Unknown
  misc_feature (1)..( 9): Result.003 file - promoters60/4766335
ttggtgcct

SEQ ID NO: 134905 - DNA, 7 bp, Unknown
  misc_feature (1)..( 7): Result.003 file - promoters60/4766335
aaaacat

SEQ ID NO: 134906 - DNA, 7 bp, Unknown
  misc_feature (1)..( 7): Result.003 file - promoters60/4766335
aaaccat

SEQ ID NO: 134907 - DNA, 9 bp, Unknown
  misc_feature (1)..( 9): Result.003 file - promoters60/4766335
tctataaat

SEQ ID NO: 134908 - DNA, 9 bp, Unknown
  misc_feature (1)..( 9): Result.003 file - promoters60/4766335
tctataaat

SEQ ID NO: 134909 - DNA, 9 bp, Unknown
  misc_feature (1)..( 9): Result.003 file - promoters60/4766335
tttataaaa

SEQ ID NO: 134910 - DNA, 7 bp, Unknown
  misc_feature (1)..( 7): Result.003 file - promoters60/4766335
tttccct

SEQ ID NO: 134911 - DNA, 7 bp, Unknown
  misc_feature (1)..( 7): Result.003 file - promoters60/4766335
tttgcct

SEQ ID NO: 134912 - DNA, 9 bp, Unknown
  misc_feature (1)..( 9): Result.003 file - promoters60/4766335
ttatttgga

SEQ ID NO: 134913 - DNA, 9 bp, Unknown
  misc_feature (1)..( 9): Result.003 file - promoters60/4766335
ttatgtgga

SEQ ID NO: 134914 - DNA, 11 bp, Unknown
  misc_feature (1)..( 11): Result.003 file - promoters60/4766335
cgatacttgtc

SEQ ID NO: 134915 - DNA, 11 bp, Unknown
  misc_feature (1)..( 11): Result.003 file - promoters60/4766335
cgaaactggtc

SEQ ID NO: 134916 - DNA, 8 bp, Unknown
  misc_feature (1)..( 8): Result.003 file - promoters60/4766335
gaactcat

SEQ ID NO: 134917 - DNA, 8 bp, Unknown
  misc_feature (1)..( 8): Result.003 file - promoters60/4766335
gaagtcat

SEQ ID NO: 134918 - DNA, 7 bp, Unknown
  misc_feature (1)..( 7): Result.003 file - promoters60/4766335
agaagaa

SEQ ID NO: 134919 - DNA, 7 bp, Unknown
  misc_feature (1)..( 7): Result.003 file - promoters60/4766335
agaagaa

SEQ ID NO: 134920 - DNA, 6 bp, Unknown
  misc_feature (1)..( 6): Result.003 file - promoters60/4766335
gtgtaa

SEQ ID NO: 134921 - DNA, 6 bp, Unknown
  misc_feature (1)..( 6): Result.003 file - promoters60/4766335
gtgtaa

SEQ ID NO: 134922 - DNA, 9 bp, Unknown
  misc_feature (1)..( 9): Result.003 file - promoters60/4766335
aaacaaaaa

SEQ ID NO: 134923 - DNA, 9 bp, Unknown
  misc_feature (1)..( 9): Result.003 file - promoters60/4766335
aaagaaaaa

SEQ ID NO: 134924 - DNA, 8 bp, Unknown
  misc_feature (1)..( 8): Result.003 file - promoters60/4766335
aaagtttg

SEQ ID NO: 134925 - DNA, 8 bp, Unknown
  misc_feature (1)..( 8): Result.003 file - promoters60/4766335
aaaatttg

SEQ ID NO: 134926 - DNA, 6 bp, Unknown
  misc_feature (1)..( 6): Result.003 file - promoters60/4766335
taagat

SEQ ID NO: 134927 - DNA, 6 bp, Unknown
  misc_feature (1)..( 6): Result.003 file - promoters60/4766335
taagat

SEQ ID NO: 134928 - DNA, 7 bp, Unknown
  misc_feature (1)..( 7): Result.003 file - promoters60/4766335
ctaatct

SEQ ID NO: 134929 - DNA, 7 bp, Unknown
  misc_feature (1)..( 7): Result.003 file - promoters60/4766335
ctattct

SEQ ID NO: 134930 - DNA, 6 bp, Unknown
  misc_feature (1)..( 6): Result.003 file - promoters60/4766335
agaaat

SEQ ID NO: 134931 - DNA, 6 bp, Unknown
  misc_feature (1)..( 6): Result.003 file - promoters60/4766335
agaaat

SEQ ID NO: 134932 - DNA, 6 bp, Unknown
  misc_feature (1)..( 6): Result.003 file - promoters60/4766335
ttcgtg

SEQ ID NO: 134933 - DNA, 6 bp, Unknown
  misc_feature (1)..( 6): Result.003 file - promoters60/4766335
ttcgtg

SEQ ID NO: 134934 - DNA, 6 bp, Unknown
  misc_feature (1)..( 6): Result.003 file - promoters60/4766335
catcac

SEQ ID NO: 134935 - DNA, 6 bp, Unknown
  misc_feature (1)..( 6): Result.003 file - promoters60/4766335
catcac

SEQ ID NO: 134936 - DNA, 6 bp, Unknown
  misc_feature (1)..( 6): Result.003 file - promoters60/4766357
ggtact

SEQ ID NO: 134937 - DNA, 6 bp, Unknown
  misc_feature (1)..( 6): Result.003 file - promoters60/4766357
ggtact

SEQ ID NO: 134938 - DNA, 7 bp, Unknown
  misc_feature (1)..( 7): Result.003 file - promoters60/4766357
atacaaa

SEQ ID NO: 134939 - DNA, 7 bp, Unknown
  misc_feature (1)..( 7): Result.003 file - promoters60/4766357
atataaa

SEQ ID NO: 134940 - DNA, 8 bp, Unknown
  misc_feature (1)..( 8): Result.003 file - promoters60/4766357
ccatatac

SEQ ID NO: 134941 - DNA, 8 bp, Unknown
  misc_feature (1)..( 8): Result.003 file - promoters60/4766357
ccatttac

SEQ ID NO: 134942 - DNA, 7 bp, Unknown
  misc_feature (1)..( 7): Result.003 file - promoters60/4766357
tataatc

SEQ ID NO: 134943 - DNA, 7 bp, Unknown
  misc_feature (1)..( 7): Result.003 file - promoters60/4766357
tatgatc

SEQ ID NO: 134944 - DNA, 7 bp, Unknown
  misc_feature (1)..( 7): Result.003 file - promoters60/4766357
tttcaaa

SEQ ID NO: 134945 - DNA, 7 bp, Unknown
  misc_feature (1)..( 7): Result.003 file - promoters60/4766357
tttcaaa

SEQ ID NO: 134946 - DNA, 6 bp, Unknown
  misc_feature (1)..( 6): Result.003 file - promoters60/4766357
cagaag

SEQ ID NO: 134947 - DNA, 6 bp, Unknown
  misc_feature (1)..( 6): Result.003 file - promoters60/4766357
cagaag

SEQ ID NO: 134948 - DNA, 7 bp, Unknown
  misc_feature (1)..( 7): Result.003 file - promoters60/4766357
aagtaat

SEQ ID NO: 134949 - DNA, 7 bp, Unknown
  misc_feature (1)..( 7): Result.003 file - promoters60/4766357
aagaaat

SEQ ID NO: 134950 - DNA, 7 bp, Unknown
  misc_feature (1)..( 7): Result.003 file - promoters60/4766357
ccaaaaa

SEQ ID NO: 134951 - DNA, 7 bp, Unknown
  misc_feature (1)..( 7): Result.003 file - promoters60/4766357
ccaaaaa

SEQ ID NO: 134952 - DNA, 8 bp, Unknown
  misc_feature (1)..( 8): Result.003 file - promoters60/4766365
tccttttt

SEQ ID NO: 134953 - DNA, 8 bp, Unknown
  misc_feature (1)..( 8): Result.003 file - promoters60/4766365
tccctttc

SEQ ID NO: 134954 - DNA, 8 bp, Unknown
  misc_feature (1)..( 8): Result.003 file - promoters60/4766365
atcttttt

SEQ ID NO: 134955 - DNA, 8 bp, Unknown
  misc_feature (1)..( 8): Result.003 file - promoters60/4766365
gaataaaa

SEQ ID NO: 134956 - DNA, 8 bp, Unknown
  misc_feature (1)..( 8): Result.003 file - promoters60/4766365
aaataaaa

SEQ ID NO: 134957 - DNA, 8 bp, Unknown
  misc_feature (1)..( 8): Result.003 file - promoters60/4766365
aaacaaaa

SEQ ID NO: 134958 - DNA, 8 bp, Unknown
  misc_feature (1)..( 8): Result.003 file - promoters60/4766365
gaatctat

SEQ ID NO: 134959 - DNA, 8 bp, Unknown
  misc_feature (1)..( 8): Result.003 file - promoters60/4766365
taatatat

SEQ ID NO: 134960 - DNA, 8 bp, Unknown
  misc_feature (1)..( 8): Result.003 file - promoters60/4766365
gaatctag

SEQ ID NO: 134961 - DNA, 9 bp, Unknown
  misc_feature (1)..( 9): Result.003 file - promoters60/4766365
tgtcttgat

SEQ ID NO: 134962 - DNA, 9 bp, Unknown
  misc_feature (1)..( 9): Result.003 file - promoters60/4766365
tatcttgaa

SEQ ID NO: 134963 - DNA, 9 bp, Unknown
  misc_feature (1)..( 9): Result.003 file - promoters60/4766365
tgtgttgat

SEQ ID NO: 134964 - DNA, 7 bp, Unknown
  misc_feature (1)..( 7): Result.003 file - promoters60/4766376
gacaaac

SEQ ID NO: 134965 - DNA, 7 bp, Unknown
  misc_feature (1)..( 7): Result.003 file - promoters60/4766376
gacaaaa

SEQ ID NO: 134966 - DNA, 7 bp, Unknown
  misc_feature (1)..( 7): Result.003 file - promoters60/4766376
gacaaaa

SEQ ID NO: 134967 - DNA, 9 bp, Unknown
  misc_feature (1)..( 9): Result.003 file - promoters60/4766395
ctttgtttt

SEQ ID NO: 134968 - DNA, 9 bp, Unknown
  misc_feature (1)..( 9): Result.003 file - promoters60/4766395
atttttttt

SEQ ID NO: 134969 - DNA, 9 bp, Unknown
  misc_feature (1)..( 9): Result.003 file - promoters60/4766395
atatattta

SEQ ID NO: 134970 - DNA, 7 bp, Unknown
  misc_feature (1)..( 7): Result.003 file - promoters60/4766395
gtttttt

SEQ ID NO: 134971 - DNA, 7 bp, Unknown
  misc_feature (1)..( 7): Result.003 file - promoters60/4766395
gttgttt

SEQ ID NO: 134972 - DNA, 8 bp, Unknown
  misc_feature (1)..( 8): Result.003 file - promoters60/4766395
aaaatata

SEQ ID NO: 134973 - DNA, 8 bp, Unknown
  misc_feature (1)..( 8): Result.003 file - promoters60/4766395
aaactata

SEQ ID NO: 134974 - DNA, 6 bp, Unknown
  misc_feature (1)..( 6): Result.003 file - promoters60/4766395
aaagaa

SEQ ID NO: 134975 - DNA, 6 bp, Unknown
  misc_feature (1)..( 6): Result.003 file - promoters60/4766395
aaagaa

SEQ ID NO: 134976 - DNA, 6 bp, Unknown
  misc_feature (1)..( 6): Result.003 file - promoters60/4766395
ttatca

SEQ ID NO: 134977 - DNA, 6 bp, Unknown
  misc_feature (1)..( 6): Result.003 file - promoters60/4766395
ttatca

SEQ ID NO: 134978 - DNA, 6 bp, Unknown
  misc_feature (1)..( 6): Result.003 file - promoters60/4766395
ataaac

SEQ ID NO: 134979 - DNA, 6 bp, Unknown
  misc_feature (1)..( 6): Result.003 file - promoters60/4766395
ataaac

SEQ ID NO: 134980 - DNA, 6 bp, Unknown
  misc_feature (1)..( 6): Result.003 file - promoters60/4766395
cacatg

SEQ ID NO: 134981 - DNA, 6 bp, Unknown
  misc_feature (1)..( 6): Result.003 file - promoters60/4766395
cacatg

SEQ ID NO: 134982 - DNA, 6 bp, Unknown
  misc_feature (1)..( 6): Result.003 file - promoters60/4766395
tctcca

SEQ ID NO: 134983 - DNA, 6 bp, Unknown
  misc_feature (1)..( 6): Result.003 file - promoters60/4766395
tctcca

SEQ ID NO: 134984 - DNA, 8 bp, Unknown
  misc_feature (1)..( 8): Result.003 file - promoters60/4766395
tatacata

SEQ ID NO: 134985 - DNA, 8 bp, Unknown
  misc_feature (1)..( 8): Result.003 file - promoters60/4766395
tataaata

SEQ ID NO: 134986 - DNA, 7 bp, Unknown
  misc_feature (1)..( 7): Result.003 file - promoters60/4766395
ttaaatt

SEQ ID NO: 134987 - DNA, 7 bp, Unknown
  misc_feature (1)..( 7): Result.003 file - promoters60/4766395
ttaaatt

SEQ ID NO: 134988 - DNA, 8 bp, Unknown
  misc_feature (1)..( 8): Result.003 file - promoters60/4766395
aaaataat

SEQ ID NO: 134989 - DNA, 8 bp, Unknown
  misc_feature (1)..( 8): Result.003 file - promoters60/4766395
aaaataat

SEQ ID NO: 134990 - DNA, 6 bp, Unknown
  misc_feature (1)..( 6): Result.003 file - promoters60/4766395
atattt

SEQ ID NO: 134991 - DNA, 6 bp, Unknown
  misc_feature (1)..( 6): Result.003 file - promoters60/4766395
atattt

SEQ ID NO: 134992 - DNA, 6 bp, Unknown
  misc_feature (1)..( 6): Result.003 file - promoters60/4766395
atatat

SEQ ID NO: 134993 - DNA, 6 bp, Unknown
  misc_feature (1)..( 6): Result.003 file - promoters60/4766395
atatat

SEQ ID NO: 134994 - DNA, 6 bp, Unknown
  misc_feature (1)..( 6): Result.003 file - promoters60/4766395
aaatct

SEQ ID NO: 134995 - DNA, 6 bp, Unknown
  misc_feature (1)..( 6): Result.003 file - promoters60/4766395
aaatct

SEQ ID NO: 134996 - DNA, 7 bp, Unknown
  misc_feature (1)..( 7): Result.003 file - promoters60/4766395
aaaaatt

SEQ ID NO: 134997 - DNA, 7 bp, Unknown
  misc_feature (1)..( 7): Result.003 file - promoters60/4766395
aaaaatt

SEQ ID NO: 134998 - DNA, 6 bp, Unknown
  misc_feature (1)..( 6): Result.003 file - promoters60/4766395
aaaaaa

SEQ ID NO: 134999 - DNA, 6 bp, Unknown
  misc_feature (1)..( 6): Result.003 file - promoters60/4766395
aaaaaa

SEQ ID NO: 135000 - DNA, 7 bp, Unknown
  misc_feature (1)..( 7): Result.003 file - promoters60/4766395
aaagtta

SEQ ID NO: 135001 - DNA, 7 bp, Unknown
  misc_feature (1)..( 7): Result.003 file - promoters60/4766395
aaattta

SEQ ID NO: 135002 - DNA, 8 bp, Unknown
  misc_feature (1)..( 8): Result.003 file - promoters60/4766395
aaatttaa

SEQ ID NO: 135003 - DNA, 8 bp, Unknown
  misc_feature (1)..( 8): Result.003 file - promoters60/4766395
aaatgtaa

SEQ ID NO: 135004 - DNA, 6 bp, Unknown
  misc_feature (1)..( 6): Result.003 file - promoters60/4766421
ttaact

SEQ ID NO: 135005 - DNA, 6 bp, Unknown
  misc_feature (1)..( 6): Result.003 file - promoters60/4766421
ttaact

SEQ ID NO: 135006 - DNA, 8 bp, Unknown
  misc_feature (1)..( 8): Result.003 file - promoters60/4766421
ttacaata

SEQ ID NO: 135007 - DNA, 8 bp, Unknown
  misc_feature (1)..( 8): Result.003 file - promoters60/4766421
ttaaaatt

SEQ ID NO: 135008 - DNA, 8 bp, Unknown
  misc_feature (1)..( 8): Result.003 file - promoters60/4766421
tcaaaatt

SEQ ID NO: 135009 - DNA, 7 bp, Unknown
  misc_feature (1)..( 7): Result.003 file - promoters60/4766421
atgtttt

SEQ ID NO: 135010 - DNA, 7 bp, Unknown
  misc_feature (1)..( 7): Result.003 file - promoters60/4766421
atgtttt

SEQ ID NO: 135011 - DNA, 7 bp, Unknown
  misc_feature (1)..( 7): Result.003 file - promoters60/4766421
atgcttt

SEQ ID NO: 135012 - DNA, 8 bp, Unknown
  misc_feature (1)..( 8): Result.003 file - promoters60/4766421
aatcagat

SEQ ID NO: 135013 - DNA, 8 bp, Unknown
  misc_feature (1)..( 8): Result.003 file - promoters60/4766421
aatctgat

SEQ ID NO: 135014 - DNA, 7 bp, Unknown
  misc_feature (1)..( 7): Result.003 file - promoters60/4766421
tggagcc

SEQ ID NO: 135015 - DNA, 7 bp, Unknown
  misc_feature (1)..( 7): Result.003 file - promoters60/4766421
tggggcc

SEQ ID NO: 135016 - DNA, 6 bp, Unknown
  misc_feature (1)..( 6): Result.003 file - promoters60/4766421
tatctg

SEQ ID NO: 135017 - DNA, 6 bp, Unknown
  misc_feature (1)..( 6): Result.003 file - promoters60/4766421
tatctg

SEQ ID NO: 135018 - DNA, 6 bp, Unknown
  misc_feature (1)..( 6): Result.003 file - promoters60/4766421
tagata

SEQ ID NO: 135019 - DNA, 6 bp, Unknown
  misc_feature (1)..( 6): Result.003 file - promoters60/4766421
tagata

SEQ ID NO: 135020 - DNA, 9 bp, Unknown
  misc_feature (1)..( 9): Result.003 file - promoters60/4766421
taatgattc

SEQ ID NO: 135021 - DNA, 9 bp, Unknown
  misc_feature (1)..( 9): Result.003 file - promoters60/4766421
aattgattc

SEQ ID NO: 135022 - DNA, 9 bp, Unknown
  misc_feature (1)..( 9): Result.003 file - promoters60/4766421
aatttattt

SEQ ID NO: 135023 - DNA, 7 bp, Unknown
  misc_feature (1)..( 7): Result.003 file - promoters60/4766421
caatatt

SEQ ID NO: 135024 - DNA, 7 bp, Unknown
  misc_feature (1)..( 7): Result.003 file - promoters60/4766421
caaaatt

SEQ ID NO: 135025 - DNA, 7 bp, Unknown
  misc_feature (1)..( 7): Result.003 file - promoters60/4766421
taaaatt

SEQ ID NO: 135026 - DNA, 10 bp, Unknown
  misc_feature (1)..( 10): Result.003 file - promoters60/4766421
attatccatt

SEQ ID NO: 135027 - DNA, 10 bp, Unknown
  misc_feature (1)..( 10): Result.003 file - promoters60/4766421
attctccatt

SEQ ID NO: 135028 - DNA, 6 bp, Unknown
  misc_feature (1)..( 6): Result.003 file - promoters60/4766421
acagtg

SEQ ID NO: 135029 - DNA, 6 bp, Unknown
  misc_feature (1)..( 6): Result.003 file - promoters60/4766421
acagtg

SEQ ID NO: 135030 - DNA, 6 bp, Unknown
  misc_feature (1)..( 6): Result.003 file - promoters60/4766421
gaactt

SEQ ID NO: 135031 - DNA, 6 bp, Unknown
  misc_feature (1)..( 6): Result.003 file - promoters60/4766421
gaactt

SEQ ID NO: 135032 - DNA, 9 bp, Unknown
  misc_feature (1)..( 9): Result.003 file - promoters60/4766421
gataatttg

SEQ ID NO: 135033 - DNA, 9 bp, Unknown
  misc_feature (1)..( 9): Result.003 file - promoters60/4766421
gatgatttg

SEQ ID NO: 135034 - DNA, 8 bp, Unknown
  misc_feature (1)..( 8): Result.003 file - promoters60/4766421
ttcacaga

SEQ ID NO: 135035 - DNA, 8 bp, Unknown
  misc_feature (1)..( 8): Result.003 file - promoters60/4766421
ttcacaga

SEQ ID NO: 135036 - DNA, 6 bp, Unknown
  misc_feature (1)..( 6): Result.003 file - promoters60/4766421
tcttgt

SEQ ID NO: 135037 - DNA, 6 bp, Unknown
  misc_feature (1)..( 6): Result.003 file - promoters60/4766421
tcttgt

SEQ ID NO: 135038 - DNA, 6 bp, Unknown
  misc_feature (1)..( 6): Result.003 file - promoters60/4766421
gtgtgc

SEQ ID NO: 135039 - DNA, 6 bp, Unknown
  misc_feature (1)..( 6): Result.003 file - promoters60/4766421
gtgtgc

SEQ ID NO: 135040 - DNA, 6 bp, Unknown
  misc_feature (1)..( 6): Result.003 file - promoters60/4766429
ttcaca

SEQ ID NO: 135041 - DNA, 6 bp, Unknown
  misc_feature (1)..( 6): Result.003 file - promoters60/4766429
ttcaca

SEQ ID NO: 135042 - DNA, 6 bp, Unknown
  misc_feature (1)..( 6): Result.003 file - promoters60/4766429
agcttt

SEQ ID NO: 135043 - DNA, 6 bp, Unknown
  misc_feature (1)..( 6): Result.003 file - promoters60/4766429
agcttt

SEQ ID NO: 135044 - DNA, 6 bp, Unknown
  misc_feature (1)..( 6): Result.003 file - promoters60/4766429
ttttca

SEQ ID NO: 135045 - DNA, 6 bp, Unknown
  misc_feature (1)..( 6): Result.003 file - promoters60/4766429
ttttca

SEQ ID NO: 135046 - DNA, 6 bp, Unknown
  misc_feature (1)..( 6): Result.003 file - promoters60/4766429
ttccaa

SEQ ID NO: 135047 - DNA, 6 bp, Unknown
  misc_feature (1)..( 6): Result.003 file - promoters60/4766429
ttccaa

SEQ ID NO: 135048 - DNA, 6 bp, Unknown
  misc_feature (1)..( 6): Result.003 file - promoters60/4766429
aatcat

SEQ ID NO: 135049 - DNA, 6 bp, Unknown
  misc_feature (1)..( 6): Result.003 file - promoters60/4766429
aatcat

SEQ ID NO: 135050 - DNA, 6 bp, Unknown
  misc_feature (1)..( 6): Result.003 file - promoters60/4766429
catttt

SEQ ID NO: 135051 - DNA, 6 bp, Unknown
  misc_feature (1)..( 6): Result.003 file - promoters60/4766429
catttt

SEQ ID NO: 135052 - DNA, 8 bp, Unknown
  misc_feature (1)..( 8): Result.003 file - promoters60/4766429
tttattaa

SEQ ID NO: 135053 - DNA, 8 bp, Unknown
  misc_feature (1)..( 8): Result.003 file - promoters60/4766429
tttcttaa

SEQ ID NO: 135054 - DNA, 7 bp, Unknown
  misc_feature (1)..( 7): Result.003 file - promoters60/4766429
aagaaac

SEQ ID NO: 135055 - DNA, 7 bp, Unknown
  misc_feature (1)..( 7): Result.003 file - promoters60/4766429
aagaaac

SEQ ID NO: 135056 - DNA, 7 bp, Unknown
  misc_feature (1)..( 7): Result.003 file - promoters60/4766429
ctctata

SEQ ID NO: 135057 - DNA, 7 bp, Unknown
  misc_feature (1)..( 7): Result.003 file - promoters60/4766429
ctctata

SEQ ID NO: 135058 - DNA, 9 bp, Unknown
  misc_feature (1)..( 9): Result.003 file - promoters60/4766429
aagaagaaa

SEQ ID NO: 135059 - DNA, 9 bp, Unknown
  misc_feature (1)..( 9): Result.003 file - promoters60/4766429
aagaaaaaa

SEQ ID NO: 135060 - DNA, 7 bp, Unknown
  misc_feature (1)..( 7): Result.003 file - promoters60/4766429
caatctt

SEQ ID NO: 135061 - DNA, 7 bp, Unknown
  misc_feature (1)..( 7): Result.003 file - promoters60/4766429
caaactt

SEQ ID NO: 135062 - DNA, 7 bp, Unknown
  misc_feature (1)..( 7): Result.003 file - promoters60/4766447
catcatt

SEQ ID NO: 135063 - DNA, 7 bp, Unknown
  misc_feature (1)..( 7): Result.003 file - promoters60/4766447
aatcatt

SEQ ID NO: 135064 - DNA, 7 bp, Unknown
  misc_feature (1)..( 7): Result.003 file - promoters60/4766447
aataatt

SEQ ID NO: 135065 - DNA, 9 bp, Unknown
  misc_feature (1)..( 9): Result.003 file - promoters60/4766447
atcttattc

SEQ ID NO: 135066 - DNA, 9 bp, Unknown
  misc_feature (1)..( 9): Result.003 file - promoters60/4766447
atcttaaat

SEQ ID NO: 135067 - DNA, 9 bp, Unknown
  misc_feature (1)..( 9): Result.003 file - promoters60/4766447
ttctaattc

SEQ ID NO: 135068 - DNA, 11 bp, Unknown
  misc_feature (1)..( 11): Result.003 file - promoters60/4766447
tttttggaaac

SEQ ID NO: 135069 - DNA, 11 bp, Unknown
  misc_feature (1)..( 11): Result.003 file - promoters60/4766447
tttatggtttc

SEQ ID NO: 135070 - DNA, 11 bp, Unknown
  misc_feature (1)..( 11): Result.003 file - promoters60/4766447
attagggtttc

SEQ ID NO: 135071 - DNA, 8 bp, Unknown
  misc_feature (1)..( 8): Result.003 file - promoters60/4766447
atgtctaa

SEQ ID NO: 135072 - DNA, 8 bp, Unknown
  misc_feature (1)..( 8): Result.003 file - promoters60/4766447
ttgtataa

SEQ ID NO: 135073 - DNA, 8 bp, Unknown
  misc_feature (1)..( 8): Result.003 file - promoters60/4766447
ttgtatgc

SEQ ID NO: 135074 - DNA, 8 bp, Unknown
  misc_feature (1)..( 8): Result.003 file - promoters60/4766447
tcaatcaa

SEQ ID NO: 135075 - DNA, 8 bp, Unknown
  misc_feature (1)..( 8): Result.003 file - promoters60/4766447
ccaagcaa

SEQ ID NO: 135076 - DNA, 8 bp, Unknown
  misc_feature (1)..( 8): Result.003 file - promoters60/4766447
tcaaacaa

SEQ ID NO: 135077 - DNA, 7 bp, Unknown
  misc_feature (1)..( 7): Result.003 file - promoters60/4766447
tttgttt

SEQ ID NO: 135078 - DNA, 7 bp, Unknown
  misc_feature (1)..( 7): Result.003 file - promoters60/4766447
tttattt

SEQ ID NO: 135079 - DNA, 7 bp, Unknown
  misc_feature (1)..( 7): Result.003 file - promoters60/4766447
attattt

SEQ ID NO: 135080 - DNA, 11 bp, Unknown
  misc_feature (1)..( 11): Result.003 file - promoters60/4766447
attccactttt

SEQ ID NO: 135081 - DNA, 11 bp, Unknown
  misc_feature (1)..( 11): Result.003 file - promoters60/4766447
aatccaatttt

SEQ ID NO: 135082 - DNA, 11 bp, Unknown
  misc_feature (1)..( 11): Result.003 file - promoters60/4766447
aatacaaaaaa

SEQ ID NO: 135083 - DNA, 11 bp, Unknown
  misc_feature (1)..( 11): Result.003 file - promoters60/4766477
atcaataaact

SEQ ID NO: 135084 - DNA, 11 bp, Unknown
  misc_feature (1)..( 11): Result.003 file - promoters60/4766477
gtcaacaaaat

SEQ ID NO: 135085 - DNA, 11 bp, Unknown
  misc_feature (1)..( 11): Result.003 file - promoters60/4766477
acacacaattt

SEQ ID NO: 135086 - DNA, 11 bp, Unknown
  misc_feature (1)..( 11): Result.003 file - promoters60/4766477
gaaaacaaaat

SEQ ID NO: 135087 - DNA, 11 bp, Unknown
  misc_feature (1)..( 11): Result.003 file - promoters60/4766477
aaaaataactg

SEQ ID NO: 135088 - DNA, 11 bp, Unknown
  misc_feature (1)..( 11): Result.003 file - promoters60/4766477
aataacaaata

SEQ ID NO: 135089 - DNA, 10 bp, Unknown
  misc_feature (1)..( 10): Result.003 file - promoters60/4766477
acttcttctc

SEQ ID NO: 135090 - DNA, 10 bp, Unknown
  misc_feature (1)..( 10): Result.003 file - promoters60/4766477
actgcttcgc

SEQ ID NO: 135091 - DNA, 10 bp, Unknown
  misc_feature (1)..( 10): Result.003 file - promoters60/4766477
actgcttgtt

SEQ ID NO: 135092 - DNA, 10 bp, Unknown
  misc_feature (1)..( 10): Result.003 file - promoters60/4766477
gtttcttctc

SEQ ID NO: 135093 - DNA, 10 bp, Unknown
  misc_feature (1)..( 10): Result.003 file - promoters60/4766477
attttttctt

SEQ ID NO: 135094 - DNA, 10 bp, Unknown
  misc_feature (1)..( 10): Result.003 file - promoters60/4766477
tctgattgga

SEQ ID NO: 135095 - DNA, 13 bp, Unknown
  misc_feature (1)..( 13): Result.003 file - promoters60/4766477
caacaatgtacaa

SEQ ID NO: 135096 - DNA, 13 bp, Unknown
  misc_feature (1)..( 13): Result.003 file - promoters60/4766477
caataatttacat

SEQ ID NO: 135097 - DNA, 13 bp, Unknown
  misc_feature (1)..( 13): Result.003 file - promoters60/4766477
ttacaatttacaa

SEQ ID NO: 135098 - DNA, 13 bp, Unknown
  misc_feature (1)..( 13): Result.003 file - promoters60/4766477
taacaatatatat

SEQ ID NO: 135099 - DNA, 13 bp, Unknown
  misc_feature (1)..( 13): Result.003 file - promoters60/4766477
agatattttaaaa

SEQ ID NO: 135100 - DNA, 13 bp, Unknown
  misc_feature (1)..( 13): Result.003 file - promoters60/4766477
taataatggttct

SEQ ID NO: 135101 - DNA, 13 bp, Unknown
  misc_feature (1)..( 13): Result.003 file - promoters60/4766477
tgaaaatttatac

SEQ ID NO: 135102 - DNA, 15 bp, Unknown
  misc_feature (1)..( 15): Result.003 file - promoters60/4766487
tgtcatattcgtcgc

SEQ ID NO: 135103 - DNA, 15 bp, Unknown
  misc_feature (1)..( 15): Result.003 file - promoters60/4766487
gttcaaattcaaaat

SEQ ID NO: 135104 - DNA, 15 bp, Unknown
  misc_feature (1)..( 15): Result.003 file - promoters60/4766487
tgtcacattccatct

SEQ ID NO: 135105 - DNA, 15 bp, Unknown
  misc_feature (1)..( 15): Result.003 file - promoters60/4766487
tgaaaaattcaacaa

SEQ ID NO: 135106 - DNA, 15 bp, Unknown
  misc_feature (1)..( 15): Result.003 file - promoters60/4766487
gtacgacttcgacaa

SEQ ID NO: 135107 - DNA, 9 bp, Unknown
  misc_feature (1)..( 9): Result.003 file - promoters60/4766487
caaagaaac

SEQ ID NO: 135108 - DNA, 9 bp, Unknown
  misc_feature (1)..( 9): Result.003 file - promoters60/4766487
caatgaaat

SEQ ID NO: 135109 - DNA, 9 bp, Unknown
  misc_feature (1)..( 9): Result.003 file - promoters60/4766487
aaaataaaa

SEQ ID NO: 135110 - DNA, 9 bp, Unknown
  misc_feature (1)..( 9): Result.003 file - promoters60/4766487
ataataaaa

SEQ ID NO: 135111 - DNA, 9 bp, Unknown
  misc_feature (1)..( 9): Result.003 file - promoters60/4766487
agaataaaa

SEQ ID NO: 135112 - DNA, 12 bp, Unknown
  misc_feature (1)..( 12): Result.003 file - promoters60/4766487
caaaagcactga

SEQ ID NO: 135113 - DNA, 12 bp, Unknown
  misc_feature (1)..( 12): Result.003 file - promoters60/4766487
aaaaagcaaaaa

SEQ ID NO: 135114 - DNA, 13 bp, Unknown
  misc_feature (1)..( 13): Result.003 file - promoters60/4766487
taagaagaaaaaa

SEQ ID NO: 135115 - DNA, 13 bp, Unknown
  misc_feature (1)..( 13): Result.003 file - promoters60/4766487
gaagaagattgtt

SEQ ID NO: 135116 - DNA, 13 bp, Unknown
  misc_feature (1)..( 13): Result.003 file - promoters60/4766487
catgaagatatat

SEQ ID NO: 135117 - DNA, 7 bp, Unknown
  misc_feature (1)..( 7): Result.003 file - promoters60/4766490
ttttttg

SEQ ID NO: 135118 - DNA, 7 bp, Unknown
  misc_feature (1)..( 7): Result.003 file - promoters60/4766490
tttgttg

SEQ ID NO: 135119 - DNA, 6 bp, Unknown
  misc_feature (1)..( 6): Result.003 file - promoters60/4766490
caaaaa

SEQ ID NO: 135120 - DNA, 6 bp, Unknown
  misc_feature (1)..( 6): Result.003 file - promoters60/4766490
caaaaa

SEQ ID NO: 135121 - DNA, 10 bp, Unknown
  misc_feature (1)..( 10): Result.003 file - promoters60/4766490
tttgaaaaga

SEQ ID NO: 135122 - DNA, 10 bp, Unknown
  misc_feature (1)..( 10): Result.003 file - promoters60/4766490
aaaaaaaaga

SEQ ID NO: 135123 - DNA, 11 bp, Unknown
  misc_feature (1)..( 11): Result.003 file - promoters60/4766490
gaagaaacaga

SEQ ID NO: 135124 - DNA, 8 bp, Unknown
  misc_feature (1)..( 8): Result.003 file - promoters60/4766490
caattatt

SEQ ID NO: 135125 - DNA, 8 bp, Unknown
  misc_feature (1)..( 8): Result.003 file - promoters60/4766490
caactatt

SEQ ID NO: 135126 - DNA, 7 bp, Unknown
  misc_feature (1)..( 7): Result.003 file - promoters60/4766490
ttttatg

SEQ ID NO: 135127 - DNA, 7 bp, Unknown
  misc_feature (1)..( 7): Result.003 file - promoters60/4766490
tttcatg

SEQ ID NO: 135128 - DNA, 6 bp, Unknown
  misc_feature (1)..( 6): Result.003 file - promoters60/4766490
taaaaa

SEQ ID NO: 135129 - DNA, 6 bp, Unknown
  misc_feature (1)..( 6): Result.003 file - promoters60/4766490
taaaaa

SEQ ID NO: 135130 - DNA, 8 bp, Unknown
  misc_feature (1)..( 8): Result.003 file - promoters60/4766490
tcgacatg

SEQ ID NO: 135131 - DNA, 8 bp, Unknown
  misc_feature (1)..( 8): Result.003 file - promoters60/4766490
tcgacatg

SEQ ID NO: 135132 - DNA, 7 bp, Unknown
  misc_feature (1)..( 7): Result.003 file - promoters60/4766490
acgtggt

SEQ ID NO: 135133 - DNA, 7 bp, Unknown
  misc_feature (1)..( 7): Result.003 file - promoters60/4766490
acgtggt

SEQ ID NO: 135134 - DNA, 6 bp, Unknown
  misc_feature (1)..( 6): Result.003 file - promoters60/4766490
ggtgga

SEQ ID NO: 135135 - DNA, 6 bp, Unknown
  misc_feature (1)..( 6): Result.003 file - promoters60/4766490
ggtgga

SEQ ID NO: 135136 - DNA, 6 bp, Unknown
  misc_feature (1)..( 6): Result.003 file - promoters60/4766490
aaagaa

SEQ ID NO: 135137 - DNA, 6 bp, Unknown
  misc_feature (1)..( 6): Result.003 file - promoters60/4766490
aaagaa

SEQ ID NO: 135138 - DNA, 6 bp, Unknown
  misc_feature (1)..( 6): Result.003 file - promoters60/4766490
acaaca

SEQ ID NO: 135139 - DNA, 6 bp, Unknown
  misc_feature (1)..( 6): Result.003 file - promoters60/4766490
acaaca

SEQ ID NO: 135140 - DNA, 12 bp, Unknown
  misc_feature (1)..( 12): Result.003 file - promoters60/4766490
tgaaaagatgaa

SEQ ID NO: 135141 - DNA, 12 bp, Unknown
  misc_feature (1)..( 12): Result.003 file - promoters60/4766490
acacaagaagaa

SEQ ID NO: 135142 - DNA, 12 bp, Unknown
  misc_feature (1)..( 12): Result.003 file - promoters60/4766490
gaaaaaaaagaa

SEQ ID NO: 135143 - DNA, 9 bp, Unknown
  misc_feature (1)..( 9): Result.003 file - promoters60/4766490
atgataaga

SEQ ID NO: 135144 - DNA, 9 bp, Unknown
  misc_feature (1)..( 9): Result.003 file - promoters60/4766490
atgatgaga

SEQ ID NO: 135145 - DNA, 6 bp, Unknown
  misc_feature (1)..( 6): Result.003 file - promoters60/4766490
aataaa

SEQ ID NO: 135146 - DNA, 6 bp, Unknown
  misc_feature (1)..( 6): Result.003 file - promoters60/4766490
aataaa

SEQ ID NO: 135147 - DNA, 6 bp, Unknown
  misc_feature (1)..( 6): Result.003 file - promoters60/4766490
aactag

SEQ ID NO: 135148 - DNA, 6 bp, Unknown
  misc_feature (1)..( 6): Result.003 file - promoters60/4766490
aactag

SEQ ID NO: 135149 - DNA, 7 bp, Unknown
  misc_feature (1)..( 7): Result.003 file - promoters60/4766490
aattttg

SEQ ID NO: 135150 - DNA, 7 bp, Unknown
  misc_feature (1)..( 7): Result.003 file - promoters60/4766490
aatgttg

SEQ ID NO: 135151 - DNA, 8 bp, Unknown
  misc_feature (1)..( 8): Result.003 file - promoters60/4766490
tggtaaag

SEQ ID NO: 135152 - DNA, 8 bp, Unknown
  misc_feature (1)..( 8): Result.003 file - promoters60/4766490
tggcaaag

SEQ ID NO: 135153 - DNA, 7 bp, Unknown
  misc_feature (1)..( 7): Result.003 file - promoters60/4766490
cgttttc

SEQ ID NO: 135154 - DNA, 7 bp, Unknown
  misc_feature (1)..( 7): Result.003 file - promoters60/4766490
cgtcttc

SEQ ID NO: 135155 - DNA, 7 bp, Unknown
  misc_feature (1)..( 7): Result.003 file - promoters60/4766553
catatat

SEQ ID NO: 135156 - DNA, 7 bp, Unknown
  misc_feature (1)..( 7): Result.003 file - promoters60/4766553
catttat

SEQ ID NO: 135157 - DNA, 6 bp, Unknown
  misc_feature (1)..( 6): Result.003 file - promoters60/4766553
tttact

SEQ ID NO: 135158 - DNA, 6 bp, Unknown
  misc_feature (1)..( 6): Result.003 file - promoters60/4766553
tttact

SEQ ID NO: 135159 - DNA, 6 bp, Unknown
  misc_feature (1)..( 6): Result.003 file - promoters60/4766553
tgtttt

SEQ ID NO: 135160 - DNA, 6 bp, Unknown
  misc_feature (1)..( 6): Result.003 file - promoters60/4766553
tgtttt

SEQ ID NO: 135161 - DNA, 8 bp, Unknown
  misc_feature (1)..( 8): Result.003 file - promoters60/4766553
tctgataa

SEQ ID NO: 135162 - DNA, 8 bp, Unknown
  misc_feature (1)..( 8): Result.003 file - promoters60/4766553
tctgataa

SEQ ID NO: 135163 - DNA, 7 bp, Unknown
  misc_feature (1)..( 7): Result.003 file - promoters60/4766553
ttaattt

SEQ ID NO: 135164 - DNA, 7 bp, Unknown
  misc_feature (1)..( 7): Result.003 file - promoters60/4766553
ttaattt

SEQ ID NO: 135165 - DNA, 7 bp, Unknown
  misc_feature (1)..( 7): Result.003 file - promoters60/4766553
gcaggat

SEQ ID NO: 135166 - DNA, 7 bp, Unknown
  misc_feature (1)..( 7): Result.003 file - promoters60/4766553
gcatgat

SEQ ID NO: 135167 - DNA, 8 bp, Unknown
  misc_feature (1)..( 8): Result.003 file - promoters60/4766553
gtagagaa

SEQ ID NO: 135168 - DNA, 8 bp, Unknown
  misc_feature (1)..( 8): Result.003 file - promoters60/4766553
gtagagaa

SEQ ID NO: 135169 - DNA, 6 bp, Unknown
  misc_feature (1)..( 6): Result.003 file - promoters60/4766553
agaaga

SEQ ID NO: 135170 - DNA, 6 bp, Unknown
  misc_feature (1)..( 6): Result.003 file - promoters60/4766553
agaaga

SEQ ID NO: 135171 - DNA, 6 bp, Unknown
  misc_feature (1)..( 6): Result.003 file - promoters60/4766553
gtgatt

SEQ ID NO: 135172 - DNA, 6 bp, Unknown
  misc_feature (1)..( 6): Result.003 file - promoters60/4766553
gtgatt

SEQ ID NO: 135173 - DNA, 13 bp, Unknown
  misc_feature (1)..( 13): Result.003 file - promoters60/4766578
gtttcaatattgg

SEQ ID NO: 135174 - DNA, 13 bp, Unknown
  misc_feature (1)..( 13): Result.003 file - promoters60/4766578
attttaattttgg

SEQ ID NO: 135175 - DNA, 13 bp, Unknown
  misc_feature (1)..( 13): Result.003 file - promoters60/4766578
tttttgattaatg

SEQ ID NO: 135176 - DNA, 14 bp, Unknown
  misc_feature (1)..( 14): Result.003 file - promoters60/4766578
tttcttgaattatc

SEQ ID NO: 135177 - DNA, 7 bp, Unknown
  misc_feature (1)..( 7): Result.003 file - promoters60/4766578
ataatta

SEQ ID NO: 135178 - DNA, 7 bp, Unknown
  misc_feature (1)..( 7): Result.003 file - promoters60/4766578
atactta

SEQ ID NO: 135179 - DNA, 7 bp, Unknown
  misc_feature (1)..( 7): Result.003 file - promoters60/4766578
gtaatta

SEQ ID NO: 135180 - DNA, 7 bp, Unknown
  misc_feature (1)..( 7): Result.003 file - promoters60/4766578
atattta

SEQ ID NO: 135181 - DNA, 7 bp, Unknown
  misc_feature (1)..( 7): Result.003 file - promoters60/4766578
gtaatta

SEQ ID NO: 135182 - DNA, 11 bp, Unknown
  misc_feature (1)..( 11): Result.003 file - promoters60/4766578
ttattttatag

SEQ ID NO: 135183 - DNA, 11 bp, Unknown
  misc_feature (1)..( 11): Result.003 file - promoters60/4766578
acattttatag

SEQ ID NO: 135184 - DNA, 11 bp, Unknown
  misc_feature (1)..( 11): Result.003 file - promoters60/4766578
tgattttagac

SEQ ID NO: 135185 - DNA, 11 bp, Unknown
  misc_feature (1)..( 11): Result.003 file - promoters60/4766578
acattttgaag

SEQ ID NO: 135186 - DNA, 10 bp, Unknown
  misc_feature (1)..( 10): Result.003 file - promoters60/4766578
taaaataaag

SEQ ID NO: 135187 - DNA, 10 bp, Unknown
  misc_feature (1)..( 10): Result.003 file - promoters60/4766578
caaaaaaaaa

SEQ ID NO: 135188 - DNA, 10 bp, Unknown
  misc_feature (1)..( 10): Result.003 file - promoters60/4766578
taaaataaaa

SEQ ID NO: 135189 - DNA, 11 bp, Unknown
  misc_feature (1)..( 11): Result.003 file - promoters60/4766578
accaatgaaat

SEQ ID NO: 135190 - DNA, 7 bp, Unknown
  misc_feature (1)..( 7): Result.003 file - promoters60/4766578
gaaaaaa

SEQ ID NO: 135191 - DNA, 7 bp, Unknown
  misc_feature (1)..( 7): Result.003 file - promoters60/4766578
gaaaaaa

SEQ ID NO: 135192 - DNA, 7 bp, Unknown
  misc_feature (1)..( 7): Result.003 file - promoters60/4766578
taaaaaa

SEQ ID NO: 135193 - DNA, 7 bp, Unknown
  misc_feature (1)..( 7): Result.003 file - promoters60/4766578
ataaaaa

SEQ ID NO: 135194 - DNA, 7 bp, Unknown
  misc_feature (1)..( 7): Result.003 file - promoters60/4766602
ccctaac

SEQ ID NO: 135195 - DNA, 7 bp, Unknown
  misc_feature (1)..( 7): Result.003 file - promoters60/4766602
ccctaac

SEQ ID NO: 135196 - DNA, 9 bp, Unknown
  misc_feature (1)..( 9): Result.003 file - promoters60/4766602
actatatat

SEQ ID NO: 135197 - DNA, 9 bp, Unknown
  misc_feature (1)..( 9): Result.003 file - promoters60/4766602
actatataa

SEQ ID NO: 135198 - DNA, 9 bp, Unknown
  misc_feature (1)..( 9): Result.003 file - promoters60/4766602
ctaatataa

SEQ ID NO: 135199 - DNA, 9 bp, Unknown
  misc_feature (1)..( 9): Result.003 file - promoters60/4766602
aggaaaaaa

SEQ ID NO: 135200 - DNA, 9 bp, Unknown
  misc_feature (1)..( 9): Result.003 file - promoters60/4766602
aggacaaaa

SEQ ID NO: 135201 - DNA, 8 bp, Unknown
  misc_feature (1)..( 8): Result.003 file - promoters60/4766602
tgtaaaac

SEQ ID NO: 135202 - DNA, 8 bp, Unknown
  misc_feature (1)..( 8): Result.003 file - promoters60/4766602
tgtataac

SEQ ID NO: 135203 - DNA, 6 bp, Unknown
  misc_feature (1)..( 6): Result.003 file - promoters60/4766602
attgat

SEQ ID NO: 135204 - DNA, 6 bp, Unknown
  misc_feature (1)..( 6): Result.003 file - promoters60/4766602
attgat

SEQ ID NO: 135205 - DNA, 6 bp, Unknown
  misc_feature (1)..( 6): Result.003 file - promoters60/4766602
attcat

SEQ ID NO: 135206 - DNA, 6 bp, Unknown
  misc_feature (1)..( 6): Result.003 file - promoters60/4766602
attcat

SEQ ID NO: 135207 - DNA, 6 bp, Unknown
  misc_feature (1)..( 6): Result.003 file - promoters60/4766602
atataa

SEQ ID NO: 135208 - DNA, 6 bp, Unknown
  misc_feature (1)..( 6): Result.003 file - promoters60/4766602
atataa

SEQ ID NO: 135209 - DNA, 8 bp, Unknown
  misc_feature (1)..( 8): Result.003 file - promoters60/4766602
tggcaata

SEQ ID NO: 135210 - DNA, 8 bp, Unknown
  misc_feature (1)..( 8): Result.003 file - promoters60/4766602
tggaaata

SEQ ID NO: 135211 - DNA, 7 bp, Unknown
  misc_feature (1)..( 7): Result.003 file - promoters60/4766602
taatttg

SEQ ID NO: 135212 - DNA, 7 bp, Unknown
  misc_feature (1)..( 7): Result.003 file - promoters60/4766602
taatttg

SEQ ID NO: 135213 - DNA, 6 bp, Unknown
  misc_feature (1)..( 6): Result.003 file - promoters60/4766602
aatcaa

SEQ ID NO: 135214 - DNA, 6 bp, Unknown
  misc_feature (1)..( 6): Result.003 file - promoters60/4766602
aatcaa

SEQ ID NO: 135215 - DNA, 8 bp, Unknown
  misc_feature (1)..( 8): Result.003 file - promoters60/4766602
cattttta

SEQ ID NO: 135216 - DNA, 8 bp, Unknown
  misc_feature (1)..( 8): Result.003 file - promoters60/4766602
catttttt

SEQ ID NO: 135217 - DNA, 8 bp, Unknown
  misc_feature (1)..( 8): Result.003 file - promoters60/4766602
tttttttt

SEQ ID NO: 135218 - DNA, 8 bp, Unknown
  misc_feature (1)..( 8): Result.003 file - promoters60/4766602
attgtaag

SEQ ID NO: 135219 - DNA, 8 bp, Unknown
  misc_feature (1)..( 8): Result.003 file - promoters60/4766602
attttaaa

SEQ ID NO: 135220 - DNA, 8 bp, Unknown
  misc_feature (1)..( 8): Result.003 file - promoters60/4766602
cgtttaaa

SEQ ID NO: 135221 - DNA, 8 bp, Unknown
  misc_feature (1)..( 8): Result.003 file - promoters60/4766602
gtagttaa

SEQ ID NO: 135222 - DNA, 8 bp, Unknown
  misc_feature (1)..( 8): Result.003 file - promoters60/4766602
gtatttaa

SEQ ID NO: 135223 - DNA, 6 bp, Unknown
  misc_feature (1)..( 6): Result.003 file - promoters60/4766602
ttttta

SEQ ID NO: 135224 - DNA, 6 bp, Unknown
  misc_feature (1)..( 6): Result.003 file - promoters60/4766602
ttttta

SEQ ID NO: 135225 - DNA, 6 bp, Unknown
  misc_feature (1)..( 6): Result.003 file - promoters60/4766602
aacgta

SEQ ID NO: 135226 - DNA, 6 bp, Unknown
  misc_feature (1)..( 6): Result.003 file - promoters60/4766602
aacgta

SEQ ID NO: 135227 - DNA, 6 bp, Unknown
  misc_feature (1)..( 6): Result.003 file - promoters60/4766602
atttag

SEQ ID NO: 135228 - DNA, 6 bp, Unknown
  misc_feature (1)..( 6): Result.003 file - promoters60/4766602
atttag

SEQ ID NO: 135229 - DNA, 7 bp, Unknown
  misc_feature (1)..( 7): Result.003 file - promoters60/4766602
atccaaa

SEQ ID NO: 135230 - DNA, 7 bp, Unknown
  misc_feature (1)..( 7): Result.003 file - promoters60/4766602
atcgaaa

SEQ ID NO: 135231 - DNA, 11 bp, Unknown
  misc_feature (1)..( 11): Result.003 file - promoters60/4766620
tttgaatcaaa

SEQ ID NO: 135232 - DNA, 11 bp, Unknown
  misc_feature (1)..( 11): Result.003 file - promoters60/4766620
tttgcatcaaa

SEQ ID NO: 135233 - DNA, 6 bp, Unknown
  misc_feature (1)..( 6): Result.003 file - promoters60/4766620
attttg

SEQ ID NO: 135234 - DNA, 6 bp, Unknown
  misc_feature (1)..( 6): Result.003 file - promoters60/4766620
attttg

SEQ ID NO: 135235 - DNA, 7 bp, Unknown
  misc_feature (1)..( 7): Result.003 file - promoters60/4766620
taaaaat

SEQ ID NO: 135236 - DNA, 7 bp, Unknown
  misc_feature (1)..( 7): Result.003 file - promoters60/4766620
taaaaat

SEQ ID NO: 135237 - DNA, 8 bp, Unknown
  misc_feature (1)..( 8): Result.003 file - promoters60/4766620
atttcggc

SEQ ID NO: 135238 - DNA, 8 bp, Unknown
  misc_feature (1)..( 8): Result.003 file - promoters60/4766620
atttgggc

SEQ ID NO: 135239 - DNA, 7 bp, Unknown
  misc_feature (1)..( 7): Result.003 file - promoters60/4766620
aactgaa

SEQ ID NO: 135240 - DNA, 7 bp, Unknown
  misc_feature (1)..( 7): Result.003 file - promoters60/4766620
aactgaa

SEQ ID NO: 135241 - DNA, 7 bp, Unknown
  misc_feature (1)..( 7): Result.003 file - promoters60/4766620
tttggtg

SEQ ID NO: 135242 - DNA, 7 bp, Unknown
  misc_feature (1)..( 7): Result.003 file - promoters60/4766620
ttttgtg

SEQ ID NO: 135243 - DNA, 7 bp, Unknown
  misc_feature (1)..( 7): Result.003 file - promoters60/4766620
gtttatc

SEQ ID NO: 135244 - DNA, 7 bp, Unknown
  misc_feature (1)..( 7): Result.003 file - promoters60/4766620
gtttatc

SEQ ID NO: 135245 - DNA, 7 bp, Unknown
  misc_feature (1)..( 7): Result.003 file - promoters60/4766620
atcgtac

SEQ ID NO: 135246 - DNA, 7 bp, Unknown
  misc_feature (1)..( 7): Result.003 file - promoters60/4766620
atcttac

SEQ ID NO: 135247 - DNA, 6 bp, Unknown
  misc_feature (1)..( 6): Result.003 file - promoters60/4766620
ataaat

SEQ ID NO: 135248 - DNA, 6 bp, Unknown
  misc_feature (1)..( 6): Result.003 file - promoters60/4766620
ataaat

SEQ ID NO: 135249 - DNA, 7 bp, Unknown
  misc_feature (1)..( 7): Result.003 file - promoters60/4766620
ggtacaa

SEQ ID NO: 135250 - DNA, 7 bp, Unknown
  misc_feature (1)..( 7): Result.003 file - promoters60/4766620
ggttcaa

SEQ ID NO: 135251 - DNA, 8 bp, Unknown
  misc_feature (1)..( 8): Result.003 file - promoters60/4766620
cagtggat

SEQ ID NO: 135252 - DNA, 8 bp, Unknown
  misc_feature (1)..( 8): Result.003 file - promoters60/4766620
cagttgat

SEQ ID NO: 135253 - DNA, 6 bp, Unknown
  misc_feature (1)..( 6): Result.003 file - promoters60/4766620
aaattc

SEQ ID NO: 135254 - DNA, 6 bp, Unknown
  misc_feature (1)..( 6): Result.003 file - promoters60/4766620
aaattc

SEQ ID NO: 135255 - DNA, 7 bp, Unknown
  misc_feature (1)..( 7): Result.003 file - promoters60/4766620
aaatgac

SEQ ID NO: 135256 - DNA, 7 bp, Unknown
  misc_feature (1)..( 7): Result.003 file - promoters60/4766620
aaaggac

SEQ ID NO: 135257 - DNA, 6 bp, Unknown
  misc_feature (1)..( 6): Result.003 file - promoters60/4766620
taattt

SEQ ID NO: 135258 - DNA, 6 bp, Unknown
  misc_feature (1)..( 6): Result.003 file - promoters60/4766620
taattt

SEQ ID NO: 135259 - DNA, 10 bp, Unknown
  misc_feature (1)..( 10): Result.003 file - promoters60/4766624
ggaaatattt

SEQ ID NO: 135260 - DNA, 10 bp, Unknown
  misc_feature (1)..( 10): Result.003 file - promoters60/4766624
ggagatagag

SEQ ID NO: 135261 - DNA, 10 bp, Unknown
  misc_feature (1)..( 10): Result.003 file - promoters60/4766624
tgagaaagag

SEQ ID NO: 135262 - DNA, 10 bp, Unknown
  misc_feature (1)..( 10): Result.003 file - promoters60/4766624
ttctgtgata

SEQ ID NO: 135263 - DNA, 10 bp, Unknown
  misc_feature (1)..( 10): Result.003 file - promoters60/4766624
acctgagatt

SEQ ID NO: 135264 - DNA, 10 bp, Unknown
  misc_feature (1)..( 10): Result.003 file - promoters60/4766624
ctttgaaatt

SEQ ID NO: 135265 - DNA, 10 bp, Unknown
  misc_feature (1)..( 10): Result.003 file - promoters60/4766624
accggagaga

SEQ ID NO: 135266 - DNA, 10 bp, Unknown
  misc_feature (1)..( 10): Result.003 file - promoters60/4766624
tcaaatctat

SEQ ID NO: 135267 - DNA, 10 bp, Unknown
  misc_feature (1)..( 10): Result.003 file - promoters60/4766624
tcaactctat

SEQ ID NO: 135268 - DNA, 10 bp, Unknown
  misc_feature (1)..( 10): Result.003 file - promoters60/4766624
tcacctctaa

SEQ ID NO: 135269 - DNA, 8 bp, Unknown
  misc_feature (1)..( 8): Result.003 file - promoters60/4766624
gaacatga

SEQ ID NO: 135270 - DNA, 8 bp, Unknown
  misc_feature (1)..( 8): Result.003 file - promoters60/4766624
gaacattt

SEQ ID NO: 135271 - DNA, 8 bp, Unknown
  misc_feature (1)..( 8): Result.003 file - promoters60/4766624
caacgttt

SEQ ID NO: 135272 - DNA, 7 bp, Unknown
  misc_feature (1)..( 7): Result.003 file - promoters60/4766628
ctcctca

SEQ ID NO: 135273 - DNA, 7 bp, Unknown
  misc_feature (1)..( 7): Result.003 file - promoters60/4766628
ctcatca

SEQ ID NO: 135274 - DNA, 7 bp, Unknown
  misc_feature (1)..( 7): Result.003 file - promoters60/4766628
tatggaa

SEQ ID NO: 135275 - DNA, 7 bp, Unknown
  misc_feature (1)..( 7): Result.003 file - promoters60/4766628
tatcgaa

SEQ ID NO: 135276 - DNA, 6 bp, Unknown
  misc_feature (1)..( 6): Result.003 file - promoters60/4766628
agttga

SEQ ID NO: 135277 - DNA, 6 bp, Unknown
  misc_feature (1)..( 6): Result.003 file - promoters60/4766628
agttga

SEQ ID NO: 135278 - DNA, 8 bp, Unknown
  misc_feature (1)..( 8): Result.003 file - promoters60/4766628
caaaaaaa

SEQ ID NO: 135279 - DNA, 8 bp, Unknown
  misc_feature (1)..( 8): Result.003 file - promoters60/4766628
caaagaaa

SEQ ID NO: 135280 - DNA, 8 bp, Unknown
  misc_feature (1)..( 8): Result.003 file - promoters60/4766628
gtttcgtt

SEQ ID NO: 135281 - DNA, 8 bp, Unknown
  misc_feature (1)..( 8): Result.003 file - promoters60/4766628
gtttcgtt

SEQ ID NO: 135282 - DNA, 6 bp, Unknown
  misc_feature (1)..( 6): Result.003 file - promoters60/4766628
ccgact

SEQ ID NO: 135283 - DNA, 6 bp, Unknown
  misc_feature (1)..( 6): Result.003 file - promoters60/4766628
ccgact

SEQ ID NO: 135284 - DNA, 7 bp, Unknown
  misc_feature (1)..( 7): Result.003 file - promoters60/4766628
tatcttg

SEQ ID NO: 135285 - DNA, 7 bp, Unknown
  misc_feature (1)..( 7): Result.003 file - promoters60/4766628
tattttg

SEQ ID NO: 135286 - DNA, 7 bp, Unknown
  misc_feature (1)..( 7): Result.003 file - promoters60/4766628
aactaac

SEQ ID NO: 135287 - DNA, 7 bp, Unknown
  misc_feature (1)..( 7): Result.003 file - promoters60/4766628
aaccaac

SEQ ID NO: 135288 - DNA, 7 bp, Unknown
  misc_feature (1)..( 7): Result.003 file - promoters60/4766628
ttttcaa

SEQ ID NO: 135289 - DNA, 7 bp, Unknown
  misc_feature (1)..( 7): Result.003 file - promoters60/4766628
ttttcaa

SEQ ID NO: 135290 - DNA, 7 bp, Unknown
  misc_feature (1)..( 7): Result.003 file - promoters60/4766628
tttgtta

SEQ ID NO: 135291 - DNA, 7 bp, Unknown
  misc_feature (1)..( 7): Result.003 file - promoters60/4766628
tttatta

SEQ ID NO: 135292 - DNA, 7 bp, Unknown
  misc_feature (1)..( 7): Result.003 file - promoters60/4766628
tccccaa

SEQ ID NO: 135293 - DNA, 7 bp, Unknown
  misc_feature (1)..( 7): Result.003 file - promoters60/4766628
tccccaa

SEQ ID NO: 135294 - DNA, 6 bp, Unknown
  misc_feature (1)..( 6): Result.003 file - promoters60/4766628
cggaag

SEQ ID NO: 135295 - DNA, 6 bp, Unknown
  misc_feature (1)..( 6): Result.003 file - promoters60/4766628
cggaag

SEQ ID NO: 135296 - DNA, 9 bp, Unknown
  misc_feature (1)..( 9): Result.003 file - promoters60/4766628
tcatctttt

SEQ ID NO: 135297 - DNA, 9 bp, Unknown
  misc_feature (1)..( 9): Result.003 file - promoters60/4766628
tcatatttt

SEQ ID NO: 135298 - DNA, 6 bp, Unknown
  misc_feature (1)..( 6): Result.003 file - promoters60/4766654
tcttat

SEQ ID NO: 135299 - DNA, 6 bp, Unknown
  misc_feature (1)..( 6): Result.003 file - promoters60/4766654
tcttat

SEQ ID NO: 135300 - DNA, 7 bp, Unknown
  misc_feature (1)..( 7): Result.003 file - promoters60/4766654
gataaac

SEQ ID NO: 135301 - DNA, 7 bp, Unknown
  misc_feature (1)..( 7): Result.003 file - promoters60/4766654
gataaaa

SEQ ID NO: 135302 - DNA, 8 bp, Unknown
  misc_feature (1)..( 8): Result.003 file - promoters60/4766654
aatagaaa

SEQ ID NO: 135303 - DNA, 7 bp, Unknown
  misc_feature (1)..( 7): Result.003 file - promoters60/4766654
ttacttt

SEQ ID NO: 135304 - DNA, 7 bp, Unknown
  misc_feature (1)..( 7): Result.003 file - promoters60/4766654
ttatttt

SEQ ID NO: 135305 - DNA, 7 bp, Unknown
  misc_feature (1)..( 7): Result.003 file - promoters60/4766654
tttatat

SEQ ID NO: 135306 - DNA, 7 bp, Unknown
  misc_feature (1)..( 7): Result.003 file - promoters60/4766654
tttatat

SEQ ID NO: 135307 - DNA, 7 bp, Unknown
  misc_feature (1)..( 7): Result.003 file - promoters60/4766654
tttgtat

SEQ ID NO: 135308 - DNA, 7 bp, Unknown
  misc_feature (1)..( 7): Result.003 file - promoters60/4766654
ataatta

SEQ ID NO: 135309 - DNA, 7 bp, Unknown
  misc_feature (1)..( 7): Result.003 file - promoters60/4766654
atagtta

SEQ ID NO: 135310 - DNA, 8 bp, Unknown
  misc_feature (1)..( 8): Result.003 file - promoters60/4766654
gtttataa

SEQ ID NO: 135311 - DNA, 8 bp, Unknown
  misc_feature (1)..( 8): Result.003 file - promoters60/4766654
gttgataa

SEQ ID NO: 135312 - DNA, 8 bp, Unknown
  misc_feature (1)..( 8): Result.003 file - promoters60/4766654
ctttctaa

SEQ ID NO: 135313 - DNA, 8 bp, Unknown
  misc_feature (1)..( 8): Result.003 file - promoters60/4766654
aacactat

SEQ ID NO: 135314 - DNA, 8 bp, Unknown
  misc_feature (1)..( 8): Result.003 file - promoters60/4766654
aacacttt

SEQ ID NO: 135315 - DNA, 8 bp, Unknown
  misc_feature (1)..( 8): Result.003 file - promoters60/4766654
tacaattt

SEQ ID NO: 135316 - DNA, 6 bp, Unknown
  misc_feature (1)..( 6): Result.003 file - promoters60/4766654
aatcta

SEQ ID NO: 135317 - DNA, 6 bp, Unknown
  misc_feature (1)..( 6): Result.003 file - promoters60/4766654
aatcta

SEQ ID NO: 135318 - DNA, 6 bp, Unknown
  misc_feature (1)..( 6): Result.003 file - promoters60/4766654
tatata

SEQ ID NO: 135319 - DNA, 6 bp, Unknown
  misc_feature (1)..( 6): Result.003 file - promoters60/4766654
tatata

SEQ ID NO: 135320 - DNA, 6 bp, Unknown
  misc_feature (1)..( 6): Result.003 file - promoters60/4766654
ataaat

SEQ ID NO: 135321 - DNA, 6 bp, Unknown
  misc_feature (1)..( 6): Result.003 file - promoters60/4766654
ataaat

SEQ ID NO: 135322 - DNA, 6 bp, Unknown
  misc_feature (1)..( 6): Result.003 file - promoters60/4766654
ttgaat

SEQ ID NO: 135323 - DNA, 6 bp, Unknown
  misc_feature (1)..( 6): Result.003 file - promoters60/4766654
ttgaat

SEQ ID NO: 135324 - DNA, 6 bp, Unknown
  misc_feature (1)..( 6): Result.003 file - promoters60/4766654
aatcac

SEQ ID NO: 135325 - DNA, 6 bp, Unknown
  misc_feature (1)..( 6): Result.003 file - promoters60/4766654
aatcac

SEQ ID NO: 135326 - DNA, 7 bp, Unknown
  misc_feature (1)..( 7): Result.003 file - promoters60/4766654
tatactc

SEQ ID NO: 135327 - DNA, 7 bp, Unknown
  misc_feature (1)..( 7): Result.003 file - promoters60/4766654
tattctc

SEQ ID NO: 135328 - DNA, 8 bp, Unknown
  misc_feature (1)..( 8): Result.003 file - promoters60/4766654
agcattgc

SEQ ID NO: 135329 - DNA, 8 bp, Unknown
  misc_feature (1)..( 8): Result.003 file - promoters60/4766654
agctttgc

SEQ ID NO: 135330 - DNA, 6 bp, Unknown
  misc_feature (1)..( 6): Result.003 file - promoters60/4766654
acttgt

SEQ ID NO: 135331 - DNA, 6 bp, Unknown
  misc_feature (1)..( 6): Result.003 file - promoters60/4766654
acttgt

SEQ ID NO: 135332 - DNA, 9 bp, Unknown
  misc_feature (1)..( 9): Result.003 file - promoters60/4766654
aatgaacac

SEQ ID NO: 135333 - DNA, 9 bp, Unknown
  misc_feature (1)..( 9): Result.003 file - promoters60/4766654
aataaacac

SEQ ID NO: 135334 - DNA, 6 bp, Unknown
  misc_feature (1)..( 6): Result.003 file - promoters60/4766654
attcga

SEQ ID NO: 135335 - DNA, 6 bp, Unknown
  misc_feature (1)..( 6): Result.003 file - promoters60/4766654
attcga

SEQ ID NO: 135336 - DNA, 7 bp, Unknown
  misc_feature (1)..( 7): Result.003 file - promoters60/4766654
atataat

SEQ ID NO: 135337 - DNA, 7 bp, Unknown
  misc_feature (1)..( 7): Result.003 file - promoters60/4766654
atacaat

SEQ ID NO: 135338 - DNA, 7 bp, Unknown
  misc_feature (1)..( 7): Result.003 file - promoters60/4766654
acacaaa

SEQ ID NO: 135339 - DNA, 7 bp, Unknown
  misc_feature (1)..( 7): Result.003 file - promoters60/4766654
acaaaaa

SEQ ID NO: 135340 - DNA, 8 bp, Unknown
  misc_feature (1)..( 8): Result.003 file - promoters60/4766712
gtttcttc

SEQ ID NO: 135341 - DNA, 8 bp, Unknown
  misc_feature (1)..( 8): Result.003 file - promoters60/4766712
aattcttc

SEQ ID NO: 135342 - DNA, 8 bp, Unknown
  misc_feature (1)..( 8): Result.003 file - promoters60/4766712
ttttcttt

SEQ ID NO: 135343 - DNA, 8 bp, Unknown
  misc_feature (1)..( 8): Result.003 file - promoters60/4766712
ttttctgg

SEQ ID NO: 135344 - DNA, 8 bp, Unknown
  misc_feature (1)..( 8): Result.003 file - promoters60/4766712
atttattt

SEQ ID NO: 135345 - DNA, 8 bp, Unknown
  misc_feature (1)..( 8): Result.003 file - promoters60/4766712
ttttctag

SEQ ID NO: 135346 - DNA, 6 bp, Unknown
  misc_feature (1)..( 6): Result.003 file - promoters60/4766727
taacca

SEQ ID NO: 135347 - DNA, 6 bp, Unknown
  misc_feature (1)..( 6): Result.003 file - promoters60/4766727
taacca

SEQ ID NO: 135348 - DNA, 11 bp, Unknown
  misc_feature (1)..( 11): Result.003 file - promoters60/4766727
aaattacttac

SEQ ID NO: 135349 - DNA, 11 bp, Unknown
  misc_feature (1)..( 11): Result.003 file - promoters60/4766727
atattactata

SEQ ID NO: 135350 - DNA, 11 bp, Unknown
  misc_feature (1)..( 11): Result.003 file - promoters60/4766727
atagtacaata

SEQ ID NO: 135351 - DNA, 9 bp, Unknown
  misc_feature (1)..( 9): Result.003 file - promoters60/4766727
actaatgat

SEQ ID NO: 135352 - DNA, 9 bp, Unknown
  misc_feature (1)..( 9): Result.003 file - promoters60/4766727
tataatgat

SEQ ID NO: 135353 - DNA, 9 bp, Unknown
  misc_feature (1)..( 9): Result.003 file - promoters60/4766727
aataattac

SEQ ID NO: 135354 - DNA, 7 bp, Unknown
  misc_feature (1)..( 7): Result.003 file - promoters60/4766727
ggtttaa

SEQ ID NO: 135355 - DNA, 7 bp, Unknown
  misc_feature (1)..( 7): Result.003 file - promoters60/4766727
ggtttaa

SEQ ID NO: 135356 - DNA, 7 bp, Unknown
  misc_feature (1)..( 7): Result.003 file - promoters60/4766727
tttcttt

SEQ ID NO: 135357 - DNA, 7 bp, Unknown
  misc_feature (1)..( 7): Result.003 file - promoters60/4766727
ttttttt

SEQ ID NO: 135358 - DNA, 7 bp, Unknown
  misc_feature (1)..( 7): Result.003 file - promoters60/4766727
ccatttt

SEQ ID NO: 135359 - DNA, 7 bp, Unknown
  misc_feature (1)..( 7): Result.003 file - promoters60/4766727
ccatttt

SEQ ID NO: 135360 - DNA, 6 bp, Unknown
  misc_feature (1)..( 6): Result.003 file - promoters60/4766727
acataa

SEQ ID NO: 135361 - DNA, 6 bp, Unknown
  misc_feature (1)..( 6): Result.003 file - promoters60/4766727
acataa

SEQ ID NO: 135362 - DNA, 10 bp, Unknown
  misc_feature (1)..( 10): Result.003 file - promoters60/4766727
acatacatta

SEQ ID NO: 135363 - DNA, 10 bp, Unknown
  misc_feature (1)..( 10): Result.003 file - promoters60/4766727
atataaatta

SEQ ID NO: 135364 - DNA, 10 bp, Unknown
  misc_feature (1)..( 10): Result.003 file - promoters60/4766727
atatgaatca

SEQ ID NO: 135365 - DNA, 7 bp, Unknown
  misc_feature (1)..( 7): Result.003 file - promoters60/4766727
atattat

SEQ ID NO: 135366 - DNA, 7 bp, Unknown
  misc_feature (1)..( 7): Result.003 file - promoters60/4766727
atattat

SEQ ID NO: 135367 - DNA, 11 bp, Unknown
  misc_feature (1)..( 11): Result.003 file - promoters60/4766727
tagattttttt

SEQ ID NO: 135368 - DNA, 11 bp, Unknown
  misc_feature (1)..( 11): Result.003 file - promoters60/4766727
tagattttttt

SEQ ID NO: 135369 - DNA, 6 bp, Unknown
  misc_feature (1)..( 6): Result.003 file - promoters60/4766727
taaaaa

SEQ ID NO: 135370 - DNA, 6 bp, Unknown
  misc_feature (1)..( 6): Result.003 file - promoters60/4766727
taaaaa

SEQ ID NO: 135371 - DNA, 6 bp, Unknown
  misc_feature (1)..( 6): Result.003 file - promoters60/4766727
aaaaca

SEQ ID NO: 135372 - DNA, 6 bp, Unknown
  misc_feature (1)..( 6): Result.003 file - promoters60/4766727
aaaaca

SEQ ID NO: 135373 - DNA, 11 bp, Unknown
  misc_feature (1)..( 11): Result.003 file - promoters60/4766727
aaatggcccaa

SEQ ID NO: 135374 - DNA, 11 bp, Unknown
  misc_feature (1)..( 11): Result.003 file - promoters60/4766727
aaaaggcccaa

SEQ ID NO: 135375 - DNA, 6 bp, Unknown
  misc_feature (1)..( 6): Result.003 file - promoters60/4766727
atcaaa

SEQ ID NO: 135376 - DNA, 6 bp, Unknown
  misc_feature (1)..( 6): Result.003 file - promoters60/4766727
atcaaa

SEQ ID NO: 135377 - DNA, 6 bp, Unknown
  misc_feature (1)..( 6): Result.003 file - promoters60/4766727
tacaac

SEQ ID NO: 135378 - DNA, 6 bp, Unknown
  misc_feature (1)..( 6): Result.003 file - promoters60/4766727
tacaac

SEQ ID NO: 135379 - DNA, 7 bp, Unknown
  misc_feature (1)..( 7): Result.003 file - promoters60/4766727
taatatc

SEQ ID NO: 135380 - DNA, 7 bp, Unknown
  misc_feature (1)..( 7): Result.003 file - promoters60/4766727
taacatc

SEQ ID NO: 135381 - DNA, 8 bp, Unknown
  misc_feature (1)..( 8): Result.003 file - promoters60/4766727
atagcaca

SEQ ID NO: 135382 - DNA, 8 bp, Unknown
  misc_feature (1)..( 8): Result.003 file - promoters60/4766727
atagtaca

SEQ ID NO: 135383 - DNA, 8 bp, Unknown
  misc_feature (1)..( 8): Result.003 file - promoters60/4766727
atcaaata

SEQ ID NO: 135384 - DNA, 8 bp, Unknown
  misc_feature (1)..( 8): Result.003 file - promoters60/4766727
atcagata

SEQ ID NO: 135385 - DNA, 6 bp, Unknown
  misc_feature (1)..( 6): Result.003 file - promoters60/4766727
taaaaa

SEQ ID NO: 135386 - DNA, 6 bp, Unknown
  misc_feature (1)..( 6): Result.003 file - promoters60/4766727
taaaaa

SEQ ID NO: 135387 - DNA, 7 bp, Unknown
  misc_feature (1)..( 7): Result.003 file - promoters60/4766727
aaaatat

SEQ ID NO: 135388 - DNA, 7 bp, Unknown
  misc_feature (1)..( 7): Result.003 file - promoters60/4766727
aaaatat

SEQ ID NO: 135389 - DNA, 7 bp, Unknown
  misc_feature (1)..( 7): Result.003 file - promoters60/4766727
aaagaag

SEQ ID NO: 135390 - DNA, 7 bp, Unknown
  misc_feature (1)..( 7): Result.003 file - promoters60/4766727
aaaaaag

SEQ ID NO: 135391 - DNA, 8 bp, Unknown
  misc_feature (1)..( 8): Result.003 file - promoters60/4766727
aaatatag

SEQ ID NO: 135392 - DNA, 8 bp, Unknown
  misc_feature (1)..( 8): Result.003 file - promoters60/4766727
aaacatag

SEQ ID NO: 135393 - DNA, 10 bp, Unknown
  misc_feature (1)..( 10): Result.003 file - promoters60/4766738
aatactaaaa

SEQ ID NO: 135394 - DNA, 10 bp, Unknown
  misc_feature (1)..( 10): Result.003 file - promoters60/4766738
aatattaaga

SEQ ID NO: 135395 - DNA, 10 bp, Unknown
  misc_feature (1)..( 10): Result.003 file - promoters60/4766738
gatagtaaaa

SEQ ID NO: 135396 - DNA, 6 bp, Unknown
  misc_feature (1)..( 6): Result.003 file - promoters60/4766738
aagaat

SEQ ID NO: 135397 - DNA, 6 bp, Unknown
  misc_feature (1)..( 6): Result.003 file - promoters60/4766738
aagaat

SEQ ID NO: 135398 - DNA, 6 bp, Unknown
  misc_feature (1)..( 6): Result.003 file - promoters60/4766738
cttttt

SEQ ID NO: 135399 - DNA, 6 bp, Unknown
  misc_feature (1)..( 6): Result.003 file - promoters60/4766738
cttttt

SEQ ID NO: 135400 - DNA, 6 bp, Unknown
  misc_feature (1)..( 6): Result.003 file - promoters60/4766738
ttagta

SEQ ID NO: 135401 - DNA, 6 bp, Unknown
  misc_feature (1)..( 6): Result.003 file - promoters60/4766738
ttagta

SEQ ID NO: 135402 - DNA, 6 bp, Unknown
  misc_feature (1)..( 6): Result.003 file - promoters60/4766738
ggttga

SEQ ID NO: 135403 - DNA, 6 bp, Unknown
  misc_feature (1)..( 6): Result.003 file - promoters60/4766738
ggttga

SEQ ID NO: 135404 - DNA, 7 bp, Unknown
  misc_feature (1)..( 7): Result.003 file - promoters60/4766738
aaacgaa

SEQ ID NO: 135405 - DNA, 7 bp, Unknown
  misc_feature (1)..( 7): Result.003 file - promoters60/4766738
aaaagaa

SEQ ID NO: 135406 - DNA, 10 bp, Unknown
  misc_feature (1)..( 10): Result.003 file - promoters60/4766738
agaaaagaag

SEQ ID NO: 135407 - DNA, 10 bp, Unknown
  misc_feature (1)..( 10): Result.003 file - promoters60/4766738
agaaaaaaag

SEQ ID NO: 135408 - DNA, 8 bp, Unknown
  misc_feature (1)..( 8): Result.003 file - promoters60/4766738
ttattgtc

SEQ ID NO: 135409 - DNA, 8 bp, Unknown
  misc_feature (1)..( 8): Result.003 file - promoters60/4766738
ttaatgtc

SEQ ID NO: 135410 - DNA, 6 bp, Unknown
  misc_feature (1)..( 6): Result.003 file - promoters60/4766738
gtttcc

SEQ ID NO: 135411 - DNA, 6 bp, Unknown
  misc_feature (1)..( 6): Result.003 file - promoters60/4766738
gtttcc

SEQ ID NO: 135412 - DNA, 7 bp, Unknown
  misc_feature (1)..( 7): Result.003 file - promoters60/4766738
catcact

SEQ ID NO: 135413 - DNA, 7 bp, Unknown
  misc_feature (1)..( 7): Result.003 file - promoters60/4766738
cattact

SEQ ID NO: 135414 - DNA, 6 bp, Unknown
  misc_feature (1)..( 6): Result.003 file - promoters60/4766738
tattct

SEQ ID NO: 135415 - DNA, 6 bp, Unknown
  misc_feature (1)..( 6): Result.003 file - promoters60/4766738
tattct

SEQ ID NO: 135416 - DNA, 7 bp, Unknown
  misc_feature (1)..( 7): Result.003 file - promoters60/4766738
cttatct

SEQ ID NO: 135417 - DNA, 7 bp, Unknown
  misc_feature (1)..( 7): Result.003 file - promoters60/4766738
cttgtct

SEQ ID NO: 135418 - DNA, 6 bp, Unknown
  misc_feature (1)..( 6): Result.003 file - promoters60/4766738
tctgaa

SEQ ID NO: 135419 - DNA, 6 bp, Unknown
  misc_feature (1)..( 6): Result.003 file - promoters60/4766738
tctgaa

SEQ ID NO: 135420 - DNA, 7 bp, Unknown
  misc_feature (1)..( 7): Result.003 file - promoters60/4766738
tatcatt

SEQ ID NO: 135421 - DNA, 7 bp, Unknown
  misc_feature (1)..( 7): Result.003 file - promoters60/4766738
tatgatt

SEQ ID NO: 135422 - DNA, 7 bp, Unknown
  misc_feature (1)..( 7): Result.003 file - promoters60/4766738
gaatttg

SEQ ID NO: 135423 - DNA, 7 bp, Unknown
  misc_feature (1)..( 7): Result.003 file - promoters60/4766738
gaatttg

SEQ ID NO: 135424 - DNA, 7 bp, Unknown
  misc_feature (1)..( 7): Result.003 file - promoters60/4766738
tttgatt

SEQ ID NO: 135425 - DNA, 7 bp, Unknown
  misc_feature (1)..( 7): Result.003 file - promoters60/4766738
tttgatt

SEQ ID NO: 135426 - DNA, 7 bp, Unknown
  misc_feature (1)..( 7): Result.003 file - promoters60/4766738
ttagatc

SEQ ID NO: 135427 - DNA, 7 bp, Unknown
  misc_feature (1)..( 7): Result.003 file - promoters60/4766738
ttatatc

SEQ ID NO: 135428 - DNA, 6 bp, Unknown
  misc_feature (1)..( 6): Result.003 file - promoters60/4766738
catttg

SEQ ID NO: 135429 - DNA, 6 bp, Unknown
  misc_feature (1)..( 6): Result.003 file - promoters60/4766738
catttg

SEQ ID NO: 135430 - DNA, 8 bp, Unknown
  misc_feature (1)..( 8): Result.003 file - promoters60/4766754
attatatg

SEQ ID NO: 135431 - DNA, 8 bp, Unknown
  misc_feature (1)..( 8): Result.003 file - promoters60/4766754
attacatg

SEQ ID NO: 135432 - DNA, 6 bp, Unknown
  misc_feature (1)..( 6): Result.003 file - promoters60/4766754
gacatt

SEQ ID NO: 135433 - DNA, 6 bp, Unknown
  misc_feature (1)..( 6): Result.003 file - promoters60/4766754
gacatt

SEQ ID NO: 135434 - DNA, 7 bp, Unknown
  misc_feature (1)..( 7): Result.003 file - promoters60/4766754
atatttt

SEQ ID NO: 135435 - DNA, 7 bp, Unknown
  misc_feature (1)..( 7): Result.003 file - promoters60/4766754
atatttt

SEQ ID NO: 135436 - DNA, 6 bp, Unknown
  misc_feature (1)..( 6): Result.003 file - promoters60/4766754
ataaat

SEQ ID NO: 135437 - DNA, 6 bp, Unknown
  misc_feature (1)..( 6): Result.003 file - promoters60/4766754
ataaat

SEQ ID NO: 135438 - DNA, 16 bp, Unknown
  misc_feature (1)..( 16): Result.003 file - promoters60/4766754
tgttaatttttttttg

SEQ ID NO: 135439 - DNA, 16 bp, Unknown
  misc_feature (1)..( 16): Result.003 file - promoters60/4766754
tgtttatttatttttg

SEQ ID NO: 135440 - DNA, 6 bp, Unknown
  misc_feature (1)..( 6): Result.003 file - promoters60/4766754
ccaaaa

SEQ ID NO: 135441 - DNA, 6 bp, Unknown
  misc_feature (1)..( 6): Result.003 file - promoters60/4766754
ccaaaa

SEQ ID NO: 135442 - DNA, 8 bp, Unknown
  misc_feature (1)..( 8): Result.003 file - promoters60/4766754
agtataaa

SEQ ID NO: 135443 - DNA, 8 bp, Unknown
  misc_feature (1)..( 8): Result.003 file - promoters60/4766754
agtatata

SEQ ID NO: 135444 - DNA, 8 bp, Unknown
  misc_feature (1)..( 8): Result.003 file - promoters60/4766754
tgtatata

SEQ ID NO: 135445 - DNA, 6 bp, Unknown
  misc_feature (1)..( 6): Result.003 file - promoters60/4766754
tataaa

SEQ ID NO: 135446 - DNA, 6 bp, Unknown
  misc_feature (1)..( 6): Result.003 file - promoters60/4766754
tataaa

SEQ ID NO: 135447 - DNA, 7 bp, Unknown
  misc_feature (1)..( 7): Result.003 file - promoters60/4766754
tggctaa

SEQ ID NO: 135448 - DNA, 7 bp, Unknown
  misc_feature (1)..( 7): Result.003 file - promoters60/4766754
tggataa

SEQ ID NO: 135449 - DNA, 7 bp, Unknown
  misc_feature (1)..( 7): Result.003 file - promoters60/4766754
ggtgttg

SEQ ID NO: 135450 - DNA, 7 bp, Unknown
  misc_feature (1)..( 7): Result.003 file - promoters60/4766754
ggttttg

SEQ ID NO: 135451 - DNA, 7 bp, Unknown
  misc_feature (1)..( 7): Result.003 file - promoters60/4766754
aattaat

SEQ ID NO: 135452 - DNA, 7 bp, Unknown
  misc_feature (1)..( 7): Result.003 file - promoters60/4766754
aattaat

SEQ ID NO: 135453 - DNA, 8 bp, Unknown
  misc_feature (1)..( 8): Result.003 file - promoters60/4766754
ttttttgg

SEQ ID NO: 135454 - DNA, 8 bp, Unknown
  misc_feature (1)..( 8): Result.003 file - promoters60/4766754
tttgttgg

SEQ ID NO: 135455 - DNA, 7 bp, Unknown
  misc_feature (1)..( 7): Result.003 file - promoters60/4766754
tcgaatt

SEQ ID NO: 135456 - DNA, 7 bp, Unknown
  misc_feature (1)..( 7): Result.003 file - promoters60/4766754
tcgtatt

SEQ ID NO: 135457 - DNA, 6 bp, Unknown
  misc_feature (1)..( 6): Result.003 file - promoters60/4766754
agtaaa

SEQ ID NO: 135458 - DNA, 6 bp, Unknown
  misc_feature (1)..( 6): Result.003 file - promoters60/4766754
agtaaa

SEQ ID NO: 135459 - DNA, 7 bp, Unknown
  misc_feature (1)..( 7): Result.003 file - promoters60/4766754
aatcggg

SEQ ID NO: 135460 - DNA, 7 bp, Unknown
  misc_feature (1)..( 7): Result.003 file - promoters60/4766754
aattggg

SEQ ID NO: 135461 - DNA, 8 bp, Unknown
  misc_feature (1)..( 8): Result.003 file - promoters60/4766754
gaaagaaa

SEQ ID NO: 135462 - DNA, 8 bp, Unknown
  misc_feature (1)..( 8): Result.003 file - promoters60/4766754
gaaacaaa

SEQ ID NO: 135463 - DNA, 10 bp, Unknown
  misc_feature (1)..( 10): Result.003 file - promoters60/4766754
ggaaaagaaa

SEQ ID NO: 135464 - DNA, 10 bp, Unknown
  misc_feature (1)..( 10): Result.003 file - promoters60/4766754
ggaaatgaaa

SEQ ID NO: 135465 - DNA, 7 bp, Unknown
  misc_feature (1)..( 7): Result.003 file - promoters60/4766754
cccacta

SEQ ID NO: 135466 - DNA, 7 bp, Unknown
  misc_feature (1)..( 7): Result.003 file - promoters60/4766754
cccacta

SEQ ID NO: 135467 - DNA, 9 bp, Unknown
  misc_feature (1)..( 9): Result.003 file - promoters60/4766754
aaagaaaag

SEQ ID NO: 135468 - DNA, 9 bp, Unknown
  misc_feature (1)..( 9): Result.003 file - promoters60/4766754
aaagtaaag

SEQ ID NO: 135469 - DNA, 9 bp, Unknown
  misc_feature (1)..( 9): Result.003 file - promoters60/4766776
aaaaatgaa

SEQ ID NO: 135470 - DNA, 9 bp, Unknown
  misc_feature (1)..( 9): Result.003 file - promoters60/4766776
aaaaaagaa

SEQ ID NO: 135471 - DNA, 6 bp, Unknown
  misc_feature (1)..( 6): Result.003 file - promoters60/4766776
gtgtaa

SEQ ID NO: 135472 - DNA, 6 bp, Unknown
  misc_feature (1)..( 6): Result.003 file - promoters60/4766776
gtgtaa

SEQ ID NO: 135473 - DNA, 7 bp, Unknown
  misc_feature (1)..( 7): Result.003 file - promoters60/4766776
gaagaaa

SEQ ID NO: 135474 - DNA, 7 bp, Unknown
  misc_feature (1)..( 7): Result.003 file - promoters60/4766776
gaagaaa

SEQ ID NO: 135475 - DNA, 8 bp, Unknown
  misc_feature (1)..( 8): Result.003 file - promoters60/4766776
ttttatca

SEQ ID NO: 135476 - DNA, 8 bp, Unknown
  misc_feature (1)..( 8): Result.003 file - promoters60/4766776
ttttgtca

SEQ ID NO: 135477 - DNA, 9 bp, Unknown
  misc_feature (1)..( 9): Result.003 file - promoters60/4766776
atatatatc

SEQ ID NO: 135478 - DNA, 9 bp, Unknown
  misc_feature (1)..( 9): Result.003 file - promoters60/4766776
atatttatt

SEQ ID NO: 135479 - DNA, 9 bp, Unknown
  misc_feature (1)..( 9): Result.003 file - promoters60/4766776
ctatgtatc

SEQ ID NO: 135480 - DNA, 6 bp, Unknown
  misc_feature (1)..( 6): Result.003 file - promoters60/4766776
aaatat

SEQ ID NO: 135481 - DNA, 6 bp, Unknown
  misc_feature (1)..( 6): Result.003 file - promoters60/4766776
aaatat

SEQ ID NO: 135482 - DNA, 6 bp, Unknown
  misc_feature (1)..( 6): Result.003 file - promoters60/4766776
aaatat

SEQ ID NO: 135483 - DNA, 8 bp, Unknown
  misc_feature (1)..( 8): Result.003 file - promoters60/4766776
atatatac

SEQ ID NO: 135484 - DNA, 8 bp, Unknown
  misc_feature (1)..( 8): Result.003 file - promoters60/4766776
atatgtac

SEQ ID NO: 135485 - DNA, 8 bp, Unknown
  misc_feature (1)..( 8): Result.003 file - promoters60/4766776
aaatcaat

SEQ ID NO: 135486 - DNA, 8 bp, Unknown
  misc_feature (1)..( 8): Result.003 file - promoters60/4766776
aaaacaac

SEQ ID NO: 135487 - DNA, 8 bp, Unknown
  misc_feature (1)..( 8): Result.003 file - promoters60/4766776
aaattaat

SEQ ID NO: 135488 - DNA, 7 bp, Unknown
  misc_feature (1)..( 7): Result.003 file - promoters60/4766776
aatcaaa

SEQ ID NO: 135489 - DNA, 7 bp, Unknown
  misc_feature (1)..( 7): Result.003 file - promoters60/4766776
aatcaaa

SEQ ID NO: 135490 - DNA, 7 bp, Unknown
  misc_feature (1)..( 7): Result.003 file - promoters60/4766776
attcaat

SEQ ID NO: 135491 - DNA, 7 bp, Unknown
  misc_feature (1)..( 7): Result.003 file - promoters60/4766776
attaaat

SEQ ID NO: 135492 - DNA, 7 bp, Unknown
  misc_feature (1)..( 7): Result.003 file - promoters60/4766776
acacgta

SEQ ID NO: 135493 - DNA, 7 bp, Unknown
  misc_feature (1)..( 7): Result.003 file - promoters60/4766776
acacgta

SEQ ID NO: 135494 - DNA, 7 bp, Unknown
  misc_feature (1)..( 7): Result.003 file - promoters60/4766776
tttttat

SEQ ID NO: 135495 - DNA, 7 bp, Unknown
  misc_feature (1)..( 7): Result.003 file - promoters60/4766776
tttatat

SEQ ID NO: 135496 - DNA, 12 bp, Unknown
  misc_feature (1)..( 12): Result.003 file - promoters60/4766776
atcttaagatat

SEQ ID NO: 135497 - DNA, 12 bp, Unknown
  misc_feature (1)..( 12): Result.003 file - promoters60/4766776
atcttaaaatat

SEQ ID NO: 135498 - DNA, 12 bp, Unknown
  misc_feature (1)..( 12): Result.003 file - promoters60/4766776
cgccaaaaatat

SEQ ID NO: 135499 - DNA, 7 bp, Unknown
  misc_feature (1)..( 7): Result.003 file - promoters60/4766776
ataataa

SEQ ID NO: 135500 - DNA, 7 bp, Unknown
  misc_feature (1)..( 7): Result.003 file - promoters60/4766776
atattaa

SEQ ID NO: 135501 - DNA, 7 bp, Unknown
  misc_feature (1)..( 7): Result.003 file - promoters60/4766776
aaatata

SEQ ID NO: 135502 - DNA, 7 bp, Unknown
  misc_feature (1)..( 7): Result.003 file - promoters60/4766776
aaaaata

SEQ ID NO: 135503 - DNA, 6 bp, Unknown
  misc_feature (1)..( 6): Result.003 file - promoters60/4766776
agacac

SEQ ID NO: 135504 - DNA, 6 bp, Unknown
  misc_feature (1)..( 6): Result.003 file - promoters60/4766776
agacac

SEQ ID NO: 135505 - DNA, 7 bp, Unknown
  misc_feature (1)..( 7): Result.003 file - promoters60/4766776
tccatct

SEQ ID NO: 135506 - DNA, 7 bp, Unknown
  misc_feature (1)..( 7): Result.003 file - promoters60/4766776
tccctct

SEQ ID NO: 135507 - DNA, 7 bp, Unknown
  misc_feature (1)..( 7): Result.003 file - promoters60/4766776
tctaacc

SEQ ID NO: 135508 - DNA, 7 bp, Unknown
  misc_feature (1)..( 7): Result.003 file - promoters60/4766776
tctcacc

SEQ ID NO: 135509 - DNA, 6 bp, Unknown
  misc_feature (1)..( 6): Result.003 file - promoters60/4766776
aaataa

SEQ ID NO: 135510 - DNA, 6 bp, Unknown
  misc_feature (1)..( 6): Result.003 file - promoters60/4766776
aaataa

SEQ ID NO: 135511 - DNA, 6 bp, Unknown
  misc_feature (1)..( 6): Result.003 file - promoters60/4766776
aattca

SEQ ID NO: 135512 - DNA, 6 bp, Unknown
  misc_feature (1)..( 6): Result.003 file - promoters60/4766776
aattca

SEQ ID NO: 135513 - DNA, 10 bp, Unknown
  misc_feature (1)..( 10): Result.003 file - promoters60/4766776
aaaatcttta

SEQ ID NO: 135514 - DNA, 10 bp, Unknown
  misc_feature (1)..( 10): Result.003 file - promoters60/4766776
aaattcttta

SEQ ID NO: 135515 - DNA, 10 bp, Unknown
  misc_feature (1)..( 10): Result.003 file - promoters60/4766784
acaagatttg

SEQ ID NO: 135516 - DNA, 10 bp, Unknown
  misc_feature (1)..( 10): Result.003 file - promoters60/4766784
acaagttttt

SEQ ID NO: 135517 - DNA, 10 bp, Unknown
  misc_feature (1)..( 10): Result.003 file - promoters60/4766784
cctagaattg

SEQ ID NO: 135518 - DNA, 6 bp, Unknown
  misc_feature (1)..( 6): Result.003 file - promoters60/4766784
tccata

SEQ ID NO: 135519 - DNA, 6 bp, Unknown
  misc_feature (1)..( 6): Result.003 file - promoters60/4766784
tccata

SEQ ID NO: 135520 - DNA, 7 bp, Unknown
  misc_feature (1)..( 7): Result.003 file - promoters60/4766784
atcaaga

SEQ ID NO: 135521 - DNA, 7 bp, Unknown
  misc_feature (1)..( 7): Result.003 file - promoters60/4766784
atcgaga

SEQ ID NO: 135522 - DNA, 6 bp, Unknown
  misc_feature (1)..( 6): Result.003 file - promoters60/4766784
ctgaaa

SEQ ID NO: 135523 - DNA, 6 bp, Unknown
  misc_feature (1)..( 6): Result.003 file - promoters60/4766784
ctgaaa

SEQ ID NO: 135524 - DNA, 7 bp, Unknown
  misc_feature (1)..( 7): Result.003 file - promoters60/4766784
ccagatt

SEQ ID NO: 135525 - DNA, 7 bp, Unknown
  misc_feature (1)..( 7): Result.003 file - promoters60/4766784
ccacatt

SEQ ID NO: 135526 - DNA, 6 bp, Unknown
  misc_feature (1)..( 6): Result.003 file - promoters60/4766784
attaat

SEQ ID NO: 135527 - DNA, 6 bp, Unknown
  misc_feature (1)..( 6): Result.003 file - promoters60/4766784
attaat

SEQ ID NO: 135528 - DNA, 6 bp, Unknown
  misc_feature (1)..( 6): Result.003 file - promoters60/4766784
ttaatt

SEQ ID NO: 135529 - DNA, 6 bp, Unknown
  misc_feature (1)..( 6): Result.003 file - promoters60/4766784
ttaatt

SEQ ID NO: 135530 - DNA, 6 bp, Unknown
  misc_feature (1)..( 6): Result.003 file - promoters60/4766784
tttgac

SEQ ID NO: 135531 - DNA, 6 bp, Unknown
  misc_feature (1)..( 6): Result.003 file - promoters60/4766784
tttgac

SEQ ID NO: 135532 - DNA, 6 bp, Unknown
  misc_feature (1)..( 6): Result.003 file - promoters60/4766784
caaaaa

SEQ ID NO: 135533 - DNA, 6 bp, Unknown
  misc_feature (1)..( 6): Result.003 file - promoters60/4766784
caaaaa

SEQ ID NO: 135534 - DNA, 6 bp, Unknown
  misc_feature (1)..( 6): Result.003 file - promoters60/4766784
ttttta

SEQ ID NO: 135535 - DNA, 6 bp, Unknown
  misc_feature (1)..( 6): Result.003 file - promoters60/4766784
ttttta

SEQ ID NO: 135536 - DNA, 10 bp, Unknown
  misc_feature (1)..( 10): Result.003 file - promoters60/4766784
tatattatta

SEQ ID NO: 135537 - DNA, 10 bp, Unknown
  misc_feature (1)..( 10): Result.003 file - promoters60/4766784
tatattctta

SEQ ID NO: 135538 - DNA, 7 bp, Unknown
  misc_feature (1)..( 7): Result.003 file - promoters60/4766784
aaaataa

SEQ ID NO: 135539 - DNA, 7 bp, Unknown
  misc_feature (1)..( 7): Result.003 file - promoters60/4766784
aaattaa

SEQ ID NO: 135540 - DNA, 7 bp, Unknown
  misc_feature (1)..( 7): Result.003 file - promoters60/4766784
tgttaaa

SEQ ID NO: 135541 - DNA, 7 bp, Unknown
  misc_feature (1)..( 7): Result.003 file - promoters60/4766784
tgttaaa

SEQ ID NO: 135542 - DNA, 7 bp, Unknown
  misc_feature (1)..( 7): Result.003 file - promoters60/4766784
aatataa

SEQ ID NO: 135543 - DNA, 7 bp, Unknown
  misc_feature (1)..( 7): Result.003 file - promoters60/4766784
aatgtaa

SEQ ID NO: 135544 - DNA, 6 bp, Unknown
  misc_feature (1)..( 6): Result.003 file - promoters60/4766784
ataaaa

SEQ ID NO: 135545 - DNA, 6 bp, Unknown
  misc_feature (1)..( 6): Result.003 file - promoters60/4766784
ataaaa

SEQ ID NO: 135546 - DNA, 6 bp, Unknown
  misc_feature (1)..( 6): Result.003 file - promoters60/4766816
gattta

SEQ ID NO: 135547 - DNA, 6 bp, Unknown
  misc_feature (1)..( 6): Result.003 file - promoters60/4766816
gattta

SEQ ID NO: 135548 - DNA, 7 bp, Unknown
  misc_feature (1)..( 7): Result.003 file - promoters60/4766816
aaaatat

SEQ ID NO: 135549 - DNA, 7 bp, Unknown
  misc_feature (1)..( 7): Result.003 file - promoters60/4766816
aaaatat

SEQ ID NO: 135550 - DNA, 7 bp, Unknown
  misc_feature (1)..( 7): Result.003 file - promoters60/4766816
tatacaa

SEQ ID NO: 135551 - DNA, 7 bp, Unknown
  misc_feature (1)..( 7): Result.003 file - promoters60/4766816
tatgcaa

SEQ ID NO: 135552 - DNA, 7 bp, Unknown
  misc_feature (1)..( 7): Result.003 file - promoters60/4766816
tatattt

SEQ ID NO: 135553 - DNA, 7 bp, Unknown
  misc_feature (1)..( 7): Result.003 file - promoters60/4766816
tatattt

SEQ ID NO: 135554 - DNA, 6 bp, Unknown
  misc_feature (1)..( 6): Result.003 file - promoters60/4766816
tatact

SEQ ID NO: 135555 - DNA, 6 bp, Unknown
  misc_feature (1)..( 6): Result.003 file - promoters60/4766816
tatact

SEQ ID NO: 135556 - DNA, 7 bp, Unknown
  misc_feature (1)..( 7): Result.003 file - promoters60/4766816
tttttaa

SEQ ID NO: 135557 - DNA, 7 bp, Unknown
  misc_feature (1)..( 7): Result.003 file - promoters60/4766816
tttttaa

SEQ ID NO: 135558 - DNA, 7 bp, Unknown
  misc_feature (1)..( 7): Result.003 file - promoters60/4766816
taatttt

SEQ ID NO: 135559 - DNA, 7 bp, Unknown
  misc_feature (1)..( 7): Result.003 file - promoters60/4766816
taatttt

SEQ ID NO: 135560 - DNA, 9 bp, Unknown
  misc_feature (1)..( 9): Result.003 file - promoters60/4766816
ttttaataa

SEQ ID NO: 135561 - DNA, 9 bp, Unknown
  misc_feature (1)..( 9): Result.003 file - promoters60/4766816
tttttataa

SEQ ID NO: 135562 - DNA, 6 bp, Unknown
  misc_feature (1)..( 6): Result.003 file - promoters60/4766816
aaaact

SEQ ID NO: 135563 - DNA, 6 bp, Unknown
  misc_feature (1)..( 6): Result.003 file - promoters60/4766816
aaaact

SEQ ID NO: 135564 - DNA, 6 bp, Unknown
  misc_feature (1)..( 6): Result.003 file - promoters60/4766816
aataaa

SEQ ID NO: 135565 - DNA, 6 bp, Unknown
  misc_feature (1)..( 6): Result.003 file - promoters60/4766816
aataaa

SEQ ID NO: 135566 - DNA, 6 bp, Unknown
  misc_feature (1)..( 6): Result.003 file - promoters60/4766816
tctctc

SEQ ID NO: 135567 - DNA, 6 bp, Unknown
  misc_feature (1)..( 6): Result.003 file - promoters60/4766816
tctctc

SEQ ID NO: 135568 - DNA, 9 bp, Unknown
  misc_feature (1)..( 9): Result.003 file - promoters60/4766816
taaatttgg

SEQ ID NO: 135569 - DNA, 9 bp, Unknown
  misc_feature (1)..( 9): Result.003 file - promoters60/4766816
caaatatgg

SEQ ID NO: 135570 - DNA, 9 bp, Unknown
  misc_feature (1)..( 9): Result.003 file - promoters60/4766816
caaatatgc

SEQ ID NO: 135571 - DNA, 7 bp, Unknown
  misc_feature (1)..( 7): Result.003 file - promoters60/4766816
tatattt

SEQ ID NO: 135572 - DNA, 7 bp, Unknown
  misc_feature (1)..( 7): Result.003 file - promoters60/4766816
tatattt

SEQ ID NO: 135573 - DNA, 7 bp, Unknown
  misc_feature (1)..( 7): Result.003 file - promoters60/4766816
agtactt

SEQ ID NO: 135574 - DNA, 7 bp, Unknown
  misc_feature (1)..( 7): Result.003 file - promoters60/4766816
agtactt

SEQ ID NO: 135575 - DNA, 11 bp, Unknown
  misc_feature (1)..( 11): Result.003 file - promoters60/4766826
aaacaaatttt

SEQ ID NO: 135576 - DNA, 11 bp, Unknown
  misc_feature (1)..( 11): Result.003 file - promoters60/4766826
aaaccaatttt

SEQ ID NO: 135577 - DNA, 11 bp, Unknown
  misc_feature (1)..( 11): Result.003 file - promoters60/4766826
catcaaattag

SEQ ID NO: 135578 - DNA, 11 bp, Unknown
  misc_feature (1)..( 11): Result.003 file - promoters60/4766826
attcaaacctt

SEQ ID NO: 135579 - DNA, 8 bp, Unknown
  misc_feature (1)..( 8): Result.003 file - promoters60/4766835
cggttcaa

SEQ ID NO: 135580 - DNA, 8 bp, Unknown
  misc_feature (1)..( 8): Result.003 file - promoters60/4766835
aagttcaa

SEQ ID NO: 135581 - DNA, 8 bp, Unknown
  misc_feature (1)..( 8): Result.003 file - promoters60/4766835
aaggtcag

SEQ ID NO: 135582 - DNA, 7 bp, Unknown
  misc_feature (1)..( 7): Result.003 file - promoters60/4766835
atccaaa

SEQ ID NO: 135583 - DNA, 7 bp, Unknown
  misc_feature (1)..( 7): Result.003 file - promoters60/4766835
atcaaaa

SEQ ID NO: 135584 - DNA, 7 bp, Unknown
  misc_feature (1)..( 7): Result.003 file - promoters60/4766835
atctaaa

SEQ ID NO: 135585 - DNA, 8 bp, Unknown
  misc_feature (1)..( 8): Result.003 file - promoters60/4766835
aaacaaaa

SEQ ID NO: 135586 - DNA, 8 bp, Unknown
  misc_feature (1)..( 8): Result.003 file - promoters60/4766835
aaacaact

SEQ ID NO: 135587 - DNA, 8 bp, Unknown
  misc_feature (1)..( 8): Result.003 file - promoters60/4766835
aaagaaaa

SEQ ID NO: 135588 - DNA, 8 bp, Unknown
  misc_feature (1)..( 8): Result.003 file - promoters60/4766835
ttaaaatt

SEQ ID NO: 135589 - DNA, 8 bp, Unknown
  misc_feature (1)..( 8): Result.003 file - promoters60/4766835
ataaaatg

SEQ ID NO: 135590 - DNA, 8 bp, Unknown
  misc_feature (1)..( 8): Result.003 file - promoters60/4766835
agaaaaaa

SEQ ID NO: 135591 - DNA, 8 bp, Unknown
  misc_feature (1)..( 8): Result.003 file - promoters60/4766835
taaatgta

SEQ ID NO: 135592 - DNA, 8 bp, Unknown
  misc_feature (1)..( 8): Result.003 file - promoters60/4766835
aaaaagta

SEQ ID NO: 135593 - DNA, 8 bp, Unknown
  misc_feature (1)..( 8): Result.003 file - promoters60/4766835
aaaaagaa

SEQ ID NO: 135594 - DNA, 10 bp, Unknown
  misc_feature (1)..( 10): Result.003 file - promoters60/4766835
aaataattga

SEQ ID NO: 135595 - DNA, 10 bp, Unknown
  misc_feature (1)..( 10): Result.003 file - promoters60/4766835
aaaaaatgtt

SEQ ID NO: 135596 - DNA, 10 bp, Unknown
  misc_feature (1)..( 10): Result.003 file - promoters60/4766835
aaataaatga

SEQ ID NO: 135597 - DNA, 7 bp, Unknown
  misc_feature (1)..( 7): Result.003 file - promoters60/4766835
ttaattc

SEQ ID NO: 135598 - DNA, 7 bp, Unknown
  misc_feature (1)..( 7): Result.003 file - promoters60/4766835
ttaattt

SEQ ID NO: 135599 - DNA, 7 bp, Unknown
  misc_feature (1)..( 7): Result.003 file - promoters60/4766835
taaattt

SEQ ID NO: 135600 - DNA, 8 bp, Unknown
  misc_feature (1)..( 8): Result.003 file - promoters60/4766835
cattaaat

SEQ ID NO: 135601 - DNA, 8 bp, Unknown
  misc_feature (1)..( 8): Result.003 file - promoters60/4766835
cataaaaa

SEQ ID NO: 135602 - DNA, 8 bp, Unknown
  misc_feature (1)..( 8): Result.003 file - promoters60/4766835
gctaaaaa

SEQ ID NO: 135603 - DNA, 8 bp, Unknown
  misc_feature (1)..( 8): Result.003 file - promoters60/4766835
acaaataa

SEQ ID NO: 135604 - DNA, 8 bp, Unknown
  misc_feature (1)..( 8): Result.003 file - promoters60/4766835
acacataa

SEQ ID NO: 135605 - DNA, 8 bp, Unknown
  misc_feature (1)..( 8): Result.003 file - promoters60/4766835
acacattt

SEQ ID NO: 135606 - DNA, 7 bp, Unknown
  misc_feature (1)..( 7): Result.003 file - promoters60/4766835
ttttcag

SEQ ID NO: 135607 - DNA, 7 bp, Unknown
  misc_feature (1)..( 7): Result.003 file - promoters60/4766835
ttttcag

SEQ ID NO: 135608 - DNA, 7 bp, Unknown
  misc_feature (1)..( 7): Result.003 file - promoters60/4766835
ttttcat

SEQ ID NO: 135609 - DNA, 14 bp, Unknown
  misc_feature (1)..( 14): Result.003 file - promoters60/4766862
ttttggtgagaaga

SEQ ID NO: 135610 - DNA, 14 bp, Unknown
  misc_feature (1)..( 14): Result.003 file - promoters60/4766862
gacacaagagaaga

SEQ ID NO: 135611 - DNA, 14 bp, Unknown
  misc_feature (1)..( 14): Result.003 file - promoters60/4766862
tttgggtgagaatc

SEQ ID NO: 135612 - DNA, 14 bp, Unknown
  misc_feature (1)..( 14): Result.003 file - promoters60/4766862
tgaattttagaaga

SEQ ID NO: 135613 - DNA, 14 bp, Unknown
  misc_feature (1)..( 14): Result.003 file - promoters60/4766862
cgcggtcgagaata

SEQ ID NO: 135614 - DNA, 14 bp, Unknown
  misc_feature (1)..( 14): Result.003 file - promoters60/4766862
tcgttgagagcata

SEQ ID NO: 135615 - DNA, 8 bp, Unknown
  misc_feature (1)..( 8): Result.003 file - promoters60/4766866
aacattta

SEQ ID NO: 135616 - DNA, 8 bp, Unknown
  misc_feature (1)..( 8): Result.003 file - promoters60/4766866
aacctttg

SEQ ID NO: 135617 - DNA, 8 bp, Unknown
  misc_feature (1)..( 8): Result.003 file - promoters60/4766866
gacatttt

SEQ ID NO: 135618 - DNA, 8 bp, Unknown
  misc_feature (1)..( 8): Result.003 file - promoters60/4766866
cccctttg

SEQ ID NO: 135619 - DNA, 11 bp, Unknown
  misc_feature (1)..( 11): Result.003 file - promoters60/4766866
tttaaattaaa

SEQ ID NO: 135620 - DNA, 11 bp, Unknown
  misc_feature (1)..( 11): Result.003 file - promoters60/4766866
tgattattaaa

SEQ ID NO: 135621 - DNA, 11 bp, Unknown
  misc_feature (1)..( 11): Result.003 file - promoters60/4766866
gaaaaaataat

SEQ ID NO: 135622 - DNA, 11 bp, Unknown
  misc_feature (1)..( 11): Result.003 file - promoters60/4766866
ttttaattaat

SEQ ID NO: 135623 - DNA, 14 bp, Unknown
  misc_feature (1)..( 14): Result.003 file - promoters60/4766866
caagacatttagac

SEQ ID NO: 135624 - DNA, 14 bp, Unknown
  misc_feature (1)..( 14): Result.003 file - promoters60/4766866
gttggaatttagat

SEQ ID NO: 135625 - DNA, 14 bp, Unknown
  misc_feature (1)..( 14): Result.003 file - promoters60/4766866
aaaagaaattaacc

SEQ ID NO: 135626 - DNA, 14 bp, Unknown
  misc_feature (1)..( 14): Result.003 file - promoters60/4766866
aaaagaaaataaaa

SEQ ID NO: 135627 - DNA, 14 bp, Unknown
  misc_feature (1)..( 14): Result.003 file - promoters60/4766866
aagggaaatgaaat

SEQ ID NO: 135628 - DNA, 12 bp, Unknown
  misc_feature (1)..( 12): Result.003 file - promoters60/4766866
tttaaagacaca

SEQ ID NO: 135629 - DNA, 12 bp, Unknown
  misc_feature (1)..( 12): Result.003 file - promoters60/4766866
agataagacaac

SEQ ID NO: 135630 - DNA, 12 bp, Unknown
  misc_feature (1)..( 12): Result.003 file - promoters60/4766866
ttttgagacaaa

SEQ ID NO: 135631 - DNA, 12 bp, Unknown
  misc_feature (1)..( 12): Result.003 file - promoters60/4766866
ttgaaacaaaaa

SEQ ID NO: 135632 - DNA, 12 bp, Unknown
  misc_feature (1)..( 12): Result.003 file - promoters60/4766866
gagaaagaaagc

SEQ ID NO: 135633 - DNA, 6 bp, Unknown
  misc_feature (1)..( 6): Result.003 file - promoters60/4766870
atgaag

SEQ ID NO: 135634 - DNA, 6 bp, Unknown
  misc_feature (1)..( 6): Result.003 file - promoters60/4766870
atgaag

SEQ ID NO: 135635 - DNA, 7 bp, Unknown
  misc_feature (1)..( 7): Result.003 file - promoters60/4766870
tgaagtt

SEQ ID NO: 135636 - DNA, 7 bp, Unknown
  misc_feature (1)..( 7): Result.003 file - promoters60/4766870
tgatgtt

SEQ ID NO: 135637 - DNA, 6 bp, Unknown
  misc_feature (1)..( 6): Result.003 file - promoters60/4766870
gatgaa

SEQ ID NO: 135638 - DNA, 6 bp, Unknown
  misc_feature (1)..( 6): Result.003 file - promoters60/4766870
gatgaa

SEQ ID NO: 135639 - DNA, 7 bp, Unknown
  misc_feature (1)..( 7): Result.003 file - promoters60/4766870
gattttt

SEQ ID NO: 135640 - DNA, 7 bp, Unknown
  misc_feature (1)..( 7): Result.003 file - promoters60/4766870
gattttg

SEQ ID NO: 135641 - DNA, 7 bp, Unknown
  misc_feature (1)..( 7): Result.003 file - promoters60/4766870
gatgttg

SEQ ID NO: 135642 - DNA, 6 bp, Unknown
  misc_feature (1)..( 6): Result.003 file - promoters60/4766870
tctttg

SEQ ID NO: 135643 - DNA, 6 bp, Unknown
  misc_feature (1)..( 6): Result.003 file - promoters60/4766870
tctttg

SEQ ID NO: 135644 - DNA, 7 bp, Unknown
  misc_feature (1)..( 7): Result.003 file - promoters60/4766870
gtttgag

SEQ ID NO: 135645 - DNA, 7 bp, Unknown
  misc_feature (1)..( 7): Result.003 file - promoters60/4766870
gtttgag

SEQ ID NO: 135646 - DNA, 7 bp, Unknown
  misc_feature (1)..( 7): Result.003 file - promoters60/4766870
atgttga

SEQ ID NO: 135647 - DNA, 7 bp, Unknown
  misc_feature (1)..( 7): Result.003 file - promoters60/4766870
atgatga

SEQ ID NO: 135648 - DNA, 8 bp, Unknown
  misc_feature (1)..( 8): Result.003 file - promoters60/4766870
attgtttt

SEQ ID NO: 135649 - DNA, 8 bp, Unknown
  misc_feature (1)..( 8): Result.003 file - promoters60/4766870
attttttt

SEQ ID NO: 135650 - DNA, 8 bp, Unknown
  misc_feature (1)..( 8): Result.003 file - promoters60/4766870
tgattatt

SEQ ID NO: 135651 - DNA, 8 bp, Unknown
  misc_feature (1)..( 8): Result.003 file - promoters60/4766870
tgagtatt

SEQ ID NO: 135652 - DNA, 8 bp, Unknown
  misc_feature (1)..( 8): Result.003 file - promoters60/4766870
aagatgat

SEQ ID NO: 135653 - DNA, 8 bp, Unknown
  misc_feature (1)..( 8): Result.003 file - promoters60/4766870
aagaggat

SEQ ID NO: 135654 - DNA, 10 bp, Unknown
  misc_feature (1)..( 10): Result.003 file - promoters60/4766870
tttatttata

SEQ ID NO: 135655 - DNA, 10 bp, Unknown
  misc_feature (1)..( 10): Result.003 file - promoters60/4766870
tttttttata

SEQ ID NO: 135656 - DNA, 7 bp, Unknown
  misc_feature (1)..( 7): Result.003 file - promoters60/4766870
tcttaaa

SEQ ID NO: 135657 - DNA, 7 bp, Unknown
  misc_feature (1)..( 7): Result.003 file - promoters60/4766870
tctaaaa

SEQ ID NO: 135658 - DNA, 6 bp, Unknown
  misc_feature (1)..( 6): Result.003 file - promoters60/4766924
gttggt

SEQ ID NO: 135659 - DNA, 6 bp, Unknown
  misc_feature (1)..( 6): Result.003 file - promoters60/4766924
gttggt

SEQ ID NO: 135660 - DNA, 6 bp, Unknown
  misc_feature (1)..( 6): Result.003 file - promoters60/4766924
tagatc

SEQ ID NO: 135661 - DNA, 6 bp, Unknown
  misc_feature (1)..( 6): Result.003 file - promoters60/4766924
tagatc

SEQ ID NO: 135662 - DNA, 6 bp, Unknown
  misc_feature (1)..( 6): Result.003 file - promoters60/4766924
ttttat

SEQ ID NO: 135663 - DNA, 6 bp, Unknown
  misc_feature (1)..( 6): Result.003 file - promoters60/4766924
ttttat

SEQ ID NO: 135664 - DNA, 6 bp, Unknown
  misc_feature (1)..( 6): Result.003 file - promoters60/4766924
tatata

SEQ ID NO: 135665 - DNA, 6 bp, Unknown
  misc_feature (1)..( 6): Result.003 file - promoters60/4766924
tatata

SEQ ID NO: 135666 - DNA, 8 bp, Unknown
  misc_feature (1)..( 8): Result.003 file - promoters60/4766924
acccacca

SEQ ID NO: 135667 - DNA, 8 bp, Unknown
  misc_feature (1)..( 8): Result.003 file - promoters60/4766924
accaacca

SEQ ID NO: 135668 - DNA, 7 bp, Unknown
  misc_feature (1)..( 7): Result.003 file - promoters60/4766924
tgggatc

SEQ ID NO: 135669 - DNA, 7 bp, Unknown
  misc_feature (1)..( 7): Result.003 file - promoters60/4766924
tggtatc

SEQ ID NO: 135670 - DNA, 7 bp, Unknown
  misc_feature (1)..( 7): Result.003 file - promoters60/4766924
gtctaaa

SEQ ID NO: 135671 - DNA, 7 bp, Unknown
  misc_feature (1)..( 7): Result.003 file - promoters60/4766924
gtcaaaa

SEQ ID NO: 135672 - DNA, 11 bp, Unknown
  misc_feature (1)..( 11): Result.003 file - promoters60/4766977
gaacattaata

SEQ ID NO: 135673 - DNA, 11 bp, Unknown
  misc_feature (1)..( 11): Result.003 file - promoters60/4766977
ccacaataatt

SEQ ID NO: 135674 - DNA, 11 bp, Unknown
  misc_feature (1)..( 11): Result.003 file - promoters60/4766977
ggacaataata

SEQ ID NO: 135675 - DNA, 11 bp, Unknown
  misc_feature (1)..( 11): Result.003 file - promoters60/4766977
ccaaaattaca

SEQ ID NO: 135676 - DNA, 12 bp, Unknown
  misc_feature (1)..( 12): Result.003 file - promoters60/4766977
agtataaaatac

SEQ ID NO: 135677 - DNA, 12 bp, Unknown
  misc_feature (1)..( 12): Result.003 file - promoters60/4766977
tttttaatatat

SEQ ID NO: 135678 - DNA, 12 bp, Unknown
  misc_feature (1)..( 12): Result.003 file - promoters60/4766977
cagaaaaaatac

SEQ ID NO: 135679 - DNA, 12 bp, Unknown
  misc_feature (1)..( 12): Result.003 file - promoters60/4766977
taagtagaaaac

SEQ ID NO: 135680 - DNA, 12 bp, Unknown
  misc_feature (1)..( 12): Result.003 file - promoters60/4766977
agagaaaaaaca

SEQ ID NO: 135681 - DNA, 10 bp, Unknown
  misc_feature (1)..( 10): Result.003 file - promoters60/4766977
actaatttta

SEQ ID NO: 135682 - DNA, 10 bp, Unknown
  misc_feature (1)..( 10): Result.003 file - promoters60/4766977
actaagtttg

SEQ ID NO: 135683 - DNA, 10 bp, Unknown
  misc_feature (1)..( 10): Result.003 file - promoters60/4766977
tctaattact

SEQ ID NO: 135684 - DNA, 10 bp, Unknown
  misc_feature (1)..( 10): Result.003 file - promoters60/4766977
tggtatttta

SEQ ID NO: 135685 - DNA, 9 bp, Unknown
  misc_feature (1)..( 9): Result.003 file - promoters60/4766977
aaccaaaat

SEQ ID NO: 135686 - DNA, 9 bp, Unknown
  misc_feature (1)..( 9): Result.003 file - promoters60/4766977
aactaaaaa

SEQ ID NO: 135687 - DNA, 9 bp, Unknown
  misc_feature (1)..( 9): Result.003 file - promoters60/4766977
acctaaact

SEQ ID NO: 135688 - DNA, 9 bp, Unknown
  misc_feature (1)..( 9): Result.003 file - promoters60/4766977
tgctatact

SEQ ID NO: 135689 - DNA, 10 bp, Unknown
  misc_feature (1)..( 10): Result.003 file - promoters60/4766977
aaaatatatt

SEQ ID NO: 135690 - DNA, 10 bp, Unknown
  misc_feature (1)..( 10): Result.003 file - promoters60/4766977
aaaatacttt

SEQ ID NO: 135691 - DNA, 10 bp, Unknown
  misc_feature (1)..( 10): Result.003 file - promoters60/4766977
gaaatatatg

SEQ ID NO: 135692 - DNA, 10 bp, Unknown
  misc_feature (1)..( 10): Result.003 file - promoters60/4766977
atcatatatg

SEQ ID NO: 135693 - DNA, 13 bp, Unknown
  misc_feature (1)..( 13): Result.003 file - promoters60/4766977
atactttatcgtc

SEQ ID NO: 135694 - DNA, 13 bp, Unknown
  misc_feature (1)..( 13): Result.003 file - promoters60/4766977
tttctttttcgag

SEQ ID NO: 135695 - DNA, 13 bp, Unknown
  misc_feature (1)..( 13): Result.003 file - promoters60/4766977
tgtattttttttt

SEQ ID NO: 135696 - DNA, 13 bp, Unknown
  misc_feature (1)..( 13): Result.003 file - promoters60/4766977
aacgtttataaga

SEQ ID NO: 135697 - DNA, 13 bp, Unknown
  misc_feature (1)..( 13): Result.003 file - promoters60/4766977
attatttttactc

SEQ ID NO: 135698 - DNA, 12 bp, Unknown
  misc_feature (1)..( 12): Result.003 file - promoters60/4766977
actataaataga

SEQ ID NO: 135699 - DNA, 12 bp, Unknown
  misc_feature (1)..( 12): Result.003 file - promoters60/4766977
tctataaaaaaa

SEQ ID NO: 135700 - DNA, 12 bp, Unknown
  misc_feature (1)..( 12): Result.003 file - promoters60/4766977
aatataaataac

SEQ ID NO: 135701 - DNA, 12 bp, Unknown
  misc_feature (1)..( 12): Result.003 file - promoters60/4766977
tctataaatata

SEQ ID NO: 135702 - DNA, 12 bp, Unknown
  misc_feature (1)..( 12): Result.003 file - promoters60/4766977
tatataaatagt

SEQ ID NO: 135703 - DNA, 12 bp, Unknown
  misc_feature (1)..( 12): Result.003 file - promoters60/4766977
aatataaatact

SEQ ID NO: 135704 - DNA, 9 bp, Unknown
  misc_feature (1)..( 9): Result.003 file - promoters60/4766977
ttaagcttg

SEQ ID NO: 135705 - DNA, 9 bp, Unknown
  misc_feature (1)..( 9): Result.003 file - promoters60/4766977
ataaactta

SEQ ID NO: 135706 - DNA, 9 bp, Unknown
  misc_feature (1)..( 9): Result.003 file - promoters60/4766977
ataaagtta

SEQ ID NO: 135707 - DNA, 9 bp, Unknown
  misc_feature (1)..( 9): Result.003 file - promoters60/4766977
ttaaccttt

SEQ ID NO: 135708 - DNA, 9 bp, Unknown
  misc_feature (1)..( 9): Result.003 file - promoters60/4766977
ttaaaatga

SEQ ID NO: 135709 - DNA, 9 bp, Unknown
  misc_feature (1)..( 9): Result.003 file - promoters60/4766977
ttaaaatta

SEQ ID NO: 135710 - DNA, 9 bp, Unknown
  misc_feature (1)..( 9): Result.003 file - promoters60/4766977
ataaagtta

SEQ ID NO: 135711 - DNA, 9 bp, Unknown
  misc_feature (1)..( 9): Result.003 file - promoters60/4766977
aaaaaataa

SEQ ID NO: 135712 - DNA, 11 bp, Unknown
  misc_feature (1)..( 11): Result.003 file - promoters60/4767038
ctttttttttt

SEQ ID NO: 135713 - DNA, 11 bp, Unknown
  misc_feature (1)..( 11): Result.003 file - promoters60/4767038
cttcttttttt

SEQ ID NO: 135714 - DNA, 11 bp, Unknown
  misc_feature (1)..( 11): Result.003 file - promoters60/4767038
ctttttttttc

SEQ ID NO: 135715 - DNA, 9 bp, Unknown
  misc_feature (1)..( 9): Result.003 file - promoters60/4767038
aactatttt

SEQ ID NO: 135716 - DNA, 9 bp, Unknown
  misc_feature (1)..( 9): Result.003 file - promoters60/4767038
atctatttt

SEQ ID NO: 135717 - DNA, 9 bp, Unknown
  misc_feature (1)..( 9): Result.003 file - promoters60/4767038
atcaattta

SEQ ID NO: 135718 - DNA, 8 bp, Unknown
  misc_feature (1)..( 8): Result.003 file - promoters60/4767050
ttagaatt

SEQ ID NO: 135719 - DNA, 8 bp, Unknown
  misc_feature (1)..( 8): Result.003 file - promoters60/4767050
ttataatt

SEQ ID NO: 135720 - DNA, 8 bp, Unknown
  misc_feature (1)..( 8): Result.003 file - promoters60/4767050
atagaaaa

SEQ ID NO: 135721 - DNA, 8 bp, Unknown
  misc_feature (1)..( 8): Result.003 file - promoters60/4767050
atataaat

SEQ ID NO: 135722 - DNA, 8 bp, Unknown
  misc_feature (1)..( 8): Result.003 file - promoters60/4767050
aaataaat

SEQ ID NO: 135723 - DNA, 6 bp, Unknown
  misc_feature (1)..( 6): Result.003 file - promoters60/4767050
aagaag

SEQ ID NO: 135724 - DNA, 6 bp, Unknown
  misc_feature (1)..( 6): Result.003 file - promoters60/4767050
aagaag

SEQ ID NO: 135725 - DNA, 7 bp, Unknown
  misc_feature (1)..( 7): Result.003 file - promoters60/4767050
tctgcaa

SEQ ID NO: 135726 - DNA, 7 bp, Unknown
  misc_feature (1)..( 7): Result.003 file - promoters60/4767050
tctgcaa

SEQ ID NO: 135727 - DNA, 9 bp, Unknown
  misc_feature (1)..( 9): Result.003 file - promoters60/4767050
agattgttc

SEQ ID NO: 135728 - DNA, 9 bp, Unknown
  misc_feature (1)..( 9): Result.003 file - promoters60/4767050
agatggttc

SEQ ID NO: 135729 - DNA, 8 bp, Unknown
  misc_feature (1)..( 8): Result.003 file - promoters60/4767050
gatcagag

SEQ ID NO: 135730 - DNA, 8 bp, Unknown
  misc_feature (1)..( 8): Result.003 file - promoters60/4767050
gatcagag

SEQ ID NO: 135731 - DNA, 6 bp, Unknown
  misc_feature (1)..( 6): Result.003 file - promoters60/4767050
agagaa

SEQ ID NO: 135732 - DNA, 6 bp, Unknown
  misc_feature (1)..( 6): Result.003 file - promoters60/4767050
agagaa

SEQ ID NO: 135733 - DNA, 6 bp, Unknown
  misc_feature (1)..( 6): Result.003 file - promoters60/4767050
gatgaa

SEQ ID NO: 135734 - DNA, 6 bp, Unknown
  misc_feature (1)..( 6): Result.003 file - promoters60/4767050
gatgaa

SEQ ID NO: 135735 - DNA, 6 bp, Unknown
  misc_feature (1)..( 6): Result.003 file - promoters60/4767050
atttag

SEQ ID NO: 135736 - DNA, 6 bp, Unknown
  misc_feature (1)..( 6): Result.003 file - promoters60/4767050
atttag

SEQ ID NO: 135737 - DNA, 8 bp, Unknown
  misc_feature (1)..( 8): Result.003 file - promoters60/4767050
aaagtaaa

SEQ ID NO: 135738 - DNA, 8 bp, Unknown
  misc_feature (1)..( 8): Result.003 file - promoters60/4767050
aaactaaa

SEQ ID NO: 135739 - DNA, 6 bp, Unknown
  misc_feature (1)..( 6): Result.003 file - promoters60/4767050
gaatca

SEQ ID NO: 135740 - DNA, 6 bp, Unknown
  misc_feature (1)..( 6): Result.003 file - promoters60/4767050
gaatca

SEQ ID NO: 135741 - DNA, 7 bp, Unknown
  misc_feature (1)..( 7): Result.003 file - promoters60/4767050
tccggtt

SEQ ID NO: 135742 - DNA, 7 bp, Unknown
  misc_feature (1)..( 7): Result.003 file - promoters60/4767050
tccagtt

SEQ ID NO: 135743 - DNA, 6 bp, Unknown
  misc_feature (1)..( 6): Result.003 file - promoters60/4767050
tttccg

SEQ ID NO: 135744 - DNA, 6 bp, Unknown
  misc_feature (1)..( 6): Result.003 file - promoters60/4767050
tttccg

SEQ ID NO: 135745 - DNA, 6 bp, Unknown
  misc_feature (1)..( 6): Result.003 file - promoters60/4767050
aaccct

SEQ ID NO: 135746 - DNA, 6 bp, Unknown
  misc_feature (1)..( 6): Result.003 file - promoters60/4767050
aaccct

SEQ ID NO: 135747 - DNA, 6 bp, Unknown
  misc_feature (1)..( 6): Result.003 file - promoters60/4767059
tagatc

SEQ ID NO: 135748 - DNA, 6 bp, Unknown
  misc_feature (1)..( 6): Result.003 file - promoters60/4767059
tagatc

SEQ ID NO: 135749 - DNA, 6 bp, Unknown
  misc_feature (1)..( 6): Result.003 file - promoters60/4767059
acttct

SEQ ID NO: 135750 - DNA, 6 bp, Unknown
  misc_feature (1)..( 6): Result.003 file - promoters60/4767059
acttct

SEQ ID NO: 135751 - DNA, 7 bp, Unknown
  misc_feature (1)..( 7): Result.003 file - promoters60/4767059
taaattt

SEQ ID NO: 135752 - DNA, 7 bp, Unknown
  misc_feature (1)..( 7): Result.003 file - promoters60/4767059
gaaattt

SEQ ID NO: 135753 - DNA, 7 bp, Unknown
  misc_feature (1)..( 7): Result.003 file - promoters60/4767059
taaatta

SEQ ID NO: 135754 - DNA, 6 bp, Unknown
  misc_feature (1)..( 6): Result.003 file - promoters60/4767059
aaagac

SEQ ID NO: 135755 - DNA, 6 bp, Unknown
  misc_feature (1)..( 6): Result.003 file - promoters60/4767059
aaagac

SEQ ID NO: 135756 - DNA, 8 bp, Unknown
  misc_feature (1)..( 8): Result.003 file - promoters60/4767059
ttggtaga

SEQ ID NO: 135757 - DNA, 8 bp, Unknown
  misc_feature (1)..( 8): Result.003 file - promoters60/4767059
ttggaaga

SEQ ID NO: 135758 - DNA, 8 bp, Unknown
  misc_feature (1)..( 8): Result.003 file - promoters60/4767059
gaattttg

SEQ ID NO: 135759 - DNA, 8 bp, Unknown
  misc_feature (1)..( 8): Result.003 file - promoters60/4767059
gaactttg

SEQ ID NO: 135760 - DNA, 8 bp, Unknown
  misc_feature (1)..( 8): Result.003 file - promoters60/4767059
gaacttct

SEQ ID NO: 135761 - DNA, 8 bp, Unknown
  misc_feature (1)..( 8): Result.003 file - promoters60/4767059
ttaaatgc

SEQ ID NO: 135762 - DNA, 8 bp, Unknown
  misc_feature (1)..( 8): Result.003 file - promoters60/4767059
ttaactgc

SEQ ID NO: 135763 - DNA, 8 bp, Unknown
  misc_feature (1)..( 8): Result.003 file - promoters60/4767059
taataaat

SEQ ID NO: 135764 - DNA, 8 bp, Unknown
  misc_feature (1)..( 8): Result.003 file - promoters60/4767059
taacaaat

SEQ ID NO: 135765 - DNA, 6 bp, Unknown
  misc_feature (1)..( 6): Result.003 file - promoters60/4767059
gatatg

SEQ ID NO: 135766 - DNA, 6 bp, Unknown
  misc_feature (1)..( 6): Result.003 file - promoters60/4767059
gatatg

SEQ ID NO: 135767 - DNA, 6 bp, Unknown
  misc_feature (1)..( 6): Result.003 file - promoters60/4767059
taattt

SEQ ID NO: 135768 - DNA, 6 bp, Unknown
  misc_feature (1)..( 6): Result.003 file - promoters60/4767059
taattt

SEQ ID NO: 135769 - DNA, 7 bp, Unknown
  misc_feature (1)..( 7): Result.003 file - promoters60/4767059
tataatt

SEQ ID NO: 135770 - DNA, 7 bp, Unknown
  misc_feature (1)..( 7): Result.003 file - promoters60/4767059
tattatt

SEQ ID NO: 135771 - DNA, 8 bp, Unknown
  misc_feature (1)..( 8): Result.003 file - promoters60/4767059
ataaaatt

SEQ ID NO: 135772 - DNA, 8 bp, Unknown
  misc_feature (1)..( 8): Result.003 file - promoters60/4767059
atataatt

SEQ ID NO: 135773 - DNA, 8 bp, Unknown
  misc_feature (1)..( 8): Result.003 file - promoters60/4767059
aaagtcaa

SEQ ID NO: 135774 - DNA, 8 bp, Unknown
  misc_feature (1)..( 8): Result.003 file - promoters60/4767059
aaaatcaa

SEQ ID NO: 135775 - DNA, 8 bp, Unknown
  misc_feature (1)..( 8): Result.003 file - promoters60/4767059
attcggtt

SEQ ID NO: 135776 - DNA, 8 bp, Unknown
  misc_feature (1)..( 8): Result.003 file - promoters60/4767059
attcagtt

SEQ ID NO: 135777 - DNA, 10 bp, Unknown
  misc_feature (1)..( 10): Result.003 file - promoters60/4767059
gtcgttttca

SEQ ID NO: 135778 - DNA, 10 bp, Unknown
  misc_feature (1)..( 10): Result.003 file - promoters60/4767059
gtcgttttca

SEQ ID NO: 135779 - DNA, 6 bp, Unknown
  misc_feature (1)..( 6): Result.003 file - promoters60/4767059
aaaaaa

SEQ ID NO: 135780 - DNA, 6 bp, Unknown
  misc_feature (1)..( 6): Result.003 file - promoters60/4767059
aaaaaa

SEQ ID NO: 135781 - DNA, 7 bp, Unknown
  misc_feature (1)..( 7): Result.003 file - promoters60/4767059
gatgaaa

SEQ ID NO: 135782 - DNA, 7 bp, Unknown
  misc_feature (1)..( 7): Result.003 file - promoters60/4767059
gatcaaa

SEQ ID NO: 135783 - DNA, 6 bp, Unknown
  misc_feature (1)..( 6): Result.003 file - promoters60/4767059
attaat

SEQ ID NO: 135784 - DNA, 6 bp, Unknown
  misc_feature (1)..( 6): Result.003 file - promoters60/4767059
attaat

SEQ ID NO: 135785 - DNA, 6 bp, Unknown
  misc_feature (1)..( 6): Result.003 file - promoters60/4767059
atttca

SEQ ID NO: 135786 - DNA, 6 bp, Unknown
  misc_feature (1)..( 6): Result.003 file - promoters60/4767059
atttca

SEQ ID NO: 135787 - DNA, 10 bp, Unknown
  misc_feature (1)..( 10): Result.003 file - promoters60/4767059
catgaattta

SEQ ID NO: 135788 - DNA, 10 bp, Unknown
  misc_feature (1)..( 10): Result.003 file - promoters60/4767059
cataaattta

SEQ ID NO: 135789 - DNA, 7 bp, Unknown
  misc_feature (1)..( 7): Result.003 file - promoters60/4767059
aggccca

SEQ ID NO: 135790 - DNA, 7 bp, Unknown
  misc_feature (1)..( 7): Result.003 file - promoters60/4767059
aggccca

SEQ ID NO: 135791 - DNA, 7 bp, Unknown
  misc_feature (1)..( 7): Result.003 file - promoters60/4767063
aaaatga

SEQ ID NO: 135792 - DNA, 7 bp, Unknown
  misc_feature (1)..( 7): Result.003 file - promoters60/4767063
aaactga

SEQ ID NO: 135793 - DNA, 7 bp, Unknown
  misc_feature (1)..( 7): Result.003 file - promoters60/4767063
caaatga

SEQ ID NO: 135794 - DNA, 7 bp, Unknown
  misc_feature (1)..( 7): Result.003 file - promoters60/4767063
tttcttc

SEQ ID NO: 135795 - DNA, 7 bp, Unknown
  misc_feature (1)..( 7): Result.003 file - promoters60/4767063
tttcttt

SEQ ID NO: 135796 - DNA, 7 bp, Unknown
  misc_feature (1)..( 7): Result.003 file - promoters60/4767063
tttattt

SEQ ID NO: 135797 - DNA, 6 bp, Unknown
  misc_feature (1)..( 6): Result.003 file - promoters60/4767063
cgcttt

SEQ ID NO: 135798 - DNA, 6 bp, Unknown
  misc_feature (1)..( 6): Result.003 file - promoters60/4767063
cgcttt

SEQ ID NO: 135799 - DNA, 7 bp, Unknown
  misc_feature (1)..( 7): Result.003 file - promoters60/4767063
tttcgta

SEQ ID NO: 135800 - DNA, 7 bp, Unknown
  misc_feature (1)..( 7): Result.003 file - promoters60/4767063
tttagta

SEQ ID NO: 135801 - DNA, 10 bp, Unknown
  misc_feature (1)..( 10): Result.003 file - promoters60/4767063
ttgctgtttt

SEQ ID NO: 135802 - DNA, 10 bp, Unknown
  misc_feature (1)..( 10): Result.003 file - promoters60/4767063
ttgctttttt

SEQ ID NO: 135803 - DNA, 8 bp, Unknown
  misc_feature (1)..( 8): Result.003 file - promoters60/4767063
ttttgtct

SEQ ID NO: 135804 - DNA, 8 bp, Unknown
  misc_feature (1)..( 8): Result.003 file - promoters60/4767063
ttttttct

SEQ ID NO: 135805 - DNA, 11 bp, Unknown
  misc_feature (1)..( 11): Result.003 file - promoters60/4767063
ttttgtaattt

SEQ ID NO: 135806 - DNA, 11 bp, Unknown
  misc_feature (1)..( 11): Result.003 file - promoters60/4767063
tttagtatttt

SEQ ID NO: 135807 - DNA, 7 bp, Unknown
  misc_feature (1)..( 7): Result.003 file - promoters60/4767063
tttataa

SEQ ID NO: 135808 - DNA, 7 bp, Unknown
  misc_feature (1)..( 7): Result.003 file - promoters60/4767063
tttttaa

SEQ ID NO: 135809 - DNA, 9 bp, Unknown
  misc_feature (1)..( 9): Result.003 file - promoters60/4767063
attttatgt

SEQ ID NO: 135810 - DNA, 9 bp, Unknown
  misc_feature (1)..( 9): Result.003 file - promoters60/4767063
atttcatga

SEQ ID NO: 135811 - DNA, 9 bp, Unknown
  misc_feature (1)..( 9): Result.003 file - promoters60/4767063
gacttatgt

SEQ ID NO: 135812 - DNA, 11 bp, Unknown
  misc_feature (1)..( 11): Result.003 file - promoters60/4767063
attaattataa

SEQ ID NO: 135813 - DNA, 11 bp, Unknown
  misc_feature (1)..( 11): Result.003 file - promoters60/4767063
tgaaattataa

SEQ ID NO: 135814 - DNA, 11 bp, Unknown
  misc_feature (1)..( 11): Result.003 file - promoters60/4767063
attaattaatt

SEQ ID NO: 135815 - DNA, 8 bp, Unknown
  misc_feature (1)..( 8): Result.003 file - promoters60/4767063
attgtaaa

SEQ ID NO: 135816 - DNA, 8 bp, Unknown
  misc_feature (1)..( 8): Result.003 file - promoters60/4767063
attttaaa

SEQ ID NO: 135817 - DNA, 7 bp, Unknown
  misc_feature (1)..( 7): Result.003 file - promoters60/4767063
tctccaa

SEQ ID NO: 135818 - DNA, 7 bp, Unknown
  misc_feature (1)..( 7): Result.003 file - promoters60/4767063
tctccaa

SEQ ID NO: 135819 - DNA, 6 bp, Unknown
  misc_feature (1)..( 6): Result.003 file - promoters60/4767063
tagagg

SEQ ID NO: 135820 - DNA, 6 bp, Unknown
  misc_feature (1)..( 6): Result.003 file - promoters60/4767063
tagagg

SEQ ID NO: 135821 - DNA, 6 bp, Unknown
  misc_feature (1)..( 6): Result.003 file - promoters60/4767063
atgaga

SEQ ID NO: 135822 - DNA, 6 bp, Unknown
  misc_feature (1)..( 6): Result.003 file - promoters60/4767063
atgaga

SEQ ID NO: 135823 - DNA, 6 bp, Unknown
  misc_feature (1)..( 6): Result.003 file - promoters60/4767063
tgtgaa

SEQ ID NO: 135824 - DNA, 6 bp, Unknown
  misc_feature (1)..( 6): Result.003 file - promoters60/4767063
tgtgaa

SEQ ID NO: 135825 - DNA, 6 bp, Unknown
  misc_feature (1)..( 6): Result.003 file - promoters60/4767063
ttttgt

SEQ ID NO: 135826 - DNA, 6 bp, Unknown
  misc_feature (1)..( 6): Result.003 file - promoters60/4767063
ttttgt

SEQ ID NO: 135827 - DNA, 6 bp, Unknown
  misc_feature (1)..( 6): Result.003 file - promoters60/4767063
aataag

SEQ ID NO: 135828 - DNA, 6 bp, Unknown
  misc_feature (1)..( 6): Result.003 file - promoters60/4767063
aataag

SEQ ID NO: 135829 - DNA, 7 bp, Unknown
  misc_feature (1)..( 7): Result.003 file - promoters60/4767063
aaaaaaa

SEQ ID NO: 135830 - DNA, 7 bp, Unknown
  misc_feature (1)..( 7): Result.003 file - promoters60/4767063
aaaaaaa

SEQ ID NO: 135831 - DNA, 11 bp, Unknown
  misc_feature (1)..( 11): Result.003 file - promoters60/4767063
attcattaatt

SEQ ID NO: 135832 - DNA, 11 bp, Unknown
  misc_feature (1)..( 11): Result.003 file - promoters60/4767063
attaattaatt

SEQ ID NO: 135833 - DNA, 6 bp, Unknown
  misc_feature (1)..( 6): Result.003 file - promoters60/4767063
agtagt

SEQ ID NO: 135834 - DNA, 6 bp, Unknown
  misc_feature (1)..( 6): Result.003 file - promoters60/4767063
agtagt

SEQ ID NO: 135835 - DNA, 6 bp, Unknown
  misc_feature (1)..( 6): Result.003 file - promoters60/4767063
accaaa

SEQ ID NO: 135836 - DNA, 6 bp, Unknown
  misc_feature (1)..( 6): Result.003 file - promoters60/4767063
accaaa

SEQ ID NO: 135837 - DNA, 7 bp, Unknown
  misc_feature (1)..( 7): Result.003 file - promoters60/4767063
gttaacc

SEQ ID NO: 135838 - DNA, 7 bp, Unknown
  misc_feature (1)..( 7): Result.003 file - promoters60/4767063
gttaacc

SEQ ID NO: 135839 - DNA, 8 bp, Unknown
  misc_feature (1)..( 8): Result.003 file - promoters60/4767063
aaattata

SEQ ID NO: 135840 - DNA, 8 bp, Unknown
  misc_feature (1)..( 8): Result.003 file - promoters60/4767063
aaatgata

SEQ ID NO: 135841 - DNA, 10 bp, Unknown
  misc_feature (1)..( 10): Result.003 file - promoters60/4767063
caacttagac

SEQ ID NO: 135842 - DNA, 10 bp, Unknown
  misc_feature (1)..( 10): Result.003 file - promoters60/4767063
caaattagac

SEQ ID NO: 135843 - DNA, 9 bp, Unknown
  misc_feature (1)..( 9): Result.003 file - promoters60/4767063
ttcattttt

SEQ ID NO: 135844 - DNA, 9 bp, Unknown
  misc_feature (1)..( 9): Result.003 file - promoters60/4767063
ttcatcttt

SEQ ID NO: 135845 - DNA, 8 bp, Unknown
  misc_feature (1)..( 8): Result.003 file - promoters60/4767066
tttaatca

SEQ ID NO: 135846 - DNA, 8 bp, Unknown
  misc_feature (1)..( 8): Result.003 file - promoters60/4767066
cttagtca

SEQ ID NO: 135847 - DNA, 8 bp, Unknown
  misc_feature (1)..( 8): Result.003 file - promoters60/4767066
agtaatga

SEQ ID NO: 135848 - DNA, 9 bp, Unknown
  misc_feature (1)..( 9): Result.003 file - promoters60/4767066
aatttttca

SEQ ID NO: 135849 - DNA, 9 bp, Unknown
  misc_feature (1)..( 9): Result.003 file - promoters60/4767066
gatttttac

SEQ ID NO: 135850 - DNA, 9 bp, Unknown
  misc_feature (1)..( 9): Result.003 file - promoters60/4767066
tattattca

SEQ ID NO: 135851 - DNA, 9 bp, Unknown
  misc_feature (1)..( 9): Result.003 file - promoters60/4767066
tattattga

SEQ ID NO: 135852 - DNA, 8 bp, Unknown
  misc_feature (1)..( 8): Result.003 file - promoters60/4767066
tattgatc

SEQ ID NO: 135853 - DNA, 8 bp, Unknown
  misc_feature (1)..( 8): Result.003 file - promoters60/4767066
cattgatg

SEQ ID NO: 135854 - DNA, 8 bp, Unknown
  misc_feature (1)..( 8): Result.003 file - promoters60/4767066
catttatg

SEQ ID NO: 135855 - DNA, 8 bp, Unknown
  misc_feature (1)..( 8): Result.003 file - promoters60/4767066
aattttta

SEQ ID NO: 135856 - DNA, 8 bp, Unknown
  misc_feature (1)..( 8): Result.003 file - promoters60/4767066
aatttttt

SEQ ID NO: 135857 - DNA, 9 bp, Unknown
  misc_feature (1)..( 9): Result.003 file - promoters60/4767066
gctttcttt

SEQ ID NO: 135858 - DNA, 6 bp, Unknown
  misc_feature (1)..( 6): Result.003 file - promoters60/4767066
tttttt

SEQ ID NO: 135859 - DNA, 6 bp, Unknown
  misc_feature (1)..( 6): Result.003 file - promoters60/4767066
tttttt

SEQ ID NO: 135860 - DNA, 7 bp, Unknown
  misc_feature (1)..( 7): Result.003 file - promoters60/4767066
tttcttt

SEQ ID NO: 135861 - DNA, 13 bp, Unknown
  misc_feature (1)..( 13): Result.003 file - promoters60/4767066
gtgactaattctt

SEQ ID NO: 135862 - DNA, 13 bp, Unknown
  misc_feature (1)..( 13): Result.003 file - promoters60/4767066
tttgcaaattctc

SEQ ID NO: 135863 - DNA, 14 bp, Unknown
  misc_feature (1)..( 14): Result.003 file - promoters60/4767066
tttttcaatttctc

SEQ ID NO: 135864 - DNA, 8 bp, Unknown
  misc_feature (1)..( 8): Result.003 file - promoters60/4767066
caaaaact

SEQ ID NO: 135865 - DNA, 8 bp, Unknown
  misc_feature (1)..( 8): Result.003 file - promoters60/4767066
gcaaaact

SEQ ID NO: 135866 - DNA, 8 bp, Unknown
  misc_feature (1)..( 8): Result.003 file - promoters60/4767066
caaaaact

SEQ ID NO: 135867 - DNA, 9 bp, Unknown
  misc_feature (1)..( 9): Result.003 file - promoters60/4767066
taaaacatt

SEQ ID NO: 135868 - DNA, 9 bp, Unknown
  misc_feature (1)..( 9): Result.003 file - promoters60/4767066
aaaaacaaa

SEQ ID NO: 135869 - DNA, 9 bp, Unknown
  misc_feature (1)..( 9): Result.003 file - promoters60/4767066
aaaaagaaa

SEQ ID NO: 135870 - DNA, 7 bp, Unknown
  misc_feature (1)..( 7): Result.003 file - promoters60/4767066
gagaaat

SEQ ID NO: 135871 - DNA, 7 bp, Unknown
  misc_feature (1)..( 7): Result.003 file - promoters60/4767066
aagaaat

SEQ ID NO: 135872 - DNA, 7 bp, Unknown
  misc_feature (1)..( 7): Result.003 file - promoters60/4767066
taaaaaa

SEQ ID NO: 135873 - DNA, 11 bp, Unknown
  misc_feature (1)..( 11): Result.003 file - promoters60/4767144
aaaaaattaaa

SEQ ID NO: 135874 - DNA, 11 bp, Unknown
  misc_feature (1)..( 11): Result.003 file - promoters60/4767144
aaaatatttat

SEQ ID NO: 135875 - DNA, 11 bp, Unknown
  misc_feature (1)..( 11): Result.003 file - promoters60/4767144
taaaaattaaa

SEQ ID NO: 135876 - DNA, 11 bp, Unknown
  misc_feature (1)..( 11): Result.003 file - promoters60/4767144
cgaagattaaa

SEQ ID NO: 135877 - DNA, 13 bp, Unknown
  misc_feature (1)..( 13): Result.003 file - promoters60/4767144
aaaaattaaacaa

SEQ ID NO: 135878 - DNA, 13 bp, Unknown
  misc_feature (1)..( 13): Result.003 file - promoters60/4767144
gataataaaatat

SEQ ID NO: 135879 - DNA, 13 bp, Unknown
  misc_feature (1)..( 13): Result.003 file - promoters60/4767144
gaagattaaacaa

SEQ ID NO: 135880 - DNA, 13 bp, Unknown
  misc_feature (1)..( 13): Result.003 file - promoters60/4767144
aaaaattaaaatc

SEQ ID NO: 135881 - DNA, 12 bp, Unknown
  misc_feature (1)..( 12): Result.003 file - promoters60/4767144
ttaatagagaga

SEQ ID NO: 135882 - DNA, 12 bp, Unknown
  misc_feature (1)..( 12): Result.003 file - promoters60/4767144
ttgtgagataga

SEQ ID NO: 135883 - DNA, 12 bp, Unknown
  misc_feature (1)..( 12): Result.003 file - promoters60/4767144
atttttgatata

SEQ ID NO: 135884 - DNA, 12 bp, Unknown
  misc_feature (1)..( 12): Result.003 file - promoters60/4767144
atttttaaccaa

SEQ ID NO: 135885 - DNA, 10 bp, Unknown
  misc_feature (1)..( 10): Result.003 file - promoters60/4767144
atattgctta

SEQ ID NO: 135886 - DNA, 10 bp, Unknown
  misc_feature (1)..( 10): Result.003 file - promoters60/4767144
atatttcttg

SEQ ID NO: 135887 - DNA, 10 bp, Unknown
  misc_feature (1)..( 10): Result.003 file - promoters60/4767144
ccgttgctta

SEQ ID NO: 135888 - DNA, 10 bp, Unknown
  misc_feature (1)..( 10): Result.003 file - promoters60/4767144
tctattcttg

SEQ ID NO: 135889 - DNA, 6 bp, Unknown
  misc_feature (1)..( 6): Result.003 file - promoters60/4767148
acaatt

SEQ ID NO: 135890 - DNA, 6 bp, Unknown
  misc_feature (1)..( 6): Result.003 file - promoters60/4767148
acaatt

SEQ ID NO: 135891 - DNA, 6 bp, Unknown
  misc_feature (1)..( 6): Result.003 file - promoters60/4767148
atctgt

SEQ ID NO: 135892 - DNA, 6 bp, Unknown
  misc_feature (1)..( 6): Result.003 file - promoters60/4767148
atctgt

SEQ ID NO: 135893 - DNA, 8 bp, Unknown
  misc_feature (1)..( 8): Result.003 file - promoters60/4767148
attgatat

SEQ ID NO: 135894 - DNA, 8 bp, Unknown
  misc_feature (1)..( 8): Result.003 file - promoters60/4767148
attcatat

SEQ ID NO: 135895 - DNA, 6 bp, Unknown
  misc_feature (1)..( 6): Result.003 file - promoters60/4767148
acaaat

SEQ ID NO: 135896 - DNA, 6 bp, Unknown
  misc_feature (1)..( 6): Result.003 file - promoters60/4767148
acaaat

SEQ ID NO: 135897 - DNA, 7 bp, Unknown
  misc_feature (1)..( 7): Result.003 file - promoters60/4767148
atttcta

SEQ ID NO: 135898 - DNA, 7 bp, Unknown
  misc_feature (1)..( 7): Result.003 file - promoters60/4767148
atttctt

SEQ ID NO: 135899 - DNA, 7 bp, Unknown
  misc_feature (1)..( 7): Result.003 file - promoters60/4767148
attcctt

SEQ ID NO: 135900 - DNA, 7 bp, Unknown
  misc_feature (1)..( 7): Result.003 file - promoters60/4767148
tacaaaa

SEQ ID NO: 135901 - DNA, 7 bp, Unknown
  misc_feature (1)..( 7): Result.003 file - promoters60/4767148
tacaaaa

SEQ ID NO: 135902 - DNA, 6 bp, Unknown
  misc_feature (1)..( 6): Result.003 file - promoters60/4767148
ttctaa

SEQ ID NO: 135903 - DNA, 6 bp, Unknown
  misc_feature (1)..( 6): Result.003 file - promoters60/4767148
ttctaa

SEQ ID NO: 135904 - DNA, 8 bp, Unknown
  misc_feature (1)..( 8): Result.003 file - promoters60/4767148
tattgatt

SEQ ID NO: 135905 - DNA, 8 bp, Unknown
  misc_feature (1)..( 8): Result.003 file - promoters60/4767148
tatttatt

SEQ ID NO: 135906 - DNA, 12 bp, Unknown
  misc_feature (1)..( 12): Result.003 file - promoters60/4767148
agtaactttaga

SEQ ID NO: 135907 - DNA, 12 bp, Unknown
  misc_feature (1)..( 12): Result.003 file - promoters60/4767148
agtaaatttgac

SEQ ID NO: 135908 - DNA, 12 bp, Unknown
  misc_feature (1)..( 12): Result.003 file - promoters60/4767148
aacaaatttgac

SEQ ID NO: 135909 - DNA, 6 bp, Unknown
  misc_feature (1)..( 6): Result.003 file - promoters60/4767148
tatgct

SEQ ID NO: 135910 - DNA, 6 bp, Unknown
  misc_feature (1)..( 6): Result.003 file - promoters60/4767148
tatgct

SEQ ID NO: 135911 - DNA, 6 bp, Unknown
  misc_feature (1)..( 6): Result.003 file - promoters60/4767148
tatgaa

SEQ ID NO: 135912 - DNA, 6 bp, Unknown
  misc_feature (1)..( 6): Result.003 file - promoters60/4767148
tatgaa

SEQ ID NO: 135913 - DNA, 6 bp, Unknown
  misc_feature (1)..( 6): Result.003 file - promoters60/4767148
taaata

SEQ ID NO: 135914 - DNA, 6 bp, Unknown
  misc_feature (1)..( 6): Result.003 file - promoters60/4767148
taaata

SEQ ID NO: 135915 - DNA, 6 bp, Unknown
  misc_feature (1)..( 6): Result.003 file - promoters60/4767148
ttatta

SEQ ID NO: 135916 - DNA, 6 bp, Unknown
  misc_feature (1)..( 6): Result.003 file - promoters60/4767148
ttatta

SEQ ID NO: 135917 - DNA, 6 bp, Unknown
  misc_feature (1)..( 6): Result.003 file - promoters60/4767148
attata

SEQ ID NO: 135918 - DNA, 6 bp, Unknown
  misc_feature (1)..( 6): Result.003 file - promoters60/4767148
attata

SEQ ID NO: 135919 - DNA, 7 bp, Unknown
  misc_feature (1)..( 7): Result.003 file - promoters60/4767148
atagctt

SEQ ID NO: 135920 - DNA, 7 bp, Unknown
  misc_feature (1)..( 7): Result.003 file - promoters60/4767148
ataactt

SEQ ID NO: 135921 - DNA, 6 bp, Unknown
  misc_feature (1)..( 6): Result.003 file - promoters60/4767148
aaattt

SEQ ID NO: 135922 - DNA, 6 bp, Unknown
  misc_feature (1)..( 6): Result.003 file - promoters60/4767148
aaattt

SEQ ID NO: 135923 - DNA, 7 bp, Unknown
  misc_feature (1)..( 7): Result.003 file - promoters60/4767148
aaacagt

SEQ ID NO: 135924 - DNA, 7 bp, Unknown
  misc_feature (1)..( 7): Result.003 file - promoters60/4767148
aaaaagt

SEQ ID NO: 135925 - DNA, 8 bp, Unknown
  misc_feature (1)..( 8): Result.003 file - promoters60/4767148
gttttaaa

SEQ ID NO: 135926 - DNA, 8 bp, Unknown
  misc_feature (1)..( 8): Result.003 file - promoters60/4767148
gttttaaa

SEQ ID NO: 135927 - DNA, 7 bp, Unknown
  misc_feature (1)..( 7): Result.003 file - promoters60/4767195
aaaataa

SEQ ID NO: 135928 - DNA, 7 bp, Unknown
  misc_feature (1)..( 7): Result.003 file - promoters60/4767195
aaactaa

SEQ ID NO: 135929 - DNA, 7 bp, Unknown
  misc_feature (1)..( 7): Result.003 file - promoters60/4767195
atactaa

SEQ ID NO: 135930 - DNA, 7 bp, Unknown
  misc_feature (1)..( 7): Result.003 file - promoters60/4767195
atactaa

SEQ ID NO: 135931 - DNA, 10 bp, Unknown
  misc_feature (1)..( 10): Result.003 file - promoters60/4767195
ttctaaaatt

SEQ ID NO: 135932 - DNA, 10 bp, Unknown
  misc_feature (1)..( 10): Result.003 file - promoters60/4767195
ttctaatatt

SEQ ID NO: 135933 - DNA, 7 bp, Unknown
  misc_feature (1)..( 7): Result.003 file - promoters60/4767195
ttatttt

SEQ ID NO: 135934 - DNA, 7 bp, Unknown
  misc_feature (1)..( 7): Result.003 file - promoters60/4767195
ttaattt

SEQ ID NO: 135935 - DNA, 8 bp, Unknown
  misc_feature (1)..( 8): Result.003 file - promoters60/4767195
tctataag

SEQ ID NO: 135936 - DNA, 8 bp, Unknown
  misc_feature (1)..( 8): Result.003 file - promoters60/4767195
tctataag

SEQ ID NO: 135937 - DNA, 7 bp, Unknown
  misc_feature (1)..( 7): Result.003 file - promoters60/4767195
tgaagat

SEQ ID NO: 135938 - DNA, 7 bp, Unknown
  misc_feature (1)..( 7): Result.003 file - promoters60/4767195
tgaagaa

SEQ ID NO: 135939 - DNA, 7 bp, Unknown
  misc_feature (1)..( 7): Result.003 file - promoters60/4767195
agaagat

SEQ ID NO: 135940 - DNA, 6 bp, Unknown
  misc_feature (1)..( 6): Result.003 file - promoters60/4767195
aatttt

SEQ ID NO: 135941 - DNA, 6 bp, Unknown
  misc_feature (1)..( 6): Result.003 file - promoters60/4767195
aatttt

SEQ ID NO: 135942 - DNA, 8 bp, Unknown
  misc_feature (1)..( 8): Result.003 file - promoters60/4767195
tgggccta

SEQ ID NO: 135943 - DNA, 8 bp, Unknown
  misc_feature (1)..( 8): Result.003 file - promoters60/4767195
tgggccta

SEQ ID NO: 135944 - DNA, 6 bp, Unknown
  misc_feature (1)..( 6): Result.003 file - promoters60/4767195
gcattt

SEQ ID NO: 135945 - DNA, 6 bp, Unknown
  misc_feature (1)..( 6): Result.003 file - promoters60/4767195
gcattt

SEQ ID NO: 135946 - DNA, 6 bp, Unknown
  misc_feature (1)..( 6): Result.003 file - promoters60/4767195
gaattt

SEQ ID NO: 135947 - DNA, 6 bp, Unknown
  misc_feature (1)..( 6): Result.003 file - promoters60/4767195
gaattt

SEQ ID NO: 135948 - DNA, 7 bp, Unknown
  misc_feature (1)..( 7): Result.003 file - promoters60/4767195
tttctaa

SEQ ID NO: 135949 - DNA, 7 bp, Unknown
  misc_feature (1)..( 7): Result.003 file - promoters60/4767195
tttgtaa

SEQ ID NO: 135950 - DNA, 7 bp, Unknown
  misc_feature (1)..( 7): Result.003 file - promoters60/4767195
tttattt

SEQ ID NO: 135951 - DNA, 7 bp, Unknown
  misc_feature (1)..( 7): Result.003 file - promoters60/4767195
tttgttt

SEQ ID NO: 135952 - DNA, 6 bp, Unknown
  misc_feature (1)..( 6): Result.003 file - promoters60/4767195
acattt

SEQ ID NO: 135953 - DNA, 6 bp, Unknown
  misc_feature (1)..( 6): Result.003 file - promoters60/4767195
acattt

SEQ ID NO: 135954 - DNA, 6 bp, Unknown
  misc_feature (1)..( 6): Result.003 file - promoters60/4767195
cacatg

SEQ ID NO: 135955 - DNA, 6 bp, Unknown
  misc_feature (1)..( 6): Result.003 file - promoters60/4767195
cacatg

SEQ ID NO: 135956 - DNA, 6 bp, Unknown
  misc_feature (1)..( 6): Result.003 file - promoters60/4767195
gagatt

SEQ ID NO: 135957 - DNA, 6 bp, Unknown
  misc_feature (1)..( 6): Result.003 file - promoters60/4767195
gagatt

SEQ ID NO: 135958 - DNA, 6 bp, Unknown
  misc_feature (1)..( 6): Result.003 file - promoters60/4767195
ttgggt

SEQ ID NO: 135959 - DNA, 6 bp, Unknown
  misc_feature (1)..( 6): Result.003 file - promoters60/4767195
ttgggt

SEQ ID NO: 135960 - DNA, 6 bp, Unknown
  misc_feature (1)..( 6): Result.003 file - promoters60/4767195
agatga

SEQ ID NO: 135961 - DNA, 6 bp, Unknown
  misc_feature (1)..( 6): Result.003 file - promoters60/4767195
agatga

SEQ ID NO: 135962 - DNA, 9 bp, Unknown
  misc_feature (1)..( 9): Result.003 file - promoters60/4767195
ggttaatgg

SEQ ID NO: 135963 - DNA, 9 bp, Unknown
  misc_feature (1)..( 9): Result.003 file - promoters60/4767195
ggtttatgg

SEQ ID NO: 135964 - DNA, 10 bp, Unknown
  misc_feature (1)..( 10): Result.003 file - promoters60/4767298
tatttcattt

SEQ ID NO: 135965 - DNA, 10 bp, Unknown
  misc_feature (1)..( 10): Result.003 file - promoters60/4767298
tatatcacaa

SEQ ID NO: 135966 - DNA, 10 bp, Unknown
  misc_feature (1)..( 10): Result.003 file - promoters60/4767298
tatttccttc

SEQ ID NO: 135967 - DNA, 10 bp, Unknown
  misc_feature (1)..( 10): Result.003 file - promoters60/4767298
tatgtcacta

SEQ ID NO: 135968 - DNA, 10 bp, Unknown
  misc_feature (1)..( 10): Result.003 file - promoters60/4767298
aatatcaata

SEQ ID NO: 135969 - DNA, 10 bp, Unknown
  misc_feature (1)..( 10): Result.003 file - promoters60/4767298
aatctcaata

SEQ ID NO: 135970 - DNA, 11 bp, Unknown
  misc_feature (1)..( 11): Result.003 file - promoters60/4767298
tcctaaaatca

SEQ ID NO: 135971 - DNA, 11 bp, Unknown
  misc_feature (1)..( 11): Result.003 file - promoters60/4767298
ttttaaaatat

SEQ ID NO: 135972 - DNA, 11 bp, Unknown
  misc_feature (1)..( 11): Result.003 file - promoters60/4767298
cattaaaatat

SEQ ID NO: 135973 - DNA, 11 bp, Unknown
  misc_feature (1)..( 11): Result.003 file - promoters60/4767298
tcctaaaatag

SEQ ID NO: 135974 - DNA, 11 bp, Unknown
  misc_feature (1)..( 11): Result.003 file - promoters60/4767298
atgaaaaataa

SEQ ID NO: 135975 - DNA, 11 bp, Unknown
  misc_feature (1)..( 11): Result.003 file - promoters60/4767298
atctaatatat

SEQ ID NO: 135976 - DNA, 13 bp, Unknown
  misc_feature (1)..( 13): Result.003 file - promoters60/4767298
gacattataaaat

SEQ ID NO: 135977 - DNA, 13 bp, Unknown
  misc_feature (1)..( 13): Result.003 file - promoters60/4767298
ctttttataatca

SEQ ID NO: 135978 - DNA, 13 bp, Unknown
  misc_feature (1)..( 13): Result.003 file - promoters60/4767298
tgaattctaaaat

SEQ ID NO: 135979 - DNA, 13 bp, Unknown
  misc_feature (1)..( 13): Result.003 file - promoters60/4767298
ctttttttaacaa

SEQ ID NO: 135980 - DNA, 13 bp, Unknown
  misc_feature (1)..( 13): Result.003 file - promoters60/4767298
tgtcttttatcaa

SEQ ID NO: 135981 - DNA, 13 bp, Unknown
  misc_feature (1)..( 13): Result.003 file - promoters60/4767298
aatcttttgacag

SEQ ID NO: 135982 - DNA, 7 bp, Unknown
  misc_feature (1)..( 7): Result.003 file - promoters60/4767318
aaattat

SEQ ID NO: 135983 - DNA, 7 bp, Unknown
  misc_feature (1)..( 7): Result.003 file - promoters60/4767318
aaaatat

SEQ ID NO: 135984 - DNA, 7 bp, Unknown
  misc_feature (1)..( 7): Result.003 file - promoters60/4767318
agagtaa

SEQ ID NO: 135985 - DNA, 7 bp, Unknown
  misc_feature (1)..( 7): Result.003 file - promoters60/4767318
agattaa

SEQ ID NO: 135986 - DNA, 7 bp, Unknown
  misc_feature (1)..( 7): Result.003 file - promoters60/4767318
aaagact

SEQ ID NO: 135987 - DNA, 7 bp, Unknown
  misc_feature (1)..( 7): Result.003 file - promoters60/4767318
aaatact

SEQ ID NO: 135988 - DNA, 13 bp, Unknown
  misc_feature (1)..( 13): Result.003 file - promoters60/4767318
tttagttttcctt

SEQ ID NO: 135989 - DNA, 13 bp, Unknown
  misc_feature (1)..( 13): Result.003 file - promoters60/4767318
ttttgttttcctt

SEQ ID NO: 135990 - DNA, 10 bp, Unknown
  misc_feature (1)..( 10): Result.003 file - promoters60/4767318
aaatacacaa

SEQ ID NO: 135991 - DNA, 10 bp, Unknown
  misc_feature (1)..( 10): Result.003 file - promoters60/4767318
aaaaacacaa

SEQ ID NO: 135992 - DNA, 10 bp, Unknown
  misc_feature (1)..( 10): Result.003 file - promoters60/4767318
aaacacacgc

SEQ ID NO: 135993 - DNA, 8 bp, Unknown
  misc_feature (1)..( 8): Result.003 file - promoters60/4767318
tgttattt

SEQ ID NO: 135994 - DNA, 8 bp, Unknown
  misc_feature (1)..( 8): Result.003 file - promoters60/4767318
tgtaattt

SEQ ID NO: 135995 - DNA, 7 bp, Unknown
  misc_feature (1)..( 7): Result.003 file - promoters60/4767318
cttaaac

SEQ ID NO: 135996 - DNA, 7 bp, Unknown
  misc_feature (1)..( 7): Result.003 file - promoters60/4767318
cttcaac

SEQ ID NO: 135997 - DNA, 6 bp, Unknown
  misc_feature (1)..( 6): Result.003 file - promoters60/4767318
cattaa

SEQ ID NO: 135998 - DNA, 6 bp, Unknown
  misc_feature (1)..( 6): Result.003 file - promoters60/4767318
cattaa

SEQ ID NO: 135999 - DNA, 6 bp, Unknown
  misc_feature (1)..( 6): Result.003 file - promoters60/4767318
ctaaaa

SEQ ID NO: 136000 - DNA, 6 bp, Unknown
  misc_feature (1)..( 6): Result.003 file - promoters60/4767318
ctaaaa

SEQ ID NO: 136001 - DNA, 6 bp, Unknown
  misc_feature (1)..( 6): Result.003 file - promoters60/4767318
gtattt

SEQ ID NO: 136002 - DNA, 6 bp, Unknown
  misc_feature (1)..( 6): Result.003 file - promoters60/4767318
gtattt

SEQ ID NO: 136003 - DNA, 7 bp, Unknown
  misc_feature (1)..( 7): Result.003 file - promoters60/4767318
ttataaa

SEQ ID NO: 136004 - DNA, 7 bp, Unknown
  misc_feature (1)..( 7): Result.003 file - promoters60/4767318
ttataaa

SEQ ID NO: 136005 - DNA, 8 bp, Unknown
  misc_feature (1)..( 8): Result.003 file - promoters60/4767318
cttctctt

SEQ ID NO: 136006 - DNA, 8 bp, Unknown
  misc_feature (1)..( 8): Result.003 file - promoters60/4767318
cttttctt

SEQ ID NO: 136007 - DNA, 9 bp, Unknown
  misc_feature (1)..( 9): Result.003 file - promoters60/4767318
tttaattag

SEQ ID NO: 136008 - DNA, 9 bp, Unknown
  misc_feature (1)..( 9): Result.003 file - promoters60/4767318
tttacttaa

SEQ ID NO: 136009 - DNA, 9 bp, Unknown
  misc_feature (1)..( 9): Result.003 file - promoters60/4767318
ttttcttaa

SEQ ID NO: 136010 - DNA, 6 bp, Unknown
  misc_feature (1)..( 6): Result.003 file - promoters60/4767318
cttgtt

SEQ ID NO: 136011 - DNA, 6 bp, Unknown
  misc_feature (1)..( 6): Result.003 file - promoters60/4767318
cttgtt

SEQ ID NO: 136012 - DNA, 8 bp, Unknown
  misc_feature (1)..( 8): Result.003 file - promoters60/4767318
acaagatt

SEQ ID NO: 136013 - DNA, 8 bp, Unknown
  misc_feature (1)..( 8): Result.003 file - promoters60/4767318
acatgatt

SEQ ID NO: 136014 - DNA, 7 bp, Unknown
  misc_feature (1)..( 7): Result.003 file - promoters60/4767318
tacgttt

SEQ ID NO: 136015 - DNA, 7 bp, Unknown
  misc_feature (1)..( 7): Result.003 file - promoters60/4767318
tactttt

SEQ ID NO: 136016 - DNA, 7 bp, Unknown
  misc_feature (1)..( 7): Result.003 file - promoters60/4767318
taagtta

SEQ ID NO: 136017 - DNA, 7 bp, Unknown
  misc_feature (1)..( 7): Result.003 file - promoters60/4767318
taaatta

SEQ ID NO: 136018 - DNA, 8 bp, Unknown
  misc_feature (1)..( 8): Result.003 file - promoters60/4767318
gaaactaa

SEQ ID NO: 136019 - DNA, 8 bp, Unknown
  misc_feature (1)..( 8): Result.003 file - promoters60/4767318
gaatctaa

SEQ ID NO: 136020 - DNA, 8 bp, Unknown
  misc_feature (1)..( 8): Result.003 file - promoters60/4767318
gtcttcat

SEQ ID NO: 136021 - DNA, 8 bp, Unknown
  misc_feature (1)..( 8): Result.003 file - promoters60/4767318
gtcttcat

SEQ ID NO: 136022 - DNA, 6 bp, Unknown
  misc_feature (1)..( 6): Result.003 file - promoters60/4767318
ttatta

SEQ ID NO: 136023 - DNA, 6 bp, Unknown
  misc_feature (1)..( 6): Result.003 file - promoters60/4767318
ttatta

SEQ ID NO: 136024 - DNA, 7 bp, Unknown
  misc_feature (1)..( 7): Result.003 file - promoters60/4767318
ttaatat

SEQ ID NO: 136025 - DNA, 7 bp, Unknown
  misc_feature (1)..( 7): Result.003 file - promoters60/4767318
ttattat

SEQ ID NO: 136026 - DNA, 7 bp, Unknown
  misc_feature (1)..( 7): Result.003 file - promoters60/4767318
acaaaat

SEQ ID NO: 136027 - DNA, 7 bp, Unknown
  misc_feature (1)..( 7): Result.003 file - promoters60/4767318
acaaaat

SEQ ID NO: 136028 - DNA, 11 bp, Unknown
  misc_feature (1)..( 11): Result.003 file - promoters60/4767330
aacatttcctt

SEQ ID NO: 136029 - DNA, 11 bp, Unknown
  misc_feature (1)..( 11): Result.003 file - promoters60/4767330
aacatttcttt

SEQ ID NO: 136030 - DNA, 11 bp, Unknown
  misc_feature (1)..( 11): Result.003 file - promoters60/4767330
ataatttattt

SEQ ID NO: 136031 - DNA, 6 bp, Unknown
  misc_feature (1)..( 6): Result.003 file - promoters60/4767330
tttgtt

SEQ ID NO: 136032 - DNA, 6 bp, Unknown
  misc_feature (1)..( 6): Result.003 file - promoters60/4767330
tttgtt

SEQ ID NO: 136033 - DNA, 11 bp, Unknown
  misc_feature (1)..( 11): Result.003 file - promoters60/4767330
atttttgtttg

SEQ ID NO: 136034 - DNA, 11 bp, Unknown
  misc_feature (1)..( 11): Result.003 file - promoters60/4767330
atttctgtttg

SEQ ID NO: 136035 - DNA, 7 bp, Unknown
  misc_feature (1)..( 7): Result.003 file - promoters60/4767330
aaagaac

SEQ ID NO: 136036 - DNA, 7 bp, Unknown
  misc_feature (1)..( 7): Result.003 file - promoters60/4767330
aaataac

SEQ ID NO: 136037 - DNA, 6 bp, Unknown
  misc_feature (1)..( 6): Result.003 file - promoters60/4767330
ttaatt

SEQ ID NO: 136038 - DNA, 6 bp, Unknown
  misc_feature (1)..( 6): Result.003 file - promoters60/4767330
ttaatt

SEQ ID NO: 136039 - DNA, 6 bp, Unknown
  misc_feature (1)..( 6): Result.003 file - promoters60/4767330
acaaat

SEQ ID NO: 136040 - DNA, 6 bp, Unknown
  misc_feature (1)..( 6): Result.003 file - promoters60/4767330
acaaat

SEQ ID NO: 136041 - DNA, 7 bp, Unknown
  misc_feature (1)..( 7): Result.003 file - promoters60/4767330
agtttat

SEQ ID NO: 136042 - DNA, 7 bp, Unknown
  misc_feature (1)..( 7): Result.003 file - promoters60/4767330
agtatat

SEQ ID NO: 136043 - DNA, 7 bp, Unknown
  misc_feature (1)..( 7): Result.003 file - promoters60/4767330
tattttt

SEQ ID NO: 136044 - DNA, 7 bp, Unknown
  misc_feature (1)..( 7): Result.003 file - promoters60/4767330
tatattt

SEQ ID NO: 136045 - DNA, 6 bp, Unknown
  misc_feature (1)..( 6): Result.003 file - promoters60/4767330
ttttct

SEQ ID NO: 136046 - DNA, 6 bp, Unknown
  misc_feature (1)..( 6): Result.003 file - promoters60/4767330
ttttct

SEQ ID NO: 136047 - DNA, 8 bp, Unknown
  misc_feature (1)..( 8): Result.003 file - promoters60/4767330
caattatt

SEQ ID NO: 136048 - DNA, 8 bp, Unknown
  misc_feature (1)..( 8): Result.003 file - promoters60/4767330
caattatt

SEQ ID NO: 136049 - DNA, 8 bp, Unknown
  misc_feature (1)..( 8): Result.003 file - promoters60/4767330
caattttt

SEQ ID NO: 136050 - DNA, 8 bp, Unknown
  misc_feature (1)..( 8): Result.003 file - promoters60/4767330
caatattt

SEQ ID NO: 136051 - DNA, 8 bp, Unknown
  misc_feature (1)..( 8): Result.003 file - promoters60/4767330
cgatattt

SEQ ID NO: 136052 - DNA, 6 bp, Unknown
  misc_feature (1)..( 6): Result.003 file - promoters60/4767330
taatta

SEQ ID NO: 136053 - DNA, 6 bp, Unknown
  misc_feature (1)..( 6): Result.003 file - promoters60/4767330
taatta

SEQ ID NO: 136054 - DNA, 8 bp, Unknown
  misc_feature (1)..( 8): Result.003 file - promoters60/4767330
tttagatt

SEQ ID NO: 136055 - DNA, 8 bp, Unknown
  misc_feature (1)..( 8): Result.003 file - promoters60/4767330
tttatatt

SEQ ID NO: 136056 - DNA, 6 bp, Unknown
  misc_feature (1)..( 6): Result.003 file - promoters60/4767330
ataata

SEQ ID NO: 136057 - DNA, 6 bp, Unknown
  misc_feature (1)..( 6): Result.003 file - promoters60/4767330
ataata

SEQ ID NO: 136058 - DNA, 6 bp, Unknown
  misc_feature (1)..( 6): Result.003 file - promoters60/4767330
attttt

SEQ ID NO: 136059 - DNA, 6 bp, Unknown
  misc_feature (1)..( 6): Result.003 file - promoters60/4767330
attttt

SEQ ID NO: 136060 - DNA, 6 bp, Unknown
  misc_feature (1)..( 6): Result.003 file - promoters60/4767330
aataaa

SEQ ID NO: 136061 - DNA, 6 bp, Unknown
  misc_feature (1)..( 6): Result.003 file - promoters60/4767330
aataaa

SEQ ID NO: 136062 - DNA, 6 bp, Unknown
  misc_feature (1)..( 6): Result.003 file - promoters60/4767330
aaattt

SEQ ID NO: 136063 - DNA, 6 bp, Unknown
  misc_feature (1)..( 6): Result.003 file - promoters60/4767330
aaattt

SEQ ID NO: 136064 - DNA, 10 bp, Unknown
  misc_feature (1)..( 10): Result.003 file - promoters60/4767330
ccccaaaacc

SEQ ID NO: 136065 - DNA, 10 bp, Unknown
  misc_feature (1)..( 10): Result.003 file - promoters60/4767330
ccctaaaacc

SEQ ID NO: 136066 - DNA, 7 bp, Unknown
  misc_feature (1)..( 7): Result.003 file - promoters60/4767330
aaacgta

SEQ ID NO: 136067 - DNA, 7 bp, Unknown
  misc_feature (1)..( 7): Result.003 file - promoters60/4767330
aaatgta

SEQ ID NO: 136068 - DNA, 9 bp, Unknown
  misc_feature (1)..( 9): Result.003 file - promoters60/4767330
aatatgttt

SEQ ID NO: 136069 - DNA, 9 bp, Unknown
  misc_feature (1)..( 9): Result.003 file - promoters60/4767330
aatatattt

SEQ ID NO: 136070 - DNA, 8 bp, Unknown
  misc_feature (1)..( 8): Result.003 file - promoters60/4767330
taaaataa

SEQ ID NO: 136071 - DNA, 8 bp, Unknown
  misc_feature (1)..( 8): Result.003 file - promoters60/4767330
taaaataa

SEQ ID NO: 136072 - DNA, 7 bp, Unknown
  misc_feature (1)..( 7): Result.003 file - promoters60/4767330
aaacaat

SEQ ID NO: 136073 - DNA, 7 bp, Unknown
  misc_feature (1)..( 7): Result.003 file - promoters60/4767330
aaaaaat

SEQ ID NO: 136074 - DNA, 8 bp, Unknown
  misc_feature (1)..( 8): Result.003 file - promoters60/4767330
tttcaata

SEQ ID NO: 136075 - DNA, 8 bp, Unknown
  misc_feature (1)..( 8): Result.003 file - promoters60/4767330
tttcaata

SEQ ID NO: 136076 - DNA, 6 bp, Unknown
  misc_feature (1)..( 6): Result.003 file - promoters60/4767333
gacaaa

SEQ ID NO: 136077 - DNA, 6 bp, Unknown
  misc_feature (1)..( 6): Result.003 file - promoters60/4767333
gacaaa

SEQ ID NO: 136078 - DNA, 7 bp, Unknown
  misc_feature (1)..( 7): Result.003 file - promoters60/4767333
tttcttt

SEQ ID NO: 136079 - DNA, 7 bp, Unknown
  misc_feature (1)..( 7): Result.003 file - promoters60/4767333
tttgttt

SEQ ID NO: 136080 - DNA, 10 bp, Unknown
  misc_feature (1)..( 10): Result.003 file - promoters60/4767333
atcaaaaaag

SEQ ID NO: 136081 - DNA, 10 bp, Unknown
  misc_feature (1)..( 10): Result.003 file - promoters60/4767333
atcgaaatta

SEQ ID NO: 136082 - DNA, 10 bp, Unknown
  misc_feature (1)..( 10): Result.003 file - promoters60/4767333
cgcgaaacga

SEQ ID NO: 136083 - DNA, 8 bp, Unknown
  misc_feature (1)..( 8): Result.003 file - promoters60/4767333
aaacataa

SEQ ID NO: 136084 - DNA, 8 bp, Unknown
  misc_feature (1)..( 8): Result.003 file - promoters60/4767333
aaacgtaa

SEQ ID NO: 136085 - DNA, 6 bp, Unknown
  misc_feature (1)..( 6): Result.003 file - promoters60/4767333
gaaaat

SEQ ID NO: 136086 - DNA, 6 bp, Unknown
  misc_feature (1)..( 6): Result.003 file - promoters60/4767333
gaaaat

SEQ ID NO: 136087 - DNA, 6 bp, Unknown
  misc_feature (1)..( 6): Result.003 file - promoters60/4767333
aggtct

SEQ ID NO: 136088 - DNA, 6 bp, Unknown
  misc_feature (1)..( 6): Result.003 file - promoters60/4767333
aggtct

SEQ ID NO: 136089 - DNA, 7 bp, Unknown
  misc_feature (1)..( 7): Result.003 file - promoters60/4767333
ggtttct

SEQ ID NO: 136090 - DNA, 7 bp, Unknown
  misc_feature (1)..( 7): Result.003 file - promoters60/4767333
ggtttct

SEQ ID NO: 136091 - DNA, 6 bp, Unknown
  misc_feature (1)..( 6): Result.003 file - promoters60/4767333
agtttt

SEQ ID NO: 136092 - DNA, 6 bp, Unknown
  misc_feature (1)..( 6): Result.003 file - promoters60/4767333
agtttt

SEQ ID NO: 136093 - DNA, 7 bp, Unknown
  misc_feature (1)..( 7): Result.003 file - promoters60/4767333
taaaatc

SEQ ID NO: 136094 - DNA, 7 bp, Unknown
  misc_feature (1)..( 7): Result.003 file - promoters60/4767333
taagatc

SEQ ID NO: 136095 - DNA, 7 bp, Unknown
  misc_feature (1)..( 7): Result.003 file - promoters60/4767333
aaaccct

SEQ ID NO: 136096 - DNA, 7 bp, Unknown
  misc_feature (1)..( 7): Result.003 file - promoters60/4767333
aaaacct

SEQ ID NO: 136097 - DNA, 6 bp, Unknown
  misc_feature (1)..( 6): Result.003 file - promoters60/4767333
accatt

SEQ ID NO: 136098 - DNA, 6 bp, Unknown
  misc_feature (1)..( 6): Result.003 file - promoters60/4767333
accatt

SEQ ID NO: 136099 - DNA, 9 bp, Unknown
  misc_feature (1)..( 9): Result.003 file - promoters60/4767379
aaaaataaa

SEQ ID NO: 136100 - DNA, 9 bp, Unknown
  misc_feature (1)..( 9): Result.003 file - promoters60/4767379
aaaaatata

SEQ ID NO: 136101 - DNA, 9 bp, Unknown
  misc_feature (1)..( 9): Result.003 file - promoters60/4767379
aaaattaat

SEQ ID NO: 136102 - DNA, 9 bp, Unknown
  misc_feature (1)..( 9): Result.003 file - promoters60/4767379
taaaataca

SEQ ID NO: 136103 - DNA, 9 bp, Unknown
  misc_feature (1)..( 9): Result.003 file - promoters60/4767379
gataatatt

SEQ ID NO: 136104 - DNA, 9 bp, Unknown
  misc_feature (1)..( 9): Result.003 file - promoters60/4767379
aatattatt

SEQ ID NO: 136105 - DNA, 9 bp, Unknown
  misc_feature (1)..( 9): Result.003 file - promoters60/4767379
aataaaagc

SEQ ID NO: 136106 - DNA, 9 bp, Unknown
  misc_feature (1)..( 9): Result.003 file - promoters60/4767379
tataaaaaa

SEQ ID NO: 136107 - DNA, 9 bp, Unknown
  misc_feature (1)..( 9): Result.003 file - promoters60/4767379
aataaaatt

SEQ ID NO: 136108 - DNA, 9 bp, Unknown
  misc_feature (1)..( 9): Result.003 file - promoters60/4767379
tataaaata

SEQ ID NO: 136109 - DNA, 9 bp, Unknown
  misc_feature (1)..( 9): Result.003 file - promoters60/4767379
gataatatt

SEQ ID NO: 136110 - DNA, 9 bp, Unknown
  misc_feature (1)..( 9): Result.003 file - promoters60/4767379
aatattatt

SEQ ID NO: 136111 - DNA, 12 bp, Unknown
  misc_feature (1)..( 12): Result.003 file - promoters60/4767379
tgaaaaacaaac

SEQ ID NO: 136112 - DNA, 12 bp, Unknown
  misc_feature (1)..( 12): Result.003 file - promoters60/4767379
tgaaaaaaaaaa

SEQ ID NO: 136113 - DNA, 12 bp, Unknown
  misc_feature (1)..( 12): Result.003 file - promoters60/4767379
ctataaataaat

SEQ ID NO: 136114 - DNA, 12 bp, Unknown
  misc_feature (1)..( 12): Result.003 file - promoters60/4767379
agtcaaacaaat

SEQ ID NO: 136115 - DNA, 12 bp, Unknown
  misc_feature (1)..( 12): Result.003 file - promoters60/4767379
gtttaatgaaat

SEQ ID NO: 136116 - DNA, 12 bp, Unknown
  misc_feature (1)..( 12): Result.003 file - promoters60/4767379
tgtgaaacaaat

SEQ ID NO: 136117 - DNA, 12 bp, Unknown
  misc_feature (1)..( 12): Result.003 file - promoters60/4767379
ctggtcataaat

SEQ ID NO: 136118 - DNA, 10 bp, Unknown
  misc_feature (1)..( 10): Result.003 file - promoters60/4767379
gtttgtttaa

SEQ ID NO: 136119 - DNA, 10 bp, Unknown
  misc_feature (1)..( 10): Result.003 file - promoters60/4767379
ataggtttaa

SEQ ID NO: 136120 - DNA, 10 bp, Unknown
  misc_feature (1)..( 10): Result.003 file - promoters60/4767379
atttctttaa

SEQ ID NO: 136121 - DNA, 10 bp, Unknown
  misc_feature (1)..( 10): Result.003 file - promoters60/4767379
ttttgtttct

SEQ ID NO: 136122 - DNA, 10 bp, Unknown
  misc_feature (1)..( 10): Result.003 file - promoters60/4767379
ctttttttgc

SEQ ID NO: 136123 - DNA, 10 bp, Unknown
  misc_feature (1)..( 10): Result.003 file - promoters60/4767379
ttttgtactc

SEQ ID NO: 136124 - DNA, 11 bp, Unknown
  misc_feature (1)..( 11): Result.003 file - promoters60/4767379
cattatatata

SEQ ID NO: 136125 - DNA, 11 bp, Unknown
  misc_feature (1)..( 11): Result.003 file - promoters60/4767379
acatatataaa

SEQ ID NO: 136126 - DNA, 11 bp, Unknown
  misc_feature (1)..( 11): Result.003 file - promoters60/4767379
gcctatatata

SEQ ID NO: 136127 - DNA, 11 bp, Unknown
  misc_feature (1)..( 11): Result.003 file - promoters60/4767379
ccttataaata

SEQ ID NO: 136128 - DNA, 11 bp, Unknown
  misc_feature (1)..( 11): Result.003 file - promoters60/4767379
ccttaaaaacc

SEQ ID NO: 136129 - DNA, 11 bp, Unknown
  misc_feature (1)..( 11): Result.003 file - promoters60/4767379
ccttaaaaaga

SEQ ID NO: 136130 - DNA, 12 bp, Unknown
  misc_feature (1)..( 12): Result.003 file - promoters60/4767379
attacaaaacta

SEQ ID NO: 136131 - DNA, 12 bp, Unknown
  misc_feature (1)..( 12): Result.003 file - promoters60/4767379
tatacaaaaaaa

SEQ ID NO: 136132 - DNA, 12 bp, Unknown
  misc_feature (1)..( 12): Result.003 file - promoters60/4767379
ttgacaaataaa

SEQ ID NO: 136133 - DNA, 12 bp, Unknown
  misc_feature (1)..( 12): Result.003 file - promoters60/4767379
tatacaagaaca

SEQ ID NO: 136134 - DNA, 10 bp, Unknown
  misc_feature (1)..( 10): Result.003 file - promoters60/4767379
tgaaaaaacg

SEQ ID NO: 136135 - DNA, 12 bp, Unknown
  misc_feature (1)..( 12): Result.003 file - promoters60/4767379
ggaacaaaggag

SEQ ID NO: 136136 - DNA, 10 bp, Unknown
  misc_feature (1)..( 10): Result.003 file - promoters60/4767379
atattattag

SEQ ID NO: 136137 - DNA, 10 bp, Unknown
  misc_feature (1)..( 10): Result.003 file - promoters60/4767379
atattattag

SEQ ID NO: 136138 - DNA, 10 bp, Unknown
  misc_feature (1)..( 10): Result.003 file - promoters60/4767379
ttattatatt

SEQ ID NO: 136139 - DNA, 10 bp, Unknown
  misc_feature (1)..( 10): Result.003 file - promoters60/4767379
atataattat

SEQ ID NO: 136140 - DNA, 10 bp, Unknown
  misc_feature (1)..( 10): Result.003 file - promoters60/4767379
aaattattta

SEQ ID NO: 136141 - DNA, 10 bp, Unknown
  misc_feature (1)..( 10): Result.003 file - promoters60/4767379
atacaatgaa

SEQ ID NO: 136142 - DNA, 10 bp, Unknown
  misc_feature (1)..( 10): Result.003 file - promoters60/4767379
aattaaaatc

SEQ ID NO: 136143 - DNA, 10 bp, Unknown
  misc_feature (1)..( 10): Result.003 file - promoters60/4767379
cgttaaaaat

SEQ ID NO: 136144 - DNA, 10 bp, Unknown
  misc_feature (1)..( 10): Result.003 file - promoters60/4767379
taataaaaaa

SEQ ID NO: 136145 - DNA, 10 bp, Unknown
  misc_feature (1)..( 10): Result.003 file - promoters60/4767379
ccagaaaaaa

SEQ ID NO: 136146 - DNA, 10 bp, Unknown
  misc_feature (1)..( 10): Result.003 file - promoters60/4767379
gaacaaatgt

SEQ ID NO: 136147 - DNA, 11 bp, Unknown
  misc_feature (1)..( 11): Result.003 file - promoters60/4767379
tttcaaagaaa

SEQ ID NO: 136148 - DNA, 13 bp, Unknown
  misc_feature (1)..( 13): Result.003 file - promoters60/4767379
ttgagtctaaaga

SEQ ID NO: 136149 - DNA, 13 bp, Unknown
  misc_feature (1)..( 13): Result.003 file - promoters60/4767379
aaaagtccaaaat

SEQ ID NO: 136150 - DNA, 13 bp, Unknown
  misc_feature (1)..( 13): Result.003 file - promoters60/4767379
tttggtcaaaacg

SEQ ID NO: 136151 - DNA, 13 bp, Unknown
  misc_feature (1)..( 13): Result.003 file - promoters60/4767379
ttgactctcttct

SEQ ID NO: 136152 - DNA, 13 bp, Unknown
  misc_feature (1)..( 13): Result.003 file - promoters60/4767379
cctaatccaaaat

SEQ ID NO: 136153 - DNA, 13 bp, Unknown
  misc_feature (1)..( 13): Result.003 file - promoters60/4767379
ttcactccaaaga

SEQ ID NO: 136154 - DNA, 9 bp, Unknown
  misc_feature (1)..( 9): Result.003 file - promoters60/4767379
caaaatgaa

SEQ ID NO: 136155 - DNA, 9 bp, Unknown
  misc_feature (1)..( 9): Result.003 file - promoters60/4767379
aaaaaagaa

SEQ ID NO: 136156 - DNA, 9 bp, Unknown
  misc_feature (1)..( 9): Result.003 file - promoters60/4767379
gaaaaaaaa

SEQ ID NO: 136157 - DNA, 9 bp, Unknown
  misc_feature (1)..( 9): Result.003 file - promoters60/4767379
ataaataaa

SEQ ID NO: 136158 - DNA, 9 bp, Unknown
  misc_feature (1)..( 9): Result.003 file - promoters60/4767379
ataaatgta

SEQ ID NO: 136159 - DNA, 9 bp, Unknown
  misc_feature (1)..( 9): Result.003 file - promoters60/4767379
tcaaacaaa

SEQ ID NO: 136160 - DNA, 10 bp, Unknown
  misc_feature (1)..( 10): Result.003 file - promoters60/4767379
tttctttttg

SEQ ID NO: 136161 - DNA, 10 bp, Unknown
  misc_feature (1)..( 10): Result.003 file - promoters60/4767379
taaatttttg

SEQ ID NO: 136162 - DNA, 10 bp, Unknown
  misc_feature (1)..( 10): Result.003 file - promoters60/4767379
ttcattttaa

SEQ ID NO: 136163 - DNA, 10 bp, Unknown
  misc_feature (1)..( 10): Result.003 file - promoters60/4767379
ttaatcttta

SEQ ID NO: 136164 - DNA, 10 bp, Unknown
  misc_feature (1)..( 10): Result.003 file - promoters60/4767379
caaatgtttg

SEQ ID NO: 136165 - DNA, 10 bp, Unknown
  misc_feature (1)..( 10): Result.003 file - promoters60/4767379
tggatctttt

SEQ ID NO: 136166 - DNA, 14 bp, Unknown
  misc_feature (1)..( 14): Result.003 file - promoters60/4767379
ctttaacagctagc

SEQ ID NO: 136167 - DNA, 14 bp, Unknown
  misc_feature (1)..( 14): Result.003 file - promoters60/4767379
gaataaaagctcaa

SEQ ID NO: 136168 - DNA, 14 bp, Unknown
  misc_feature (1)..( 14): Result.003 file - promoters60/4767379
cacaaacagcagac

SEQ ID NO: 136169 - DNA, 14 bp, Unknown
  misc_feature (1)..( 14): Result.003 file - promoters60/4767379
aggtaacagttttc

SEQ ID NO: 136170 - DNA, 14 bp, Unknown
  misc_feature (1)..( 14): Result.003 file - promoters60/4767379
aattaaaaaggaag

SEQ ID NO: 136171 - DNA, 14 bp, Unknown
  misc_feature (1)..( 14): Result.003 file - promoters60/4767379
acattaaagcccaa

SEQ ID NO: 136172 - DNA, 11 bp, Unknown
  misc_feature (1)..( 11): Result.003 file - promoters60/4767379
accaaaaaaga

SEQ ID NO: 136173 - DNA, 11 bp, Unknown
  misc_feature (1)..( 11): Result.003 file - promoters60/4767379
agttaaaaagt

SEQ ID NO: 136174 - DNA, 11 bp, Unknown
  misc_feature (1)..( 11): Result.003 file - promoters60/4767379
atcgaaataga

SEQ ID NO: 136175 - DNA, 11 bp, Unknown
  misc_feature (1)..( 11): Result.003 file - promoters60/4767379
agttaaaaaat

SEQ ID NO: 136176 - DNA, 11 bp, Unknown
  misc_feature (1)..( 11): Result.003 file - promoters60/4767379
atttacaaaca

SEQ ID NO: 136177 - DNA, 11 bp, Unknown
  misc_feature (1)..( 11): Result.003 file - promoters60/4767379
ctttacaacca

SEQ ID NO: 136178 - DNA, 8 bp, Unknown
  misc_feature (1)..( 8): Result.003 file - promoters60/4767402
acaaaatc

SEQ ID NO: 136179 - DNA, 8 bp, Unknown
  misc_feature (1)..( 8): Result.003 file - promoters60/4767402
acataatt

SEQ ID NO: 136180 - DNA, 8 bp, Unknown
  misc_feature (1)..( 8): Result.003 file - promoters60/4767402
aaataaaa

SEQ ID NO: 136181 - DNA, 9 bp, Unknown
  misc_feature (1)..( 9): Result.003 file - promoters60/4767402
tattttatt

SEQ ID NO: 136182 - DNA, 9 bp, Unknown
  misc_feature (1)..( 9): Result.003 file - promoters60/4767402
gattttatt

SEQ ID NO: 136183 - DNA, 9 bp, Unknown
  misc_feature (1)..( 9): Result.003 file - promoters60/4767402
ttttttaaa

SEQ ID NO: 136184 - DNA, 9 bp, Unknown
  misc_feature (1)..( 9): Result.003 file - promoters60/4767402
ctttttcca

SEQ ID NO: 136185 - DNA, 9 bp, Unknown
  misc_feature (1)..( 9): Result.003 file - promoters60/4767402
ctttttatt

SEQ ID NO: 136186 - DNA, 9 bp, Unknown
  misc_feature (1)..( 9): Result.003 file - promoters60/4767402
ttttttttt

SEQ ID NO: 136187 - DNA, 9 bp, Unknown
  misc_feature (1)..( 9): Result.003 file - promoters60/4767402
atttgtttt

SEQ ID NO: 136188 - DNA, 8 bp, Unknown
  misc_feature (1)..( 8): Result.003 file - promoters60/4767402
tctttcaa

SEQ ID NO: 136189 - DNA, 8 bp, Unknown
  misc_feature (1)..( 8): Result.003 file - promoters60/4767402
tctgtcac

SEQ ID NO: 136190 - DNA, 8 bp, Unknown
  misc_feature (1)..( 8): Result.003 file - promoters60/4767402
tttttcaa

SEQ ID NO: 136191 - DNA, 9 bp, Unknown
  misc_feature (1)..( 9): Result.003 file - promoters60/4767402
attttgtta

SEQ ID NO: 136192 - DNA, 9 bp, Unknown
  misc_feature (1)..( 9): Result.003 file - promoters60/4767402
atttagtta

SEQ ID NO: 136193 - DNA, 9 bp, Unknown
  misc_feature (1)..( 9): Result.003 file - promoters60/4767402
gttttgtga

SEQ ID NO: 136194 - DNA, 6 bp, Unknown
  misc_feature (1)..( 6): Result.003 file - promoters60/4767410
ttttta

SEQ ID NO: 136195 - DNA, 6 bp, Unknown
  misc_feature (1)..( 6): Result.003 file - promoters60/4767410
ttttta

SEQ ID NO: 136196 - DNA, 8 bp, Unknown
  misc_feature (1)..( 8): Result.003 file - promoters60/4767410
taaattga

SEQ ID NO: 136197 - DNA, 8 bp, Unknown
  misc_feature (1)..( 8): Result.003 file - promoters60/4767410
taagttga

SEQ ID NO: 136198 - DNA, 7 bp, Unknown
  misc_feature (1)..( 7): Result.003 file - promoters60/4767410
tatgaaa

SEQ ID NO: 136199 - DNA, 7 bp, Unknown
  misc_feature (1)..( 7): Result.003 file - promoters60/4767410
tatgaaa

SEQ ID NO: 136200 - DNA, 7 bp, Unknown
  misc_feature (1)..( 7): Result.003 file - promoters60/4767410
tattaaa

SEQ ID NO: 136201 - DNA, 8 bp, Unknown
  misc_feature (1)..( 8): Result.003 file - promoters60/4767410
agttaaag

SEQ ID NO: 136202 - DNA, 8 bp, Unknown
  misc_feature (1)..( 8): Result.003 file - promoters60/4767410
tgttaaag

SEQ ID NO: 136203 - DNA, 8 bp, Unknown
  misc_feature (1)..( 8): Result.003 file - promoters60/4767410
agtaaaaa

SEQ ID NO: 136204 - DNA, 9 bp, Unknown
  misc_feature (1)..( 9): Result.003 file - promoters60/4767410
tcttagtct

SEQ ID NO: 136205 - DNA, 9 bp, Unknown
  misc_feature (1)..( 9): Result.003 file - promoters60/4767410
tcttaatct

SEQ ID NO: 136206 - DNA, 9 bp, Unknown
  misc_feature (1)..( 9): Result.003 file - promoters60/4767410
ggttttgtt

SEQ ID NO: 136207 - DNA, 9 bp, Unknown
  misc_feature (1)..( 9): Result.003 file - promoters60/4767410
ggatttgtt

SEQ ID NO: 136208 - DNA, 9 bp, Unknown
  misc_feature (1)..( 9): Result.003 file - promoters60/4767410
ggacttgtg

SEQ ID NO: 136209 - DNA, 7 bp, Unknown
  misc_feature (1)..( 7): Result.003 file - promoters60/4767410
tcctttt

SEQ ID NO: 136210 - DNA, 7 bp, Unknown
  misc_feature (1)..( 7): Result.003 file - promoters60/4767410
tccattt

SEQ ID NO: 136211 - DNA, 6 bp, Unknown
  misc_feature (1)..( 6): Result.003 file - promoters60/4767410
tttctt

SEQ ID NO: 136212 - DNA, 6 bp, Unknown
  misc_feature (1)..( 6): Result.003 file - promoters60/4767410
tttctt

SEQ ID NO: 136213 - DNA, 7 bp, Unknown
  misc_feature (1)..( 7): Result.003 file - promoters60/4767410
aaaatat

SEQ ID NO: 136214 - DNA, 7 bp, Unknown
  misc_feature (1)..( 7): Result.003 file - promoters60/4767410
aaaatat

SEQ ID NO: 136215 - DNA, 7 bp, Unknown
  misc_feature (1)..( 7): Result.003 file - promoters60/4767410
actgcat

SEQ ID NO: 136216 - DNA, 7 bp, Unknown
  misc_feature (1)..( 7): Result.003 file - promoters60/4767410
acttcat

SEQ ID NO: 136217 - DNA, 7 bp, Unknown
  misc_feature (1)..( 7): Result.003 file - promoters60/4767410
ccatcca

SEQ ID NO: 136218 - DNA, 7 bp, Unknown
  misc_feature (1)..( 7): Result.003 file - promoters60/4767410
ccagcca

SEQ ID NO: 136219 - DNA, 6 bp, Unknown
  misc_feature (1)..( 6): Result.003 file - promoters60/4767410
atacaa

SEQ ID NO: 136220 - DNA, 6 bp, Unknown
  misc_feature (1)..( 6): Result.003 file - promoters60/4767410
atacaa

SEQ ID NO: 136221 - DNA, 6 bp, Unknown
  misc_feature (1)..( 6): Result.003 file - promoters60/4767410
atgtct

SEQ ID NO: 136222 - DNA, 6 bp, Unknown
  misc_feature (1)..( 6): Result.003 file - promoters60/4767410
atgtct

SEQ ID NO: 136223 - DNA, 7 bp, Unknown
  misc_feature (1)..( 7): Result.003 file - promoters60/4767410
ttggaga

SEQ ID NO: 136224 - DNA, 7 bp, Unknown
  misc_feature (1)..( 7): Result.003 file - promoters60/4767410
ttggaga

SEQ ID NO: 136225 - DNA, 6 bp, Unknown
  misc_feature (1)..( 6): Result.003 file - promoters60/4767410
gaagat

SEQ ID NO: 136226 - DNA, 6 bp, Unknown
  misc_feature (1)..( 6): Result.003 file - promoters60/4767410
gaagat

SEQ ID NO: 136227 - DNA, 6 bp, Unknown
  misc_feature (1)..( 6): Result.003 file - promoters60/4767410
gatcga

SEQ ID NO: 136228 - DNA, 6 bp, Unknown
  misc_feature (1)..( 6): Result.003 file - promoters60/4767410
gatcga

SEQ ID NO: 136229 - DNA, 6 bp, Unknown
  misc_feature (1)..( 6): Result.003 file - promoters60/4767410
aaatgc

SEQ ID NO: 136230 - DNA, 6 bp, Unknown
  misc_feature (1)..( 6): Result.003 file - promoters60/4767410
aaatgc

SEQ ID NO: 136231 - DNA, 9 bp, Unknown
  misc_feature (1)..( 9): Result.003 file - promoters60/4767442
tttgttgcg

SEQ ID NO: 136232 - DNA, 9 bp, Unknown
  misc_feature (1)..( 9): Result.003 file - promoters60/4767442
tttgtttta

SEQ ID NO: 136233 - DNA, 9 bp, Unknown
  misc_feature (1)..( 9): Result.003 file - promoters60/4767442
tttgttagt

SEQ ID NO: 136234 - DNA, 9 bp, Unknown
  misc_feature (1)..( 9): Result.003 file - promoters60/4767442
cttgtatta

SEQ ID NO: 136235 - DNA, 12 bp, Unknown
  misc_feature (1)..( 12): Result.003 file - promoters60/4767452
gaaaaagatatg

SEQ ID NO: 136236 - DNA, 12 bp, Unknown
  misc_feature (1)..( 12): Result.003 file - promoters60/4767452
caaaaagacggc

SEQ ID NO: 136237 - DNA, 12 bp, Unknown
  misc_feature (1)..( 12): Result.003 file - promoters60/4767452
caaaaacctctg

SEQ ID NO: 136238 - DNA, 12 bp, Unknown
  misc_feature (1)..( 12): Result.003 file - promoters60/4767452
aaaaaaaaaaaa

SEQ ID NO: 136239 - DNA, 8 bp, Unknown
  misc_feature (1)..( 8): Result.003 file - promoters60/4767452
tatattta

SEQ ID NO: 136240 - DNA, 8 bp, Unknown
  misc_feature (1)..( 8): Result.003 file - promoters60/4767452
aatatttt

SEQ ID NO: 136241 - DNA, 8 bp, Unknown
  misc_feature (1)..( 8): Result.003 file - promoters60/4767452
tataatta

SEQ ID NO: 136242 - DNA, 8 bp, Unknown
  misc_feature (1)..( 8): Result.003 file - promoters60/4767452
attatttt

SEQ ID NO: 136243 - DNA, 10 bp, Unknown
  misc_feature (1)..( 10): Result.003 file - promoters60/4767452
taatataagg

SEQ ID NO: 136244 - DNA, 10 bp, Unknown
  misc_feature (1)..( 10): Result.003 file - promoters60/4767452
ttttataagc

SEQ ID NO: 136245 - DNA, 10 bp, Unknown
  misc_feature (1)..( 10): Result.003 file - promoters60/4767452
ttttttaaaa

SEQ ID NO: 136246 - DNA, 10 bp, Unknown
  misc_feature (1)..( 10): Result.003 file - promoters60/4767452
agagataagc

SEQ ID NO: 136247 - DNA, 12 bp, Unknown
  misc_feature (1)..( 12): Result.003 file - promoters60/4767452
tctcaaaatcaa

SEQ ID NO: 136248 - DNA, 12 bp, Unknown
  misc_feature (1)..( 12): Result.003 file - promoters60/4767452
attcaagatcaa

SEQ ID NO: 136249 - DNA, 12 bp, Unknown
  misc_feature (1)..( 12): Result.003 file - promoters60/4767452
tcttcaaatcat

SEQ ID NO: 136250 - DNA, 12 bp, Unknown
  misc_feature (1)..( 12): Result.003 file - promoters60/4767452
tctgaaaatgga

SEQ ID NO: 136251 - DNA, 11 bp, Unknown
  misc_feature (1)..( 11): Result.003 file - promoters60/4767452
agaaacagaga

SEQ ID NO: 136252 - DNA, 11 bp, Unknown
  misc_feature (1)..( 11): Result.003 file - promoters60/4767452
aaaaaaagaaa

SEQ ID NO: 136253 - DNA, 11 bp, Unknown
  misc_feature (1)..( 11): Result.003 file - promoters60/4767452
aataacagatg

SEQ ID NO: 136254 - DNA, 11 bp, Unknown
  misc_feature (1)..( 11): Result.003 file - promoters60/4767452
aaaaacaaaaa

SEQ ID NO: 136255 - DNA, 11 bp, Unknown
  misc_feature (1)..( 11): Result.003 file - promoters60/4767487
aataaataaaa

SEQ ID NO: 136256 - DNA, 11 bp, Unknown
  misc_feature (1)..( 11): Result.003 file - promoters60/4767487
tttaattaaac

SEQ ID NO: 136257 - DNA, 11 bp, Unknown
  misc_feature (1)..( 11): Result.003 file - promoters60/4767487
ggaaaacaaaa

SEQ ID NO: 136258 - DNA, 11 bp, Unknown
  misc_feature (1)..( 11): Result.003 file - promoters60/4767487
atgaatgaaac

SEQ ID NO: 136259 - DNA, 11 bp, Unknown
  misc_feature (1)..( 11): Result.003 file - promoters60/4767487
tgtaattagaa

SEQ ID NO: 136260 - DNA, 11 bp, Unknown
  misc_feature (1)..( 11): Result.003 file - promoters60/4767487
tttcatttcca

SEQ ID NO: 136261 - DNA, 11 bp, Unknown
  misc_feature (1)..( 11): Result.003 file - promoters60/4767487
cttcattttta

SEQ ID NO: 136262 - DNA, 12 bp, Unknown
  misc_feature (1)..( 12): Result.003 file - promoters60/4767487
gtatattttcta

SEQ ID NO: 136263 - DNA, 12 bp, Unknown
  misc_feature (1)..( 12): Result.003 file - promoters60/4767487
tacgattttctt

SEQ ID NO: 136264 - DNA, 12 bp, Unknown
  misc_feature (1)..( 12): Result.003 file - promoters60/4767487
gtaaattttgta

SEQ ID NO: 136265 - DNA, 12 bp, Unknown
  misc_feature (1)..( 12): Result.003 file - promoters60/4767487
cttctatttcta

SEQ ID NO: 136266 - DNA, 12 bp, Unknown
  misc_feature (1)..( 12): Result.003 file - promoters60/4767487
acaaaatttatg

SEQ ID NO: 136267 - DNA, 12 bp, Unknown
  misc_feature (1)..( 12): Result.003 file - promoters60/4767487
aaacctttttat

SEQ ID NO: 136268 - DNA, 11 bp, Unknown
  misc_feature (1)..( 11): Result.003 file - promoters60/4767490
tcatatttgaa

SEQ ID NO: 136269 - DNA, 11 bp, Unknown
  misc_feature (1)..( 11): Result.003 file - promoters60/4767490
tcatatttatt

SEQ ID NO: 136270 - DNA, 11 bp, Unknown
  misc_feature (1)..( 11): Result.003 file - promoters60/4767490
aaatatatatt

SEQ ID NO: 136271 - DNA, 14 bp, Unknown
  misc_feature (1)..( 14): Result.003 file - promoters60/4767490
tttgtaaatttttt

SEQ ID NO: 136272 - DNA, 14 bp, Unknown
  misc_feature (1)..( 14): Result.003 file - promoters60/4767490
tttataaacttttt

SEQ ID NO: 136273 - DNA, 14 bp, Unknown
  misc_feature (1)..( 14): Result.003 file - promoters60/4767490
attaatcatttttg

SEQ ID NO: 136274 - DNA, 14 bp, Unknown
  misc_feature (1)..( 14): Result.003 file - promoters60/4767490
actttaaagtttaa

SEQ ID NO: 136275 - DNA, 10 bp, Unknown
  misc_feature (1)..( 10): Result.003 file - promoters60/4767490
ttgtccatat

SEQ ID NO: 136276 - DNA, 10 bp, Unknown
  misc_feature (1)..( 10): Result.003 file - promoters60/4767490
atgtccatat

SEQ ID NO: 136277 - DNA, 10 bp, Unknown
  misc_feature (1)..( 10): Result.003 file - promoters60/4767490
atgtcctaat

SEQ ID NO: 136278 - DNA, 14 bp, Unknown
  misc_feature (1)..( 14): Result.003 file - promoters60/4767490
aaaaaatatttttg

SEQ ID NO: 136279 - DNA, 14 bp, Unknown
  misc_feature (1)..( 14): Result.003 file - promoters60/4767490
attaatcatttttg

SEQ ID NO: 136280 - DNA, 14 bp, Unknown
  misc_feature (1)..( 14): Result.003 file - promoters60/4767490
aaaaaatactttaa

SEQ ID NO: 136281 - DNA, 14 bp, Unknown
  misc_feature (1)..( 14): Result.003 file - promoters60/4767490
taggattactttat

SEQ ID NO: 136282 - DNA, 12 bp, Unknown
  misc_feature (1)..( 12): Result.003 file - promoters60/4767490
aattaaccctct

SEQ ID NO: 136283 - DNA, 12 bp, Unknown
  misc_feature (1)..( 12): Result.003 file - promoters60/4767490
tattgacccaca

SEQ ID NO: 136284 - DNA, 12 bp, Unknown
  misc_feature (1)..( 12): Result.003 file - promoters60/4767490
aatttatgttga

SEQ ID NO: 136285 - DNA, 9 bp, Unknown
  misc_feature (1)..( 9): Result.003 file - promoters60/4767490
catatgatc

SEQ ID NO: 136286 - DNA, 9 bp, Unknown
  misc_feature (1)..( 9): Result.003 file - promoters60/4767490
taaatgatc

SEQ ID NO: 136287 - DNA, 9 bp, Unknown
  misc_feature (1)..( 9): Result.003 file - promoters60/4767490
taattgatt

SEQ ID NO: 136288 - DNA, 6 bp, Unknown
  misc_feature (1)..( 6): Result.003 file - promoters60/4767505
cgagtc

SEQ ID NO: 136289 - DNA, 6 bp, Unknown
  misc_feature (1)..( 6): Result.003 file - promoters60/4767505
cgagtc

SEQ ID NO: 136290 - DNA, 6 bp, Unknown
  misc_feature (1)..( 6): Result.003 file - promoters60/4767505
gaaatt

SEQ ID NO: 136291 - DNA, 6 bp, Unknown
  misc_feature (1)..( 6): Result.003 file - promoters60/4767505
gaaatt

SEQ ID NO: 136292 - DNA, 7 bp, Unknown
  misc_feature (1)..( 7): Result.003 file - promoters60/4767505
gactgaa

SEQ ID NO: 136293 - DNA, 7 bp, Unknown
  misc_feature (1)..( 7): Result.003 file - promoters60/4767505
gacagaa

SEQ ID NO: 136294 - DNA, 8 bp, Unknown
  misc_feature (1)..( 8): Result.003 file - promoters60/4767505
aaagatca

SEQ ID NO: 136295 - DNA, 8 bp, Unknown
  misc_feature (1)..( 8): Result.003 file - promoters60/4767505
aaagatca

SEQ ID NO: 136296 - DNA, 6 bp, Unknown
  misc_feature (1)..( 6): Result.003 file - promoters60/4767505
tagtag

SEQ ID NO: 136297 - DNA, 6 bp, Unknown
  misc_feature (1)..( 6): Result.003 file - promoters60/4767505
tagtag

SEQ ID NO: 136298 - DNA, 6 bp, Unknown
  misc_feature (1)..( 6): Result.003 file - promoters60/4767505
cctttt

SEQ ID NO: 136299 - DNA, 6 bp, Unknown
  misc_feature (1)..( 6): Result.003 file - promoters60/4767505
cctttt

SEQ ID NO: 136300 - DNA, 6 bp, Unknown
  misc_feature (1)..( 6): Result.003 file - promoters60/4767505
tttgat

SEQ ID NO: 136301 - DNA, 6 bp, Unknown
  misc_feature (1)..( 6): Result.003 file - promoters60/4767505
tttgat

SEQ ID NO: 136302 - DNA, 8 bp, Unknown
  misc_feature (1)..( 8): Result.003 file - promoters60/4767505
tttaacta

SEQ ID NO: 136303 - DNA, 8 bp, Unknown
  misc_feature (1)..( 8): Result.003 file - promoters60/4767505
tttatcta

SEQ ID NO: 136304 - DNA, 8 bp, Unknown
  misc_feature (1)..( 8): Result.003 file - promoters60/4767505
ctattttt

SEQ ID NO: 136305 - DNA, 8 bp, Unknown
  misc_feature (1)..( 8): Result.003 file - promoters60/4767505
ctatcttt

SEQ ID NO: 136306 - DNA, 8 bp, Unknown
  misc_feature (1)..( 8): Result.003 file - promoters60/4767505
cactaacc

SEQ ID NO: 136307 - DNA, 8 bp, Unknown
  misc_feature (1)..( 8): Result.003 file - promoters60/4767505
cactaacc

SEQ ID NO: 136308 - DNA, 7 bp, Unknown
  misc_feature (1)..( 7): Result.003 file - promoters60/4767505
aatcggt

SEQ ID NO: 136309 - DNA, 7 bp, Unknown
  misc_feature (1)..( 7): Result.003 file - promoters60/4767505
aattggt

SEQ ID NO: 136310 - DNA, 6 bp, Unknown
  misc_feature (1)..( 6): Result.003 file - promoters60/4767505
gacctc

SEQ ID NO: 136311 - DNA, 6 bp, Unknown
  misc_feature (1)..( 6): Result.003 file - promoters60/4767505
gacctc

SEQ ID NO: 136312 - DNA, 8 bp, Unknown
  misc_feature (1)..( 8): Result.003 file - promoters60/4767505
ttttaata

SEQ ID NO: 136313 - DNA, 8 bp, Unknown
  misc_feature (1)..( 8): Result.003 file - promoters60/4767505
ttttaata

SEQ ID NO: 136314 - DNA, 9 bp, Unknown
  misc_feature (1)..( 9): Result.003 file - promoters60/4767505
tcttgttta

SEQ ID NO: 136315 - DNA, 9 bp, Unknown
  misc_feature (1)..( 9): Result.003 file - promoters60/4767505
tctttttta

SEQ ID NO: 136316 - DNA, 7 bp, Unknown
  misc_feature (1)..( 7): Result.003 file - promoters60/4767505
aaacata

SEQ ID NO: 136317 - DNA, 7 bp, Unknown
  misc_feature (1)..( 7): Result.003 file - promoters60/4767505
aaatata

SEQ ID NO: 136318 - DNA, 7 bp, Unknown
  misc_feature (1)..( 7): Result.003 file - promoters60/4767505
caagata

SEQ ID NO: 136319 - DNA, 7 bp, Unknown
  misc_feature (1)..( 7): Result.003 file - promoters60/4767505
caacata

SEQ ID NO: 136320 - DNA, 7 bp, Unknown
  misc_feature (1)..( 7): Result.003 file - promoters60/4767505
ttaaaaa

SEQ ID NO: 136321 - DNA, 7 bp, Unknown
  misc_feature (1)..( 7): Result.003 file - promoters60/4767505
ttacaaa

SEQ ID NO: 136322 - DNA, 8 bp, Unknown
  misc_feature (1)..( 8): Result.003 file - promoters60/4767505
gtgaaaaa

SEQ ID NO: 136323 - DNA, 8 bp, Unknown
  misc_feature (1)..( 8): Result.003 file - promoters60/4767505
gtgaaaaa

SEQ ID NO: 136324 - DNA, 8 bp, Unknown
  misc_feature (1)..( 8): Result.003 file - promoters60/4767505
tattaata

SEQ ID NO: 136325 - DNA, 8 bp, Unknown
  misc_feature (1)..( 8): Result.003 file - promoters60/4767505
tataaata

SEQ ID NO: 136326 - DNA, 9 bp, Unknown
  misc_feature (1)..( 9): Result.003 file - promoters60/4767515
acagacaat

SEQ ID NO: 136327 - DNA, 9 bp, Unknown
  misc_feature (1)..( 9): Result.003 file - promoters60/4767515
taagaaaat

SEQ ID NO: 136328 - DNA, 9 bp, Unknown
  misc_feature (1)..( 9): Result.003 file - promoters60/4767515
gcagtcaaa

SEQ ID NO: 136329 - DNA, 9 bp, Unknown
  misc_feature (1)..( 9): Result.003 file - promoters60/4767515
actgacaat

SEQ ID NO: 136330 - DNA, 9 bp, Unknown
  misc_feature (1)..( 9): Result.003 file - promoters60/4767515
caaggaaag

SEQ ID NO: 136331 - DNA, 9 bp, Unknown
  misc_feature (1)..( 9): Result.003 file - promoters60/4767515
caagtaaaa

SEQ ID NO: 136332 - DNA, 12 bp, Unknown
  misc_feature (1)..( 12): Result.003 file - promoters60/4767515
tacgaaaatggc

SEQ ID NO: 136333 - DNA, 12 bp, Unknown
  misc_feature (1)..( 12): Result.003 file - promoters60/4767515
aacgaaattagt

SEQ ID NO: 136334 - DNA, 12 bp, Unknown
  misc_feature (1)..( 12): Result.003 file - promoters60/4767515
tactaaaagttt

SEQ ID NO: 136335 - DNA, 12 bp, Unknown
  misc_feature (1)..( 12): Result.003 file - promoters60/4767515
cacgaaatccat

SEQ ID NO: 136336 - DNA, 12 bp, Unknown
  misc_feature (1)..( 12): Result.003 file - promoters60/4767515
tgagaaacccaa

SEQ ID NO: 136337 - DNA, 12 bp, Unknown
  misc_feature (1)..( 12): Result.003 file - promoters60/4767515
aaaaaaacacaa

SEQ ID NO: 136338 - DNA, 17 bp, Unknown
  misc_feature (1)..( 17): Result.003 file - promoters60/4767515
tcacttttatgggccgt

SEQ ID NO: 136339 - DNA, 17 bp, Unknown
  misc_feature (1)..( 17): Result.003 file - promoters60/4767515
attattttatttttttt

SEQ ID NO: 136340 - DNA, 17 bp, Unknown
  misc_feature (1)..( 17): Result.003 file - promoters60/4767515
ctcattttaatgggccg

SEQ ID NO: 136341 - DNA, 17 bp, Unknown
  misc_feature (1)..( 17): Result.003 file - promoters60/4767515
agccttgtatttacttt

SEQ ID NO: 136342 - DNA, 17 bp, Unknown
  misc_feature (1)..( 17): Result.003 file - promoters60/4767515
cccttttgatttaactc

SEQ ID NO: 136343 - DNA, 17 bp, Unknown
  misc_feature (1)..( 17): Result.003 file - promoters60/4767515
aaattaaaaatgggtct

SEQ ID NO: 136344 - DNA, 8 bp, Unknown
  misc_feature (1)..( 8): Result.003 file - promoters60/4767515
agaagaaa

SEQ ID NO: 136345 - DNA, 8 bp, Unknown
  misc_feature (1)..( 8): Result.003 file - promoters60/4767515
tgaagaac

SEQ ID NO: 136346 - DNA, 9 bp, Unknown
  misc_feature (1)..( 9): Result.003 file - promoters60/4767515
tcaaagaaa

SEQ ID NO: 136347 - DNA, 8 bp, Unknown
  misc_feature (1)..( 8): Result.003 file - promoters60/4767515
agaacaac

SEQ ID NO: 136348 - DNA, 9 bp, Unknown
  misc_feature (1)..( 9): Result.003 file - promoters60/4767515
agagacaaa

SEQ ID NO: 136349 - DNA, 9 bp, Unknown
  misc_feature (1)..( 9): Result.003 file - promoters60/4767515
gctaacaac

SEQ ID NO: 136350 - DNA, 8 bp, Unknown
  misc_feature (1)..( 8): Result.003 file - promoters60/4767519
atttattt

SEQ ID NO: 136351 - DNA, 8 bp, Unknown
  misc_feature (1)..( 8): Result.003 file - promoters60/4767519
attgattt

SEQ ID NO: 136352 - DNA, 7 bp, Unknown
  misc_feature (1)..( 7): Result.003 file - promoters60/4767519
aaacatt

SEQ ID NO: 136353 - DNA, 7 bp, Unknown
  misc_feature (1)..( 7): Result.003 file - promoters60/4767519
aaaaatt

SEQ ID NO: 136354 - DNA, 8 bp, Unknown
  misc_feature (1)..( 8): Result.003 file - promoters60/4767519
aaatcata

SEQ ID NO: 136355 - DNA, 7 bp, Unknown
  misc_feature (1)..( 7): Result.003 file - promoters60/4767519
tttttaa

SEQ ID NO: 136356 - DNA, 7 bp, Unknown
  misc_feature (1)..( 7): Result.003 file - promoters60/4767519
tttataa

SEQ ID NO: 136357 - DNA, 7 bp, Unknown
  misc_feature (1)..( 7): Result.003 file - promoters60/4767519
aaataaa

SEQ ID NO: 136358 - DNA, 7 bp, Unknown
  misc_feature (1)..( 7): Result.003 file - promoters60/4767519
aaataaa

SEQ ID NO: 136359 - DNA, 7 bp, Unknown
  misc_feature (1)..( 7): Result.003 file - promoters60/4767519
aaataat

SEQ ID NO: 136360 - DNA, 7 bp, Unknown
  misc_feature (1)..( 7): Result.003 file - promoters60/4767519
ttatata

SEQ ID NO: 136361 - DNA, 7 bp, Unknown
  misc_feature (1)..( 7): Result.003 file - promoters60/4767519
ttatata

SEQ ID NO: 136362 - DNA, 7 bp, Unknown
  misc_feature (1)..( 7): Result.003 file - promoters60/4767519
gatttat

SEQ ID NO: 136363 - DNA, 7 bp, Unknown
  misc_feature (1)..( 7): Result.003 file - promoters60/4767519
gatatat

SEQ ID NO: 136364 - DNA, 7 bp, Unknown
  misc_feature (1)..( 7): Result.003 file - promoters60/4767519
aagttat

SEQ ID NO: 136365 - DNA, 10 bp, Unknown
  misc_feature (1)..( 10): Result.003 file - promoters60/4767519
aacactttat

SEQ ID NO: 136366 - DNA, 10 bp, Unknown
  misc_feature (1)..( 10): Result.003 file - promoters60/4767519
aacactatat

SEQ ID NO: 136367 - DNA, 6 bp, Unknown
  misc_feature (1)..( 6): Result.003 file - promoters60/4767519
tcttta

SEQ ID NO: 136368 - DNA, 6 bp, Unknown
  misc_feature (1)..( 6): Result.003 file - promoters60/4767519
tcttta

SEQ ID NO: 136369 - DNA, 6 bp, Unknown
  misc_feature (1)..( 6): Result.003 file - promoters60/4767519
atcttt

SEQ ID NO: 136370 - DNA, 6 bp, Unknown
  misc_feature (1)..( 6): Result.003 file - promoters60/4767519
atcttt

SEQ ID NO: 136371 - DNA, 8 bp, Unknown
  misc_feature (1)..( 8): Result.003 file - promoters60/4767519
atttaaat

SEQ ID NO: 136372 - DNA, 8 bp, Unknown
  misc_feature (1)..( 8): Result.003 file - promoters60/4767519
atttcaat

SEQ ID NO: 136373 - DNA, 7 bp, Unknown
  misc_feature (1)..( 7): Result.003 file - promoters60/4767519
atttaag

SEQ ID NO: 136374 - DNA, 7 bp, Unknown
  misc_feature (1)..( 7): Result.003 file - promoters60/4767519
atttaag

SEQ ID NO: 136375 - DNA, 11 bp, Unknown
  misc_feature (1)..( 11): Result.003 file - promoters60/4767519
ataattttata

SEQ ID NO: 136376 - DNA, 11 bp, Unknown
  misc_feature (1)..( 11): Result.003 file - promoters60/4767519
ataattatatg

SEQ ID NO: 136377 - DNA, 11 bp, Unknown
  misc_feature (1)..( 11): Result.003 file - promoters60/4767519
ttaggtatatg

SEQ ID NO: 136378 - DNA, 7 bp, Unknown
  misc_feature (1)..( 7): Result.003 file - promoters60/4767519
taaatac

SEQ ID NO: 136379 - DNA, 7 bp, Unknown
  misc_feature (1)..( 7): Result.003 file - promoters60/4767519
taagtac

SEQ ID NO: 136380 - DNA, 8 bp, Unknown
  misc_feature (1)..( 8): Result.003 file - promoters60/4767519
tgagaaaa

SEQ ID NO: 136381 - DNA, 8 bp, Unknown
  misc_feature (1)..( 8): Result.003 file - promoters60/4767519
tgaaaaaa

SEQ ID NO: 136382 - DNA, 7 bp, Unknown
  misc_feature (1)..( 7): Result.003 file - promoters60/4767519
taacatt

SEQ ID NO: 136383 - DNA, 7 bp, Unknown
  misc_feature (1)..( 7): Result.003 file - promoters60/4767519
taacatt

SEQ ID NO: 136384 - DNA, 6 bp, Unknown
  misc_feature (1)..( 6): Result.003 file - promoters60/4767519
tgataa

SEQ ID NO: 136385 - DNA, 6 bp, Unknown
  misc_feature (1)..( 6): Result.003 file - promoters60/4767519
tgataa

SEQ ID NO: 136386 - DNA, 9 bp, Unknown
  misc_feature (1)..( 9): Result.003 file - promoters60/4767519
aataaaaat

SEQ ID NO: 136387 - DNA, 9 bp, Unknown
  misc_feature (1)..( 9): Result.003 file - promoters60/4767519
aatagaaat

SEQ ID NO: 136388 - DNA, 7 bp, Unknown
  misc_feature (1)..( 7): Result.003 file - promoters60/4767519
tagaaac

SEQ ID NO: 136389 - DNA, 7 bp, Unknown
  misc_feature (1)..( 7): Result.003 file - promoters60/4767519
tagaaac

SEQ ID NO: 136390 - DNA, 6 bp, Unknown
  misc_feature (1)..( 6): Result.003 file - promoters60/4767519
aacgta

SEQ ID NO: 136391 - DNA, 6 bp, Unknown
  misc_feature (1)..( 6): Result.003 file - promoters60/4767519
aacgta

SEQ ID NO: 136392 - DNA, 10 bp, Unknown
  misc_feature (1)..( 10): Result.003 file - promoters60/4767519
gtatcaaaat

SEQ ID NO: 136393 - DNA, 10 bp, Unknown
  misc_feature (1)..( 10): Result.003 file - promoters60/4767519
gtatcataat

SEQ ID NO: 136394 - DNA, 10 bp, Unknown
  misc_feature (1)..( 10): Result.003 file - promoters60/4767539
atctctgcag

SEQ ID NO: 136395 - DNA, 10 bp, Unknown
  misc_feature (1)..( 10): Result.003 file - promoters60/4767539
gtctctgcag

SEQ ID NO: 136396 - DNA, 10 bp, Unknown
  misc_feature (1)..( 10): Result.003 file - promoters60/4767539
atctctttgg

SEQ ID NO: 136397 - DNA, 7 bp, Unknown
  misc_feature (1)..( 7): Result.003 file - promoters60/4767539
tttgtct

SEQ ID NO: 136398 - DNA, 7 bp, Unknown
  misc_feature (1)..( 7): Result.003 file - promoters60/4767539
tttatct

SEQ ID NO: 136399 - DNA, 7 bp, Unknown
  misc_feature (1)..( 7): Result.003 file - promoters60/4767539
agatatt

SEQ ID NO: 136400 - DNA, 7 bp, Unknown
  misc_feature (1)..( 7): Result.003 file - promoters60/4767539
agatatt

SEQ ID NO: 136401 - DNA, 7 bp, Unknown
  misc_feature (1)..( 7): Result.003 file - promoters60/4767539
tttacaa

SEQ ID NO: 136402 - DNA, 7 bp, Unknown
  misc_feature (1)..( 7): Result.003 file - promoters60/4767539
ttttcaa

SEQ ID NO: 136403 - DNA, 7 bp, Unknown
  misc_feature (1)..( 7): Result.003 file - promoters60/4767539
agtttat

SEQ ID NO: 136404 - DNA, 7 bp, Unknown
  misc_feature (1)..( 7): Result.003 file - promoters60/4767539
agtttat

SEQ ID NO: 136405 - DNA, 6 bp, Unknown
  misc_feature (1)..( 6): Result.003 file - promoters60/4767539
ttatcc

SEQ ID NO: 136406 - DNA, 6 bp, Unknown
  misc_feature (1)..( 6): Result.003 file - promoters60/4767539
ttatcc

SEQ ID NO: 136407 - DNA, 8 bp, Unknown
  misc_feature (1)..( 8): Result.003 file - promoters60/4767539
tttggatg

SEQ ID NO: 136408 - DNA, 8 bp, Unknown
  misc_feature (1)..( 8): Result.003 file - promoters60/4767539
gttgtatg

SEQ ID NO: 136409 - DNA, 8 bp, Unknown
  misc_feature (1)..( 8): Result.003 file - promoters60/4767539
gttgtaac

SEQ ID NO: 136410 - DNA, 6 bp, Unknown
  misc_feature (1)..( 6): Result.003 file - promoters60/4767539
tatttt

SEQ ID NO: 136411 - DNA, 6 bp, Unknown
  misc_feature (1)..( 6): Result.003 file - promoters60/4767539
tatttt

SEQ ID NO: 136412 - DNA, 6 bp, Unknown
  misc_feature (1)..( 6): Result.003 file - promoters60/4767539
acattc

SEQ ID NO: 136413 - DNA, 6 bp, Unknown
  misc_feature (1)..( 6): Result.003 file - promoters60/4767539
acattc

SEQ ID NO: 136414 - DNA, 6 bp, Unknown
  misc_feature (1)..( 6): Result.003 file - promoters60/4767539
ttttga

SEQ ID NO: 136415 - DNA, 6 bp, Unknown
  misc_feature (1)..( 6): Result.003 file - promoters60/4767539
ttttga

SEQ ID NO: 136416 - DNA, 7 bp, Unknown
  misc_feature (1)..( 7): Result.003 file - promoters60/4767539
taaaact

SEQ ID NO: 136417 - DNA, 7 bp, Unknown
  misc_feature (1)..( 7): Result.003 file - promoters60/4767539
taatact

SEQ ID NO: 136418 - DNA, 7 bp, Unknown
  misc_feature (1)..( 7): Result.003 file - promoters60/4767539
aaactgt

SEQ ID NO: 136419 - DNA, 7 bp, Unknown
  misc_feature (1)..( 7): Result.003 file - promoters60/4767539
aaactgt

SEQ ID NO: 136420 - DNA, 7 bp, Unknown
  misc_feature (1)..( 7): Result.003 file - promoters60/4767539
aaacata

SEQ ID NO: 136421 - DNA, 7 bp, Unknown
  misc_feature (1)..( 7): Result.003 file - promoters60/4767539
aaaaata

SEQ ID NO: 136422 - DNA, 7 bp, Unknown
  misc_feature (1)..( 7): Result.003 file - promoters60/4767539
gaagaaa

SEQ ID NO: 136423 - DNA, 7 bp, Unknown
  misc_feature (1)..( 7): Result.003 file - promoters60/4767539
gaataaa

SEQ ID NO: 136424 - DNA, 9 bp, Unknown
  misc_feature (1)..( 9): Result.003 file - promoters60/4767539
cacaatcta

SEQ ID NO: 136425 - DNA, 9 bp, Unknown
  misc_feature (1)..( 9): Result.003 file - promoters60/4767539
cactatcta

SEQ ID NO: 136426 - DNA, 6 bp, Unknown
  misc_feature (1)..( 6): Result.003 file - promoters60/4767545
tccatt

SEQ ID NO: 136427 - DNA, 6 bp, Unknown
  misc_feature (1)..( 6): Result.003 file - promoters60/4767545
tccatt

SEQ ID NO: 136428 - DNA, 7 bp, Unknown
  misc_feature (1)..( 7): Result.003 file - promoters60/4767545
ttttatg

SEQ ID NO: 136429 - DNA, 7 bp, Unknown
  misc_feature (1)..( 7): Result.003 file - promoters60/4767545
ttttatg

SEQ ID NO: 136430 - DNA, 7 bp, Unknown
  misc_feature (1)..( 7): Result.003 file - promoters60/4767545
tttgaaa

SEQ ID NO: 136431 - DNA, 7 bp, Unknown
  misc_feature (1)..( 7): Result.003 file - promoters60/4767545
tttcaaa

SEQ ID NO: 136432 - DNA, 7 bp, Unknown
  misc_feature (1)..( 7): Result.003 file - promoters60/4767545
aaattgt

SEQ ID NO: 136433 - DNA, 7 bp, Unknown
  misc_feature (1)..( 7): Result.003 file - promoters60/4767545
aaaatgt

SEQ ID NO: 136434 - DNA, 8 bp, Unknown
  misc_feature (1)..( 8): Result.003 file - promoters60/4767545
ttgaaaat

SEQ ID NO: 136435 - DNA, 8 bp, Unknown
  misc_feature (1)..( 8): Result.003 file - promoters60/4767545
atgaaaag

SEQ ID NO: 136436 - DNA, 8 bp, Unknown
  misc_feature (1)..( 8): Result.003 file - promoters60/4767545
atgaaaag

SEQ ID NO: 136437 - DNA, 7 bp, Unknown
  misc_feature (1)..( 7): Result.003 file - promoters60/4767545
ataagtt

SEQ ID NO: 136438 - DNA, 7 bp, Unknown
  misc_feature (1)..( 7): Result.003 file - promoters60/4767545
atatgtt

SEQ ID NO: 136439 - DNA, 7 bp, Unknown
  misc_feature (1)..( 7): Result.003 file - promoters60/4767545
ctttctt

SEQ ID NO: 136440 - DNA, 7 bp, Unknown
  misc_feature (1)..( 7): Result.003 file - promoters60/4767545
ctttctt

SEQ ID NO: 136441 - DNA, 7 bp, Unknown
  misc_feature (1)..( 7): Result.003 file - promoters60/4767545
ctcctct

SEQ ID NO: 136442 - DNA, 7 bp, Unknown
  misc_feature (1)..( 7): Result.003 file - promoters60/4767545
ctcatct

SEQ ID NO: 136443 - DNA, 8 bp, Unknown
  misc_feature (1)..( 8): Result.003 file - promoters60/4767545
atttaaaa

SEQ ID NO: 136444 - DNA, 8 bp, Unknown
  misc_feature (1)..( 8): Result.003 file - promoters60/4767545
attaaaaa

SEQ ID NO: 136445 - DNA, 6 bp, Unknown
  misc_feature (1)..( 6): Result.003 file - promoters60/4767545
tgatta

SEQ ID NO: 136446 - DNA, 6 bp, Unknown
  misc_feature (1)..( 6): Result.003 file - promoters60/4767545
tgatta

SEQ ID NO: 136447 - DNA, 7 bp, Unknown
  misc_feature (1)..( 7): Result.003 file - promoters60/4767545
atgtgga

SEQ ID NO: 136448 - DNA, 7 bp, Unknown
  misc_feature (1)..( 7): Result.003 file - promoters60/4767545
atgcgga

SEQ ID NO: 136449 - DNA, 8 bp, Unknown
  misc_feature (1)..( 8): Result.003 file - promoters60/4767545
aaaataaa

SEQ ID NO: 136450 - DNA, 8 bp, Unknown
  misc_feature (1)..( 8): Result.003 file - promoters60/4767545
aaattaaa

SEQ ID NO: 136451 - DNA, 8 bp, Unknown
  misc_feature (1)..( 8): Result.003 file - promoters60/4767545
ttgaaaaa

SEQ ID NO: 136452 - DNA, 8 bp, Unknown
  misc_feature (1)..( 8): Result.003 file - promoters60/4767545
atgaaaag

SEQ ID NO: 136453 - DNA, 8 bp, Unknown
  misc_feature (1)..( 8): Result.003 file - promoters60/4767545
atgaaaag

SEQ ID NO: 136454 - DNA, 7 bp, Unknown
  misc_feature (1)..( 7): Result.003 file - promoters60/4767545
aaacaaa

SEQ ID NO: 136455 - DNA, 7 bp, Unknown
  misc_feature (1)..( 7): Result.003 file - promoters60/4767545
aaagaaa

SEQ ID NO: 136456 - DNA, 7 bp, Unknown
  misc_feature (1)..( 7): Result.003 file - promoters60/4767545
aatgcaa

SEQ ID NO: 136457 - DNA, 7 bp, Unknown
  misc_feature (1)..( 7): Result.003 file - promoters60/4767545
aatccaa

SEQ ID NO: 136458 - DNA, 6 bp, Unknown
  misc_feature (1)..( 6): Result.003 file - promoters60/4767545
aaataa

SEQ ID NO: 136459 - DNA, 6 bp, Unknown
  misc_feature (1)..( 6): Result.003 file - promoters60/4767545
aaataa

SEQ ID NO: 136460 - DNA, 7 bp, Unknown
  misc_feature (1)..( 7): Result.003 file - promoters60/4767545
aaataat

SEQ ID NO: 136461 - DNA, 7 bp, Unknown
  misc_feature (1)..( 7): Result.003 file - promoters60/4767545
aaaaaat

SEQ ID NO: 136462 - DNA, 7 bp, Unknown
  misc_feature (1)..( 7): Result.003 file - promoters60/4767545
caaaatc

SEQ ID NO: 136463 - DNA, 7 bp, Unknown
  misc_feature (1)..( 7): Result.003 file - promoters60/4767545
caagatc

SEQ ID NO: 136464 - DNA, 6 bp, Unknown
  misc_feature (1)..( 6): Result.003 file - promoters60/4767545
cttctc

SEQ ID NO: 136465 - DNA, 6 bp, Unknown
  misc_feature (1)..( 6): Result.003 file - promoters60/4767545
cttctc

SEQ ID NO: 136466 - DNA, 6 bp, Unknown
  misc_feature (1)..( 6): Result.003 file - promoters60/4767545
gagttt

SEQ ID NO: 136467 - DNA, 6 bp, Unknown
  misc_feature (1)..( 6): Result.003 file - promoters60/4767545
gagttt

SEQ ID NO: 136468 - DNA, 6 bp, Unknown
  misc_feature (1)..( 6): Result.003 file - promoters60/4767545
tttcga

SEQ ID NO: 136469 - DNA, 6 bp, Unknown
  misc_feature (1)..( 6): Result.003 file - promoters60/4767545
tttcga

SEQ ID NO: 136470 - DNA, 8 bp, Unknown
  misc_feature (1)..( 8): Result.003 file - promoters60/4767552
aacaaaaa

SEQ ID NO: 136471 - DNA, 8 bp, Unknown
  misc_feature (1)..( 8): Result.003 file - promoters60/4767552
aacaaaaa

SEQ ID NO: 136472 - DNA, 7 bp, Unknown
  misc_feature (1)..( 7): Result.003 file - promoters60/4767552
taacaaa

SEQ ID NO: 136473 - DNA, 7 bp, Unknown
  misc_feature (1)..( 7): Result.003 file - promoters60/4767552
taagaaa

SEQ ID NO: 136474 - DNA, 7 bp, Unknown
  misc_feature (1)..( 7): Result.003 file - promoters60/4767552
aaatgtg

SEQ ID NO: 136475 - DNA, 7 bp, Unknown
  misc_feature (1)..( 7): Result.003 file - promoters60/4767552
aaaagtg

SEQ ID NO: 136476 - DNA, 13 bp, Unknown
  misc_feature (1)..( 13): Result.003 file - promoters60/4767552
ataatactataat

SEQ ID NO: 136477 - DNA, 13 bp, Unknown
  misc_feature (1)..( 13): Result.003 file - promoters60/4767552
ataatcctaaaat

SEQ ID NO: 136478 - DNA, 7 bp, Unknown
  misc_feature (1)..( 7): Result.003 file - promoters60/4767552
caaacta

SEQ ID NO: 136479 - DNA, 7 bp, Unknown
  misc_feature (1)..( 7): Result.003 file - promoters60/4767552
caatcta

SEQ ID NO: 136480 - DNA, 10 bp, Unknown
  misc_feature (1)..( 10): Result.003 file - promoters60/4767552
atattataaa

SEQ ID NO: 136481 - DNA, 10 bp, Unknown
  misc_feature (1)..( 10): Result.003 file - promoters60/4767552
atatcataaa

SEQ ID NO: 136482 - DNA, 6 bp, Unknown
  misc_feature (1)..( 6): Result.003 file - promoters60/4767552
tcagag

SEQ ID NO: 136483 - DNA, 6 bp, Unknown
  misc_feature (1)..( 6): Result.003 file - promoters60/4767552
tcagag

SEQ ID NO: 136484 - DNA, 6 bp, Unknown
  misc_feature (1)..( 6): Result.003 file - promoters60/4767552
tcattt

SEQ ID NO: 136485 - DNA, 6 bp, Unknown
  misc_feature (1)..( 6): Result.003 file - promoters60/4767552
tcattt

SEQ ID NO: 136486 - DNA, 9 bp, Unknown
  misc_feature (1)..( 9): Result.003 file - promoters60/4767552
ttgtaagtg

SEQ ID NO: 136487 - DNA, 9 bp, Unknown
  misc_feature (1)..( 9): Result.003 file - promoters60/4767552
ttgtgagtg

SEQ ID NO: 136488 - DNA, 6 bp, Unknown
  misc_feature (1)..( 6): Result.003 file - promoters60/4767552
cataga

SEQ ID NO: 136489 - DNA, 6 bp, Unknown
  misc_feature (1)..( 6): Result.003 file - promoters60/4767552
cataga

SEQ ID NO: 136490 - DNA, 6 bp, Unknown
  misc_feature (1)..( 6): Result.003 file - promoters60/4767552
ataaaa

SEQ ID NO: 136491 - DNA, 6 bp, Unknown
  misc_feature (1)..( 6): Result.003 file - promoters60/4767552
ataaaa

SEQ ID NO: 136492 - DNA, 6 bp, Unknown
  misc_feature (1)..( 6): Result.003 file - promoters60/4767552
taggtt

SEQ ID NO: 136493 - DNA, 6 bp, Unknown
  misc_feature (1)..( 6): Result.003 file - promoters60/4767552
taggtt

SEQ ID NO: 136494 - DNA, 7 bp, Unknown
  misc_feature (1)..( 7): Result.003 file - promoters60/4767552
agaaata

SEQ ID NO: 136495 - DNA, 7 bp, Unknown
  misc_feature (1)..( 7): Result.003 file - promoters60/4767552
agagata

SEQ ID NO: 136496 - DNA, 7 bp, Unknown
  misc_feature (1)..( 7): Result.003 file - promoters60/4767552
agatatt

SEQ ID NO: 136497 - DNA, 7 bp, Unknown
  misc_feature (1)..( 7): Result.003 file - promoters60/4767552
tcaaaat

SEQ ID NO: 136498 - DNA, 7 bp, Unknown
  misc_feature (1)..( 7): Result.003 file - promoters60/4767552
tcagaat

SEQ ID NO: 136499 - DNA, 6 bp, Unknown
  misc_feature (1)..( 6): Result.003 file - promoters60/4767552
atttct

SEQ ID NO: 136500 - DNA, 6 bp, Unknown
  misc_feature (1)..( 6): Result.003 file - promoters60/4767552
atttct

SEQ ID NO: 136501 - DNA, 8 bp, Unknown
  misc_feature (1)..( 8): Result.003 file - promoters60/4767552
tgtctact

SEQ ID NO: 136502 - DNA, 8 bp, Unknown
  misc_feature (1)..( 8): Result.003 file - promoters60/4767552
tgtcaact

SEQ ID NO: 136503 - DNA, 7 bp, Unknown
  misc_feature (1)..( 7): Result.003 file - promoters60/4767552
tcaagag

SEQ ID NO: 136504 - DNA, 7 bp, Unknown
  misc_feature (1)..( 7): Result.003 file - promoters60/4767552
tcacgag

SEQ ID NO: 136505 - DNA, 10 bp, Unknown
  misc_feature (1)..( 10): Result.003 file - promoters60/4767578
taatttatct

SEQ ID NO: 136506 - DNA, 10 bp, Unknown
  misc_feature (1)..( 10): Result.003 file - promoters60/4767578
gattttatct

SEQ ID NO: 136507 - DNA, 10 bp, Unknown
  misc_feature (1)..( 10): Result.003 file - promoters60/4767578
taatgtatac

SEQ ID NO: 136508 - DNA, 11 bp, Unknown
  misc_feature (1)..( 11): Result.003 file - promoters60/4767578
aacaaaatgta

SEQ ID NO: 136509 - DNA, 11 bp, Unknown
  misc_feature (1)..( 11): Result.003 file - promoters60/4767578
aacaaaataca

SEQ ID NO: 136510 - DNA, 11 bp, Unknown
  misc_feature (1)..( 11): Result.003 file - promoters60/4767578
atgtaaattgt

SEQ ID NO: 136511 - DNA, 9 bp, Unknown
  misc_feature (1)..( 9): Result.003 file - promoters60/4767578
tgtcttcat

SEQ ID NO: 136512 - DNA, 9 bp, Unknown
  misc_feature (1)..( 9): Result.003 file - promoters60/4767578
tgtattcat

SEQ ID NO: 136513 - DNA, 6 bp, Unknown
  misc_feature (1)..( 6): Result.003 file - promoters60/4767578
aaattt

SEQ ID NO: 136514 - DNA, 6 bp, Unknown
  misc_feature (1)..( 6): Result.003 file - promoters60/4767578
aaattt

SEQ ID NO: 136515 - DNA, 6 bp, Unknown
  misc_feature (1)..( 6): Result.003 file - promoters60/4767578
aaatca

SEQ ID NO: 136516 - DNA, 6 bp, Unknown
  misc_feature (1)..( 6): Result.003 file - promoters60/4767578
aaatca

SEQ ID NO: 136517 - DNA, 7 bp, Unknown
  misc_feature (1)..( 7): Result.003 file - promoters60/4767578
aatttat

SEQ ID NO: 136518 - DNA, 7 bp, Unknown
  misc_feature (1)..( 7): Result.003 file - promoters60/4767578
aatgtat

SEQ ID NO: 136519 - DNA, 7 bp, Unknown
  misc_feature (1)..( 7): Result.003 file - promoters60/4767578
aattaca

SEQ ID NO: 136520 - DNA, 7 bp, Unknown
  misc_feature (1)..( 7): Result.003 file - promoters60/4767578
aatgaca

SEQ ID NO: 136521 - DNA, 8 bp, Unknown
  misc_feature (1)..( 8): Result.003 file - promoters60/4767578
tactatat

SEQ ID NO: 136522 - DNA, 8 bp, Unknown
  misc_feature (1)..( 8): Result.003 file - promoters60/4767578
tactttat

SEQ ID NO: 136523 - DNA, 6 bp, Unknown
  misc_feature (1)..( 6): Result.003 file - promoters60/4767578
ttatat

SEQ ID NO: 136524 - DNA, 6 bp, Unknown
  misc_feature (1)..( 6): Result.003 file - promoters60/4767578
ttatat

SEQ ID NO: 136525 - DNA, 7 bp, Unknown
  misc_feature (1)..( 7): Result.003 file - promoters60/4767578
aaaaaaa

SEQ ID NO: 136526 - DNA, 7 bp, Unknown
  misc_feature (1)..( 7): Result.003 file - promoters60/4767578
aaagaaa

SEQ ID NO: 136527 - DNA, 8 bp, Unknown
  misc_feature (1)..( 8): Result.003 file - promoters60/4767578
aagaaaaa

SEQ ID NO: 136528 - DNA, 8 bp, Unknown
  misc_feature (1)..( 8): Result.003 file - promoters60/4767578
aagaaaaa

SEQ ID NO: 136529 - DNA, 6 bp, Unknown
  misc_feature (1)..( 6): Result.003 file - promoters60/4767578
tcttct

SEQ ID NO: 136530 - DNA, 6 bp, Unknown
  misc_feature (1)..( 6): Result.003 file - promoters60/4767578
tcttct

SEQ ID NO: 136531 - DNA, 6 bp, Unknown
  misc_feature (1)..( 6): Result.003 file - promoters60/4767578
ttctct

SEQ ID NO: 136532 - DNA, 6 bp, Unknown
  misc_feature (1)..( 6): Result.003 file - promoters60/4767578
ttctct

SEQ ID NO: 136533 - DNA, 7 bp, Unknown
  misc_feature (1)..( 7): Result.003 file - promoters60/4767578
aattttg

SEQ ID NO: 136534 - DNA, 7 bp, Unknown
  misc_feature (1)..( 7): Result.003 file - promoters60/4767578
aattttg

SEQ ID NO: 136535 - DNA, 7 bp, Unknown
  misc_feature (1)..( 7): Result.003 file - promoters60/4767578
atatcat

SEQ ID NO: 136536 - DNA, 7 bp, Unknown
  misc_feature (1)..( 7): Result.003 file - promoters60/4767578
atatcat

SEQ ID NO: 136537 - DNA, 8 bp, Unknown
  misc_feature (1)..( 8): Result.003 file - promoters60/4767578
gtcattta

SEQ ID NO: 136538 - DNA, 8 bp, Unknown
  misc_feature (1)..( 8): Result.003 file - promoters60/4767578
gtcactta

SEQ ID NO: 136539 - DNA, 7 bp, Unknown
  misc_feature (1)..( 7): Result.003 file - promoters60/4767578
tcgtaat

SEQ ID NO: 136540 - DNA, 7 bp, Unknown
  misc_feature (1)..( 7): Result.003 file - promoters60/4767578
tcgaaat

SEQ ID NO: 136541 - DNA, 6 bp, Unknown
  misc_feature (1)..( 6): Result.003 file - promoters60/4767610
aatatt

SEQ ID NO: 136542 - DNA, 6 bp, Unknown
  misc_feature (1)..( 6): Result.003 file - promoters60/4767610
aatatt

SEQ ID NO: 136543 - DNA, 7 bp, Unknown
  misc_feature (1)..( 7): Result.003 file - promoters60/4767610
atggagt

SEQ ID NO: 136544 - DNA, 7 bp, Unknown
  misc_feature (1)..( 7): Result.003 file - promoters60/4767610
atgtagt

SEQ ID NO: 136545 - DNA, 7 bp, Unknown
  misc_feature (1)..( 7): Result.003 file - promoters60/4767610
acgtgta

SEQ ID NO: 136546 - DNA, 7 bp, Unknown
  misc_feature (1)..( 7): Result.003 file - promoters60/4767610
acgtgta

SEQ ID NO: 136547 - DNA, 10 bp, Unknown
  misc_feature (1)..( 10): Result.003 file - promoters60/4767610
aactatacaa

SEQ ID NO: 136548 - DNA, 10 bp, Unknown
  misc_feature (1)..( 10): Result.003 file - promoters60/4767610
aactattcaa

SEQ ID NO: 136549 - DNA, 7 bp, Unknown
  misc_feature (1)..( 7): Result.003 file - promoters60/4767610
tgtatac

SEQ ID NO: 136550 - DNA, 7 bp, Unknown
  misc_feature (1)..( 7): Result.003 file - promoters60/4767610
tgtatac

SEQ ID NO: 136551 - DNA, 8 bp, Unknown
  misc_feature (1)..( 8): Result.003 file - promoters60/4767610
tatcttaa

SEQ ID NO: 136552 - DNA, 8 bp, Unknown
  misc_feature (1)..( 8): Result.003 file - promoters60/4767610
tattttaa

SEQ ID NO: 136553 - DNA, 8 bp, Unknown
  misc_feature (1)..( 8): Result.003 file - promoters60/4767610
tattttat

SEQ ID NO: 136554 - DNA, 6 bp, Unknown
  misc_feature (1)..( 6): Result.003 file - promoters60/4767610
aagaca

SEQ ID NO: 136555 - DNA, 6 bp, Unknown
  misc_feature (1)..( 6): Result.003 file - promoters60/4767610
aagaca

SEQ ID NO: 136556 - DNA, 9 bp, Unknown
  misc_feature (1)..( 9): Result.003 file - promoters60/4767610
aataaatat

SEQ ID NO: 136557 - DNA, 9 bp, Unknown
  misc_feature (1)..( 9): Result.003 file - promoters60/4767610
cttaattat

SEQ ID NO: 136558 - DNA, 9 bp, Unknown
  misc_feature (1)..( 9): Result.003 file - promoters60/4767610
cttgatttg

SEQ ID NO: 136559 - DNA, 13 bp, Unknown
  misc_feature (1)..( 13): Result.003 file - promoters60/4767610
tatacagtataca

SEQ ID NO: 136560 - DNA, 13 bp, Unknown
  misc_feature (1)..( 13): Result.003 file - promoters60/4767610
tatacattataca

SEQ ID NO: 136561 - DNA, 6 bp, Unknown
  misc_feature (1)..( 6): Result.003 file - promoters60/4767610
taataa

SEQ ID NO: 136562 - DNA, 6 bp, Unknown
  misc_feature (1)..( 6): Result.003 file - promoters60/4767610
taataa

SEQ ID NO: 136563 - DNA, 6 bp, Unknown
  misc_feature (1)..( 6): Result.003 file - promoters60/4767610
ttttat

SEQ ID NO: 136564 - DNA, 6 bp, Unknown
  misc_feature (1)..( 6): Result.003 file - promoters60/4767610
ttttat

SEQ ID NO: 136565 - DNA, 6 bp, Unknown
  misc_feature (1)..( 6): Result.003 file - promoters60/4767610
tatata

SEQ ID NO: 136566 - DNA, 6 bp, Unknown
  misc_feature (1)..( 6): Result.003 file - promoters60/4767610
tatata

SEQ ID NO: 136567 - DNA, 8 bp, Unknown
  misc_feature (1)..( 8): Result.003 file - promoters60/4767610
acccacca

SEQ ID NO: 136568 - DNA, 8 bp, Unknown
  misc_feature (1)..( 8): Result.003 file - promoters60/4767610
accaacca

SEQ ID NO: 136569 - DNA, 7 bp, Unknown
  misc_feature (1)..( 7): Result.003 file - promoters60/4767610
atataat

SEQ ID NO: 136570 - DNA, 7 bp, Unknown
  misc_feature (1)..( 7): Result.003 file - promoters60/4767610
atataat

SEQ ID NO: 136571 - DNA, 6 bp, Unknown
  misc_feature (1)..( 6): Result.003 file - promoters60/4767610
aatcca

SEQ ID NO: 136572 - DNA, 6 bp, Unknown
  misc_feature (1)..( 6): Result.003 file - promoters60/4767610
aatcca

SEQ ID NO: 136573 - DNA, 8 bp, Unknown
  misc_feature (1)..( 8): Result.003 file - promoters60/4767610
aaaaaatg

SEQ ID NO: 136574 - DNA, 8 bp, Unknown
  misc_feature (1)..( 8): Result.003 file - promoters60/4767610
aaaacatg

SEQ ID NO: 136575 - DNA, 10 bp, Unknown
  misc_feature (1)..( 10): Result.003 file - promoters60/4767638
tcataaatag

SEQ ID NO: 136576 - DNA, 10 bp, Unknown
  misc_feature (1)..( 10): Result.003 file - promoters60/4767638
ttataattag

SEQ ID NO: 136577 - DNA, 10 bp, Unknown
  misc_feature (1)..( 10): Result.003 file - promoters60/4767638
agataattaa

SEQ ID NO: 136578 - DNA, 10 bp, Unknown
  misc_feature (1)..( 10): Result.003 file - promoters60/4767638
ttatgattga

SEQ ID NO: 136579 - DNA, 9 bp, Unknown
  misc_feature (1)..( 9): Result.003 file - promoters60/4767638
acaattaaa

SEQ ID NO: 136580 - DNA, 9 bp, Unknown
  misc_feature (1)..( 9): Result.003 file - promoters60/4767638
tcaaataaa

SEQ ID NO: 136581 - DNA, 9 bp, Unknown
  misc_feature (1)..( 9): Result.003 file - promoters60/4767638
acaataaaa

SEQ ID NO: 136582 - DNA, 9 bp, Unknown
  misc_feature (1)..( 9): Result.003 file - promoters60/4767638
atgataaaa

SEQ ID NO: 136583 - DNA, 6 bp, Unknown
  misc_feature (1)..( 6): Result.003 file - promoters60/4767659
gaaaaa

SEQ ID NO: 136584 - DNA, 6 bp, Unknown
  misc_feature (1)..( 6): Result.003 file - promoters60/4767659
gaaaaa

SEQ ID NO: 136585 - DNA, 6 bp, Unknown
  misc_feature (1)..( 6): Result.003 file - promoters60/4767659
aaaata

SEQ ID NO: 136586 - DNA, 6 bp, Unknown
  misc_feature (1)..( 6): Result.003 file - promoters60/4767659
aaaata

SEQ ID NO: 136587 - DNA, 7 bp, Unknown
  misc_feature (1)..( 7): Result.003 file - promoters60/4767659
tcacata

SEQ ID NO: 136588 - DNA, 7 bp, Unknown
  misc_feature (1)..( 7): Result.003 file - promoters60/4767659
tcaaata

SEQ ID NO: 136589 - DNA, 7 bp, Unknown
  misc_feature (1)..( 7): Result.003 file - promoters60/4767659
ttgtaag

SEQ ID NO: 136590 - DNA, 7 bp, Unknown
  misc_feature (1)..( 7): Result.003 file - promoters60/4767659
ttgtaag

SEQ ID NO: 136591 - DNA, 7 bp, Unknown
  misc_feature (1)..( 7): Result.003 file - promoters60/4767659
attttag

SEQ ID NO: 136592 - DNA, 7 bp, Unknown
  misc_feature (1)..( 7): Result.003 file - promoters60/4767659
attttag

SEQ ID NO: 136593 - DNA, 8 bp, Unknown
  misc_feature (1)..( 8): Result.003 file - promoters60/4767659
aaaaggaa

SEQ ID NO: 136594 - DNA, 8 bp, Unknown
  misc_feature (1)..( 8): Result.003 file - promoters60/4767659
aaatggaa

SEQ ID NO: 136595 - DNA, 7 bp, Unknown
  misc_feature (1)..( 7): Result.003 file - promoters60/4767659
ttagttg

SEQ ID NO: 136596 - DNA, 7 bp, Unknown
  misc_feature (1)..( 7): Result.003 file - promoters60/4767659
ttatttg

SEQ ID NO: 136597 - DNA, 8 bp, Unknown
  misc_feature (1)..( 8): Result.003 file - promoters60/4767659
aaatcctt

SEQ ID NO: 136598 - DNA, 8 bp, Unknown
  misc_feature (1)..( 8): Result.003 file - promoters60/4767659
aaagcctt

SEQ ID NO: 136599 - DNA, 6 bp, Unknown
  misc_feature (1)..( 6): Result.003 file - promoters60/4767659
aaaatt

SEQ ID NO: 136600 - DNA, 6 bp, Unknown
  misc_feature (1)..( 6): Result.003 file - promoters60/4767659
aaaatt

SEQ ID NO: 136601 - DNA, 7 bp, Unknown
  misc_feature (1)..( 7): Result.003 file - promoters60/4767659
cttctca

SEQ ID NO: 136602 - DNA, 7 bp, Unknown
  misc_feature (1)..( 7): Result.003 file - promoters60/4767659
cttatca

SEQ ID NO: 136603 - DNA, 6 bp, Unknown
  misc_feature (1)..( 6): Result.003 file - promoters60/4767659
gagaag

SEQ ID NO: 136604 - DNA, 6 bp, Unknown
  misc_feature (1)..( 6): Result.003 file - promoters60/4767659
gagaag

SEQ ID NO: 136605 - DNA, 7 bp, Unknown
  misc_feature (1)..( 7): Result.003 file - promoters60/4767659
acatgaa

SEQ ID NO: 136606 - DNA, 7 bp, Unknown
  misc_feature (1)..( 7): Result.003 file - promoters60/4767659
acatgaa

SEQ ID NO: 136607 - DNA, 6 bp, Unknown
  misc_feature (1)..( 6): Result.003 file - promoters60/4767659
cctaat

SEQ ID NO: 136608 - DNA, 6 bp, Unknown
  misc_feature (1)..( 6): Result.003 file - promoters60/4767659
cctaat

SEQ ID NO: 136609 - DNA, 6 bp, Unknown
  misc_feature (1)..( 6): Result.003 file - promoters60/4767659
acaagt

SEQ ID NO: 136610 - DNA, 6 bp, Unknown
  misc_feature (1)..( 6): Result.003 file - promoters60/4767659
acaagt

SEQ ID NO: 136611 - DNA, 6 bp, Unknown
  misc_feature (1)..( 6): Result.003 file - promoters60/4767659
ttctgt

SEQ ID NO: 136612 - DNA, 6 bp, Unknown
  misc_feature (1)..( 6): Result.003 file - promoters60/4767659
ttctgt

SEQ ID NO: 136613 - DNA, 9 bp, Unknown
  misc_feature (1)..( 9): Result.003 file - promoters60/4767659
ggccagaaa

SEQ ID NO: 136614 - DNA, 9 bp, Unknown
  misc_feature (1)..( 9): Result.003 file - promoters60/4767659
ggcaagaaa

SEQ ID NO: 136615 - DNA, 8 bp, Unknown
  misc_feature (1)..( 8): Result.003 file - promoters60/4767659
agtgacta

SEQ ID NO: 136616 - DNA, 8 bp, Unknown
  misc_feature (1)..( 8): Result.003 file - promoters60/4767659
agtgtcta

SEQ ID NO: 136617 - DNA, 7 bp, Unknown
  misc_feature (1)..( 7): Result.003 file - promoters60/4767659
ttcatat

SEQ ID NO: 136618 - DNA, 7 bp, Unknown
  misc_feature (1)..( 7): Result.003 file - promoters60/4767659
ttcttat

SEQ ID NO: 136619 - DNA, 9 bp, Unknown
  misc_feature (1)..( 9): Result.003 file - promoters60/4767663
aattaaaat

SEQ ID NO: 136620 - DNA, 9 bp, Unknown
  misc_feature (1)..( 9): Result.003 file - promoters60/4767663
aatgaaaaa

SEQ ID NO: 136621 - DNA, 9 bp, Unknown
  misc_feature (1)..( 9): Result.003 file - promoters60/4767663
cgttaaaaa

SEQ ID NO: 136622 - DNA, 9 bp, Unknown
  misc_feature (1)..( 9): Result.003 file - promoters60/4767663
tcagaaaaa

SEQ ID NO: 136623 - DNA, 9 bp, Unknown
  misc_feature (1)..( 9): Result.003 file - promoters60/4767663
aatcaaata

SEQ ID NO: 136624 - DNA, 9 bp, Unknown
  misc_feature (1)..( 9): Result.003 file - promoters60/4767663
tatgaaatt

SEQ ID NO: 136625 - DNA, 9 bp, Unknown
  misc_feature (1)..( 9): Result.003 file - promoters60/4767663
ttatatata

SEQ ID NO: 136626 - DNA, 9 bp, Unknown
  misc_feature (1)..( 9): Result.003 file - promoters60/4767663
ttatatata

SEQ ID NO: 136627 - DNA, 9 bp, Unknown
  misc_feature (1)..( 9): Result.003 file - promoters60/4767663
gtatatata

SEQ ID NO: 136628 - DNA, 9 bp, Unknown
  misc_feature (1)..( 9): Result.003 file - promoters60/4767663
ctatatata

SEQ ID NO: 136629 - DNA, 9 bp, Unknown
  misc_feature (1)..( 9): Result.003 file - promoters60/4767663
atatatata

SEQ ID NO: 136630 - DNA, 9 bp, Unknown
  misc_feature (1)..( 9): Result.003 file - promoters60/4767663
atatttata

SEQ ID NO: 136631 - DNA, 11 bp, Unknown
  misc_feature (1)..( 11): Result.003 file - promoters60/4767663
tatccaaaatg

SEQ ID NO: 136632 - DNA, 11 bp, Unknown
  misc_feature (1)..( 11): Result.003 file - promoters60/4767663
tatacaaacta

SEQ ID NO: 136633 - DNA, 11 bp, Unknown
  misc_feature (1)..( 11): Result.003 file - promoters60/4767663
catacacattc

SEQ ID NO: 136634 - DNA, 11 bp, Unknown
  misc_feature (1)..( 11): Result.003 file - promoters60/4767663
cgtacacatag

SEQ ID NO: 136635 - DNA, 11 bp, Unknown
  misc_feature (1)..( 11): Result.003 file - promoters60/4767663
tacacacacac

SEQ ID NO: 136636 - DNA, 11 bp, Unknown
  misc_feature (1)..( 11): Result.003 file - promoters60/4767663
tttacaaaaat

SEQ ID NO: 136637 - DNA, 12 bp, Unknown
  misc_feature (1)..( 12): Result.003 file - promoters60/4767663
acatattctgaa

SEQ ID NO: 136638 - DNA, 12 bp, Unknown
  misc_feature (1)..( 12): Result.003 file - promoters60/4767663
ataaattttgag

SEQ ID NO: 136639 - DNA, 12 bp, Unknown
  misc_feature (1)..( 12): Result.003 file - promoters60/4767663
tcaaatattgcg

SEQ ID NO: 136640 - DNA, 12 bp, Unknown
  misc_feature (1)..( 12): Result.003 file - promoters60/4767663
taagcttttagt

SEQ ID NO: 136641 - DNA, 12 bp, Unknown
  misc_feature (1)..( 12): Result.003 file - promoters60/4767663
aaaaagtttatt

SEQ ID NO: 136642 - DNA, 12 bp, Unknown
  misc_feature (1)..( 12): Result.003 file - promoters60/4767663
aaaaagttgcaa

SEQ ID NO: 136643 - DNA, 14 bp, Unknown
  misc_feature (1)..( 14): Result.003 file - promoters60/4767663
ttagatatatttaa

SEQ ID NO: 136644 - DNA, 14 bp, Unknown
  misc_feature (1)..( 14): Result.003 file - promoters60/4767663
ttatatatgtttat

SEQ ID NO: 136645 - DNA, 14 bp, Unknown
  misc_feature (1)..( 14): Result.003 file - promoters60/4767663
aaacataagtttca

SEQ ID NO: 136646 - DNA, 14 bp, Unknown
  misc_feature (1)..( 14): Result.003 file - promoters60/4767663
caagtgaagtatca

SEQ ID NO: 136647 - DNA, 14 bp, Unknown
  misc_feature (1)..( 14): Result.003 file - promoters60/4767663
aaaaaaaagtttat

SEQ ID NO: 136648 - DNA, 14 bp, Unknown
  misc_feature (1)..( 14): Result.003 file - promoters60/4767663
tctgataaattttg

SEQ ID NO: 136649 - DNA, 14 bp, Unknown
  misc_feature (1)..( 14): Result.003 file - promoters60/4767663
tagaaaaagttgca

SEQ ID NO: 136650 - DNA, 6 bp, Unknown
  misc_feature (1)..( 6): Result.003 file - promoters60/4767679
agacaa

SEQ ID NO: 136651 - DNA, 6 bp, Unknown
  misc_feature (1)..( 6): Result.003 file - promoters60/4767679
agacaa

SEQ ID NO: 136652 - DNA, 7 bp, Unknown
  misc_feature (1)..( 7): Result.003 file - promoters60/4767679
taaaagt

SEQ ID NO: 136653 - DNA, 7 bp, Unknown
  misc_feature (1)..( 7): Result.003 file - promoters60/4767679
taagagt

SEQ ID NO: 136654 - DNA, 8 bp, Unknown
  misc_feature (1)..( 8): Result.003 file - promoters60/4767679
ggagtatt

SEQ ID NO: 136655 - DNA, 8 bp, Unknown
  misc_feature (1)..( 8): Result.003 file - promoters60/4767679
ggactatt

SEQ ID NO: 136656 - DNA, 8 bp, Unknown
  misc_feature (1)..( 8): Result.003 file - promoters60/4767679
tacaatca

SEQ ID NO: 136657 - DNA, 8 bp, Unknown
  misc_feature (1)..( 8): Result.003 file - promoters60/4767679
aacaatca

SEQ ID NO: 136658 - DNA, 8 bp, Unknown
  misc_feature (1)..( 8): Result.003 file - promoters60/4767679
aacaattc

SEQ ID NO: 136659 - DNA, 8 bp, Unknown
  misc_feature (1)..( 8): Result.003 file - promoters60/4767679
tatatata

SEQ ID NO: 136660 - DNA, 8 bp, Unknown
  misc_feature (1)..( 8): Result.003 file - promoters60/4767679
tataaata

SEQ ID NO: 136661 - DNA, 6 bp, Unknown
  misc_feature (1)..( 6): Result.003 file - promoters60/4767679
atatca

SEQ ID NO: 136662 - DNA, 6 bp, Unknown
  misc_feature (1)..( 6): Result.003 file - promoters60/4767679
atatca

SEQ ID NO: 136663 - DNA, 6 bp, Unknown
  misc_feature (1)..( 6): Result.003 file - promoters60/4767679
ttttct

SEQ ID NO: 136664 - DNA, 6 bp, Unknown
  misc_feature (1)..( 6): Result.003 file - promoters60/4767679
ttttct

SEQ ID NO: 136665 - DNA, 6 bp, Unknown
  misc_feature (1)..( 6): Result.003 file - promoters60/4767679
aaaaaa

SEQ ID NO: 136666 - DNA, 6 bp, Unknown
  misc_feature (1)..( 6): Result.003 file - promoters60/4767679
aaaaaa

SEQ ID NO: 136667 - DNA, 10 bp, Unknown
  misc_feature (1)..( 10): Result.003 file - promoters60/4767679
caaaaaatta

SEQ ID NO: 136668 - DNA, 10 bp, Unknown
  misc_feature (1)..( 10): Result.003 file - promoters60/4767679
caaataatta

SEQ ID NO: 136669 - DNA, 14 bp, Unknown
  misc_feature (1)..( 14): Result.003 file - promoters60/4767679
aaatagaataaaaa

SEQ ID NO: 136670 - DNA, 14 bp, Unknown
  misc_feature (1)..( 14): Result.003 file - promoters60/4767679
aaaaagaaaaaaaa

SEQ ID NO: 136671 - DNA, 9 bp, Unknown
  misc_feature (1)..( 9): Result.003 file - promoters60/4767679
ggttaaaat

SEQ ID NO: 136672 - DNA, 9 bp, Unknown
  misc_feature (1)..( 9): Result.003 file - promoters60/4767679
ggttgaaat

SEQ ID NO: 136673 - DNA, 7 bp, Unknown
  misc_feature (1)..( 7): Result.003 file - promoters60/4767679
caataat

SEQ ID NO: 136674 - DNA, 7 bp, Unknown
  misc_feature (1)..( 7): Result.003 file - promoters60/4767679
caataat

SEQ ID NO: 136675 - DNA, 6 bp, Unknown
  misc_feature (1)..( 6): Result.003 file - promoters60/4767679
agaaat

SEQ ID NO: 136676 - DNA, 6 bp, Unknown
  misc_feature (1)..( 6): Result.003 file - promoters60/4767679
agaaat

SEQ ID NO: 136677 - DNA, 6 bp, Unknown
  misc_feature (1)..( 6): Result.003 file - promoters60/4767679
aataga

SEQ ID NO: 136678 - DNA, 6 bp, Unknown
  misc_feature (1)..( 6): Result.003 file - promoters60/4767679
aataga

SEQ ID NO: 136679 - DNA, 7 bp, Unknown
  misc_feature (1)..( 7): Result.003 file - promoters60/4767679
tatttca

SEQ ID NO: 136680 - DNA, 7 bp, Unknown
  misc_feature (1)..( 7): Result.003 file - promoters60/4767679
tatgtca

SEQ ID NO: 136681 - DNA, 7 bp, Unknown
  misc_feature (1)..( 7): Result.003 file - promoters60/4767679
acaagga

SEQ ID NO: 136682 - DNA, 7 bp, Unknown
  misc_feature (1)..( 7): Result.003 file - promoters60/4767679
acaggga

SEQ ID NO: 136683 - DNA, 6 bp, Unknown
  misc_feature (1)..( 6): Result.003 file - promoters60/4767679
taattt

SEQ ID NO: 136684 - DNA, 6 bp, Unknown
  misc_feature (1)..( 6): Result.003 file - promoters60/4767679
taattt

SEQ ID NO: 136685 - DNA, 7 bp, Unknown
  misc_feature (1)..( 7): Result.003 file - promoters60/4767679
tttctga

SEQ ID NO: 136686 - DNA, 7 bp, Unknown
  misc_feature (1)..( 7): Result.003 file - promoters60/4767679
tttatga

SEQ ID NO: 136687 - DNA, 6 bp, Unknown
  misc_feature (1)..( 6): Result.003 file - promoters60/4767679
atgaaa

SEQ ID NO: 136688 - DNA, 6 bp, Unknown
  misc_feature (1)..( 6): Result.003 file - promoters60/4767679
atgaaa

SEQ ID NO: 136689 - DNA, 8 bp, Unknown
  misc_feature (1)..( 8): Result.003 file - promoters60/4767679
aaaaacaa

SEQ ID NO: 136690 - DNA, 8 bp, Unknown
  misc_feature (1)..( 8): Result.003 file - promoters60/4767679
aaacacaa

SEQ ID NO: 136691 - DNA, 6 bp, Unknown
  misc_feature (1)..( 6): Result.003 file - promoters60/4767679
ttaatg

SEQ ID NO: 136692 - DNA, 6 bp, Unknown
  misc_feature (1)..( 6): Result.003 file - promoters60/4767679
ttaatg

SEQ ID NO: 136693 - DNA, 14 bp, Unknown
  misc_feature (1)..( 14): Result.003 file - promoters60/4767683
tatattaaattttt

SEQ ID NO: 136694 - DNA, 14 bp, Unknown
  misc_feature (1)..( 14): Result.003 file - promoters60/4767683
tatataaaaaaaaa

SEQ ID NO: 136695 - DNA, 14 bp, Unknown
  misc_feature (1)..( 14): Result.003 file - promoters60/4767683
tatatagatagcta

SEQ ID NO: 136696 - DNA, 14 bp, Unknown
  misc_feature (1)..( 14): Result.003 file - promoters60/4767683
agaataaaagaaaa

SEQ ID NO: 136697 - DNA, 14 bp, Unknown
  misc_feature (1)..( 14): Result.003 file - promoters60/4767683
ttgataaaggaagt

SEQ ID NO: 136698 - DNA, 11 bp, Unknown
  misc_feature (1)..( 11): Result.003 file - promoters60/4767683
caaaatcaaat

SEQ ID NO: 136699 - DNA, 11 bp, Unknown
  misc_feature (1)..( 11): Result.003 file - promoters60/4767683
ggaaagcaatg

SEQ ID NO: 136700 - DNA, 11 bp, Unknown
  misc_feature (1)..( 11): Result.003 file - promoters60/4767683
aaaaagaaatg

SEQ ID NO: 136701 - DNA, 11 bp, Unknown
  misc_feature (1)..( 11): Result.003 file - promoters60/4767683
aaaaaaaaatg

SEQ ID NO: 136702 - DNA, 9 bp, Unknown
  misc_feature (1)..( 9): Result.003 file - promoters60/4767683
caagcagag

SEQ ID NO: 136703 - DNA, 9 bp, Unknown
  misc_feature (1)..( 9): Result.003 file - promoters60/4767683
aaagaagag

SEQ ID NO: 136704 - DNA, 9 bp, Unknown
  misc_feature (1)..( 9): Result.003 file - promoters60/4767683
agggaagag

SEQ ID NO: 136705 - DNA, 9 bp, Unknown
  misc_feature (1)..( 9): Result.003 file - promoters60/4767683
aaaaaagaa

SEQ ID NO: 136706 - DNA, 17 bp, Unknown
  misc_feature (1)..( 17): Result.003 file - promoters60/4767683
cagagaggcaaaatcaa

SEQ ID NO: 136707 - DNA, 17 bp, Unknown
  misc_feature (1)..( 17): Result.003 file - promoters60/4767683
atacaccccaaaatatc

SEQ ID NO: 136708 - DNA, 17 bp, Unknown
  misc_feature (1)..( 17): Result.003 file - promoters60/4767683
tgagtagtgtaaattat

SEQ ID NO: 136709 - DNA, 17 bp, Unknown
  misc_feature (1)..( 17): Result.003 file - promoters60/4767683
agtaatgtcaattttga

SEQ ID NO: 136710 - DNA, 17 bp, Unknown
  misc_feature (1)..( 17): Result.003 file - promoters60/4767683
ttttagtttaaaatagg

SEQ ID NO: 136711 - DNA, 8 bp, Unknown
  misc_feature (1)..( 8): Result.003 file - promoters60/4767683
tttagact

SEQ ID NO: 136712 - DNA, 8 bp, Unknown
  misc_feature (1)..( 8): Result.003 file - promoters60/4767683
attatact

SEQ ID NO: 136713 - DNA, 8 bp, Unknown
  misc_feature (1)..( 8): Result.003 file - promoters60/4767683
ttttgaca

SEQ ID NO: 136714 - DNA, 8 bp, Unknown
  misc_feature (1)..( 8): Result.003 file - promoters60/4767683
attataag

SEQ ID NO: 136715 - DNA, 9 bp, Unknown
  misc_feature (1)..( 9): Result.003 file - promoters60/4767701
ttttgttac

SEQ ID NO: 136716 - DNA, 9 bp, Unknown
  misc_feature (1)..( 9): Result.003 file - promoters60/4767701
cattgttaa

SEQ ID NO: 136717 - DNA, 9 bp, Unknown
  misc_feature (1)..( 9): Result.003 file - promoters60/4767701
atttgatac

SEQ ID NO: 136718 - DNA, 9 bp, Unknown
  misc_feature (1)..( 9): Result.003 file - promoters60/4767701
aattgtttg

SEQ ID NO: 136719 - DNA, 9 bp, Unknown
  misc_feature (1)..( 9): Result.003 file - promoters60/4767701
cattttttc

SEQ ID NO: 136720 - DNA, 9 bp, Unknown
  misc_feature (1)..( 9): Result.003 file - promoters60/4767701
aatttttcg

SEQ ID NO: 136721 - DNA, 9 bp, Unknown
  misc_feature (1)..( 9): Result.003 file - promoters60/4767701
atttgatcg

SEQ ID NO: 136722 - DNA, 9 bp, Unknown
  misc_feature (1)..( 9): Result.003 file - promoters60/4767705
atactaatt

SEQ ID NO: 136723 - DNA, 9 bp, Unknown
  misc_feature (1)..( 9): Result.003 file - promoters60/4767705
ataataatt

SEQ ID NO: 136724 - DNA, 9 bp, Unknown
  misc_feature (1)..( 9): Result.003 file - promoters60/4767705
agaataatg

SEQ ID NO: 136725 - DNA, 13 bp, Unknown
  misc_feature (1)..( 13): Result.003 file - promoters60/4767705
ttatttttttaaa

SEQ ID NO: 136726 - DNA, 13 bp, Unknown
  misc_feature (1)..( 13): Result.003 file - promoters60/4767705
ttatatttttaat

SEQ ID NO: 136727 - DNA, 13 bp, Unknown
  misc_feature (1)..( 13): Result.003 file - promoters60/4767705
caatgcatttaaa

SEQ ID NO: 136728 - DNA, 7 bp, Unknown
  misc_feature (1)..( 7): Result.003 file - promoters60/4767705
ttaaaaa

SEQ ID NO: 136729 - DNA, 7 bp, Unknown
  misc_feature (1)..( 7): Result.003 file - promoters60/4767705
ctaaaaa

SEQ ID NO: 136730 - DNA, 7 bp, Unknown
  misc_feature (1)..( 7): Result.003 file - promoters60/4767705
ttaaaat

SEQ ID NO: 136731 - DNA, 9 bp, Unknown
  misc_feature (1)..( 9): Result.003 file - promoters60/4767705
ctaaattga

SEQ ID NO: 136732 - DNA, 9 bp, Unknown
  misc_feature (1)..( 9): Result.003 file - promoters60/4767705
aaaaattga

SEQ ID NO: 136733 - DNA, 9 bp, Unknown
  misc_feature (1)..( 9): Result.003 file - promoters60/4767705
aaaaattct

SEQ ID NO: 136734 - DNA, 10 bp, Unknown
  misc_feature (1)..( 10): Result.003 file - promoters60/4767705
taatgaaagc

SEQ ID NO: 136735 - DNA, 10 bp, Unknown
  misc_feature (1)..( 10): Result.003 file - promoters60/4767705
aaatgaaaaa

SEQ ID NO: 136736 - DNA, 10 bp, Unknown
  misc_feature (1)..( 10): Result.003 file - promoters60/4767705
aaaagaaaaa

SEQ ID NO: 136737 - DNA, 10 bp, Unknown
  misc_feature (1)..( 10): Result.003 file - promoters60/4767705
aatttatctg

SEQ ID NO: 136738 - DNA, 10 bp, Unknown
  misc_feature (1)..( 10): Result.003 file - promoters60/4767705
ggtttctctg

SEQ ID NO: 136739 - DNA, 10 bp, Unknown
  misc_feature (1)..( 10): Result.003 file - promoters60/4767705
aatgtatacg

SEQ ID NO: 136740 - DNA, 7 bp, Unknown
  misc_feature (1)..( 7): Result.003 file - promoters60/4767705
attggat

SEQ ID NO: 136741 - DNA, 7 bp, Unknown
  misc_feature (1)..( 7): Result.003 file - promoters60/4767705
attcgat

SEQ ID NO: 136742 - DNA, 7 bp, Unknown
  misc_feature (1)..( 7): Result.003 file - promoters60/4767705
attggac

SEQ ID NO: 136743 - DNA, 8 bp, Unknown
  misc_feature (1)..( 8): Result.003 file - promoters60/4767705
gataaaat

SEQ ID NO: 136744 - DNA, 8 bp, Unknown
  misc_feature (1)..( 8): Result.003 file - promoters60/4767705
gataaaaa

SEQ ID NO: 136745 - DNA, 8 bp, Unknown
  misc_feature (1)..( 8): Result.003 file - promoters60/4767705
actaaaaa

SEQ ID NO: 136746 - DNA, 7 bp, Unknown
  misc_feature (1)..( 7): Result.003 file - promoters60/4767705
attattt

SEQ ID NO: 136747 - DNA, 7 bp, Unknown
  misc_feature (1)..( 7): Result.003 file - promoters60/4767705
tttattt

SEQ ID NO: 136748 - DNA, 7 bp, Unknown
  misc_feature (1)..( 7): Result.003 file - promoters60/4767705
attaatt

SEQ ID NO: 136749 - DNA, 8 bp, Unknown
  misc_feature (1)..( 8): Result.003 file - promoters60/4767705
caaataat

SEQ ID NO: 136750 - DNA, 8 bp, Unknown
  misc_feature (1)..( 8): Result.003 file - promoters60/4767705
taaaaaat

SEQ ID NO: 136751 - DNA, 8 bp, Unknown
  misc_feature (1)..( 8): Result.003 file - promoters60/4767705
taaaaatt

SEQ ID NO: 136752 - DNA, 6 bp, Unknown
  misc_feature (1)..( 6): Result.003 file - promoters60/4767705
aagaaa

SEQ ID NO: 136753 - DNA, 6 bp, Unknown
  misc_feature (1)..( 6): Result.003 file - promoters60/4767705
aagaaa

SEQ ID NO: 136754 - DNA, 6 bp, Unknown
  misc_feature (1)..( 6): Result.003 file - promoters60/4767705
aagaaa

SEQ ID NO: 136755 - DNA, 8 bp, Unknown
  misc_feature (1)..( 8): Result.003 file - promoters60/4767705
aaatgtaa

SEQ ID NO: 136756 - DNA, 8 bp, Unknown
  misc_feature (1)..( 8): Result.003 file - promoters60/4767705
aaaagtaa

SEQ ID NO: 136757 - DNA, 8 bp, Unknown
  misc_feature (1)..( 8): Result.003 file - promoters60/4767705
aaattaaa

SEQ ID NO: 136758 - DNA, 9 bp, Unknown
  misc_feature (1)..( 9): Result.003 file - promoters60/4767715
tttggtaaa

SEQ ID NO: 136759 - DNA, 9 bp, Unknown
  misc_feature (1)..( 9): Result.003 file - promoters60/4767715
aatggtaaa

SEQ ID NO: 136760 - DNA, 9 bp, Unknown
  misc_feature (1)..( 9): Result.003 file - promoters60/4767715
ttttgtagt

SEQ ID NO: 136761 - DNA, 8 bp, Unknown
  misc_feature (1)..( 8): Result.003 file - promoters60/4767715
aaagttaa

SEQ ID NO: 136762 - DNA, 8 bp, Unknown
  misc_feature (1)..( 8): Result.003 file - promoters60/4767715
aaatttaa

SEQ ID NO: 136763 - DNA, 7 bp, Unknown
  misc_feature (1)..( 7): Result.003 file - promoters60/4767715
tttttaa

SEQ ID NO: 136764 - DNA, 7 bp, Unknown
  misc_feature (1)..( 7): Result.003 file - promoters60/4767715
tttttaa

SEQ ID NO: 136765 - DNA, 11 bp, Unknown
  misc_feature (1)..( 11): Result.003 file - promoters60/4767715
aaaaacaacaa

SEQ ID NO: 136766 - DNA, 11 bp, Unknown
  misc_feature (1)..( 11): Result.003 file - promoters60/4767715
aaaaaaaacaa

SEQ ID NO: 136767 - DNA, 9 bp, Unknown
  misc_feature (1)..( 9): Result.003 file - promoters60/4767715
aaacaaaaa

SEQ ID NO: 136768 - DNA, 9 bp, Unknown
  misc_feature (1)..( 9): Result.003 file - promoters60/4767715
aaaaaaaaa

SEQ ID NO: 136769 - DNA, 9 bp, Unknown
  misc_feature (1)..( 9): Result.003 file - promoters60/4767715
aaaccaatt

SEQ ID NO: 136770 - DNA, 6 bp, Unknown
  misc_feature (1)..( 6): Result.003 file - promoters60/4767715
actttt

SEQ ID NO: 136771 - DNA, 6 bp, Unknown
  misc_feature (1)..( 6): Result.003 file - promoters60/4767715
actttt

SEQ ID NO: 136772 - DNA, 6 bp, Unknown
  misc_feature (1)..( 6): Result.003 file - promoters60/4767715
gaaaat

SEQ ID NO: 136773 - DNA, 6 bp, Unknown
  misc_feature (1)..( 6): Result.003 file - promoters60/4767715
gaaaat

SEQ ID NO: 136774 - DNA, 6 bp, Unknown
  misc_feature (1)..( 6): Result.003 file - promoters60/4767715
gtttga

SEQ ID NO: 136775 - DNA, 6 bp, Unknown
  misc_feature (1)..( 6): Result.003 file - promoters60/4767715
gtttga

SEQ ID NO: 136776 - DNA, 9 bp, Unknown
  misc_feature (1)..( 9): Result.003 file - promoters60/4767715
attttgttg

SEQ ID NO: 136777 - DNA, 9 bp, Unknown
  misc_feature (1)..( 9): Result.003 file - promoters60/4767715
atttttttg

SEQ ID NO: 136778 - DNA, 6 bp, Unknown
  misc_feature (1)..( 6): Result.003 file - promoters60/4767715
gttgtg

SEQ ID NO: 136779 - DNA, 6 bp, Unknown
  misc_feature (1)..( 6): Result.003 file - promoters60/4767715
gttgtg

SEQ ID NO: 136780 - DNA, 7 bp, Unknown
  misc_feature (1)..( 7): Result.003 file - promoters60/4767715
aaaagtt

SEQ ID NO: 136781 - DNA, 7 bp, Unknown
  misc_feature (1)..( 7): Result.003 file - promoters60/4767715
aaatgtt

SEQ ID NO: 136782 - DNA, 7 bp, Unknown
  misc_feature (1)..( 7): Result.003 file - promoters60/4767715
gtattat

SEQ ID NO: 136783 - DNA, 7 bp, Unknown
  misc_feature (1)..( 7): Result.003 file - promoters60/4767715
gtattat

SEQ ID NO: 136784 - DNA, 10 bp, Unknown
  misc_feature (1)..( 10): Result.003 file - promoters60/4767715
acctgctcat

SEQ ID NO: 136785 - DNA, 10 bp, Unknown
  misc_feature (1)..( 10): Result.003 file - promoters60/4767715
accttctcat

SEQ ID NO: 136786 - DNA, 7 bp, Unknown
  misc_feature (1)..( 7): Result.003 file - promoters60/4767715
ttcttct

SEQ ID NO: 136787 - DNA, 7 bp, Unknown
  misc_feature (1)..( 7): Result.003 file - promoters60/4767715
ttcttct

SEQ ID NO: 136788 - DNA, 10 bp, Unknown
  misc_feature (1)..( 10): Result.003 file - promoters60/4767748
caaaacacat

SEQ ID NO: 136789 - DNA, 10 bp, Unknown
  misc_feature (1)..( 10): Result.003 file - promoters60/4767748
caaaacatcc

SEQ ID NO: 136790 - DNA, 10 bp, Unknown
  misc_feature (1)..( 10): Result.003 file - promoters60/4767748
taaaacaaaa

SEQ ID NO: 136791 - DNA, 10 bp, Unknown
  misc_feature (1)..( 10): Result.003 file - promoters60/4767748
caaaaccgtt

SEQ ID NO: 136792 - DNA, 10 bp, Unknown
  misc_feature (1)..( 10): Result.003 file - promoters60/4767748
gcaaataaat

SEQ ID NO: 136793 - DNA, 10 bp, Unknown
  misc_feature (1)..( 10): Result.003 file - promoters60/4767748
ctaaacaaaa

SEQ ID NO: 136794 - DNA, 7 bp, Unknown
  misc_feature (1)..( 7): Result.003 file - promoters60/4767764
gcaaaag

SEQ ID NO: 136795 - DNA, 7 bp, Unknown
  misc_feature (1)..( 7): Result.003 file - promoters60/4767764
gcagaag

SEQ ID NO: 136796 - DNA, 6 bp, Unknown
  misc_feature (1)..( 6): Result.003 file - promoters60/4767764
tttaaa

SEQ ID NO: 136797 - DNA, 6 bp, Unknown
  misc_feature (1)..( 6): Result.003 file - promoters60/4767764
tttaaa

SEQ ID NO: 136798 - DNA, 7 bp, Unknown
  misc_feature (1)..( 7): Result.003 file - promoters60/4767764
tttcaaa

SEQ ID NO: 136799 - DNA, 7 bp, Unknown
  misc_feature (1)..( 7): Result.003 file - promoters60/4767764
aaacatt

SEQ ID NO: 136800 - DNA, 7 bp, Unknown
  misc_feature (1)..( 7): Result.003 file - promoters60/4767764
aaagatt

SEQ ID NO: 136801 - DNA, 7 bp, Unknown
  misc_feature (1)..( 7): Result.003 file - promoters60/4767764
tcaaatt

SEQ ID NO: 136802 - DNA, 7 bp, Unknown
  misc_feature (1)..( 7): Result.003 file - promoters60/4767764
tcagatt

SEQ ID NO: 136803 - DNA, 6 bp, Unknown
  misc_feature (1)..( 6): Result.003 file - promoters60/4767764
aaaata

SEQ ID NO: 136804 - DNA, 6 bp, Unknown
  misc_feature (1)..( 6): Result.003 file - promoters60/4767764
aaaata

SEQ ID NO: 136805 - DNA, 7 bp, Unknown
  misc_feature (1)..( 7): Result.003 file - promoters60/4767764
tgagacg

SEQ ID NO: 136806 - DNA, 7 bp, Unknown
  misc_feature (1)..( 7): Result.003 file - promoters60/4767764
tgagacg

SEQ ID NO: 136807 - DNA, 8 bp, Unknown
  misc_feature (1)..( 8): Result.003 file - promoters60/4767764
gaacaagg

SEQ ID NO: 136808 - DNA, 8 bp, Unknown
  misc_feature (1)..( 8): Result.003 file - promoters60/4767764
gaaaaagg

SEQ ID NO: 136809 - DNA, 6 bp, Unknown
  misc_feature (1)..( 6): Result.003 file - promoters60/4767764
aagcaa

SEQ ID NO: 136810 - DNA, 6 bp, Unknown
  misc_feature (1)..( 6): Result.003 file - promoters60/4767764
aagcaa

SEQ ID NO: 136811 - DNA, 15 bp, Unknown
  misc_feature (1)..( 15): Result.003 file - promoters60/4767764
aaattgtttcaaacg

SEQ ID NO: 136812 - DNA, 15 bp, Unknown
  misc_feature (1)..( 15): Result.003 file - promoters60/4767764
aaattgtatacatat

SEQ ID NO: 136813 - DNA, 15 bp, Unknown
  misc_feature (1)..( 15): Result.003 file - promoters60/4767764
gcattggatagatat

SEQ ID NO: 136814 - DNA, 9 bp, Unknown
  misc_feature (1)..( 9): Result.003 file - promoters60/4767764
ttaatatct

SEQ ID NO: 136815 - DNA, 9 bp, Unknown
  misc_feature (1)..( 9): Result.003 file - promoters60/4767764
ttaatattt

SEQ ID NO: 136816 - DNA, 9 bp, Unknown
  misc_feature (1)..( 9): Result.003 file - promoters60/4767764
ataatcttt

SEQ ID NO: 136817 - DNA, 6 bp, Unknown
  misc_feature (1)..( 6): Result.003 file - promoters60/4767764
acaaaa

SEQ ID NO: 136818 - DNA, 6 bp, Unknown
  misc_feature (1)..( 6): Result.003 file - promoters60/4767764
acaaaa

SEQ ID NO: 136819 - DNA, 8 bp, Unknown
  misc_feature (1)..( 8): Result.003 file - promoters60/4767764
aagtcaaa

SEQ ID NO: 136820 - DNA, 8 bp, Unknown
  misc_feature (1)..( 8): Result.003 file - promoters60/4767764
aagtgaaa

SEQ ID NO: 136821 - DNA, 9 bp, Unknown
  misc_feature (1)..( 9): Result.003 file - promoters60/4767764
aaatactac

SEQ ID NO: 136822 - DNA, 9 bp, Unknown
  misc_feature (1)..( 9): Result.003 file - promoters60/4767764
taatgctac

SEQ ID NO: 136823 - DNA, 9 bp, Unknown
  misc_feature (1)..( 9): Result.003 file - promoters60/4767764
taacgctta

SEQ ID NO: 136824 - DNA, 8 bp, Unknown
  misc_feature (1)..( 8): Result.003 file - promoters60/4767764
tattttac

SEQ ID NO: 136825 - DNA, 8 bp, Unknown
  misc_feature (1)..( 8): Result.003 file - promoters60/4767764
tatattac

SEQ ID NO: 136826 - DNA, 6 bp, Unknown
  misc_feature (1)..( 6): Result.003 file - promoters60/4767764
tatttt

SEQ ID NO: 136827 - DNA, 6 bp, Unknown
  misc_feature (1)..( 6): Result.003 file - promoters60/4767764
tatttt

SEQ ID NO: 136828 - DNA, 6 bp, Unknown
  misc_feature (1)..( 6): Result.003 file - promoters60/4767764
gaacat

SEQ ID NO: 136829 - DNA, 6 bp, Unknown
  misc_feature (1)..( 6): Result.003 file - promoters60/4767764
gaacat

SEQ ID NO: 136830 - DNA, 6 bp, Unknown
  misc_feature (1)..( 6): Result.003 file - promoters60/4767764
tttata

SEQ ID NO: 136831 - DNA, 6 bp, Unknown
  misc_feature (1)..( 6): Result.003 file - promoters60/4767764
tttata

SEQ ID NO: 136832 - DNA, 8 bp, Unknown
  misc_feature (1)..( 8): Result.003 file - promoters60/4767764
aatcttta

SEQ ID NO: 136833 - DNA, 8 bp, Unknown
  misc_feature (1)..( 8): Result.003 file - promoters60/4767764
aatgttta

SEQ ID NO: 136834 - DNA, 6 bp, Unknown
  misc_feature (1)..( 6): Result.003 file - promoters60/4767764
aacaac

SEQ ID NO: 136835 - DNA, 6 bp, Unknown
  misc_feature (1)..( 6): Result.003 file - promoters60/4767764
aacaac

SEQ ID NO: 136836 - DNA, 8 bp, Unknown
  misc_feature (1)..( 8): Result.003 file - promoters60/4767764
gtaataat

SEQ ID NO: 136837 - DNA, 8 bp, Unknown
  misc_feature (1)..( 8): Result.003 file - promoters60/4767764
gtattaat

SEQ ID NO: 136838 - DNA, 8 bp, Unknown
  misc_feature (1)..( 8): Result.003 file - promoters60/4767767
cacagtat

SEQ ID NO: 136839 - DNA, 8 bp, Unknown
  misc_feature (1)..( 8): Result.003 file - promoters60/4767767
aacattat

SEQ ID NO: 136840 - DNA, 8 bp, Unknown
  misc_feature (1)..( 8): Result.003 file - promoters60/4767767
aaccttaa

SEQ ID NO: 136841 - DNA, 9 bp, Unknown
  misc_feature (1)..( 9): Result.003 file - promoters60/4767767
acttaaata

SEQ ID NO: 136842 - DNA, 9 bp, Unknown
  misc_feature (1)..( 9): Result.003 file - promoters60/4767767
actaaaata

SEQ ID NO: 136843 - DNA, 8 bp, Unknown
  misc_feature (1)..( 8): Result.003 file - promoters60/4767767
aatctata

SEQ ID NO: 136844 - DNA, 8 bp, Unknown
  misc_feature (1)..( 8): Result.003 file - promoters60/4767767
aatccata

SEQ ID NO: 136845 - DNA, 8 bp, Unknown
  misc_feature (1)..( 8): Result.003 file - promoters60/4767767
tatctatt

SEQ ID NO: 136846 - DNA, 7 bp, Unknown
  misc_feature (1)..( 7): Result.003 file - promoters60/4767767
aatgcaa

SEQ ID NO: 136847 - DNA, 7 bp, Unknown
  misc_feature (1)..( 7): Result.003 file - promoters60/4767767
aattcaa

SEQ ID NO: 136848 - DNA, 6 bp, Unknown
  misc_feature (1)..( 6): Result.003 file - promoters60/4767767
atcaca

SEQ ID NO: 136849 - DNA, 6 bp, Unknown
  misc_feature (1)..( 6): Result.003 file - promoters60/4767767
atcaca

SEQ ID NO: 136850 - DNA, 7 bp, Unknown
  misc_feature (1)..( 7): Result.003 file - promoters60/4767767
ttgaaaa

SEQ ID NO: 136851 - DNA, 7 bp, Unknown
  misc_feature (1)..( 7): Result.003 file - promoters60/4767767
ttggaaa

SEQ ID NO: 136852 - DNA, 7 bp, Unknown
  misc_feature (1)..( 7): Result.003 file - promoters60/4767767
aaccttg

SEQ ID NO: 136853 - DNA, 7 bp, Unknown
  misc_feature (1)..( 7): Result.003 file - promoters60/4767767
aacctta

SEQ ID NO: 136854 - DNA, 7 bp, Unknown
  misc_feature (1)..( 7): Result.003 file - promoters60/4767767
aacatta

SEQ ID NO: 136855 - DNA, 9 bp, Unknown
  misc_feature (1)..( 9): Result.003 file - promoters60/4767767
tttgattat

SEQ ID NO: 136856 - DNA, 9 bp, Unknown
  misc_feature (1)..( 9): Result.003 file - promoters60/4767767
catgaatat

SEQ ID NO: 136857 - DNA, 9 bp, Unknown
  misc_feature (1)..( 9): Result.003 file - promoters60/4767767
catcaatct

SEQ ID NO: 136858 - DNA, 7 bp, Unknown
  misc_feature (1)..( 7): Result.003 file - promoters60/4767767
ttataat

SEQ ID NO: 136859 - DNA, 7 bp, Unknown
  misc_feature (1)..( 7): Result.003 file - promoters60/4767767
ttagaat

SEQ ID NO: 136860 - DNA, 8 bp, Unknown
  misc_feature (1)..( 8): Result.003 file - promoters60/4767767
tttggagt

SEQ ID NO: 136861 - DNA, 8 bp, Unknown
  misc_feature (1)..( 8): Result.003 file - promoters60/4767767
tttgaagt

SEQ ID NO: 136862 - DNA, 7 bp, Unknown
  misc_feature (1)..( 7): Result.003 file - promoters60/4767767
acaaaaa

SEQ ID NO: 136863 - DNA, 7 bp, Unknown
  misc_feature (1)..( 7): Result.003 file - promoters60/4767767
acaaaaa

SEQ ID NO: 136864 - DNA, 6 bp, Unknown
  misc_feature (1)..( 6): Result.003 file - promoters60/4767767
aagcat

SEQ ID NO: 136865 - DNA, 6 bp, Unknown
  misc_feature (1)..( 6): Result.003 file - promoters60/4767767
aagcat

SEQ ID NO: 136866 - DNA, 7 bp, Unknown
  misc_feature (1)..( 7): Result.003 file - promoters60/4767767
ctaaatt

SEQ ID NO: 136867 - DNA, 7 bp, Unknown
  misc_feature (1)..( 7): Result.003 file - promoters60/4767767
ctagatt

SEQ ID NO: 136868 - DNA, 6 bp, Unknown
  misc_feature (1)..( 6): Result.003 file - promoters60/4767767
aataaa

SEQ ID NO: 136869 - DNA, 6 bp, Unknown
  misc_feature (1)..( 6): Result.003 file - promoters60/4767767
aataaa

SEQ ID NO: 136870 - DNA, 10 bp, Unknown
  misc_feature (1)..( 10): Result.003 file - promoters60/4767767
aaataaaaaa

SEQ ID NO: 136871 - DNA, 10 bp, Unknown
  misc_feature (1)..( 10): Result.003 file - promoters60/4767767
aaacaaaaaa

SEQ ID NO: 136872 - DNA, 6 bp, Unknown
  misc_feature (1)..( 6): Result.003 file - promoters60/4767767
tttcaa

SEQ ID NO: 136873 - DNA, 6 bp, Unknown
  misc_feature (1)..( 6): Result.003 file - promoters60/4767767
tttcaa

SEQ ID NO: 136874 - DNA, 6 bp, Unknown
  misc_feature (1)..( 6): Result.003 file - promoters60/4767767
aaaatg

SEQ ID NO: 136875 - DNA, 6 bp, Unknown
  misc_feature (1)..( 6): Result.003 file - promoters60/4767767
aaaatg

SEQ ID NO: 136876 - DNA, 6 bp, Unknown
  misc_feature (1)..( 6): Result.003 file - promoters60/4767767
gaaatt

SEQ ID NO: 136877 - DNA, 6 bp, Unknown
  misc_feature (1)..( 6): Result.003 file - promoters60/4767767
gaaatt

SEQ ID NO: 136878 - DNA, 8 bp, Unknown
  misc_feature (1)..( 8): Result.003 file - promoters60/4767767
aattcagc

SEQ ID NO: 136879 - DNA, 8 bp, Unknown
  misc_feature (1)..( 8): Result.003 file - promoters60/4767767
aattaagc

SEQ ID NO: 136880 - DNA, 7 bp, Unknown
  misc_feature (1)..( 7): Result.003 file - promoters60/4767767
aatattt

SEQ ID NO: 136881 - DNA, 7 bp, Unknown
  misc_feature (1)..( 7): Result.003 file - promoters60/4767767
aatcttt

SEQ ID NO: 136882 - DNA, 8 bp, Unknown
  misc_feature (1)..( 8): Result.003 file - promoters60/4767767
aaccctag

SEQ ID NO: 136883 - DNA, 8 bp, Unknown
  misc_feature (1)..( 8): Result.003 file - promoters60/4767767
aacgctag

SEQ ID NO: 136884 - DNA, 9 bp, Unknown
  misc_feature (1)..( 9): Result.003 file - promoters60/4767767
ttattgata

SEQ ID NO: 136885 - DNA, 9 bp, Unknown
  misc_feature (1)..( 9): Result.003 file - promoters60/4767767
ttatggata

SEQ ID NO: 136886 - DNA, 11 bp, Unknown
  misc_feature (1)..( 11): Result.003 file - promoters60/4767795
aaaatcataat

SEQ ID NO: 136887 - DNA, 11 bp, Unknown
  misc_feature (1)..( 11): Result.003 file - promoters60/4767795
aaactcaaaat

SEQ ID NO: 136888 - DNA, 11 bp, Unknown
  misc_feature (1)..( 11): Result.003 file - promoters60/4767795
ccaatcattag

SEQ ID NO: 136889 - DNA, 10 bp, Unknown
  misc_feature (1)..( 10): Result.003 file - promoters60/4767795
tgattagcaa

SEQ ID NO: 136890 - DNA, 10 bp, Unknown
  misc_feature (1)..( 10): Result.003 file - promoters60/4767795
tgattagtta

SEQ ID NO: 136891 - DNA, 10 bp, Unknown
  misc_feature (1)..( 10): Result.003 file - promoters60/4767795
tcattagtta

SEQ ID NO: 136892 - DNA, 8 bp, Unknown
  misc_feature (1)..( 8): Result.003 file - promoters60/4767795
ttagcaat

SEQ ID NO: 136893 - DNA, 8 bp, Unknown
  misc_feature (1)..( 8): Result.003 file - promoters60/4767795
ttagaaat

SEQ ID NO: 136894 - DNA, 6 bp, Unknown
  misc_feature (1)..( 6): Result.003 file - promoters60/4767795
atattt

SEQ ID NO: 136895 - DNA, 6 bp, Unknown
  misc_feature (1)..( 6): Result.003 file - promoters60/4767795
atattt

SEQ ID NO: 136896 - DNA, 6 bp, Unknown
  misc_feature (1)..( 6): Result.003 file - promoters60/4767795
ttccaa

SEQ ID NO: 136897 - DNA, 6 bp, Unknown
  misc_feature (1)..( 6): Result.003 file - promoters60/4767795
ttccaa

SEQ ID NO: 136898 - DNA, 6 bp, Unknown
  misc_feature (1)..( 6): Result.003 file - promoters60/4767795
catttt

SEQ ID NO: 136899 - DNA, 6 bp, Unknown
  misc_feature (1)..( 6): Result.003 file - promoters60/4767795
catttt

SEQ ID NO: 136900 - DNA, 8 bp, Unknown
  misc_feature (1)..( 8): Result.003 file - promoters60/4767795
tttattaa

SEQ ID NO: 136901 - DNA, 8 bp, Unknown
  misc_feature (1)..( 8): Result.003 file - promoters60/4767795
tttcttaa

SEQ ID NO: 136902 - DNA, 8 bp, Unknown
  misc_feature (1)..( 8): Result.003 file - promoters60/4767795
tttcataa

SEQ ID NO: 136903 - DNA, 7 bp, Unknown
  misc_feature (1)..( 7): Result.003 file - promoters60/4767795
aagaaac

SEQ ID NO: 136904 - DNA, 7 bp, Unknown
  misc_feature (1)..( 7): Result.003 file - promoters60/4767795
aagaaac

SEQ ID NO: 136905 - DNA, 7 bp, Unknown
  misc_feature (1)..( 7): Result.003 file - promoters60/4767795
ctctata

SEQ ID NO: 136906 - DNA, 7 bp, Unknown
  misc_feature (1)..( 7): Result.003 file - promoters60/4767795
ctctata

SEQ ID NO: 136907 - DNA, 8 bp, Unknown
  misc_feature (1)..( 8): Result.003 file - promoters60/4767795
gttatatt

SEQ ID NO: 136908 - DNA, 8 bp, Unknown
  misc_feature (1)..( 8): Result.003 file - promoters60/4767795
gttaaatt

SEQ ID NO: 136909 - DNA, 10 bp, Unknown
  misc_feature (1)..( 10): Result.003 file - promoters60/4767795
tttccatttt

SEQ ID NO: 136910 - DNA, 10 bp, Unknown
  misc_feature (1)..( 10): Result.003 file - promoters60/4767795
tttccaattt

SEQ ID NO: 136911 - DNA, 7 bp, Unknown
  misc_feature (1)..( 7): Result.003 file - promoters60/4767795
ttgattc

SEQ ID NO: 136912 - DNA, 7 bp, Unknown
  misc_feature (1)..( 7): Result.003 file - promoters60/4767795
ttgtttc

SEQ ID NO: 136913 - DNA, 7 bp, Unknown
  misc_feature (1)..( 7): Result.003 file - promoters60/4767795
aaacaaa

SEQ ID NO: 136914 - DNA, 7 bp, Unknown
  misc_feature (1)..( 7): Result.003 file - promoters60/4767795
aaaaaaa

SEQ ID NO: 136915 - DNA, 6 bp, Unknown
  misc_feature (1)..( 6): Result.003 file - promoters60/4767795
aaaata

SEQ ID NO: 136916 - DNA, 6 bp, Unknown
  misc_feature (1)..( 6): Result.003 file - promoters60/4767795
aaaata

SEQ ID NO: 136917 - DNA, 8 bp, Unknown
  misc_feature (1)..( 8): Result.003 file - promoters60/4767795
ttagagtt

SEQ ID NO: 136918 - DNA, 8 bp, Unknown
  misc_feature (1)..( 8): Result.003 file - promoters60/4767795
ttacagtt

SEQ ID NO: 136919 - DNA, 12 bp, Unknown
  misc_feature (1)..( 12): Result.003 file - promoters60/4767837
acaacaaaaaat

SEQ ID NO: 136920 - DNA, 12 bp, Unknown
  misc_feature (1)..( 12): Result.003 file - promoters60/4767837
acaaaaaacaat

SEQ ID NO: 136921 - DNA, 12 bp, Unknown
  misc_feature (1)..( 12): Result.003 file - promoters60/4767837
ctaaaaaaccgg

SEQ ID NO: 136922 - DNA, 9 bp, Unknown
  misc_feature (1)..( 9): Result.003 file - promoters60/4767837
ttcttcaat

SEQ ID NO: 136923 - DNA, 9 bp, Unknown
  misc_feature (1)..( 9): Result.003 file - promoters60/4767837
ttctacaat

SEQ ID NO: 136924 - DNA, 9 bp, Unknown
  misc_feature (1)..( 9): Result.003 file - promoters60/4767837
ctcttcata

SEQ ID NO: 136925 - DNA, 13 bp, Unknown
  misc_feature (1)..( 13): Result.003 file - promoters60/4767884
tagggtaagagag

SEQ ID NO: 136926 - DNA, 13 bp, Unknown
  misc_feature (1)..( 13): Result.003 file - promoters60/4767884
tggtgtaagaaaa

SEQ ID NO: 136927 - DNA, 13 bp, Unknown
  misc_feature (1)..( 13): Result.003 file - promoters60/4767884
ccgactaaaaaaa

SEQ ID NO: 136928 - DNA, 13 bp, Unknown
  misc_feature (1)..( 13): Result.003 file - promoters60/4767884
aattctaaaatct

SEQ ID NO: 136929 - DNA, 13 bp, Unknown
  misc_feature (1)..( 13): Result.003 file - promoters60/4767884
caaactaaaatat

SEQ ID NO: 136930 - DNA, 13 bp, Unknown
  misc_feature (1)..( 13): Result.003 file - promoters60/4767884
aattcttaaattt

SEQ ID NO: 136931 - DNA, 12 bp, Unknown
  misc_feature (1)..( 12): Result.003 file - promoters60/4767884
agagaaagaaag

SEQ ID NO: 136932 - DNA, 12 bp, Unknown
  misc_feature (1)..( 12): Result.003 file - promoters60/4767884
agaaaaaattca

SEQ ID NO: 136933 - DNA, 12 bp, Unknown
  misc_feature (1)..( 12): Result.003 file - promoters60/4767884
taaaaaaatctt

SEQ ID NO: 136934 - DNA, 12 bp, Unknown
  misc_feature (1)..( 12): Result.003 file - promoters60/4767884
ttaaaaaataat

SEQ ID NO: 136935 - DNA, 12 bp, Unknown
  misc_feature (1)..( 12): Result.003 file - promoters60/4767884
ttctaaaatctt

SEQ ID NO: 136936 - DNA, 12 bp, Unknown
  misc_feature (1)..( 12): Result.003 file - promoters60/4767884
atcatcaatctt

SEQ ID NO: 136937 - DNA, 12 bp, Unknown
  misc_feature (1)..( 12): Result.003 file - promoters60/4767884
tatattcgattc

SEQ ID NO: 136938 - DNA, 12 bp, Unknown
  misc_feature (1)..( 12): Result.003 file - promoters60/4767884
aatatttgatac

SEQ ID NO: 136939 - DNA, 12 bp, Unknown
  misc_feature (1)..( 12): Result.003 file - promoters60/4767884
gataattgttac

SEQ ID NO: 136940 - DNA, 12 bp, Unknown
  misc_feature (1)..( 12): Result.003 file - promoters60/4767884
cataattcaacg

SEQ ID NO: 136941 - DNA, 12 bp, Unknown
  misc_feature (1)..( 12): Result.003 file - promoters60/4767884
aatctttttttt

SEQ ID NO: 136942 - DNA, 12 bp, Unknown
  misc_feature (1)..( 12): Result.003 file - promoters60/4767884
taaattttatat

SEQ ID NO: 136943 - DNA, 13 bp, Unknown
  misc_feature (1)..( 13): Result.003 file - promoters60/4767892
ttagacgtgttta

SEQ ID NO: 136944 - DNA, 13 bp, Unknown
  misc_feature (1)..( 13): Result.003 file - promoters60/4767892
aaccacgtgtccg

SEQ ID NO: 136945 - DNA, 13 bp, Unknown
  misc_feature (1)..( 13): Result.003 file - promoters60/4767892
ttaaacgtgttta

SEQ ID NO: 136946 - DNA, 14 bp, Unknown
  misc_feature (1)..( 14): Result.003 file - promoters60/4767892
acatcattacatgc

SEQ ID NO: 136947 - DNA, 14 bp, Unknown
  misc_feature (1)..( 14): Result.003 file - promoters60/4767892
acattattacgaaa

SEQ ID NO: 136948 - DNA, 14 bp, Unknown
  misc_feature (1)..( 14): Result.003 file - promoters60/4767892
tgattaatactaaa

SEQ ID NO: 136949 - DNA, 14 bp, Unknown
  misc_feature (1)..( 14): Result.003 file - promoters60/4767892
cgcaacttacaaaa

SEQ ID NO: 136950 - DNA, 8 bp, Unknown
  misc_feature (1)..( 8): Result.003 file - promoters60/4767892
acaaacaa

SEQ ID NO: 136951 - DNA, 8 bp, Unknown
  misc_feature (1)..( 8): Result.003 file - promoters60/4767892
acaaacac

SEQ ID NO: 136952 - DNA, 8 bp, Unknown
  misc_feature (1)..( 8): Result.003 file - promoters60/4767892
ccaaaaaa

SEQ ID NO: 136953 - DNA, 8 bp, Unknown
  misc_feature (1)..( 8): Result.003 file - promoters60/4767892
agataaaa

SEQ ID NO: 136954 - DNA, 8 bp, Unknown
  misc_feature (1)..( 8): Result.003 file - promoters60/4767892
agaaaaaa

SEQ ID NO: 136955 - DNA, 8 bp, Unknown
  misc_feature (1)..( 8): Result.003 file - promoters60/4767892
agaaaaac

SEQ ID NO: 136956 - DNA, 8 bp, Unknown
  misc_feature (1)..( 8): Result.003 file - promoters60/4767892
tgttaaca

SEQ ID NO: 136957 - DNA, 8 bp, Unknown
  misc_feature (1)..( 8): Result.003 file - promoters60/4767892
tgtaaact

SEQ ID NO: 136958 - DNA, 8 bp, Unknown
  misc_feature (1)..( 8): Result.003 file - promoters60/4767892
cgtatact

SEQ ID NO: 136959 - DNA, 14 bp, Unknown
  misc_feature (1)..( 14): Result.003 file - promoters60/4767892
attattacgaaaac

SEQ ID NO: 136960 - DNA, 14 bp, Unknown
  misc_feature (1)..( 14): Result.003 file - promoters60/4767892
caacttacaaaaac

SEQ ID NO: 136961 - DNA, 14 bp, Unknown
  misc_feature (1)..( 14): Result.003 file - promoters60/4767892
attaatactaaata

SEQ ID NO: 136962 - DNA, 6 bp, Unknown
  misc_feature (1)..( 6): Result.003 file - promoters60/4767933
aaccct

SEQ ID NO: 136963 - DNA, 6 bp, Unknown
  misc_feature (1)..( 6): Result.003 file - promoters60/4767933
aaccct

SEQ ID NO: 136964 - DNA, 6 bp, Unknown
  misc_feature (1)..( 6): Result.003 file - promoters60/4767933
gcccaa

SEQ ID NO: 136965 - DNA, 6 bp, Unknown
  misc_feature (1)..( 6): Result.003 file - promoters60/4767933
gcccaa

SEQ ID NO: 136966 - DNA, 7 bp, Unknown
  misc_feature (1)..( 7): Result.003 file - promoters60/4767933
caataaa

SEQ ID NO: 136967 - DNA, 7 bp, Unknown
  misc_feature (1)..( 7): Result.003 file - promoters60/4767933
caaaaaa

SEQ ID NO: 136968 - DNA, 6 bp, Unknown
  misc_feature (1)..( 6): Result.003 file - promoters60/4767933
ttttca

SEQ ID NO: 136969 - DNA, 6 bp, Unknown
  misc_feature (1)..( 6): Result.003 file - promoters60/4767933
ttttca

SEQ ID NO: 136970 - DNA, 8 bp, Unknown
  misc_feature (1)..( 8): Result.003 file - promoters60/4767933
atccaaaa

SEQ ID NO: 136971 - DNA, 8 bp, Unknown
  misc_feature (1)..( 8): Result.003 file - promoters60/4767933
atccaaat

SEQ ID NO: 136972 - DNA, 8 bp, Unknown
  misc_feature (1)..( 8): Result.003 file - promoters60/4767933
atcgaaaa

SEQ ID NO: 136973 - DNA, 6 bp, Unknown
  misc_feature (1)..( 6): Result.003 file - promoters60/4767933
aatttc

SEQ ID NO: 136974 - DNA, 6 bp, Unknown
  misc_feature (1)..( 6): Result.003 file - promoters60/4767933
aatttc

SEQ ID NO: 136975 - DNA, 7 bp, Unknown
  misc_feature (1)..( 7): Result.003 file - promoters60/4767933
tatggac

SEQ ID NO: 136976 - DNA, 7 bp, Unknown
  misc_feature (1)..( 7): Result.003 file - promoters60/4767933
tattgac

SEQ ID NO: 136977 - DNA, 10 bp, Unknown
  misc_feature (1)..( 10): Result.003 file - promoters60/4767933
aaattgaaac

SEQ ID NO: 136978 - DNA, 10 bp, Unknown
  misc_feature (1)..( 10): Result.003 file - promoters60/4767933
aaatggaaac

SEQ ID NO: 136979 - DNA, 7 bp, Unknown
  misc_feature (1)..( 7): Result.003 file - promoters60/4767933
agtgaaa

SEQ ID NO: 136980 - DNA, 7 bp, Unknown
  misc_feature (1)..( 7): Result.003 file - promoters60/4767933
agtgaaa

SEQ ID NO: 136981 - DNA, 8 bp, Unknown
  misc_feature (1)..( 8): Result.003 file - promoters60/4767933
agtgggta

SEQ ID NO: 136982 - DNA, 8 bp, Unknown
  misc_feature (1)..( 8): Result.003 file - promoters60/4767933
agtcggta

SEQ ID NO: 136983 - DNA, 11 bp, Unknown
  misc_feature (1)..( 11): Result.003 file - promoters60/4767933
caatatgtaaa

SEQ ID NO: 136984 - DNA, 11 bp, Unknown
  misc_feature (1)..( 11): Result.003 file - promoters60/4767933
caatatggaaa

SEQ ID NO: 136985 - DNA, 8 bp, Unknown
  misc_feature (1)..( 8): Result.003 file - promoters60/4767933
attttgtc

SEQ ID NO: 136986 - DNA, 8 bp, Unknown
  misc_feature (1)..( 8): Result.003 file - promoters60/4767933
attttgtc

SEQ ID NO: 136987 - DNA, 6 bp, Unknown
  misc_feature (1)..( 6): Result.003 file - promoters60/4767933
tttttg

SEQ ID NO: 136988 - DNA, 6 bp, Unknown
  misc_feature (1)..( 6): Result.003 file - promoters60/4767933
tttttg

SEQ ID NO: 136989 - DNA, 8 bp, Unknown
  misc_feature (1)..( 8): Result.003 file - promoters60/4767933
aagaaaat

SEQ ID NO: 136990 - DNA, 8 bp, Unknown
  misc_feature (1)..( 8): Result.003 file - promoters60/4767933
aagaaaat

SEQ ID NO: 136991 - DNA, 10 bp, Unknown
  misc_feature (1)..( 10): Result.003 file - promoters60/4767933
aaataaaaat

SEQ ID NO: 136992 - DNA, 10 bp, Unknown
  misc_feature (1)..( 10): Result.003 file - promoters60/4767933
aaataataat

SEQ ID NO: 136993 - DNA, 6 bp, Unknown
  misc_feature (1)..( 6): Result.003 file - promoters60/4767933
aacaat

SEQ ID NO: 136994 - DNA, 6 bp, Unknown
  misc_feature (1)..( 6): Result.003 file - promoters60/4767933
aacaat

SEQ ID NO: 136995 - DNA, 9 bp, Unknown
  misc_feature (1)..( 9): Result.003 file - promoters60/4767944
agatacgaa

SEQ ID NO: 136996 - DNA, 9 bp, Unknown
  misc_feature (1)..( 9): Result.003 file - promoters60/4767944
agatgcgaa

SEQ ID NO: 136997 - DNA, 9 bp, Unknown
  misc_feature (1)..( 9): Result.003 file - promoters60/4767944
tttggtttg

SEQ ID NO: 136998 - DNA, 9 bp, Unknown
  misc_feature (1)..( 9): Result.003 file - promoters60/4767944
tttgatttg

SEQ ID NO: 136999 - DNA, 6 bp, Unknown
  misc_feature (1)..( 6): Result.003 file - promoters60/4767944
ttacga

SEQ ID NO: 137000 - DNA, 6 bp, Unknown
  misc_feature (1)..( 6): Result.003 file - promoters60/4767944
ttacga

SEQ ID NO: 137001 - DNA, 7 bp, Unknown
  misc_feature (1)..( 7): Result.003 file - promoters60/4767944
ccaaaac

SEQ ID NO: 137002 - DNA, 7 bp, Unknown
  misc_feature (1)..( 7): Result.003 file - promoters60/4767944
ccaaaac

SEQ ID NO: 137003 - DNA, 7 bp, Unknown
  misc_feature (1)..( 7): Result.003 file - promoters60/4767944
acaaaac

SEQ ID NO: 137004 - DNA, 8 bp, Unknown
  misc_feature (1)..( 8): Result.003 file - promoters60/4767944
caaaactt

SEQ ID NO: 137005 - DNA, 8 bp, Unknown
  misc_feature (1)..( 8): Result.003 file - promoters60/4767944
aaaacctt

SEQ ID NO: 137006 - DNA, 8 bp, Unknown
  misc_feature (1)..( 8): Result.003 file - promoters60/4767944
caaaacat

SEQ ID NO: 137007 - DNA, 7 bp, Unknown
  misc_feature (1)..( 7): Result.003 file - promoters60/4767944
actgtag

SEQ ID NO: 137008 - DNA, 7 bp, Unknown
  misc_feature (1)..( 7): Result.003 file - promoters60/4767944
actttag

SEQ ID NO: 137009 - DNA, 8 bp, Unknown
  misc_feature (1)..( 8): Result.003 file - promoters60/4767944
gataaatg

SEQ ID NO: 137010 - DNA, 8 bp, Unknown
  misc_feature (1)..( 8): Result.003 file - promoters60/4767944
gatagatg

SEQ ID NO: 137011 - DNA, 8 bp, Unknown
  misc_feature (1)..( 8): Result.003 file - promoters60/4767944
gattgatc

SEQ ID NO: 137012 - DNA, 8 bp, Unknown
  misc_feature (1)..( 8): Result.003 file - promoters60/4767944
aaaacatg

SEQ ID NO: 137013 - DNA, 8 bp, Unknown
  misc_feature (1)..( 8): Result.003 file - promoters60/4767944
aaaacatg

SEQ ID NO: 137014 - DNA, 7 bp, Unknown
  misc_feature (1)..( 7): Result.003 file - promoters60/4767944
aatgaat

SEQ ID NO: 137015 - DNA, 7 bp, Unknown
  misc_feature (1)..( 7): Result.003 file - promoters60/4767944
aataaat

SEQ ID NO: 137016 - DNA, 7 bp, Unknown
  misc_feature (1)..( 7): Result.003 file - promoters60/4767944
tccaata

SEQ ID NO: 137017 - DNA, 7 bp, Unknown
  misc_feature (1)..( 7): Result.003 file - promoters60/4767944
tccaata

SEQ ID NO: 137018 - DNA, 9 bp, Unknown
  misc_feature (1)..( 9): Result.003 file - promoters60/4767944
tatacatca

SEQ ID NO: 137019 - DNA, 9 bp, Unknown
  misc_feature (1)..( 9): Result.003 file - promoters60/4767944
tataaatca

SEQ ID NO: 137020 - DNA, 6 bp, Unknown
  misc_feature (1)..( 6): Result.003 file - promoters60/4767944
gaaaaa

SEQ ID NO: 137021 - DNA, 6 bp, Unknown
  misc_feature (1)..( 6): Result.003 file - promoters60/4767944
gaaaaa

SEQ ID NO: 137022 - DNA, 7 bp, Unknown
  misc_feature (1)..( 7): Result.003 file - promoters60/4767944
aatatat

SEQ ID NO: 137023 - DNA, 7 bp, Unknown
  misc_feature (1)..( 7): Result.003 file - promoters60/4767944
aatttat

SEQ ID NO: 137024 - DNA, 7 bp, Unknown
  misc_feature (1)..( 7): Result.003 file - promoters60/4767944
ccaaaac

SEQ ID NO: 137025 - DNA, 7 bp, Unknown
  misc_feature (1)..( 7): Result.003 file - promoters60/4767944
ccaaaac

SEQ ID NO: 137026 - DNA, 7 bp, Unknown
  misc_feature (1)..( 7): Result.003 file - promoters60/4767944
accgaat

SEQ ID NO: 137027 - DNA, 7 bp, Unknown
  misc_feature (1)..( 7): Result.003 file - promoters60/4767944
accaaat

SEQ ID NO: 137028 - DNA, 9 bp, Unknown
  misc_feature (1)..( 9): Result.003 file - promoters60/4767952
agaaagaaa

SEQ ID NO: 137029 - DNA, 9 bp, Unknown
  misc_feature (1)..( 9): Result.003 file - promoters60/4767952
ggaatgaat

SEQ ID NO: 137030 - DNA, 9 bp, Unknown
  misc_feature (1)..( 9): Result.003 file - promoters60/4767952
agaaagtgt

SEQ ID NO: 137031 - DNA, 9 bp, Unknown
  misc_feature (1)..( 9): Result.003 file - promoters60/4767952
taaaagaaa

SEQ ID NO: 137032 - DNA, 8 bp, Unknown
  misc_feature (1)..( 8): Result.003 file - promoters60/4767952
gaatgttt

SEQ ID NO: 137033 - DNA, 8 bp, Unknown
  misc_feature (1)..( 8): Result.003 file - promoters60/4767952
aaatgttg

SEQ ID NO: 137034 - DNA, 8 bp, Unknown
  misc_feature (1)..( 8): Result.003 file - promoters60/4767952
taatgttt

SEQ ID NO: 137035 - DNA, 8 bp, Unknown
  misc_feature (1)..( 8): Result.003 file - promoters60/4767952
aaaggttg

SEQ ID NO: 137036 - DNA, 10 bp, Unknown
  misc_feature (1)..( 10): Result.003 file - promoters60/4767952
ataaattaaa

SEQ ID NO: 137037 - DNA, 10 bp, Unknown
  misc_feature (1)..( 10): Result.003 file - promoters60/4767952
tttaatcaaa

SEQ ID NO: 137038 - DNA, 10 bp, Unknown
  misc_feature (1)..( 10): Result.003 file - promoters60/4767952
ataaataaaa

SEQ ID NO: 137039 - DNA, 10 bp, Unknown
  misc_feature (1)..( 10): Result.003 file - promoters60/4767952
attgataaat

SEQ ID NO: 137040 - DNA, 9 bp, Unknown
  misc_feature (1)..( 9): Result.003 file - promoters60/4767952
aatgaaacg

SEQ ID NO: 137041 - DNA, 9 bp, Unknown
  misc_feature (1)..( 9): Result.003 file - promoters60/4767952
aattaaatt

SEQ ID NO: 137042 - DNA, 9 bp, Unknown
  misc_feature (1)..( 9): Result.003 file - promoters60/4767952
tattaaatg

SEQ ID NO: 137043 - DNA, 9 bp, Unknown
  misc_feature (1)..( 9): Result.003 file - promoters60/4767952
ttttacatt

SEQ ID NO: 137044 - DNA, 9 bp, Unknown
  misc_feature (1)..( 9): Result.003 file - promoters60/4767952
tattaaatg

SEQ ID NO: 137045 - DNA, 9 bp, Unknown
  misc_feature (1)..( 9): Result.003 file - promoters60/4767952
ataaataaa

SEQ ID NO: 137046 - DNA, 9 bp, Unknown
  misc_feature (1)..( 9): Result.003 file - promoters60/4767952
ataaataaa

SEQ ID NO: 137047 - DNA, 9 bp, Unknown
  misc_feature (1)..( 9): Result.003 file - promoters60/4767952
acaaaaaaa

SEQ ID NO: 137048 - DNA, 9 bp, Unknown
  misc_feature (1)..( 9): Result.003 file - promoters60/4767952
ataaatgca

SEQ ID NO: 137049 - DNA, 11 bp, Unknown
  misc_feature (1)..( 11): Result.003 file - promoters60/4767952
aaaaaagaaag

SEQ ID NO: 137050 - DNA, 11 bp, Unknown
  misc_feature (1)..( 11): Result.003 file - promoters60/4767952
aaagaagaacg

SEQ ID NO: 137051 - DNA, 11 bp, Unknown
  misc_feature (1)..( 11): Result.003 file - promoters60/4767952
aatgaataacg

SEQ ID NO: 137052 - DNA, 11 bp, Unknown
  misc_feature (1)..( 11): Result.003 file - promoters60/4767952
ataaaagaaaa

SEQ ID NO: 137053 - DNA, 8 bp, Unknown
  misc_feature (1)..( 8): Result.003 file - promoters60/4767952
cgacgaaa

SEQ ID NO: 137054 - DNA, 8 bp, Unknown
  misc_feature (1)..( 8): Result.003 file - promoters60/4767952
agaccaaa

SEQ ID NO: 137055 - DNA, 8 bp, Unknown
  misc_feature (1)..( 8): Result.003 file - promoters60/4767952
agatcaat

SEQ ID NO: 137056 - DNA, 8 bp, Unknown
  misc_feature (1)..( 8): Result.003 file - promoters60/4767952
ggatcaaa

SEQ ID NO: 137057 - DNA, 11 bp, Unknown
  misc_feature (1)..( 11): Result.003 file - promoters60/4767952
attatgttaac

SEQ ID NO: 137058 - DNA, 11 bp, Unknown
  misc_feature (1)..( 11): Result.003 file - promoters60/4767952
aaaatgttaaa

SEQ ID NO: 137059 - DNA, 11 bp, Unknown
  misc_feature (1)..( 11): Result.003 file - promoters60/4767952
tgattgttaac

SEQ ID NO: 137060 - DNA, 11 bp, Unknown
  misc_feature (1)..( 11): Result.003 file - promoters60/4767952
aaaatgttgtt

SEQ ID NO: 137061 - DNA, 9 bp, Unknown
  misc_feature (1)..( 9): Result.003 file - promoters60/4767952
ttatcgatt

SEQ ID NO: 137062 - DNA, 9 bp, Unknown
  misc_feature (1)..( 9): Result.003 file - promoters60/4767952
agatcaatt

SEQ ID NO: 137063 - DNA, 9 bp, Unknown
  misc_feature (1)..( 9): Result.003 file - promoters60/4767952
agaccaaaa

SEQ ID NO: 137064 - DNA, 9 bp, Unknown
  misc_feature (1)..( 9): Result.003 file - promoters60/4767952
ggatcaaag

SEQ ID NO: 137065 - DNA, 8 bp, Unknown
  misc_feature (1)..( 8): Result.003 file - promoters60/4767956
caaccatt

SEQ ID NO: 137066 - DNA, 8 bp, Unknown
  misc_feature (1)..( 8): Result.003 file - promoters60/4767956
caaacata

SEQ ID NO: 137067 - DNA, 8 bp, Unknown
  misc_feature (1)..( 8): Result.003 file - promoters60/4767956
aaaacata

SEQ ID NO: 137068 - DNA, 8 bp, Unknown
  misc_feature (1)..( 8): Result.003 file - promoters60/4767956
caaacaaa

SEQ ID NO: 137069 - DNA, 10 bp, Unknown
  misc_feature (1)..( 10): Result.003 file - promoters60/4767972
gaaaatgaaa

SEQ ID NO: 137070 - DNA, 10 bp, Unknown
  misc_feature (1)..( 10): Result.003 file - promoters60/4767972
tgaaacgaat

SEQ ID NO: 137071 - DNA, 10 bp, Unknown
  misc_feature (1)..( 10): Result.003 file - promoters60/4767972
gaaaatgatt

SEQ ID NO: 137072 - DNA, 10 bp, Unknown
  misc_feature (1)..( 10): Result.003 file - promoters60/4767972
ttgaaccaat

SEQ ID NO: 137073 - DNA, 11 bp, Unknown
  misc_feature (1)..( 11): Result.003 file - promoters60/4767972
gaagataaaca

SEQ ID NO: 137074 - DNA, 11 bp, Unknown
  misc_feature (1)..( 11): Result.003 file - promoters60/4767972
gaaaatataca

SEQ ID NO: 137075 - DNA, 11 bp, Unknown
  misc_feature (1)..( 11): Result.003 file - promoters60/4767972
taaagtattta

SEQ ID NO: 137076 - DNA, 7 bp, Unknown
  misc_feature (1)..( 7): Result.003 file - promoters60/4767972
attaacc

SEQ ID NO: 137077 - DNA, 7 bp, Unknown
  misc_feature (1)..( 7): Result.003 file - promoters60/4767972
attaacc

SEQ ID NO: 137078 - DNA, 7 bp, Unknown
  misc_feature (1)..( 7): Result.003 file - promoters60/4767972
attaacc

SEQ ID NO: 137079 - DNA, 9 bp, Unknown
  misc_feature (1)..( 9): Result.003 file - promoters60/4767972
actgtcata

SEQ ID NO: 137080 - DNA, 9 bp, Unknown
  misc_feature (1)..( 9): Result.003 file - promoters60/4767972
actttcata

SEQ ID NO: 137081 - DNA, 9 bp, Unknown
  misc_feature (1)..( 9): Result.003 file - promoters60/4767972
actttaata

SEQ ID NO: 137082 - DNA, 6 bp, Unknown
  misc_feature (1)..( 6): Result.003 file - promoters60/4767976
aacatt

SEQ ID NO: 137083 - DNA, 6 bp, Unknown
  misc_feature (1)..( 6): Result.003 file - promoters60/4767976
aacatt

SEQ ID NO: 137084 - DNA, 8 bp, Unknown
  misc_feature (1)..( 8): Result.003 file - promoters60/4767976
tgtattaa

SEQ ID NO: 137085 - DNA, 8 bp, Unknown
  misc_feature (1)..( 8): Result.003 file - promoters60/4767976
tgtgttaa

SEQ ID NO: 137086 - DNA, 7 bp, Unknown
  misc_feature (1)..( 7): Result.003 file - promoters60/4767976
tttgtaa

SEQ ID NO: 137087 - DNA, 7 bp, Unknown
  misc_feature (1)..( 7): Result.003 file - promoters60/4767976
tttgtaa

SEQ ID NO: 137088 - DNA, 7 bp, Unknown
  misc_feature (1)..( 7): Result.003 file - promoters60/4767976
gaaaatt

SEQ ID NO: 137089 - DNA, 7 bp, Unknown
  misc_feature (1)..( 7): Result.003 file - promoters60/4767976
gaatatt

SEQ ID NO: 137090 - DNA, 9 bp, Unknown
  misc_feature (1)..( 9): Result.003 file - promoters60/4767976
ttatcttcc

SEQ ID NO: 137091 - DNA, 9 bp, Unknown
  misc_feature (1)..( 9): Result.003 file - promoters60/4767976
ttatgttcc

SEQ ID NO: 137092 - DNA, 8 bp, Unknown
  misc_feature (1)..( 8): Result.003 file - promoters60/4767976
attattgc

SEQ ID NO: 137093 - DNA, 8 bp, Unknown
  misc_feature (1)..( 8): Result.003 file - promoters60/4767976
atttttgc

SEQ ID NO: 137094 - DNA, 7 bp, Unknown
  misc_feature (1)..( 7): Result.003 file - promoters60/4767976
aataagc

SEQ ID NO: 137095 - DNA, 7 bp, Unknown
  misc_feature (1)..( 7): Result.003 file - promoters60/4767976
aatgagc

SEQ ID NO: 137096 - DNA, 6 bp, Unknown
  misc_feature (1)..( 6): Result.003 file - promoters60/4767976
taaagg

SEQ ID NO: 137097 - DNA, 6 bp, Unknown
  misc_feature (1)..( 6): Result.003 file - promoters60/4767976
taaagg

SEQ ID NO: 137098 - DNA, 7 bp, Unknown
  misc_feature (1)..( 7): Result.003 file - promoters60/4767976
aaatata

SEQ ID NO: 137099 - DNA, 7 bp, Unknown
  misc_feature (1)..( 7): Result.003 file - promoters60/4767976
aaagata

SEQ ID NO: 137100 - DNA, 7 bp, Unknown
  misc_feature (1)..( 7): Result.003 file - promoters60/4767976
tttcaat

SEQ ID NO: 137101 - DNA, 7 bp, Unknown
  misc_feature (1)..( 7): Result.003 file - promoters60/4767976
ttttaat

SEQ ID NO: 137102 - DNA, 8 bp, Unknown
  misc_feature (1)..( 8): Result.003 file - promoters60/4767976
gtttggtc

SEQ ID NO: 137103 - DNA, 8 bp, Unknown
  misc_feature (1)..( 8): Result.003 file - promoters60/4767976
gttgggtc

SEQ ID NO: 137104 - DNA, 6 bp, Unknown
  misc_feature (1)..( 6): Result.003 file - promoters60/4767976
aacatt

SEQ ID NO: 137105 - DNA, 6 bp, Unknown
  misc_feature (1)..( 6): Result.003 file - promoters60/4767976
aacatt

SEQ ID NO: 137106 - DNA, 7 bp, Unknown
  misc_feature (1)..( 7): Result.003 file - promoters60/4767976
cactaaa

SEQ ID NO: 137107 - DNA, 7 bp, Unknown
  misc_feature (1)..( 7): Result.003 file - promoters60/4767976
cactaaa

SEQ ID NO: 137108 - DNA, 6 bp, Unknown
  misc_feature (1)..( 6): Result.003 file - promoters60/4767976
ccatta

SEQ ID NO: 137109 - DNA, 6 bp, Unknown
  misc_feature (1)..( 6): Result.003 file - promoters60/4767976
ccatta

SEQ ID NO: 137110 - DNA, 7 bp, Unknown
  misc_feature (1)..( 7): Result.003 file - promoters60/4767976
ctatata

SEQ ID NO: 137111 - DNA, 7 bp, Unknown
  misc_feature (1)..( 7): Result.003 file - promoters60/4767976
gtatata

SEQ ID NO: 137112 - DNA, 7 bp, Unknown
  misc_feature (1)..( 7): Result.003 file - promoters60/4767976
gtatata

SEQ ID NO: 137113 - DNA, 6 bp, Unknown
  misc_feature (1)..( 6): Result.003 file - promoters60/4767976
agtaaa

SEQ ID NO: 137114 - DNA, 6 bp, Unknown
  misc_feature (1)..( 6): Result.003 file - promoters60/4767976
agtaaa

SEQ ID NO: 137115 - DNA, 7 bp, Unknown
  misc_feature (1)..( 7): Result.003 file - promoters60/4767976
aatcggg

SEQ ID NO: 137116 - DNA, 7 bp, Unknown
  misc_feature (1)..( 7): Result.003 file - promoters60/4767976
aattggg

SEQ ID NO: 137117 - DNA, 8 bp, Unknown
  misc_feature (1)..( 8): Result.003 file - promoters60/4767976
gaaagaaa

SEQ ID NO: 137118 - DNA, 8 bp, Unknown
  misc_feature (1)..( 8): Result.003 file - promoters60/4767976
gaaacaaa

SEQ ID NO: 137119 - DNA, 10 bp, Unknown
  misc_feature (1)..( 10): Result.003 file - promoters60/4767976
ggaaaagaaa

SEQ ID NO: 137120 - DNA, 10 bp, Unknown
  misc_feature (1)..( 10): Result.003 file - promoters60/4767976
ggaaatgaaa

SEQ ID NO: 137121 - DNA, 7 bp, Unknown
  misc_feature (1)..( 7): Result.003 file - promoters60/4767976
cccacta

SEQ ID NO: 137122 - DNA, 7 bp, Unknown
  misc_feature (1)..( 7): Result.003 file - promoters60/4767976
cccacta

SEQ ID NO: 137123 - DNA, 9 bp, Unknown
  misc_feature (1)..( 9): Result.003 file - promoters60/4767976
aaagaaaag

SEQ ID NO: 137124 - DNA, 9 bp, Unknown
  misc_feature (1)..( 9): Result.003 file - promoters60/4767976
aaagtaaag

SEQ ID NO: 137125 - DNA, 7 bp, Unknown
  misc_feature (1)..( 7): Result.003 file - promoters60/4767982
taaaaat

SEQ ID NO: 137126 - DNA, 7 bp, Unknown
  misc_feature (1)..( 7): Result.003 file - promoters60/4767982
aaaaaat

SEQ ID NO: 137127 - DNA, 7 bp, Unknown
  misc_feature (1)..( 7): Result.003 file - promoters60/4767982
taaaaag

SEQ ID NO: 137128 - DNA, 7 bp, Unknown
  misc_feature (1)..( 7): Result.003 file - promoters60/4767982
caaaaat

SEQ ID NO: 137129 - DNA, 9 bp, Unknown
  misc_feature (1)..( 9): Result.003 file - promoters60/4767982
ctgtgtttt

SEQ ID NO: 137130 - DNA, 9 bp, Unknown
  misc_feature (1)..( 9): Result.003 file - promoters60/4767982
ctgtgtgag

SEQ ID NO: 137131 - DNA, 9 bp, Unknown
  misc_feature (1)..( 9): Result.003 file - promoters60/4767982
atgtttttt

SEQ ID NO: 137132 - DNA, 9 bp, Unknown
  misc_feature (1)..( 9): Result.003 file - promoters60/4767982
atgttttag

SEQ ID NO: 137133 - DNA, 6 bp, Unknown
  misc_feature (1)..( 6): Result.003 file - promoters60/4767986
aataat

SEQ ID NO: 137134 - DNA, 6 bp, Unknown
  misc_feature (1)..( 6): Result.003 file - promoters60/4767986
aataat

SEQ ID NO: 137135 - DNA, 6 bp, Unknown
  misc_feature (1)..( 6): Result.003 file - promoters60/4767986
aataat

SEQ ID NO: 137136 - DNA, 6 bp, Unknown
  misc_feature (1)..( 6): Result.003 file - promoters60/4767986
aataat

SEQ ID NO: 137137 - DNA, 6 bp, Unknown
  misc_feature (1)..( 6): Result.003 file - promoters60/4767986
aataat

SEQ ID NO: 137138 - DNA, 6 bp, Unknown
  misc_feature (1)..( 6): Result.003 file - promoters60/4767986
aataat

SEQ ID NO: 137139 - DNA, 8 bp, Unknown
  misc_feature (1)..( 8): Result.003 file - promoters60/4767986
taatcaaa

SEQ ID NO: 137140 - DNA, 8 bp, Unknown
  misc_feature (1)..( 8): Result.003 file - promoters60/4767986
taaacaaa

SEQ ID NO: 137141 - DNA, 6 bp, Unknown
  misc_feature (1)..( 6): Result.003 file - promoters60/4767986
aatcaa

SEQ ID NO: 137142 - DNA, 6 bp, Unknown
  misc_feature (1)..( 6): Result.003 file - promoters60/4767986
aatcaa

SEQ ID NO: 137143 - DNA, 6 bp, Unknown
  misc_feature (1)..( 6): Result.003 file - promoters60/4767986
tcttta

SEQ ID NO: 137144 - DNA, 6 bp, Unknown
  misc_feature (1)..( 6): Result.003 file - promoters60/4767986
tcttta

SEQ ID NO: 137145 - DNA, 6 bp, Unknown
  misc_feature (1)..( 6): Result.003 file - promoters60/4767986
tgtttc

SEQ ID NO: 137146 - DNA, 6 bp, Unknown
  misc_feature (1)..( 6): Result.003 file - promoters60/4767986
tgtttc

SEQ ID NO: 137147 - DNA, 9 bp, Unknown
  misc_feature (1)..( 9): Result.003 file - promoters60/4767994
attctttga

SEQ ID NO: 137148 - DNA, 9 bp, Unknown
  misc_feature (1)..( 9): Result.003 file - promoters60/4767994
atttttttc

SEQ ID NO: 137149 - DNA, 9 bp, Unknown
  misc_feature (1)..( 9): Result.003 file - promoters60/4767994
atttttcct

SEQ ID NO: 137150 - DNA, 9 bp, Unknown
  misc_feature (1)..( 9): Result.003 file - promoters60/4767994
gtttgttca

SEQ ID NO: 137151 - DNA, 7 bp, Unknown
  misc_feature (1)..( 7): Result.003 file - promoters60/4767994
cttttta

SEQ ID NO: 137152 - DNA, 7 bp, Unknown
  misc_feature (1)..( 7): Result.003 file - promoters60/4767994
cttttta

SEQ ID NO: 137153 - DNA, 7 bp, Unknown
  misc_feature (1)..( 7): Result.003 file - promoters60/4767994
ctttttt

SEQ ID NO: 137154 - DNA, 7 bp, Unknown
  misc_feature (1)..( 7): Result.003 file - promoters60/4767994
cttttta

SEQ ID NO: 137155 - DNA, 14 bp, Unknown
  misc_feature (1)..( 14): Result.003 file - promoters60/4767994
aaaaaaaaagtgga

SEQ ID NO: 137156 - DNA, 14 bp, Unknown
  misc_feature (1)..( 14): Result.003 file - promoters60/4767994
ccgtcaaaattgga

SEQ ID NO: 137157 - DNA, 14 bp, Unknown
  misc_feature (1)..( 14): Result.003 file - promoters60/4767994
aaaaaaaaagtgat

SEQ ID NO: 137158 - DNA, 14 bp, Unknown
  misc_feature (1)..( 14): Result.003 file - promoters60/4767994
atactaaaagaaat

SEQ ID NO: 137159 - DNA, 11 bp, Unknown
  misc_feature (1)..( 11): Result.003 file - promoters60/4767994
aaataaacaaa

SEQ ID NO: 137160 - DNA, 11 bp, Unknown
  misc_feature (1)..( 11): Result.003 file - promoters60/4767994
aaagaaataaa

SEQ ID NO: 137161 - DNA, 11 bp, Unknown
  misc_feature (1)..( 11): Result.003 file - promoters60/4767994
aaaaaaaaaaa

SEQ ID NO: 137162 - DNA, 11 bp, Unknown
  misc_feature (1)..( 11): Result.003 file - promoters60/4767994
gaagaaaccgg

SEQ ID NO: 137163 - DNA, 9 bp, Unknown
  misc_feature (1)..( 9): Result.003 file - promoters60/4768007
aaaaataaa

SEQ ID NO: 137164 - DNA, 9 bp, Unknown
  misc_feature (1)..( 9): Result.003 file - promoters60/4768007
aaaaatata

SEQ ID NO: 137165 - DNA, 9 bp, Unknown
  misc_feature (1)..( 9): Result.003 file - promoters60/4768007
aaaattaat

SEQ ID NO: 137166 - DNA, 9 bp, Unknown
  misc_feature (1)..( 9): Result.003 file - promoters60/4768007
aaagaaaaa

SEQ ID NO: 137167 - DNA, 9 bp, Unknown
  misc_feature (1)..( 9): Result.003 file - promoters60/4768007
aaagatatc

SEQ ID NO: 137168 - DNA, 9 bp, Unknown
  misc_feature (1)..( 9): Result.003 file - promoters60/4768007
gataatatt

SEQ ID NO: 137169 - DNA, 9 bp, Unknown
  misc_feature (1)..( 9): Result.003 file - promoters60/4768007
aaagattta

SEQ ID NO: 137170 - DNA, 11 bp, Unknown
  misc_feature (1)..( 11): Result.003 file - promoters60/4768007
taaataaaagc

SEQ ID NO: 137171 - DNA, 11 bp, Unknown
  misc_feature (1)..( 11): Result.003 file - promoters60/4768007
gatataaaaaa

SEQ ID NO: 137172 - DNA, 11 bp, Unknown
  misc_feature (1)..( 11): Result.003 file - promoters60/4768007
acaataaaatt

SEQ ID NO: 137173 - DNA, 11 bp, Unknown
  misc_feature (1)..( 11): Result.003 file - promoters60/4768007
taaagaaaaag

SEQ ID NO: 137174 - DNA, 11 bp, Unknown
  misc_feature (1)..( 11): Result.003 file - promoters60/4768007
ggtatcaaaca

SEQ ID NO: 137175 - DNA, 11 bp, Unknown
  misc_feature (1)..( 11): Result.003 file - promoters60/4768007
gagataatatt

SEQ ID NO: 137176 - DNA, 11 bp, Unknown
  misc_feature (1)..( 11): Result.003 file - promoters60/4768007
tgaaaaacaaa

SEQ ID NO: 137177 - DNA, 11 bp, Unknown
  misc_feature (1)..( 11): Result.003 file - promoters60/4768007
tgaaaaaaaaa

SEQ ID NO: 137178 - DNA, 11 bp, Unknown
  misc_feature (1)..( 11): Result.003 file - promoters60/4768007
ctataaataaa

SEQ ID NO: 137179 - DNA, 11 bp, Unknown
  misc_feature (1)..( 11): Result.003 file - promoters60/4768007
agtcaaacaaa

SEQ ID NO: 137180 - DNA, 11 bp, Unknown
  misc_feature (1)..( 11): Result.003 file - promoters60/4768007
tgtgaaacaaa

SEQ ID NO: 137181 - DNA, 11 bp, Unknown
  misc_feature (1)..( 11): Result.003 file - promoters60/4768007
aatcaatcaaa

SEQ ID NO: 137182 - DNA, 20 bp, Unknown
  misc_feature (1)..( 20): Result.003 file - promoters60/4768007
aatgtttgtttaacaaaaaa

SEQ ID NO: 137183 - DNA, 20 bp, Unknown
  misc_feature (1)..( 20): Result.003 file - promoters60/4768007
agaataggtttaagaacttt

SEQ ID NO: 137184 - DNA, 20 bp, Unknown
  misc_feature (1)..( 20): Result.003 file - promoters60/4768007
tttatttctttaaactatga

SEQ ID NO: 137185 - DNA, 20 bp, Unknown
  misc_feature (1)..( 20): Result.003 file - promoters60/4768007
ttagatggattaattctttt

SEQ ID NO: 137186 - DNA, 20 bp, Unknown
  misc_feature (1)..( 20): Result.003 file - promoters60/4768007
caaacaaacaaaattatttt

SEQ ID NO: 137187 - DNA, 20 bp, Unknown
  misc_feature (1)..( 20): Result.003 file - promoters60/4768007
aaagttactttatgtttcgt

SEQ ID NO: 137188 - DNA, 13 bp, Unknown
  misc_feature (1)..( 13): Result.003 file - promoters60/4768007
tccattatatata

SEQ ID NO: 137189 - DNA, 13 bp, Unknown
  misc_feature (1)..( 13): Result.003 file - promoters60/4768007
atacatatataaa

SEQ ID NO: 137190 - DNA, 13 bp, Unknown
  misc_feature (1)..( 13): Result.003 file - promoters60/4768007
acgcctatatata

SEQ ID NO: 137191 - DNA, 13 bp, Unknown
  misc_feature (1)..( 13): Result.003 file - promoters60/4768007
tttcttatatctt

SEQ ID NO: 137192 - DNA, 13 bp, Unknown
  misc_feature (1)..( 13): Result.003 file - promoters60/4768007
tcctttatattct

SEQ ID NO: 137193 - DNA, 13 bp, Unknown
  misc_feature (1)..( 13): Result.003 file - promoters60/4768007
agtgagatataat

SEQ ID NO: 137194 - DNA, 13 bp, Unknown
  misc_feature (1)..( 13): Result.003 file - promoters60/4768007
tcctttttagttc

SEQ ID NO: 137195 - DNA, 15 bp, Unknown
  misc_feature (1)..( 15): Result.003 file - promoters60/4768007
aaatattaaccttga

SEQ ID NO: 137196 - DNA, 15 bp, Unknown
  misc_feature (1)..( 15): Result.003 file - promoters60/4768007
aaaaattaaatgcta

SEQ ID NO: 137197 - DNA, 15 bp, Unknown
  misc_feature (1)..( 15): Result.003 file - promoters60/4768007
caaaattgaccctga

SEQ ID NO: 137198 - DNA, 15 bp, Unknown
  misc_feature (1)..( 15): Result.003 file - promoters60/4768007
aaagatttatattat

SEQ ID NO: 137199 - DNA, 15 bp, Unknown
  misc_feature (1)..( 15): Result.003 file - promoters60/4768007
taaaatttcataacc

SEQ ID NO: 137200 - DNA, 15 bp, Unknown
  misc_feature (1)..( 15): Result.003 file - promoters60/4768007
aaagatatcaagtgg

SEQ ID NO: 137201 - DNA, 10 bp, Unknown
  misc_feature (1)..( 10): Result.003 file - promoters60/4768007
ttcatatgtt

SEQ ID NO: 137202 - DNA, 10 bp, Unknown
  misc_feature (1)..( 10): Result.003 file - promoters60/4768007
ttcataaaat

SEQ ID NO: 137203 - DNA, 10 bp, Unknown
  misc_feature (1)..( 10): Result.003 file - promoters60/4768007
gtcattaaat

SEQ ID NO: 137204 - DNA, 10 bp, Unknown
  misc_feature (1)..( 10): Result.003 file - promoters60/4768007
gacatttaat

SEQ ID NO: 137205 - DNA, 10 bp, Unknown
  misc_feature (1)..( 10): Result.003 file - promoters60/4768007
ttcagaaatg

SEQ ID NO: 137206 - DNA, 10 bp, Unknown
  misc_feature (1)..( 10): Result.003 file - promoters60/4768007
ttcttaatat

SEQ ID NO: 137207 - DNA, 11 bp, Unknown
  misc_feature (1)..( 11): Result.003 file - promoters60/4768007
taacaaaaaaa

SEQ ID NO: 137208 - DNA, 11 bp, Unknown
  misc_feature (1)..( 11): Result.003 file - promoters60/4768007
taataaaaaac

SEQ ID NO: 137209 - DNA, 11 bp, Unknown
  misc_feature (1)..( 11): Result.003 file - promoters60/4768007
caactaaagta

SEQ ID NO: 137210 - DNA, 11 bp, Unknown
  misc_feature (1)..( 11): Result.003 file - promoters60/4768007
aaacaaaggaa

SEQ ID NO: 137211 - DNA, 11 bp, Unknown
  misc_feature (1)..( 11): Result.003 file - promoters60/4768007
aacaaaaaaaa

SEQ ID NO: 137212 - DNA, 11 bp, Unknown
  misc_feature (1)..( 11): Result.003 file - promoters60/4768007
ctggaaacact

SEQ ID NO: 137213 - DNA, 9 bp, Unknown
  misc_feature (1)..( 9): Result.003 file - promoters60/4768007
aatatttaa

SEQ ID NO: 137214 - DNA, 9 bp, Unknown
  misc_feature (1)..( 9): Result.003 file - promoters60/4768007
aatatttag

SEQ ID NO: 137215 - DNA, 9 bp, Unknown
  misc_feature (1)..( 9): Result.003 file - promoters60/4768007
aatatttca

SEQ ID NO: 137216 - DNA, 9 bp, Unknown
  misc_feature (1)..( 9): Result.003 file - promoters60/4768007
gctatttat

SEQ ID NO: 137217 - DNA, 9 bp, Unknown
  misc_feature (1)..( 9): Result.003 file - promoters60/4768007
aatctttaa

SEQ ID NO: 137218 - DNA, 9 bp, Unknown
  misc_feature (1)..( 9): Result.003 file - promoters60/4768007
gatctttta

SEQ ID NO: 137219 - DNA, 11 bp, Unknown
  misc_feature (1)..( 11): Result.003 file - promoters60/4768007
gaaacaaaaaa

SEQ ID NO: 137220 - DNA, 11 bp, Unknown
  misc_feature (1)..( 11): Result.003 file - promoters60/4768007
gaaacaagaaa

SEQ ID NO: 137221 - DNA, 11 bp, Unknown
  misc_feature (1)..( 11): Result.003 file - promoters60/4768007
gtaataaaaaa

SEQ ID NO: 137222 - DNA, 11 bp, Unknown
  misc_feature (1)..( 11): Result.003 file - promoters60/4768007
caaacaaaatt

SEQ ID NO: 137223 - DNA, 11 bp, Unknown
  misc_feature (1)..( 11): Result.003 file - promoters60/4768007
taaacaaagga

SEQ ID NO: 137224 - DNA, 11 bp, Unknown
  misc_feature (1)..( 11): Result.003 file - promoters60/4768007
gaaacacttat

SEQ ID NO: 137225 - DNA, 9 bp, Unknown
  misc_feature (1)..( 9): Result.003 file - promoters60/4768039
attcctaaa

SEQ ID NO: 137226 - DNA, 9 bp, Unknown
  misc_feature (1)..( 9): Result.003 file - promoters60/4768039
atttctaaa

SEQ ID NO: 137227 - DNA, 9 bp, Unknown
  misc_feature (1)..( 9): Result.003 file - promoters60/4768039
ttttttaac

SEQ ID NO: 137228 - DNA, 10 bp, Unknown
  misc_feature (1)..( 10): Result.003 file - promoters60/4768039
gataatattt

SEQ ID NO: 137229 - DNA, 10 bp, Unknown
  misc_feature (1)..( 10): Result.003 file - promoters60/4768039
tataatatct

SEQ ID NO: 137230 - DNA, 10 bp, Unknown
  misc_feature (1)..( 10): Result.003 file - promoters60/4768039
tattatagat

SEQ ID NO: 137231 - DNA, 10 bp, Unknown
  misc_feature (1)..( 10): Result.003 file - promoters60/4768039
cattatcgat

SEQ ID NO: 137232 - DNA, 11 bp, Unknown
  misc_feature (1)..( 11): Result.003 file - promoters60/4768039
ggaagaaaaag

SEQ ID NO: 137233 - DNA, 11 bp, Unknown
  misc_feature (1)..( 11): Result.003 file - promoters60/4768039
caaaaaaaaag

SEQ ID NO: 137234 - DNA, 11 bp, Unknown
  misc_feature (1)..( 11): Result.003 file - promoters60/4768039
caaacaaaaat

SEQ ID NO: 137235 - DNA, 10 bp, Unknown
  misc_feature (1)..( 10): Result.003 file - promoters60/4768039
tgcaagtttc

SEQ ID NO: 137236 - DNA, 10 bp, Unknown
  misc_feature (1)..( 10): Result.003 file - promoters60/4768039
tgcaactttg

SEQ ID NO: 137237 - DNA, 10 bp, Unknown
  misc_feature (1)..( 10): Result.003 file - promoters60/4768039
caaaactttg

SEQ ID NO: 137238 - DNA, 11 bp, Unknown
  misc_feature (1)..( 11): Result.003 file - promoters60/4768039
ttaatataata

SEQ ID NO: 137239 - DNA, 11 bp, Unknown
  misc_feature (1)..( 11): Result.003 file - promoters60/4768039
ttattatagat

SEQ ID NO: 137240 - DNA, 11 bp, Unknown
  misc_feature (1)..( 11): Result.003 file - promoters60/4768039
acattatcgat

SEQ ID NO: 137241 - DNA, 6 bp, Unknown
  misc_feature (1)..( 6): Result.003 file - promoters60/4768066
gataaa

SEQ ID NO: 137242 - DNA, 6 bp, Unknown
  misc_feature (1)..( 6): Result.003 file - promoters60/4768066
gataaa

SEQ ID NO: 137243 - DNA, 6 bp, Unknown
  misc_feature (1)..( 6): Result.003 file - promoters60/4768066
tttatt

SEQ ID NO: 137244 - DNA, 6 bp, Unknown
  misc_feature (1)..( 6): Result.003 file - promoters60/4768066
tttatt

SEQ ID NO: 137245 - DNA, 7 bp, Unknown
  misc_feature (1)..( 7): Result.003 file - promoters60/4768066
gttttaa

SEQ ID NO: 137246 - DNA, 7 bp, Unknown
  misc_feature (1)..( 7): Result.003 file - promoters60/4768066
gttgtaa

SEQ ID NO: 137247 - DNA, 6 bp, Unknown
  misc_feature (1)..( 6): Result.003 file - promoters60/4768066
taacgt

SEQ ID NO: 137248 - DNA, 6 bp, Unknown
  misc_feature (1)..( 6): Result.003 file - promoters60/4768066
taacgt

SEQ ID NO: 137249 - DNA, 7 bp, Unknown
  misc_feature (1)..( 7): Result.003 file - promoters60/4768066
aaattaa

SEQ ID NO: 137250 - DNA, 7 bp, Unknown
  misc_feature (1)..( 7): Result.003 file - promoters60/4768066
aaaataa

SEQ ID NO: 137251 - DNA, 10 bp, Unknown
  misc_feature (1)..( 10): Result.003 file - promoters60/4768066
taaaaaaaaa

SEQ ID NO: 137252 - DNA, 10 bp, Unknown
  misc_feature (1)..( 10): Result.003 file - promoters60/4768066
taaaaagaaa

SEQ ID NO: 137253 - DNA, 6 bp, Unknown
  misc_feature (1)..( 6): Result.003 file - promoters60/4768066
gtatat

SEQ ID NO: 137254 - DNA, 6 bp, Unknown
  misc_feature (1)..( 6): Result.003 file - promoters60/4768066
gtatat

SEQ ID NO: 137255 - DNA, 6 bp, Unknown
  misc_feature (1)..( 6): Result.003 file - promoters60/4768066
gtatat

SEQ ID NO: 137256 - DNA, 6 bp, Unknown
  misc_feature (1)..( 6): Result.003 file - promoters60/4768066
taaaca

SEQ ID NO: 137257 - DNA, 6 bp, Unknown
  misc_feature (1)..( 6): Result.003 file - promoters60/4768066
taaaca

SEQ ID NO: 137258 - DNA, 8 bp, Unknown
  misc_feature (1)..( 8): Result.003 file - promoters60/4768066
ggattagg

SEQ ID NO: 137259 - DNA, 8 bp, Unknown
  misc_feature (1)..( 8): Result.003 file - promoters60/4768066
ggattagg

SEQ ID NO: 137260 - DNA, 6 bp, Unknown
  misc_feature (1)..( 6): Result.003 file - promoters60/4768066
ttttgt

SEQ ID NO: 137261 - DNA, 6 bp, Unknown
  misc_feature (1)..( 6): Result.003 file - promoters60/4768066
ttttgt

SEQ ID NO: 137262 - DNA, 7 bp, Unknown
  misc_feature (1)..( 7): Result.003 file - promoters60/4768066
taattaa

SEQ ID NO: 137263 - DNA, 7 bp, Unknown
  misc_feature (1)..( 7): Result.003 file - promoters60/4768066
taattaa

SEQ ID NO: 137264 - DNA, 11 bp, Unknown
  misc_feature (1)..( 11): Result.003 file - promoters60/4768066
ttacctaaacc

SEQ ID NO: 137265 - DNA, 11 bp, Unknown
  misc_feature (1)..( 11): Result.003 file - promoters60/4768066
ttaactaaacc

SEQ ID NO: 137266 - DNA, 7 bp, Unknown
  misc_feature (1)..( 7): Result.003 file - promoters60/4768066
actcaac

SEQ ID NO: 137267 - DNA, 7 bp, Unknown
  misc_feature (1)..( 7): Result.003 file - promoters60/4768066
actaaac

SEQ ID NO: 137268 - DNA, 8 bp, Unknown
  misc_feature (1)..( 8): Result.003 file - promoters60/4768066
tcttaatt

SEQ ID NO: 137269 - DNA, 8 bp, Unknown
  misc_feature (1)..( 8): Result.003 file - promoters60/4768066
tctaaatt

SEQ ID NO: 137270 - DNA, 7 bp, Unknown
  misc_feature (1)..( 7): Result.003 file - promoters60/4768066
tagataa

SEQ ID NO: 137271 - DNA, 7 bp, Unknown
  misc_feature (1)..( 7): Result.003 file - promoters60/4768066
tagataa

SEQ ID NO: 137272 - DNA, 6 bp, Unknown
  misc_feature (1)..( 6): Result.003 file - promoters60/4768066
attaat

SEQ ID NO: 137273 - DNA, 6 bp, Unknown
  misc_feature (1)..( 6): Result.003 file - promoters60/4768066
attaat

SEQ ID NO: 137274 - DNA, 6 bp, Unknown
  misc_feature (1)..( 6): Result.003 file - promoters60/4768066
agtaaa

SEQ ID NO: 137275 - DNA, 6 bp, Unknown
  misc_feature (1)..( 6): Result.003 file - promoters60/4768066
agtaaa

SEQ ID NO: 137276 - DNA, 7 bp, Unknown
  misc_feature (1)..( 7): Result.003 file - promoters60/4768066
aatcggg

SEQ ID NO: 137277 - DNA, 7 bp, Unknown
  misc_feature (1)..( 7): Result.003 file - promoters60/4768066
aattggg

SEQ ID NO: 137278 - DNA, 8 bp, Unknown
  misc_feature (1)..( 8): Result.003 file - promoters60/4768066
gaaagaaa

SEQ ID NO: 137279 - DNA, 8 bp, Unknown
  misc_feature (1)..( 8): Result.003 file - promoters60/4768066
gaaacaaa

SEQ ID NO: 137280 - DNA, 10 bp, Unknown
  misc_feature (1)..( 10): Result.003 file - promoters60/4768066
ggaaaagaaa

SEQ ID NO: 137281 - DNA, 10 bp, Unknown
  misc_feature (1)..( 10): Result.003 file - promoters60/4768066
ggaaatgaaa

SEQ ID NO: 137282 - DNA, 7 bp, Unknown
  misc_feature (1)..( 7): Result.003 file - promoters60/4768066
cccacta

SEQ ID NO: 137283 - DNA, 7 bp, Unknown
  misc_feature (1)..( 7): Result.003 file - promoters60/4768066
cccacta

SEQ ID NO: 137284 - DNA, 9 bp, Unknown
  misc_feature (1)..( 9): Result.003 file - promoters60/4768066
aaagaaaag

SEQ ID NO: 137285 - DNA, 9 bp, Unknown
  misc_feature (1)..( 9): Result.003 file - promoters60/4768066
aaagtaaag

SEQ ID NO: 137286 - DNA, 7 bp, Unknown
  misc_feature (1)..( 7): Result.003 file - promoters60/4768147
tcttttt

SEQ ID NO: 137287 - DNA, 7 bp, Unknown
  misc_feature (1)..( 7): Result.003 file - promoters60/4768147
tcttttt

SEQ ID NO: 137288 - DNA, 13 bp, Unknown
  misc_feature (1)..( 13): Result.003 file - promoters60/4768147
ctctactttctcc

SEQ ID NO: 137289 - DNA, 13 bp, Unknown
  misc_feature (1)..( 13): Result.003 file - promoters60/4768147
caataatttttcc

SEQ ID NO: 137290 - DNA, 13 bp, Unknown
  misc_feature (1)..( 13): Result.003 file - promoters60/4768147
ataatgtttgagt

SEQ ID NO: 137291 - DNA, 6 bp, Unknown
  misc_feature (1)..( 6): Result.003 file - promoters60/4768147
acattg

SEQ ID NO: 137292 - DNA, 6 bp, Unknown
  misc_feature (1)..( 6): Result.003 file - promoters60/4768147
acattg

SEQ ID NO: 137293 - DNA, 7 bp, Unknown
  misc_feature (1)..( 7): Result.003 file - promoters60/4768147
tattata

SEQ ID NO: 137294 - DNA, 7 bp, Unknown
  misc_feature (1)..( 7): Result.003 file - promoters60/4768147
tattatg

SEQ ID NO: 137295 - DNA, 7 bp, Unknown
  misc_feature (1)..( 7): Result.003 file - promoters60/4768147
tattata

SEQ ID NO: 137296 - DNA, 10 bp, Unknown
  misc_feature (1)..( 10): Result.003 file - promoters60/4768147
aaaacaataa

SEQ ID NO: 137297 - DNA, 10 bp, Unknown
  misc_feature (1)..( 10): Result.003 file - promoters60/4768147
taaataataa

SEQ ID NO: 137298 - DNA, 10 bp, Unknown
  misc_feature (1)..( 10): Result.003 file - promoters60/4768147
aaaacacaaa

SEQ ID NO: 137299 - DNA, 6 bp, Unknown
  misc_feature (1)..( 6): Result.003 file - promoters60/4768147
acttga

SEQ ID NO: 137300 - DNA, 6 bp, Unknown
  misc_feature (1)..( 6): Result.003 file - promoters60/4768147
acttga

SEQ ID NO: 137301 - DNA, 7 bp, Unknown
  misc_feature (1)..( 7): Result.003 file - promoters60/4768147
taggttg

SEQ ID NO: 137302 - DNA, 7 bp, Unknown
  misc_feature (1)..( 7): Result.003 file - promoters60/4768147
tagtttg

SEQ ID NO: 137303 - DNA, 6 bp, Unknown
  misc_feature (1)..( 6): Result.003 file - promoters60/4768147
attttt

SEQ ID NO: 137304 - DNA, 6 bp, Unknown
  misc_feature (1)..( 6): Result.003 file - promoters60/4768147
attttt

SEQ ID NO: 137305 - DNA, 7 bp, Unknown
  misc_feature (1)..( 7): Result.003 file - promoters60/4768147
caaaaaa

SEQ ID NO: 137306 - DNA, 7 bp, Unknown
  misc_feature (1)..( 7): Result.003 file - promoters60/4768147
caaaaaa

SEQ ID NO: 137307 - DNA, 8 bp, Unknown
  misc_feature (1)..( 8): Result.003 file - promoters60/4768147
tctcaaaa

SEQ ID NO: 137308 - DNA, 8 bp, Unknown
  misc_feature (1)..( 8): Result.003 file - promoters60/4768147
tctaaaaa

SEQ ID NO: 137309 - DNA, 7 bp, Unknown
  misc_feature (1)..( 7): Result.003 file - promoters60/4768147
atagata

SEQ ID NO: 137310 - DNA, 7 bp, Unknown
  misc_feature (1)..( 7): Result.003 file - promoters60/4768147
atatata

SEQ ID NO: 137311 - DNA, 7 bp, Unknown
  misc_feature (1)..( 7): Result.003 file - promoters60/4768147
atgtaat

SEQ ID NO: 137312 - DNA, 7 bp, Unknown
  misc_feature (1)..( 7): Result.003 file - promoters60/4768147
atggaat

SEQ ID NO: 137313 - DNA, 7 bp, Unknown
  misc_feature (1)..( 7): Result.003 file - promoters60/4768147
acctaat

SEQ ID NO: 137314 - DNA, 7 bp, Unknown
  misc_feature (1)..( 7): Result.003 file - promoters60/4768147
accaaat

SEQ ID NO: 137315 - DNA, 6 bp, Unknown
  misc_feature (1)..( 6): Result.003 file - promoters60/4768147
aaaaaa

SEQ ID NO: 137316 - DNA, 6 bp, Unknown
  misc_feature (1)..( 6): Result.003 file - promoters60/4768147
aaaaaa

SEQ ID NO: 137317 - DNA, 6 bp, Unknown
  misc_feature (1)..( 6): Result.003 file - promoters60/4768147
gtcaaa

SEQ ID NO: 137318 - DNA, 6 bp, Unknown
  misc_feature (1)..( 6): Result.003 file - promoters60/4768147
gtcaaa

SEQ ID NO: 137319 - DNA, 6 bp, Unknown
  misc_feature (1)..( 6): Result.003 file - promoters60/4768147
ggcgag

SEQ ID NO: 137320 - DNA, 6 bp, Unknown
  misc_feature (1)..( 6): Result.003 file - promoters60/4768147
ggcgag

SEQ ID NO: 137321 - DNA, 8 bp, Unknown
  misc_feature (1)..( 8): Result.003 file - promoters60/4768169
gttagaac

SEQ ID NO: 137322 - DNA, 8 bp, Unknown
  misc_feature (1)..( 8): Result.003 file - promoters60/4768169
gtttgaaa

SEQ ID NO: 137323 - DNA, 8 bp, Unknown
  misc_feature (1)..( 8): Result.003 file - promoters60/4768169
ttttcaaa

SEQ ID NO: 137324 - DNA, 6 bp, Unknown
  misc_feature (1)..( 6): Result.003 file - promoters60/4768169
aattca

SEQ ID NO: 137325 - DNA, 6 bp, Unknown
  misc_feature (1)..( 6): Result.003 file - promoters60/4768169
aattca

SEQ ID NO: 137326 - DNA, 7 bp, Unknown
  misc_feature (1)..( 7): Result.003 file - promoters60/4768169
tttctaa

SEQ ID NO: 137327 - DNA, 7 bp, Unknown
  misc_feature (1)..( 7): Result.003 file - promoters60/4768169
tttttaa

SEQ ID NO: 137328 - DNA, 9 bp, Unknown
  misc_feature (1)..( 9): Result.003 file - promoters60/4768169
ttaattttg

SEQ ID NO: 137329 - DNA, 9 bp, Unknown
  misc_feature (1)..( 9): Result.003 file - promoters60/4768169
ttaactttg

SEQ ID NO: 137330 - DNA, 8 bp, Unknown
  misc_feature (1)..( 8): Result.003 file - promoters60/4768169
tcatataa

SEQ ID NO: 137331 - DNA, 8 bp, Unknown
  misc_feature (1)..( 8): Result.003 file - promoters60/4768169
tcaaataa

SEQ ID NO: 137332 - DNA, 6 bp, Unknown
  misc_feature (1)..( 6): Result.003 file - promoters60/4768169
ttcttt

SEQ ID NO: 137333 - DNA, 6 bp, Unknown
  misc_feature (1)..( 6): Result.003 file - promoters60/4768169
ttcttt

SEQ ID NO: 137334 - DNA, 7 bp, Unknown
  misc_feature (1)..( 7): Result.003 file - promoters60/4768169
aacaaag

SEQ ID NO: 137335 - DNA, 7 bp, Unknown
  misc_feature (1)..( 7): Result.003 file - promoters60/4768169
aacaaag

SEQ ID NO: 137336 - DNA, 7 bp, Unknown
  misc_feature (1)..( 7): Result.003 file - promoters60/4768169
tatgtat

SEQ ID NO: 137337 - DNA, 7 bp, Unknown
  misc_feature (1)..( 7): Result.003 file - promoters60/4768169
tatatat

SEQ ID NO: 137338 - DNA, 7 bp, Unknown
  misc_feature (1)..( 7): Result.003 file - promoters60/4768169
aaatcag

SEQ ID NO: 137339 - DNA, 7 bp, Unknown
  misc_feature (1)..( 7): Result.003 file - promoters60/4768169
aaaccag

SEQ ID NO: 137340 - DNA, 7 bp, Unknown
  misc_feature (1)..( 7): Result.003 file - promoters60/4768169
gaataaa

SEQ ID NO: 137341 - DNA, 7 bp, Unknown
  misc_feature (1)..( 7): Result.003 file - promoters60/4768169
gaaaaaa

SEQ ID NO: 137342 - DNA, 7 bp, Unknown
  misc_feature (1)..( 7): Result.003 file - promoters60/4768169
acctcat

SEQ ID NO: 137343 - DNA, 7 bp, Unknown
  misc_feature (1)..( 7): Result.003 file - promoters60/4768169
accacat

SEQ ID NO: 137344 - DNA, 7 bp, Unknown
  misc_feature (1)..( 7): Result.003 file - promoters60/4768169
aaaagat

SEQ ID NO: 137345 - DNA, 7 bp, Unknown
  misc_feature (1)..( 7): Result.003 file - promoters60/4768169
aaatgat

SEQ ID NO: 137346 - DNA, 6 bp, Unknown
  misc_feature (1)..( 6): Result.003 file - promoters60/4768169
tgtgga

SEQ ID NO: 137347 - DNA, 6 bp, Unknown
  misc_feature (1)..( 6): Result.003 file - promoters60/4768169
tgtgga

SEQ ID NO: 137348 - DNA, 7 bp, Unknown
  misc_feature (1)..( 7): Result.003 file - promoters60/4768169
gaatttg

SEQ ID NO: 137349 - DNA, 7 bp, Unknown
  misc_feature (1)..( 7): Result.003 file - promoters60/4768169
gaaattg

SEQ ID NO: 137350 - DNA, 9 bp, Unknown
  misc_feature (1)..( 9): Result.003 file - promoters60/4768169
aaactgtat

SEQ ID NO: 137351 - DNA, 9 bp, Unknown
  misc_feature (1)..( 9): Result.003 file - promoters60/4768169
aaactatat

SEQ ID NO: 137352 - DNA, 8 bp, Unknown
  misc_feature (1)..( 8): Result.003 file - promoters60/4768169
ttgacaaa

SEQ ID NO: 137353 - DNA, 8 bp, Unknown
  misc_feature (1)..( 8): Result.003 file - promoters60/4768169
ttggcaaa

SEQ ID NO: 137354 - DNA, 6 bp, Unknown
  misc_feature (1)..( 6): Result.003 file - promoters60/4768169
aaagtt

SEQ ID NO: 137355 - DNA, 6 bp, Unknown
  misc_feature (1)..( 6): Result.003 file - promoters60/4768169
aaagtt

SEQ ID NO: 137356 - DNA, 7 bp, Unknown
  misc_feature (1)..( 7): Result.003 file - promoters60/4768169
tatggac

SEQ ID NO: 137357 - DNA, 7 bp, Unknown
  misc_feature (1)..( 7): Result.003 file - promoters60/4768169
tatggac

SEQ ID NO: 137358 - DNA, 8 bp, Unknown
  misc_feature (1)..( 8): Result.003 file - promoters60/4768169
aaatttct

SEQ ID NO: 137359 - DNA, 8 bp, Unknown
  misc_feature (1)..( 8): Result.003 file - promoters60/4768169
aaatatct

SEQ ID NO: 137360 - DNA, 6 bp, Unknown
  misc_feature (1)..( 6): Result.003 file - promoters60/4768169
tttaaa

SEQ ID NO: 137361 - DNA, 6 bp, Unknown
  misc_feature (1)..( 6): Result.003 file - promoters60/4768169
tttaaa

SEQ ID NO: 137362 - DNA, 9 bp, Unknown
  misc_feature (1)..( 9): Result.003 file - promoters60/4768169
attttctga

SEQ ID NO: 137363 - DNA, 9 bp, Unknown
  misc_feature (1)..( 9): Result.003 file - promoters60/4768169
attttctga

SEQ ID NO: 137364 - DNA, 7 bp, Unknown
  misc_feature (1)..( 7): Result.003 file - promoters60/4768169
gttttca

SEQ ID NO: 137365 - DNA, 7 bp, Unknown
  misc_feature (1)..( 7): Result.003 file - promoters60/4768169
gttttca

SEQ ID NO: 137366 - DNA, 8 bp, Unknown
  misc_feature (1)..( 8): Result.003 file - promoters60/4768198
ttttagct

SEQ ID NO: 137367 - DNA, 8 bp, Unknown
  misc_feature (1)..( 8): Result.003 file - promoters60/4768198
atttcgct

SEQ ID NO: 137368 - DNA, 8 bp, Unknown
  misc_feature (1)..( 8): Result.003 file - promoters60/4768198
ttttagtt

SEQ ID NO: 137369 - DNA, 10 bp, Unknown
  misc_feature (1)..( 10): Result.003 file - promoters60/4768198
ttaaaattta

SEQ ID NO: 137370 - DNA, 10 bp, Unknown
  misc_feature (1)..( 10): Result.003 file - promoters60/4768198
ctaacattta

SEQ ID NO: 137371 - DNA, 10 bp, Unknown
  misc_feature (1)..( 10): Result.003 file - promoters60/4768198
ttaaaatagt

SEQ ID NO: 137372 - DNA, 7 bp, Unknown
  misc_feature (1)..( 7): Result.003 file - promoters60/4768198
tagtgat

SEQ ID NO: 137373 - DNA, 7 bp, Unknown
  misc_feature (1)..( 7): Result.003 file - promoters60/4768198
tagtgat

SEQ ID NO: 137374 - DNA, 6 bp, Unknown
  misc_feature (1)..( 6): Result.003 file - promoters60/4768198
caaaaa

SEQ ID NO: 137375 - DNA, 6 bp, Unknown
  misc_feature (1)..( 6): Result.003 file - promoters60/4768198
caaaaa

SEQ ID NO: 137376 - DNA, 7 bp, Unknown
  misc_feature (1)..( 7): Result.003 file - promoters60/4768198
gaagact

SEQ ID NO: 137377 - DNA, 7 bp, Unknown
  misc_feature (1)..( 7): Result.003 file - promoters60/4768198
gaaaact

SEQ ID NO: 137378 - DNA, 6 bp, Unknown
  misc_feature (1)..( 6): Result.003 file - promoters60/4768198
atgaaa

SEQ ID NO: 137379 - DNA, 6 bp, Unknown
  misc_feature (1)..( 6): Result.003 file - promoters60/4768198
atgaaa

SEQ ID NO: 137380 - DNA, 11 bp, Unknown
  misc_feature (1)..( 11): Result.003 file - promoters60/4768198
aatcaatggtt

SEQ ID NO: 137381 - DNA, 11 bp, Unknown
  misc_feature (1)..( 11): Result.003 file - promoters60/4768198
acacaatggaa

SEQ ID NO: 137382 - DNA, 11 bp, Unknown
  misc_feature (1)..( 11): Result.003 file - promoters60/4768198
aatcaattgtt

SEQ ID NO: 137383 - DNA, 9 bp, Unknown
  misc_feature (1)..( 9): Result.003 file - promoters60/4768198
cttcaaatc

SEQ ID NO: 137384 - DNA, 9 bp, Unknown
  misc_feature (1)..( 9): Result.003 file - promoters60/4768198
tgtcaaatt

SEQ ID NO: 137385 - DNA, 9 bp, Unknown
  misc_feature (1)..( 9): Result.003 file - promoters60/4768198
tgtcatatt

SEQ ID NO: 137386 - DNA, 9 bp, Unknown
  misc_feature (1)..( 9): Result.003 file - promoters60/4768198
tttatagtt

SEQ ID NO: 137387 - DNA, 9 bp, Unknown
  misc_feature (1)..( 9): Result.003 file - promoters60/4768198
tttttagtt

SEQ ID NO: 137388 - DNA, 9 bp, Unknown
  misc_feature (1)..( 9): Result.003 file - promoters60/4768198
tttctagtc

SEQ ID NO: 137389 - DNA, 8 bp, Unknown
  misc_feature (1)..( 8): Result.003 file - promoters60/4768198
actcaaat

SEQ ID NO: 137390 - DNA, 8 bp, Unknown
  misc_feature (1)..( 8): Result.003 file - promoters60/4768198
actcaaat

SEQ ID NO: 137391 - DNA, 6 bp, Unknown
  misc_feature (1)..( 6): Result.003 file - promoters60/4768198
attaaa

SEQ ID NO: 137392 - DNA, 6 bp, Unknown
  misc_feature (1)..( 6): Result.003 file - promoters60/4768198
attaaa

SEQ ID NO: 137393 - DNA, 6 bp, Unknown
  misc_feature (1)..( 6): Result.003 file - promoters60/4768198
aaatta

SEQ ID NO: 137394 - DNA, 6 bp, Unknown
  misc_feature (1)..( 6): Result.003 file - promoters60/4768198
aaatta

SEQ ID NO: 137395 - DNA, 7 bp, Unknown
  misc_feature (1)..( 7): Result.003 file - promoters60/4768198
aaagaag

SEQ ID NO: 137396 - DNA, 7 bp, Unknown
  misc_feature (1)..( 7): Result.003 file - promoters60/4768198
aaagaag

SEQ ID NO: 137397 - DNA, 9 bp, Unknown
  misc_feature (1)..( 9): Result.003 file - promoters60/4768198
tcttttatt

SEQ ID NO: 137398 - DNA, 9 bp, Unknown
  misc_feature (1)..( 9): Result.003 file - promoters60/4768198
tcttctatt

SEQ ID NO: 137399 - DNA, 7 bp, Unknown
  misc_feature (1)..( 7): Result.003 file - promoters60/4768198
cttgaga

SEQ ID NO: 137400 - DNA, 7 bp, Unknown
  misc_feature (1)..( 7): Result.003 file - promoters60/4768198
ctttaga

SEQ ID NO: 137401 - DNA, 6 bp, Unknown
  misc_feature (1)..( 6): Result.003 file - promoters60/4768198
ggtttt

SEQ ID NO: 137402 - DNA, 6 bp, Unknown
  misc_feature (1)..( 6): Result.003 file - promoters60/4768198
ggtttt

SEQ ID NO: 137403 - DNA, 7 bp, Unknown
  misc_feature (1)..( 7): Result.003 file - promoters60/4768198
attgttt

SEQ ID NO: 137404 - DNA, 7 bp, Unknown
  misc_feature (1)..( 7): Result.003 file - promoters60/4768198
attgttt

SEQ ID NO: 137405 - DNA, 7 bp, Unknown
  misc_feature (1)..( 7): Result.003 file - promoters60/4768198
aatatta

SEQ ID NO: 137406 - DNA, 7 bp, Unknown
  misc_feature (1)..( 7): Result.003 file - promoters60/4768198
aatgtta

SEQ ID NO: 137407 - DNA, 7 bp, Unknown
  misc_feature (1)..( 7): Result.003 file - promoters60/4768198
gcaatgt

SEQ ID NO: 137408 - DNA, 7 bp, Unknown
  misc_feature (1)..( 7): Result.003 file - promoters60/4768198
gcaatgt

SEQ ID NO: 137409 - DNA, 12 bp, Unknown
  misc_feature (1)..( 12): Result.003 file - promoters60/4768209
gattttgtctat

SEQ ID NO: 137410 - DNA, 12 bp, Unknown
  misc_feature (1)..( 12): Result.003 file - promoters60/4768209
gatgttgtttat

SEQ ID NO: 137411 - DNA, 12 bp, Unknown
  misc_feature (1)..( 12): Result.003 file - promoters60/4768209
tgagttattttc

SEQ ID NO: 137412 - DNA, 12 bp, Unknown
  misc_feature (1)..( 12): Result.003 file - promoters60/4768209
gatttaatttat

SEQ ID NO: 137413 - DNA, 12 bp, Unknown
  misc_feature (1)..( 12): Result.003 file - promoters60/4768217
ttaccattgaaa

SEQ ID NO: 137414 - DNA, 12 bp, Unknown
  misc_feature (1)..( 12): Result.003 file - promoters60/4768217
acccaattgaac

SEQ ID NO: 137415 - DNA, 12 bp, Unknown
  misc_feature (1)..( 12): Result.003 file - promoters60/4768217
gattttttgaaa

SEQ ID NO: 137416 - DNA, 12 bp, Unknown
  misc_feature (1)..( 12): Result.003 file - promoters60/4768217
taaccgttgagc

SEQ ID NO: 137417 - DNA, 12 bp, Unknown
  misc_feature (1)..( 12): Result.003 file - promoters60/4768217
gagcccttgaaa

SEQ ID NO: 137418 - DNA, 12 bp, Unknown
  misc_feature (1)..( 12): Result.003 file - promoters60/4768217
taatcgttaatt

SEQ ID NO: 137419 - DNA, 12 bp, Unknown
  misc_feature (1)..( 12): Result.003 file - promoters60/4768236
tccaaaaaagaa

SEQ ID NO: 137420 - DNA, 12 bp, Unknown
  misc_feature (1)..( 12): Result.003 file - promoters60/4768236
agcaaaaatgaa

SEQ ID NO: 137421 - DNA, 12 bp, Unknown
  misc_feature (1)..( 12): Result.003 file - promoters60/4768236
tcctaaaaacat

SEQ ID NO: 137422 - DNA, 12 bp, Unknown
  misc_feature (1)..( 12): Result.003 file - promoters60/4768236
tataaaaaaata

SEQ ID NO: 137423 - DNA, 12 bp, Unknown
  misc_feature (1)..( 12): Result.003 file - promoters60/4768236
atctagaaattc

SEQ ID NO: 137424 - DNA, 11 bp, Unknown
  misc_feature (1)..( 11): Result.003 file - promoters60/4768236
ttataaacccc

SEQ ID NO: 137425 - DNA, 11 bp, Unknown
  misc_feature (1)..( 11): Result.003 file - promoters60/4768236
aaatacaccca

SEQ ID NO: 137426 - DNA, 11 bp, Unknown
  misc_feature (1)..( 11): Result.003 file - promoters60/4768236
ctaaaaacatt

SEQ ID NO: 137427 - DNA, 11 bp, Unknown
  misc_feature (1)..( 11): Result.003 file - promoters60/4768236
ctagaaattct

SEQ ID NO: 137428 - DNA, 11 bp, Unknown
  misc_feature (1)..( 11): Result.003 file - promoters60/4768236
aaaaaaatatt

SEQ ID NO: 137429 - DNA, 7 bp, Unknown
  misc_feature (1)..( 7): Result.003 file - promoters60/4768236
aaaattc

SEQ ID NO: 137430 - DNA, 7 bp, Unknown
  misc_feature (1)..( 7): Result.003 file - promoters60/4768236
taaattc

SEQ ID NO: 137431 - DNA, 7 bp, Unknown
  misc_feature (1)..( 7): Result.003 file - promoters60/4768236
taatttc

SEQ ID NO: 137432 - DNA, 7 bp, Unknown
  misc_feature (1)..( 7): Result.003 file - promoters60/4768236
caatttc

SEQ ID NO: 137433 - DNA, 12 bp, Unknown
  misc_feature (1)..( 12): Result.003 file - promoters60/4768236
gatacatattag

SEQ ID NO: 137434 - DNA, 12 bp, Unknown
  misc_feature (1)..( 12): Result.003 file - promoters60/4768236
aataaatatcaa

SEQ ID NO: 137435 - DNA, 12 bp, Unknown
  misc_feature (1)..( 12): Result.003 file - promoters60/4768236
aattaatagcaa

SEQ ID NO: 137436 - DNA, 12 bp, Unknown
  misc_feature (1)..( 12): Result.003 file - promoters60/4768236
aattaacttcat

SEQ ID NO: 137437 - DNA, 11 bp, Unknown
  misc_feature (1)..( 11): Result.003 file - promoters60/4768236
aaagaaattat

SEQ ID NO: 137438 - DNA, 11 bp, Unknown
  misc_feature (1)..( 11): Result.003 file - promoters60/4768236
ctagaaattct

SEQ ID NO: 137439 - DNA, 11 bp, Unknown
  misc_feature (1)..( 11): Result.003 file - promoters60/4768236
taaaaaaatat

SEQ ID NO: 137440 - DNA, 11 bp, Unknown
  misc_feature (1)..( 11): Result.003 file - promoters60/4768236
agcaaaaatga

SEQ ID NO: 137441 - DNA, 11 bp, Unknown
  misc_feature (1)..( 11): Result.003 file - promoters60/4768236
ctaaaaacatt

SEQ ID NO: 137442 - DNA, 9 bp, Unknown
  misc_feature (1)..( 9): Result.003 file - promoters60/4768236
aagtcaaaa

SEQ ID NO: 137443 - DNA, 9 bp, Unknown
  misc_feature (1)..( 9): Result.003 file - promoters60/4768236
atttcaaaa

SEQ ID NO: 137444 - DNA, 9 bp, Unknown
  misc_feature (1)..( 9): Result.003 file - promoters60/4768236
aagacaaaa

SEQ ID NO: 137445 - DNA, 9 bp, Unknown
  misc_feature (1)..( 9): Result.003 file - promoters60/4768236
tagaaaaaa

SEQ ID NO: 137446 - DNA, 11 bp, Unknown
  misc_feature (1)..( 11): Result.003 file - promoters60/4768236
catttaaatca

SEQ ID NO: 137447 - DNA, 11 bp, Unknown
  misc_feature (1)..( 11): Result.003 file - promoters60/4768236
cattaaaatat

SEQ ID NO: 137448 - DNA, 11 bp, Unknown
  misc_feature (1)..( 11): Result.003 file - promoters60/4768236
atgaaaaataa

SEQ ID NO: 137449 - DNA, 12 bp, Unknown
  misc_feature (1)..( 12): Result.003 file - promoters60/4768236
agccaaaactaa

SEQ ID NO: 137450 - DNA, 10 bp, Unknown
  misc_feature (1)..( 10): Result.003 file - promoters60/4768236
aaattttaca

SEQ ID NO: 137451 - DNA, 10 bp, Unknown
  misc_feature (1)..( 10): Result.003 file - promoters60/4768236
ctattttatt

SEQ ID NO: 137452 - DNA, 10 bp, Unknown
  misc_feature (1)..( 10): Result.003 file - promoters60/4768236
ctatcttata

SEQ ID NO: 137453 - DNA, 10 bp, Unknown
  misc_feature (1)..( 10): Result.003 file - promoters60/4768236
taattatatt

SEQ ID NO: 137454 - DNA, 6 bp, Unknown
  misc_feature (1)..( 6): Result.003 file - promoters60/4768239
ctttta

SEQ ID NO: 137455 - DNA, 6 bp, Unknown
  misc_feature (1)..( 6): Result.003 file - promoters60/4768239
ctttta

SEQ ID NO: 137456 - DNA, 10 bp, Unknown
  misc_feature (1)..( 10): Result.003 file - promoters60/4768239
aaatattata

SEQ ID NO: 137457 - DNA, 10 bp, Unknown
  misc_feature (1)..( 10): Result.003 file - promoters60/4768239
aaaaattcag

SEQ ID NO: 137458 - DNA, 10 bp, Unknown
  misc_feature (1)..( 10): Result.003 file - promoters60/4768239
gaatatgata

SEQ ID NO: 137459 - DNA, 7 bp, Unknown
  misc_feature (1)..( 7): Result.003 file - promoters60/4768239
acaaata

SEQ ID NO: 137460 - DNA, 7 bp, Unknown
  misc_feature (1)..( 7): Result.003 file - promoters60/4768239
acaaatg

SEQ ID NO: 137461 - DNA, 7 bp, Unknown
  misc_feature (1)..( 7): Result.003 file - promoters60/4768239
gcaaata

SEQ ID NO: 137462 - DNA, 8 bp, Unknown
  misc_feature (1)..( 8): Result.003 file - promoters60/4768239
atcgtttg

SEQ ID NO: 137463 - DNA, 8 bp, Unknown
  misc_feature (1)..( 8): Result.003 file - promoters60/4768239
atcctttg

SEQ ID NO: 137464 - DNA, 6 bp, Unknown
  misc_feature (1)..( 6): Result.003 file - promoters60/4768239
atttga

SEQ ID NO: 137465 - DNA, 6 bp, Unknown
  misc_feature (1)..( 6): Result.003 file - promoters60/4768239
atttga

SEQ ID NO: 137466 - DNA, 9 bp, Unknown
  misc_feature (1)..( 9): Result.003 file - promoters60/4768239
gatgctttg

SEQ ID NO: 137467 - DNA, 9 bp, Unknown
  misc_feature (1)..( 9): Result.003 file - promoters60/4768239
gattctttg

SEQ ID NO: 137468 - DNA, 9 bp, Unknown
  misc_feature (1)..( 9): Result.003 file - promoters60/4768239
cattttttc

SEQ ID NO: 137469 - DNA, 7 bp, Unknown
  misc_feature (1)..( 7): Result.003 file - promoters60/4768239
tattata

SEQ ID NO: 137470 - DNA, 7 bp, Unknown
  misc_feature (1)..( 7): Result.003 file - promoters60/4768239
tatgata

SEQ ID NO: 137471 - DNA, 10 bp, Unknown
  misc_feature (1)..( 10): Result.003 file - promoters60/4768239
agattagcta

SEQ ID NO: 137472 - DNA, 10 bp, Unknown
  misc_feature (1)..( 10): Result.003 file - promoters60/4768239
agattagcta

SEQ ID NO: 137473 - DNA, 6 bp, Unknown
  misc_feature (1)..( 6): Result.003 file - promoters60/4768239
tgtttt

SEQ ID NO: 137474 - DNA, 6 bp, Unknown
  misc_feature (1)..( 6): Result.003 file - promoters60/4768239
tgtttt

SEQ ID NO: 137475 - DNA, 6 bp, Unknown
  misc_feature (1)..( 6): Result.003 file - promoters60/4768239
ttttat

SEQ ID NO: 137476 - DNA, 6 bp, Unknown
  misc_feature (1)..( 6): Result.003 file - promoters60/4768239
ttttat

SEQ ID NO: 137477 - DNA, 7 bp, Unknown
  misc_feature (1)..( 7): Result.003 file - promoters60/4768239
taataat

SEQ ID NO: 137478 - DNA, 7 bp, Unknown
  misc_feature (1)..( 7): Result.003 file - promoters60/4768239
taacaat

SEQ ID NO: 137479 - DNA, 8 bp, Unknown
  misc_feature (1)..( 8): Result.003 file - promoters60/4768239
gtcctatt

SEQ ID NO: 137480 - DNA, 8 bp, Unknown
  misc_feature (1)..( 8): Result.003 file - promoters60/4768239
gtccgatt

SEQ ID NO: 137481 - DNA, 7 bp, Unknown
  misc_feature (1)..( 7): Result.003 file - promoters60/4768239
tatatat

SEQ ID NO: 137482 - DNA, 7 bp, Unknown
  misc_feature (1)..( 7): Result.003 file - promoters60/4768239
tatttat

SEQ ID NO: 137483 - DNA, 8 bp, Unknown
  misc_feature (1)..( 8): Result.003 file - promoters60/4768250
ttttaata

SEQ ID NO: 137484 - DNA, 8 bp, Unknown
  misc_feature (1)..( 8): Result.003 file - promoters60/4768250
atttaatt

SEQ ID NO: 137485 - DNA, 9 bp, Unknown
  misc_feature (1)..( 9): Result.003 file - promoters60/4768250
tttgtaatt

SEQ ID NO: 137486 - DNA, 9 bp, Unknown
  misc_feature (1)..( 9): Result.003 file - promoters60/4768250
gatttaaag

SEQ ID NO: 137487 - DNA, 9 bp, Unknown
  misc_feature (1)..( 9): Result.003 file - promoters60/4768250
actttaaaa

SEQ ID NO: 137488 - DNA, 9 bp, Unknown
  misc_feature (1)..( 9): Result.003 file - promoters60/4768250
tgtttgatt

SEQ ID NO: 137489 - DNA, 11 bp, Unknown
  misc_feature (1)..( 11): Result.003 file - promoters60/4768250
atttaaagcta

SEQ ID NO: 137490 - DNA, 11 bp, Unknown
  misc_feature (1)..( 11): Result.003 file - promoters60/4768250
attaaaagaaa

SEQ ID NO: 137491 - DNA, 11 bp, Unknown
  misc_feature (1)..( 11): Result.003 file - promoters60/4768250
cttaaataata

SEQ ID NO: 137492 - DNA, 11 bp, Unknown
  misc_feature (1)..( 11): Result.003 file - promoters60/4768250
ctaaaataata

SEQ ID NO: 137493 - DNA, 11 bp, Unknown
  misc_feature (1)..( 11): Result.003 file - promoters60/4768250
cctaacagaat

SEQ ID NO: 137494 - DNA, 11 bp, Unknown
  misc_feature (1)..( 11): Result.003 file - promoters60/4768250
aagaaaaaaat

SEQ ID NO: 137495 - DNA, 12 bp, Unknown
  misc_feature (1)..( 12): Result.003 file - promoters60/4768250
agtaataatatt

SEQ ID NO: 137496 - DNA, 12 bp, Unknown
  misc_feature (1)..( 12): Result.003 file - promoters60/4768250
caaaattatatc

SEQ ID NO: 137497 - DNA, 12 bp, Unknown
  misc_feature (1)..( 12): Result.003 file - promoters60/4768250
ttatacaatatt

SEQ ID NO: 137498 - DNA, 12 bp, Unknown
  misc_feature (1)..( 12): Result.003 file - promoters60/4768250
caaacttatcca

SEQ ID NO: 137499 - DNA, 12 bp, Unknown
  misc_feature (1)..( 12): Result.003 file - promoters60/4768250
aaaactttaaaa

SEQ ID NO: 137500 - DNA, 12 bp, Unknown
  misc_feature (1)..( 12): Result.003 file - promoters60/4768250
cgaatcaatatg

SEQ ID NO: 137501 - DNA, 9 bp, Unknown
  misc_feature (1)..( 9): Result.003 file - promoters60/4768250
caagattta

SEQ ID NO: 137502 - DNA, 9 bp, Unknown
  misc_feature (1)..( 9): Result.003 file - promoters60/4768250
caaaattat

SEQ ID NO: 137503 - DNA, 9 bp, Unknown
  misc_feature (1)..( 9): Result.003 file - promoters60/4768250
caaacttat

SEQ ID NO: 137504 - DNA, 9 bp, Unknown
  misc_feature (1)..( 9): Result.003 file - promoters60/4768250
aaaacttta

SEQ ID NO: 137505 - DNA, 9 bp, Unknown
  misc_feature (1)..( 9): Result.003 file - promoters60/4768250
caatatttg

SEQ ID NO: 137506 - DNA, 9 bp, Unknown
  misc_feature (1)..( 9): Result.003 file - promoters60/4768250
caatatgtg

SEQ ID NO: 137507 - DNA, 13 bp, Unknown
  misc_feature (1)..( 13): Result.003 file - promoters60/4768250
ggtagaaaaacct

SEQ ID NO: 137508 - DNA, 13 bp, Unknown
  misc_feature (1)..( 13): Result.003 file - promoters60/4768250
gatacaaaaccct

SEQ ID NO: 137509 - DNA, 13 bp, Unknown
  misc_feature (1)..( 13): Result.003 file - promoters60/4768250
agaagaaaaaaat

SEQ ID NO: 137510 - DNA, 13 bp, Unknown
  misc_feature (1)..( 13): Result.003 file - promoters60/4768250
tttctaaaataat

SEQ ID NO: 137511 - DNA, 13 bp, Unknown
  misc_feature (1)..( 13): Result.003 file - promoters60/4768250
tttataatatata

SEQ ID NO: 137512 - DNA, 11 bp, Unknown
  misc_feature (1)..( 11): Result.003 file - promoters60/4768250
ttaaataatac

SEQ ID NO: 137513 - DNA, 11 bp, Unknown
  misc_feature (1)..( 11): Result.003 file - promoters60/4768250
gaaaaaaattc

SEQ ID NO: 137514 - DNA, 11 bp, Unknown
  misc_feature (1)..( 11): Result.003 file - promoters60/4768250
ttaattaaaag

SEQ ID NO: 137515 - DNA, 11 bp, Unknown
  misc_feature (1)..( 11): Result.003 file - promoters60/4768250
taaaataatat

SEQ ID NO: 137516 - DNA, 11 bp, Unknown
  misc_feature (1)..( 11): Result.003 file - promoters60/4768250
cagaataaaaa

SEQ ID NO: 137517 - DNA, 6 bp, Unknown
  misc_feature (1)..( 6): Result.003 file - promoters60/4768253
agattc

SEQ ID NO: 137518 - DNA, 6 bp, Unknown
  misc_feature (1)..( 6): Result.003 file - promoters60/4768253
agattc

SEQ ID NO: 137519 - DNA, 8 bp, Unknown
  misc_feature (1)..( 8): Result.003 file - promoters60/4768253
tcccatga

SEQ ID NO: 137520 - DNA, 8 bp, Unknown
  misc_feature (1)..( 8): Result.003 file - promoters60/4768253
tccgatga

SEQ ID NO: 137521 - DNA, 6 bp, Unknown
  misc_feature (1)..( 6): Result.003 file - promoters60/4768253
tcttct

SEQ ID NO: 137522 - DNA, 6 bp, Unknown
  misc_feature (1)..( 6): Result.003 file - promoters60/4768253
tcttct

SEQ ID NO: 137523 - DNA, 6 bp, Unknown
  misc_feature (1)..( 6): Result.003 file - promoters60/4768253
gaaaaa

SEQ ID NO: 137524 - DNA, 6 bp, Unknown
  misc_feature (1)..( 6): Result.003 file - promoters60/4768253
gaaaaa

SEQ ID NO: 137525 - DNA, 6 bp, Unknown
  misc_feature (1)..( 6): Result.003 file - promoters60/4768253
ataaat

SEQ ID NO: 137526 - DNA, 6 bp, Unknown
  misc_feature (1)..( 6): Result.003 file - promoters60/4768253
ataaat

SEQ ID NO: 137527 - DNA, 7 bp, Unknown
  misc_feature (1)..( 7): Result.003 file - promoters60/4768253
taataat

SEQ ID NO: 137528 - DNA, 7 bp, Unknown
  misc_feature (1)..( 7): Result.003 file - promoters60/4768253
taaaaat

SEQ ID NO: 137529 - DNA, 8 bp, Unknown
  misc_feature (1)..( 8): Result.003 file - promoters60/4768253
aagacaaa

SEQ ID NO: 137530 - DNA, 8 bp, Unknown
  misc_feature (1)..( 8): Result.003 file - promoters60/4768253
aagaaaaa

SEQ ID NO: 137531 - DNA, 7 bp, Unknown
  misc_feature (1)..( 7): Result.003 file - promoters60/4768253
gaactca

SEQ ID NO: 137532 - DNA, 7 bp, Unknown
  misc_feature (1)..( 7): Result.003 file - promoters60/4768253
gaactca

SEQ ID NO: 137533 - DNA, 7 bp, Unknown
  misc_feature (1)..( 7): Result.003 file - promoters60/4768253
attttct

SEQ ID NO: 137534 - DNA, 7 bp, Unknown
  misc_feature (1)..( 7): Result.003 file - promoters60/4768253
attgtct

SEQ ID NO: 137535 - DNA, 6 bp, Unknown
  misc_feature (1)..( 6): Result.003 file - promoters60/4768253
aagaaa

SEQ ID NO: 137536 - DNA, 6 bp, Unknown
  misc_feature (1)..( 6): Result.003 file - promoters60/4768253
aagaaa

SEQ ID NO: 137537 - DNA, 8 bp, Unknown
  misc_feature (1)..( 8): Result.003 file - promoters60/4768253
ggcccatt

SEQ ID NO: 137538 - DNA, 8 bp, Unknown
  misc_feature (1)..( 8): Result.003 file - promoters60/4768253
ggccgatt

SEQ ID NO: 137539 - DNA, 7 bp, Unknown
  misc_feature (1)..( 7): Result.003 file - promoters60/4768253
agtctcc

SEQ ID NO: 137540 - DNA, 7 bp, Unknown
  misc_feature (1)..( 7): Result.003 file - promoters60/4768253
agtctcc

SEQ ID NO: 137541 - DNA, 10 bp, Unknown
  misc_feature (1)..( 10): Result.003 file - promoters60/4768265
ataaatgtgt

SEQ ID NO: 137542 - DNA, 10 bp, Unknown
  misc_feature (1)..( 10): Result.003 file - promoters60/4768265
aagaatttgt

SEQ ID NO: 137543 - DNA, 10 bp, Unknown
  misc_feature (1)..( 10): Result.003 file - promoters60/4768265
ttaaatgtat

SEQ ID NO: 137544 - DNA, 10 bp, Unknown
  misc_feature (1)..( 10): Result.003 file - promoters60/4768265
cctaatttgc

SEQ ID NO: 137545 - DNA, 10 bp, Unknown
  misc_feature (1)..( 10): Result.003 file - promoters60/4768265
agaaattgcg

SEQ ID NO: 137546 - DNA, 10 bp, Unknown
  misc_feature (1)..( 10): Result.003 file - promoters60/4768265
ctgaattgca

SEQ ID NO: 137547 - DNA, 12 bp, Unknown
  misc_feature (1)..( 12): Result.003 file - promoters60/4768265
gtcaagtttgag

SEQ ID NO: 137548 - DNA, 12 bp, Unknown
  misc_feature (1)..( 12): Result.003 file - promoters60/4768265
atcaattttgct

SEQ ID NO: 137549 - DNA, 12 bp, Unknown
  misc_feature (1)..( 12): Result.003 file - promoters60/4768265
gaagagtctgat

SEQ ID NO: 137550 - DNA, 12 bp, Unknown
  misc_feature (1)..( 12): Result.003 file - promoters60/4768265
atcatttttttc

SEQ ID NO: 137551 - DNA, 12 bp, Unknown
  misc_feature (1)..( 12): Result.003 file - promoters60/4768265
aataatttattt

SEQ ID NO: 137552 - DNA, 12 bp, Unknown
  misc_feature (1)..( 12): Result.003 file - promoters60/4768265
gacgagcctgat

SEQ ID NO: 137553 - DNA, 6 bp, Unknown
  misc_feature (1)..( 6): Result.003 file - promoters60/4768269
attcac

SEQ ID NO: 137554 - DNA, 6 bp, Unknown
  misc_feature (1)..( 6): Result.003 file - promoters60/4768269
attcac

SEQ ID NO: 137555 - DNA, 7 bp, Unknown
  misc_feature (1)..( 7): Result.003 file - promoters60/4768269
acaaata

SEQ ID NO: 137556 - DNA, 7 bp, Unknown
  misc_feature (1)..( 7): Result.003 file - promoters60/4768269
ccaaata

SEQ ID NO: 137557 - DNA, 7 bp, Unknown
  misc_feature (1)..( 7): Result.003 file - promoters60/4768269
acaaatg

SEQ ID NO: 137558 - DNA, 8 bp, Unknown
  misc_feature (1)..( 8): Result.003 file - promoters60/4768269
ataataat

SEQ ID NO: 137559 - DNA, 8 bp, Unknown
  misc_feature (1)..( 8): Result.003 file - promoters60/4768269
ataacaat

SEQ ID NO: 137560 - DNA, 6 bp, Unknown
  misc_feature (1)..( 6): Result.003 file - promoters60/4768269
ctttca

SEQ ID NO: 137561 - DNA, 6 bp, Unknown
  misc_feature (1)..( 6): Result.003 file - promoters60/4768269
ctttca

SEQ ID NO: 137562 - DNA, 6 bp, Unknown
  misc_feature (1)..( 6): Result.003 file - promoters60/4768269
aataac

SEQ ID NO: 137563 - DNA, 6 bp, Unknown
  misc_feature (1)..( 6): Result.003 file - promoters60/4768269
aataac

SEQ ID NO: 137564 - DNA, 7 bp, Unknown
  misc_feature (1)..( 7): Result.003 file - promoters60/4768269
aaagaat

SEQ ID NO: 137565 - DNA, 7 bp, Unknown
  misc_feature (1)..( 7): Result.003 file - promoters60/4768269
aaacaat

SEQ ID NO: 137566 - DNA, 11 bp, Unknown
  misc_feature (1)..( 11): Result.003 file - promoters60/4768269
agtttttttgc

SEQ ID NO: 137567 - DNA, 11 bp, Unknown
  misc_feature (1)..( 11): Result.003 file - promoters60/4768269
agttattttgc

SEQ ID NO: 137568 - DNA, 7 bp, Unknown
  misc_feature (1)..( 7): Result.003 file - promoters60/4768269
tctgtga

SEQ ID NO: 137569 - DNA, 7 bp, Unknown
  misc_feature (1)..( 7): Result.003 file - promoters60/4768269
tctgtga

SEQ ID NO: 137570 - DNA, 7 bp, Unknown
  misc_feature (1)..( 7): Result.003 file - promoters60/4768269
ttttgta

SEQ ID NO: 137571 - DNA, 7 bp, Unknown
  misc_feature (1)..( 7): Result.003 file - promoters60/4768269
tttggta

SEQ ID NO: 137572 - DNA, 7 bp, Unknown
  misc_feature (1)..( 7): Result.003 file - promoters60/4768269
tggcatt

SEQ ID NO: 137573 - DNA, 7 bp, Unknown
  misc_feature (1)..( 7): Result.003 file - promoters60/4768269
tggaatt

SEQ ID NO: 137574 - DNA, 6 bp, Unknown
  misc_feature (1)..( 6): Result.003 file - promoters60/4768269
ttcggt

SEQ ID NO: 137575 - DNA, 6 bp, Unknown
  misc_feature (1)..( 6): Result.003 file - promoters60/4768269
ttcggt

SEQ ID NO: 137576 - DNA, 8 bp, Unknown
  misc_feature (1)..( 8): Result.003 file - promoters60/4768269
catcagaa

SEQ ID NO: 137577 - DNA, 8 bp, Unknown
  misc_feature (1)..( 8): Result.003 file - promoters60/4768269
catcggaa

SEQ ID NO: 137578 - DNA, 7 bp, Unknown
  misc_feature (1)..( 7): Result.003 file - promoters60/4768269
tgcaagg

SEQ ID NO: 137579 - DNA, 7 bp, Unknown
  misc_feature (1)..( 7): Result.003 file - promoters60/4768269
tgccagg

SEQ ID NO: 137580 - DNA, 11 bp, Unknown
  misc_feature (1)..( 11): Result.003 file - promoters60/4768285
caaacttataa

SEQ ID NO: 137581 - DNA, 11 bp, Unknown
  misc_feature (1)..( 11): Result.003 file - promoters60/4768285
atcacttgtaa

SEQ ID NO: 137582 - DNA, 11 bp, Unknown
  misc_feature (1)..( 11): Result.003 file - promoters60/4768285
taaatttaaat

SEQ ID NO: 137583 - DNA, 11 bp, Unknown
  misc_feature (1)..( 11): Result.003 file - promoters60/4768285
cgatcttgtat

SEQ ID NO: 137584 - DNA, 11 bp, Unknown
  misc_feature (1)..( 11): Result.003 file - promoters60/4768285
taaattaaact

SEQ ID NO: 137585 - DNA, 11 bp, Unknown
  misc_feature (1)..( 11): Result.003 file - promoters60/4768285
gaaatgaaatc

SEQ ID NO: 137586 - DNA, 12 bp, Unknown
  misc_feature (1)..( 12): Result.003 file - promoters60/4768285
gtttttctaatt

SEQ ID NO: 137587 - DNA, 12 bp, Unknown
  misc_feature (1)..( 12): Result.003 file - promoters60/4768285
gttattctctta

SEQ ID NO: 137588 - DNA, 12 bp, Unknown
  misc_feature (1)..( 12): Result.003 file - promoters60/4768285
ttttttccaaat

SEQ ID NO: 137589 - DNA, 12 bp, Unknown
  misc_feature (1)..( 12): Result.003 file - promoters60/4768285
acttttccaatg

SEQ ID NO: 137590 - DNA, 12 bp, Unknown
  misc_feature (1)..( 12): Result.003 file - promoters60/4768285
ttgctgccaatg

SEQ ID NO: 137591 - DNA, 12 bp, Unknown
  misc_feature (1)..( 12): Result.003 file - promoters60/4768285
tcttttcacata

SEQ ID NO: 137592 - DNA, 14 bp, Unknown
  misc_feature (1)..( 14): Result.003 file - promoters60/4768285
tttaatcgatcatc

SEQ ID NO: 137593 - DNA, 14 bp, Unknown
  misc_feature (1)..( 14): Result.003 file - promoters60/4768285
ttttatcattaatt

SEQ ID NO: 137594 - DNA, 14 bp, Unknown
  misc_feature (1)..( 14): Result.003 file - promoters60/4768285
gtttgtcaaccaca

SEQ ID NO: 137595 - DNA, 14 bp, Unknown
  misc_feature (1)..( 14): Result.003 file - promoters60/4768285
tattgacaataaca

SEQ ID NO: 137596 - DNA, 14 bp, Unknown
  misc_feature (1)..( 14): Result.003 file - promoters60/4768285
atttttcactaatt

SEQ ID NO: 137597 - DNA, 14 bp, Unknown
  misc_feature (1)..( 14): Result.003 file - promoters60/4768285
tcctcacactaaac

SEQ ID NO: 137598 - DNA, 12 bp, Unknown
  misc_feature (1)..( 12): Result.003 file - promoters60/4768285
cgttttatattt

SEQ ID NO: 137599 - DNA, 12 bp, Unknown
  misc_feature (1)..( 12): Result.003 file - promoters60/4768285
caatttatatct

SEQ ID NO: 137600 - DNA, 12 bp, Unknown
  misc_feature (1)..( 12): Result.003 file - promoters60/4768285
aataatatattt

SEQ ID NO: 137601 - DNA, 12 bp, Unknown
  misc_feature (1)..( 12): Result.003 file - promoters60/4768285
caatttatctaa

SEQ ID NO: 137602 - DNA, 12 bp, Unknown
  misc_feature (1)..( 12): Result.003 file - promoters60/4768285
tcattcatatca

SEQ ID NO: 137603 - DNA, 12 bp, Unknown
  misc_feature (1)..( 12): Result.003 file - promoters60/4768285
gttttcttatta

SEQ ID NO: 137604 - DNA, 6 bp, Unknown
  misc_feature (1)..( 6): Result.003 file - promoters60/4768289
taacaa

SEQ ID NO: 137605 - DNA, 6 bp, Unknown
  misc_feature (1)..( 6): Result.003 file - promoters60/4768289
taacaa

SEQ ID NO: 137606 - DNA, 9 bp, Unknown
  misc_feature (1)..( 9): Result.003 file - promoters60/4768289
gtttattaa

SEQ ID NO: 137607 - DNA, 9 bp, Unknown
  misc_feature (1)..( 9): Result.003 file - promoters60/4768289
atttattaa

SEQ ID NO: 137608 - DNA, 9 bp, Unknown
  misc_feature (1)..( 9): Result.003 file - promoters60/4768289
gtttatgaa

SEQ ID NO: 137609 - DNA, 6 bp, Unknown
  misc_feature (1)..( 6): Result.003 file - promoters60/4768289
gaacat

SEQ ID NO: 137610 - DNA, 6 bp, Unknown
  misc_feature (1)..( 6): Result.003 file - promoters60/4768289
gaacat

SEQ ID NO: 137611 - DNA, 8 bp, Unknown
  misc_feature (1)..( 8): Result.003 file - promoters60/4768289
ttacaaga

SEQ ID NO: 137612 - DNA, 8 bp, Unknown
  misc_feature (1)..( 8): Result.003 file - promoters60/4768289
ttaaaaga

SEQ ID NO: 137613 - DNA, 8 bp, Unknown
  misc_feature (1)..( 8): Result.003 file - promoters60/4768289
tgagctta

SEQ ID NO: 137614 - DNA, 8 bp, Unknown
  misc_feature (1)..( 8): Result.003 file - promoters60/4768289
tgaactta

SEQ ID NO: 137615 - DNA, 6 bp, Unknown
  misc_feature (1)..( 6): Result.003 file - promoters60/4768289
gagatt

SEQ ID NO: 137616 - DNA, 6 bp, Unknown
  misc_feature (1)..( 6): Result.003 file - promoters60/4768289
gagatt

SEQ ID NO: 137617 - DNA, 7 bp, Unknown
  misc_feature (1)..( 7): Result.003 file - promoters60/4768289
atgctta

SEQ ID NO: 137618 - DNA, 7 bp, Unknown
  misc_feature (1)..( 7): Result.003 file - promoters60/4768289
atgctta

SEQ ID NO: 137619 - DNA, 8 bp, Unknown
  misc_feature (1)..( 8): Result.003 file - promoters60/4768289
tcaggttg

SEQ ID NO: 137620 - DNA, 8 bp, Unknown
  misc_feature (1)..( 8): Result.003 file - promoters60/4768289
tcaagttg

SEQ ID NO: 137621 - DNA, 13 bp, Unknown
  misc_feature (1)..( 13): Result.003 file - promoters60/4768289
ttgaatcaatatt

SEQ ID NO: 137622 - DNA, 13 bp, Unknown
  misc_feature (1)..( 13): Result.003 file - promoters60/4768289
ttgattcaaaatt

SEQ ID NO: 137623 - DNA, 7 bp, Unknown
  misc_feature (1)..( 7): Result.003 file - promoters60/4768289
tggattt

SEQ ID NO: 137624 - DNA, 7 bp, Unknown
  misc_feature (1)..( 7): Result.003 file - promoters60/4768289
tggattt

SEQ ID NO: 137625 - DNA, 6 bp, Unknown
  misc_feature (1)..( 6): Result.003 file - promoters60/4768289
aagatt

SEQ ID NO: 137626 - DNA, 6 bp, Unknown
  misc_feature (1)..( 6): Result.003 file - promoters60/4768289
aagatt

SEQ ID NO: 137627 - DNA, 6 bp, Unknown
  misc_feature (1)..( 6): Result.003 file - promoters60/4768289
ttggtt

SEQ ID NO: 137628 - DNA, 6 bp, Unknown
  misc_feature (1)..( 6): Result.003 file - promoters60/4768289
ttggtt

SEQ ID NO: 137629 - DNA, 6 bp, Unknown
  misc_feature (1)..( 6): Result.003 file - promoters60/4768289
ttaacc

SEQ ID NO: 137630 - DNA, 6 bp, Unknown
  misc_feature (1)..( 6): Result.003 file - promoters60/4768289
ttaacc

SEQ ID NO: 137631 - DNA, 7 bp, Unknown
  misc_feature (1)..( 7): Result.003 file - promoters60/4768289
ctcactc

SEQ ID NO: 137632 - DNA, 7 bp, Unknown
  misc_feature (1)..( 7): Result.003 file - promoters60/4768289
ctcgctc

SEQ ID NO: 137633 - DNA, 6 bp, Unknown
  misc_feature (1)..( 6): Result.003 file - promoters60/4768289
atttct

SEQ ID NO: 137634 - DNA, 6 bp, Unknown
  misc_feature (1)..( 6): Result.003 file - promoters60/4768289
atttct

SEQ ID NO: 137635 - DNA, 7 bp, Unknown
  misc_feature (1)..( 7): Result.003 file - promoters60/4768293
tcttctg

SEQ ID NO: 137636 - DNA, 7 bp, Unknown
  misc_feature (1)..( 7): Result.003 file - promoters60/4768293
tcttctg

SEQ ID NO: 137637 - DNA, 8 bp, Unknown
  misc_feature (1)..( 8): Result.003 file - promoters60/4768293
cattttgt

SEQ ID NO: 137638 - DNA, 8 bp, Unknown
  misc_feature (1)..( 8): Result.003 file - promoters60/4768293
cattttca

SEQ ID NO: 137639 - DNA, 8 bp, Unknown
  misc_feature (1)..( 8): Result.003 file - promoters60/4768293
gattctca

SEQ ID NO: 137640 - DNA, 10 bp, Unknown
  misc_feature (1)..( 10): Result.003 file - promoters60/4768293
ttttacagat

SEQ ID NO: 137641 - DNA, 10 bp, Unknown
  misc_feature (1)..( 10): Result.003 file - promoters60/4768293
attttcagat

SEQ ID NO: 137642 - DNA, 10 bp, Unknown
  misc_feature (1)..( 10): Result.003 file - promoters60/4768293
attctcaccc

SEQ ID NO: 137643 - DNA, 7 bp, Unknown
  misc_feature (1)..( 7): Result.003 file - promoters60/4768293
cagtgaa

SEQ ID NO: 137644 - DNA, 7 bp, Unknown
  misc_feature (1)..( 7): Result.003 file - promoters60/4768293
cagggaa

SEQ ID NO: 137645 - DNA, 10 bp, Unknown
  misc_feature (1)..( 10): Result.003 file - promoters60/4768293
tgatattctt

SEQ ID NO: 137646 - DNA, 10 bp, Unknown
  misc_feature (1)..( 10): Result.003 file - promoters60/4768293
tgatatgctt

SEQ ID NO: 137647 - DNA, 7 bp, Unknown
  misc_feature (1)..( 7): Result.003 file - promoters60/4768293
gatgata

SEQ ID NO: 137648 - DNA, 7 bp, Unknown
  misc_feature (1)..( 7): Result.003 file - promoters60/4768293
gatcata

SEQ ID NO: 137649 - DNA, 7 bp, Unknown
  misc_feature (1)..( 7): Result.003 file - promoters60/4768293
aaactac

SEQ ID NO: 137650 - DNA, 7 bp, Unknown
  misc_feature (1)..( 7): Result.003 file - promoters60/4768293
aaactac

SEQ ID NO: 137651 - DNA, 6 bp, Unknown
  misc_feature (1)..( 6): Result.003 file - promoters60/4768293
aaactt

SEQ ID NO: 137652 - DNA, 6 bp, Unknown
  misc_feature (1)..( 6): Result.003 file - promoters60/4768293
aaactt

SEQ ID NO: 137653 - DNA, 8 bp, Unknown
  misc_feature (1)..( 8): Result.003 file - promoters60/4768293
tgcaggta

SEQ ID NO: 137654 - DNA, 8 bp, Unknown
  misc_feature (1)..( 8): Result.003 file - promoters60/4768293
tgcaggta

SEQ ID NO: 137655 - DNA, 8 bp, Unknown
  misc_feature (1)..( 8): Result.003 file - promoters60/4768293
tggaatcc

SEQ ID NO: 137656 - DNA, 8 bp, Unknown
  misc_feature (1)..( 8): Result.003 file - promoters60/4768293
tggtatcc

SEQ ID NO: 137657 - DNA, 7 bp, Unknown
  misc_feature (1)..( 7): Result.003 file - promoters60/4768293
atcatgc

SEQ ID NO: 137658 - DNA, 7 bp, Unknown
  misc_feature (1)..( 7): Result.003 file - promoters60/4768293
atcctgc

SEQ ID NO: 137659 - DNA, 13 bp, Unknown
  misc_feature (1)..( 13): Result.003 file - promoters60/4768319
catcttcctttgt

SEQ ID NO: 137660 - DNA, 13 bp, Unknown
  misc_feature (1)..( 13): Result.003 file - promoters60/4768319
attcttcgtttgt

SEQ ID NO: 137661 - DNA, 13 bp, Unknown
  misc_feature (1)..( 13): Result.003 file - promoters60/4768319
actcttcgtcaat

SEQ ID NO: 137662 - DNA, 13 bp, Unknown
  misc_feature (1)..( 13): Result.003 file - promoters60/4768319
cattttctttttg

SEQ ID NO: 137663 - DNA, 11 bp, Unknown
  misc_feature (1)..( 11): Result.003 file - promoters60/4768319
tagataattgt

SEQ ID NO: 137664 - DNA, 11 bp, Unknown
  misc_feature (1)..( 11): Result.003 file - promoters60/4768319
cagataagtct

SEQ ID NO: 137665 - DNA, 11 bp, Unknown
  misc_feature (1)..( 11): Result.003 file - promoters60/4768319
tagacaattgt

SEQ ID NO: 137666 - DNA, 7 bp, Unknown
  misc_feature (1)..( 7): Result.003 file - promoters60/4768319
actcttt

SEQ ID NO: 137667 - DNA, 7 bp, Unknown
  misc_feature (1)..( 7): Result.003 file - promoters60/4768319
actcttc

SEQ ID NO: 137668 - DNA, 7 bp, Unknown
  misc_feature (1)..( 7): Result.003 file - promoters60/4768319
actattc

SEQ ID NO: 137669 - DNA, 6 bp, Unknown
  misc_feature (1)..( 6): Result.003 file - promoters60/4768319
aaaaaa

SEQ ID NO: 137670 - DNA, 6 bp, Unknown
  misc_feature (1)..( 6): Result.003 file - promoters60/4768319
aaaaaa

SEQ ID NO: 137671 - DNA, 6 bp, Unknown
  misc_feature (1)..( 6): Result.003 file - promoters60/4768319
aaaaaa

SEQ ID NO: 137672 - DNA, 8 bp, Unknown
  misc_feature (1)..( 8): Result.003 file - promoters60/4768319
taaacatt

SEQ ID NO: 137673 - DNA, 8 bp, Unknown
  misc_feature (1)..( 8): Result.003 file - promoters60/4768319
taaacaaa

SEQ ID NO: 137674 - DNA, 8 bp, Unknown
  misc_feature (1)..( 8): Result.003 file - promoters60/4768319
taaaaaaa

SEQ ID NO: 137675 - DNA, 9 bp, Unknown
  misc_feature (1)..( 9): Result.003 file - promoters60/4768319
ttcactttt

SEQ ID NO: 137676 - DNA, 9 bp, Unknown
  misc_feature (1)..( 9): Result.003 file - promoters60/4768319
ctcattttt

SEQ ID NO: 137677 - DNA, 9 bp, Unknown
  misc_feature (1)..( 9): Result.003 file - promoters60/4768319
attattatt

SEQ ID NO: 137678 - DNA, 7 bp, Unknown
  misc_feature (1)..( 7): Result.003 file - promoters60/4768323
ttggtca

SEQ ID NO: 137679 - DNA, 7 bp, Unknown
  misc_feature (1)..( 7): Result.003 file - promoters60/4768323
ttggtct

SEQ ID NO: 137680 - DNA, 7 bp, Unknown
  misc_feature (1)..( 7): Result.003 file - promoters60/4768323
ttgatca

SEQ ID NO: 137681 - DNA, 7 bp, Unknown
  misc_feature (1)..( 7): Result.003 file - promoters60/4768323
tttactg

SEQ ID NO: 137682 - DNA, 7 bp, Unknown
  misc_feature (1)..( 7): Result.003 file - promoters60/4768323
ttttctg

SEQ ID NO: 137683 - DNA, 7 bp, Unknown
  misc_feature (1)..( 7): Result.003 file - promoters60/4768323
atgaaat

SEQ ID NO: 137684 - DNA, 7 bp, Unknown
  misc_feature (1)..( 7): Result.003 file - promoters60/4768323
atgcaat

SEQ ID NO: 137685 - DNA, 9 bp, Unknown
  misc_feature (1)..( 9): Result.003 file - promoters60/4768323
gaaaagtat

SEQ ID NO: 137686 - DNA, 9 bp, Unknown
  misc_feature (1)..( 9): Result.003 file - promoters60/4768323
gaaaagtat

SEQ ID NO: 137687 - DNA, 7 bp, Unknown
  misc_feature (1)..( 7): Result.003 file - promoters60/4768323
tcacatc

SEQ ID NO: 137688 - DNA, 7 bp, Unknown
  misc_feature (1)..( 7): Result.003 file - promoters60/4768323
tcaaatc

SEQ ID NO: 137689 - DNA, 7 bp, Unknown
  misc_feature (1)..( 7): Result.003 file - promoters60/4768323
gtttttc

SEQ ID NO: 137690 - DNA, 7 bp, Unknown
  misc_feature (1)..( 7): Result.003 file - promoters60/4768323
ctttttc

SEQ ID NO: 137691 - DNA, 7 bp, Unknown
  misc_feature (1)..( 7): Result.003 file - promoters60/4768323
ctttttt

SEQ ID NO: 137692 - DNA, 6 bp, Unknown
  misc_feature (1)..( 6): Result.003 file - promoters60/4768323
tgattt

SEQ ID NO: 137693 - DNA, 6 bp, Unknown
  misc_feature (1)..( 6): Result.003 file - promoters60/4768323
tgattt

SEQ ID NO: 137694 - DNA, 8 bp, Unknown
  misc_feature (1)..( 8): Result.003 file - promoters60/4768323
tttcttat

SEQ ID NO: 137695 - DNA, 8 bp, Unknown
  misc_feature (1)..( 8): Result.003 file - promoters60/4768323
tttgttat

SEQ ID NO: 137696 - DNA, 7 bp, Unknown
  misc_feature (1)..( 7): Result.003 file - promoters60/4768323
ggaacca

SEQ ID NO: 137697 - DNA, 7 bp, Unknown
  misc_feature (1)..( 7): Result.003 file - promoters60/4768323
ggatcca

SEQ ID NO: 137698 - DNA, 6 bp, Unknown
  misc_feature (1)..( 6): Result.003 file - promoters60/4768323
tagggt

SEQ ID NO: 137699 - DNA, 6 bp, Unknown
  misc_feature (1)..( 6): Result.003 file - promoters60/4768323
tagggt

SEQ ID NO: 137700 - DNA, 6 bp, Unknown
  misc_feature (1)..( 6): Result.003 file - promoters60/4768323
aaaaaa

SEQ ID NO: 137701 - DNA, 6 bp, Unknown
  misc_feature (1)..( 6): Result.003 file - promoters60/4768323
aaaaaa

SEQ ID NO: 137702 - DNA, 7 bp, Unknown
  misc_feature (1)..( 7): Result.003 file - promoters60/4768323
tcttttt

SEQ ID NO: 137703 - DNA, 7 bp, Unknown
  misc_feature (1)..( 7): Result.003 file - promoters60/4768323
tcttttt

SEQ ID NO: 137704 - DNA, 6 bp, Unknown
  misc_feature (1)..( 6): Result.003 file - promoters60/4768323
atattt

SEQ ID NO: 137705 - DNA, 6 bp, Unknown
  misc_feature (1)..( 6): Result.003 file - promoters60/4768323
atattt

SEQ ID NO: 137706 - DNA, 6 bp, Unknown
  misc_feature (1)..( 6): Result.003 file - promoters60/4768323
aaaaga

SEQ ID NO: 137707 - DNA, 6 bp, Unknown
  misc_feature (1)..( 6): Result.003 file - promoters60/4768323
aaaaga

SEQ ID NO: 137708 - DNA, 7 bp, Unknown
  misc_feature (1)..( 7): Result.003 file - promoters60/4768346
atatgat

SEQ ID NO: 137709 - DNA, 7 bp, Unknown
  misc_feature (1)..( 7): Result.003 file - promoters60/4768346
atatgat

SEQ ID NO: 137710 - DNA, 7 bp, Unknown
  misc_feature (1)..( 7): Result.003 file - promoters60/4768346
taaaata

SEQ ID NO: 137711 - DNA, 7 bp, Unknown
  misc_feature (1)..( 7): Result.003 file - promoters60/4768346
taagata

SEQ ID NO: 137712 - DNA, 10 bp, Unknown
  misc_feature (1)..( 10): Result.003 file - promoters60/4768346
atatctgaaa

SEQ ID NO: 137713 - DNA, 10 bp, Unknown
  misc_feature (1)..( 10): Result.003 file - promoters60/4768346
atatatgaaa

SEQ ID NO: 137714 - DNA, 9 bp, Unknown
  misc_feature (1)..( 9): Result.003 file - promoters60/4768346
aaataaaat

SEQ ID NO: 137715 - DNA, 9 bp, Unknown
  misc_feature (1)..( 9): Result.003 file - promoters60/4768346
aaataaaat

SEQ ID NO: 137716 - DNA, 7 bp, Unknown
  misc_feature (1)..( 7): Result.003 file - promoters60/4768346
accgaaa

SEQ ID NO: 137717 - DNA, 7 bp, Unknown
  misc_feature (1)..( 7): Result.003 file - promoters60/4768346
accaaaa

SEQ ID NO: 137718 - DNA, 8 bp, Unknown
  misc_feature (1)..( 8): Result.003 file - promoters60/4768346
aaagaatc

SEQ ID NO: 137719 - DNA, 8 bp, Unknown
  misc_feature (1)..( 8): Result.003 file - promoters60/4768346
aaaaaatc

SEQ ID NO: 137720 - DNA, 9 bp, Unknown
  misc_feature (1)..( 9): Result.003 file - promoters60/4768346
aatcatatt

SEQ ID NO: 137721 - DNA, 9 bp, Unknown
  misc_feature (1)..( 9): Result.003 file - promoters60/4768346
aatcttatt

SEQ ID NO: 137722 - DNA, 7 bp, Unknown
  misc_feature (1)..( 7): Result.003 file - promoters60/4768346
tcaaaat

SEQ ID NO: 137723 - DNA, 7 bp, Unknown
  misc_feature (1)..( 7): Result.003 file - promoters60/4768346
tcaaaat

SEQ ID NO: 137724 - DNA, 7 bp, Unknown
  misc_feature (1)..( 7): Result.003 file - promoters60/4768346
aatacaa

SEQ ID NO: 137725 - DNA, 7 bp, Unknown
  misc_feature (1)..( 7): Result.003 file - promoters60/4768346
aatacaa

SEQ ID NO: 137726 - DNA, 7 bp, Unknown
  misc_feature (1)..( 7): Result.003 file - promoters60/4768346
accaaaa

SEQ ID NO: 137727 - DNA, 7 bp, Unknown
  misc_feature (1)..( 7): Result.003 file - promoters60/4768346
accaaaa

SEQ ID NO: 137728 - DNA, 9 bp, Unknown
  misc_feature (1)..( 9): Result.003 file - promoters60/4768346
actcgaaaa

SEQ ID NO: 137729 - DNA, 9 bp, Unknown
  misc_feature (1)..( 9): Result.003 file - promoters60/4768346
actggaaaa

SEQ ID NO: 137730 - DNA, 9 bp, Unknown
  misc_feature (1)..( 9): Result.003 file - promoters60/4768346
accaaaatc

SEQ ID NO: 137731 - DNA, 9 bp, Unknown
  misc_feature (1)..( 9): Result.003 file - promoters60/4768346
accaaaatc

SEQ ID NO: 137732 - DNA, 7 bp, Unknown
  misc_feature (1)..( 7): Result.003 file - promoters60/4768346
tcaaaac

SEQ ID NO: 137733 - DNA, 7 bp, Unknown
  misc_feature (1)..( 7): Result.003 file - promoters60/4768346
tcacaac

SEQ ID NO: 137734 - DNA, 7 bp, Unknown
  misc_feature (1)..( 7): Result.003 file - promoters60/4768346
aattgaa

SEQ ID NO: 137735 - DNA, 7 bp, Unknown
  misc_feature (1)..( 7): Result.003 file - promoters60/4768346
aattgaa

SEQ ID NO: 137736 - DNA, 8 bp, Unknown
  misc_feature (1)..( 8): Result.003 file - promoters60/4768346
catatatg

SEQ ID NO: 137737 - DNA, 8 bp, Unknown
  misc_feature (1)..( 8): Result.003 file - promoters60/4768346
catttatg

SEQ ID NO: 137738 - DNA, 6 bp, Unknown
  misc_feature (1)..( 6): Result.003 file - promoters60/4768346
tttacg

SEQ ID NO: 137739 - DNA, 6 bp, Unknown
  misc_feature (1)..( 6): Result.003 file - promoters60/4768346
tttacg

SEQ ID NO: 137740 - DNA, 7 bp, Unknown
  misc_feature (1)..( 7): Result.003 file - promoters60/4768346
aatcatt

SEQ ID NO: 137741 - DNA, 7 bp, Unknown
  misc_feature (1)..( 7): Result.003 file - promoters60/4768346
aatgatt

SEQ ID NO: 137742 - DNA, 7 bp, Unknown
  misc_feature (1)..( 7): Result.003 file - promoters60/4768346
ttacaat

SEQ ID NO: 137743 - DNA, 7 bp, Unknown
  misc_feature (1)..( 7): Result.003 file - promoters60/4768346
ttataat

SEQ ID NO: 137744 - DNA, 7 bp, Unknown
  misc_feature (1)..( 7): Result.003 file - promoters60/4768346
aatctgt

SEQ ID NO: 137745 - DNA, 7 bp, Unknown
  misc_feature (1)..( 7): Result.003 file - promoters60/4768346
aatctgt

SEQ ID NO: 137746 - DNA, 11 bp, Unknown
  misc_feature (1)..( 11): Result.003 file - promoters60/4768354
taacatttttt

SEQ ID NO: 137747 - DNA, 11 bp, Unknown
  misc_feature (1)..( 11): Result.003 file - promoters60/4768354
taagatttttg

SEQ ID NO: 137748 - DNA, 11 bp, Unknown
  misc_feature (1)..( 11): Result.003 file - promoters60/4768354
tagaatttttt

SEQ ID NO: 137749 - DNA, 9 bp, Unknown
  misc_feature (1)..( 9): Result.003 file - promoters60/4768354
tttaatcag

SEQ ID NO: 137750 - DNA, 9 bp, Unknown
  misc_feature (1)..( 9): Result.003 file - promoters60/4768354
tttattcag

SEQ ID NO: 137751 - DNA, 9 bp, Unknown
  misc_feature (1)..( 9): Result.003 file - promoters60/4768354
gttattcga

SEQ ID NO: 137752 - DNA, 6 bp, Unknown
  misc_feature (1)..( 6): Result.003 file - promoters60/4768354
tgcaat

SEQ ID NO: 137753 - DNA, 6 bp, Unknown
  misc_feature (1)..( 6): Result.003 file - promoters60/4768354
tgcaat

SEQ ID NO: 137754 - DNA, 8 bp, Unknown
  misc_feature (1)..( 8): Result.003 file - promoters60/4768354
ttcattta

SEQ ID NO: 137755 - DNA, 8 bp, Unknown
  misc_feature (1)..( 8): Result.003 file - promoters60/4768354
ttcattta

SEQ ID NO: 137756 - DNA, 6 bp, Unknown
  misc_feature (1)..( 6): Result.003 file - promoters60/4768354
tatttt

SEQ ID NO: 137757 - DNA, 6 bp, Unknown
  misc_feature (1)..( 6): Result.003 file - promoters60/4768354
tatttt

SEQ ID NO: 137758 - DNA, 6 bp, Unknown
  misc_feature (1)..( 6): Result.003 file - promoters60/4768354
taattt

SEQ ID NO: 137759 - DNA, 6 bp, Unknown
  misc_feature (1)..( 6): Result.003 file - promoters60/4768354
taattt

SEQ ID NO: 137760 - DNA, 6 bp, Unknown
  misc_feature (1)..( 6): Result.003 file - promoters60/4768354
tttcac

SEQ ID NO: 137761 - DNA, 6 bp, Unknown
  misc_feature (1)..( 6): Result.003 file - promoters60/4768354
tttcac

SEQ ID NO: 137762 - DNA, 7 bp, Unknown
  misc_feature (1)..( 7): Result.003 file - promoters60/4768354
attttca

SEQ ID NO: 137763 - DNA, 7 bp, Unknown
  misc_feature (1)..( 7): Result.003 file - promoters60/4768354
attctca

SEQ ID NO: 137764 - DNA, 7 bp, Unknown
  misc_feature (1)..( 7): Result.003 file - promoters60/4768354
atgttat

SEQ ID NO: 137765 - DNA, 7 bp, Unknown
  misc_feature (1)..( 7): Result.003 file - promoters60/4768354
atggtat

SEQ ID NO: 137766 - DNA, 6 bp, Unknown
  misc_feature (1)..( 6): Result.003 file - promoters60/4768354
aatatt

SEQ ID NO: 137767 - DNA, 6 bp, Unknown
  misc_feature (1)..( 6): Result.003 file - promoters60/4768354
aatatt

SEQ ID NO: 137768 - DNA, 6 bp, Unknown
  misc_feature (1)..( 6): Result.003 file - promoters60/4768354
gaaaat

SEQ ID NO: 137769 - DNA, 6 bp, Unknown
  misc_feature (1)..( 6): Result.003 file - promoters60/4768354
gaaaat

SEQ ID NO: 137770 - DNA, 7 bp, Unknown
  misc_feature (1)..( 7): Result.003 file - promoters60/4768354
taaatct

SEQ ID NO: 137771 - DNA, 7 bp, Unknown
  misc_feature (1)..( 7): Result.003 file - promoters60/4768354
taactct

SEQ ID NO: 137772 - DNA, 12 bp, Unknown
  misc_feature (1)..( 12): Result.003 file - promoters60/4768354
aaaaaatctctg

SEQ ID NO: 137773 - DNA, 12 bp, Unknown
  misc_feature (1)..( 12): Result.003 file - promoters60/4768354
aaataatctctg

SEQ ID NO: 137774 - DNA, 7 bp, Unknown
  misc_feature (1)..( 7): Result.003 file - promoters60/4768354
aattttt

SEQ ID NO: 137775 - DNA, 7 bp, Unknown
  misc_feature (1)..( 7): Result.003 file - promoters60/4768354
aattttt

SEQ ID NO: 137776 - DNA, 7 bp, Unknown
  misc_feature (1)..( 7): Result.003 file - promoters60/4768354
ttaatgt

SEQ ID NO: 137777 - DNA, 7 bp, Unknown
  misc_feature (1)..( 7): Result.003 file - promoters60/4768354
ttattgt

SEQ ID NO: 137778 - DNA, 6 bp, Unknown
  misc_feature (1)..( 6): Result.003 file - promoters60/4768354
aatttt

SEQ ID NO: 137779 - DNA, 6 bp, Unknown
  misc_feature (1)..( 6): Result.003 file - promoters60/4768354
aatttt

SEQ ID NO: 137780 - DNA, 6 bp, Unknown
  misc_feature (1)..( 6): Result.003 file - promoters60/4768354
tattcg

SEQ ID NO: 137781 - DNA, 6 bp, Unknown
  misc_feature (1)..( 6): Result.003 file - promoters60/4768354
tattcg

SEQ ID NO: 137782 - DNA, 6 bp, Unknown
  misc_feature (1)..( 6): Result.003 file - promoters60/4768354
acctat

SEQ ID NO: 137783 - DNA, 6 bp, Unknown
  misc_feature (1)..( 6): Result.003 file - promoters60/4768354
acctat

SEQ ID NO: 137784 - DNA, 8 bp, Unknown
  misc_feature (1)..( 8): Result.003 file - promoters60/4768354
caaaactt

SEQ ID NO: 137785 - DNA, 8 bp, Unknown
  misc_feature (1)..( 8): Result.003 file - promoters60/4768354
caaatctt

SEQ ID NO: 137786 - DNA, 7 bp, Unknown
  misc_feature (1)..( 7): Result.003 file - promoters60/4768354
gaataaa

SEQ ID NO: 137787 - DNA, 7 bp, Unknown
  misc_feature (1)..( 7): Result.003 file - promoters60/4768354
gaaaaaa

SEQ ID NO: 137788 - DNA, 6 bp, Unknown
  misc_feature (1)..( 6): Result.003 file - promoters60/4768354
atttaa

SEQ ID NO: 137789 - DNA, 6 bp, Unknown
  misc_feature (1)..( 6): Result.003 file - promoters60/4768354
atttaa

SEQ ID NO: 137790 - DNA, 6 bp, Unknown
  misc_feature (1)..( 6): Result.003 file - promoters60/4768354
taaaat

SEQ ID NO: 137791 - DNA, 6 bp, Unknown
  misc_feature (1)..( 6): Result.003 file - promoters60/4768354
taaaat

SEQ ID NO: 137792 - DNA, 7 bp, Unknown
  misc_feature (1)..( 7): Result.003 file - promoters60/4768354
aaagtca

SEQ ID NO: 137793 - DNA, 7 bp, Unknown
  misc_feature (1)..( 7): Result.003 file - promoters60/4768354
aaaatca

SEQ ID NO: 137794 - DNA, 6 bp, Unknown
  misc_feature (1)..( 6): Result.003 file - promoters60/4768354
tcacat

SEQ ID NO: 137795 - DNA, 6 bp, Unknown
  misc_feature (1)..( 6): Result.003 file - promoters60/4768354
tcacat

SEQ ID NO: 137796 - DNA, 6 bp, Unknown
  misc_feature (1)..( 6): Result.003 file - promoters60/4768354
aatcat

SEQ ID NO: 137797 - DNA, 6 bp, Unknown
  misc_feature (1)..( 6): Result.003 file - promoters60/4768354
aatcat

SEQ ID NO: 137798 - DNA, 6 bp, Unknown
  misc_feature (1)..( 6): Result.003 file - promoters60/4768354
tttgta

SEQ ID NO: 137799 - DNA, 6 bp, Unknown
  misc_feature (1)..( 6): Result.003 file - promoters60/4768354
tttgta

SEQ ID NO: 137800 - DNA, 6 bp, Unknown
  misc_feature (1)..( 6): Result.003 file - promoters60/4768358
gttttt

SEQ ID NO: 137801 - DNA, 6 bp, Unknown
  misc_feature (1)..( 6): Result.003 file - promoters60/4768358
gttttt

SEQ ID NO: 137802 - DNA, 7 bp, Unknown
  misc_feature (1)..( 7): Result.003 file - promoters60/4768358
aatttta

SEQ ID NO: 137803 - DNA, 7 bp, Unknown
  misc_feature (1)..( 7): Result.003 file - promoters60/4768358
aatttta

SEQ ID NO: 137804 - DNA, 7 bp, Unknown
  misc_feature (1)..( 7): Result.003 file - promoters60/4768358
ataacaa

SEQ ID NO: 137805 - DNA, 7 bp, Unknown
  misc_feature (1)..( 7): Result.003 file - promoters60/4768358
ataacaa

SEQ ID NO: 137806 - DNA, 8 bp, Unknown
  misc_feature (1)..( 8): Result.003 file - promoters60/4768358
atattttt

SEQ ID NO: 137807 - DNA, 8 bp, Unknown
  misc_feature (1)..( 8): Result.003 file - promoters60/4768358
atactttt

SEQ ID NO: 137808 - DNA, 6 bp, Unknown
  misc_feature (1)..( 6): Result.003 file - promoters60/4768358
ttttag

SEQ ID NO: 137809 - DNA, 6 bp, Unknown
  misc_feature (1)..( 6): Result.003 file - promoters60/4768358
ttttag

SEQ ID NO: 137810 - DNA, 6 bp, Unknown
  misc_feature (1)..( 6): Result.003 file - promoters60/4768358
aacgaa

SEQ ID NO: 137811 - DNA, 6 bp, Unknown
  misc_feature (1)..( 6): Result.003 file - promoters60/4768358
aacgaa

SEQ ID NO: 137812 - DNA, 6 bp, Unknown
  misc_feature (1)..( 6): Result.003 file - promoters60/4768358
aactaa

SEQ ID NO: 137813 - DNA, 6 bp, Unknown
  misc_feature (1)..( 6): Result.003 file - promoters60/4768358
aactaa

SEQ ID NO: 137814 - DNA, 9 bp, Unknown
  misc_feature (1)..( 9): Result.003 file - promoters60/4768358
caatttgtt

SEQ ID NO: 137815 - DNA, 9 bp, Unknown
  misc_feature (1)..( 9): Result.003 file - promoters60/4768358
caatatgtt

SEQ ID NO: 137816 - DNA, 8 bp, Unknown
  misc_feature (1)..( 8): Result.003 file - promoters60/4768358
atatgttt

SEQ ID NO: 137817 - DNA, 8 bp, Unknown
  misc_feature (1)..( 8): Result.003 file - promoters60/4768358
atatgttt

SEQ ID NO: 137818 - DNA, 7 bp, Unknown
  misc_feature (1)..( 7): Result.003 file - promoters60/4768358
tttgatt

SEQ ID NO: 137819 - DNA, 7 bp, Unknown
  misc_feature (1)..( 7): Result.003 file - promoters60/4768358
tttcatt

SEQ ID NO: 137820 - DNA, 8 bp, Unknown
  misc_feature (1)..( 8): Result.003 file - promoters60/4768358
tgtgttta

SEQ ID NO: 137821 - DNA, 8 bp, Unknown
  misc_feature (1)..( 8): Result.003 file - promoters60/4768358
tgttttta

SEQ ID NO: 137822 - DNA, 7 bp, Unknown
  misc_feature (1)..( 7): Result.003 file - promoters60/4768358
aaaaatc

SEQ ID NO: 137823 - DNA, 7 bp, Unknown
  misc_feature (1)..( 7): Result.003 file - promoters60/4768358
aaacatc

SEQ ID NO: 137824 - DNA, 6 bp, Unknown
  misc_feature (1)..( 6): Result.003 file - promoters60/4768358
gttata

SEQ ID NO: 137825 - DNA, 6 bp, Unknown
  misc_feature (1)..( 6): Result.003 file - promoters60/4768358
gttata

SEQ ID NO: 137826 - DNA, 6 bp, Unknown
  misc_feature (1)..( 6): Result.003 file - promoters60/4768358
ttttaa

SEQ ID NO: 137827 - DNA, 6 bp, Unknown
  misc_feature (1)..( 6): Result.003 file - promoters60/4768358
ttttaa

SEQ ID NO: 137828 - DNA, 7 bp, Unknown
  misc_feature (1)..( 7): Result.003 file - promoters60/4768358
ttaaatt

SEQ ID NO: 137829 - DNA, 7 bp, Unknown
  misc_feature (1)..( 7): Result.003 file - promoters60/4768358
ttaaatt

SEQ ID NO: 137830 - DNA, 6 bp, Unknown
  misc_feature (1)..( 6): Result.003 file - promoters60/4768358
acttaa

SEQ ID NO: 137831 - DNA, 6 bp, Unknown
  misc_feature (1)..( 6): Result.003 file - promoters60/4768358
acttaa

SEQ ID NO: 137832 - DNA, 6 bp, Unknown
  misc_feature (1)..( 6): Result.003 file - promoters60/4768358
tattta

SEQ ID NO: 137833 - DNA, 6 bp, Unknown
  misc_feature (1)..( 6): Result.003 file - promoters60/4768358
tattta

SEQ ID NO: 137834 - DNA, 6 bp, Unknown
  misc_feature (1)..( 6): Result.003 file - promoters60/4768358
aaataa

SEQ ID NO: 137835 - DNA, 6 bp, Unknown
  misc_feature (1)..( 6): Result.003 file - promoters60/4768358
aaataa

SEQ ID NO: 137836 - DNA, 6 bp, Unknown
  misc_feature (1)..( 6): Result.003 file - promoters60/4768444
ctattg

SEQ ID NO: 137837 - DNA, 6 bp, Unknown
  misc_feature (1)..( 6): Result.003 file - promoters60/4768444
ctattg

SEQ ID NO: 137838 - DNA, 6 bp, Unknown
  misc_feature (1)..( 6): Result.003 file - promoters60/4768444
cttcaa

SEQ ID NO: 137839 - DNA, 6 bp, Unknown
  misc_feature (1)..( 6): Result.003 file - promoters60/4768444
cttcaa

SEQ ID NO: 137840 - DNA, 7 bp, Unknown
  misc_feature (1)..( 7): Result.003 file - promoters60/4768444
gagagta

SEQ ID NO: 137841 - DNA, 7 bp, Unknown
  misc_feature (1)..( 7): Result.003 file - promoters60/4768444
gagtgta

SEQ ID NO: 137842 - DNA, 6 bp, Unknown
  misc_feature (1)..( 6): Result.003 file - promoters60/4768444
atttaa

SEQ ID NO: 137843 - DNA, 6 bp, Unknown
  misc_feature (1)..( 6): Result.003 file - promoters60/4768444
atttaa

SEQ ID NO: 137844 - DNA, 6 bp, Unknown
  misc_feature (1)..( 6): Result.003 file - promoters60/4768444
caaaaa

SEQ ID NO: 137845 - DNA, 6 bp, Unknown
  misc_feature (1)..( 6): Result.003 file - promoters60/4768444
caaaaa

SEQ ID NO: 137846 - DNA, 7 bp, Unknown
  misc_feature (1)..( 7): Result.003 file - promoters60/4768444
tatttta

SEQ ID NO: 137847 - DNA, 7 bp, Unknown
  misc_feature (1)..( 7): Result.003 file - promoters60/4768444
tatctta

SEQ ID NO: 137848 - DNA, 8 bp, Unknown
  misc_feature (1)..( 8): Result.003 file - promoters60/4768444
aagactct

SEQ ID NO: 137849 - DNA, 8 bp, Unknown
  misc_feature (1)..( 8): Result.003 file - promoters60/4768444
aagagtct

SEQ ID NO: 137850 - DNA, 7 bp, Unknown
  misc_feature (1)..( 7): Result.003 file - promoters60/4768444
caatagt

SEQ ID NO: 137851 - DNA, 7 bp, Unknown
  misc_feature (1)..( 7): Result.003 file - promoters60/4768444
caagagt

SEQ ID NO: 137852 - DNA, 9 bp, Unknown
  misc_feature (1)..( 9): Result.003 file - promoters60/4768528
aaactttaa

SEQ ID NO: 137853 - DNA, 9 bp, Unknown
  misc_feature (1)..( 9): Result.003 file - promoters60/4768528
aaaatttct

SEQ ID NO: 137854 - DNA, 9 bp, Unknown
  misc_feature (1)..( 9): Result.003 file - promoters60/4768528
aaaatctct

SEQ ID NO: 137855 - DNA, 8 bp, Unknown
  misc_feature (1)..( 8): Result.003 file - promoters60/4768528
tttgaaac

SEQ ID NO: 137856 - DNA, 8 bp, Unknown
  misc_feature (1)..( 8): Result.003 file - promoters60/4768528
tgtgaaac

SEQ ID NO: 137857 - DNA, 8 bp, Unknown
  misc_feature (1)..( 8): Result.003 file - promoters60/4768528
tgtgaaaa

SEQ ID NO: 137858 - DNA, 9 bp, Unknown
  misc_feature (1)..( 9): Result.003 file - promoters60/4768528
gatatttct

SEQ ID NO: 137859 - DNA, 9 bp, Unknown
  misc_feature (1)..( 9): Result.003 file - promoters60/4768528
aaaatttct

SEQ ID NO: 137860 - DNA, 9 bp, Unknown
  misc_feature (1)..( 9): Result.003 file - promoters60/4768528
aaaatctct

SEQ ID NO: 137861 - DNA, 9 bp, Unknown
  misc_feature (1)..( 9): Result.003 file - promoters60/4768528
tttcaaaat

SEQ ID NO: 137862 - DNA, 9 bp, Unknown
  misc_feature (1)..( 9): Result.003 file - promoters60/4768528
tatcaaaat

SEQ ID NO: 137863 - DNA, 9 bp, Unknown
  misc_feature (1)..( 9): Result.003 file - promoters60/4768528
ttttaaaat

SEQ ID NO: 137864 - DNA, 6 bp, Unknown
  misc_feature (1)..( 6): Result.003 file - promoters60/4768528
taacat

SEQ ID NO: 137865 - DNA, 6 bp, Unknown
  misc_feature (1)..( 6): Result.003 file - promoters60/4768528
taacat

SEQ ID NO: 137866 - DNA, 7 bp, Unknown
  misc_feature (1)..( 7): Result.003 file - promoters60/4768528
aaaatat

SEQ ID NO: 137867 - DNA, 7 bp, Unknown
  misc_feature (1)..( 7): Result.003 file - promoters60/4768528
aaattat

SEQ ID NO: 137868 - DNA, 8 bp, Unknown
  misc_feature (1)..( 8): Result.003 file - promoters60/4768528
taattaaa

SEQ ID NO: 137869 - DNA, 8 bp, Unknown
  misc_feature (1)..( 8): Result.003 file - promoters60/4768528
taactaaa

SEQ ID NO: 137870 - DNA, 6 bp, Unknown
  misc_feature (1)..( 6): Result.003 file - promoters60/4768528
aatcaa

SEQ ID NO: 137871 - DNA, 6 bp, Unknown
  misc_feature (1)..( 6): Result.003 file - promoters60/4768528
aatcaa

SEQ ID NO: 137872 - DNA, 14 bp, Unknown
  misc_feature (1)..( 14): Result.003 file - promoters60/4768528
tcaataaatacaca

SEQ ID NO: 137873 - DNA, 14 bp, Unknown
  misc_feature (1)..( 14): Result.003 file - promoters60/4768528
tcaataaatagaca

SEQ ID NO: 137874 - DNA, 7 bp, Unknown
  misc_feature (1)..( 7): Result.003 file - promoters60/4768528
aaataaa

SEQ ID NO: 137875 - DNA, 7 bp, Unknown
  misc_feature (1)..( 7): Result.003 file - promoters60/4768528
aaaaaaa

SEQ ID NO: 137876 - DNA, 9 bp, Unknown
  misc_feature (1)..( 9): Result.003 file - promoters60/4768528
ctgttttca

SEQ ID NO: 137877 - DNA, 9 bp, Unknown
  misc_feature (1)..( 9): Result.003 file - promoters60/4768528
ctgctttca

SEQ ID NO: 137878 - DNA, 7 bp, Unknown
  misc_feature (1)..( 7): Result.003 file - promoters60/4768528
attttgg

SEQ ID NO: 137879 - DNA, 7 bp, Unknown
  misc_feature (1)..( 7): Result.003 file - promoters60/4768528
attttgg

SEQ ID NO: 137880 - DNA, 8 bp, Unknown
  misc_feature (1)..( 8): Result.003 file - promoters60/4768528
tcaaattt

SEQ ID NO: 137881 - DNA, 8 bp, Unknown
  misc_feature (1)..( 8): Result.003 file - promoters60/4768528
tcaatttt

SEQ ID NO: 137882 - DNA, 7 bp, Unknown
  misc_feature (1)..( 7): Result.003 file - promoters60/4768528
gtaatgg

SEQ ID NO: 137883 - DNA, 7 bp, Unknown
  misc_feature (1)..( 7): Result.003 file - promoters60/4768528
gtattgg

SEQ ID NO: 137884 - DNA, 6 bp, Unknown
  misc_feature (1)..( 6): Result.003 file - promoters60/4768528
aaaatg

SEQ ID NO: 137885 - DNA, 6 bp, Unknown
  misc_feature (1)..( 6): Result.003 file - promoters60/4768528
aaaatg

SEQ ID NO: 137886 - DNA, 6 bp, Unknown
  misc_feature (1)..( 6): Result.003 file - promoters60/4768528
aagatt

SEQ ID NO: 137887 - DNA, 6 bp, Unknown
  misc_feature (1)..( 6): Result.003 file - promoters60/4768528
aagatt

SEQ ID NO: 137888 - DNA, 8 bp, Unknown
  misc_feature (1)..( 8): Result.003 file - promoters60/4768528
atgtaaac

SEQ ID NO: 137889 - DNA, 8 bp, Unknown
  misc_feature (1)..( 8): Result.003 file - promoters60/4768528
atgtcaac

SEQ ID NO: 137890 - DNA, 7 bp, Unknown
  misc_feature (1)..( 7): Result.003 file - promoters60/4768528
gaaaaat

SEQ ID NO: 137891 - DNA, 7 bp, Unknown
  misc_feature (1)..( 7): Result.003 file - promoters60/4768528
gaagaat

SEQ ID NO: 137892 - DNA, 7 bp, Unknown
  misc_feature (1)..( 7): Result.003 file - promoters60/4768528
caaaatt

SEQ ID NO: 137893 - DNA, 7 bp, Unknown
  misc_feature (1)..( 7): Result.003 file - promoters60/4768528
caatatt

SEQ ID NO: 137894 - DNA, 7 bp, Unknown
  misc_feature (1)..( 7): Result.003 file - promoters60/4768528
acaactt

SEQ ID NO: 137895 - DNA, 7 bp, Unknown
  misc_feature (1)..( 7): Result.003 file - promoters60/4768528
acatctt

SEQ ID NO: 137896 - DNA, 7 bp, Unknown
  misc_feature (1)..( 7): Result.003 file - promoters60/4768528
tttattt

SEQ ID NO: 137897 - DNA, 7 bp, Unknown
  misc_feature (1)..( 7): Result.003 file - promoters60/4768528
ttttttt

SEQ ID NO: 137898 - DNA, 6 bp, Unknown
  misc_feature (1)..( 6): Result.003 file - promoters60/4768528
ttggtt

SEQ ID NO: 137899 - DNA, 6 bp, Unknown
  misc_feature (1)..( 6): Result.003 file - promoters60/4768528
ttggtt

SEQ ID NO: 137900 - DNA, 6 bp, Unknown
  misc_feature (1)..( 6): Result.003 file - promoters60/4768528
aaaagt

SEQ ID NO: 137901 - DNA, 6 bp, Unknown
  misc_feature (1)..( 6): Result.003 file - promoters60/4768528
aaaagt

SEQ ID NO: 137902 - DNA, 8 bp, Unknown
  misc_feature (1)..( 8): Result.003 file - promoters60/4768547
tcaaaata

SEQ ID NO: 137903 - DNA, 8 bp, Unknown
  misc_feature (1)..( 8): Result.003 file - promoters60/4768547
ccaaaatg

SEQ ID NO: 137904 - DNA, 8 bp, Unknown
  misc_feature (1)..( 8): Result.003 file - promoters60/4768547
tcataatt

SEQ ID NO: 137905 - DNA, 8 bp, Unknown
  misc_feature (1)..( 8): Result.003 file - promoters60/4768547
acattatt

SEQ ID NO: 137906 - DNA, 14 bp, Unknown
  misc_feature (1)..( 14): Result.003 file - promoters60/4768547
ccaaacttaaacca

SEQ ID NO: 137907 - DNA, 14 bp, Unknown
  misc_feature (1)..( 14): Result.003 file - promoters60/4768547
ccaaatttaagata

SEQ ID NO: 137908 - DNA, 14 bp, Unknown
  misc_feature (1)..( 14): Result.003 file - promoters60/4768547
tttgacttaaatat

SEQ ID NO: 137909 - DNA, 14 bp, Unknown
  misc_feature (1)..( 14): Result.003 file - promoters60/4768547
cttactttatatat

SEQ ID NO: 137910 - DNA, 9 bp, Unknown
  misc_feature (1)..( 9): Result.003 file - promoters60/4768547
tgatcttgg

SEQ ID NO: 137911 - DNA, 7 bp, Unknown
  misc_feature (1)..( 7): Result.003 file - promoters60/4768547
atcttga

SEQ ID NO: 137912 - DNA, 9 bp, Unknown
  misc_feature (1)..( 9): Result.003 file - promoters60/4768547
tgaacttat

SEQ ID NO: 137913 - DNA, 8 bp, Unknown
  misc_feature (1)..( 8): Result.003 file - promoters60/4768547
aatcatga

SEQ ID NO: 137914 - DNA, 9 bp, Unknown
  misc_feature (1)..( 9): Result.003 file - promoters60/4768547
ttacacgat

SEQ ID NO: 137915 - DNA, 9 bp, Unknown
  misc_feature (1)..( 9): Result.003 file - promoters60/4768547
caacaggat

SEQ ID NO: 137916 - DNA, 9 bp, Unknown
  misc_feature (1)..( 9): Result.003 file - promoters60/4768547
ttagacgga

SEQ ID NO: 137917 - DNA, 10 bp, Unknown
  misc_feature (1)..( 10): Result.003 file - promoters60/4768547
aaagatggaa

SEQ ID NO: 137918 - DNA, 13 bp, Unknown
  misc_feature (1)..( 13): Result.003 file - promoters60/4768568
tgattgaatattc

SEQ ID NO: 137919 - DNA, 13 bp, Unknown
  misc_feature (1)..( 13): Result.003 file - promoters60/4768568
attttgcatagat

SEQ ID NO: 137920 - DNA, 13 bp, Unknown
  misc_feature (1)..( 13): Result.003 file - promoters60/4768568
cttttacataatt

SEQ ID NO: 137921 - DNA, 13 bp, Unknown
  misc_feature (1)..( 13): Result.003 file - promoters60/4768568
tggacacataatt

SEQ ID NO: 137922 - DNA, 13 bp, Unknown
  misc_feature (1)..( 13): Result.003 file - promoters60/4768568
tttttacaaaaat

SEQ ID NO: 137923 - DNA, 13 bp, Unknown
  misc_feature (1)..( 13): Result.003 file - promoters60/4768568
taggcacatagtc

SEQ ID NO: 137924 - DNA, 13 bp, Unknown
  misc_feature (1)..( 13): Result.003 file - promoters60/4768568
tttttattctatt

SEQ ID NO: 137925 - DNA, 13 bp, Unknown
  misc_feature (1)..( 13): Result.003 file - promoters60/4768568
aattttggcaaat

SEQ ID NO: 137926 - DNA, 13 bp, Unknown
  misc_feature (1)..( 13): Result.003 file - promoters60/4768568
aattttgtaaatt

SEQ ID NO: 137927 - DNA, 13 bp, Unknown
  misc_feature (1)..( 13): Result.003 file - promoters60/4768568
aattttaagtcga

SEQ ID NO: 137928 - DNA, 13 bp, Unknown
  misc_feature (1)..( 13): Result.003 file - promoters60/4768568
ctttttataatca

SEQ ID NO: 137929 - DNA, 13 bp, Unknown
  misc_feature (1)..( 13): Result.003 file - promoters60/4768568
tattttttaaatt

SEQ ID NO: 137930 - DNA, 13 bp, Unknown
  misc_feature (1)..( 13): Result.003 file - promoters60/4768568
aatttttttatac

SEQ ID NO: 137931 - DNA, 16 bp, Unknown
  misc_feature (1)..( 16): Result.003 file - promoters60/4768568
ggcataactactacaa

SEQ ID NO: 137932 - DNA, 16 bp, Unknown
  misc_feature (1)..( 16): Result.003 file - promoters60/4768568
aatacaactaatacat

SEQ ID NO: 137933 - DNA, 16 bp, Unknown
  misc_feature (1)..( 16): Result.003 file - promoters60/4768568
aatataactaaacttt

SEQ ID NO: 137934 - DNA, 16 bp, Unknown
  misc_feature (1)..( 16): Result.003 file - promoters60/4768568
ataagaaaatatacat

SEQ ID NO: 137935 - DNA, 16 bp, Unknown
  misc_feature (1)..( 16): Result.003 file - promoters60/4768568
aaattaattaaattca

SEQ ID NO: 137936 - DNA, 16 bp, Unknown
  misc_feature (1)..( 16): Result.003 file - promoters60/4768568
ccagaaatgaatttag

SEQ ID NO: 137937 - DNA, 14 bp, Unknown
  misc_feature (1)..( 14): Result.003 file - promoters60/4768568
ctactacaacaaag

SEQ ID NO: 137938 - DNA, 14 bp, Unknown
  misc_feature (1)..( 14): Result.003 file - promoters60/4768568
ttaatacaactaat

SEQ ID NO: 137939 - DNA, 14 bp, Unknown
  misc_feature (1)..( 14): Result.003 file - promoters60/4768568
aaaatataactaaa

SEQ ID NO: 137940 - DNA, 15 bp, Unknown
  misc_feature (1)..( 15): Result.003 file - promoters60/4768568
tttaaattaattaaa

SEQ ID NO: 137941 - DNA, 14 bp, Unknown
  misc_feature (1)..( 14): Result.003 file - promoters60/4768568
aaaatatacattcg

SEQ ID NO: 137942 - DNA, 15 bp, Unknown
  misc_feature (1)..( 15): Result.003 file - promoters60/4768568
cagaaatgaatttag

SEQ ID NO: 137943 - DNA, 19 bp, Unknown
  misc_feature (1)..( 19): Result.003 file - promoters60/4768568
ttaaatgatagatgtccac

SEQ ID NO: 137944 - DNA, 19 bp, Unknown
  misc_feature (1)..( 19): Result.003 file - promoters60/4768568
ttacatgaaagacacagtg

SEQ ID NO: 137945 - DNA, 19 bp, Unknown
  misc_feature (1)..( 19): Result.003 file - promoters60/4768568
gcaagaaaaagacatagcc

SEQ ID NO: 137946 - DNA, 19 bp, Unknown
  misc_feature (1)..( 19): Result.003 file - promoters60/4768568
tactaaaatagaaaaaacg

SEQ ID NO: 137947 - DNA, 19 bp, Unknown
  misc_feature (1)..( 19): Result.003 file - promoters60/4768568
tttattaatagagaaaacg

SEQ ID NO: 137948 - DNA, 19 bp, Unknown
  misc_feature (1)..( 19): Result.003 file - promoters60/4768568
tcaataaatataaatatgg

SEQ ID NO: 137949 - DNA, 10 bp, Unknown
  misc_feature (1)..( 10): Result.003 file - promoters60/4768568
actatataag

SEQ ID NO: 137950 - DNA, 10 bp, Unknown
  misc_feature (1)..( 10): Result.003 file - promoters60/4768568
tttatatata

SEQ ID NO: 137951 - DNA, 10 bp, Unknown
  misc_feature (1)..( 10): Result.003 file - promoters60/4768568
gagatataat

SEQ ID NO: 137952 - DNA, 10 bp, Unknown
  misc_feature (1)..( 10): Result.003 file - promoters60/4768568
catatatata

SEQ ID NO: 137953 - DNA, 10 bp, Unknown
  misc_feature (1)..( 10): Result.003 file - promoters60/4768568
cgtataaata

SEQ ID NO: 137954 - DNA, 10 bp, Unknown
  misc_feature (1)..( 10): Result.003 file - promoters60/4768568
tttatattct

SEQ ID NO: 137955 - DNA, 9 bp, Unknown
  misc_feature (1)..( 9): Result.003 file - promoters60/4768568
tgtttgatt

SEQ ID NO: 137956 - DNA, 9 bp, Unknown
  misc_feature (1)..( 9): Result.003 file - promoters60/4768568
atttttatt

SEQ ID NO: 137957 - DNA, 9 bp, Unknown
  misc_feature (1)..( 9): Result.003 file - promoters60/4768568
agatttatt

SEQ ID NO: 137958 - DNA, 9 bp, Unknown
  misc_feature (1)..( 9): Result.003 file - promoters60/4768568
tattttttt

SEQ ID NO: 137959 - DNA, 9 bp, Unknown
  misc_feature (1)..( 9): Result.003 file - promoters60/4768568
aatttttac

SEQ ID NO: 137960 - DNA, 9 bp, Unknown
  misc_feature (1)..( 9): Result.003 file - promoters60/4768568
tattttcga

SEQ ID NO: 137961 - DNA, 13 bp, Unknown
  misc_feature (1)..( 13): Result.003 file - promoters60/4768568
aagctaattttgc

SEQ ID NO: 137962 - DNA, 13 bp, Unknown
  misc_feature (1)..( 13): Result.003 file - promoters60/4768568
tacataattttta

SEQ ID NO: 137963 - DNA, 13 bp, Unknown
  misc_feature (1)..( 13): Result.003 file - promoters60/4768568
cacataattatga

SEQ ID NO: 137964 - DNA, 13 bp, Unknown
  misc_feature (1)..( 13): Result.003 file - promoters60/4768568
tccttcattttta

SEQ ID NO: 137965 - DNA, 13 bp, Unknown
  misc_feature (1)..( 13): Result.003 file - promoters60/4768568
cacatagtcaagt

SEQ ID NO: 137966 - DNA, 13 bp, Unknown
  misc_feature (1)..( 13): Result.003 file - promoters60/4768568
aatgttatttttt

SEQ ID NO: 137967 - DNA, 13 bp, Unknown
  misc_feature (1)..( 13): Result.003 file - promoters60/4768568
aaacatattttcg

SEQ ID NO: 137968 - DNA, 15 bp, Unknown
  misc_feature (1)..( 15): Result.003 file - promoters60/4768568
ttcgtagattgcgtg

SEQ ID NO: 137969 - DNA, 15 bp, Unknown
  misc_feature (1)..( 15): Result.003 file - promoters60/4768568
tttttagtttgtgtg

SEQ ID NO: 137970 - DNA, 15 bp, Unknown
  misc_feature (1)..( 15): Result.003 file - promoters60/4768568
tttttaatttgtgtc

SEQ ID NO: 137971 - DNA, 15 bp, Unknown
  misc_feature (1)..( 15): Result.003 file - promoters60/4768568
atttgaattttccta

SEQ ID NO: 137972 - DNA, 15 bp, Unknown
  misc_feature (1)..( 15): Result.003 file - promoters60/4768568
tttttattttttatt

SEQ ID NO: 137973 - DNA, 15 bp, Unknown
  misc_feature (1)..( 15): Result.003 file - promoters60/4768568
ccattactttactct

SEQ ID NO: 137974 - DNA, 14 bp, Unknown
  misc_feature (1)..( 14): Result.003 file - promoters60/4768568
catttagtcattta

SEQ ID NO: 137975 - DNA, 14 bp, Unknown
  misc_feature (1)..( 14): Result.003 file - promoters60/4768568
tttttagtttgtgt

SEQ ID NO: 137976 - DNA, 14 bp, Unknown
  misc_feature (1)..( 14): Result.003 file - promoters60/4768568
tttttaatttgtgt

SEQ ID NO: 137977 - DNA, 14 bp, Unknown
  misc_feature (1)..( 14): Result.003 file - promoters60/4768568
atttgaattttcct

SEQ ID NO: 137978 - DNA, 14 bp, Unknown
  misc_feature (1)..( 14): Result.003 file - promoters60/4768568
tttttattttttat

SEQ ID NO: 137979 - DNA, 14 bp, Unknown
  misc_feature (1)..( 14): Result.003 file - promoters60/4768568
ccattactttactc

SEQ ID NO: 137980 - DNA, 12 bp, Unknown
  misc_feature (1)..( 12): Result.003 file - promoters60/4768599
gttttatatatt

SEQ ID NO: 137981 - DNA, 12 bp, Unknown
  misc_feature (1)..( 12): Result.003 file - promoters60/4768599
gttatatgtatt

SEQ ID NO: 137982 - DNA, 6 bp, Unknown
  misc_feature (1)..( 6): Result.003 file - promoters60/4768599
ttaata

SEQ ID NO: 137983 - DNA, 6 bp, Unknown
  misc_feature (1)..( 6): Result.003 file - promoters60/4768599
ttaata

SEQ ID NO: 137984 - DNA, 10 bp, Unknown
  misc_feature (1)..( 10): Result.003 file - promoters60/4768599
atttggtttt

SEQ ID NO: 137985 - DNA, 10 bp, Unknown
  misc_feature (1)..( 10): Result.003 file - promoters60/4768599
ttttagttat

SEQ ID NO: 137986 - DNA, 10 bp, Unknown
  misc_feature (1)..( 10): Result.003 file - promoters60/4768599
atttgatttt

SEQ ID NO: 137987 - DNA, 8 bp, Unknown
  misc_feature (1)..( 8): Result.003 file - promoters60/4768599
tttgccgt

SEQ ID NO: 137988 - DNA, 8 bp, Unknown
  misc_feature (1)..( 8): Result.003 file - promoters60/4768599
tttgtcgt

SEQ ID NO: 137989 - DNA, 9 bp, Unknown
  misc_feature (1)..( 9): Result.003 file - promoters60/4768599
tatttagga

SEQ ID NO: 137990 - DNA, 9 bp, Unknown
  misc_feature (1)..( 9): Result.003 file - promoters60/4768599
tatttggga

SEQ ID NO: 137991 - DNA, 9 bp, Unknown
  misc_feature (1)..( 9): Result.003 file - promoters60/4768599
tgattttct

SEQ ID NO: 137992 - DNA, 9 bp, Unknown
  misc_feature (1)..( 9): Result.003 file - promoters60/4768599
tgagtttct

SEQ ID NO: 137993 - DNA, 6 bp, Unknown
  misc_feature (1)..( 6): Result.003 file - promoters60/4768599
tttttc

SEQ ID NO: 137994 - DNA, 6 bp, Unknown
  misc_feature (1)..( 6): Result.003 file - promoters60/4768599
tttttc

SEQ ID NO: 137995 - DNA, 6 bp, Unknown
  misc_feature (1)..( 6): Result.003 file - promoters60/4768599
gggaaa

SEQ ID NO: 137996 - DNA, 6 bp, Unknown
  misc_feature (1)..( 6): Result.003 file - promoters60/4768599
gggaaa

SEQ ID NO: 137997 - DNA, 6 bp, Unknown
  misc_feature (1)..( 6): Result.003 file - promoters60/4768599
tccatg

SEQ ID NO: 137998 - DNA, 6 bp, Unknown
  misc_feature (1)..( 6): Result.003 file - promoters60/4768599
tccatg

SEQ ID NO: 137999 - DNA, 8 bp, Unknown
  misc_feature (1)..( 8): Result.003 file - promoters60/4768599
ttttttct

SEQ ID NO: 138000 - DNA, 8 bp, Unknown
  misc_feature (1)..( 8): Result.003 file - promoters60/4768599
tttcttct

SEQ ID NO: 138001 - DNA, 12 bp, Unknown
  misc_feature (1)..( 12): Result.003 file - promoters60/4768599
atgctattaaat

SEQ ID NO: 138002 - DNA, 12 bp, Unknown
  misc_feature (1)..( 12): Result.003 file - promoters60/4768599
atgctcttaaat

SEQ ID NO: 138003 - DNA, 6 bp, Unknown
  misc_feature (1)..( 6): Result.003 file - promoters60/4768599
aatatt

SEQ ID NO: 138004 - DNA, 6 bp, Unknown
  misc_feature (1)..( 6): Result.003 file - promoters60/4768599
aatatt

SEQ ID NO: 138005 - DNA, 6 bp, Unknown
  misc_feature (1)..( 6): Result.003 file - promoters60/4768599
atagta

SEQ ID NO: 138006 - DNA, 6 bp, Unknown
  misc_feature (1)..( 6): Result.003 file - promoters60/4768599
atagta

SEQ ID NO: 138007 - DNA, 6 bp, Unknown
  misc_feature (1)..( 6): Result.003 file - promoters60/4768599
atacca

SEQ ID NO: 138008 - DNA, 6 bp, Unknown
  misc_feature (1)..( 6): Result.003 file - promoters60/4768599
atacca

SEQ ID NO: 138009 - DNA, 7 bp, Unknown
  misc_feature (1)..( 7): Result.003 file - promoters60/4768599
tcttata

SEQ ID NO: 138010 - DNA, 7 bp, Unknown
  misc_feature (1)..( 7): Result.003 file - promoters60/4768599
tcttata

SEQ ID NO: 138011 - DNA, 6 bp, Unknown
  misc_feature (1)..( 6): Result.003 file - promoters60/4768599
tgttca

SEQ ID NO: 138012 - DNA, 6 bp, Unknown
  misc_feature (1)..( 6): Result.003 file - promoters60/4768599
tgttca

SEQ ID NO: 138013 - DNA, 7 bp, Unknown
  misc_feature (1)..( 7): Result.003 file - promoters60/4768599
attaaat

SEQ ID NO: 138014 - DNA, 7 bp, Unknown
  misc_feature (1)..( 7): Result.003 file - promoters60/4768599
atttaat

SEQ ID NO: 138015 - DNA, 6 bp, Unknown
  misc_feature (1)..( 6): Result.003 file - promoters60/4768599
aaattt

SEQ ID NO: 138016 - DNA, 6 bp, Unknown
  misc_feature (1)..( 6): Result.003 file - promoters60/4768599
aaattt

SEQ ID NO: 138017 - DNA, 7 bp, Unknown
  misc_feature (1)..( 7): Result.003 file - promoters60/4768599
aacatga

SEQ ID NO: 138018 - DNA, 7 bp, Unknown
  misc_feature (1)..( 7): Result.003 file - promoters60/4768599
aacatga

SEQ ID NO: 138019 - DNA, 7 bp, Unknown
  misc_feature (1)..( 7): Result.003 file - promoters60/4768599
tatcttt

SEQ ID NO: 138020 - DNA, 7 bp, Unknown
  misc_feature (1)..( 7): Result.003 file - promoters60/4768599
tatgttt

SEQ ID NO: 138021 - DNA, 7 bp, Unknown
  misc_feature (1)..( 7): Result.003 file - promoters60/4768599
gagagtt

SEQ ID NO: 138022 - DNA, 7 bp, Unknown
  misc_feature (1)..( 7): Result.003 file - promoters60/4768599
gagagtt

SEQ ID NO: 138023 - DNA, 7 bp, Unknown
  misc_feature (1)..( 7): Result.003 file - promoters60/4768599
tgttttc

SEQ ID NO: 138024 - DNA, 7 bp, Unknown
  misc_feature (1)..( 7): Result.003 file - promoters60/4768599
tgtcttc

SEQ ID NO: 138025 - DNA, 9 bp, Unknown
  misc_feature (1)..( 9): Result.003 file - promoters60/4768615
gaaaatatt

SEQ ID NO: 138026 - DNA, 9 bp, Unknown
  misc_feature (1)..( 9): Result.003 file - promoters60/4768615
aaaaataag

SEQ ID NO: 138027 - DNA, 9 bp, Unknown
  misc_feature (1)..( 9): Result.003 file - promoters60/4768615
aaaaattaa

SEQ ID NO: 138028 - DNA, 9 bp, Unknown
  misc_feature (1)..( 9): Result.003 file - promoters60/4768615
taaagtata

SEQ ID NO: 138029 - DNA, 9 bp, Unknown
  misc_feature (1)..( 9): Result.003 file - promoters60/4768615
aaacatatt

SEQ ID NO: 138030 - DNA, 9 bp, Unknown
  misc_feature (1)..( 9): Result.003 file - promoters60/4768615
taaaatttc

SEQ ID NO: 138031 - DNA, 9 bp, Unknown
  misc_feature (1)..( 9): Result.003 file - promoters60/4768615
ctaaattag

SEQ ID NO: 138032 - DNA, 9 bp, Unknown
  misc_feature (1)..( 9): Result.003 file - promoters60/4768615
aaaataaat

SEQ ID NO: 138033 - DNA, 9 bp, Unknown
  misc_feature (1)..( 9): Result.003 file - promoters60/4768615
ttaataaag

SEQ ID NO: 138034 - DNA, 9 bp, Unknown
  misc_feature (1)..( 9): Result.003 file - promoters60/4768615
aaaattaat

SEQ ID NO: 138035 - DNA, 10 bp, Unknown
  misc_feature (1)..( 10): Result.003 file - promoters60/4768615
gaaatataag

SEQ ID NO: 138036 - DNA, 10 bp, Unknown
  misc_feature (1)..( 10): Result.003 file - promoters60/4768615
ttaattaaac

SEQ ID NO: 138037 - DNA, 10 bp, Unknown
  misc_feature (1)..( 10): Result.003 file - promoters60/4768615
ataatatttc

SEQ ID NO: 138038 - DNA, 10 bp, Unknown
  misc_feature (1)..( 10): Result.003 file - promoters60/4768615
attataaaat

SEQ ID NO: 138039 - DNA, 10 bp, Unknown
  misc_feature (1)..( 10): Result.003 file - promoters60/4768615
aaaacaaacg

SEQ ID NO: 138040 - DNA, 10 bp, Unknown
  misc_feature (1)..( 10): Result.003 file - promoters60/4768615
aaaaaaaaga

SEQ ID NO: 138041 - DNA, 10 bp, Unknown
  misc_feature (1)..( 10): Result.003 file - promoters60/4768615
taaataaatt

SEQ ID NO: 138042 - DNA, 10 bp, Unknown
  misc_feature (1)..( 10): Result.003 file - promoters60/4768615
caaacaaatg

SEQ ID NO: 138043 - DNA, 10 bp, Unknown
  misc_feature (1)..( 10): Result.003 file - promoters60/4768615
taaaaaaaga

SEQ ID NO: 138044 - DNA, 10 bp, Unknown
  misc_feature (1)..( 10): Result.003 file - promoters60/4768615
tatatattaa

SEQ ID NO: 138045 - DNA, 10 bp, Unknown
  misc_feature (1)..( 10): Result.003 file - promoters60/4768615
ataatgaatt

SEQ ID NO: 138046 - DNA, 11 bp, Unknown
  misc_feature (1)..( 11): Result.003 file - promoters60/4768615
ttgagtttagg

SEQ ID NO: 138047 - DNA, 11 bp, Unknown
  misc_feature (1)..( 11): Result.003 file - promoters60/4768615
ttaagtctagt

SEQ ID NO: 138048 - DNA, 11 bp, Unknown
  misc_feature (1)..( 11): Result.003 file - promoters60/4768615
gatagtttaaa

SEQ ID NO: 138049 - DNA, 11 bp, Unknown
  misc_feature (1)..( 11): Result.003 file - promoters60/4768615
ataagtttaac

SEQ ID NO: 138050 - DNA, 11 bp, Unknown
  misc_feature (1)..( 11): Result.003 file - promoters60/4768615
ataagattagt

SEQ ID NO: 138051 - DNA, 11 bp, Unknown
  misc_feature (1)..( 11): Result.003 file - promoters60/4768615
attactctagt

SEQ ID NO: 138052 - DNA, 11 bp, Unknown
  misc_feature (1)..( 11): Result.003 file - promoters60/4768615
ctaattttcta

SEQ ID NO: 138053 - DNA, 10 bp, Unknown
  misc_feature (1)..( 10): Result.003 file - promoters60/4768615
gaaaaataaa

SEQ ID NO: 138054 - DNA, 10 bp, Unknown
  misc_feature (1)..( 10): Result.003 file - promoters60/4768615
taaacatata

SEQ ID NO: 138055 - DNA, 10 bp, Unknown
  misc_feature (1)..( 10): Result.003 file - promoters60/4768615
taaaattaat

SEQ ID NO: 138056 - DNA, 10 bp, Unknown
  misc_feature (1)..( 10): Result.003 file - promoters60/4768615
gaaatataag

SEQ ID NO: 138057 - DNA, 10 bp, Unknown
  misc_feature (1)..( 10): Result.003 file - promoters60/4768615
ataaaataca

SEQ ID NO: 138058 - DNA, 10 bp, Unknown
  misc_feature (1)..( 10): Result.003 file - promoters60/4768615
tattaataaa

SEQ ID NO: 138059 - DNA, 10 bp, Unknown
  misc_feature (1)..( 10): Result.003 file - promoters60/4768615
agataatatt

SEQ ID NO: 138060 - DNA, 12 bp, Unknown
  misc_feature (1)..( 12): Result.003 file - promoters60/4768615
aataaataaaag

SEQ ID NO: 138061 - DNA, 12 bp, Unknown
  misc_feature (1)..( 12): Result.003 file - promoters60/4768615
tttaattaaaca

SEQ ID NO: 138062 - DNA, 12 bp, Unknown
  misc_feature (1)..( 12): Result.003 file - promoters60/4768615
aaacaataaaat

SEQ ID NO: 138063 - DNA, 12 bp, Unknown
  misc_feature (1)..( 12): Result.003 file - promoters60/4768615
atgaaatataag

SEQ ID NO: 138064 - DNA, 12 bp, Unknown
  misc_feature (1)..( 12): Result.003 file - promoters60/4768615
acattataaaat

SEQ ID NO: 138065 - DNA, 12 bp, Unknown
  misc_feature (1)..( 12): Result.003 file - promoters60/4768615
aaacagtaaaac

SEQ ID NO: 138066 - DNA, 12 bp, Unknown
  misc_feature (1)..( 12): Result.003 file - promoters60/4768615
tttcatttccaa

SEQ ID NO: 138067 - DNA, 10 bp, Unknown
  misc_feature (1)..( 10): Result.003 file - promoters60/4768615
atattattag

SEQ ID NO: 138068 - DNA, 10 bp, Unknown
  misc_feature (1)..( 10): Result.003 file - promoters60/4768615
atattaataa

SEQ ID NO: 138069 - DNA, 10 bp, Unknown
  misc_feature (1)..( 10): Result.003 file - promoters60/4768615
atattattag

SEQ ID NO: 138070 - DNA, 10 bp, Unknown
  misc_feature (1)..( 10): Result.003 file - promoters60/4768615
ttattatatt

SEQ ID NO: 138071 - DNA, 10 bp, Unknown
  misc_feature (1)..( 10): Result.003 file - promoters60/4768615
atataattat

SEQ ID NO: 138072 - DNA, 10 bp, Unknown
  misc_feature (1)..( 10): Result.003 file - promoters60/4768615
aactaattaa

SEQ ID NO: 138073 - DNA, 14 bp, Unknown
  misc_feature (1)..( 14): Result.003 file - promoters60/4768615
aattacaaaactac

SEQ ID NO: 138074 - DNA, 14 bp, Unknown
  misc_feature (1)..( 14): Result.003 file - promoters60/4768615
gtatacaaaaaaag

SEQ ID NO: 138075 - DNA, 14 bp, Unknown
  misc_feature (1)..( 14): Result.003 file - promoters60/4768615
caatactatctaat

SEQ ID NO: 138076 - DNA, 14 bp, Unknown
  misc_feature (1)..( 14): Result.003 file - promoters60/4768615
actcccaaaaataa

SEQ ID NO: 138077 - DNA, 14 bp, Unknown
  misc_feature (1)..( 14): Result.003 file - promoters60/4768615
aattcctaaaatca

SEQ ID NO: 138078 - DNA, 14 bp, Unknown
  misc_feature (1)..( 14): Result.003 file - promoters60/4768615
gacaaataaacata

SEQ ID NO: 138079 - DNA, 14 bp, Unknown
  misc_feature (1)..( 14): Result.003 file - promoters60/4768615
ggaaccaatatcta

SEQ ID NO: 138080 - DNA, 9 bp, Unknown
  misc_feature (1)..( 9): Result.003 file - promoters60/4768615
aatgaaaaa

SEQ ID NO: 138081 - DNA, 9 bp, Unknown
  misc_feature (1)..( 9): Result.003 file - promoters60/4768615
aatgaatta

SEQ ID NO: 138082 - DNA, 9 bp, Unknown
  misc_feature (1)..( 9): Result.003 file - promoters60/4768615
aatgaaatt

SEQ ID NO: 138083 - DNA, 9 bp, Unknown
  misc_feature (1)..( 9): Result.003 file - promoters60/4768615
aataaattt

SEQ ID NO: 138084 - DNA, 9 bp, Unknown
  misc_feature (1)..( 9): Result.003 file - promoters60/4768615
agtaaatta

SEQ ID NO: 138085 - DNA, 10 bp, Unknown
  misc_feature (1)..( 10): Result.003 file - promoters60/4768615
aatgatattc

SEQ ID NO: 138086 - DNA, 8 bp, Unknown
  misc_feature (1)..( 8): Result.003 file - promoters60/4768615
tatatata

SEQ ID NO: 138087 - DNA, 8 bp, Unknown
  misc_feature (1)..( 8): Result.003 file - promoters60/4768615
tatataaa

SEQ ID NO: 138088 - DNA, 8 bp, Unknown
  misc_feature (1)..( 8): Result.003 file - promoters60/4768615
tatatata

SEQ ID NO: 138089 - DNA, 8 bp, Unknown
  misc_feature (1)..( 8): Result.003 file - promoters60/4768615
tataaata

SEQ ID NO: 138090 - DNA, 8 bp, Unknown
  misc_feature (1)..( 8): Result.003 file - promoters60/4768615
tataaatt

SEQ ID NO: 138091 - DNA, 8 bp, Unknown
  misc_feature (1)..( 8): Result.003 file - promoters60/4768615
tatacaaa

SEQ ID NO: 138092 - DNA, 11 bp, Unknown
  misc_feature (1)..( 11): Result.003 file - promoters60/4768615
ataagattagt

SEQ ID NO: 138093 - DNA, 11 bp, Unknown
  misc_feature (1)..( 11): Result.003 file - promoters60/4768615
gtaaaatttca

SEQ ID NO: 138094 - DNA, 11 bp, Unknown
  misc_feature (1)..( 11): Result.003 file - promoters60/4768615
ataagtttaac

SEQ ID NO: 138095 - DNA, 11 bp, Unknown
  misc_feature (1)..( 11): Result.003 file - promoters60/4768615
taaaaattaaa

SEQ ID NO: 138096 - DNA, 12 bp, Unknown
  misc_feature (1)..( 12): Result.003 file - promoters60/4768615
gtaacaattcta

SEQ ID NO: 138097 - DNA, 12 bp, Unknown
  misc_feature (1)..( 12): Result.003 file - promoters60/4768615
ttgccaatacta

SEQ ID NO: 138098 - DNA, 9 bp, Unknown
  misc_feature (1)..( 9): Result.003 file - promoters60/4768631
taaatctca

SEQ ID NO: 138099 - DNA, 9 bp, Unknown
  misc_feature (1)..( 9): Result.003 file - promoters60/4768631
caaatctcg

SEQ ID NO: 138100 - DNA, 9 bp, Unknown
  misc_feature (1)..( 9): Result.003 file - promoters60/4768631
ataatttcg

SEQ ID NO: 138101 - DNA, 9 bp, Unknown
  misc_feature (1)..( 9): Result.003 file - promoters60/4768631
ataatttga

SEQ ID NO: 138102 - DNA, 8 bp, Unknown
  misc_feature (1)..( 8): Result.003 file - promoters60/4768631
ggcccatc

SEQ ID NO: 138103 - DNA, 8 bp, Unknown
  misc_feature (1)..( 8): Result.003 file - promoters60/4768631
ggcccaaa

SEQ ID NO: 138104 - DNA, 8 bp, Unknown
  misc_feature (1)..( 8): Result.003 file - promoters60/4768631
tgcccaaa

SEQ ID NO: 138105 - DNA, 8 bp, Unknown
  misc_feature (1)..( 8): Result.003 file - promoters60/4768631
ggcccaac

SEQ ID NO: 138106 - DNA, 7 bp, Unknown
  misc_feature (1)..( 7): Result.003 file - promoters60/4768690
tgtccaa

SEQ ID NO: 138107 - DNA, 7 bp, Unknown
  misc_feature (1)..( 7): Result.003 file - promoters60/4768690
tgttcaa

SEQ ID NO: 138108 - DNA, 9 bp, Unknown
  misc_feature (1)..( 9): Result.003 file - promoters60/4768690
taagaatct

SEQ ID NO: 138109 - DNA, 9 bp, Unknown
  misc_feature (1)..( 9): Result.003 file - promoters60/4768690
taagagtct

SEQ ID NO: 138110 - DNA, 7 bp, Unknown
  misc_feature (1)..( 7): Result.003 file - promoters60/4768690
ttgattt

SEQ ID NO: 138111 - DNA, 7 bp, Unknown
  misc_feature (1)..( 7): Result.003 file - promoters60/4768690
ttgtttt

SEQ ID NO: 138112 - DNA, 8 bp, Unknown
  misc_feature (1)..( 8): Result.003 file - promoters60/4768690
gatagtag

SEQ ID NO: 138113 - DNA, 8 bp, Unknown
  misc_feature (1)..( 8): Result.003 file - promoters60/4768690
gatagtac

SEQ ID NO: 138114 - DNA, 8 bp, Unknown
  misc_feature (1)..( 8): Result.003 file - promoters60/4768690
aatattag

SEQ ID NO: 138115 - DNA, 9 bp, Unknown
  misc_feature (1)..( 9): Result.003 file - promoters60/4768690
aactgttct

SEQ ID NO: 138116 - DNA, 9 bp, Unknown
  misc_feature (1)..( 9): Result.003 file - promoters60/4768690
aacggttct

SEQ ID NO: 138117 - DNA, 6 bp, Unknown
  misc_feature (1)..( 6): Result.003 file - promoters60/4768690
ataaac

SEQ ID NO: 138118 - DNA, 6 bp, Unknown
  misc_feature (1)..( 6): Result.003 file - promoters60/4768690
ataaac

SEQ ID NO: 138119 - DNA, 8 bp, Unknown
  misc_feature (1)..( 8): Result.003 file - promoters60/4768690
ctatatat

SEQ ID NO: 138120 - DNA, 8 bp, Unknown
  misc_feature (1)..( 8): Result.003 file - promoters60/4768690
ctaaatat

SEQ ID NO: 138121 - DNA, 8 bp, Unknown
  misc_feature (1)..( 8): Result.003 file - promoters60/4768690
tatataaa

SEQ ID NO: 138122 - DNA, 8 bp, Unknown
  misc_feature (1)..( 8): Result.003 file - promoters60/4768690
tatataaa

SEQ ID NO: 138123 - DNA, 8 bp, Unknown
  misc_feature (1)..( 8): Result.003 file - promoters60/4768690
gtttcaaa

SEQ ID NO: 138124 - DNA, 8 bp, Unknown
  misc_feature (1)..( 8): Result.003 file - promoters60/4768690
gtttgaaa

SEQ ID NO: 138125 - DNA, 6 bp, Unknown
  misc_feature (1)..( 6): Result.003 file - promoters60/4768690
caaaat

SEQ ID NO: 138126 - DNA, 6 bp, Unknown
  misc_feature (1)..( 6): Result.003 file - promoters60/4768690
caaaat

SEQ ID NO: 138127 - DNA, 6 bp, Unknown
  misc_feature (1)..( 6): Result.003 file - promoters60/4768690
agaatc

SEQ ID NO: 138128 - DNA, 6 bp, Unknown
  misc_feature (1)..( 6): Result.003 file - promoters60/4768690
agaatc

SEQ ID NO: 138129 - DNA, 8 bp, Unknown
  misc_feature (1)..( 8): Result.003 file - promoters60/4768690
aatccaat

SEQ ID NO: 138130 - DNA, 8 bp, Unknown
  misc_feature (1)..( 8): Result.003 file - promoters60/4768690
aatctaat

SEQ ID NO: 138131 - DNA, 7 bp, Unknown
  misc_feature (1)..( 7): Result.003 file - promoters60/4768690
ataacca

SEQ ID NO: 138132 - DNA, 7 bp, Unknown
  misc_feature (1)..( 7): Result.003 file - promoters60/4768690
ataccca

SEQ ID NO: 138133 - DNA, 6 bp, Unknown
  misc_feature (1)..( 6): Result.003 file - promoters60/4768690
aaagaa

SEQ ID NO: 138134 - DNA, 6 bp, Unknown
  misc_feature (1)..( 6): Result.003 file - promoters60/4768690
aaagaa

SEQ ID NO: 138135 - DNA, 6 bp, Unknown
  misc_feature (1)..( 6): Result.003 file - promoters60/4768690
agaaaa

SEQ ID NO: 138136 - DNA, 6 bp, Unknown
  misc_feature (1)..( 6): Result.003 file - promoters60/4768690
agaaaa

SEQ ID NO: 138137 - DNA, 8 bp, Unknown
  misc_feature (1)..( 8): Result.003 file - promoters60/4768690
ctcaatac

SEQ ID NO: 138138 - DNA, 8 bp, Unknown
  misc_feature (1)..( 8): Result.003 file - promoters60/4768690
ctcattac

SEQ ID NO: 138139 - DNA, 8 bp, Unknown
  misc_feature (1)..( 8): Result.003 file - promoters60/4768698
attagttc

SEQ ID NO: 138140 - DNA, 8 bp, Unknown
  misc_feature (1)..( 8): Result.003 file - promoters60/4768698
atttgtta

SEQ ID NO: 138141 - DNA, 8 bp, Unknown
  misc_feature (1)..( 8): Result.003 file - promoters60/4768698
attagtta

SEQ ID NO: 138142 - DNA, 8 bp, Unknown
  misc_feature (1)..( 8): Result.003 file - promoters60/4768698
attagtta

SEQ ID NO: 138143 - DNA, 8 bp, Unknown
  misc_feature (1)..( 8): Result.003 file - promoters60/4768698
aattgtta

SEQ ID NO: 138144 - DNA, 14 bp, Unknown
  misc_feature (1)..( 14): Result.003 file - promoters60/4768698
aattcgaatttttc

SEQ ID NO: 138145 - DNA, 14 bp, Unknown
  misc_feature (1)..( 14): Result.003 file - promoters60/4768698
ggccggaattttag

SEQ ID NO: 138146 - DNA, 14 bp, Unknown
  misc_feature (1)..( 14): Result.003 file - promoters60/4768698
atttgaaattttca

SEQ ID NO: 138147 - DNA, 14 bp, Unknown
  misc_feature (1)..( 14): Result.003 file - promoters60/4768698
gaatgaaatctgtc

SEQ ID NO: 138148 - DNA, 14 bp, Unknown
  misc_feature (1)..( 14): Result.003 file - promoters60/4768698
tttgaaaatttcat

SEQ ID NO: 138149 - DNA, 14 bp, Unknown
  misc_feature (1)..( 14): Result.003 file - promoters60/4768698
gcgctaaactttta

SEQ ID NO: 138150 - DNA, 16 bp, Unknown
  misc_feature (1)..( 16): Result.003 file - promoters60/4768698
attcgaatttttcaat

SEQ ID NO: 138151 - DNA, 16 bp, Unknown
  misc_feature (1)..( 16): Result.003 file - promoters60/4768698
tttagtctattttaat

SEQ ID NO: 138152 - DNA, 16 bp, Unknown
  misc_feature (1)..( 16): Result.003 file - promoters60/4768698
atttgaaattttcata

SEQ ID NO: 138153 - DNA, 16 bp, Unknown
  misc_feature (1)..( 16): Result.003 file - promoters60/4768698
caatcccaattctaac

SEQ ID NO: 138154 - DNA, 16 bp, Unknown
  misc_feature (1)..( 16): Result.003 file - promoters60/4768698
gcgctaaacttttaaa

SEQ ID NO: 138155 - DNA, 16 bp, Unknown
  misc_feature (1)..( 16): Result.003 file - promoters60/4768698
tagaaaagaatgaaat

SEQ ID NO: 138156 - DNA, 16 bp, Unknown
  misc_feature (1)..( 16): Result.003 file - promoters60/4768698
atttgaaaatttcata

SEQ ID NO: 138157 - DNA, 13 bp, Unknown
  misc_feature (1)..( 13): Result.003 file - promoters60/4768698
ttttgaagaattt

SEQ ID NO: 138158 - DNA, 13 bp, Unknown
  misc_feature (1)..( 13): Result.003 file - promoters60/4768698
ttttgatgaatgt

SEQ ID NO: 138159 - DNA, 13 bp, Unknown
  misc_feature (1)..( 13): Result.003 file - promoters60/4768698
atttgctgaataa

SEQ ID NO: 138160 - DNA, 13 bp, Unknown
  misc_feature (1)..( 13): Result.003 file - promoters60/4768698
aaaagatgaagtc

SEQ ID NO: 138161 - DNA, 13 bp, Unknown
  misc_feature (1)..( 13): Result.003 file - promoters60/4768698
tttcgatgtataa

SEQ ID NO: 138162 - DNA, 13 bp, Unknown
  misc_feature (1)..( 13): Result.003 file - promoters60/4768698
cccttgtgaatgt

SEQ ID NO: 138163 - DNA, 20 bp, Unknown
  misc_feature (1)..( 20): Result.003 file - promoters60/4768698
ataaaaatgttagataggaa

SEQ ID NO: 138164 - DNA, 20 bp, Unknown
  misc_feature (1)..( 20): Result.003 file - promoters60/4768698
tcataaattttaaaattatt

SEQ ID NO: 138165 - DNA, 20 bp, Unknown
  misc_feature (1)..( 20): Result.003 file - promoters60/4768698
tgttaaatatgaatattacc

SEQ ID NO: 138166 - DNA, 21 bp, Unknown
  misc_feature (1)..( 21): Result.003 file - promoters60/4768698
atgtaaattttgaaataattt

SEQ ID NO: 138167 - DNA, 21 bp, Unknown
  misc_feature (1)..( 21): Result.003 file - promoters60/4768698
ttaaccattgtgaaataattt

SEQ ID NO: 138168 - DNA, 21 bp, Unknown
  misc_feature (1)..( 21): Result.003 file - promoters60/4768698
agtataattgttaatcttttg

SEQ ID NO: 138169 - DNA, 10 bp, Unknown
  misc_feature (1)..( 10): Result.003 file - promoters60/4768698
tatataaaca

SEQ ID NO: 138170 - DNA, 10 bp, Unknown
  misc_feature (1)..( 10): Result.003 file - promoters60/4768698
tatataataa

SEQ ID NO: 138171 - DNA, 10 bp, Unknown
  misc_feature (1)..( 10): Result.003 file - promoters60/4768698
tatataaatg

SEQ ID NO: 138172 - DNA, 10 bp, Unknown
  misc_feature (1)..( 10): Result.003 file - promoters60/4768698
tatataaatg

SEQ ID NO: 138173 - DNA, 10 bp, Unknown
  misc_feature (1)..( 10): Result.003 file - promoters60/4768698
cctataaata

SEQ ID NO: 138174 - DNA, 10 bp, Unknown
  misc_feature (1)..( 10): Result.003 file - promoters60/4768698
acgataaata

SEQ ID NO: 138175 - DNA, 12 bp, Unknown
  misc_feature (1)..( 12): Result.003 file - promoters60/4768698
tatataaacaaa

SEQ ID NO: 138176 - DNA, 12 bp, Unknown
  misc_feature (1)..( 12): Result.003 file - promoters60/4768698
ataataaccaaa

SEQ ID NO: 138177 - DNA, 12 bp, Unknown
  misc_feature (1)..( 12): Result.003 file - promoters60/4768698
tatataaatgac

SEQ ID NO: 138178 - DNA, 12 bp, Unknown
  misc_feature (1)..( 12): Result.003 file - promoters60/4768698
tatataaatgac

SEQ ID NO: 138179 - DNA, 12 bp, Unknown
  misc_feature (1)..( 12): Result.003 file - promoters60/4768698
cctataaatatc

SEQ ID NO: 138180 - DNA, 11 bp, Unknown
  misc_feature (1)..( 11): Result.003 file - promoters60/4768698
cagaaaattcg

SEQ ID NO: 138181 - DNA, 11 bp, Unknown
  misc_feature (1)..( 11): Result.003 file - promoters60/4768698
tagaaaagaat

SEQ ID NO: 138182 - DNA, 11 bp, Unknown
  misc_feature (1)..( 11): Result.003 file - promoters60/4768698
ttgaaaatttc

SEQ ID NO: 138183 - DNA, 11 bp, Unknown
  misc_feature (1)..( 11): Result.003 file - promoters60/4768698
tagtaaatgac

SEQ ID NO: 138184 - DNA, 11 bp, Unknown
  misc_feature (1)..( 11): Result.003 file - promoters60/4768698
tttgaaatttt

SEQ ID NO: 138185 - DNA, 11 bp, Unknown
  misc_feature (1)..( 11): Result.003 file - promoters60/4768698
cgctaaacttt

SEQ ID NO: 138186 - DNA, 14 bp, Unknown
  misc_feature (1)..( 14): Result.003 file - promoters60/4768698
aaacttataattat

SEQ ID NO: 138187 - DNA, 14 bp, Unknown
  misc_feature (1)..( 14): Result.003 file - promoters60/4768698
atctttataagtat

SEQ ID NO: 138188 - DNA, 14 bp, Unknown
  misc_feature (1)..( 14): Result.003 file - promoters60/4768698
aaatttgtaacttc

SEQ ID NO: 138189 - DNA, 14 bp, Unknown
  misc_feature (1)..( 14): Result.003 file - promoters60/4768698
cgttttaaaagtaa

SEQ ID NO: 138190 - DNA, 14 bp, Unknown
  misc_feature (1)..( 14): Result.003 file - promoters60/4768698
atctttatacaaaa

SEQ ID NO: 138191 - DNA, 14 bp, Unknown
  misc_feature (1)..( 14): Result.003 file - promoters60/4768698
tatgttattagtta

SEQ ID NO: 138192 - DNA, 14 bp, Unknown
  misc_feature (1)..( 14): Result.003 file - promoters60/4768698
tatgttattagtta

SEQ ID NO: 138193 - DNA, 10 bp, Unknown
  misc_feature (1)..( 10): Result.003 file - promoters60/4768698
gtaatgtaat

SEQ ID NO: 138194 - DNA, 10 bp, Unknown
  misc_feature (1)..( 10): Result.003 file - promoters60/4768698
tgaatgtata

SEQ ID NO: 138195 - DNA, 10 bp, Unknown
  misc_feature (1)..( 10): Result.003 file - promoters60/4768698
ctaatgtgac

SEQ ID NO: 138196 - DNA, 10 bp, Unknown
  misc_feature (1)..( 10): Result.003 file - promoters60/4768698
tcgatgtata

SEQ ID NO: 138197 - DNA, 10 bp, Unknown
  misc_feature (1)..( 10): Result.003 file - promoters60/4768698
tgaatgtcaa

SEQ ID NO: 138198 - DNA, 10 bp, Unknown
  misc_feature (1)..( 10): Result.003 file - promoters60/4768698
ttatgtaaat

SEQ ID NO: 138199 - DNA, 10 bp, Unknown
  misc_feature (1)..( 10): Result.003 file - promoters60/4768698
gtatttaagc

SEQ ID NO: 138200 - DNA, 10 bp, Unknown
  misc_feature (1)..( 10): Result.003 file - promoters60/4768698
ttatgttatt

SEQ ID NO: 138201 - DNA, 10 bp, Unknown
  misc_feature (1)..( 10): Result.003 file - promoters60/4768698
aattgttaat

SEQ ID NO: 138202 - DNA, 10 bp, Unknown
  misc_feature (1)..( 10): Result.003 file - promoters60/4768698
ttatttactt

SEQ ID NO: 138203 - DNA, 14 bp, Unknown
  misc_feature (1)..( 14): Result.003 file - promoters60/4768698
tccatattatacgt

SEQ ID NO: 138204 - DNA, 14 bp, Unknown
  misc_feature (1)..( 14): Result.003 file - promoters60/4768698
caatctttatacaa

SEQ ID NO: 138205 - DNA, 14 bp, Unknown
  misc_feature (1)..( 14): Result.003 file - promoters60/4768698
atatctttataagt

SEQ ID NO: 138206 - DNA, 14 bp, Unknown
  misc_feature (1)..( 14): Result.003 file - promoters60/4768698
ataactttatgtta

SEQ ID NO: 138207 - DNA, 14 bp, Unknown
  misc_feature (1)..( 14): Result.003 file - promoters60/4768698
tttatgttattagt

SEQ ID NO: 138208 - DNA, 7 bp, Unknown
  misc_feature (1)..( 7): Result.003 file - promoters60/4768748
gtaaagt

SEQ ID NO: 138209 - DNA, 7 bp, Unknown
  misc_feature (1)..( 7): Result.003 file - promoters60/4768748
gtaaagt

SEQ ID NO: 138210 - DNA, 6 bp, Unknown
  misc_feature (1)..( 6): Result.003 file - promoters60/4768748
ttttga

SEQ ID NO: 138211 - DNA, 6 bp, Unknown
  misc_feature (1)..( 6): Result.003 file - promoters60/4768748
ttttga

SEQ ID NO: 138212 - DNA, 8 bp, Unknown
  misc_feature (1)..( 8): Result.003 file - promoters60/4768748
atttttag

SEQ ID NO: 138213 - DNA, 8 bp, Unknown
  misc_feature (1)..( 8): Result.003 file - promoters60/4768748
atttgtag

SEQ ID NO: 138214 - DNA, 7 bp, Unknown
  misc_feature (1)..( 7): Result.003 file - promoters60/4768748
ttatttt

SEQ ID NO: 138215 - DNA, 7 bp, Unknown
  misc_feature (1)..( 7): Result.003 file - promoters60/4768748
ttaattt

SEQ ID NO: 138216 - DNA, 7 bp, Unknown
  misc_feature (1)..( 7): Result.003 file - promoters60/4768748
gacctct

SEQ ID NO: 138217 - DNA, 7 bp, Unknown
  misc_feature (1)..( 7): Result.003 file - promoters60/4768748
gacttct

SEQ ID NO: 138218 - DNA, 6 bp, Unknown
  misc_feature (1)..( 6): Result.003 file - promoters60/4768748
tgagct

SEQ ID NO: 138219 - DNA, 6 bp, Unknown
  misc_feature (1)..( 6): Result.003 file - promoters60/4768748
tgagct

SEQ ID NO: 138220 - DNA, 8 bp, Unknown
  misc_feature (1)..( 8): Result.003 file - promoters60/4768748
gctttctc

SEQ ID NO: 138221 - DNA, 8 bp, Unknown
  misc_feature (1)..( 8): Result.003 file - promoters60/4768748
gcttactc

SEQ ID NO: 138222 - DNA, 8 bp, Unknown
  misc_feature (1)..( 8): Result.003 file - promoters60/4768748
ttagctca

SEQ ID NO: 138223 - DNA, 8 bp, Unknown
  misc_feature (1)..( 8): Result.003 file - promoters60/4768748
ttagttca

SEQ ID NO: 138224 - DNA, 7 bp, Unknown
  misc_feature (1)..( 7): Result.003 file - promoters60/4768748
actcgta

SEQ ID NO: 138225 - DNA, 7 bp, Unknown
  misc_feature (1)..( 7): Result.003 file - promoters60/4768748
actggta

SEQ ID NO: 138226 - DNA, 9 bp, Unknown
  misc_feature (1)..( 9): Result.003 file - promoters60/4768748
tgaaaaact

SEQ ID NO: 138227 - DNA, 9 bp, Unknown
  misc_feature (1)..( 9): Result.003 file - promoters60/4768748
tgaaaaact

SEQ ID NO: 138228 - DNA, 8 bp, Unknown
  misc_feature (1)..( 8): Result.003 file - promoters60/4768748
aatcaagt

SEQ ID NO: 138229 - DNA, 8 bp, Unknown
  misc_feature (1)..( 8): Result.003 file - promoters60/4768748
aatcaagt

SEQ ID NO: 138230 - DNA, 7 bp, Unknown
  misc_feature (1)..( 7): Result.003 file - promoters60/4768748
caaaaaa

SEQ ID NO: 138231 - DNA, 7 bp, Unknown
  misc_feature (1)..( 7): Result.003 file - promoters60/4768748
caacaaa

SEQ ID NO: 138232 - DNA, 8 bp, Unknown
  misc_feature (1)..( 8): Result.003 file - promoters60/4768778
gtttttgt

SEQ ID NO: 138233 - DNA, 8 bp, Unknown
  misc_feature (1)..( 8): Result.003 file - promoters60/4768778
gtttttgg

SEQ ID NO: 138234 - DNA, 8 bp, Unknown
  misc_feature (1)..( 8): Result.003 file - promoters60/4768778
acttttgt

SEQ ID NO: 138235 - DNA, 10 bp, Unknown
  misc_feature (1)..( 10): Result.003 file - promoters60/4768778
ttgtcttttc

SEQ ID NO: 138236 - DNA, 10 bp, Unknown
  misc_feature (1)..( 10): Result.003 file - promoters60/4768778
ttgtattttt

SEQ ID NO: 138237 - DNA, 10 bp, Unknown
  misc_feature (1)..( 10): Result.003 file - promoters60/4768778
tcaaattttt

SEQ ID NO: 138238 - DNA, 7 bp, Unknown
  misc_feature (1)..( 7): Result.003 file - promoters60/4768782
attgtgt

SEQ ID NO: 138239 - DNA, 7 bp, Unknown
  misc_feature (1)..( 7): Result.003 file - promoters60/4768782
attctgt

SEQ ID NO: 138240 - DNA, 7 bp, Unknown
  misc_feature (1)..( 7): Result.003 file - promoters60/4768782
tttgtgt

SEQ ID NO: 138241 - DNA, 11 bp, Unknown
  misc_feature (1)..( 11): Result.003 file - promoters60/4768782
ttgggaaatgt

SEQ ID NO: 138242 - DNA, 11 bp, Unknown
  misc_feature (1)..( 11): Result.003 file - promoters60/4768782
atggaaaatgt

SEQ ID NO: 138243 - DNA, 11 bp, Unknown
  misc_feature (1)..( 11): Result.003 file - promoters60/4768782
ttggaaaatat

SEQ ID NO: 138244 - DNA, 8 bp, Unknown
  misc_feature (1)..( 8): Result.003 file - promoters60/4768782
atttttca

SEQ ID NO: 138245 - DNA, 8 bp, Unknown
  misc_feature (1)..( 8): Result.003 file - promoters60/4768782
attattct

SEQ ID NO: 138246 - DNA, 8 bp, Unknown
  misc_feature (1)..( 8): Result.003 file - promoters60/4768782
cttattct

SEQ ID NO: 138247 - DNA, 10 bp, Unknown
  misc_feature (1)..( 10): Result.003 file - promoters60/4768782
aagaaaatct

SEQ ID NO: 138248 - DNA, 10 bp, Unknown
  misc_feature (1)..( 10): Result.003 file - promoters60/4768782
aagtaaatga

SEQ ID NO: 138249 - DNA, 10 bp, Unknown
  misc_feature (1)..( 10): Result.003 file - promoters60/4768782
tcttaaatga

SEQ ID NO: 138250 - DNA, 11 bp, Unknown
  misc_feature (1)..( 11): Result.003 file - promoters60/4768782
ttcttattgtt

SEQ ID NO: 138251 - DNA, 11 bp, Unknown
  misc_feature (1)..( 11): Result.003 file - promoters60/4768782
ttctcattagc

SEQ ID NO: 138252 - DNA, 11 bp, Unknown
  misc_feature (1)..( 11): Result.003 file - promoters60/4768782
ggtttaatgtt

SEQ ID NO: 138253 - DNA, 7 bp, Unknown
  misc_feature (1)..( 7): Result.003 file - promoters60/4768804
aattttg

SEQ ID NO: 138254 - DNA, 7 bp, Unknown
  misc_feature (1)..( 7): Result.003 file - promoters60/4768804
aattttg

SEQ ID NO: 138255 - DNA, 6 bp, Unknown
  misc_feature (1)..( 6): Result.003 file - promoters60/4768804
ctaaca

SEQ ID NO: 138256 - DNA, 6 bp, Unknown
  misc_feature (1)..( 6): Result.003 file - promoters60/4768804
ctaaca

SEQ ID NO: 138257 - DNA, 8 bp, Unknown
  misc_feature (1)..( 8): Result.003 file - promoters60/4768804
ataagata

SEQ ID NO: 138258 - DNA, 8 bp, Unknown
  misc_feature (1)..( 8): Result.003 file - promoters60/4768804
atatgata

SEQ ID NO: 138259 - DNA, 7 bp, Unknown
  misc_feature (1)..( 7): Result.003 file - promoters60/4768804
aataaaa

SEQ ID NO: 138260 - DNA, 7 bp, Unknown
  misc_feature (1)..( 7): Result.003 file - promoters60/4768804
aataaaa

SEQ ID NO: 138261 - DNA, 10 bp, Unknown
  misc_feature (1)..( 10): Result.003 file - promoters60/4768804
aatagataaa

SEQ ID NO: 138262 - DNA, 10 bp, Unknown
  misc_feature (1)..( 10): Result.003 file - promoters60/4768804
aatagttaaa

SEQ ID NO: 138263 - DNA, 8 bp, Unknown
  misc_feature (1)..( 8): Result.003 file - promoters60/4768804
ttgataaa

SEQ ID NO: 138264 - DNA, 8 bp, Unknown
  misc_feature (1)..( 8): Result.003 file - promoters60/4768804
ttgagaaa

SEQ ID NO: 138265 - DNA, 6 bp, Unknown
  misc_feature (1)..( 6): Result.003 file - promoters60/4768804
gttaag

SEQ ID NO: 138266 - DNA, 6 bp, Unknown
  misc_feature (1)..( 6): Result.003 file - promoters60/4768804
gttaag

SEQ ID NO: 138267 - DNA, 7 bp, Unknown
  misc_feature (1)..( 7): Result.003 file - promoters60/4768804
agagaca

SEQ ID NO: 138268 - DNA, 7 bp, Unknown
  misc_feature (1)..( 7): Result.003 file - promoters60/4768804
agataca

SEQ ID NO: 138269 - DNA, 6 bp, Unknown
  misc_feature (1)..( 6): Result.003 file - promoters60/4768804
tgctaa

SEQ ID NO: 138270 - DNA, 6 bp, Unknown
  misc_feature (1)..( 6): Result.003 file - promoters60/4768804
tgctaa

SEQ ID NO: 138271 - DNA, 6 bp, Unknown
  misc_feature (1)..( 6): Result.003 file - promoters60/4768804
attata

SEQ ID NO: 138272 - DNA, 6 bp, Unknown
  misc_feature (1)..( 6): Result.003 file - promoters60/4768804
attata

SEQ ID NO: 138273 - DNA, 7 bp, Unknown
  misc_feature (1)..( 7): Result.003 file - promoters60/4768804
tttaaag

SEQ ID NO: 138274 - DNA, 7 bp, Unknown
  misc_feature (1)..( 7): Result.003 file - promoters60/4768804
tttcaag

SEQ ID NO: 138275 - DNA, 6 bp, Unknown
  misc_feature (1)..( 6): Result.003 file - promoters60/4768811
aaagta

SEQ ID NO: 138276 - DNA, 6 bp, Unknown
  misc_feature (1)..( 6): Result.003 file - promoters60/4768811
aaagta

SEQ ID NO: 138277 - DNA, 7 bp, Unknown
  misc_feature (1)..( 7): Result.003 file - promoters60/4768811
tcccact

SEQ ID NO: 138278 - DNA, 7 bp, Unknown
  misc_feature (1)..( 7): Result.003 file - promoters60/4768811
tccgact

SEQ ID NO: 138279 - DNA, 6 bp, Unknown
  misc_feature (1)..( 6): Result.003 file - promoters60/4768811
tacgcg

SEQ ID NO: 138280 - DNA, 6 bp, Unknown
  misc_feature (1)..( 6): Result.003 file - promoters60/4768811
tacgcg

SEQ ID NO: 138281 - DNA, 7 bp, Unknown
  misc_feature (1)..( 7): Result.003 file - promoters60/4768811
ctaattt

SEQ ID NO: 138282 - DNA, 7 bp, Unknown
  misc_feature (1)..( 7): Result.003 file - promoters60/4768811
ctagttt

SEQ ID NO: 138283 - DNA, 6 bp, Unknown
  misc_feature (1)..( 6): Result.003 file - promoters60/4768811
tttgga

SEQ ID NO: 138284 - DNA, 6 bp, Unknown
  misc_feature (1)..( 6): Result.003 file - promoters60/4768811
tttgga

SEQ ID NO: 138285 - DNA, 6 bp, Unknown
  misc_feature (1)..( 6): Result.003 file - promoters60/4768811
gatttg

SEQ ID NO: 138286 - DNA, 6 bp, Unknown
  misc_feature (1)..( 6): Result.003 file - promoters60/4768811
gatttg

SEQ ID NO: 138287 - DNA, 8 bp, Unknown
  misc_feature (1)..( 8): Result.003 file - promoters60/4768811
aaaacttt

SEQ ID NO: 138288 - DNA, 8 bp, Unknown
  misc_feature (1)..( 8): Result.003 file - promoters60/4768811
aaatcttt

SEQ ID NO: 138289 - DNA, 8 bp, Unknown
  misc_feature (1)..( 8): Result.003 file - promoters60/4768811
gagttgct

SEQ ID NO: 138290 - DNA, 8 bp, Unknown
  misc_feature (1)..( 8): Result.003 file - promoters60/4768811
gaggtgct

SEQ ID NO: 138291 - DNA, 7 bp, Unknown
  misc_feature (1)..( 7): Result.003 file - promoters60/4768811
gagcttc

SEQ ID NO: 138292 - DNA, 7 bp, Unknown
  misc_feature (1)..( 7): Result.003 file - promoters60/4768811
gagtttc

SEQ ID NO: 138293 - DNA, 6 bp, Unknown
  misc_feature (1)..( 6): Result.003 file - promoters60/4768811
ttagat

SEQ ID NO: 138294 - DNA, 6 bp, Unknown
  misc_feature (1)..( 6): Result.003 file - promoters60/4768811
ttagat

SEQ ID NO: 138295 - DNA, 7 bp, Unknown
  misc_feature (1)..( 7): Result.003 file - promoters60/4768811
tgtaaaa

SEQ ID NO: 138296 - DNA, 7 bp, Unknown
  misc_feature (1)..( 7): Result.003 file - promoters60/4768811
tgtgaaa

SEQ ID NO: 138297 - DNA, 7 bp, Unknown
  misc_feature (1)..( 7): Result.003 file - promoters60/4768811
aagtttg

SEQ ID NO: 138298 - DNA, 7 bp, Unknown
  misc_feature (1)..( 7): Result.003 file - promoters60/4768811
aagtttg

SEQ ID NO: 138299 - DNA, 7 bp, Unknown
  misc_feature (1)..( 7): Result.003 file - promoters60/4768811
taaataa

SEQ ID NO: 138300 - DNA, 7 bp, Unknown
  misc_feature (1)..( 7): Result.003 file - promoters60/4768811
taattaa

SEQ ID NO: 138301 - DNA, 10 bp, Unknown
  misc_feature (1)..( 10): Result.003 file - promoters60/4768829
taaaaattaa

SEQ ID NO: 138302 - DNA, 10 bp, Unknown
  misc_feature (1)..( 10): Result.003 file - promoters60/4768829
gtaaaatttc

SEQ ID NO: 138303 - DNA, 11 bp, Unknown
  misc_feature (1)..( 11): Result.003 file - promoters60/4768829
ctaaatattag

SEQ ID NO: 138304 - DNA, 11 bp, Unknown
  misc_feature (1)..( 11): Result.003 file - promoters60/4768829
gtaacaattct

SEQ ID NO: 138305 - DNA, 11 bp, Unknown
  misc_feature (1)..( 11): Result.003 file - promoters60/4768829
cccaaaattga

SEQ ID NO: 138306 - DNA, 11 bp, Unknown
  misc_feature (1)..( 11): Result.003 file - promoters60/4768829
ttcgaaatgga

SEQ ID NO: 138307 - DNA, 11 bp, Unknown
  misc_feature (1)..( 11): Result.003 file - promoters60/4768829
ggaacaagtct

SEQ ID NO: 138308 - DNA, 11 bp, Unknown
  misc_feature (1)..( 11): Result.003 file - promoters60/4768829
atcgaaaagaa

SEQ ID NO: 138309 - DNA, 14 bp, Unknown
  misc_feature (1)..( 14): Result.003 file - promoters60/4768829
taaataaatttttg

SEQ ID NO: 138310 - DNA, 14 bp, Unknown
  misc_feature (1)..( 14): Result.003 file - promoters60/4768829
caaacaaatgtttg

SEQ ID NO: 138311 - DNA, 14 bp, Unknown
  misc_feature (1)..( 14): Result.003 file - promoters60/4768829
taaaaaaagaagaa

SEQ ID NO: 138312 - DNA, 14 bp, Unknown
  misc_feature (1)..( 14): Result.003 file - promoters60/4768829
taaaccaatgttta

SEQ ID NO: 138313 - DNA, 14 bp, Unknown
  misc_feature (1)..( 14): Result.003 file - promoters60/4768829
ctaactgatttttc

SEQ ID NO: 138314 - DNA, 14 bp, Unknown
  misc_feature (1)..( 14): Result.003 file - promoters60/4768829
agccaaaatgaacc

SEQ ID NO: 138315 - DNA, 9 bp, Unknown
  misc_feature (1)..( 9): Result.003 file - promoters60/4768829
atattatta

SEQ ID NO: 138316 - DNA, 9 bp, Unknown
  misc_feature (1)..( 9): Result.003 file - promoters60/4768829
ttattatat

SEQ ID NO: 138317 - DNA, 9 bp, Unknown
  misc_feature (1)..( 9): Result.003 file - promoters60/4768829
gtattttta

SEQ ID NO: 138318 - DNA, 9 bp, Unknown
  misc_feature (1)..( 9): Result.003 file - promoters60/4768829
atataatta

SEQ ID NO: 138319 - DNA, 9 bp, Unknown
  misc_feature (1)..( 9): Result.003 file - promoters60/4768829
ttattatgt

SEQ ID NO: 138320 - DNA, 10 bp, Unknown
  misc_feature (1)..( 10): Result.003 file - promoters60/4768829
aaatgaattt

SEQ ID NO: 138321 - DNA, 13 bp, Unknown
  misc_feature (1)..( 13): Result.003 file - promoters60/4768829
ttaaatgctagaa

SEQ ID NO: 138322 - DNA, 13 bp, Unknown
  misc_feature (1)..( 13): Result.003 file - promoters60/4768829
aacaattctaatt

SEQ ID NO: 138323 - DNA, 13 bp, Unknown
  misc_feature (1)..( 13): Result.003 file - promoters60/4768829
gttgcttctaaat

SEQ ID NO: 138324 - DNA, 13 bp, Unknown
  misc_feature (1)..( 13): Result.003 file - promoters60/4768829
aaatattcgaaat

SEQ ID NO: 138325 - DNA, 13 bp, Unknown
  misc_feature (1)..( 13): Result.003 file - promoters60/4768829
aacaagtctctat

SEQ ID NO: 138326 - DNA, 13 bp, Unknown
  misc_feature (1)..( 13): Result.003 file - promoters60/4768829
gttatatcgaaaa

SEQ ID NO: 138327 - DNA, 8 bp, Unknown
  misc_feature (1)..( 8): Result.003 file - promoters60/4768848
tggaaaat

SEQ ID NO: 138328 - DNA, 8 bp, Unknown
  misc_feature (1)..( 8): Result.003 file - promoters60/4768848
tggaaaat

SEQ ID NO: 138329 - DNA, 8 bp, Unknown
  misc_feature (1)..( 8): Result.003 file - promoters60/4768848
ttctgact

SEQ ID NO: 138330 - DNA, 8 bp, Unknown
  misc_feature (1)..( 8): Result.003 file - promoters60/4768848
ttcttact

SEQ ID NO: 138331 - DNA, 6 bp, Unknown
  misc_feature (1)..( 6): Result.003 file - promoters60/4768848
aatgat

SEQ ID NO: 138332 - DNA, 6 bp, Unknown
  misc_feature (1)..( 6): Result.003 file - promoters60/4768848
aatgat

SEQ ID NO: 138333 - DNA, 9 bp, Unknown
  misc_feature (1)..( 9): Result.003 file - promoters60/4768848
atctccatc

SEQ ID NO: 138334 - DNA, 9 bp, Unknown
  misc_feature (1)..( 9): Result.003 file - promoters60/4768848
tactccatt

SEQ ID NO: 138335 - DNA, 9 bp, Unknown
  misc_feature (1)..( 9): Result.003 file - promoters60/4768848
tactcaatt

SEQ ID NO: 138336 - DNA, 10 bp, Unknown
  misc_feature (1)..( 10): Result.003 file - promoters60/4768848
ttttacggtt

SEQ ID NO: 138337 - DNA, 10 bp, Unknown
  misc_feature (1)..( 10): Result.003 file - promoters60/4768848
ttttaaggtt

SEQ ID NO: 138338 - DNA, 7 bp, Unknown
  misc_feature (1)..( 7): Result.003 file - promoters60/4768848
gttttat

SEQ ID NO: 138339 - DNA, 7 bp, Unknown
  misc_feature (1)..( 7): Result.003 file - promoters60/4768848
gttatat

SEQ ID NO: 138340 - DNA, 6 bp, Unknown
  misc_feature (1)..( 6): Result.003 file - promoters60/4768848
attttt

SEQ ID NO: 138341 - DNA, 6 bp, Unknown
  misc_feature (1)..( 6): Result.003 file - promoters60/4768848
attttt

SEQ ID NO: 138342 - DNA, 6 bp, Unknown
  misc_feature (1)..( 6): Result.003 file - promoters60/4768848
tccaaa

SEQ ID NO: 138343 - DNA, 6 bp, Unknown
  misc_feature (1)..( 6): Result.003 file - promoters60/4768848
tccaaa

SEQ ID NO: 138344 - DNA, 7 bp, Unknown
  misc_feature (1)..( 7): Result.003 file - promoters60/4768848
attaaat

SEQ ID NO: 138345 - DNA, 7 bp, Unknown
  misc_feature (1)..( 7): Result.003 file - promoters60/4768848
attaaaa

SEQ ID NO: 138346 - DNA, 8 bp, Unknown
  misc_feature (1)..( 8): Result.003 file - promoters60/4768848
tttataat

SEQ ID NO: 138347 - DNA, 7 bp, Unknown
  misc_feature (1)..( 7): Result.003 file - promoters60/4768848
tttctca

SEQ ID NO: 138348 - DNA, 7 bp, Unknown
  misc_feature (1)..( 7): Result.003 file - promoters60/4768848
tttctca

SEQ ID NO: 138349 - DNA, 8 bp, Unknown
  misc_feature (1)..( 8): Result.003 file - promoters60/4768848
cattttct

SEQ ID NO: 138350 - DNA, 8 bp, Unknown
  misc_feature (1)..( 8): Result.003 file - promoters60/4768848
cattctct

SEQ ID NO: 138351 - DNA, 6 bp, Unknown
  misc_feature (1)..( 6): Result.003 file - promoters60/4768848
aagaaa

SEQ ID NO: 138352 - DNA, 6 bp, Unknown
  misc_feature (1)..( 6): Result.003 file - promoters60/4768848
aagaaa

SEQ ID NO: 138353 - DNA, 7 bp, Unknown
  misc_feature (1)..( 7): Result.003 file - promoters60/4768848
agaaagt

SEQ ID NO: 138354 - DNA, 7 bp, Unknown
  misc_feature (1)..( 7): Result.003 file - promoters60/4768848
agatagt

SEQ ID NO: 138355 - DNA, 6 bp, Unknown
  misc_feature (1)..( 6): Result.003 file - promoters60/4768848
aaatgc

SEQ ID NO: 138356 - DNA, 6 bp, Unknown
  misc_feature (1)..( 6): Result.003 file - promoters60/4768848
aaatgc

SEQ ID NO: 138357 - DNA, 21 bp, Unknown
  misc_feature (1)..( 21): Result.003 file - promoters60/4768856
aaagtgattctatttttatat

SEQ ID NO: 138358 - DNA, 21 bp, Unknown
  misc_feature (1)..( 21): Result.003 file - promoters60/4768856
gtaacaattctaattttctaa

SEQ ID NO: 138359 - DNA, 21 bp, Unknown
  misc_feature (1)..( 21): Result.003 file - promoters60/4768856
tgtgtgaatttgtttttgata

SEQ ID NO: 138360 - DNA, 21 bp, Unknown
  misc_feature (1)..( 21): Result.003 file - promoters60/4768856
accttcgtgttaattgtctcc

SEQ ID NO: 138361 - DNA, 21 bp, Unknown
  misc_feature (1)..( 21): Result.003 file - promoters60/4768856
ggaacaagtctctatgacacg

SEQ ID NO: 138362 - DNA, 21 bp, Unknown
  misc_feature (1)..( 21): Result.003 file - promoters60/4768856
ggagcaatagagaagcaagct

SEQ ID NO: 138363 - DNA, 12 bp, Unknown
  misc_feature (1)..( 12): Result.003 file - promoters60/4768856
atttgatataca

SEQ ID NO: 138364 - DNA, 12 bp, Unknown
  misc_feature (1)..( 12): Result.003 file - promoters60/4768856
gtttgttataca

SEQ ID NO: 138365 - DNA, 12 bp, Unknown
  misc_feature (1)..( 12): Result.003 file - promoters60/4768856
ttttgattaaat

SEQ ID NO: 138366 - DNA, 12 bp, Unknown
  misc_feature (1)..( 12): Result.003 file - promoters60/4768856
ctgcattaaaca

SEQ ID NO: 138367 - DNA, 12 bp, Unknown
  misc_feature (1)..( 12): Result.003 file - promoters60/4768856
acttggtatatt

SEQ ID NO: 138368 - DNA, 12 bp, Unknown
  misc_feature (1)..( 12): Result.003 file - promoters60/4768856
ttttgaccgagt

SEQ ID NO: 138369 - DNA, 11 bp, Unknown
  misc_feature (1)..( 11): Result.003 file - promoters60/4768856
tatgtaaatta

SEQ ID NO: 138370 - DNA, 11 bp, Unknown
  misc_feature (1)..( 11): Result.003 file - promoters60/4768856
ttggtatatta

SEQ ID NO: 138371 - DNA, 11 bp, Unknown
  misc_feature (1)..( 11): Result.003 file - promoters60/4768856
tgattaaattg

SEQ ID NO: 138372 - DNA, 11 bp, Unknown
  misc_feature (1)..( 11): Result.003 file - promoters60/4768856
agatcaaatag

SEQ ID NO: 138373 - DNA, 11 bp, Unknown
  misc_feature (1)..( 11): Result.003 file - promoters60/4768856
cgataaaacaa

SEQ ID NO: 138374 - DNA, 11 bp, Unknown
  misc_feature (1)..( 11): Result.003 file - promoters60/4768856
ttgttatacat

SEQ ID NO: 138375 - DNA, 10 bp, Unknown
  misc_feature (1)..( 10): Result.003 file - promoters60/4768856
aattaatttg

SEQ ID NO: 138376 - DNA, 10 bp, Unknown
  misc_feature (1)..( 10): Result.003 file - promoters60/4768856
tattaattta

SEQ ID NO: 138377 - DNA, 10 bp, Unknown
  misc_feature (1)..( 10): Result.003 file - promoters60/4768856
gattaaattg

SEQ ID NO: 138378 - DNA, 10 bp, Unknown
  misc_feature (1)..( 10): Result.003 file - promoters60/4768856
gatcaaatag

SEQ ID NO: 138379 - DNA, 10 bp, Unknown
  misc_feature (1)..( 10): Result.003 file - promoters60/4768856
gataaaacaa

SEQ ID NO: 138380 - DNA, 10 bp, Unknown
  misc_feature (1)..( 10): Result.003 file - promoters60/4768856
cattaaacaa

SEQ ID NO: 138381 - DNA, 10 bp, Unknown
  misc_feature (1)..( 10): Result.003 file - promoters60/4768856
tttagtgtct

SEQ ID NO: 138382 - DNA, 10 bp, Unknown
  misc_feature (1)..( 10): Result.003 file - promoters60/4768856
tgcagtgtct

SEQ ID NO: 138383 - DNA, 10 bp, Unknown
  misc_feature (1)..( 10): Result.003 file - promoters60/4768856
tttattgtta

SEQ ID NO: 138384 - DNA, 10 bp, Unknown
  misc_feature (1)..( 10): Result.003 file - promoters60/4768856
tttatttctt

SEQ ID NO: 138385 - DNA, 10 bp, Unknown
  misc_feature (1)..( 10): Result.003 file - promoters60/4768856
tttattttat

SEQ ID NO: 138386 - DNA, 10 bp, Unknown
  misc_feature (1)..( 10): Result.003 file - promoters60/4768856
tttttttttt

SEQ ID NO: 138387 - DNA, 11 bp, Unknown
  misc_feature (1)..( 11): Result.003 file - promoters60/4768856
acacttttttt

SEQ ID NO: 138388 - DNA, 11 bp, Unknown
  misc_feature (1)..( 11): Result.003 file - promoters60/4768856
ttcctttattt

SEQ ID NO: 138389 - DNA, 11 bp, Unknown
  misc_feature (1)..( 11): Result.003 file - promoters60/4768856
ctattttattg

SEQ ID NO: 138390 - DNA, 11 bp, Unknown
  misc_feature (1)..( 11): Result.003 file - promoters60/4768856
ttattttattt

SEQ ID NO: 138391 - DNA, 11 bp, Unknown
  misc_feature (1)..( 11): Result.003 file - promoters60/4768856
cacatttctgc

SEQ ID NO: 138392 - DNA, 11 bp, Unknown
  misc_feature (1)..( 11): Result.003 file - promoters60/4768856
aaggttttttt

SEQ ID NO: 138393 - DNA, 10 bp, Unknown
  misc_feature (1)..( 10): Result.003 file - promoters60/4768856
taataaaaaa

SEQ ID NO: 138394 - DNA, 10 bp, Unknown
  misc_feature (1)..( 10): Result.003 file - promoters60/4768856
taattaaaaa

SEQ ID NO: 138395 - DNA, 10 bp, Unknown
  misc_feature (1)..( 10): Result.003 file - promoters60/4768856
acataaaatc

SEQ ID NO: 138396 - DNA, 10 bp, Unknown
  misc_feature (1)..( 10): Result.003 file - promoters60/4768856
agccaaaaaa

SEQ ID NO: 138397 - DNA, 10 bp, Unknown
  misc_feature (1)..( 10): Result.003 file - promoters60/4768856
gagtaacaac

SEQ ID NO: 138398 - DNA, 10 bp, Unknown
  misc_feature (1)..( 10): Result.003 file - promoters60/4768856
cagtaaataa

SEQ ID NO: 138399 - DNA, 6 bp, Unknown
  misc_feature (1)..( 6): Result.003 file - promoters60/4768928
gtttca

SEQ ID NO: 138400 - DNA, 6 bp, Unknown
  misc_feature (1)..( 6): Result.003 file - promoters60/4768928
gtttca

SEQ ID NO: 138401 - DNA, 8 bp, Unknown
  misc_feature (1)..( 8): Result.003 file - promoters60/4768928
ttcagatc

SEQ ID NO: 138402 - DNA, 8 bp, Unknown
  misc_feature (1)..( 8): Result.003 file - promoters60/4768928
ttcatatc

SEQ ID NO: 138403 - DNA, 10 bp, Unknown
  misc_feature (1)..( 10): Result.003 file - promoters60/4768928
tagttgtgtt

SEQ ID NO: 138404 - DNA, 10 bp, Unknown
  misc_feature (1)..( 10): Result.003 file - promoters60/4768928
tagatgtgtt

SEQ ID NO: 138405 - DNA, 6 bp, Unknown
  misc_feature (1)..( 6): Result.003 file - promoters60/4768928
gcaata

SEQ ID NO: 138406 - DNA, 6 bp, Unknown
  misc_feature (1)..( 6): Result.003 file - promoters60/4768928
gcaata

SEQ ID NO: 138407 - DNA, 8 bp, Unknown
  misc_feature (1)..( 8): Result.003 file - promoters60/4768928
aaagaaaa

SEQ ID NO: 138408 - DNA, 8 bp, Unknown
  misc_feature (1)..( 8): Result.003 file - promoters60/4768928
aaagaaag

SEQ ID NO: 138409 - DNA, 8 bp, Unknown
  misc_feature (1)..( 8): Result.003 file - promoters60/4768928
aaacaaaa

SEQ ID NO: 138410 - DNA, 10 bp, Unknown
  misc_feature (1)..( 10): Result.003 file - promoters60/4768928
aaagaaaaga

SEQ ID NO: 138411 - DNA, 10 bp, Unknown
  misc_feature (1)..( 10): Result.003 file - promoters60/4768928
ttggaaaaga

SEQ ID NO: 138412 - DNA, 10 bp, Unknown
  misc_feature (1)..( 10): Result.003 file - promoters60/4768928
aaacaaaaac

SEQ ID NO: 138413 - DNA, 8 bp, Unknown
  misc_feature (1)..( 8): Result.003 file - promoters60/4768928
agatttta

SEQ ID NO: 138414 - DNA, 8 bp, Unknown
  misc_feature (1)..( 8): Result.003 file - promoters60/4768928
agaattta

SEQ ID NO: 138415 - DNA, 9 bp, Unknown
  misc_feature (1)..( 9): Result.003 file - promoters60/4768928
agaaatttg

SEQ ID NO: 138416 - DNA, 9 bp, Unknown
  misc_feature (1)..( 9): Result.003 file - promoters60/4768928
agatatttg

SEQ ID NO: 138417 - DNA, 8 bp, Unknown
  misc_feature (1)..( 8): Result.003 file - promoters60/4768928
tgtttgaa

SEQ ID NO: 138418 - DNA, 8 bp, Unknown
  misc_feature (1)..( 8): Result.003 file - promoters60/4768928
tgttggaa

SEQ ID NO: 138419 - DNA, 11 bp, Unknown
  misc_feature (1)..( 11): Result.003 file - promoters60/4768928
agtgcaagata

SEQ ID NO: 138420 - DNA, 11 bp, Unknown
  misc_feature (1)..( 11): Result.003 file - promoters60/4768928
agtgaaagata

SEQ ID NO: 138421 - DNA, 7 bp, Unknown
  misc_feature (1)..( 7): Result.003 file - promoters60/4768928
aaattta

SEQ ID NO: 138422 - DNA, 7 bp, Unknown
  misc_feature (1)..( 7): Result.003 file - promoters60/4768928
aaactta

SEQ ID NO: 138423 - DNA, 6 bp, Unknown
  misc_feature (1)..( 6): Result.003 file - promoters60/4768928
taataa

SEQ ID NO: 138424 - DNA, 6 bp, Unknown
  misc_feature (1)..( 6): Result.003 file - promoters60/4768928
taataa

SEQ ID NO: 138425 - DNA, 6 bp, Unknown
  misc_feature (1)..( 6): Result.003 file - promoters60/4768928
agtaaa

SEQ ID NO: 138426 - DNA, 6 bp, Unknown
  misc_feature (1)..( 6): Result.003 file - promoters60/4768928
agtaaa

SEQ ID NO: 138427 - DNA, 7 bp, Unknown
  misc_feature (1)..( 7): Result.003 file - promoters60/4768928
aatcggg

SEQ ID NO: 138428 - DNA, 7 bp, Unknown
  misc_feature (1)..( 7): Result.003 file - promoters60/4768928
aattggg

SEQ ID NO: 138429 - DNA, 10 bp, Unknown
  misc_feature (1)..( 10): Result.003 file - promoters60/4768928
aaataaaata

SEQ ID NO: 138430 - DNA, 10 bp, Unknown
  misc_feature (1)..( 10): Result.003 file - promoters60/4768928
aaatgaaata

SEQ ID NO: 138431 - DNA, 7 bp, Unknown
  misc_feature (1)..( 7): Result.003 file - promoters60/4768928
cccacta

SEQ ID NO: 138432 - DNA, 7 bp, Unknown
  misc_feature (1)..( 7): Result.003 file - promoters60/4768928
cccacta

SEQ ID NO: 138433 - DNA, 9 bp, Unknown
  misc_feature (1)..( 9): Result.003 file - promoters60/4768928
aaagaaaag

SEQ ID NO: 138434 - DNA, 9 bp, Unknown
  misc_feature (1)..( 9): Result.003 file - promoters60/4768928
aaagtaaag

SEQ ID NO: 138435 - DNA, 7 bp, Unknown
  misc_feature (1)..( 7): Result.003 file - promoters60/4768928
gtatata

SEQ ID NO: 138436 - DNA, 7 bp, Unknown
  misc_feature (1)..( 7): Result.003 file - promoters60/4768928
gtatata

SEQ ID NO: 138437 - DNA, 8 bp, Unknown
  misc_feature (1)..( 8): Result.003 file - promoters60/4769048
aaatttgg

SEQ ID NO: 138438 - DNA, 8 bp, Unknown
  misc_feature (1)..( 8): Result.003 file - promoters60/4769048
gaatttgg

SEQ ID NO: 138439 - DNA, 8 bp, Unknown
  misc_feature (1)..( 8): Result.003 file - promoters60/4769048
aaatttca

SEQ ID NO: 138440 - DNA, 8 bp, Unknown
  misc_feature (1)..( 8): Result.003 file - promoters60/4769048
aaatttgg

SEQ ID NO: 138441 - DNA, 6 bp, Unknown
  misc_feature (1)..( 6): Result.003 file - promoters60/4769052
ttgtaa

SEQ ID NO: 138442 - DNA, 6 bp, Unknown
  misc_feature (1)..( 6): Result.003 file - promoters60/4769052
ttgtaa

SEQ ID NO: 138443 - DNA, 6 bp, Unknown
  misc_feature (1)..( 6): Result.003 file - promoters60/4769052
cctttt

SEQ ID NO: 138444 - DNA, 6 bp, Unknown
  misc_feature (1)..( 6): Result.003 file - promoters60/4769052
cctttt

SEQ ID NO: 138445 - DNA, 8 bp, Unknown
  misc_feature (1)..( 8): Result.003 file - promoters60/4769052
aatagatc

SEQ ID NO: 138446 - DNA, 8 bp, Unknown
  misc_feature (1)..( 8): Result.003 file - promoters60/4769052
aatcgatc

SEQ ID NO: 138447 - DNA, 8 bp, Unknown
  misc_feature (1)..( 8): Result.003 file - promoters60/4769052
aaaaatta

SEQ ID NO: 138448 - DNA, 8 bp, Unknown
  misc_feature (1)..( 8): Result.003 file - promoters60/4769052
aaacatta

SEQ ID NO: 138449 - DNA, 9 bp, Unknown
  misc_feature (1)..( 9): Result.003 file - promoters60/4769052
ggatcaaat

SEQ ID NO: 138450 - DNA, 9 bp, Unknown
  misc_feature (1)..( 9): Result.003 file - promoters60/4769052
ggataaaat

SEQ ID NO: 138451 - DNA, 6 bp, Unknown
  misc_feature (1)..( 6): Result.003 file - promoters60/4769052
taggtt

SEQ ID NO: 138452 - DNA, 6 bp, Unknown
  misc_feature (1)..( 6): Result.003 file - promoters60/4769052
taggtt

SEQ ID NO: 138453 - DNA, 6 bp, Unknown
  misc_feature (1)..( 6): Result.003 file - promoters60/4769052
aaaaaa

SEQ ID NO: 138454 - DNA, 6 bp, Unknown
  misc_feature (1)..( 6): Result.003 file - promoters60/4769052
aaaaaa

SEQ ID NO: 138455 - DNA, 7 bp, Unknown
  misc_feature (1)..( 7): Result.003 file - promoters60/4769052
attaaca

SEQ ID NO: 138456 - DNA, 7 bp, Unknown
  misc_feature (1)..( 7): Result.003 file - promoters60/4769052
atttaca

SEQ ID NO: 138457 - DNA, 6 bp, Unknown
  misc_feature (1)..( 6): Result.003 file - promoters60/4769052
gaaatt

SEQ ID NO: 138458 - DNA, 6 bp, Unknown
  misc_feature (1)..( 6): Result.003 file - promoters60/4769052
gaaatt

SEQ ID NO: 138459 - DNA, 7 bp, Unknown
  misc_feature (1)..( 7): Result.003 file - promoters60/4769052
atctcag

SEQ ID NO: 138460 - DNA, 7 bp, Unknown
  misc_feature (1)..( 7): Result.003 file - promoters60/4769052
atctcag

SEQ ID NO: 138461 - DNA, 7 bp, Unknown
  misc_feature (1)..( 7): Result.003 file - promoters60/4769052
caaaaca

SEQ ID NO: 138462 - DNA, 7 bp, Unknown
  misc_feature (1)..( 7): Result.003 file - promoters60/4769052
caaaaca

SEQ ID NO: 138463 - DNA, 7 bp, Unknown
  misc_feature (1)..( 7): Result.003 file - promoters60/4769052
aacactc

SEQ ID NO: 138464 - DNA, 7 bp, Unknown
  misc_feature (1)..( 7): Result.003 file - promoters60/4769052
aaccctc

SEQ ID NO: 138465 - DNA, 7 bp, Unknown
  misc_feature (1)..( 7): Result.003 file - promoters60/4769052
tatctcg

SEQ ID NO: 138466 - DNA, 7 bp, Unknown
  misc_feature (1)..( 7): Result.003 file - promoters60/4769052
tatttcg

SEQ ID NO: 138467 - DNA, 6 bp, Unknown
  misc_feature (1)..( 6): Result.003 file - promoters60/4769052
catcca

SEQ ID NO: 138468 - DNA, 6 bp, Unknown
  misc_feature (1)..( 6): Result.003 file - promoters60/4769052
catcca

SEQ ID NO: 138469 - DNA, 6 bp, Unknown
  misc_feature (1)..( 6): Result.003 file - promoters60/4769052
aatcca

SEQ ID NO: 138470 - DNA, 6 bp, Unknown
  misc_feature (1)..( 6): Result.003 file - promoters60/4769052
aatcca

SEQ ID NO: 138471 - DNA, 7 bp, Unknown
  misc_feature (1)..( 7): Result.003 file - promoters60/4769052
tattatc

SEQ ID NO: 138472 - DNA, 7 bp, Unknown
  misc_feature (1)..( 7): Result.003 file - promoters60/4769052
tattatc

SEQ ID NO: 138473 - DNA, 7 bp, Unknown
  misc_feature (1)..( 7): Result.003 file - promoters60/4769055
aatagga

SEQ ID NO: 138474 - DNA, 7 bp, Unknown
  misc_feature (1)..( 7): Result.003 file - promoters60/4769055
aatagga

SEQ ID NO: 138475 - DNA, 9 bp, Unknown
  misc_feature (1)..( 9): Result.003 file - promoters60/4769055
tagaaatac

SEQ ID NO: 138476 - DNA, 9 bp, Unknown
  misc_feature (1)..( 9): Result.003 file - promoters60/4769055
tagcaatac

SEQ ID NO: 138477 - DNA, 9 bp, Unknown
  misc_feature (1)..( 9): Result.003 file - promoters60/4769055
gaaagttaa

SEQ ID NO: 138478 - DNA, 9 bp, Unknown
  misc_feature (1)..( 9): Result.003 file - promoters60/4769055
gaaggtttt

SEQ ID NO: 138479 - DNA, 9 bp, Unknown
  misc_feature (1)..( 9): Result.003 file - promoters60/4769055
caaaattaa

SEQ ID NO: 138480 - DNA, 6 bp, Unknown
  misc_feature (1)..( 6): Result.003 file - promoters60/4769055
aatttt

SEQ ID NO: 138481 - DNA, 6 bp, Unknown
  misc_feature (1)..( 6): Result.003 file - promoters60/4769055
aatttt

SEQ ID NO: 138482 - DNA, 8 bp, Unknown
  misc_feature (1)..( 8): Result.003 file - promoters60/4769055
tttaaatt

SEQ ID NO: 138483 - DNA, 8 bp, Unknown
  misc_feature (1)..( 8): Result.003 file - promoters60/4769055
tttcaatt

SEQ ID NO: 138484 - DNA, 6 bp, Unknown
  misc_feature (1)..( 6): Result.003 file - promoters60/4769055
cctaaa

SEQ ID NO: 138485 - DNA, 6 bp, Unknown
  misc_feature (1)..( 6): Result.003 file - promoters60/4769055
cctaaa

SEQ ID NO: 138486 - DNA, 11 bp, Unknown
  misc_feature (1)..( 11): Result.003 file - promoters60/4769055
taaaatattga

SEQ ID NO: 138487 - DNA, 11 bp, Unknown
  misc_feature (1)..( 11): Result.003 file - promoters60/4769055
taaattattga

SEQ ID NO: 138488 - DNA, 12 bp, Unknown
  misc_feature (1)..( 12): Result.003 file - promoters60/4769055
gaaaagcaaaac

SEQ ID NO: 138489 - DNA, 12 bp, Unknown
  misc_feature (1)..( 12): Result.003 file - promoters60/4769055
gaagagcaaaac

SEQ ID NO: 138490 - DNA, 9 bp, Unknown
  misc_feature (1)..( 9): Result.003 file - promoters60/4769055
ttaaatttt

SEQ ID NO: 138491 - DNA, 9 bp, Unknown
  misc_feature (1)..( 9): Result.003 file - promoters60/4769055
ttaattttt

SEQ ID NO: 138492 - DNA, 7 bp, Unknown
  misc_feature (1)..( 7): Result.003 file - promoters60/4769055
caattgt

SEQ ID NO: 138493 - DNA, 7 bp, Unknown
  misc_feature (1)..( 7): Result.003 file - promoters60/4769055
caagtgt

SEQ ID NO: 138494 - DNA, 7 bp, Unknown
  misc_feature (1)..( 7): Result.003 file - promoters60/4769055
ctgattt

SEQ ID NO: 138495 - DNA, 7 bp, Unknown
  misc_feature (1)..( 7): Result.003 file - promoters60/4769055
ctgtttt

SEQ ID NO: 138496 - DNA, 6 bp, Unknown
  misc_feature (1)..( 6): Result.003 file - promoters60/4769055
tcttcc

SEQ ID NO: 138497 - DNA, 6 bp, Unknown
  misc_feature (1)..( 6): Result.003 file - promoters60/4769055
tcttcc

SEQ ID NO: 138498 - DNA, 8 bp, Unknown
  misc_feature (1)..( 8): Result.003 file - promoters60/4769055
ctctctcg

SEQ ID NO: 138499 - DNA, 8 bp, Unknown
  misc_feature (1)..( 8): Result.003 file - promoters60/4769055
ctctctcg

SEQ ID NO: 138500 - DNA, 6 bp, Unknown
  misc_feature (1)..( 6): Result.003 file - promoters60/4769059
aaagaa

SEQ ID NO: 138501 - DNA, 6 bp, Unknown
  misc_feature (1)..( 6): Result.003 file - promoters60/4769059
aaagaa

SEQ ID NO: 138502 - DNA, 7 bp, Unknown
  misc_feature (1)..( 7): Result.003 file - promoters60/4769059
tccacca

SEQ ID NO: 138503 - DNA, 7 bp, Unknown
  misc_feature (1)..( 7): Result.003 file - promoters60/4769059
tcctcca

SEQ ID NO: 138504 - DNA, 7 bp, Unknown
  misc_feature (1)..( 7): Result.003 file - promoters60/4769059
tactgca

SEQ ID NO: 138505 - DNA, 7 bp, Unknown
  misc_feature (1)..( 7): Result.003 file - promoters60/4769059
taccgca

SEQ ID NO: 138506 - DNA, 6 bp, Unknown
  misc_feature (1)..( 6): Result.003 file - promoters60/4769059
tgacgg

SEQ ID NO: 138507 - DNA, 6 bp, Unknown
  misc_feature (1)..( 6): Result.003 file - promoters60/4769059
tgacgg

SEQ ID NO: 138508 - DNA, 8 bp, Unknown
  misc_feature (1)..( 8): Result.003 file - promoters60/4769059
aagggaat

SEQ ID NO: 138509 - DNA, 8 bp, Unknown
  misc_feature (1)..( 8): Result.003 file - promoters60/4769059
aagcgaat

SEQ ID NO: 138510 - DNA, 12 bp, Unknown
  misc_feature (1)..( 12): Result.003 file - promoters60/4769059
ctatctctttat

SEQ ID NO: 138511 - DNA, 12 bp, Unknown
  misc_feature (1)..( 12): Result.003 file - promoters60/4769059
ttatatctgtat

SEQ ID NO: 138512 - DNA, 12 bp, Unknown
  misc_feature (1)..( 12): Result.003 file - promoters60/4769059
ttagatcgtacc

SEQ ID NO: 138513 - DNA, 9 bp, Unknown
  misc_feature (1)..( 9): Result.003 file - promoters60/4769059
gtgttcatt

SEQ ID NO: 138514 - DNA, 9 bp, Unknown
  misc_feature (1)..( 9): Result.003 file - promoters60/4769059
gtgttgatt

SEQ ID NO: 138515 - DNA, 8 bp, Unknown
  misc_feature (1)..( 8): Result.003 file - promoters60/4769059
tggtcagt

SEQ ID NO: 138516 - DNA, 8 bp, Unknown
  misc_feature (1)..( 8): Result.003 file - promoters60/4769059
tggtgagt

SEQ ID NO: 138517 - DNA, 6 bp, Unknown
  misc_feature (1)..( 6): Result.003 file - promoters60/4769059
gttctc

SEQ ID NO: 138518 - DNA, 6 bp, Unknown
  misc_feature (1)..( 6): Result.003 file - promoters60/4769059
gttctc

SEQ ID NO: 138519 - DNA, 6 bp, Unknown
  misc_feature (1)..( 6): Result.003 file - promoters60/4769059
cctttt

SEQ ID NO: 138520 - DNA, 6 bp, Unknown
  misc_feature (1)..( 6): Result.003 file - promoters60/4769059
cctttt

SEQ ID NO: 138521 - DNA, 6 bp, Unknown
  misc_feature (1)..( 6): Result.003 file - promoters60/4769059
tcttta

SEQ ID NO: 138522 - DNA, 6 bp, Unknown
  misc_feature (1)..( 6): Result.003 file - promoters60/4769059
tcttta

SEQ ID NO: 138523 - DNA, 7 bp, Unknown
  misc_feature (1)..( 7): Result.003 file - promoters60/4769059
tggagtc

SEQ ID NO: 138524 - DNA, 7 bp, Unknown
  misc_feature (1)..( 7): Result.003 file - promoters60/4769059
tggagtc

SEQ ID NO: 138525 - DNA, 7 bp, Unknown
  misc_feature (1)..( 7): Result.003 file - promoters60/4769059
tatcatt

SEQ ID NO: 138526 - DNA, 7 bp, Unknown
  misc_feature (1)..( 7): Result.003 file - promoters60/4769059
tatgatt

SEQ ID NO: 138527 - DNA, 7 bp, Unknown
  misc_feature (1)..( 7): Result.003 file - promoters60/4769059
gaatttg

SEQ ID NO: 138528 - DNA, 7 bp, Unknown
  misc_feature (1)..( 7): Result.003 file - promoters60/4769059
gaatttg

SEQ ID NO: 138529 - DNA, 7 bp, Unknown
  misc_feature (1)..( 7): Result.003 file - promoters60/4769059
tttgatt

SEQ ID NO: 138530 - DNA, 7 bp, Unknown
  misc_feature (1)..( 7): Result.003 file - promoters60/4769059
tttgatt

SEQ ID NO: 138531 - DNA, 6 bp, Unknown
  misc_feature (1)..( 6): Result.003 file - promoters60/4769059
catttg

SEQ ID NO: 138532 - DNA, 6 bp, Unknown
  misc_feature (1)..( 6): Result.003 file - promoters60/4769059
catttg

SEQ ID NO: 138533 - DNA, 6 bp, Unknown
  misc_feature (1)..( 6): Result.003 file - promoters60/4769075
ataaat

SEQ ID NO: 138534 - DNA, 6 bp, Unknown
  misc_feature (1)..( 6): Result.003 file - promoters60/4769075
ataaat

SEQ ID NO: 138535 - DNA, 6 bp, Unknown
  misc_feature (1)..( 6): Result.003 file - promoters60/4769075
aaacca

SEQ ID NO: 138536 - DNA, 6 bp, Unknown
  misc_feature (1)..( 6): Result.003 file - promoters60/4769075
aaacca

SEQ ID NO: 138537 - DNA, 13 bp, Unknown
  misc_feature (1)..( 13): Result.003 file - promoters60/4769075
acactatactgta

SEQ ID NO: 138538 - DNA, 13 bp, Unknown
  misc_feature (1)..( 13): Result.003 file - promoters60/4769075
aaactttacattc

SEQ ID NO: 138539 - DNA, 13 bp, Unknown
  misc_feature (1)..( 13): Result.003 file - promoters60/4769075
caactctattctg

SEQ ID NO: 138540 - DNA, 6 bp, Unknown
  misc_feature (1)..( 6): Result.003 file - promoters60/4769075
tttgat

SEQ ID NO: 138541 - DNA, 6 bp, Unknown
  misc_feature (1)..( 6): Result.003 file - promoters60/4769075
tttgat

SEQ ID NO: 138542 - DNA, 7 bp, Unknown
  misc_feature (1)..( 7): Result.003 file - promoters60/4769075
atgtgct

SEQ ID NO: 138543 - DNA, 7 bp, Unknown
  misc_feature (1)..( 7): Result.003 file - promoters60/4769075
atgcgct

SEQ ID NO: 138544 - DNA, 6 bp, Unknown
  misc_feature (1)..( 6): Result.003 file - promoters60/4769075
caatta

SEQ ID NO: 138545 - DNA, 6 bp, Unknown
  misc_feature (1)..( 6): Result.003 file - promoters60/4769075
caatta

SEQ ID NO: 138546 - DNA, 6 bp, Unknown
  misc_feature (1)..( 6): Result.003 file - promoters60/4769075
caattt

SEQ ID NO: 138547 - DNA, 6 bp, Unknown
  misc_feature (1)..( 6): Result.003 file - promoters60/4769075
caattt

SEQ ID NO: 138548 - DNA, 7 bp, Unknown
  misc_feature (1)..( 7): Result.003 file - promoters60/4769075
tttcact

SEQ ID NO: 138549 - DNA, 7 bp, Unknown
  misc_feature (1)..( 7): Result.003 file - promoters60/4769075
tttcact

SEQ ID NO: 138550 - DNA, 6 bp, Unknown
  misc_feature (1)..( 6): Result.003 file - promoters60/4769075
tctaaa

SEQ ID NO: 138551 - DNA, 6 bp, Unknown
  misc_feature (1)..( 6): Result.003 file - promoters60/4769075
tctaaa

SEQ ID NO: 138552 - DNA, 8 bp, Unknown
  misc_feature (1)..( 8): Result.003 file - promoters60/4769075
attttcta

SEQ ID NO: 138553 - DNA, 8 bp, Unknown
  misc_feature (1)..( 8): Result.003 file - promoters60/4769075
attttcta

SEQ ID NO: 138554 - DNA, 9 bp, Unknown
  misc_feature (1)..( 9): Result.003 file - promoters60/4769075
taaaatccg

SEQ ID NO: 138555 - DNA, 9 bp, Unknown
  misc_feature (1)..( 9): Result.003 file - promoters60/4769075
taaaagccg

SEQ ID NO: 138556 - DNA, 9 bp, Unknown
  misc_feature (1)..( 9): Result.003 file - promoters60/4769075
gaagtattt

SEQ ID NO: 138557 - DNA, 9 bp, Unknown
  misc_feature (1)..( 9): Result.003 file - promoters60/4769075
gaaggattt

SEQ ID NO: 138558 - DNA, 6 bp, Unknown
  misc_feature (1)..( 6): Result.003 file - promoters60/4769075
aaacca

SEQ ID NO: 138559 - DNA, 6 bp, Unknown
  misc_feature (1)..( 6): Result.003 file - promoters60/4769075
aaacca

SEQ ID NO: 138560 - DNA, 7 bp, Unknown
  misc_feature (1)..( 7): Result.003 file - promoters60/4769075
aaataaa

SEQ ID NO: 138561 - DNA, 7 bp, Unknown
  misc_feature (1)..( 7): Result.003 file - promoters60/4769075
aaagaaa

SEQ ID NO: 138562 - DNA, 6 bp, Unknown
  misc_feature (1)..( 6): Result.003 file - promoters60/4769075
tgattt

SEQ ID NO: 138563 - DNA, 6 bp, Unknown
  misc_feature (1)..( 6): Result.003 file - promoters60/4769075
tgattt

SEQ ID NO: 138564 - DNA, 7 bp, Unknown
  misc_feature (1)..( 7): Result.003 file - promoters60/4769075
tgaccaa

SEQ ID NO: 138565 - DNA, 7 bp, Unknown
  misc_feature (1)..( 7): Result.003 file - promoters60/4769075
tgatcaa

SEQ ID NO: 138566 - DNA, 7 bp, Unknown
  misc_feature (1)..( 7): Result.003 file - promoters60/4769083
gagccac

SEQ ID NO: 138567 - DNA, 7 bp, Unknown
  misc_feature (1)..( 7): Result.003 file - promoters60/4769083
gagtcac

SEQ ID NO: 138568 - DNA, 9 bp, Unknown
  misc_feature (1)..( 9): Result.003 file - promoters60/4769083
ttaatttat

SEQ ID NO: 138569 - DNA, 9 bp, Unknown
  misc_feature (1)..( 9): Result.003 file - promoters60/4769083
ttatttttg

SEQ ID NO: 138570 - DNA, 9 bp, Unknown
  misc_feature (1)..( 9): Result.003 file - promoters60/4769083
taaatttat

SEQ ID NO: 138571 - DNA, 7 bp, Unknown
  misc_feature (1)..( 7): Result.003 file - promoters60/4769083
aatttat

SEQ ID NO: 138572 - DNA, 7 bp, Unknown
  misc_feature (1)..( 7): Result.003 file - promoters60/4769083
catttat

SEQ ID NO: 138573 - DNA, 7 bp, Unknown
  misc_feature (1)..( 7): Result.003 file - promoters60/4769083
aatttat

SEQ ID NO: 138574 - DNA, 6 bp, Unknown
  misc_feature (1)..( 6): Result.003 file - promoters60/4769083
aagctc

SEQ ID NO: 138575 - DNA, 6 bp, Unknown
  misc_feature (1)..( 6): Result.003 file - promoters60/4769083
aagctc

SEQ ID NO: 138576 - DNA, 7 bp, Unknown
  misc_feature (1)..( 7): Result.003 file - promoters60/4769083
ctctcat

SEQ ID NO: 138577 - DNA, 7 bp, Unknown
  misc_feature (1)..( 7): Result.003 file - promoters60/4769083
ctcacat

SEQ ID NO: 138578 - DNA, 7 bp, Unknown
  misc_feature (1)..( 7): Result.003 file - promoters60/4769083
taaaata

SEQ ID NO: 138579 - DNA, 7 bp, Unknown
  misc_feature (1)..( 7): Result.003 file - promoters60/4769083
aaaaata

SEQ ID NO: 138580 - DNA, 7 bp, Unknown
  misc_feature (1)..( 7): Result.003 file - promoters60/4769083
taaaatg

SEQ ID NO: 138581 - DNA, 12 bp, Unknown
  misc_feature (1)..( 12): Result.003 file - promoters60/4769083
gtttggtttata

SEQ ID NO: 138582 - DNA, 12 bp, Unknown
  misc_feature (1)..( 12): Result.003 file - promoters60/4769083
gttaggttgata

SEQ ID NO: 138583 - DNA, 9 bp, Unknown
  misc_feature (1)..( 9): Result.003 file - promoters60/4769083
taaagaaaa

SEQ ID NO: 138584 - DNA, 9 bp, Unknown
  misc_feature (1)..( 9): Result.003 file - promoters60/4769083
taaagaaaa

SEQ ID NO: 138585 - DNA, 9 bp, Unknown
  misc_feature (1)..( 9): Result.003 file - promoters60/4769083
aaaagtaaa

SEQ ID NO: 138586 - DNA, 8 bp, Unknown
  misc_feature (1)..( 8): Result.003 file - promoters60/4769083
aaaataaa

SEQ ID NO: 138587 - DNA, 8 bp, Unknown
  misc_feature (1)..( 8): Result.003 file - promoters60/4769083
aaattaaa

SEQ ID NO: 138588 - DNA, 8 bp, Unknown
  misc_feature (1)..( 8): Result.003 file - promoters60/4769083
aaagtaaa

SEQ ID NO: 138589 - DNA, 6 bp, Unknown
  misc_feature (1)..( 6): Result.003 file - promoters60/4769083
aaaata

SEQ ID NO: 138590 - DNA, 6 bp, Unknown
  misc_feature (1)..( 6): Result.003 file - promoters60/4769083
aaaata

SEQ ID NO: 138591 - DNA, 9 bp, Unknown
  misc_feature (1)..( 9): Result.003 file - promoters60/4769083
ttcttaacc

SEQ ID NO: 138592 - DNA, 9 bp, Unknown
  misc_feature (1)..( 9): Result.003 file - promoters60/4769083
ttctcaacc

SEQ ID NO: 138593 - DNA, 8 bp, Unknown
  misc_feature (1)..( 8): Result.003 file - promoters60/4769083
tatctata

SEQ ID NO: 138594 - DNA, 8 bp, Unknown
  misc_feature (1)..( 8): Result.003 file - promoters60/4769083
tatatata

SEQ ID NO: 138595 - DNA, 7 bp, Unknown
  misc_feature (1)..( 7): Result.003 file - promoters60/4769083
ccaaaaa

SEQ ID NO: 138596 - DNA, 7 bp, Unknown
  misc_feature (1)..( 7): Result.003 file - promoters60/4769083
ccaaaaa

SEQ ID NO: 138597 - DNA, 11 bp, Unknown
  misc_feature (1)..( 11): Result.003 file - promoters60/4769083
attcaaagcaa

SEQ ID NO: 138598 - DNA, 11 bp, Unknown
  misc_feature (1)..( 11): Result.003 file - promoters60/4769083
attaaaatcaa

SEQ ID NO: 138599 - DNA, 8 bp, Unknown
  misc_feature (1)..( 8): Result.003 file - promoters60/4769083
ctacaaat

SEQ ID NO: 138600 - DNA, 8 bp, Unknown
  misc_feature (1)..( 8): Result.003 file - promoters60/4769083
ctaaaaat

SEQ ID NO: 138601 - DNA, 8 bp, Unknown
  misc_feature (1)..( 8): Result.003 file - promoters60/4769083
ataaaaaa

SEQ ID NO: 138602 - DNA, 6 bp, Unknown
  misc_feature (1)..( 6): Result.003 file - promoters60/4769083
aaatgt

SEQ ID NO: 138603 - DNA, 6 bp, Unknown
  misc_feature (1)..( 6): Result.003 file - promoters60/4769083
aaatgt

SEQ ID NO: 138604 - DNA, 9 bp, Unknown
  misc_feature (1)..( 9): Result.003 file - promoters60/4769083
aaaaacaaa

SEQ ID NO: 138605 - DNA, 9 bp, Unknown
  misc_feature (1)..( 9): Result.003 file - promoters60/4769083
aaaaagaaa

SEQ ID NO: 138606 - DNA, 7 bp, Unknown
  misc_feature (1)..( 7): Result.003 file - promoters60/4769083
atcccaa

SEQ ID NO: 138607 - DNA, 7 bp, Unknown
  misc_feature (1)..( 7): Result.003 file - promoters60/4769083
atcacaa

SEQ ID NO: 138608 - DNA, 8 bp, Unknown
  misc_feature (1)..( 8): Result.003 file - promoters60/4769083
aagtatcc

SEQ ID NO: 138609 - DNA, 8 bp, Unknown
  misc_feature (1)..( 8): Result.003 file - promoters60/4769083
aagaatcc

SEQ ID NO: 138610 - DNA, 8 bp, Unknown
  misc_feature (1)..( 8): Result.003 file - promoters60/4769083
tataaaac

SEQ ID NO: 138611 - DNA, 8 bp, Unknown
  misc_feature (1)..( 8): Result.003 file - promoters60/4769083
tataaaac

SEQ ID NO: 138612 - DNA, 6 bp, Unknown
  misc_feature (1)..( 6): Result.003 file - promoters60/4769083
atgttt

SEQ ID NO: 138613 - DNA, 6 bp, Unknown
  misc_feature (1)..( 6): Result.003 file - promoters60/4769083
atgttt

SEQ ID NO: 138614 - DNA, 7 bp, Unknown
  misc_feature (1)..( 7): Result.003 file - promoters60/4769083
taataat

SEQ ID NO: 138615 - DNA, 7 bp, Unknown
  misc_feature (1)..( 7): Result.003 file - promoters60/4769083
taaaaat

SEQ ID NO: 138616 - DNA, 7 bp, Unknown
  misc_feature (1)..( 7): Result.003 file - promoters60/4769083
atcatca

SEQ ID NO: 138617 - DNA, 7 bp, Unknown
  misc_feature (1)..( 7): Result.003 file - promoters60/4769083
atcttca

SEQ ID NO: 138618 - DNA, 6 bp, Unknown
  misc_feature (1)..( 6): Result.003 file - promoters60/4769107
ttgttt

SEQ ID NO: 138619 - DNA, 6 bp, Unknown
  misc_feature (1)..( 6): Result.003 file - promoters60/4769107
ttgttt

SEQ ID NO: 138620 - DNA, 6 bp, Unknown
  misc_feature (1)..( 6): Result.003 file - promoters60/4769107
atatat

SEQ ID NO: 138621 - DNA, 6 bp, Unknown
  misc_feature (1)..( 6): Result.003 file - promoters60/4769107
atatat

SEQ ID NO: 138622 - DNA, 6 bp, Unknown
  misc_feature (1)..( 6): Result.003 file - promoters60/4769107
attttt

SEQ ID NO: 138623 - DNA, 6 bp, Unknown
  misc_feature (1)..( 6): Result.003 file - promoters60/4769107
attttt

SEQ ID NO: 138624 - DNA, 8 bp, Unknown
  misc_feature (1)..( 8): Result.003 file - promoters60/4769107
aaacaaaa

SEQ ID NO: 138625 - DNA, 8 bp, Unknown
  misc_feature (1)..( 8): Result.003 file - promoters60/4769107
aaacaatt

SEQ ID NO: 138626 - DNA, 8 bp, Unknown
  misc_feature (1)..( 8): Result.003 file - promoters60/4769107
aaacaaaa

SEQ ID NO: 138627 - DNA, 7 bp, Unknown
  misc_feature (1)..( 7): Result.003 file - promoters60/4769107
aataaac

SEQ ID NO: 138628 - DNA, 7 bp, Unknown
  misc_feature (1)..( 7): Result.003 file - promoters60/4769107
aattaac

SEQ ID NO: 138629 - DNA, 6 bp, Unknown
  misc_feature (1)..( 6): Result.003 file - promoters60/4769107
tttatt

SEQ ID NO: 138630 - DNA, 6 bp, Unknown
  misc_feature (1)..( 6): Result.003 file - promoters60/4769107
tttatt

SEQ ID NO: 138631 - DNA, 6 bp, Unknown
  misc_feature (1)..( 6): Result.003 file - promoters60/4769107
attaaa

SEQ ID NO: 138632 - DNA, 6 bp, Unknown
  misc_feature (1)..( 6): Result.003 file - promoters60/4769107
attaaa

SEQ ID NO: 138633 - DNA, 6 bp, Unknown
  misc_feature (1)..( 6): Result.003 file - promoters60/4769107
attaca

SEQ ID NO: 138634 - DNA, 6 bp, Unknown
  misc_feature (1)..( 6): Result.003 file - promoters60/4769107
attaca

SEQ ID NO: 138635 - DNA, 6 bp, Unknown
  misc_feature (1)..( 6): Result.003 file - promoters60/4769107
tatatt

SEQ ID NO: 138636 - DNA, 6 bp, Unknown
  misc_feature (1)..( 6): Result.003 file - promoters60/4769107
tatatt

SEQ ID NO: 138637 - DNA, 12 bp, Unknown
  misc_feature (1)..( 12): Result.003 file - promoters60/4769107
tatatatattgc

SEQ ID NO: 138638 - DNA, 12 bp, Unknown
  misc_feature (1)..( 12): Result.003 file - promoters60/4769107
tatatataatgc

SEQ ID NO: 138639 - DNA, 10 bp, Unknown
  misc_feature (1)..( 10): Result.003 file - promoters60/4769107
tttctatatt

SEQ ID NO: 138640 - DNA, 10 bp, Unknown
  misc_feature (1)..( 10): Result.003 file - promoters60/4769107
tttttatatt

SEQ ID NO: 138641 - DNA, 10 bp, Unknown
  misc_feature (1)..( 10): Result.003 file - promoters60/4769107
cttttatcat

SEQ ID NO: 138642 - DNA, 7 bp, Unknown
  misc_feature (1)..( 7): Result.003 file - promoters60/4769107
aacatta

SEQ ID NO: 138643 - DNA, 7 bp, Unknown
  misc_feature (1)..( 7): Result.003 file - promoters60/4769107
aacttta

SEQ ID NO: 138644 - DNA, 10 bp, Unknown
  misc_feature (1)..( 10): Result.003 file - promoters60/4769107
caaaataaat

SEQ ID NO: 138645 - DNA, 10 bp, Unknown
  misc_feature (1)..( 10): Result.003 file - promoters60/4769107
aaaaacaaat

SEQ ID NO: 138646 - DNA, 10 bp, Unknown
  misc_feature (1)..( 10): Result.003 file - promoters60/4769107
aaaaacaatt

SEQ ID NO: 138647 - DNA, 8 bp, Unknown
  misc_feature (1)..( 8): Result.003 file - promoters60/4769107
aaaaaaac

SEQ ID NO: 138648 - DNA, 8 bp, Unknown
  misc_feature (1)..( 8): Result.003 file - promoters60/4769107
aaagaaac

SEQ ID NO: 138649 - DNA, 7 bp, Unknown
  misc_feature (1)..( 7): Result.003 file - promoters60/4769107
accgcag

SEQ ID NO: 138650 - DNA, 7 bp, Unknown
  misc_feature (1)..( 7): Result.003 file - promoters60/4769107
accacag

SEQ ID NO: 138651 - DNA, 8 bp, Unknown
  misc_feature (1)..( 8): Result.003 file - promoters60/4769107
aaacaaaa

SEQ ID NO: 138652 - DNA, 8 bp, Unknown
  misc_feature (1)..( 8): Result.003 file - promoters60/4769107
aaaaaaaa

SEQ ID NO: 138653 - DNA, 6 bp, Unknown
  misc_feature (1)..( 6): Result.003 file - promoters60/4769107
aaaaaa

SEQ ID NO: 138654 - DNA, 6 bp, Unknown
  misc_feature (1)..( 6): Result.003 file - promoters60/4769107
aaaaaa

SEQ ID NO: 138655 - DNA, 7 bp, Unknown
  misc_feature (1)..( 7): Result.003 file - promoters60/4769107
aaagaag

SEQ ID NO: 138656 - DNA, 7 bp, Unknown
  misc_feature (1)..( 7): Result.003 file - promoters60/4769107
aaaaaag

SEQ ID NO: 138657 - DNA, 7 bp, Unknown
  misc_feature (1)..( 7): Result.003 file - promoters60/4769107
ttctttt

SEQ ID NO: 138658 - DNA, 7 bp, Unknown
  misc_feature (1)..( 7): Result.003 file - promoters60/4769107
ttctttt

SEQ ID NO: 138659 - DNA, 6 bp, Unknown
  misc_feature (1)..( 6): Result.003 file - promoters60/4769107
ataaag

SEQ ID NO: 138660 - DNA, 6 bp, Unknown
  misc_feature (1)..( 6): Result.003 file - promoters60/4769107
ataaag

SEQ ID NO: 138661 - DNA, 8 bp, Unknown
  misc_feature (1)..( 8): Result.003 file - promoters60/4769107
cttcgcaa

SEQ ID NO: 138662 - DNA, 8 bp, Unknown
  misc_feature (1)..( 8): Result.003 file - promoters60/4769107
cttctcaa

SEQ ID NO: 138663 - DNA, 8 bp, Unknown
  misc_feature (1)..( 8): Result.003 file - promoters60/4769107
tttaaaaa

SEQ ID NO: 138664 - DNA, 8 bp, Unknown
  misc_feature (1)..( 8): Result.003 file - promoters60/4769107
tttacaaa

SEQ ID NO: 138665 - DNA, 6 bp, Unknown
  misc_feature (1)..( 6): Result.003 file - promoters60/4769107
tcattt

SEQ ID NO: 138666 - DNA, 6 bp, Unknown
  misc_feature (1)..( 6): Result.003 file - promoters60/4769107
tcattt

SEQ ID NO: 138667 - DNA, 8 bp, Unknown
  misc_feature (1)..( 8): Result.003 file - promoters60/4769107
ttgtttca

SEQ ID NO: 138668 - DNA, 8 bp, Unknown
  misc_feature (1)..( 8): Result.003 file - promoters60/4769107
ttgtttca

SEQ ID NO: 138669 - DNA, 8 bp, Unknown
  misc_feature (1)..( 8): Result.003 file - promoters60/4769107
tctatata

SEQ ID NO: 138670 - DNA, 8 bp, Unknown
  misc_feature (1)..( 8): Result.003 file - promoters60/4769107
tctatata

SEQ ID NO: 138671 - DNA, 6 bp, Unknown
  misc_feature (1)..( 6): Result.003 file - promoters60/4769107
aagata

SEQ ID NO: 138672 - DNA, 6 bp, Unknown
  misc_feature (1)..( 6): Result.003 file - promoters60/4769107
aagata

SEQ ID NO: 138673 - DNA, 11 bp, Unknown
  misc_feature (1)..( 11): Result.003 file - promoters60/4769107
atccaccaccg

SEQ ID NO: 138674 - DNA, 11 bp, Unknown
  misc_feature (1)..( 11): Result.003 file - promoters60/4769107
atccaccaccg

SEQ ID NO: 138675 - DNA, 13 bp, Unknown
  misc_feature (1)..( 13): Result.003 file - promoters60/4769137
accgtcgtgtcaa

SEQ ID NO: 138676 - DNA, 13 bp, Unknown
  misc_feature (1)..( 13): Result.003 file - promoters60/4769137
ttcgttgtgtaat

SEQ ID NO: 138677 - DNA, 13 bp, Unknown
  misc_feature (1)..( 13): Result.003 file - promoters60/4769137
aacgtcgtctagc

SEQ ID NO: 138678 - DNA, 13 bp, Unknown
  misc_feature (1)..( 13): Result.003 file - promoters60/4769137
aacttcgtcgaat

SEQ ID NO: 138679 - DNA, 13 bp, Unknown
  misc_feature (1)..( 13): Result.003 file - promoters60/4769137
gccaatgtctaat

SEQ ID NO: 138680 - DNA, 13 bp, Unknown
  misc_feature (1)..( 13): Result.003 file - promoters60/4769137
atgtttttctaat

SEQ ID NO: 138681 - DNA, 8 bp, Unknown
  misc_feature (1)..( 8): Result.003 file - promoters60/4769137
catatata

SEQ ID NO: 138682 - DNA, 8 bp, Unknown
  misc_feature (1)..( 8): Result.003 file - promoters60/4769137
catataaa

SEQ ID NO: 138683 - DNA, 8 bp, Unknown
  misc_feature (1)..( 8): Result.003 file - promoters60/4769137
gatatata

SEQ ID NO: 138684 - DNA, 8 bp, Unknown
  misc_feature (1)..( 8): Result.003 file - promoters60/4769137
aatataaa

SEQ ID NO: 138685 - DNA, 8 bp, Unknown
  misc_feature (1)..( 8): Result.003 file - promoters60/4769137
actataaa

SEQ ID NO: 138686 - DNA, 8 bp, Unknown
  misc_feature (1)..( 8): Result.003 file - promoters60/4769137
catatatt

SEQ ID NO: 138687 - DNA, 8 bp, Unknown
  misc_feature (1)..( 8): Result.003 file - promoters60/4769141
atttaaat

SEQ ID NO: 138688 - DNA, 8 bp, Unknown
  misc_feature (1)..( 8): Result.003 file - promoters60/4769141
atttcaat

SEQ ID NO: 138689 - DNA, 8 bp, Unknown
  misc_feature (1)..( 8): Result.003 file - promoters60/4769141
attaaaat

SEQ ID NO: 138690 - DNA, 9 bp, Unknown
  misc_feature (1)..( 9): Result.003 file - promoters60/4769141
aaaaactaa

SEQ ID NO: 138691 - DNA, 9 bp, Unknown
  misc_feature (1)..( 9): Result.003 file - promoters60/4769141
aaatactct

SEQ ID NO: 138692 - DNA, 9 bp, Unknown
  misc_feature (1)..( 9): Result.003 file - promoters60/4769141
agaaactaa

SEQ ID NO: 138693 - DNA, 10 bp, Unknown
  misc_feature (1)..( 10): Result.003 file - promoters60/4769141
aaatagttat

SEQ ID NO: 138694 - DNA, 10 bp, Unknown
  misc_feature (1)..( 10): Result.003 file - promoters60/4769141
aaataattat

SEQ ID NO: 138695 - DNA, 11 bp, Unknown
  misc_feature (1)..( 11): Result.003 file - promoters60/4769141
aaactaaagaa

SEQ ID NO: 138696 - DNA, 9 bp, Unknown
  misc_feature (1)..( 9): Result.003 file - promoters60/4769141
ttttctaaa

SEQ ID NO: 138697 - DNA, 9 bp, Unknown
  misc_feature (1)..( 9): Result.003 file - promoters60/4769141
aattcaaaa

SEQ ID NO: 138698 - DNA, 10 bp, Unknown
  misc_feature (1)..( 10): Result.003 file - promoters60/4769141
atttgctact

SEQ ID NO: 138699 - DNA, 11 bp, Unknown
  misc_feature (1)..( 11): Result.003 file - promoters60/4769141
aagaaaaaagt

SEQ ID NO: 138700 - DNA, 11 bp, Unknown
  misc_feature (1)..( 11): Result.003 file - promoters60/4769141
atgaacaaagt

SEQ ID NO: 138701 - DNA, 11 bp, Unknown
  misc_feature (1)..( 11): Result.003 file - promoters60/4769141
aagaaaattaa

SEQ ID NO: 138702 - DNA, 11 bp, Unknown
  misc_feature (1)..( 11): Result.003 file - promoters60/4769141
tatatatccgc

SEQ ID NO: 138703 - DNA, 11 bp, Unknown
  misc_feature (1)..( 11): Result.003 file - promoters60/4769141
tatataatagt

SEQ ID NO: 138704 - DNA, 11 bp, Unknown
  misc_feature (1)..( 11): Result.003 file - promoters60/4769141
tatataaatcc

SEQ ID NO: 138705 - DNA, 11 bp, Unknown
  misc_feature (1)..( 11): Result.003 file - promoters60/4769141
aatataaaatg

SEQ ID NO: 138706 - DNA, 10 bp, Unknown
  misc_feature (1)..( 10): Result.003 file - promoters60/4769141
ctaataaata

SEQ ID NO: 138707 - DNA, 10 bp, Unknown
  misc_feature (1)..( 10): Result.003 file - promoters60/4769141
ttaataaaac

SEQ ID NO: 138708 - DNA, 10 bp, Unknown
  misc_feature (1)..( 10): Result.003 file - promoters60/4769141
tcaataaaat

SEQ ID NO: 138709 - DNA, 10 bp, Unknown
  misc_feature (1)..( 10): Result.003 file - promoters60/4769141
ttagtaaaac

SEQ ID NO: 138710 - DNA, 7 bp, Unknown
  misc_feature (1)..( 7): Result.003 file - promoters60/4769153
aaaatat

SEQ ID NO: 138711 - DNA, 7 bp, Unknown
  misc_feature (1)..( 7): Result.003 file - promoters60/4769153
aaaataa

SEQ ID NO: 138712 - DNA, 7 bp, Unknown
  misc_feature (1)..( 7): Result.003 file - promoters60/4769153
caaatat

SEQ ID NO: 138713 - DNA, 8 bp, Unknown
  misc_feature (1)..( 8): Result.003 file - promoters60/4769153
aaacatat

SEQ ID NO: 138714 - DNA, 8 bp, Unknown
  misc_feature (1)..( 8): Result.003 file - promoters60/4769153
acaaataa

SEQ ID NO: 138715 - DNA, 8 bp, Unknown
  misc_feature (1)..( 8): Result.003 file - promoters60/4769153
caaattaa

SEQ ID NO: 138716 - DNA, 12 bp, Unknown
  misc_feature (1)..( 12): Result.003 file - promoters60/4769153
atgaaaaacaaa

SEQ ID NO: 138717 - DNA, 12 bp, Unknown
  misc_feature (1)..( 12): Result.003 file - promoters60/4769153
ggggaaaaaaaa

SEQ ID NO: 138718 - DNA, 12 bp, Unknown
  misc_feature (1)..( 12): Result.003 file - promoters60/4769153
ttttaaaaaaag

SEQ ID NO: 138719 - DNA, 12 bp, Unknown
  misc_feature (1)..( 12): Result.003 file - promoters60/4769153
agccaaaacatc

SEQ ID NO: 138720 - DNA, 12 bp, Unknown
  misc_feature (1)..( 12): Result.003 file - promoters60/4769153
aaccaaaacgac

SEQ ID NO: 138721 - DNA, 12 bp, Unknown
  misc_feature (1)..( 12): Result.003 file - promoters60/4769153
ttacaaatatga

SEQ ID NO: 138722 - DNA, 9 bp, Unknown
  misc_feature (1)..( 9): Result.003 file - promoters60/4769153
ctacatatt

SEQ ID NO: 138723 - DNA, 9 bp, Unknown
  misc_feature (1)..( 9): Result.003 file - promoters60/4769153
aaacatatt

SEQ ID NO: 138724 - DNA, 9 bp, Unknown
  misc_feature (1)..( 9): Result.003 file - promoters60/4769153
ctacataat

SEQ ID NO: 138725 - DNA, 9 bp, Unknown
  misc_feature (1)..( 9): Result.003 file - promoters60/4769153
aatcatatt

SEQ ID NO: 138726 - DNA, 9 bp, Unknown
  misc_feature (1)..( 9): Result.003 file - promoters60/4769153
ccaaaaata

SEQ ID NO: 138727 - DNA, 9 bp, Unknown
  misc_feature (1)..( 9): Result.003 file - promoters60/4769153
acaaataaa

SEQ ID NO: 138728 - DNA, 13 bp, Unknown
  misc_feature (1)..( 13): Result.003 file - promoters60/4769153
aacccgacagaaa

SEQ ID NO: 138729 - DNA, 13 bp, Unknown
  misc_feature (1)..( 13): Result.003 file - promoters60/4769153
atgttaacaaaaa

SEQ ID NO: 138730 - DNA, 13 bp, Unknown
  misc_feature (1)..( 13): Result.003 file - promoters60/4769153
atattaataaagc

SEQ ID NO: 138731 - DNA, 13 bp, Unknown
  misc_feature (1)..( 13): Result.003 file - promoters60/4769153
cttttaatatgaa

SEQ ID NO: 138732 - DNA, 13 bp, Unknown
  misc_feature (1)..( 13): Result.003 file - promoters60/4769153
acattaaaaaaat

SEQ ID NO: 138733 - DNA, 13 bp, Unknown
  misc_feature (1)..( 13): Result.003 file - promoters60/4769153
acattataaaata

SEQ ID NO: 138734 - DNA, 11 bp, Unknown
  misc_feature (1)..( 11): Result.003 file - promoters60/4769153
atgtcaaccaa

SEQ ID NO: 138735 - DNA, 11 bp, Unknown
  misc_feature (1)..( 11): Result.003 file - promoters60/4769153
atgttaacaaa

SEQ ID NO: 138736 - DNA, 11 bp, Unknown
  misc_feature (1)..( 11): Result.003 file - promoters60/4769153
atattaataaa

SEQ ID NO: 138737 - DNA, 11 bp, Unknown
  misc_feature (1)..( 11): Result.003 file - promoters60/4769153
cttttaatatg

SEQ ID NO: 138738 - DNA, 11 bp, Unknown
  misc_feature (1)..( 11): Result.003 file - promoters60/4769153
acattaaaaaa

SEQ ID NO: 138739 - DNA, 11 bp, Unknown
  misc_feature (1)..( 11): Result.003 file - promoters60/4769153
acattataaaa

SEQ ID NO: 138740 - DNA, 7 bp, Unknown
  misc_feature (1)..( 7): Result.003 file - promoters60/4769169
tccaaaa

SEQ ID NO: 138741 - DNA, 7 bp, Unknown
  misc_feature (1)..( 7): Result.003 file - promoters60/4769169
tcctaaa

SEQ ID NO: 138742 - DNA, 7 bp, Unknown
  misc_feature (1)..( 7): Result.003 file - promoters60/4769169
tccaaac

SEQ ID NO: 138743 - DNA, 9 bp, Unknown
  misc_feature (1)..( 9): Result.003 file - promoters60/4769169
aaaagcaaa

SEQ ID NO: 138744 - DNA, 9 bp, Unknown
  misc_feature (1)..( 9): Result.003 file - promoters60/4769169
aaaaacaac

SEQ ID NO: 138745 - DNA, 9 bp, Unknown
  misc_feature (1)..( 9): Result.003 file - promoters60/4769169
caaaacaaa

SEQ ID NO: 138746 - DNA, 9 bp, Unknown
  misc_feature (1)..( 9): Result.003 file - promoters60/4769169
gaaaacact

SEQ ID NO: 138747 - DNA, 7 bp, Unknown
  misc_feature (1)..( 7): Result.003 file - promoters60/4769169
cccacga

SEQ ID NO: 138748 - DNA, 7 bp, Unknown
  misc_feature (1)..( 7): Result.003 file - promoters60/4769169
tccacga

SEQ ID NO: 138749 - DNA, 7 bp, Unknown
  misc_feature (1)..( 7): Result.003 file - promoters60/4769169
cccacgt

SEQ ID NO: 138750 - DNA, 8 bp, Unknown
  misc_feature (1)..( 8): Result.003 file - promoters60/4769169
aaattata

SEQ ID NO: 138751 - DNA, 8 bp, Unknown
  misc_feature (1)..( 8): Result.003 file - promoters60/4769169
aaaatatc

SEQ ID NO: 138752 - DNA, 8 bp, Unknown
  misc_feature (1)..( 8): Result.003 file - promoters60/4769169
taatcata

SEQ ID NO: 138753 - DNA, 9 bp, Unknown
  misc_feature (1)..( 9): Result.003 file - promoters60/4769169
aaaaataaa

SEQ ID NO: 138754 - DNA, 9 bp, Unknown
  misc_feature (1)..( 9): Result.003 file - promoters60/4769169
caaaacaaa

SEQ ID NO: 138755 - DNA, 9 bp, Unknown
  misc_feature (1)..( 9): Result.003 file - promoters60/4769169
aaaaattag

SEQ ID NO: 138756 - DNA, 9 bp, Unknown
  misc_feature (1)..( 9): Result.003 file - promoters60/4769169
gcaaactta

SEQ ID NO: 138757 - DNA, 10 bp, Unknown
  misc_feature (1)..( 10): Result.003 file - promoters60/4769169
aaatattgaa

SEQ ID NO: 138758 - DNA, 10 bp, Unknown
  misc_feature (1)..( 10): Result.003 file - promoters60/4769169
aaaaatttat

SEQ ID NO: 138759 - DNA, 10 bp, Unknown
  misc_feature (1)..( 10): Result.003 file - promoters60/4769169
atatataata

SEQ ID NO: 138760 - DNA, 9 bp, Unknown
  misc_feature (1)..( 9): Result.003 file - promoters60/4769169
ctaaacact

SEQ ID NO: 138761 - DNA, 9 bp, Unknown
  misc_feature (1)..( 9): Result.003 file - promoters60/4769169
ttaaacata

SEQ ID NO: 138762 - DNA, 9 bp, Unknown
  misc_feature (1)..( 9): Result.003 file - promoters60/4769169
ttaaaaata

SEQ ID NO: 138763 - DNA, 9 bp, Unknown
  misc_feature (1)..( 9): Result.003 file - promoters60/4769169
attttgtag

SEQ ID NO: 138764 - DNA, 9 bp, Unknown
  misc_feature (1)..( 9): Result.003 file - promoters60/4769169
attttgtaa

SEQ ID NO: 138765 - DNA, 9 bp, Unknown
  misc_feature (1)..( 9): Result.003 file - promoters60/4769169
cgtttataa

SEQ ID NO: 138766 - DNA, 7 bp, Unknown
  misc_feature (1)..( 7): Result.003 file - promoters60/4769169
aaaattg

SEQ ID NO: 138767 - DNA, 7 bp, Unknown
  misc_feature (1)..( 7): Result.003 file - promoters60/4769169
aaaatta

SEQ ID NO: 138768 - DNA, 7 bp, Unknown
  misc_feature (1)..( 7): Result.003 file - promoters60/4769169
aaactta

SEQ ID NO: 138769 - DNA, 7 bp, Unknown
  misc_feature (1)..( 7): Result.003 file - promoters60/4769169
ataaaat

SEQ ID NO: 138770 - DNA, 7 bp, Unknown
  misc_feature (1)..( 7): Result.003 file - promoters60/4769169
gtaaaat

SEQ ID NO: 138771 - DNA, 7 bp, Unknown
  misc_feature (1)..( 7): Result.003 file - promoters60/4769169
gtaaaaa

SEQ ID NO: 138772 - DNA, 9 bp, Unknown
  misc_feature (1)..( 9): Result.003 file - promoters60/4769169
ttaatattt

SEQ ID NO: 138773 - DNA, 9 bp, Unknown
  misc_feature (1)..( 9): Result.003 file - promoters60/4769169
ataagattt

SEQ ID NO: 138774 - DNA, 9 bp, Unknown
  misc_feature (1)..( 9): Result.003 file - promoters60/4769169
ataatattg

SEQ ID NO: 138775 - DNA, 6 bp, Unknown
  misc_feature (1)..( 6): Result.003 file - promoters60/4769169
ttcaaa

SEQ ID NO: 138776 - DNA, 6 bp, Unknown
  misc_feature (1)..( 6): Result.003 file - promoters60/4769169
ttcaaa

SEQ ID NO: 138777 - DNA, 6 bp, Unknown
  misc_feature (1)..( 6): Result.003 file - promoters60/4769169
ttcaaa

SEQ ID NO: 138778 - DNA, 9 bp, Unknown
  misc_feature (1)..( 9): Result.003 file - promoters60/4769169
ttttttttt

SEQ ID NO: 138779 - DNA, 9 bp, Unknown
  misc_feature (1)..( 9): Result.003 file - promoters60/4769169
ttttttttc

SEQ ID NO: 138780 - DNA, 9 bp, Unknown
  misc_feature (1)..( 9): Result.003 file - promoters60/4769169
tttcttaaa

SEQ ID NO: 138781 - DNA, 10 bp, Unknown
  misc_feature (1)..( 10): Result.003 file - promoters60/4769169
attgatgttc

SEQ ID NO: 138782 - DNA, 10 bp, Unknown
  misc_feature (1)..( 10): Result.003 file - promoters60/4769169
attaatgttc

SEQ ID NO: 138783 - DNA, 10 bp, Unknown
  misc_feature (1)..( 10): Result.003 file - promoters60/4769169
attaattcca

SEQ ID NO: 138784 - DNA, 9 bp, Unknown
  misc_feature (1)..( 9): Result.003 file - promoters60/4769169
ttaaaatag

SEQ ID NO: 138785 - DNA, 9 bp, Unknown
  misc_feature (1)..( 9): Result.003 file - promoters60/4769169
ttaaaaata

SEQ ID NO: 138786 - DNA, 9 bp, Unknown
  misc_feature (1)..( 9): Result.003 file - promoters60/4769169
ttaaacata

SEQ ID NO: 138787 - DNA, 8 bp, Unknown
  misc_feature (1)..( 8): Result.003 file - promoters60/4769169
ttaaaata

SEQ ID NO: 138788 - DNA, 8 bp, Unknown
  misc_feature (1)..( 8): Result.003 file - promoters60/4769169
taaaaata

SEQ ID NO: 138789 - DNA, 9 bp, Unknown
  misc_feature (1)..( 9): Result.003 file - promoters60/4769169
ttaaacata

SEQ ID NO: 138790 - DNA, 9 bp, Unknown
  misc_feature (1)..( 9): Result.003 file - promoters60/4769180
agattcata

SEQ ID NO: 138791 - DNA, 9 bp, Unknown
  misc_feature (1)..( 9): Result.003 file - promoters60/4769180
acattaata

SEQ ID NO: 138792 - DNA, 9 bp, Unknown
  misc_feature (1)..( 9): Result.003 file - promoters60/4769180
ttattaatt

SEQ ID NO: 138793 - DNA, 9 bp, Unknown
  misc_feature (1)..( 9): Result.003 file - promoters60/4769180
acaataatc

SEQ ID NO: 138794 - DNA, 8 bp, Unknown
  misc_feature (1)..( 8): Result.003 file - promoters60/4769180
aaatcata

SEQ ID NO: 138795 - DNA, 8 bp, Unknown
  misc_feature (1)..( 8): Result.003 file - promoters60/4769180
aaaacatt

SEQ ID NO: 138796 - DNA, 8 bp, Unknown
  misc_feature (1)..( 8): Result.003 file - promoters60/4769180
aaaatatt

SEQ ID NO: 138797 - DNA, 8 bp, Unknown
  misc_feature (1)..( 8): Result.003 file - promoters60/4769180
ttaatatt

SEQ ID NO: 138798 - DNA, 9 bp, Unknown
  misc_feature (1)..( 9): Result.003 file - promoters60/4769180
agatttacc

SEQ ID NO: 138799 - DNA, 9 bp, Unknown
  misc_feature (1)..( 9): Result.003 file - promoters60/4769180
tgatttatc

SEQ ID NO: 138800 - DNA, 9 bp, Unknown
  misc_feature (1)..( 9): Result.003 file - promoters60/4769180
agatttatt

SEQ ID NO: 138801 - DNA, 9 bp, Unknown
  misc_feature (1)..( 9): Result.003 file - promoters60/4769180
aaattaatc

SEQ ID NO: 138802 - DNA, 9 bp, Unknown
  misc_feature (1)..( 9): Result.003 file - promoters60/4769180
ccctatctt

SEQ ID NO: 138803 - DNA, 9 bp, Unknown
  misc_feature (1)..( 9): Result.003 file - promoters60/4769180
atttatctt

SEQ ID NO: 138804 - DNA, 9 bp, Unknown
  misc_feature (1)..( 9): Result.003 file - promoters60/4769180
attcatctt

SEQ ID NO: 138805 - DNA, 9 bp, Unknown
  misc_feature (1)..( 9): Result.003 file - promoters60/4769180
attaatcgg

SEQ ID NO: 138806 - DNA, 11 bp, Unknown
  misc_feature (1)..( 11): Result.003 file - promoters60/4769180
aaataaacaat

SEQ ID NO: 138807 - DNA, 11 bp, Unknown
  misc_feature (1)..( 11): Result.003 file - promoters60/4769180
aaaaaaaaata

SEQ ID NO: 138808 - DNA, 11 bp, Unknown
  misc_feature (1)..( 11): Result.003 file - promoters60/4769180
gaataaccaaa

SEQ ID NO: 138809 - DNA, 11 bp, Unknown
  misc_feature (1)..( 11): Result.003 file - promoters60/4769180
taattaccaaa

SEQ ID NO: 138810 - DNA, 11 bp, Unknown
  misc_feature (1)..( 11): Result.003 file - promoters60/4769180
gaataatattt

SEQ ID NO: 138811 - DNA, 11 bp, Unknown
  misc_feature (1)..( 11): Result.003 file - promoters60/4769180
aaataaacaat

SEQ ID NO: 138812 - DNA, 11 bp, Unknown
  misc_feature (1)..( 11): Result.003 file - promoters60/4769180
taaaaaaaaat

SEQ ID NO: 138813 - DNA, 11 bp, Unknown
  misc_feature (1)..( 11): Result.003 file - promoters60/4769180
gaataaccaaa

SEQ ID NO: 138814 - DNA, 11 bp, Unknown
  misc_feature (1)..( 11): Result.003 file - promoters60/4769180
taattaccaaa

SEQ ID NO: 138815 - DNA, 11 bp, Unknown
  misc_feature (1)..( 11): Result.003 file - promoters60/4769180
gaataatattt

SEQ ID NO: 138816 - DNA, 8 bp, Unknown
  misc_feature (1)..( 8): Result.003 file - promoters60/4769180
tcataaaa

SEQ ID NO: 138817 - DNA, 8 bp, Unknown
  misc_feature (1)..( 8): Result.003 file - promoters60/4769180
tcataaaa

SEQ ID NO: 138818 - DNA, 8 bp, Unknown
  misc_feature (1)..( 8): Result.003 file - promoters60/4769180
agataaaa

SEQ ID NO: 138819 - DNA, 8 bp, Unknown
  misc_feature (1)..( 8): Result.003 file - promoters60/4769180
gcatgaaa

SEQ ID NO: 138820 - DNA, 9 bp, Unknown
  misc_feature (1)..( 9): Result.003 file - promoters60/4769180
gtaacaaat

SEQ ID NO: 138821 - DNA, 9 bp, Unknown
  misc_feature (1)..( 9): Result.003 file - promoters60/4769180
aaaacgaat

SEQ ID NO: 138822 - DNA, 9 bp, Unknown
  misc_feature (1)..( 9): Result.003 file - promoters60/4769180
ataataaat

SEQ ID NO: 138823 - DNA, 9 bp, Unknown
  misc_feature (1)..( 9): Result.003 file - promoters60/4769180
ataatagta

SEQ ID NO: 138824 - DNA, 8 bp, Unknown
  misc_feature (1)..( 8): Result.003 file - promoters60/4769180
aaaaaaaa

SEQ ID NO: 138825 - DNA, 8 bp, Unknown
  misc_feature (1)..( 8): Result.003 file - promoters60/4769180
aaacaaaa

SEQ ID NO: 138826 - DNA, 8 bp, Unknown
  misc_feature (1)..( 8): Result.003 file - promoters60/4769180
aagaaaaa

SEQ ID NO: 138827 - DNA, 8 bp, Unknown
  misc_feature (1)..( 8): Result.003 file - promoters60/4769180
gagagaaa

SEQ ID NO: 138828 - DNA, 11 bp, Unknown
  misc_feature (1)..( 11): Result.003 file - promoters60/4769180
taattaccaaa

SEQ ID NO: 138829 - DNA, 11 bp, Unknown
  misc_feature (1)..( 11): Result.003 file - promoters60/4769180
aaattacatac

SEQ ID NO: 138830 - DNA, 11 bp, Unknown
  misc_feature (1)..( 11): Result.003 file - promoters60/4769180
gaataaccaaa

SEQ ID NO: 138831 - DNA, 11 bp, Unknown
  misc_feature (1)..( 11): Result.003 file - promoters60/4769180
gaataatattt

SEQ ID NO: 138832 - DNA, 12 bp, Unknown
  misc_feature (1)..( 12): Result.003 file - promoters60/4769180
taattaccaaaa

SEQ ID NO: 138833 - DNA, 12 bp, Unknown
  misc_feature (1)..( 12): Result.003 file - promoters60/4769180
tacatactaaaa

SEQ ID NO: 138834 - DNA, 12 bp, Unknown
  misc_feature (1)..( 12): Result.003 file - promoters60/4769180
gaataaccaaag

SEQ ID NO: 138835 - DNA, 12 bp, Unknown
  misc_feature (1)..( 12): Result.003 file - promoters60/4769180
gaataatattta

SEQ ID NO: 138836 - DNA, 9 bp, Unknown
  misc_feature (1)..( 9): Result.003 file - promoters60/4769180
aaatcaatc

SEQ ID NO: 138837 - DNA, 9 bp, Unknown
  misc_feature (1)..( 9): Result.003 file - promoters60/4769180
aaattaatc

SEQ ID NO: 138838 - DNA, 9 bp, Unknown
  misc_feature (1)..( 9): Result.003 file - promoters60/4769180
tgatttatc

SEQ ID NO: 138839 - DNA, 9 bp, Unknown
  misc_feature (1)..( 9): Result.003 file - promoters60/4769180
ttattcatc

SEQ ID NO: 138840 - DNA, 18 bp, Unknown
  misc_feature (1)..( 18): Result.003 file - promoters60/4769184
agctaaaagtacaattta

SEQ ID NO: 138841 - DNA, 18 bp, Unknown
  misc_feature (1)..( 18): Result.003 file - promoters60/4769184
tgctaaaaatccttgaga

SEQ ID NO: 138842 - DNA, 18 bp, Unknown
  misc_feature (1)..( 18): Result.003 file - promoters60/4769184
gattaaatgtataattta

SEQ ID NO: 138843 - DNA, 18 bp, Unknown
  misc_feature (1)..( 18): Result.003 file - promoters60/4769184
tgctaatgtgaacttagt

SEQ ID NO: 138844 - DNA, 11 bp, Unknown
  misc_feature (1)..( 11): Result.003 file - promoters60/4769184
ttaaaattcaa

SEQ ID NO: 138845 - DNA, 11 bp, Unknown
  misc_feature (1)..( 11): Result.003 file - promoters60/4769184
ccaaaatccaa

SEQ ID NO: 138846 - DNA, 11 bp, Unknown
  misc_feature (1)..( 11): Result.003 file - promoters60/4769184
cacaaagtcaa

SEQ ID NO: 138847 - DNA, 11 bp, Unknown
  misc_feature (1)..( 11): Result.003 file - promoters60/4769184
ttaaaatctct

SEQ ID NO: 138848 - DNA, 11 bp, Unknown
  misc_feature (1)..( 11): Result.003 file - promoters60/4769184
ttataatattt

SEQ ID NO: 138849 - DNA, 15 bp, Unknown
  misc_feature (1)..( 15): Result.003 file - promoters60/4769184
taaaagtacaattta

SEQ ID NO: 138850 - DNA, 15 bp, Unknown
  misc_feature (1)..( 15): Result.003 file - promoters60/4769184
ttgtagtacagtaag

SEQ ID NO: 138851 - DNA, 15 bp, Unknown
  misc_feature (1)..( 15): Result.003 file - promoters60/4769184
taaatgtataattta

SEQ ID NO: 138852 - DNA, 15 bp, Unknown
  misc_feature (1)..( 15): Result.003 file - promoters60/4769184
gtgttcgataattga

SEQ ID NO: 138853 - DNA, 9 bp, Unknown
  misc_feature (1)..( 9): Result.003 file - promoters60/4769184
aaaaattgg

SEQ ID NO: 138854 - DNA, 9 bp, Unknown
  misc_feature (1)..( 9): Result.003 file - promoters60/4769184
aaaaattcc

SEQ ID NO: 138855 - DNA, 9 bp, Unknown
  misc_feature (1)..( 9): Result.003 file - promoters60/4769184
caaagttct

SEQ ID NO: 138856 - DNA, 9 bp, Unknown
  misc_feature (1)..( 9): Result.003 file - promoters60/4769184
taaaataat

SEQ ID NO: 138857 - DNA, 9 bp, Unknown
  misc_feature (1)..( 9): Result.003 file - promoters60/4769184
gtttaatta

SEQ ID NO: 138858 - DNA, 9 bp, Unknown
  misc_feature (1)..( 9): Result.003 file - promoters60/4769184
atttgattt

SEQ ID NO: 138859 - DNA, 9 bp, Unknown
  misc_feature (1)..( 9): Result.003 file - promoters60/4769184
atttaattt

SEQ ID NO: 138860 - DNA, 9 bp, Unknown
  misc_feature (1)..( 9): Result.003 file - promoters60/4769184
atttaacaa

SEQ ID NO: 138861 - DNA, 8 bp, Unknown
  misc_feature (1)..( 8): Result.003 file - promoters60/4769184
aattatat

SEQ ID NO: 138862 - DNA, 8 bp, Unknown
  misc_feature (1)..( 8): Result.003 file - promoters60/4769184
tattgtat

SEQ ID NO: 138863 - DNA, 8 bp, Unknown
  misc_feature (1)..( 8): Result.003 file - promoters60/4769184
aattgtat

SEQ ID NO: 138864 - DNA, 8 bp, Unknown
  misc_feature (1)..( 8): Result.003 file - promoters60/4769184
tattatag

SEQ ID NO: 138865 - DNA, 13 bp, Unknown
  misc_feature (1)..( 13): Result.003 file - promoters60/4769184
ttaacagagacat

SEQ ID NO: 138866 - DNA, 13 bp, Unknown
  misc_feature (1)..( 13): Result.003 file - promoters60/4769184
ttcctagatacag

SEQ ID NO: 138867 - DNA, 13 bp, Unknown
  misc_feature (1)..( 13): Result.003 file - promoters60/4769184
gattccgatccag

SEQ ID NO: 138868 - DNA, 13 bp, Unknown
  misc_feature (1)..( 13): Result.003 file - promoters60/4769184
ttcttagctacgt

SEQ ID NO: 138869 - DNA, 9 bp, Unknown
  misc_feature (1)..( 9): Result.003 file - promoters60/4769186
cgaaagaat

SEQ ID NO: 138870 - DNA, 9 bp, Unknown
  misc_feature (1)..( 9): Result.003 file - promoters60/4769186
gaaaagaaa

SEQ ID NO: 138871 - DNA, 10 bp, Unknown
  misc_feature (1)..( 10): Result.003 file - promoters60/4769186
ggaaatgaaa

SEQ ID NO: 138872 - DNA, 7 bp, Unknown
  misc_feature (1)..( 7): Result.003 file - promoters60/4769186
aaaatat

SEQ ID NO: 138873 - DNA, 7 bp, Unknown
  misc_feature (1)..( 7): Result.003 file - promoters60/4769186
aaaataa

SEQ ID NO: 138874 - DNA, 7 bp, Unknown
  misc_feature (1)..( 7): Result.003 file - promoters60/4769186
gaaatat

SEQ ID NO: 138875 - DNA, 6 bp, Unknown
  misc_feature (1)..( 6): Result.003 file - promoters60/4769186
aatatt

SEQ ID NO: 138876 - DNA, 6 bp, Unknown
  misc_feature (1)..( 6): Result.003 file - promoters60/4769186
aatatt

SEQ ID NO: 138877 - DNA, 8 bp, Unknown
  misc_feature (1)..( 8): Result.003 file - promoters60/4769186
atgtagaa

SEQ ID NO: 138878 - DNA, 8 bp, Unknown
  misc_feature (1)..( 8): Result.003 file - promoters60/4769186
atgaagaa

SEQ ID NO: 138879 - DNA, 7 bp, Unknown
  misc_feature (1)..( 7): Result.003 file - promoters60/4769186
tattaac

SEQ ID NO: 138880 - DNA, 7 bp, Unknown
  misc_feature (1)..( 7): Result.003 file - promoters60/4769186
tataaac

SEQ ID NO: 138881 - DNA, 8 bp, Unknown
  misc_feature (1)..( 8): Result.003 file - promoters60/4769186
ggttgtgt

SEQ ID NO: 138882 - DNA, 8 bp, Unknown
  misc_feature (1)..( 8): Result.003 file - promoters60/4769186
ggttttgt

SEQ ID NO: 138883 - DNA, 10 bp, Unknown
  misc_feature (1)..( 10): Result.003 file - promoters60/4769186
gaactcacta

SEQ ID NO: 138884 - DNA, 10 bp, Unknown
  misc_feature (1)..( 10): Result.003 file - promoters60/4769186
gaacccacta

SEQ ID NO: 138885 - DNA, 6 bp, Unknown
  misc_feature (1)..( 6): Result.003 file - promoters60/4769186
tttatt

SEQ ID NO: 138886 - DNA, 6 bp, Unknown
  misc_feature (1)..( 6): Result.003 file - promoters60/4769186
tttatt

SEQ ID NO: 138887 - DNA, 6 bp, Unknown
  misc_feature (1)..( 6): Result.003 file - promoters60/4769186
agtaaa

SEQ ID NO: 138888 - DNA, 6 bp, Unknown
  misc_feature (1)..( 6): Result.003 file - promoters60/4769186
agtaaa

SEQ ID NO: 138889 - DNA, 7 bp, Unknown
  misc_feature (1)..( 7): Result.003 file - promoters60/4769186
aatcggg

SEQ ID NO: 138890 - DNA, 7 bp, Unknown
  misc_feature (1)..( 7): Result.003 file - promoters60/4769186
aattggg

SEQ ID NO: 138891 - DNA, 8 bp, Unknown
  misc_feature (1)..( 8): Result.003 file - promoters60/4769186
gaaagaaa

SEQ ID NO: 138892 - DNA, 8 bp, Unknown
  misc_feature (1)..( 8): Result.003 file - promoters60/4769186
gaaacaaa

SEQ ID NO: 138893 - DNA, 7 bp, Unknown
  misc_feature (1)..( 7): Result.003 file - promoters60/4769186
cccacta

SEQ ID NO: 138894 - DNA, 7 bp, Unknown
  misc_feature (1)..( 7): Result.003 file - promoters60/4769186
cccacta

SEQ ID NO: 138895 - DNA, 9 bp, Unknown
  misc_feature (1)..( 9): Result.003 file - promoters60/4769186
aaagaaaag

SEQ ID NO: 138896 - DNA, 9 bp, Unknown
  misc_feature (1)..( 9): Result.003 file - promoters60/4769186
aaagtaaag

SEQ ID NO: 138897 - DNA, 7 bp, Unknown
  misc_feature (1)..( 7): Result.003 file - promoters60/4769186
gtatata

SEQ ID NO: 138898 - DNA, 7 bp, Unknown
  misc_feature (1)..( 7): Result.003 file - promoters60/4769186
gtatata

SEQ ID NO: 138899 - DNA, 7 bp, Unknown
  misc_feature (1)..( 7): Result.003 file - promoters60/4769229
tactaaa

SEQ ID NO: 138900 - DNA, 7 bp, Unknown
  misc_feature (1)..( 7): Result.003 file - promoters60/4769229
tacgaaa

SEQ ID NO: 138901 - DNA, 9 bp, Unknown
  misc_feature (1)..( 9): Result.003 file - promoters60/4769229
gttgaaaaa

SEQ ID NO: 138902 - DNA, 9 bp, Unknown
  misc_feature (1)..( 9): Result.003 file - promoters60/4769229
gtttaaaaa

SEQ ID NO: 138903 - DNA, 6 bp, Unknown
  misc_feature (1)..( 6): Result.003 file - promoters60/4769229
ctatta

SEQ ID NO: 138904 - DNA, 6 bp, Unknown
  misc_feature (1)..( 6): Result.003 file - promoters60/4769229
ctatta

SEQ ID NO: 138905 - DNA, 7 bp, Unknown
  misc_feature (1)..( 7): Result.003 file - promoters60/4769229
tttgtga

SEQ ID NO: 138906 - DNA, 7 bp, Unknown
  misc_feature (1)..( 7): Result.003 file - promoters60/4769229
tttttga

SEQ ID NO: 138907 - DNA, 7 bp, Unknown
  misc_feature (1)..( 7): Result.003 file - promoters60/4769229
ttttttt

SEQ ID NO: 138908 - DNA, 9 bp, Unknown
  misc_feature (1)..( 9): Result.003 file - promoters60/4769229
aagaagaaa

SEQ ID NO: 138909 - DNA, 9 bp, Unknown
  misc_feature (1)..( 9): Result.003 file - promoters60/4769229
aagtagaaa

SEQ ID NO: 138910 - DNA, 6 bp, Unknown
  misc_feature (1)..( 6): Result.003 file - promoters60/4769229
aattta

SEQ ID NO: 138911 - DNA, 6 bp, Unknown
  misc_feature (1)..( 6): Result.003 file - promoters60/4769229
aattta

SEQ ID NO: 138912 - DNA, 9 bp, Unknown
  misc_feature (1)..( 9): Result.003 file - promoters60/4769229
ttataataa

SEQ ID NO: 138913 - DNA, 9 bp, Unknown
  misc_feature (1)..( 9): Result.003 file - promoters60/4769229
ttaaaattc

SEQ ID NO: 138914 - DNA, 9 bp, Unknown
  misc_feature (1)..( 9): Result.003 file - promoters60/4769229
caataataa

SEQ ID NO: 138915 - DNA, 7 bp, Unknown
  misc_feature (1)..( 7): Result.003 file - promoters60/4769229
agagttt

SEQ ID NO: 138916 - DNA, 7 bp, Unknown
  misc_feature (1)..( 7): Result.003 file - promoters60/4769229
agagttt

SEQ ID NO: 138917 - DNA, 9 bp, Unknown
  misc_feature (1)..( 9): Result.003 file - promoters60/4769229
gactctctt

SEQ ID NO: 138918 - DNA, 9 bp, Unknown
  misc_feature (1)..( 9): Result.003 file - promoters60/4769229
gactctctt

SEQ ID NO: 138919 - DNA, 7 bp, Unknown
  misc_feature (1)..( 7): Result.003 file - promoters60/4769229
aatacat

SEQ ID NO: 138920 - DNA, 7 bp, Unknown
  misc_feature (1)..( 7): Result.003 file - promoters60/4769229
aatccat

SEQ ID NO: 138921 - DNA, 7 bp, Unknown
  misc_feature (1)..( 7): Result.003 file - promoters60/4769229
aaggatt

SEQ ID NO: 138922 - DNA, 7 bp, Unknown
  misc_feature (1)..( 7): Result.003 file - promoters60/4769229
aagtatt

SEQ ID NO: 138923 - DNA, 10 bp, Unknown
  misc_feature (1)..( 10): Result.003 file - promoters60/4769229
tatcttaccg

SEQ ID NO: 138924 - DNA, 10 bp, Unknown
  misc_feature (1)..( 10): Result.003 file - promoters60/4769229
tatcttgccg

SEQ ID NO: 138925 - DNA, 8 bp, Unknown
  misc_feature (1)..( 8): Result.003 file - promoters60/4769229
aaattccc

SEQ ID NO: 138926 - DNA, 8 bp, Unknown
  misc_feature (1)..( 8): Result.003 file - promoters60/4769229
aaaatccc

SEQ ID NO: 138927 - DNA, 8 bp, Unknown
  misc_feature (1)..( 8): Result.003 file - promoters60/4769257
aatacaaa

SEQ ID NO: 138928 - DNA, 8 bp, Unknown
  misc_feature (1)..( 8): Result.003 file - promoters60/4769257
aatataaa

SEQ ID NO: 138929 - DNA, 8 bp, Unknown
  misc_feature (1)..( 8): Result.003 file - promoters60/4769257
tttacaaa

SEQ ID NO: 138930 - DNA, 8 bp, Unknown
  misc_feature (1)..( 8): Result.003 file - promoters60/4769257
aattcaat

SEQ ID NO: 138931 - DNA, 8 bp, Unknown
  misc_feature (1)..( 8): Result.003 file - promoters60/4769257
tatataaa

SEQ ID NO: 138932 - DNA, 8 bp, Unknown
  misc_feature (1)..( 8): Result.003 file - promoters60/4769257
aatataat

SEQ ID NO: 138933 - DNA, 12 bp, Unknown
  misc_feature (1)..( 12): Result.003 file - promoters60/4769257
ctccatctatgt

SEQ ID NO: 138934 - DNA, 12 bp, Unknown
  misc_feature (1)..( 12): Result.003 file - promoters60/4769257
tataatcaatgg

SEQ ID NO: 138935 - DNA, 12 bp, Unknown
  misc_feature (1)..( 12): Result.003 file - promoters60/4769257
aaaaatctttgt

SEQ ID NO: 138936 - DNA, 12 bp, Unknown
  misc_feature (1)..( 12): Result.003 file - promoters60/4769257
taaaatcttcca

SEQ ID NO: 138937 - DNA, 12 bp, Unknown
  misc_feature (1)..( 12): Result.003 file - promoters60/4769257
taaaatcagatc

SEQ ID NO: 138938 - DNA, 12 bp, Unknown
  misc_feature (1)..( 12): Result.003 file - promoters60/4769257
atatatcattgc

SEQ ID NO: 138939 - DNA, 9 bp, Unknown
  misc_feature (1)..( 9): Result.003 file - promoters60/4769257
ataagaata

SEQ ID NO: 138940 - DNA, 9 bp, Unknown
  misc_feature (1)..( 9): Result.003 file - promoters60/4769257
gtaagaaaa

SEQ ID NO: 138941 - DNA, 9 bp, Unknown
  misc_feature (1)..( 9): Result.003 file - promoters60/4769257
gtaagagag

SEQ ID NO: 138942 - DNA, 9 bp, Unknown
  misc_feature (1)..( 9): Result.003 file - promoters60/4769257
ctaaaaaaa

SEQ ID NO: 138943 - DNA, 9 bp, Unknown
  misc_feature (1)..( 9): Result.003 file - promoters60/4769257
ctaaaatct

SEQ ID NO: 138944 - DNA, 9 bp, Unknown
  misc_feature (1)..( 9): Result.003 file - promoters60/4769257
ataaaatca

SEQ ID NO: 138945 - DNA, 13 bp, Unknown
  misc_feature (1)..( 13): Result.003 file - promoters60/4769257
aaacaaaatcgat

SEQ ID NO: 138946 - DNA, 13 bp, Unknown
  misc_feature (1)..( 13): Result.003 file - promoters60/4769257
tcaaaaaaacgag

SEQ ID NO: 138947 - DNA, 13 bp, Unknown
  misc_feature (1)..( 13): Result.003 file - promoters60/4769257
tcataaatacgta

SEQ ID NO: 138948 - DNA, 13 bp, Unknown
  misc_feature (1)..( 13): Result.003 file - promoters60/4769257
aattaaatagtta

SEQ ID NO: 138949 - DNA, 13 bp, Unknown
  misc_feature (1)..( 13): Result.003 file - promoters60/4769257
aagaaaagaaaga

SEQ ID NO: 138950 - DNA, 14 bp, Unknown
  misc_feature (1)..( 14): Result.003 file - promoters60/4769257
tgacaacaaacgaa

SEQ ID NO: 138951 - DNA, 6 bp, Unknown
  misc_feature (1)..( 6): Result.003 file - promoters60/4769260
gattca

SEQ ID NO: 138952 - DNA, 6 bp, Unknown
  misc_feature (1)..( 6): Result.003 file - promoters60/4769260
gattca

SEQ ID NO: 138953 - DNA, 7 bp, Unknown
  misc_feature (1)..( 7): Result.003 file - promoters60/4769260
tatgttc

SEQ ID NO: 138954 - DNA, 7 bp, Unknown
  misc_feature (1)..( 7): Result.003 file - promoters60/4769260
tatgttc

SEQ ID NO: 138955 - DNA, 9 bp, Unknown
  misc_feature (1)..( 9): Result.003 file - promoters60/4769260
caaaatcaa

SEQ ID NO: 138956 - DNA, 9 bp, Unknown
  misc_feature (1)..( 9): Result.003 file - promoters60/4769260
caaaaacaa

SEQ ID NO: 138957 - DNA, 7 bp, Unknown
  misc_feature (1)..( 7): Result.003 file - promoters60/4769260
gaaaaag

SEQ ID NO: 138958 - DNA, 7 bp, Unknown
  misc_feature (1)..( 7): Result.003 file - promoters60/4769260
taaaaag

SEQ ID NO: 138959 - DNA, 7 bp, Unknown
  misc_feature (1)..( 7): Result.003 file - promoters60/4769260
taaaaac

SEQ ID NO: 138960 - DNA, 6 bp, Unknown
  misc_feature (1)..( 6): Result.003 file - promoters60/4769260
ttgatt

SEQ ID NO: 138961 - DNA, 6 bp, Unknown
  misc_feature (1)..( 6): Result.003 file - promoters60/4769260
ttgatt

SEQ ID NO: 138962 - DNA, 7 bp, Unknown
  misc_feature (1)..( 7): Result.003 file - promoters60/4769260
caaaatt

SEQ ID NO: 138963 - DNA, 7 bp, Unknown
  misc_feature (1)..( 7): Result.003 file - promoters60/4769260
caaaatt

SEQ ID NO: 138964 - DNA, 7 bp, Unknown
  misc_feature (1)..( 7): Result.003 file - promoters60/4769260
atataaa

SEQ ID NO: 138965 - DNA, 7 bp, Unknown
  misc_feature (1)..( 7): Result.003 file - promoters60/4769260
ataaaaa

SEQ ID NO: 138966 - DNA, 6 bp, Unknown
  misc_feature (1)..( 6): Result.003 file - promoters60/4769260
aaaaaa

SEQ ID NO: 138967 - DNA, 6 bp, Unknown
  misc_feature (1)..( 6): Result.003 file - promoters60/4769260
aaaaaa

SEQ ID NO: 138968 - DNA, 11 bp, Unknown
  misc_feature (1)..( 11): Result.003 file - promoters60/4769260
atgttttatgt

SEQ ID NO: 138969 - DNA, 11 bp, Unknown
  misc_feature (1)..( 11): Result.003 file - promoters60/4769260
atgatttatgt

SEQ ID NO: 138970 - DNA, 6 bp, Unknown
  misc_feature (1)..( 6): Result.003 file - promoters60/4769260
atatgt

SEQ ID NO: 138971 - DNA, 6 bp, Unknown
  misc_feature (1)..( 6): Result.003 file - promoters60/4769260
atatgt

SEQ ID NO: 138972 - DNA, 7 bp, Unknown
  misc_feature (1)..( 7): Result.003 file - promoters60/4769260
ctagact

SEQ ID NO: 138973 - DNA, 7 bp, Unknown
  misc_feature (1)..( 7): Result.003 file - promoters60/4769260
ctatact

SEQ ID NO: 138974 - DNA, 10 bp, Unknown
  misc_feature (1)..( 10): Result.003 file - promoters60/4769260
tgatttgttt

SEQ ID NO: 138975 - DNA, 10 bp, Unknown
  misc_feature (1)..( 10): Result.003 file - promoters60/4769260
tgattttttt

SEQ ID NO: 138976 - DNA, 7 bp, Unknown
  misc_feature (1)..( 7): Result.003 file - promoters60/4769260
ttgtatc

SEQ ID NO: 138977 - DNA, 7 bp, Unknown
  misc_feature (1)..( 7): Result.003 file - promoters60/4769260
ttggatc

SEQ ID NO: 138978 - DNA, 7 bp, Unknown
  misc_feature (1)..( 7): Result.003 file - promoters60/4769260
tacttga

SEQ ID NO: 138979 - DNA, 7 bp, Unknown
  misc_feature (1)..( 7): Result.003 file - promoters60/4769260
tacttga

SEQ ID NO: 138980 - DNA, 12 bp, Unknown
  misc_feature (1)..( 12): Result.003 file - promoters60/4769260
aatgggcctaag

SEQ ID NO: 138981 - DNA, 12 bp, Unknown
  misc_feature (1)..( 12): Result.003 file - promoters60/4769260
aatgggcttaag

SEQ ID NO: 138982 - DNA, 6 bp, Unknown
  misc_feature (1)..( 6): Result.003 file - promoters60/4769260
ctaaaa

SEQ ID NO: 138983 - DNA, 6 bp, Unknown
  misc_feature (1)..( 6): Result.003 file - promoters60/4769260
ctaaaa

SEQ ID NO: 138984 - DNA, 6 bp, Unknown
  misc_feature (1)..( 6): Result.003 file - promoters60/4769276
gaacat

SEQ ID NO: 138985 - DNA, 6 bp, Unknown
  misc_feature (1)..( 6): Result.003 file - promoters60/4769276
gaacat

SEQ ID NO: 138986 - DNA, 6 bp, Unknown
  misc_feature (1)..( 6): Result.003 file - promoters60/4769276
gaacat

SEQ ID NO: 138987 - DNA, 6 bp, Unknown
  misc_feature (1)..( 6): Result.003 file - promoters60/4769298
cactgt

SEQ ID NO: 138988 - DNA, 6 bp, Unknown
  misc_feature (1)..( 6): Result.003 file - promoters60/4769298
cactgt

SEQ ID NO: 138989 - DNA, 8 bp, Unknown
  misc_feature (1)..( 8): Result.003 file - promoters60/4769298
atacgtcg

SEQ ID NO: 138990 - DNA, 8 bp, Unknown
  misc_feature (1)..( 8): Result.003 file - promoters60/4769298
ataagtcg

SEQ ID NO: 138991 - DNA, 7 bp, Unknown
  misc_feature (1)..( 7): Result.003 file - promoters60/4769298
ctctcta

SEQ ID NO: 138992 - DNA, 7 bp, Unknown
  misc_feature (1)..( 7): Result.003 file - promoters60/4769298
ctcacta

SEQ ID NO: 138993 - DNA, 11 bp, Unknown
  misc_feature (1)..( 11): Result.003 file - promoters60/4769298
taatattaata

SEQ ID NO: 138994 - DNA, 11 bp, Unknown
  misc_feature (1)..( 11): Result.003 file - promoters60/4769298
caataataata

SEQ ID NO: 138995 - DNA, 11 bp, Unknown
  misc_feature (1)..( 11): Result.003 file - promoters60/4769298
caataagatca

SEQ ID NO: 138996 - DNA, 8 bp, Unknown
  misc_feature (1)..( 8): Result.003 file - promoters60/4769298
cgttaggg

SEQ ID NO: 138997 - DNA, 8 bp, Unknown
  misc_feature (1)..( 8): Result.003 file - promoters60/4769298
cgtcaggg

SEQ ID NO: 138998 - DNA, 8 bp, Unknown
  misc_feature (1)..( 8): Result.003 file - promoters60/4769298
cattcact

SEQ ID NO: 138999 - DNA, 8 bp, Unknown
  misc_feature (1)..( 8): Result.003 file - promoters60/4769298
cattcact

SEQ ID NO: 139000 - DNA, 7 bp, Unknown
  misc_feature (1)..( 7): Result.003 file - promoters60/4769298
ttaagct

SEQ ID NO: 139001 - DNA, 7 bp, Unknown
  misc_feature (1)..( 7): Result.003 file - promoters60/4769298
ttaagct

SEQ ID NO: 139002 - DNA, 6 bp, Unknown
  misc_feature (1)..( 6): Result.003 file - promoters60/4769298
catttc

SEQ ID NO: 139003 - DNA, 6 bp, Unknown
  misc_feature (1)..( 6): Result.003 file - promoters60/4769298
catttc

SEQ ID NO: 139004 - DNA, 6 bp, Unknown
  misc_feature (1)..( 6): Result.003 file - promoters60/4769298
taaaca

SEQ ID NO: 139005 - DNA, 6 bp, Unknown
  misc_feature (1)..( 6): Result.003 file - promoters60/4769298
taaaca

SEQ ID NO: 139006 - DNA, 7 bp, Unknown
  misc_feature (1)..( 7): Result.003 file - promoters60/4769298
cattttt

SEQ ID NO: 139007 - DNA, 7 bp, Unknown
  misc_feature (1)..( 7): Result.003 file - promoters60/4769298
cattttt

SEQ ID NO: 139008 - DNA, 6 bp, Unknown
  misc_feature (1)..( 6): Result.003 file - promoters60/4769298
tcttat

SEQ ID NO: 139009 - DNA, 6 bp, Unknown
  misc_feature (1)..( 6): Result.003 file - promoters60/4769298
tcttat

SEQ ID NO: 139010 - DNA, 7 bp, Unknown
  misc_feature (1)..( 7): Result.003 file - promoters60/4769298
gatatta

SEQ ID NO: 139011 - DNA, 7 bp, Unknown
  misc_feature (1)..( 7): Result.003 file - promoters60/4769298
gatctta

SEQ ID NO: 139012 - DNA, 7 bp, Unknown
  misc_feature (1)..( 7): Result.003 file - promoters60/4769298
aaagaca

SEQ ID NO: 139013 - DNA, 7 bp, Unknown
  misc_feature (1)..( 7): Result.003 file - promoters60/4769298
aaacaca

SEQ ID NO: 139014 - DNA, 7 bp, Unknown
  misc_feature (1)..( 7): Result.003 file - promoters60/4769298
aataaaa

SEQ ID NO: 139015 - DNA, 7 bp, Unknown
  misc_feature (1)..( 7): Result.003 file - promoters60/4769298
aatcaaa

SEQ ID NO: 139016 - DNA, 7 bp, Unknown
  misc_feature (1)..( 7): Result.003 file - promoters60/4769301
ctttttt

SEQ ID NO: 139017 - DNA, 7 bp, Unknown
  misc_feature (1)..( 7): Result.003 file - promoters60/4769301
cttattt

SEQ ID NO: 139018 - DNA, 9 bp, Unknown
  misc_feature (1)..( 9): Result.003 file - promoters60/4769301
tttggtctt

SEQ ID NO: 139019 - DNA, 9 bp, Unknown
  misc_feature (1)..( 9): Result.003 file - promoters60/4769301
tttgttctt

SEQ ID NO: 139020 - DNA, 6 bp, Unknown
  misc_feature (1)..( 6): Result.003 file - promoters60/4769301
tttttt

SEQ ID NO: 139021 - DNA, 6 bp, Unknown
  misc_feature (1)..( 6): Result.003 file - promoters60/4769301
tttttt

SEQ ID NO: 139022 - DNA, 7 bp, Unknown
  misc_feature (1)..( 7): Result.003 file - promoters60/4769301
tgttctc

SEQ ID NO: 139023 - DNA, 7 bp, Unknown
  misc_feature (1)..( 7): Result.003 file - promoters60/4769301
tgtgctc

SEQ ID NO: 139024 - DNA, 7 bp, Unknown
  misc_feature (1)..( 7): Result.003 file - promoters60/4769301
ataatca

SEQ ID NO: 139025 - DNA, 7 bp, Unknown
  misc_feature (1)..( 7): Result.003 file - promoters60/4769301
atattca

SEQ ID NO: 139026 - DNA, 7 bp, Unknown
  misc_feature (1)..( 7): Result.003 file - promoters60/4769301
tgtacat

SEQ ID NO: 139027 - DNA, 7 bp, Unknown
  misc_feature (1)..( 7): Result.003 file - promoters60/4769301
tgtacat

SEQ ID NO: 139028 - DNA, 8 bp, Unknown
  misc_feature (1)..( 8): Result.003 file - promoters60/4769301
ttataata

SEQ ID NO: 139029 - DNA, 8 bp, Unknown
  misc_feature (1)..( 8): Result.003 file - promoters60/4769301
ttatgata

SEQ ID NO: 139030 - DNA, 6 bp, Unknown
  misc_feature (1)..( 6): Result.003 file - promoters60/4769301
attttt

SEQ ID NO: 139031 - DNA, 6 bp, Unknown
  misc_feature (1)..( 6): Result.003 file - promoters60/4769301
attttt

SEQ ID NO: 139032 - DNA, 6 bp, Unknown
  misc_feature (1)..( 6): Result.003 file - promoters60/4769301
aaaaaa

SEQ ID NO: 139033 - DNA, 6 bp, Unknown
  misc_feature (1)..( 6): Result.003 file - promoters60/4769301
aaaaaa

SEQ ID NO: 139034 - DNA, 14 bp, Unknown
  misc_feature (1)..( 14): Result.003 file - promoters60/4769301
ggtcttacaatttt

SEQ ID NO: 139035 - DNA, 14 bp, Unknown
  misc_feature (1)..( 14): Result.003 file - promoters60/4769301
agaaatacaatttt

SEQ ID NO: 139036 - DNA, 14 bp, Unknown
  misc_feature (1)..( 14): Result.003 file - promoters60/4769301
agaactactattcg

SEQ ID NO: 139037 - DNA, 6 bp, Unknown
  misc_feature (1)..( 6): Result.003 file - promoters60/4769301
caaaaa

SEQ ID NO: 139038 - DNA, 6 bp, Unknown
  misc_feature (1)..( 6): Result.003 file - promoters60/4769301
caaaaa

SEQ ID NO: 139039 - DNA, 8 bp, Unknown
  misc_feature (1)..( 8): Result.003 file - promoters60/4769301
ctaaaata

SEQ ID NO: 139040 - DNA, 8 bp, Unknown
  misc_feature (1)..( 8): Result.003 file - promoters60/4769301
ctaaaaaa

SEQ ID NO: 139041 - DNA, 8 bp, Unknown
  misc_feature (1)..( 8): Result.003 file - promoters60/4769301
ttaaaaaa

SEQ ID NO: 139042 - DNA, 7 bp, Unknown
  misc_feature (1)..( 7): Result.003 file - promoters60/4769301
cttttgg

SEQ ID NO: 139043 - DNA, 7 bp, Unknown
  misc_feature (1)..( 7): Result.003 file - promoters60/4769301
tttttgg

SEQ ID NO: 139044 - DNA, 7 bp, Unknown
  misc_feature (1)..( 7): Result.003 file - promoters60/4769301
tttttgt

SEQ ID NO: 139045 - DNA, 8 bp, Unknown
  misc_feature (1)..( 8): Result.003 file - promoters60/4769301
ttttcttt

SEQ ID NO: 139046 - DNA, 8 bp, Unknown
  misc_feature (1)..( 8): Result.003 file - promoters60/4769301
tttgcttt

SEQ ID NO: 139047 - DNA, 11 bp, Unknown
  misc_feature (1)..( 11): Result.003 file - promoters60/4769301
aaaagaagaaa

SEQ ID NO: 139048 - DNA, 11 bp, Unknown
  misc_feature (1)..( 11): Result.003 file - promoters60/4769301
aaacgaataaa

SEQ ID NO: 139049 - DNA, 10 bp, Unknown
  misc_feature (1)..( 10): Result.003 file - promoters60/4769301
ttttaaaaga

SEQ ID NO: 139050 - DNA, 10 bp, Unknown
  misc_feature (1)..( 10): Result.003 file - promoters60/4769301
tttcaaaaaa

SEQ ID NO: 139051 - DNA, 10 bp, Unknown
  misc_feature (1)..( 10): Result.003 file - promoters60/4769301
ttgcaaaaaa

SEQ ID NO: 139052 - DNA, 7 bp, Unknown
  misc_feature (1)..( 7): Result.003 file - promoters60/4769301
aaagaaa

SEQ ID NO: 139053 - DNA, 7 bp, Unknown
  misc_feature (1)..( 7): Result.003 file - promoters60/4769301
aaataaa

SEQ ID NO: 139054 - DNA, 7 bp, Unknown
  misc_feature (1)..( 7): Result.003 file - promoters60/4769301
aaacaaa

SEQ ID NO: 139055 - DNA, 7 bp, Unknown
  misc_feature (1)..( 7): Result.003 file - promoters60/4769301
aaataaa

SEQ ID NO: 139056 - DNA, 10 bp, Unknown
  misc_feature (1)..( 10): Result.003 file - promoters60/4769301
tatacatcaa

SEQ ID NO: 139057 - DNA, 10 bp, Unknown
  misc_feature (1)..( 10): Result.003 file - promoters60/4769301
tatagatcaa

SEQ ID NO: 139058 - DNA, 6 bp, Unknown
  misc_feature (1)..( 6): Result.003 file - promoters60/4769301
ataaat

SEQ ID NO: 139059 - DNA, 6 bp, Unknown
  misc_feature (1)..( 6): Result.003 file - promoters60/4769301
ataaat

SEQ ID NO: 139060 - DNA, 7 bp, Unknown
  misc_feature (1)..( 7): Result.003 file - promoters60/4769301
tttttta

SEQ ID NO: 139061 - DNA, 7 bp, Unknown
  misc_feature (1)..( 7): Result.003 file - promoters60/4769301
tttatta

SEQ ID NO: 139062 - DNA, 6 bp, Unknown
  misc_feature (1)..( 6): Result.003 file - promoters60/4769301
ttacaa

SEQ ID NO: 139063 - DNA, 6 bp, Unknown
  misc_feature (1)..( 6): Result.003 file - promoters60/4769301
ttacaa

SEQ ID NO: 139064 - DNA, 6 bp, Unknown
  misc_feature (1)..( 6): Result.003 file - promoters60/4769301
aactaa

SEQ ID NO: 139065 - DNA, 6 bp, Unknown
  misc_feature (1)..( 6): Result.003 file - promoters60/4769301
aactaa

SEQ ID NO: 139066 - DNA, 7 bp, Unknown
  misc_feature (1)..( 7): Result.003 file - promoters60/4769301
ttgtaca

SEQ ID NO: 139067 - DNA, 7 bp, Unknown
  misc_feature (1)..( 7): Result.003 file - promoters60/4769301
ttgtaca

SEQ ID NO: 139068 - DNA, 6 bp, Unknown
  misc_feature (1)..( 6): Result.003 file - promoters60/4769301
ataaat

SEQ ID NO: 139069 - DNA, 6 bp, Unknown
  misc_feature (1)..( 6): Result.003 file - promoters60/4769301
ataaat

SEQ ID NO: 139070 - DNA, 11 bp, Unknown
  misc_feature (1)..( 11): Result.003 file - promoters60/4769312
aaataaaatgt

SEQ ID NO: 139071 - DNA, 11 bp, Unknown
  misc_feature (1)..( 11): Result.003 file - promoters60/4769312
tgctaaaattg

SEQ ID NO: 139072 - DNA, 11 bp, Unknown
  misc_feature (1)..( 11): Result.003 file - promoters60/4769312
aaagaaaacat

SEQ ID NO: 139073 - DNA, 11 bp, Unknown
  misc_feature (1)..( 11): Result.003 file - promoters60/4769312
acgtaagattg

SEQ ID NO: 139074 - DNA, 11 bp, Unknown
  misc_feature (1)..( 11): Result.003 file - promoters60/4769312
caaaatagatt

SEQ ID NO: 139075 - DNA, 11 bp, Unknown
  misc_feature (1)..( 11): Result.003 file - promoters60/4769312
aaaaaaagaaa

SEQ ID NO: 139076 - DNA, 11 bp, Unknown
  misc_feature (1)..( 11): Result.003 file - promoters60/4769312
caataaagtag

SEQ ID NO: 139077 - DNA, 11 bp, Unknown
  misc_feature (1)..( 11): Result.003 file - promoters60/4769312
aaataaagctt

SEQ ID NO: 139078 - DNA, 11 bp, Unknown
  misc_feature (1)..( 11): Result.003 file - promoters60/4769312
caacaaaatag

SEQ ID NO: 139079 - DNA, 11 bp, Unknown
  misc_feature (1)..( 11): Result.003 file - promoters60/4769312
aaacaaagaaa

SEQ ID NO: 139080 - DNA, 11 bp, Unknown
  misc_feature (1)..( 11): Result.003 file - promoters60/4769312
caataaagtag

SEQ ID NO: 139081 - DNA, 11 bp, Unknown
  misc_feature (1)..( 11): Result.003 file - promoters60/4769312
aaataaagctt

SEQ ID NO: 139082 - DNA, 7 bp, Unknown
  misc_feature (1)..( 7): Result.003 file - promoters60/4769312
aaattaa

SEQ ID NO: 139083 - DNA, 7 bp, Unknown
  misc_feature (1)..( 7): Result.003 file - promoters60/4769312
aaattat

SEQ ID NO: 139084 - DNA, 7 bp, Unknown
  misc_feature (1)..( 7): Result.003 file - promoters60/4769312
aaagtaa

SEQ ID NO: 139085 - DNA, 7 bp, Unknown
  misc_feature (1)..( 7): Result.003 file - promoters60/4769312
aaatatt

SEQ ID NO: 139086 - DNA, 8 bp, Unknown
  misc_feature (1)..( 8): Result.003 file - promoters60/4769312
ggaaaaaa

SEQ ID NO: 139087 - DNA, 8 bp, Unknown
  misc_feature (1)..( 8): Result.003 file - promoters60/4769312
tgaacaaa

SEQ ID NO: 139088 - DNA, 8 bp, Unknown
  misc_feature (1)..( 8): Result.003 file - promoters60/4769312
tgaccaaa

SEQ ID NO: 139089 - DNA, 11 bp, Unknown
  misc_feature (1)..( 11): Result.003 file - promoters60/4769312
gaatctctctg

SEQ ID NO: 139090 - DNA, 11 bp, Unknown
  misc_feature (1)..( 11): Result.003 file - promoters60/4769312
caatcactctc

SEQ ID NO: 139091 - DNA, 11 bp, Unknown
  misc_feature (1)..( 11): Result.003 file - promoters60/4769312
caatccctctc

SEQ ID NO: 139092 - DNA, 10 bp, Unknown
  misc_feature (1)..( 10): Result.003 file - promoters60/4769312
tatatatacc

SEQ ID NO: 139093 - DNA, 10 bp, Unknown
  misc_feature (1)..( 10): Result.003 file - promoters60/4769312
tatataatag

SEQ ID NO: 139094 - DNA, 10 bp, Unknown
  misc_feature (1)..( 10): Result.003 file - promoters60/4769312
tatataaacc

SEQ ID NO: 139095 - DNA, 10 bp, Unknown
  misc_feature (1)..( 10): Result.003 file - promoters60/4769312
tatttaaaca

SEQ ID NO: 139096 - DNA, 9 bp, Unknown
  misc_feature (1)..( 9): Result.003 file - promoters60/4769312
ttgaccagg

SEQ ID NO: 139097 - DNA, 9 bp, Unknown
  misc_feature (1)..( 9): Result.003 file - promoters60/4769312
ttgaccaaa

SEQ ID NO: 139098 - DNA, 9 bp, Unknown
  misc_feature (1)..( 9): Result.003 file - promoters60/4769312
atgaacaaa

SEQ ID NO: 139099 - DNA, 6 bp, Unknown
  misc_feature (1)..( 6): Result.003 file - promoters60/4769320
aaatac

SEQ ID NO: 139100 - DNA, 6 bp, Unknown
  misc_feature (1)..( 6): Result.003 file - promoters60/4769320
aaatac

SEQ ID NO: 139101 - DNA, 6 bp, Unknown
  misc_feature (1)..( 6): Result.003 file - promoters60/4769320
cattaa

SEQ ID NO: 139102 - DNA, 6 bp, Unknown
  misc_feature (1)..( 6): Result.003 file - promoters60/4769320
cattaa

SEQ ID NO: 139103 - DNA, 6 bp, Unknown
  misc_feature (1)..( 6): Result.003 file - promoters60/4769320
caaaca

SEQ ID NO: 139104 - DNA, 6 bp, Unknown
  misc_feature (1)..( 6): Result.003 file - promoters60/4769320
caaaca

SEQ ID NO: 139105 - DNA, 6 bp, Unknown
  misc_feature (1)..( 6): Result.003 file - promoters60/4769320
aacaaa

SEQ ID NO: 139106 - DNA, 6 bp, Unknown
  misc_feature (1)..( 6): Result.003 file - promoters60/4769320
aacaaa

SEQ ID NO: 139107 - DNA, 6 bp, Unknown
  misc_feature (1)..( 6): Result.003 file - promoters60/4769320
aaaata

SEQ ID NO: 139108 - DNA, 6 bp, Unknown
  misc_feature (1)..( 6): Result.003 file - promoters60/4769320
aaaata

SEQ ID NO: 139109 - DNA, 8 bp, Unknown
  misc_feature (1)..( 8): Result.003 file - promoters60/4769320
attacaca

SEQ ID NO: 139110 - DNA, 8 bp, Unknown
  misc_feature (1)..( 8): Result.003 file - promoters60/4769320
attacaat

SEQ ID NO: 139111 - DNA, 8 bp, Unknown
  misc_feature (1)..( 8): Result.003 file - promoters60/4769320
cttaaaca

SEQ ID NO: 139112 - DNA, 14 bp, Unknown
  misc_feature (1)..( 14): Result.003 file - promoters60/4769320
atttgatagtgatt

SEQ ID NO: 139113 - DNA, 14 bp, Unknown
  misc_feature (1)..( 14): Result.003 file - promoters60/4769320
atttaatagtcatt

SEQ ID NO: 139114 - DNA, 14 bp, Unknown
  misc_feature (1)..( 14): Result.003 file - promoters60/4769320
tactaatactcaaa

SEQ ID NO: 139115 - DNA, 7 bp, Unknown
  misc_feature (1)..( 7): Result.003 file - promoters60/4769320
aatttca

SEQ ID NO: 139116 - DNA, 7 bp, Unknown
  misc_feature (1)..( 7): Result.003 file - promoters60/4769320
aatatca

SEQ ID NO: 139117 - DNA, 8 bp, Unknown
  misc_feature (1)..( 8): Result.003 file - promoters60/4769320
tatttttt

SEQ ID NO: 139118 - DNA, 8 bp, Unknown
  misc_feature (1)..( 8): Result.003 file - promoters60/4769320
tattgttt

SEQ ID NO: 139119 - DNA, 9 bp, Unknown
  misc_feature (1)..( 9): Result.003 file - promoters60/4769320
tatatgatt

SEQ ID NO: 139120 - DNA, 9 bp, Unknown
  misc_feature (1)..( 9): Result.003 file - promoters60/4769320
tatttgatt

SEQ ID NO: 139121 - DNA, 9 bp, Unknown
  misc_feature (1)..( 9): Result.003 file - promoters60/4769320
tatttttgt

SEQ ID NO: 139122 - DNA, 6 bp, Unknown
  misc_feature (1)..( 6): Result.003 file - promoters60/4769320
tgtaat

SEQ ID NO: 139123 - DNA, 6 bp, Unknown
  misc_feature (1)..( 6): Result.003 file - promoters60/4769320
tgtaat

SEQ ID NO: 139124 - DNA, 7 bp, Unknown
  misc_feature (1)..( 7): Result.003 file - promoters60/4769320
aaatata

SEQ ID NO: 139125 - DNA, 7 bp, Unknown
  misc_feature (1)..( 7): Result.003 file - promoters60/4769320
aaaaata

SEQ ID NO: 139126 - DNA, 6 bp, Unknown
  misc_feature (1)..( 6): Result.003 file - promoters60/4769320
aaaata

SEQ ID NO: 139127 - DNA, 6 bp, Unknown
  misc_feature (1)..( 6): Result.003 file - promoters60/4769320
aaaata

SEQ ID NO: 139128 - DNA, 7 bp, Unknown
  misc_feature (1)..( 7): Result.003 file - promoters60/4769320
aattttg

SEQ ID NO: 139129 - DNA, 7 bp, Unknown
  misc_feature (1)..( 7): Result.003 file - promoters60/4769320
aatattg

SEQ ID NO: 139130 - DNA, 6 bp, Unknown
  misc_feature (1)..( 6): Result.003 file - promoters60/4769320
acactt

SEQ ID NO: 139131 - DNA, 6 bp, Unknown
  misc_feature (1)..( 6): Result.003 file - promoters60/4769320
acactt

SEQ ID NO: 139132 - DNA, 6 bp, Unknown
  misc_feature (1)..( 6): Result.003 file - promoters60/4769320
ttgtat

SEQ ID NO: 139133 - DNA, 6 bp, Unknown
  misc_feature (1)..( 6): Result.003 file - promoters60/4769320
ttgtat

SEQ ID NO: 139134 - DNA, 6 bp, Unknown
  misc_feature (1)..( 6): Result.003 file - promoters60/4769320
taactt

SEQ ID NO: 139135 - DNA, 6 bp, Unknown
  misc_feature (1)..( 6): Result.003 file - promoters60/4769320
taactt

SEQ ID NO: 139136 - DNA, 6 bp, Unknown
  misc_feature (1)..( 6): Result.003 file - promoters60/4769320
attcat

SEQ ID NO: 139137 - DNA, 6 bp, Unknown
  misc_feature (1)..( 6): Result.003 file - promoters60/4769320
attcat

SEQ ID NO: 139138 - DNA, 6 bp, Unknown
  misc_feature (1)..( 6): Result.003 file - promoters60/4769320
gtcatt

SEQ ID NO: 139139 - DNA, 6 bp, Unknown
  misc_feature (1)..( 6): Result.003 file - promoters60/4769320
gtcatt

SEQ ID NO: 139140 - DNA, 13 bp, Unknown
  misc_feature (1)..( 13): Result.003 file - promoters60/4769328
gtagatttcttca

SEQ ID NO: 139141 - DNA, 13 bp, Unknown
  misc_feature (1)..( 13): Result.003 file - promoters60/4769328
gaagctttcttct

SEQ ID NO: 139142 - DNA, 13 bp, Unknown
  misc_feature (1)..( 13): Result.003 file - promoters60/4769328
tttaggttcctca

SEQ ID NO: 139143 - DNA, 13 bp, Unknown
  misc_feature (1)..( 13): Result.003 file - promoters60/4769328
ataattttcttct

SEQ ID NO: 139144 - DNA, 13 bp, Unknown
  misc_feature (1)..( 13): Result.003 file - promoters60/4769328
atagttttctgtt

SEQ ID NO: 139145 - DNA, 13 bp, Unknown
  misc_feature (1)..( 13): Result.003 file - promoters60/4769328
tttaatttcttaa

SEQ ID NO: 139146 - DNA, 12 bp, Unknown
  misc_feature (1)..( 12): Result.003 file - promoters60/4769328
tcacatacgtaa

SEQ ID NO: 139147 - DNA, 12 bp, Unknown
  misc_feature (1)..( 12): Result.003 file - promoters60/4769328
gaacaaacgccg

SEQ ID NO: 139148 - DNA, 12 bp, Unknown
  misc_feature (1)..( 12): Result.003 file - promoters60/4769328
attcatataaat

SEQ ID NO: 139149 - DNA, 12 bp, Unknown
  misc_feature (1)..( 12): Result.003 file - promoters60/4769328
actcatatccat

SEQ ID NO: 139150 - DNA, 12 bp, Unknown
  misc_feature (1)..( 12): Result.003 file - promoters60/4769328
attgatatggtg

SEQ ID NO: 139151 - DNA, 12 bp, Unknown
  misc_feature (1)..( 12): Result.003 file - promoters60/4769328
cattttatcgat

SEQ ID NO: 139152 - DNA, 6 bp, Unknown
  misc_feature (1)..( 6): Result.003 file - promoters60/4769344
cttcgt

SEQ ID NO: 139153 - DNA, 6 bp, Unknown
  misc_feature (1)..( 6): Result.003 file - promoters60/4769344
cttcgt

SEQ ID NO: 139154 - DNA, 7 bp, Unknown
  misc_feature (1)..( 7): Result.003 file - promoters60/4769344
tggattt

SEQ ID NO: 139155 - DNA, 7 bp, Unknown
  misc_feature (1)..( 7): Result.003 file - promoters60/4769344
tggtttt

SEQ ID NO: 139156 - DNA, 6 bp, Unknown
  misc_feature (1)..( 6): Result.003 file - promoters60/4769344
ttgctt

SEQ ID NO: 139157 - DNA, 6 bp, Unknown
  misc_feature (1)..( 6): Result.003 file - promoters60/4769344
ttgctt

SEQ ID NO: 139158 - DNA, 6 bp, Unknown
  misc_feature (1)..( 6): Result.003 file - promoters60/4769344
atgtgt

SEQ ID NO: 139159 - DNA, 6 bp, Unknown
  misc_feature (1)..( 6): Result.003 file - promoters60/4769344
atgtgt

SEQ ID NO: 139160 - DNA, 6 bp, Unknown
  misc_feature (1)..( 6): Result.003 file - promoters60/4769344
gtactg

SEQ ID NO: 139161 - DNA, 6 bp, Unknown
  misc_feature (1)..( 6): Result.003 file - promoters60/4769344
gtactg

SEQ ID NO: 139162 - DNA, 7 bp, Unknown
  misc_feature (1)..( 7): Result.003 file - promoters60/4769344
cattgtt

SEQ ID NO: 139163 - DNA, 7 bp, Unknown
  misc_feature (1)..( 7): Result.003 file - promoters60/4769344
catcgtt

SEQ ID NO: 139164 - DNA, 7 bp, Unknown
  misc_feature (1)..( 7): Result.003 file - promoters60/4769344
tctgaaa

SEQ ID NO: 139165 - DNA, 7 bp, Unknown
  misc_feature (1)..( 7): Result.003 file - promoters60/4769344
tcttaaa

SEQ ID NO: 139166 - DNA, 7 bp, Unknown
  misc_feature (1)..( 7): Result.003 file - promoters60/4769344
acttaaa

SEQ ID NO: 139167 - DNA, 7 bp, Unknown
  misc_feature (1)..( 7): Result.003 file - promoters60/4769344
attattg

SEQ ID NO: 139168 - DNA, 7 bp, Unknown
  misc_feature (1)..( 7): Result.003 file - promoters60/4769344
atttttg

SEQ ID NO: 139169 - DNA, 7 bp, Unknown
  misc_feature (1)..( 7): Result.003 file - promoters60/4769344
gcttagt

SEQ ID NO: 139170 - DNA, 7 bp, Unknown
  misc_feature (1)..( 7): Result.003 file - promoters60/4769344
gctgagt

SEQ ID NO: 139171 - DNA, 6 bp, Unknown
  misc_feature (1)..( 6): Result.003 file - promoters60/4769344
taaaac

SEQ ID NO: 139172 - DNA, 6 bp, Unknown
  misc_feature (1)..( 6): Result.003 file - promoters60/4769344
taaaac

SEQ ID NO: 139173 - DNA, 8 bp, Unknown
  misc_feature (1)..( 8): Result.003 file - promoters60/4769344
ttgaagaa

SEQ ID NO: 139174 - DNA, 8 bp, Unknown
  misc_feature (1)..( 8): Result.003 file - promoters60/4769344
ttgacgaa

SEQ ID NO: 139175 - DNA, 7 bp, Unknown
  misc_feature (1)..( 7): Result.003 file - promoters60/4769344
aaacttt

SEQ ID NO: 139176 - DNA, 7 bp, Unknown
  misc_feature (1)..( 7): Result.003 file - promoters60/4769344
aaacttt

SEQ ID NO: 139177 - DNA, 6 bp, Unknown
  misc_feature (1)..( 6): Result.003 file - promoters60/4769344
gtttga

SEQ ID NO: 139178 - DNA, 6 bp, Unknown
  misc_feature (1)..( 6): Result.003 file - promoters60/4769344
gtttga

SEQ ID NO: 139179 - DNA, 7 bp, Unknown
  misc_feature (1)..( 7): Result.003 file - promoters60/4769344
tatattt

SEQ ID NO: 139180 - DNA, 7 bp, Unknown
  misc_feature (1)..( 7): Result.003 file - promoters60/4769344
tatattt

SEQ ID NO: 139181 - DNA, 9 bp, Unknown
  misc_feature (1)..( 9): Result.003 file - promoters60/4769366
acaactact

SEQ ID NO: 139182 - DNA, 9 bp, Unknown
  misc_feature (1)..( 9): Result.003 file - promoters60/4769366
acaactaag

SEQ ID NO: 139183 - DNA, 9 bp, Unknown
  misc_feature (1)..( 9): Result.003 file - promoters60/4769366
aaaactaag

SEQ ID NO: 139184 - DNA, 6 bp, Unknown
  misc_feature (1)..( 6): Result.003 file - promoters60/4769366
ccaaac

SEQ ID NO: 139185 - DNA, 6 bp, Unknown
  misc_feature (1)..( 6): Result.003 file - promoters60/4769366
ccaaac

SEQ ID NO: 139186 - DNA, 8 bp, Unknown
  misc_feature (1)..( 8): Result.003 file - promoters60/4769366
caccaacc

SEQ ID NO: 139187 - DNA, 8 bp, Unknown
  misc_feature (1)..( 8): Result.003 file - promoters60/4769366
cactaacc

SEQ ID NO: 139188 - DNA, 6 bp, Unknown
  misc_feature (1)..( 6): Result.003 file - promoters60/4769366
ttctca

SEQ ID NO: 139189 - DNA, 6 bp, Unknown
  misc_feature (1)..( 6): Result.003 file - promoters60/4769366
ttctca

SEQ ID NO: 139190 - DNA, 16 bp, Unknown
  misc_feature (1)..( 16): Result.003 file - promoters60/4769366
cacaaatttaaccaaa

SEQ ID NO: 139191 - DNA, 16 bp, Unknown
  misc_feature (1)..( 16): Result.003 file - promoters60/4769366
gtttgatttatccaaa

SEQ ID NO: 139192 - DNA, 16 bp, Unknown
  misc_feature (1)..( 16): Result.003 file - promoters60/4769366
cacatatttagcaaaa

SEQ ID NO: 139193 - DNA, 14 bp, Unknown
  misc_feature (1)..( 14): Result.003 file - promoters60/4769366
ttcttatttaaacg

SEQ ID NO: 139194 - DNA, 14 bp, Unknown
  misc_feature (1)..( 14): Result.003 file - promoters60/4769366
ttcctattaaaacc

SEQ ID NO: 139195 - DNA, 14 bp, Unknown
  misc_feature (1)..( 14): Result.003 file - promoters60/4769366
tctgttataaaacc

SEQ ID NO: 139196 - DNA, 9 bp, Unknown
  misc_feature (1)..( 9): Result.003 file - promoters60/4769366
ataatcaat

SEQ ID NO: 139197 - DNA, 9 bp, Unknown
  misc_feature (1)..( 9): Result.003 file - promoters60/4769366
ataataaat

SEQ ID NO: 139198 - DNA, 12 bp, Unknown
  misc_feature (1)..( 12): Result.003 file - promoters60/4769366
tataaacatttt

SEQ ID NO: 139199 - DNA, 12 bp, Unknown
  misc_feature (1)..( 12): Result.003 file - promoters60/4769366
actaaaaatttt

SEQ ID NO: 139200 - DNA, 12 bp, Unknown
  misc_feature (1)..( 12): Result.003 file - promoters60/4769366
actacaaattcc

SEQ ID NO: 139201 - DNA, 7 bp, Unknown
  misc_feature (1)..( 7): Result.003 file - promoters60/4769366
aaaagtc

SEQ ID NO: 139202 - DNA, 7 bp, Unknown
  misc_feature (1)..( 7): Result.003 file - promoters60/4769366
aaatgtc

SEQ ID NO: 139203 - DNA, 6 bp, Unknown
  misc_feature (1)..( 6): Result.003 file - promoters60/4769366
atattt

SEQ ID NO: 139204 - DNA, 6 bp, Unknown
  misc_feature (1)..( 6): Result.003 file - promoters60/4769366
atattt

SEQ ID NO: 139205 - DNA, 7 bp, Unknown
  misc_feature (1)..( 7): Result.003 file - promoters60/4769366
aaattca

SEQ ID NO: 139206 - DNA, 7 bp, Unknown
  misc_feature (1)..( 7): Result.003 file - promoters60/4769366
aaaatca

SEQ ID NO: 139207 - DNA, 6 bp, Unknown
  misc_feature (1)..( 6): Result.003 file - promoters60/4769366
ccttct

SEQ ID NO: 139208 - DNA, 6 bp, Unknown
  misc_feature (1)..( 6): Result.003 file - promoters60/4769366
ccttct

SEQ ID NO: 139209 - DNA, 10 bp, Unknown
  misc_feature (1)..( 10): Result.003 file - promoters60/4769366
tttagccaaa

SEQ ID NO: 139210 - DNA, 10 bp, Unknown
  misc_feature (1)..( 10): Result.003 file - promoters60/4769366
tttagcaaaa

SEQ ID NO: 139211 - DNA, 6 bp, Unknown
  misc_feature (1)..( 6): Result.003 file - promoters60/4769366
acacaa

SEQ ID NO: 139212 - DNA, 6 bp, Unknown
  misc_feature (1)..( 6): Result.003 file - promoters60/4769366
acacaa

SEQ ID NO: 139213 - DNA, 7 bp, Unknown
  misc_feature (1)..( 7): Result.003 file - promoters60/4769366
gatcttg

SEQ ID NO: 139214 - DNA, 7 bp, Unknown
  misc_feature (1)..( 7): Result.003 file - promoters60/4769366
gatattg

SEQ ID NO: 139215 - DNA, 7 bp, Unknown
  misc_feature (1)..( 7): Result.003 file - promoters60/4769366
aatgcaa

SEQ ID NO: 139216 - DNA, 7 bp, Unknown
  misc_feature (1)..( 7): Result.003 file - promoters60/4769366
aatccaa

SEQ ID NO: 139217 - DNA, 6 bp, Unknown
  misc_feature (1)..( 6): Result.003 file - promoters60/4769366
ccacta

SEQ ID NO: 139218 - DNA, 6 bp, Unknown
  misc_feature (1)..( 6): Result.003 file - promoters60/4769366
ccacta

SEQ ID NO: 139219 - DNA, 8 bp, Unknown
  misc_feature (1)..( 8): Result.003 file - promoters60/4769384
attttatt

SEQ ID NO: 139220 - DNA, 8 bp, Unknown
  misc_feature (1)..( 8): Result.003 file - promoters60/4769384
atttgatt

SEQ ID NO: 139221 - DNA, 7 bp, Unknown
  misc_feature (1)..( 7): Result.003 file - promoters60/4769384
ttctccc

SEQ ID NO: 139222 - DNA, 7 bp, Unknown
  misc_feature (1)..( 7): Result.003 file - promoters60/4769384
ttctccc

SEQ ID NO: 139223 - DNA, 7 bp, Unknown
  misc_feature (1)..( 7): Result.003 file - promoters60/4769384
acaatct

SEQ ID NO: 139224 - DNA, 7 bp, Unknown
  misc_feature (1)..( 7): Result.003 file - promoters60/4769384
acactct

SEQ ID NO: 139225 - DNA, 7 bp, Unknown
  misc_feature (1)..( 7): Result.003 file - promoters60/4769384
tctatat

SEQ ID NO: 139226 - DNA, 7 bp, Unknown
  misc_feature (1)..( 7): Result.003 file - promoters60/4769384
tctttat

SEQ ID NO: 139227 - DNA, 8 bp, Unknown
  misc_feature (1)..( 8): Result.003 file - promoters60/4769384
tatctttg

SEQ ID NO: 139228 - DNA, 8 bp, Unknown
  misc_feature (1)..( 8): Result.003 file - promoters60/4769384
tatcgttg

SEQ ID NO: 139229 - DNA, 6 bp, Unknown
  misc_feature (1)..( 6): Result.003 file - promoters60/4769384
ctccaa

SEQ ID NO: 139230 - DNA, 6 bp, Unknown
  misc_feature (1)..( 6): Result.003 file - promoters60/4769384
ctccaa

SEQ ID NO: 139231 - DNA, 6 bp, Unknown
  misc_feature (1)..( 6): Result.003 file - promoters60/4769384
ttaaca

SEQ ID NO: 139232 - DNA, 6 bp, Unknown
  misc_feature (1)..( 6): Result.003 file - promoters60/4769384
ttaaca

SEQ ID NO: 139233 - DNA, 6 bp, Unknown
  misc_feature (1)..( 6): Result.003 file - promoters60/4769384
gtggac

SEQ ID NO: 139234 - DNA, 6 bp, Unknown
  misc_feature (1)..( 6): Result.003 file - promoters60/4769384
gtggac

SEQ ID NO: 139235 - DNA, 6 bp, Unknown
  misc_feature (1)..( 6): Result.003 file - promoters60/4769384
attata

SEQ ID NO: 139236 - DNA, 6 bp, Unknown
  misc_feature (1)..( 6): Result.003 file - promoters60/4769384
attata

SEQ ID NO: 139237 - DNA, 6 bp, Unknown
  misc_feature (1)..( 6): Result.003 file - promoters60/4769384
tatttt

SEQ ID NO: 139238 - DNA, 6 bp, Unknown
  misc_feature (1)..( 6): Result.003 file - promoters60/4769384
tatttt

SEQ ID NO: 139239 - DNA, 11 bp, Unknown
  misc_feature (1)..( 11): Result.003 file - promoters60/4769384
ccaaatattaa

SEQ ID NO: 139240 - DNA, 11 bp, Unknown
  misc_feature (1)..( 11): Result.003 file - promoters60/4769384
ccatatattaa

SEQ ID NO: 139241 - DNA, 6 bp, Unknown
  misc_feature (1)..( 6): Result.003 file - promoters60/4769384
ataaaa

SEQ ID NO: 139242 - DNA, 6 bp, Unknown
  misc_feature (1)..( 6): Result.003 file - promoters60/4769384
ataaaa

SEQ ID NO: 139243 - DNA, 8 bp, Unknown
  misc_feature (1)..( 8): Result.003 file - promoters60/4769384
aaaataag

SEQ ID NO: 139244 - DNA, 8 bp, Unknown
  misc_feature (1)..( 8): Result.003 file - promoters60/4769384
aaaagaag

SEQ ID NO: 139245 - DNA, 7 bp, Unknown
  misc_feature (1)..( 7): Result.003 file - promoters60/4769384
aaaaaga

SEQ ID NO: 139246 - DNA, 7 bp, Unknown
  misc_feature (1)..( 7): Result.003 file - promoters60/4769384
aaaaaga

SEQ ID NO: 139247 - DNA, 7 bp, Unknown
  misc_feature (1)..( 7): Result.003 file - promoters60/4769384
aaaacaa

SEQ ID NO: 139248 - DNA, 7 bp, Unknown
  misc_feature (1)..( 7): Result.003 file - promoters60/4769384
aaaacaa

SEQ ID NO: 139249 - DNA, 6 bp, Unknown
  misc_feature (1)..( 6): Result.003 file - promoters60/4769384
ggtctc

SEQ ID NO: 139250 - DNA, 6 bp, Unknown
  misc_feature (1)..( 6): Result.003 file - promoters60/4769384
ggtctc

SEQ ID NO: 139251 - DNA, 7 bp, Unknown
  misc_feature (1)..( 7): Result.003 file - promoters60/4769384
ctaattt

SEQ ID NO: 139252 - DNA, 7 bp, Unknown
  misc_feature (1)..( 7): Result.003 file - promoters60/4769384
ctagttt

SEQ ID NO: 139253 - DNA, 6 bp, Unknown
  misc_feature (1)..( 6): Result.003 file - promoters60/4769384
tttgga

SEQ ID NO: 139254 - DNA, 6 bp, Unknown
  misc_feature (1)..( 6): Result.003 file - promoters60/4769384
tttgga

SEQ ID NO: 139255 - DNA, 6 bp, Unknown
  misc_feature (1)..( 6): Result.003 file - promoters60/4769384
gatttg

SEQ ID NO: 139256 - DNA, 6 bp, Unknown
  misc_feature (1)..( 6): Result.003 file - promoters60/4769384
gatttg

SEQ ID NO: 139257 - DNA, 8 bp, Unknown
  misc_feature (1)..( 8): Result.003 file - promoters60/4769384
aaaacttt

SEQ ID NO: 139258 - DNA, 8 bp, Unknown
  misc_feature (1)..( 8): Result.003 file - promoters60/4769384
aaatcttt

SEQ ID NO: 139259 - DNA, 6 bp, Unknown
  misc_feature (1)..( 6): Result.003 file - promoters60/4769388
ccatat

SEQ ID NO: 139260 - DNA, 6 bp, Unknown
  misc_feature (1)..( 6): Result.003 file - promoters60/4769388
ccatat

SEQ ID NO: 139261 - DNA, 6 bp, Unknown
  misc_feature (1)..( 6): Result.003 file - promoters60/4769388
tataaa

SEQ ID NO: 139262 - DNA, 6 bp, Unknown
  misc_feature (1)..( 6): Result.003 file - promoters60/4769388
tataaa

SEQ ID NO: 139263 - DNA, 6 bp, Unknown
  misc_feature (1)..( 6): Result.003 file - promoters60/4769388
gttttg

SEQ ID NO: 139264 - DNA, 6 bp, Unknown
  misc_feature (1)..( 6): Result.003 file - promoters60/4769388
gttttg

SEQ ID NO: 139265 - DNA, 8 bp, Unknown
  misc_feature (1)..( 8): Result.003 file - promoters60/4769388
ttttaaat

SEQ ID NO: 139266 - DNA, 8 bp, Unknown
  misc_feature (1)..( 8): Result.003 file - promoters60/4769388
ctttaaaa

SEQ ID NO: 139267 - DNA, 6 bp, Unknown
  misc_feature (1)..( 6): Result.003 file - promoters60/4769388
agaaat

SEQ ID NO: 139268 - DNA, 6 bp, Unknown
  misc_feature (1)..( 6): Result.003 file - promoters60/4769388
agaaat

SEQ ID NO: 139269 - DNA, 7 bp, Unknown
  misc_feature (1)..( 7): Result.003 file - promoters60/4769388
tcgtaag

SEQ ID NO: 139270 - DNA, 7 bp, Unknown
  misc_feature (1)..( 7): Result.003 file - promoters60/4769388
tcgtaag

SEQ ID NO: 139271 - DNA, 6 bp, Unknown
  misc_feature (1)..( 6): Result.003 file - promoters60/4769388
aagaaa

SEQ ID NO: 139272 - DNA, 6 bp, Unknown
  misc_feature (1)..( 6): Result.003 file - promoters60/4769388
aagaaa

SEQ ID NO: 139273 - DNA, 6 bp, Unknown
  misc_feature (1)..( 6): Result.003 file - promoters60/4769388
gtcatc

SEQ ID NO: 139274 - DNA, 6 bp, Unknown
  misc_feature (1)..( 6): Result.003 file - promoters60/4769388
gtcatc

SEQ ID NO: 139275 - DNA, 7 bp, Unknown
  misc_feature (1)..( 7): Result.003 file - promoters60/4769388
aaataca

SEQ ID NO: 139276 - DNA, 7 bp, Unknown
  misc_feature (1)..( 7): Result.003 file - promoters60/4769388
aaacaca

SEQ ID NO: 139277 - DNA, 7 bp, Unknown
  misc_feature (1)..( 7): Result.003 file - promoters60/4769388
ccattgt

SEQ ID NO: 139278 - DNA, 7 bp, Unknown
  misc_feature (1)..( 7): Result.003 file - promoters60/4769388
ccattgt

SEQ ID NO: 139279 - DNA, 10 bp, Unknown
  misc_feature (1)..( 10): Result.003 file - promoters60/4769392
cccaaaattg

SEQ ID NO: 139280 - DNA, 10 bp, Unknown
  misc_feature (1)..( 10): Result.003 file - promoters60/4769392
cgtaaaattt

SEQ ID NO: 139281 - DNA, 10 bp, Unknown
  misc_feature (1)..( 10): Result.003 file - promoters60/4769392
tgtataatgg

SEQ ID NO: 139282 - DNA, 10 bp, Unknown
  misc_feature (1)..( 10): Result.003 file - promoters60/4769392
tggaaacttt

SEQ ID NO: 139283 - DNA, 10 bp, Unknown
  misc_feature (1)..( 10): Result.003 file - promoters60/4769392
tgtttaagta

SEQ ID NO: 139284 - DNA, 12 bp, Unknown
  misc_feature (1)..( 12): Result.003 file - promoters60/4769392
ttcatttttatt

SEQ ID NO: 139285 - DNA, 12 bp, Unknown
  misc_feature (1)..( 12): Result.003 file - promoters60/4769392
aaactttttacg

SEQ ID NO: 139286 - DNA, 12 bp, Unknown
  misc_feature (1)..( 12): Result.003 file - promoters60/4769392
gttggttttatt

SEQ ID NO: 139287 - DNA, 12 bp, Unknown
  misc_feature (1)..( 12): Result.003 file - promoters60/4769392
tcacttttcctt

SEQ ID NO: 139288 - DNA, 12 bp, Unknown
  misc_feature (1)..( 12): Result.003 file - promoters60/4769392
tagtgttttatt

SEQ ID NO: 139289 - DNA, 10 bp, Unknown
  misc_feature (1)..( 10): Result.003 file - promoters60/4769392
ggattaattc

SEQ ID NO: 139290 - DNA, 10 bp, Unknown
  misc_feature (1)..( 10): Result.003 file - promoters60/4769392
cgtttacttc

SEQ ID NO: 139291 - DNA, 10 bp, Unknown
  misc_feature (1)..( 10): Result.003 file - promoters60/4769392
cctttaatta

SEQ ID NO: 139292 - DNA, 10 bp, Unknown
  misc_feature (1)..( 10): Result.003 file - promoters60/4769392
cctataataa

SEQ ID NO: 139293 - DNA, 11 bp, Unknown
  misc_feature (1)..( 11): Result.003 file - promoters60/4769392
taaatctttat

SEQ ID NO: 139294 - DNA, 11 bp, Unknown
  misc_feature (1)..( 11): Result.003 file - promoters60/4769392
aaaaactttat

SEQ ID NO: 139295 - DNA, 11 bp, Unknown
  misc_feature (1)..( 11): Result.003 file - promoters60/4769392
taaatattttt

SEQ ID NO: 139296 - DNA, 11 bp, Unknown
  misc_feature (1)..( 11): Result.003 file - promoters60/4769392
ctaaactttga

SEQ ID NO: 139297 - DNA, 12 bp, Unknown
  misc_feature (1)..( 12): Result.003 file - promoters60/4769392
aaagaaataaat

SEQ ID NO: 139298 - DNA, 12 bp, Unknown
  misc_feature (1)..( 12): Result.003 file - promoters60/4769392
tattaaataaat

SEQ ID NO: 139299 - DNA, 12 bp, Unknown
  misc_feature (1)..( 12): Result.003 file - promoters60/4769392
gtccaaaaaaaa

SEQ ID NO: 139300 - DNA, 12 bp, Unknown
  misc_feature (1)..( 12): Result.003 file - promoters60/4769392
cttgaaaaaaga

SEQ ID NO: 139301 - DNA, 12 bp, Unknown
  misc_feature (1)..( 12): Result.003 file - promoters60/4769392
ccacaaatatcg

SEQ ID NO: 139302 - DNA, 9 bp, Unknown
  misc_feature (1)..( 9): Result.003 file - promoters60/4769392
atttatttc

SEQ ID NO: 139303 - DNA, 9 bp, Unknown
  misc_feature (1)..( 9): Result.003 file - promoters60/4769392
ttttgtttc

SEQ ID NO: 139304 - DNA, 9 bp, Unknown
  misc_feature (1)..( 9): Result.003 file - promoters60/4769392
ttatgtata

SEQ ID NO: 139305 - DNA, 9 bp, Unknown
  misc_feature (1)..( 9): Result.003 file - promoters60/4769392
ttatgtgat

SEQ ID NO: 139306 - DNA, 12 bp, Unknown
  misc_feature (1)..( 12): Result.003 file - promoters60/4769392
ttttaaaaaaga

SEQ ID NO: 139307 - DNA, 12 bp, Unknown
  misc_feature (1)..( 12): Result.003 file - promoters60/4769392
cttgaaaaaaga

SEQ ID NO: 139308 - DNA, 12 bp, Unknown
  misc_feature (1)..( 12): Result.003 file - promoters60/4769392
gtccaaaaaaaa

SEQ ID NO: 139309 - DNA, 12 bp, Unknown
  misc_feature (1)..( 12): Result.003 file - promoters60/4769392
aaataaaaaaaa

SEQ ID NO: 139310 - DNA, 12 bp, Unknown
  misc_feature (1)..( 12): Result.003 file - promoters60/4769392
aatcaaaacaaa

SEQ ID NO: 139311 - DNA, 12 bp, Unknown
  misc_feature (1)..( 12): Result.003 file - promoters60/4769392
gaccacaaatat

SEQ ID NO: 139312 - DNA, 9 bp, Unknown
  misc_feature (1)..( 9): Result.003 file - promoters60/4769392
ttatttgag

SEQ ID NO: 139313 - DNA, 9 bp, Unknown
  misc_feature (1)..( 9): Result.003 file - promoters60/4769392
ttaattgta

SEQ ID NO: 139314 - DNA, 9 bp, Unknown
  misc_feature (1)..( 9): Result.003 file - promoters60/4769392
ttatttggc

SEQ ID NO: 139315 - DNA, 9 bp, Unknown
  misc_feature (1)..( 9): Result.003 file - promoters60/4769392
ttatttttt

SEQ ID NO: 139316 - DNA, 8 bp, Unknown
  misc_feature (1)..( 8): Result.003 file - promoters60/4769392
tgattttt

SEQ ID NO: 139317 - DNA, 8 bp, Unknown
  misc_feature (1)..( 8): Result.003 file - promoters60/4769392
tgatcttt

SEQ ID NO: 139318 - DNA, 9 bp, Unknown
  misc_feature (1)..( 9): Result.003 file - promoters60/4769392
taattattt

SEQ ID NO: 139319 - DNA, 9 bp, Unknown
  misc_feature (1)..( 9): Result.003 file - promoters60/4769392
taataatta

SEQ ID NO: 139320 - DNA, 11 bp, Unknown
  misc_feature (1)..( 11): Result.003 file - promoters60/4769392
aataaatcgta

SEQ ID NO: 139321 - DNA, 11 bp, Unknown
  misc_feature (1)..( 11): Result.003 file - promoters60/4769392
agaaaatcgaa

SEQ ID NO: 139322 - DNA, 11 bp, Unknown
  misc_feature (1)..( 11): Result.003 file - promoters60/4769392
gtataatggaa

SEQ ID NO: 139323 - DNA, 11 bp, Unknown
  misc_feature (1)..( 11): Result.003 file - promoters60/4769392
atgaaaaataa

SEQ ID NO: 139324 - DNA, 19 bp, Unknown
  misc_feature (1)..( 19): Result.003 file - promoters60/4769411
aattgcaaaatatataaaa

SEQ ID NO: 139325 - DNA, 19 bp, Unknown
  misc_feature (1)..( 19): Result.003 file - promoters60/4769411
ttattcttaatttataaaa

SEQ ID NO: 139326 - DNA, 19 bp, Unknown
  misc_feature (1)..( 19): Result.003 file - promoters60/4769411
ttcggtttaatttgacaaa

SEQ ID NO: 139327 - DNA, 19 bp, Unknown
  misc_feature (1)..( 19): Result.003 file - promoters60/4769411
ttcggttgaattcatcatc

SEQ ID NO: 139328 - DNA, 19 bp, Unknown
  misc_feature (1)..( 19): Result.003 file - promoters60/4769411
tagggtttgattttgtgat

SEQ ID NO: 139329 - DNA, 19 bp, Unknown
  misc_feature (1)..( 19): Result.003 file - promoters60/4769411
aagctcttaattgtttatg

SEQ ID NO: 139330 - DNA, 10 bp, Unknown
  misc_feature (1)..( 10): Result.003 file - promoters60/4769411
aataattttc

SEQ ID NO: 139331 - DNA, 10 bp, Unknown
  misc_feature (1)..( 10): Result.003 file - promoters60/4769411
aatcattccc

SEQ ID NO: 139332 - DNA, 11 bp, Unknown
  misc_feature (1)..( 11): Result.003 file - promoters60/4769411
gataaatttat

SEQ ID NO: 139333 - DNA, 11 bp, Unknown
  misc_feature (1)..( 11): Result.003 file - promoters60/4769411
aggcgatcatt

SEQ ID NO: 139334 - DNA, 11 bp, Unknown
  misc_feature (1)..( 11): Result.003 file - promoters60/4769411
gcccaattatt

SEQ ID NO: 139335 - DNA, 11 bp, Unknown
  misc_feature (1)..( 11): Result.003 file - promoters60/4769411
tgacaaacatg

SEQ ID NO: 139336 - DNA, 11 bp, Unknown
  misc_feature (1)..( 11): Result.003 file - promoters60/4769411
tttgtataact

SEQ ID NO: 139337 - DNA, 11 bp, Unknown
  misc_feature (1)..( 11): Result.003 file - promoters60/4769411
attgtatgcaa

SEQ ID NO: 139338 - DNA, 11 bp, Unknown
  misc_feature (1)..( 11): Result.003 file - promoters60/4769411
tttgtattatt

SEQ ID NO: 139339 - DNA, 11 bp, Unknown
  misc_feature (1)..( 11): Result.003 file - promoters60/4769411
attgtaaaaag

SEQ ID NO: 139340 - DNA, 11 bp, Unknown
  misc_feature (1)..( 11): Result.003 file - promoters60/4769411
attttaaagaa

SEQ ID NO: 139341 - DNA, 11 bp, Unknown
  misc_feature (1)..( 11): Result.003 file - promoters60/4769411
agtttagagaa

SEQ ID NO: 139342 - DNA, 11 bp, Unknown
  misc_feature (1)..( 11): Result.003 file - promoters60/4769411
gttttaaaata

SEQ ID NO: 139343 - DNA, 8 bp, Unknown
  misc_feature (1)..( 8): Result.003 file - promoters60/4769411
ggataagg

SEQ ID NO: 139344 - DNA, 8 bp, Unknown
  misc_feature (1)..( 8): Result.003 file - promoters60/4769411
ggaaaagc

SEQ ID NO: 139345 - DNA, 8 bp, Unknown
  misc_feature (1)..( 8): Result.003 file - promoters60/4769411
agataaga

SEQ ID NO: 139346 - DNA, 8 bp, Unknown
  misc_feature (1)..( 8): Result.003 file - promoters60/4769411
gaaaaagc

SEQ ID NO: 139347 - DNA, 8 bp, Unknown
  misc_feature (1)..( 8): Result.003 file - promoters60/4769411
ggataagt

SEQ ID NO: 139348 - DNA, 12 bp, Unknown
  misc_feature (1)..( 12): Result.003 file - promoters60/4769411
caaataattttc

SEQ ID NO: 139349 - DNA, 12 bp, Unknown
  misc_feature (1)..( 12): Result.003 file - promoters60/4769411
tataaaattttg

SEQ ID NO: 139350 - DNA, 12 bp, Unknown
  misc_feature (1)..( 12): Result.003 file - promoters60/4769411
ggataaatttat

SEQ ID NO: 139351 - DNA, 12 bp, Unknown
  misc_feature (1)..( 12): Result.003 file - promoters60/4769411
gcgatcattttg

SEQ ID NO: 139352 - DNA, 12 bp, Unknown
  misc_feature (1)..( 12): Result.003 file - promoters60/4769411
ggatcaatcaat

SEQ ID NO: 139353 - DNA, 10 bp, Unknown
  misc_feature (1)..( 10): Result.003 file - promoters60/4769411
ccattaaatt

SEQ ID NO: 139354 - DNA, 10 bp, Unknown
  misc_feature (1)..( 10): Result.003 file - promoters60/4769411
cgattaaacc

SEQ ID NO: 139355 - DNA, 10 bp, Unknown
  misc_feature (1)..( 10): Result.003 file - promoters60/4769411
gaattaaatt

SEQ ID NO: 139356 - DNA, 10 bp, Unknown
  misc_feature (1)..( 10): Result.003 file - promoters60/4769411
aaattaacat

SEQ ID NO: 139357 - DNA, 10 bp, Unknown
  misc_feature (1)..( 10): Result.003 file - promoters60/4769411
aaattgagga

SEQ ID NO: 139358 - DNA, 10 bp, Unknown
  misc_feature (1)..( 10): Result.003 file - promoters60/4769411
aaagtgtttt

SEQ ID NO: 139359 - DNA, 10 bp, Unknown
  misc_feature (1)..( 10): Result.003 file - promoters60/4769411
gaagataagg

SEQ ID NO: 139360 - DNA, 10 bp, Unknown
  misc_feature (1)..( 10): Result.003 file - promoters60/4769411
agagataaag

SEQ ID NO: 139361 - DNA, 10 bp, Unknown
  misc_feature (1)..( 10): Result.003 file - promoters60/4769411
tgagagaagt

SEQ ID NO: 139362 - DNA, 10 bp, Unknown
  misc_feature (1)..( 10): Result.003 file - promoters60/4769411
gaagacaagg

SEQ ID NO: 139363 - DNA, 10 bp, Unknown
  misc_feature (1)..( 10): Result.003 file - promoters60/4769411
gaaaatatat

SEQ ID NO: 139364 - DNA, 7 bp, Unknown
  misc_feature (1)..( 7): Result.003 file - promoters60/4769420
taatttc

SEQ ID NO: 139365 - DNA, 7 bp, Unknown
  misc_feature (1)..( 7): Result.003 file - promoters60/4769420
taatttc

SEQ ID NO: 139366 - DNA, 12 bp, Unknown
  misc_feature (1)..( 12): Result.003 file - promoters60/4769420
ccaaattatttt

SEQ ID NO: 139367 - DNA, 12 bp, Unknown
  misc_feature (1)..( 12): Result.003 file - promoters60/4769420
aaaaagtatttt

SEQ ID NO: 139368 - DNA, 12 bp, Unknown
  misc_feature (1)..( 12): Result.003 file - promoters60/4769420
aaaaagtaaaca

SEQ ID NO: 139369 - DNA, 6 bp, Unknown
  misc_feature (1)..( 6): Result.003 file - promoters60/4769420
agctaa

SEQ ID NO: 139370 - DNA, 6 bp, Unknown
  misc_feature (1)..( 6): Result.003 file - promoters60/4769420
agctaa

SEQ ID NO: 139371 - DNA, 7 bp, Unknown
  misc_feature (1)..( 7): Result.003 file - promoters60/4769420
aaattat

SEQ ID NO: 139372 - DNA, 7 bp, Unknown
  misc_feature (1)..( 7): Result.003 file - promoters60/4769420
aaattat

SEQ ID NO: 139373 - DNA, 7 bp, Unknown
  misc_feature (1)..( 7): Result.003 file - promoters60/4769420
aactaag

SEQ ID NO: 139374 - DNA, 7 bp, Unknown
  misc_feature (1)..( 7): Result.003 file - promoters60/4769420
aactaag

SEQ ID NO: 139375 - DNA, 10 bp, Unknown
  misc_feature (1)..( 10): Result.003 file - promoters60/4769420
actacaaatt

SEQ ID NO: 139376 - DNA, 10 bp, Unknown
  misc_feature (1)..( 10): Result.003 file - promoters60/4769420
actaaaaatt

SEQ ID NO: 139377 - DNA, 10 bp, Unknown
  misc_feature (1)..( 10): Result.003 file - promoters60/4769420
tttagccaaa

SEQ ID NO: 139378 - DNA, 10 bp, Unknown
  misc_feature (1)..( 10): Result.003 file - promoters60/4769420
tttagcaaaa

SEQ ID NO: 139379 - DNA, 6 bp, Unknown
  misc_feature (1)..( 6): Result.003 file - promoters60/4769420
acacaa

SEQ ID NO: 139380 - DNA, 6 bp, Unknown
  misc_feature (1)..( 6): Result.003 file - promoters60/4769420
acacaa

SEQ ID NO: 139381 - DNA, 7 bp, Unknown
  misc_feature (1)..( 7): Result.003 file - promoters60/4769420
gatcttg

SEQ ID NO: 139382 - DNA, 7 bp, Unknown
  misc_feature (1)..( 7): Result.003 file - promoters60/4769420
gatattg

SEQ ID NO: 139383 - DNA, 7 bp, Unknown
  misc_feature (1)..( 7): Result.003 file - promoters60/4769420
aatgcaa

SEQ ID NO: 139384 - DNA, 7 bp, Unknown
  misc_feature (1)..( 7): Result.003 file - promoters60/4769420
aatccaa

SEQ ID NO: 139385 - DNA, 6 bp, Unknown
  misc_feature (1)..( 6): Result.003 file - promoters60/4769420
ccacta

SEQ ID NO: 139386 - DNA, 6 bp, Unknown
  misc_feature (1)..( 6): Result.003 file - promoters60/4769420
ccacta

SEQ ID NO: 139387 - DNA, 7 bp, Unknown
  misc_feature (1)..( 7): Result.003 file - promoters60/4769420
taaaacc

SEQ ID NO: 139388 - DNA, 7 bp, Unknown
  misc_feature (1)..( 7): Result.003 file - promoters60/4769420
taaaacc

SEQ ID NO: 139389 - DNA, 6 bp, Unknown
  misc_feature (1)..( 6): Result.003 file - promoters60/4769420
gttttg

SEQ ID NO: 139390 - DNA, 6 bp, Unknown
  misc_feature (1)..( 6): Result.003 file - promoters60/4769420
gttttg

SEQ ID NO: 139391 - DNA, 6 bp, Unknown
  misc_feature (1)..( 6): Result.003 file - promoters60/4769420
aattgt

SEQ ID NO: 139392 - DNA, 6 bp, Unknown
  misc_feature (1)..( 6): Result.003 file - promoters60/4769420
aattgt

SEQ ID NO: 139393 - DNA, 8 bp, Unknown
  misc_feature (1)..( 8): Result.003 file - promoters60/4769420
ccaagtaa

SEQ ID NO: 139394 - DNA, 8 bp, Unknown
  misc_feature (1)..( 8): Result.003 file - promoters60/4769420
ccaagtaa

SEQ ID NO: 139395 - DNA, 9 bp, Unknown
  misc_feature (1)..( 9): Result.003 file - promoters60/4769420
tcagtgata

SEQ ID NO: 139396 - DNA, 9 bp, Unknown
  misc_feature (1)..( 9): Result.003 file - promoters60/4769420
tcagagata

SEQ ID NO: 139397 - DNA, 6 bp, Unknown
  misc_feature (1)..( 6): Result.003 file - promoters60/4769420
ttatat

SEQ ID NO: 139398 - DNA, 6 bp, Unknown
  misc_feature (1)..( 6): Result.003 file - promoters60/4769420
ttatat

SEQ ID NO: 139399 - DNA, 7 bp, Unknown
  misc_feature (1)..( 7): Result.003 file - promoters60/4769420
atcttca

SEQ ID NO: 139400 - DNA, 7 bp, Unknown
  misc_feature (1)..( 7): Result.003 file - promoters60/4769420
atcatca

SEQ ID NO: 139401 - DNA, 7 bp, Unknown
  misc_feature (1)..( 7): Result.003 file - promoters60/4769420
caatgaa

SEQ ID NO: 139402 - DNA, 7 bp, Unknown
  misc_feature (1)..( 7): Result.003 file - promoters60/4769420
caaagaa

SEQ ID NO: 139403 - DNA, 11 bp, Unknown
  misc_feature (1)..( 11): Result.003 file - promoters60/4770260
ccatttaaatc

SEQ ID NO: 139404 - DNA, 11 bp, Unknown
  misc_feature (1)..( 11): Result.003 file - promoters60/4770260
gcattaaaata

SEQ ID NO: 139405 - DNA, 11 bp, Unknown
  misc_feature (1)..( 11): Result.003 file - promoters60/4770260
ccatttctaca

SEQ ID NO: 139406 - DNA, 11 bp, Unknown
  misc_feature (1)..( 11): Result.003 file - promoters60/4770260
aacttaatata

SEQ ID NO: 139407 - DNA, 11 bp, Unknown
  misc_feature (1)..( 11): Result.003 file - promoters60/4770260
tttgtaaaatt

SEQ ID NO: 139408 - DNA, 11 bp, Unknown
  misc_feature (1)..( 11): Result.003 file - promoters60/4770260
atatttgaaat

SEQ ID NO: 139409 - DNA, 11 bp, Unknown
  misc_feature (1)..( 11): Result.003 file - promoters60/4770260
atattcgaaat

SEQ ID NO: 139410 - DNA, 11 bp, Unknown
  misc_feature (1)..( 11): Result.003 file - promoters60/4770260
tagtttcaaat

SEQ ID NO: 139411 - DNA, 11 bp, Unknown
  misc_feature (1)..( 11): Result.003 file - promoters60/4770260
ggatttgaatt

SEQ ID NO: 139412 - DNA, 11 bp, Unknown
  misc_feature (1)..( 11): Result.003 file - promoters60/4770260
ttacttcaaag

SEQ ID NO: 139413 - DNA, 13 bp, Unknown
  misc_feature (1)..( 13): Result.003 file - promoters60/4770264
tttcttaaaaaaa

SEQ ID NO: 139414 - DNA, 13 bp, Unknown
  misc_feature (1)..( 13): Result.003 file - promoters60/4770264
tttattaaaaaaa

SEQ ID NO: 139415 - DNA, 8 bp, Unknown
  misc_feature (1)..( 8): Result.003 file - promoters60/4770264
taaaagaa

SEQ ID NO: 139416 - DNA, 8 bp, Unknown
  misc_feature (1)..( 8): Result.003 file - promoters60/4770264
taaatgaa

SEQ ID NO: 139417 - DNA, 8 bp, Unknown
  misc_feature (1)..( 8): Result.003 file - promoters60/4770264
aaaattga

SEQ ID NO: 139418 - DNA, 8 bp, Unknown
  misc_feature (1)..( 8): Result.003 file - promoters60/4770264
aaagttga

SEQ ID NO: 139419 - DNA, 6 bp, Unknown
  misc_feature (1)..( 6): Result.003 file - promoters60/4770264
aaaata

SEQ ID NO: 139420 - DNA, 6 bp, Unknown
  misc_feature (1)..( 6): Result.003 file - promoters60/4770264
aaaata

SEQ ID NO: 139421 - DNA, 8 bp, Unknown
  misc_feature (1)..( 8): Result.003 file - promoters60/4770264
caaaagat

SEQ ID NO: 139422 - DNA, 8 bp, Unknown
  misc_feature (1)..( 8): Result.003 file - promoters60/4770264
caaaggat

SEQ ID NO: 139423 - DNA, 6 bp, Unknown
  misc_feature (1)..( 6): Result.003 file - promoters60/4770264
gtgaga

SEQ ID NO: 139424 - DNA, 6 bp, Unknown
  misc_feature (1)..( 6): Result.003 file - promoters60/4770264
gtgaga

SEQ ID NO: 139425 - DNA, 10 bp, Unknown
  misc_feature (1)..( 10): Result.003 file - promoters60/4770264
cattaattct

SEQ ID NO: 139426 - DNA, 10 bp, Unknown
  misc_feature (1)..( 10): Result.003 file - promoters60/4770264
cattcattct

SEQ ID NO: 139427 - DNA, 10 bp, Unknown
  misc_feature (1)..( 10): Result.003 file - promoters60/4770264
ttaaatattt

SEQ ID NO: 139428 - DNA, 10 bp, Unknown
  misc_feature (1)..( 10): Result.003 file - promoters60/4770264
ttaattattt

SEQ ID NO: 139429 - DNA, 9 bp, Unknown
  misc_feature (1)..( 9): Result.003 file - promoters60/4770264
gaatattat

SEQ ID NO: 139430 - DNA, 9 bp, Unknown
  misc_feature (1)..( 9): Result.003 file - promoters60/4770264
gaatatctt

SEQ ID NO: 139431 - DNA, 9 bp, Unknown
  misc_feature (1)..( 9): Result.003 file - promoters60/4770264
gaaaaaata

SEQ ID NO: 139432 - DNA, 7 bp, Unknown
  misc_feature (1)..( 7): Result.003 file - promoters60/4770264
aaattta

SEQ ID NO: 139433 - DNA, 7 bp, Unknown
  misc_feature (1)..( 7): Result.003 file - promoters60/4770264
aaagtta

SEQ ID NO: 139434 - DNA, 6 bp, Unknown
  misc_feature (1)..( 6): Result.003 file - promoters60/4770264
tttgaa

SEQ ID NO: 139435 - DNA, 6 bp, Unknown
  misc_feature (1)..( 6): Result.003 file - promoters60/4770264
tttgaa

SEQ ID NO: 139436 - DNA, 7 bp, Unknown
  misc_feature (1)..( 7): Result.003 file - promoters60/4770264
gaataaa

SEQ ID NO: 139437 - DNA, 7 bp, Unknown
  misc_feature (1)..( 7): Result.003 file - promoters60/4770264
gaagaaa

SEQ ID NO: 139438 - DNA, 7 bp, Unknown
  misc_feature (1)..( 7): Result.003 file - promoters60/4770264
gatcttc

SEQ ID NO: 139439 - DNA, 7 bp, Unknown
  misc_feature (1)..( 7): Result.003 file - promoters60/4770264
gatcttc

SEQ ID NO: 139440 - DNA, 8 bp, Unknown
  misc_feature (1)..( 8): Result.003 file - promoters60/4770264
tttagctt

SEQ ID NO: 139441 - DNA, 8 bp, Unknown
  misc_feature (1)..( 8): Result.003 file - promoters60/4770264
tttatctt

SEQ ID NO: 139442 - DNA, 6 bp, Unknown
  misc_feature (1)..( 6): Result.003 file - promoters60/4770264
gaatta

SEQ ID NO: 139443 - DNA, 6 bp, Unknown
  misc_feature (1)..( 6): Result.003 file - promoters60/4770264
gaatta

SEQ ID NO: 139444 - DNA, 6 bp, Unknown
  misc_feature (1)..( 6): Result.003 file - promoters60/4770264
gcggaa

SEQ ID NO: 139445 - DNA, 6 bp, Unknown
  misc_feature (1)..( 6): Result.003 file - promoters60/4770264
gcggaa

SEQ ID NO: 139446 - DNA, 6 bp, Unknown
  misc_feature (1)..( 6): Result.003 file - promoters60/4770264
aaagaa

SEQ ID NO: 139447 - DNA, 6 bp, Unknown
  misc_feature (1)..( 6): Result.003 file - promoters60/4770264
aaagaa

SEQ ID NO: 139448 - DNA, 7 bp, Unknown
  misc_feature (1)..( 7): Result.003 file - promoters60/4770264
tattttc

SEQ ID NO: 139449 - DNA, 7 bp, Unknown
  misc_feature (1)..( 7): Result.003 file - promoters60/4770264
tatcttc

SEQ ID NO: 139450 - DNA, 6 bp, Unknown
  misc_feature (1)..( 6): Result.003 file - promoters60/4770264
tccttg

SEQ ID NO: 139451 - DNA, 6 bp, Unknown
  misc_feature (1)..( 6): Result.003 file - promoters60/4770264
tccttg

SEQ ID NO: 139452 - DNA, 7 bp, Unknown
  misc_feature (1)..( 7): Result.003 file - promoters60/4770264
gatatat

SEQ ID NO: 139453 - DNA, 7 bp, Unknown
  misc_feature (1)..( 7): Result.003 file - promoters60/4770264
gatgtat

SEQ ID NO: 139454 - DNA, 10 bp, Unknown
  misc_feature (1)..( 10): Result.003 file - promoters60/4770268
gattttgaaa

SEQ ID NO: 139455 - DNA, 10 bp, Unknown
  misc_feature (1)..( 10): Result.003 file - promoters60/4770268
attttttaaa

SEQ ID NO: 139456 - DNA, 10 bp, Unknown
  misc_feature (1)..( 10): Result.003 file - promoters60/4770268
gatattgtat

SEQ ID NO: 139457 - DNA, 10 bp, Unknown
  misc_feature (1)..( 10): Result.003 file - promoters60/4770268
tctatgaatc

SEQ ID NO: 139458 - DNA, 10 bp, Unknown
  misc_feature (1)..( 10): Result.003 file - promoters60/4770268
tctttgaata

SEQ ID NO: 139459 - DNA, 10 bp, Unknown
  misc_feature (1)..( 10): Result.003 file - promoters60/4770268
aaactgaata

SEQ ID NO: 139460 - DNA, 8 bp, Unknown
  misc_feature (1)..( 8): Result.003 file - promoters60/4770268
ttttgtat

SEQ ID NO: 139461 - DNA, 8 bp, Unknown
  misc_feature (1)..( 8): Result.003 file - promoters60/4770268
ctttgtat

SEQ ID NO: 139462 - DNA, 8 bp, Unknown
  misc_feature (1)..( 8): Result.003 file - promoters60/4770268
ttttgttg

SEQ ID NO: 139463 - DNA, 8 bp, Unknown
  misc_feature (1)..( 8): Result.003 file - promoters60/4770268
atgtagac

SEQ ID NO: 139464 - DNA, 8 bp, Unknown
  misc_feature (1)..( 8): Result.003 file - promoters60/4770268
ttgttgac

SEQ ID NO: 139465 - DNA, 8 bp, Unknown
  misc_feature (1)..( 8): Result.003 file - promoters60/4770268
ttgttgtt

SEQ ID NO: 139466 - DNA, 7 bp, Unknown
  misc_feature (1)..( 7): Result.003 file - promoters60/4770268
gaacttg

SEQ ID NO: 139467 - DNA, 7 bp, Unknown
  misc_feature (1)..( 7): Result.003 file - promoters60/4770268
gaaattg

SEQ ID NO: 139468 - DNA, 7 bp, Unknown
  misc_feature (1)..( 7): Result.003 file - promoters60/4770268
gaaattt

SEQ ID NO: 139469 - DNA, 8 bp, Unknown
  misc_feature (1)..( 8): Result.003 file - promoters60/4770274
gaataaat

SEQ ID NO: 139470 - DNA, 8 bp, Unknown
  misc_feature (1)..( 8): Result.003 file - promoters60/4770274
gaaaaaac

SEQ ID NO: 139471 - DNA, 8 bp, Unknown
  misc_feature (1)..( 8): Result.003 file - promoters60/4770274
aaataacg

SEQ ID NO: 139472 - DNA, 8 bp, Unknown
  misc_feature (1)..( 8): Result.003 file - promoters60/4770274
atagatat

SEQ ID NO: 139473 - DNA, 8 bp, Unknown
  misc_feature (1)..( 8): Result.003 file - promoters60/4770274
ctagatat

SEQ ID NO: 139474 - DNA, 8 bp, Unknown
  misc_feature (1)..( 8): Result.003 file - promoters60/4770274
ctaaataa

SEQ ID NO: 139475 - DNA, 7 bp, Unknown
  misc_feature (1)..( 7): Result.003 file - promoters60/4770274
aataaaa

SEQ ID NO: 139476 - DNA, 7 bp, Unknown
  misc_feature (1)..( 7): Result.003 file - promoters60/4770274
aataaaa

SEQ ID NO: 139477 - DNA, 7 bp, Unknown
  misc_feature (1)..( 7): Result.003 file - promoters60/4770274
aataaac

SEQ ID NO: 139478 - DNA, 8 bp, Unknown
  misc_feature (1)..( 8): Result.003 file - promoters60/4770274
ttttcttt

SEQ ID NO: 139479 - DNA, 8 bp, Unknown
  misc_feature (1)..( 8): Result.003 file - promoters60/4770274
tttccttt

SEQ ID NO: 139480 - DNA, 8 bp, Unknown
  misc_feature (1)..( 8): Result.003 file - promoters60/4770274
gcttcttt

SEQ ID NO: 139481 - DNA, 10 bp, Unknown
  misc_feature (1)..( 10): Result.003 file - promoters60/4770274
tttaatataa

SEQ ID NO: 139482 - DNA, 10 bp, Unknown
  misc_feature (1)..( 10): Result.003 file - promoters60/4770274
ttttatataa

SEQ ID NO: 139483 - DNA, 10 bp, Unknown
  misc_feature (1)..( 10): Result.003 file - promoters60/4770274
gataatatac

SEQ ID NO: 139484 - DNA, 8 bp, Unknown
  misc_feature (1)..( 8): Result.003 file - promoters60/4770274
aatattat

SEQ ID NO: 139485 - DNA, 8 bp, Unknown
  misc_feature (1)..( 8): Result.003 file - promoters60/4770274
aatactat

SEQ ID NO: 139486 - DNA, 8 bp, Unknown
  misc_feature (1)..( 8): Result.003 file - promoters60/4770274
gataatat

SEQ ID NO: 139487 - DNA, 7 bp, Unknown
  misc_feature (1)..( 7): Result.003 file - promoters60/4770274
tacttgt

SEQ ID NO: 139488 - DNA, 7 bp, Unknown
  misc_feature (1)..( 7): Result.003 file - promoters60/4770274
aacttgt

SEQ ID NO: 139489 - DNA, 7 bp, Unknown
  misc_feature (1)..( 7): Result.003 file - promoters60/4770274
tacttgg

SEQ ID NO: 139490 - DNA, 10 bp, Unknown
  misc_feature (1)..( 10): Result.003 file - promoters60/4770274
aataaatctt

SEQ ID NO: 139491 - DNA, 10 bp, Unknown
  misc_feature (1)..( 10): Result.003 file - promoters60/4770274
cctaaacctt

SEQ ID NO: 139492 - DNA, 10 bp, Unknown
  misc_feature (1)..( 10): Result.003 file - promoters60/4770274
cctaaactaa

SEQ ID NO: 139493 - DNA, 8 bp, Unknown
  misc_feature (1)..( 8): Result.003 file - promoters60/4770274
ttaactac

SEQ ID NO: 139494 - DNA, 8 bp, Unknown
  misc_feature (1)..( 8): Result.003 file - promoters60/4770274
ataattac

SEQ ID NO: 139495 - DNA, 8 bp, Unknown
  misc_feature (1)..( 8): Result.003 file - promoters60/4770274
ataattac

SEQ ID NO: 139496 - DNA, 11 bp, Unknown
  misc_feature (1)..( 11): Result.003 file - promoters60/4770274
attaactacat

SEQ ID NO: 139497 - DNA, 11 bp, Unknown
  misc_feature (1)..( 11): Result.003 file - promoters60/4770274
aatcactacat

SEQ ID NO: 139498 - DNA, 11 bp, Unknown
  misc_feature (1)..( 11): Result.003 file - promoters60/4770274
attcactacca

SEQ ID NO: 139499 - DNA, 9 bp, Unknown
  misc_feature (1)..( 9): Result.003 file - promoters60/4770274
gtcataaat

SEQ ID NO: 139500 - DNA, 9 bp, Unknown
  misc_feature (1)..( 9): Result.003 file - promoters60/4770274
tccattaat

SEQ ID NO: 139501 - DNA, 9 bp, Unknown
  misc_feature (1)..( 9): Result.003 file - promoters60/4770274
tcctttact

SEQ ID NO: 139502 - DNA, 8 bp, Unknown
  misc_feature (1)..( 8): Result.003 file - promoters60/4770274
atctttac

SEQ ID NO: 139503 - DNA, 8 bp, Unknown
  misc_feature (1)..( 8): Result.003 file - promoters60/4770274
tcctttac

SEQ ID NO: 139504 - DNA, 8 bp, Unknown
  misc_feature (1)..( 8): Result.003 file - promoters60/4770274
tccattaa

SEQ ID NO: 139505 - DNA, 9 bp, Unknown
  misc_feature (1)..( 9): Result.003 file - promoters60/4770278
tcaaataat

SEQ ID NO: 139506 - DNA, 9 bp, Unknown
  misc_feature (1)..( 9): Result.003 file - promoters60/4770278
taaaaaaat

SEQ ID NO: 139507 - DNA, 9 bp, Unknown
  misc_feature (1)..( 9): Result.003 file - promoters60/4770278
ccaaataat

SEQ ID NO: 139508 - DNA, 9 bp, Unknown
  misc_feature (1)..( 9): Result.003 file - promoters60/4770278
gaaaacaat

SEQ ID NO: 139509 - DNA, 9 bp, Unknown
  misc_feature (1)..( 9): Result.003 file - promoters60/4770278
acaaattta

SEQ ID NO: 139510 - DNA, 10 bp, Unknown
  misc_feature (1)..( 10): Result.003 file - promoters60/4770278
ctcaaagaaa

SEQ ID NO: 139511 - DNA, 10 bp, Unknown
  misc_feature (1)..( 10): Result.003 file - promoters60/4770278
cacaaacaaa

SEQ ID NO: 139512 - DNA, 10 bp, Unknown
  misc_feature (1)..( 10): Result.003 file - promoters60/4770278
ttcaaccaat

SEQ ID NO: 139513 - DNA, 10 bp, Unknown
  misc_feature (1)..( 10): Result.003 file - promoters60/4770278
caccaacaaa

SEQ ID NO: 139514 - DNA, 10 bp, Unknown
  misc_feature (1)..( 10): Result.003 file - promoters60/4770278
ttcaaaaaaa

SEQ ID NO: 139515 - DNA, 16 bp, Unknown
  misc_feature (1)..( 16): Result.003 file - promoters60/4770278
agatttcaaataattt

SEQ ID NO: 139516 - DNA, 16 bp, Unknown
  misc_feature (1)..( 16): Result.003 file - promoters60/4770278
tctatgattatatttt

SEQ ID NO: 139517 - DNA, 16 bp, Unknown
  misc_feature (1)..( 16): Result.003 file - promoters60/4770278
aaaaaaaaaaaaattt

SEQ ID NO: 139518 - DNA, 16 bp, Unknown
  misc_feature (1)..( 16): Result.003 file - promoters60/4770278
tatatgattgtaattt

SEQ ID NO: 139519 - DNA, 16 bp, Unknown
  misc_feature (1)..( 16): Result.003 file - promoters60/4770278
aaaaataaaataatac

SEQ ID NO: 139520 - DNA, 7 bp, Unknown
  misc_feature (1)..( 7): Result.003 file - promoters60/4770280
taaaatt

SEQ ID NO: 139521 - DNA, 7 bp, Unknown
  misc_feature (1)..( 7): Result.003 file - promoters60/4770280
taatatt

SEQ ID NO: 139522 - DNA, 7 bp, Unknown
  misc_feature (1)..( 7): Result.003 file - promoters60/4770280
catatac

SEQ ID NO: 139523 - DNA, 7 bp, Unknown
  misc_feature (1)..( 7): Result.003 file - promoters60/4770280
catgtac

SEQ ID NO: 139524 - DNA, 7 bp, Unknown
  misc_feature (1)..( 7): Result.003 file - promoters60/4770280
ctgaatc

SEQ ID NO: 139525 - DNA, 7 bp, Unknown
  misc_feature (1)..( 7): Result.003 file - promoters60/4770280
ctgaatc

SEQ ID NO: 139526 - DNA, 6 bp, Unknown
  misc_feature (1)..( 6): Result.003 file - promoters60/4770280
ttgatt

SEQ ID NO: 139527 - DNA, 6 bp, Unknown
  misc_feature (1)..( 6): Result.003 file - promoters60/4770280
ttgatt

SEQ ID NO: 139528 - DNA, 6 bp, Unknown
  misc_feature (1)..( 6): Result.003 file - promoters60/4770280
caaagg

SEQ ID NO: 139529 - DNA, 6 bp, Unknown
  misc_feature (1)..( 6): Result.003 file - promoters60/4770280
caaagg

SEQ ID NO: 139530 - DNA, 7 bp, Unknown
  misc_feature (1)..( 7): Result.003 file - promoters60/4770280
tatcatt

SEQ ID NO: 139531 - DNA, 7 bp, Unknown
  misc_feature (1)..( 7): Result.003 file - promoters60/4770280
tatgatt

SEQ ID NO: 139532 - DNA, 7 bp, Unknown
  misc_feature (1)..( 7): Result.003 file - promoters60/4770280
gaatttg

SEQ ID NO: 139533 - DNA, 7 bp, Unknown
  misc_feature (1)..( 7): Result.003 file - promoters60/4770280
gaatttg

SEQ ID NO: 139534 - DNA, 7 bp, Unknown
  misc_feature (1)..( 7): Result.003 file - promoters60/4770280
tttgatt

SEQ ID NO: 139535 - DNA, 7 bp, Unknown
  misc_feature (1)..( 7): Result.003 file - promoters60/4770280
tttgatt

SEQ ID NO: 139536 - DNA, 7 bp, Unknown
  misc_feature (1)..( 7): Result.003 file - promoters60/4770280
ttagatc

SEQ ID NO: 139537 - DNA, 7 bp, Unknown
  misc_feature (1)..( 7): Result.003 file - promoters60/4770280
ttatatc

SEQ ID NO: 139538 - DNA, 6 bp, Unknown
  misc_feature (1)..( 6): Result.003 file - promoters60/4770280
catttg

SEQ ID NO: 139539 - DNA, 6 bp, Unknown
  misc_feature (1)..( 6): Result.003 file - promoters60/4770280
catttg

SEQ ID NO: 139540 - DNA, 6 bp, Unknown
  misc_feature (1)..( 6): Result.003 file - promoters60/4770288
aaaaaa

SEQ ID NO: 139541 - DNA, 6 bp, Unknown
  misc_feature (1)..( 6): Result.003 file - promoters60/4770288
aaaaaa

SEQ ID NO: 139542 - DNA, 6 bp, Unknown
  misc_feature (1)..( 6): Result.003 file - promoters60/4770288
aaaaac

SEQ ID NO: 139543 - DNA, 16 bp, Unknown
  misc_feature (1)..( 16): Result.003 file - promoters60/4770288
taaaatcaaataaatg

SEQ ID NO: 139544 - DNA, 16 bp, Unknown
  misc_feature (1)..( 16): Result.003 file - promoters60/4770288
taaaagcaaataaata

SEQ ID NO: 139545 - DNA, 16 bp, Unknown
  misc_feature (1)..( 16): Result.003 file - promoters60/4770288
tgcggatgaatatatg

SEQ ID NO: 139546 - DNA, 8 bp, Unknown
  misc_feature (1)..( 8): Result.003 file - promoters60/4770288
ttttcatt

SEQ ID NO: 139547 - DNA, 8 bp, Unknown
  misc_feature (1)..( 8): Result.003 file - promoters60/4770288
aattcatt

SEQ ID NO: 139548 - DNA, 8 bp, Unknown
  misc_feature (1)..( 8): Result.003 file - promoters60/4770288
tttttatt

SEQ ID NO: 139549 - DNA, 9 bp, Unknown
  misc_feature (1)..( 9): Result.003 file - promoters60/4770288
cgttatcaa

SEQ ID NO: 139550 - DNA, 9 bp, Unknown
  misc_feature (1)..( 9): Result.003 file - promoters60/4770288
tgttatctc

SEQ ID NO: 139551 - DNA, 9 bp, Unknown
  misc_feature (1)..( 9): Result.003 file - promoters60/4770288
tgttctctc

SEQ ID NO: 139552 - DNA, 9 bp, Unknown
  misc_feature (1)..( 9): Result.003 file - promoters60/4770288
taatctcac

SEQ ID NO: 139553 - DNA, 9 bp, Unknown
  misc_feature (1)..( 9): Result.003 file - promoters60/4770288
ttatctcat

SEQ ID NO: 139554 - DNA, 9 bp, Unknown
  misc_feature (1)..( 9): Result.003 file - promoters60/4770288
tgttctctc

SEQ ID NO: 139555 - DNA, 13 bp, Unknown
  misc_feature (1)..( 13): Result.003 file - promoters60/4770288
agtgcttaaaaaa

SEQ ID NO: 139556 - DNA, 13 bp, Unknown
  misc_feature (1)..( 13): Result.003 file - promoters60/4770288
agttcttggattc

SEQ ID NO: 139557 - DNA, 13 bp, Unknown
  misc_feature (1)..( 13): Result.003 file - promoters60/4770288
tcttcttcgattc

SEQ ID NO: 139558 - DNA, 10 bp, Unknown
  misc_feature (1)..( 10): Result.003 file - promoters60/4770305
ttttgaattc

SEQ ID NO: 139559 - DNA, 10 bp, Unknown
  misc_feature (1)..( 10): Result.003 file - promoters60/4770305
atttgaatag

SEQ ID NO: 139560 - DNA, 10 bp, Unknown
  misc_feature (1)..( 10): Result.003 file - promoters60/4770305
ttttgacaat

SEQ ID NO: 139561 - DNA, 10 bp, Unknown
  misc_feature (1)..( 10): Result.003 file - promoters60/4770305
ttttgtattc

SEQ ID NO: 139562 - DNA, 14 bp, Unknown
  misc_feature (1)..( 14): Result.003 file - promoters60/4770305
aaccaaatctaaat

SEQ ID NO: 139563 - DNA, 14 bp, Unknown
  misc_feature (1)..( 14): Result.003 file - promoters60/4770305
tcttcaatttaact

SEQ ID NO: 139564 - DNA, 14 bp, Unknown
  misc_feature (1)..( 14): Result.003 file - promoters60/4770305
tcttaaattttcca

SEQ ID NO: 139565 - DNA, 14 bp, Unknown
  misc_feature (1)..( 14): Result.003 file - promoters60/4770305
aagtaactttttta

SEQ ID NO: 139566 - DNA, 9 bp, Unknown
  misc_feature (1)..( 9): Result.003 file - promoters60/4770305
aacccaaaa

SEQ ID NO: 139567 - DNA, 9 bp, Unknown
  misc_feature (1)..( 9): Result.003 file - promoters60/4770305
agcccaaat

SEQ ID NO: 139568 - DNA, 9 bp, Unknown
  misc_feature (1)..( 9): Result.003 file - promoters60/4770305
agcccaatg

SEQ ID NO: 139569 - DNA, 9 bp, Unknown
  misc_feature (1)..( 9): Result.003 file - promoters60/4770305
ggcctaatg

SEQ ID NO: 139570 - DNA, 12 bp, Unknown
  misc_feature (1)..( 12): Result.003 file - promoters60/4770305
attcttataaca

SEQ ID NO: 139571 - DNA, 12 bp, Unknown
  misc_feature (1)..( 12): Result.003 file - promoters60/4770305
attcttcaggtg

SEQ ID NO: 139572 - DNA, 12 bp, Unknown
  misc_feature (1)..( 12): Result.003 file - promoters60/4770305
tttcttaaattt

SEQ ID NO: 139573 - DNA, 12 bp, Unknown
  misc_feature (1)..( 12): Result.003 file - promoters60/4770305
tatcttcaattt

SEQ ID NO: 139574 - DNA, 12 bp, Unknown
  misc_feature (1)..( 12): Result.003 file - promoters60/4770305
cttttttacata

SEQ ID NO: 139575 - DNA, 9 bp, Unknown
  misc_feature (1)..( 9): Result.003 file - promoters60/4770305
gtaattttc

SEQ ID NO: 139576 - DNA, 9 bp, Unknown
  misc_feature (1)..( 9): Result.003 file - promoters60/4770305
ccaatcttc

SEQ ID NO: 139577 - DNA, 9 bp, Unknown
  misc_feature (1)..( 9): Result.003 file - promoters60/4770305
catattttc

SEQ ID NO: 139578 - DNA, 9 bp, Unknown
  misc_feature (1)..( 9): Result.003 file - promoters60/4770305
atagtttag

SEQ ID NO: 139579 - DNA, 11 bp, Unknown
  misc_feature (1)..( 11): Result.003 file - promoters60/4770305
atctaaattct

SEQ ID NO: 139580 - DNA, 11 bp, Unknown
  misc_feature (1)..( 11): Result.003 file - promoters60/4770305
tcttaaatttt

SEQ ID NO: 139581 - DNA, 11 bp, Unknown
  misc_feature (1)..( 11): Result.003 file - promoters60/4770305
tcttcaattta

SEQ ID NO: 139582 - DNA, 11 bp, Unknown
  misc_feature (1)..( 11): Result.003 file - promoters60/4770305
aagtaactttt

SEQ ID NO: 139583 - DNA, 8 bp, Unknown
  misc_feature (1)..( 8): Result.003 file - promoters60/4770305
aaacaata

SEQ ID NO: 139584 - DNA, 8 bp, Unknown
  misc_feature (1)..( 8): Result.003 file - promoters60/4770305
gaactata

SEQ ID NO: 139585 - DNA, 8 bp, Unknown
  misc_feature (1)..( 8): Result.003 file - promoters60/4770305
caactatc

SEQ ID NO: 139586 - DNA, 9 bp, Unknown
  misc_feature (1)..( 9): Result.003 file - promoters60/4770305
aaagcacta

SEQ ID NO: 139587 - DNA, 7 bp, Unknown
  misc_feature (1)..( 7): Result.003 file - promoters60/4770317
gaagaaa

SEQ ID NO: 139588 - DNA, 7 bp, Unknown
  misc_feature (1)..( 7): Result.003 file - promoters60/4770317
gaacaaa

SEQ ID NO: 139589 - DNA, 6 bp, Unknown
  misc_feature (1)..( 6): Result.003 file - promoters60/4770317
aagaag

SEQ ID NO: 139590 - DNA, 6 bp, Unknown
  misc_feature (1)..( 6): Result.003 file - promoters60/4770317
aagaag

SEQ ID NO: 139591 - DNA, 6 bp, Unknown
  misc_feature (1)..( 6): Result.003 file - promoters60/4770317
gggaat

SEQ ID NO: 139592 - DNA, 6 bp, Unknown
  misc_feature (1)..( 6): Result.003 file - promoters60/4770317
gggaat

SEQ ID NO: 139593 - DNA, 8 bp, Unknown
  misc_feature (1)..( 8): Result.003 file - promoters60/4770317
agctccga

SEQ ID NO: 139594 - DNA, 8 bp, Unknown
  misc_feature (1)..( 8): Result.003 file - promoters60/4770317
agctccga

SEQ ID NO: 139595 - DNA, 6 bp, Unknown
  misc_feature (1)..( 6): Result.003 file - promoters60/4770317
tttcca

SEQ ID NO: 139596 - DNA, 6 bp, Unknown
  misc_feature (1)..( 6): Result.003 file - promoters60/4770317
tttcca

SEQ ID NO: 139597 - DNA, 6 bp, Unknown
  misc_feature (1)..( 6): Result.003 file - promoters60/4770317
cgaatg

SEQ ID NO: 139598 - DNA, 6 bp, Unknown
  misc_feature (1)..( 6): Result.003 file - promoters60/4770317
cgaatg

SEQ ID NO: 139599 - DNA, 6 bp, Unknown
  misc_feature (1)..( 6): Result.003 file - promoters60/4770317
gaagaa

SEQ ID NO: 139600 - DNA, 6 bp, Unknown
  misc_feature (1)..( 6): Result.003 file - promoters60/4770317
gaagaa

SEQ ID NO: 139601 - DNA, 6 bp, Unknown
  misc_feature (1)..( 6): Result.003 file - promoters60/4770317
ttccga

SEQ ID NO: 139602 - DNA, 6 bp, Unknown
  misc_feature (1)..( 6): Result.003 file - promoters60/4770317
ttccga

SEQ ID NO: 139603 - DNA, 6 bp, Unknown
  misc_feature (1)..( 6): Result.003 file - promoters60/4770317
accttt

SEQ ID NO: 139604 - DNA, 6 bp, Unknown
  misc_feature (1)..( 6): Result.003 file - promoters60/4770317
accttt

SEQ ID NO: 139605 - DNA, 8 bp, Unknown
  misc_feature (1)..( 8): Result.003 file - promoters60/4770317
tttctctc

SEQ ID NO: 139606 - DNA, 8 bp, Unknown
  misc_feature (1)..( 8): Result.003 file - promoters60/4770317
tttctctc

SEQ ID NO: 139607 - DNA, 6 bp, Unknown
  misc_feature (1)..( 6): Result.003 file - promoters60/4770317
tcaaaa

SEQ ID NO: 139608 - DNA, 6 bp, Unknown
  misc_feature (1)..( 6): Result.003 file - promoters60/4770317
tcaaaa

SEQ ID NO: 139609 - DNA, 7 bp, Unknown
  misc_feature (1)..( 7): Result.003 file - promoters60/4770317
aaaagaa

SEQ ID NO: 139610 - DNA, 7 bp, Unknown
  misc_feature (1)..( 7): Result.003 file - promoters60/4770317
aaacgaa

SEQ ID NO: 139611 - DNA, 8 bp, Unknown
  misc_feature (1)..( 8): Result.003 file - promoters60/4770317
caaaaaaa

SEQ ID NO: 139612 - DNA, 8 bp, Unknown
  misc_feature (1)..( 8): Result.003 file - promoters60/4770317
caataaaa

SEQ ID NO: 139613 - DNA, 7 bp, Unknown
  misc_feature (1)..( 7): Result.003 file - promoters60/4770330
gatacac

SEQ ID NO: 139614 - DNA, 7 bp, Unknown
  misc_feature (1)..( 7): Result.003 file - promoters60/4770330
gatgcac

SEQ ID NO: 139615 - DNA, 6 bp, Unknown
  misc_feature (1)..( 6): Result.003 file - promoters60/4770330
aagaag

SEQ ID NO: 139616 - DNA, 6 bp, Unknown
  misc_feature (1)..( 6): Result.003 file - promoters60/4770330
aagaag

SEQ ID NO: 139617 - DNA, 6 bp, Unknown
  misc_feature (1)..( 6): Result.003 file - promoters60/4770330
tagtgt

SEQ ID NO: 139618 - DNA, 6 bp, Unknown
  misc_feature (1)..( 6): Result.003 file - promoters60/4770330
tagtgt

SEQ ID NO: 139619 - DNA, 8 bp, Unknown
  misc_feature (1)..( 8): Result.003 file - promoters60/4770330
aacaactt

SEQ ID NO: 139620 - DNA, 8 bp, Unknown
  misc_feature (1)..( 8): Result.003 file - promoters60/4770330
aacatctt

SEQ ID NO: 139621 - DNA, 7 bp, Unknown
  misc_feature (1)..( 7): Result.003 file - promoters60/4770330
tttaact

SEQ ID NO: 139622 - DNA, 7 bp, Unknown
  misc_feature (1)..( 7): Result.003 file - promoters60/4770330
tttcact

SEQ ID NO: 139623 - DNA, 6 bp, Unknown
  misc_feature (1)..( 6): Result.003 file - promoters60/4770330
gattaa

SEQ ID NO: 139624 - DNA, 6 bp, Unknown
  misc_feature (1)..( 6): Result.003 file - promoters60/4770330
gattaa

SEQ ID NO: 139625 - DNA, 6 bp, Unknown
  misc_feature (1)..( 6): Result.003 file - promoters60/4770330
tttgat

SEQ ID NO: 139626 - DNA, 6 bp, Unknown
  misc_feature (1)..( 6): Result.003 file - promoters60/4770330
tttgat

SEQ ID NO: 139627 - DNA, 8 bp, Unknown
  misc_feature (1)..( 8): Result.003 file - promoters60/4770330
cttcatat

SEQ ID NO: 139628 - DNA, 8 bp, Unknown
  misc_feature (1)..( 8): Result.003 file - promoters60/4770330
cttcttat

SEQ ID NO: 139629 - DNA, 8 bp, Unknown
  misc_feature (1)..( 8): Result.003 file - promoters60/4770330
atttttca

SEQ ID NO: 139630 - DNA, 8 bp, Unknown
  misc_feature (1)..( 8): Result.003 file - promoters60/4770330
attgttca

SEQ ID NO: 139631 - DNA, 8 bp, Unknown
  misc_feature (1)..( 8): Result.003 file - promoters60/4770330
tttgacaa

SEQ ID NO: 139632 - DNA, 8 bp, Unknown
  misc_feature (1)..( 8): Result.003 file - promoters60/4770330
tttaacaa

SEQ ID NO: 139633 - DNA, 8 bp, Unknown
  misc_feature (1)..( 8): Result.003 file - promoters60/4770330
tgttatta

SEQ ID NO: 139634 - DNA, 8 bp, Unknown
  misc_feature (1)..( 8): Result.003 file - promoters60/4770330
tgttatta

SEQ ID NO: 139635 - DNA, 6 bp, Unknown
  misc_feature (1)..( 6): Result.003 file - promoters60/4770330
attttt

SEQ ID NO: 139636 - DNA, 6 bp, Unknown
  misc_feature (1)..( 6): Result.003 file - promoters60/4770330
attttt

SEQ ID NO: 139637 - DNA, 7 bp, Unknown
  misc_feature (1)..( 7): Result.003 file - promoters60/4770365
tatatat

SEQ ID NO: 139638 - DNA, 7 bp, Unknown
  misc_feature (1)..( 7): Result.003 file - promoters60/4770365
tatatag

SEQ ID NO: 139639 - DNA, 7 bp, Unknown
  misc_feature (1)..( 7): Result.003 file - promoters60/4770365
gatatag

SEQ ID NO: 139640 - DNA, 7 bp, Unknown
  misc_feature (1)..( 7): Result.003 file - promoters60/4770365
tagttaa

SEQ ID NO: 139641 - DNA, 7 bp, Unknown
  misc_feature (1)..( 7): Result.003 file - promoters60/4770365
aagttaa

SEQ ID NO: 139642 - DNA, 7 bp, Unknown
  misc_feature (1)..( 7): Result.003 file - promoters60/4770365
aagttat

SEQ ID NO: 139643 - DNA, 8 bp, Unknown
  misc_feature (1)..( 8): Result.003 file - promoters60/4770365
ttaaaaaa

SEQ ID NO: 139644 - DNA, 8 bp, Unknown
  misc_feature (1)..( 8): Result.003 file - promoters60/4770365
ataaaaaa

SEQ ID NO: 139645 - DNA, 8 bp, Unknown
  misc_feature (1)..( 8): Result.003 file - promoters60/4770365
ttaaaatg

SEQ ID NO: 139646 - DNA, 8 bp, Unknown
  misc_feature (1)..( 8): Result.003 file - promoters60/4770365
aaacaatc

SEQ ID NO: 139647 - DNA, 8 bp, Unknown
  misc_feature (1)..( 8): Result.003 file - promoters60/4770365
aaaaaatg

SEQ ID NO: 139648 - DNA, 8 bp, Unknown
  misc_feature (1)..( 8): Result.003 file - promoters60/4770365
cgaaaatg

SEQ ID NO: 139649 - DNA, 9 bp, Unknown
  misc_feature (1)..( 9): Result.003 file - promoters60/4770365
gattattat

SEQ ID NO: 139650 - DNA, 9 bp, Unknown
  misc_feature (1)..( 9): Result.003 file - promoters60/4770365
cggtattat

SEQ ID NO: 139651 - DNA, 9 bp, Unknown
  misc_feature (1)..( 9): Result.003 file - promoters60/4770365
gattactat

SEQ ID NO: 139652 - DNA, 7 bp, Unknown
  misc_feature (1)..( 7): Result.003 file - promoters60/4770365
aattatt

SEQ ID NO: 139653 - DNA, 7 bp, Unknown
  misc_feature (1)..( 7): Result.003 file - promoters60/4770365
tattatt

SEQ ID NO: 139654 - DNA, 7 bp, Unknown
  misc_feature (1)..( 7): Result.003 file - promoters60/4770365
tataatt

SEQ ID NO: 139655 - DNA, 8 bp, Unknown
  misc_feature (1)..( 8): Result.003 file - promoters60/4770365
taagatta

SEQ ID NO: 139656 - DNA, 8 bp, Unknown
  misc_feature (1)..( 8): Result.003 file - promoters60/4770365
caagatta

SEQ ID NO: 139657 - DNA, 8 bp, Unknown
  misc_feature (1)..( 8): Result.003 file - promoters60/4770365
caatattt

SEQ ID NO: 139658 - DNA, 8 bp, Unknown
  misc_feature (1)..( 8): Result.003 file - promoters60/4770365
ttttattt

SEQ ID NO: 139659 - DNA, 8 bp, Unknown
  misc_feature (1)..( 8): Result.003 file - promoters60/4770365
ttttgttt

SEQ ID NO: 139660 - DNA, 8 bp, Unknown
  misc_feature (1)..( 8): Result.003 file - promoters60/4770365
ttttattt

SEQ ID NO: 139661 - DNA, 7 bp, Unknown
  misc_feature (1)..( 7): Result.003 file - promoters60/4770365
aaaaaat

SEQ ID NO: 139662 - DNA, 7 bp, Unknown
  misc_feature (1)..( 7): Result.003 file - promoters60/4770365
aaacaat

SEQ ID NO: 139663 - DNA, 7 bp, Unknown
  misc_feature (1)..( 7): Result.003 file - promoters60/4770365
aaaaaag

SEQ ID NO: 139664 - DNA, 11 bp, Unknown
  misc_feature (1)..( 11): Result.003 file - promoters60/4770379
ttttcttataa

SEQ ID NO: 139665 - DNA, 11 bp, Unknown
  misc_feature (1)..( 11): Result.003 file - promoters60/4770379
cattcttattt

SEQ ID NO: 139666 - DNA, 11 bp, Unknown
  misc_feature (1)..( 11): Result.003 file - promoters60/4770379
catgctttcaa

SEQ ID NO: 139667 - DNA, 11 bp, Unknown
  misc_feature (1)..( 11): Result.003 file - promoters60/4770379
acaacttattt

SEQ ID NO: 139668 - DNA, 11 bp, Unknown
  misc_feature (1)..( 11): Result.003 file - promoters60/4770379
cgtttttattt

SEQ ID NO: 139669 - DNA, 11 bp, Unknown
  misc_feature (1)..( 11): Result.003 file - promoters60/4770379
taacttacaaa

SEQ ID NO: 139670 - DNA, 11 bp, Unknown
  misc_feature (1)..( 11): Result.003 file - promoters60/4770379
atacttactta

SEQ ID NO: 139671 - DNA, 11 bp, Unknown
  misc_feature (1)..( 11): Result.003 file - promoters60/4770379
ggccttccaaa

SEQ ID NO: 139672 - DNA, 11 bp, Unknown
  misc_feature (1)..( 11): Result.003 file - promoters60/4770379
atacgtacgta

SEQ ID NO: 139673 - DNA, 13 bp, Unknown
  misc_feature (1)..( 13): Result.003 file - promoters60/4770379
tacaatataaaca

SEQ ID NO: 139674 - DNA, 13 bp, Unknown
  misc_feature (1)..( 13): Result.003 file - promoters60/4770379
tcacatattaaca

SEQ ID NO: 139675 - DNA, 13 bp, Unknown
  misc_feature (1)..( 13): Result.003 file - promoters60/4770379
tcatatatataca

SEQ ID NO: 139676 - DNA, 13 bp, Unknown
  misc_feature (1)..( 13): Result.003 file - promoters60/4770379
gtatatataaaga

SEQ ID NO: 139677 - DNA, 13 bp, Unknown
  misc_feature (1)..( 13): Result.003 file - promoters60/4770379
actcatatatatc

SEQ ID NO: 139678 - DNA, 12 bp, Unknown
  misc_feature (1)..( 12): Result.003 file - promoters60/4770379
acttttctttct

SEQ ID NO: 139679 - DNA, 12 bp, Unknown
  misc_feature (1)..( 12): Result.003 file - promoters60/4770379
aattttttttct

SEQ ID NO: 139680 - DNA, 12 bp, Unknown
  misc_feature (1)..( 12): Result.003 file - promoters60/4770379
actttttttaca

SEQ ID NO: 139681 - DNA, 12 bp, Unknown
  misc_feature (1)..( 12): Result.003 file - promoters60/4770379
aatttttagtca

SEQ ID NO: 139682 - DNA, 14 bp, Unknown
  misc_feature (1)..( 14): Result.003 file - promoters60/4770379
tcagatatacattg

SEQ ID NO: 139683 - DNA, 14 bp, Unknown
  misc_feature (1)..( 14): Result.003 file - promoters60/4770379
ttttctataaatta

SEQ ID NO: 139684 - DNA, 14 bp, Unknown
  misc_feature (1)..( 14): Result.003 file - promoters60/4770379
ttttttatagatta

SEQ ID NO: 139685 - DNA, 14 bp, Unknown
  misc_feature (1)..( 14): Result.003 file - promoters60/4770379
agagctaaaaacgg

SEQ ID NO: 139686 - DNA, 7 bp, Unknown
  misc_feature (1)..( 7): Result.003 file - promoters60/4770379
tacgaaa

SEQ ID NO: 139687 - DNA, 7 bp, Unknown
  misc_feature (1)..( 7): Result.003 file - promoters60/4770379
tactaaa

SEQ ID NO: 139688 - DNA, 7 bp, Unknown
  misc_feature (1)..( 7): Result.003 file - promoters60/4770379
aactaaa

SEQ ID NO: 139689 - DNA, 7 bp, Unknown
  misc_feature (1)..( 7): Result.003 file - promoters60/4770379
aactaaa

SEQ ID NO: 139690 - DNA, 14 bp, Unknown
  misc_feature (1)..( 14): Result.003 file - promoters60/4770379
ttttttatagatta

SEQ ID NO: 139691 - DNA, 14 bp, Unknown
  misc_feature (1)..( 14): Result.003 file - promoters60/4770379
ctttatatagagac

SEQ ID NO: 139692 - DNA, 14 bp, Unknown
  misc_feature (1)..( 14): Result.003 file - promoters60/4770379
ttttctataaatta

SEQ ID NO: 139693 - DNA, 14 bp, Unknown
  misc_feature (1)..( 14): Result.003 file - promoters60/4770379
agagctaaaaacgg

SEQ ID NO: 139694 - DNA, 9 bp, Unknown
  misc_feature (1)..( 9): Result.003 file - promoters60/4770379
aactaaacc

SEQ ID NO: 139695 - DNA, 9 bp, Unknown
  misc_feature (1)..( 9): Result.003 file - promoters60/4770379
aactaaacc

SEQ ID NO: 139696 - DNA, 9 bp, Unknown
  misc_feature (1)..( 9): Result.003 file - promoters60/4770379
aactaatca

SEQ ID NO: 139697 - DNA, 9 bp, Unknown
  misc_feature (1)..( 9): Result.003 file - promoters60/4770379
tactaaaga

SEQ ID NO: 139698 - DNA, 13 bp, Unknown
  misc_feature (1)..( 13): Result.003 file - promoters60/4770390
agttataaatcgt

SEQ ID NO: 139699 - DNA, 13 bp, Unknown
  misc_feature (1)..( 13): Result.003 file - promoters60/4770390
agttatgaatccg

SEQ ID NO: 139700 - DNA, 13 bp, Unknown
  misc_feature (1)..( 13): Result.003 file - promoters60/4770390
aacccgaaaccgt

SEQ ID NO: 139701 - DNA, 13 bp, Unknown
  misc_feature (1)..( 13): Result.003 file - promoters60/4770390
ccttataattttt

SEQ ID NO: 139702 - DNA, 13 bp, Unknown
  misc_feature (1)..( 13): Result.003 file - promoters60/4770390
gtaactaaaatta

SEQ ID NO: 139703 - DNA, 13 bp, Unknown
  misc_feature (1)..( 13): Result.003 file - promoters60/4770390
ctttatgattctt

SEQ ID NO: 139704 - DNA, 13 bp, Unknown
  misc_feature (1)..( 13): Result.003 file - promoters60/4770390
ccttatacttcag

SEQ ID NO: 139705 - DNA, 16 bp, Unknown
  misc_feature (1)..( 16): Result.003 file - promoters60/4770390
ttttgagaaaagtaag

SEQ ID NO: 139706 - DNA, 16 bp, Unknown
  misc_feature (1)..( 16): Result.003 file - promoters60/4770390
gtttgagaataaaaat

SEQ ID NO: 139707 - DNA, 16 bp, Unknown
  misc_feature (1)..( 16): Result.003 file - promoters60/4770390
ttttgatatgattctt

SEQ ID NO: 139708 - DNA, 16 bp, Unknown
  misc_feature (1)..( 16): Result.003 file - promoters60/4770390
atatgaaaaaatagtt

SEQ ID NO: 139709 - DNA, 16 bp, Unknown
  misc_feature (1)..( 16): Result.003 file - promoters60/4770390
attttatatatgtctt

SEQ ID NO: 139710 - DNA, 16 bp, Unknown
  misc_feature (1)..( 16): Result.003 file - promoters60/4770390
ggattaaatataactt

SEQ ID NO: 139711 - DNA, 16 bp, Unknown
  misc_feature (1)..( 16): Result.003 file - promoters60/4770390
tcataaaatacaactt

SEQ ID NO: 139712 - DNA, 10 bp, Unknown
  misc_feature (1)..( 10): Result.003 file - promoters60/4770390
tatataaaag

SEQ ID NO: 139713 - DNA, 10 bp, Unknown
  misc_feature (1)..( 10): Result.003 file - promoters60/4770390
aataaaaagc

SEQ ID NO: 139714 - DNA, 10 bp, Unknown
  misc_feature (1)..( 10): Result.003 file - promoters60/4770390
aatataaagg

SEQ ID NO: 139715 - DNA, 10 bp, Unknown
  misc_feature (1)..( 10): Result.003 file - promoters60/4770390
tataaaagct

SEQ ID NO: 139716 - DNA, 10 bp, Unknown
  misc_feature (1)..( 10): Result.003 file - promoters60/4770390
attaaagggt

SEQ ID NO: 139717 - DNA, 11 bp, Unknown
  misc_feature (1)..( 11): Result.003 file - promoters60/4770390
actattaaagc

SEQ ID NO: 139718 - DNA, 9 bp, Unknown
  misc_feature (1)..( 9): Result.003 file - promoters60/4770406
taataaaca

SEQ ID NO: 139719 - DNA, 9 bp, Unknown
  misc_feature (1)..( 9): Result.003 file - promoters60/4770406
taacaaaca

SEQ ID NO: 139720 - DNA, 9 bp, Unknown
  misc_feature (1)..( 9): Result.003 file - promoters60/4770406
taataagta

SEQ ID NO: 139721 - DNA, 8 bp, Unknown
  misc_feature (1)..( 8): Result.003 file - promoters60/4770406
aacacaaa

SEQ ID NO: 139722 - DNA, 8 bp, Unknown
  misc_feature (1)..( 8): Result.003 file - promoters60/4770406
aacataaa

SEQ ID NO: 139723 - DNA, 8 bp, Unknown
  misc_feature (1)..( 8): Result.003 file - promoters60/4770406
aacataga

SEQ ID NO: 139724 - DNA, 6 bp, Unknown
  misc_feature (1)..( 6): Result.003 file - promoters60/4770406
tgtttt

SEQ ID NO: 139725 - DNA, 6 bp, Unknown
  misc_feature (1)..( 6): Result.003 file - promoters60/4770406
tgtttt

SEQ ID NO: 139726 - DNA, 6 bp, Unknown
  misc_feature (1)..( 6): Result.003 file - promoters60/4770406
tgtttt

SEQ ID NO: 139727 - DNA, 6 bp, Unknown
  misc_feature (1)..( 6): Result.003 file - promoters60/4770414
gtttaa

SEQ ID NO: 139728 - DNA, 6 bp, Unknown
  misc_feature (1)..( 6): Result.003 file - promoters60/4770414
gtttaa

SEQ ID NO: 139729 - DNA, 8 bp, Unknown
  misc_feature (1)..( 8): Result.003 file - promoters60/4770414
atagttga

SEQ ID NO: 139730 - DNA, 8 bp, Unknown
  misc_feature (1)..( 8): Result.003 file - promoters60/4770414
atatttga

SEQ ID NO: 139731 - DNA, 7 bp, Unknown
  misc_feature (1)..( 7): Result.003 file - promoters60/4770414
attgttg

SEQ ID NO: 139732 - DNA, 7 bp, Unknown
  misc_feature (1)..( 7): Result.003 file - promoters60/4770414
attcttg

SEQ ID NO: 139733 - DNA, 8 bp, Unknown
  misc_feature (1)..( 8): Result.003 file - promoters60/4770414
aaaattta

SEQ ID NO: 139734 - DNA, 8 bp, Unknown
  misc_feature (1)..( 8): Result.003 file - promoters60/4770414
aaatttta

SEQ ID NO: 139735 - DNA, 12 bp, Unknown
  misc_feature (1)..( 12): Result.003 file - promoters60/4770414
aatttataacca

SEQ ID NO: 139736 - DNA, 12 bp, Unknown
  misc_feature (1)..( 12): Result.003 file - promoters60/4770414
aatttatgacca

SEQ ID NO: 139737 - DNA, 7 bp, Unknown
  misc_feature (1)..( 7): Result.003 file - promoters60/4770414
ttattaa

SEQ ID NO: 139738 - DNA, 7 bp, Unknown
  misc_feature (1)..( 7): Result.003 file - promoters60/4770414
ttagtaa

SEQ ID NO: 139739 - DNA, 6 bp, Unknown
  misc_feature (1)..( 6): Result.003 file - promoters60/4770414
attttt

SEQ ID NO: 139740 - DNA, 6 bp, Unknown
  misc_feature (1)..( 6): Result.003 file - promoters60/4770414
attttt

SEQ ID NO: 139741 - DNA, 8 bp, Unknown
  misc_feature (1)..( 8): Result.003 file - promoters60/4770414
caataaaa

SEQ ID NO: 139742 - DNA, 8 bp, Unknown
  misc_feature (1)..( 8): Result.003 file - promoters60/4770414
ctataaaa

SEQ ID NO: 139743 - DNA, 8 bp, Unknown
  misc_feature (1)..( 8): Result.003 file - promoters60/4770414
atataaac

SEQ ID NO: 139744 - DNA, 11 bp, Unknown
  misc_feature (1)..( 11): Result.003 file - promoters60/4770414
tcaacacaaaa

SEQ ID NO: 139745 - DNA, 11 bp, Unknown
  misc_feature (1)..( 11): Result.003 file - promoters60/4770414
tcaaaacaaaa

SEQ ID NO: 139746 - DNA, 11 bp, Unknown
  misc_feature (1)..( 11): Result.003 file - promoters60/4770414
gcaacaaattt

SEQ ID NO: 139747 - DNA, 6 bp, Unknown
  misc_feature (1)..( 6): Result.003 file - promoters60/4770414
tagttt

SEQ ID NO: 139748 - DNA, 6 bp, Unknown
  misc_feature (1)..( 6): Result.003 file - promoters60/4770414
tagttt

SEQ ID NO: 139749 - DNA, 6 bp, Unknown
  misc_feature (1)..( 6): Result.003 file - promoters60/4770414
tgacta

SEQ ID NO: 139750 - DNA, 6 bp, Unknown
  misc_feature (1)..( 6): Result.003 file - promoters60/4770414
tgacta

SEQ ID NO: 139751 - DNA, 8 bp, Unknown
  misc_feature (1)..( 8): Result.003 file - promoters60/4770414
ctttttac

SEQ ID NO: 139752 - DNA, 8 bp, Unknown
  misc_feature (1)..( 8): Result.003 file - promoters60/4770414
cttgttac

SEQ ID NO: 139753 - DNA, 7 bp, Unknown
  misc_feature (1)..( 7): Result.003 file - promoters60/4770414
aaagtaa

SEQ ID NO: 139754 - DNA, 7 bp, Unknown
  misc_feature (1)..( 7): Result.003 file - promoters60/4770414
aaattaa

SEQ ID NO: 139755 - DNA, 9 bp, Unknown
  misc_feature (1)..( 9): Result.003 file - promoters60/4770414
gtaacttaa

SEQ ID NO: 139756 - DNA, 9 bp, Unknown
  misc_feature (1)..( 9): Result.003 file - promoters60/4770414
gtaacataa

SEQ ID NO: 139757 - DNA, 8 bp, Unknown
  misc_feature (1)..( 8): Result.003 file - promoters60/4770428
ttttgtgc

SEQ ID NO: 139758 - DNA, 8 bp, Unknown
  misc_feature (1)..( 8): Result.003 file - promoters60/4770428
ttttgtaa

SEQ ID NO: 139759 - DNA, 8 bp, Unknown
  misc_feature (1)..( 8): Result.003 file - promoters60/4770428
ttttgtgt

SEQ ID NO: 139760 - DNA, 8 bp, Unknown
  misc_feature (1)..( 8): Result.003 file - promoters60/4770428
ttttgttt

SEQ ID NO: 139761 - DNA, 8 bp, Unknown
  misc_feature (1)..( 8): Result.003 file - promoters60/4770428
ttttgtaa

SEQ ID NO: 139762 - DNA, 8 bp, Unknown
  misc_feature (1)..( 8): Result.003 file - promoters60/4770428
tcttgtgt

SEQ ID NO: 139763 - DNA, 9 bp, Unknown
  misc_feature (1)..( 9): Result.003 file - promoters60/4770428
aatgggccg

SEQ ID NO: 139764 - DNA, 9 bp, Unknown
  misc_feature (1)..( 9): Result.003 file - promoters60/4770428
tatgggcct

SEQ ID NO: 139765 - DNA, 9 bp, Unknown
  misc_feature (1)..( 9): Result.003 file - promoters60/4770428
aatgggtct

SEQ ID NO: 139766 - DNA, 9 bp, Unknown
  misc_feature (1)..( 9): Result.003 file - promoters60/4770428
tgtgggcca

SEQ ID NO: 139767 - DNA, 9 bp, Unknown
  misc_feature (1)..( 9): Result.003 file - promoters60/4770428
aatgggctg

SEQ ID NO: 139768 - DNA, 9 bp, Unknown
  misc_feature (1)..( 9): Result.003 file - promoters60/4770428
tatggccca

SEQ ID NO: 139769 - DNA, 12 bp, Unknown
  misc_feature (1)..( 12): Result.003 file - promoters60/4770463
ttttttatatcg

SEQ ID NO: 139770 - DNA, 12 bp, Unknown
  misc_feature (1)..( 12): Result.003 file - promoters60/4770463
aattttgtattt

SEQ ID NO: 139771 - DNA, 12 bp, Unknown
  misc_feature (1)..( 12): Result.003 file - promoters60/4770463
tattttgcattt

SEQ ID NO: 139772 - DNA, 12 bp, Unknown
  misc_feature (1)..( 12): Result.003 file - promoters60/4770463
tcttttgtagtc

SEQ ID NO: 139773 - DNA, 12 bp, Unknown
  misc_feature (1)..( 12): Result.003 file - promoters60/4770463
tatgttgcatat

SEQ ID NO: 139774 - DNA, 17 bp, Unknown
  misc_feature (1)..( 17): Result.003 file - promoters60/4770463
ttcatttttaaaaacaa

SEQ ID NO: 139775 - DNA, 17 bp, Unknown
  misc_feature (1)..( 17): Result.003 file - promoters60/4770463
tttattaatcaaaccaa

SEQ ID NO: 139776 - DNA, 17 bp, Unknown
  misc_feature (1)..( 17): Result.003 file - promoters60/4770463
aaagtttataaaatcaa

SEQ ID NO: 139777 - DNA, 17 bp, Unknown
  misc_feature (1)..( 17): Result.003 file - promoters60/4770463
tctagatctaaaaacca

SEQ ID NO: 139778 - DNA, 17 bp, Unknown
  misc_feature (1)..( 17): Result.003 file - promoters60/4770463
ttcacttttaaaaacga

SEQ ID NO: 139779 - DNA, 7 bp, Unknown
  misc_feature (1)..( 7): Result.003 file - promoters60/4770463
caacaaa

SEQ ID NO: 139780 - DNA, 7 bp, Unknown
  misc_feature (1)..( 7): Result.003 file - promoters60/4770463
caacaag

SEQ ID NO: 139781 - DNA, 7 bp, Unknown
  misc_feature (1)..( 7): Result.003 file - promoters60/4770463
gaacaaa

SEQ ID NO: 139782 - DNA, 7 bp, Unknown
  misc_feature (1)..( 7): Result.003 file - promoters60/4770463
aaacaaa

SEQ ID NO: 139783 - DNA, 7 bp, Unknown
  misc_feature (1)..( 7): Result.003 file - promoters60/4770463
aaacaaa

SEQ ID NO: 139784 - DNA, 9 bp, Unknown
  misc_feature (1)..( 9): Result.003 file - promoters60/4770463
aaagttaac

SEQ ID NO: 139785 - DNA, 9 bp, Unknown
  misc_feature (1)..( 9): Result.003 file - promoters60/4770463
aaaattatt

SEQ ID NO: 139786 - DNA, 9 bp, Unknown
  misc_feature (1)..( 9): Result.003 file - promoters60/4770463
gaagttagt

SEQ ID NO: 139787 - DNA, 9 bp, Unknown
  misc_feature (1)..( 9): Result.003 file - promoters60/4770463
taaataatt

SEQ ID NO: 139788 - DNA, 9 bp, Unknown
  misc_feature (1)..( 9): Result.003 file - promoters60/4770463
aaaattgcg

SEQ ID NO: 139789 - DNA, 12 bp, Unknown
  misc_feature (1)..( 12): Result.003 file - promoters60/4770463
tcgaaatcatat

SEQ ID NO: 139790 - DNA, 12 bp, Unknown
  misc_feature (1)..( 12): Result.003 file - promoters60/4770463
ttgaaatcatac

SEQ ID NO: 139791 - DNA, 12 bp, Unknown
  misc_feature (1)..( 12): Result.003 file - promoters60/4770463
cagaaatcgcct

SEQ ID NO: 139792 - DNA, 12 bp, Unknown
  misc_feature (1)..( 12): Result.003 file - promoters60/4770463
ttgcaatttaga

SEQ ID NO: 139793 - DNA, 12 bp, Unknown
  misc_feature (1)..( 12): Result.003 file - promoters60/4770463
ttgaaacttgca

SEQ ID NO: 139794 - DNA, 8 bp, Unknown
  misc_feature (1)..( 8): Result.003 file - promoters60/4770463
taaaaaaa

SEQ ID NO: 139795 - DNA, 8 bp, Unknown
  misc_feature (1)..( 8): Result.003 file - promoters60/4770463
taaacaaa

SEQ ID NO: 139796 - DNA, 8 bp, Unknown
  misc_feature (1)..( 8): Result.003 file - promoters60/4770463
caaacaac

SEQ ID NO: 139797 - DNA, 8 bp, Unknown
  misc_feature (1)..( 8): Result.003 file - promoters60/4770463
taaacaaa

SEQ ID NO: 139798 - DNA, 8 bp, Unknown
  misc_feature (1)..( 8): Result.003 file - promoters60/4770463
ggaacaaa

SEQ ID NO: 139799 - DNA, 6 bp, Unknown
  misc_feature (1)..( 6): Result.003 file - promoters60/4770466
tttttc

SEQ ID NO: 139800 - DNA, 6 bp, Unknown
  misc_feature (1)..( 6): Result.003 file - promoters60/4770466
tttttc

SEQ ID NO: 139801 - DNA, 6 bp, Unknown
  misc_feature (1)..( 6): Result.003 file - promoters60/4770466
ataaac

SEQ ID NO: 139802 - DNA, 6 bp, Unknown
  misc_feature (1)..( 6): Result.003 file - promoters60/4770466
ataaac

SEQ ID NO: 139803 - DNA, 6 bp, Unknown
  misc_feature (1)..( 6): Result.003 file - promoters60/4770466
ataaac

SEQ ID NO: 139804 - DNA, 6 bp, Unknown
  misc_feature (1)..( 6): Result.003 file - promoters60/4770466
atatat

SEQ ID NO: 139805 - DNA, 6 bp, Unknown
  misc_feature (1)..( 6): Result.003 file - promoters60/4770466
atatat

SEQ ID NO: 139806 - DNA, 14 bp, Unknown
  misc_feature (1)..( 14): Result.003 file - promoters60/4770466
attttatgtgctgc

SEQ ID NO: 139807 - DNA, 14 bp, Unknown
  misc_feature (1)..( 14): Result.003 file - promoters60/4770466
cttttctgttctgc

SEQ ID NO: 139808 - DNA, 14 bp, Unknown
  misc_feature (1)..( 14): Result.003 file - promoters60/4770466
attttatttttgaa

SEQ ID NO: 139809 - DNA, 9 bp, Unknown
  misc_feature (1)..( 9): Result.003 file - promoters60/4770466
aaatcaaaa

SEQ ID NO: 139810 - DNA, 9 bp, Unknown
  misc_feature (1)..( 9): Result.003 file - promoters60/4770466
aaattaaaa

SEQ ID NO: 139811 - DNA, 6 bp, Unknown
  misc_feature (1)..( 6): Result.003 file - promoters60/4770466
tttctt

SEQ ID NO: 139812 - DNA, 6 bp, Unknown
  misc_feature (1)..( 6): Result.003 file - promoters60/4770466
tttctt

SEQ ID NO: 139813 - DNA, 8 bp, Unknown
  misc_feature (1)..( 8): Result.003 file - promoters60/4770466
tatttcga

SEQ ID NO: 139814 - DNA, 8 bp, Unknown
  misc_feature (1)..( 8): Result.003 file - promoters60/4770466
tatctcga

SEQ ID NO: 139815 - DNA, 11 bp, Unknown
  misc_feature (1)..( 11): Result.003 file - promoters60/4770477
tatagttcagc

SEQ ID NO: 139816 - DNA, 11 bp, Unknown
  misc_feature (1)..( 11): Result.003 file - promoters60/4770477
tatacttcagt

SEQ ID NO: 139817 - DNA, 11 bp, Unknown
  misc_feature (1)..( 11): Result.003 file - promoters60/4770477
gatagttgtgt

SEQ ID NO: 139818 - DNA, 11 bp, Unknown
  misc_feature (1)..( 11): Result.003 file - promoters60/4770477
ttgatttcagt

SEQ ID NO: 139819 - DNA, 7 bp, Unknown
  misc_feature (1)..( 7): Result.003 file - promoters60/4770499
ttctgat

SEQ ID NO: 139820 - DNA, 7 bp, Unknown
  misc_feature (1)..( 7): Result.003 file - promoters60/4770499
ttcagat

SEQ ID NO: 139821 - DNA, 9 bp, Unknown
  misc_feature (1)..( 9): Result.003 file - promoters60/4770499
ctttttaat

SEQ ID NO: 139822 - DNA, 9 bp, Unknown
  misc_feature (1)..( 9): Result.003 file - promoters60/4770499
ctttgtaac

SEQ ID NO: 139823 - DNA, 9 bp, Unknown
  misc_feature (1)..( 9): Result.003 file - promoters60/4770499
tgttttaat

SEQ ID NO: 139824 - DNA, 6 bp, Unknown
  misc_feature (1)..( 6): Result.003 file - promoters60/4770499
gagaaa

SEQ ID NO: 139825 - DNA, 6 bp, Unknown
  misc_feature (1)..( 6): Result.003 file - promoters60/4770499
gagaaa

SEQ ID NO: 139826 - DNA, 7 bp, Unknown
  misc_feature (1)..( 7): Result.003 file - promoters60/4770499
tttcgaa

SEQ ID NO: 139827 - DNA, 7 bp, Unknown
  misc_feature (1)..( 7): Result.003 file - promoters60/4770499
tttggaa

SEQ ID NO: 139828 - DNA, 10 bp, Unknown
  misc_feature (1)..( 10): Result.003 file - promoters60/4770499
gattaaaatt

SEQ ID NO: 139829 - DNA, 10 bp, Unknown
  misc_feature (1)..( 10): Result.003 file - promoters60/4770499
aaataaaata

SEQ ID NO: 139830 - DNA, 10 bp, Unknown
  misc_feature (1)..( 10): Result.003 file - promoters60/4770499
aaatgaaata

SEQ ID NO: 139831 - DNA, 7 bp, Unknown
  misc_feature (1)..( 7): Result.003 file - promoters60/4770499
aacttga

SEQ ID NO: 139832 - DNA, 7 bp, Unknown
  misc_feature (1)..( 7): Result.003 file - promoters60/4770499
aacttga

SEQ ID NO: 139833 - DNA, 6 bp, Unknown
  misc_feature (1)..( 6): Result.003 file - promoters60/4770499
agaact

SEQ ID NO: 139834 - DNA, 6 bp, Unknown
  misc_feature (1)..( 6): Result.003 file - promoters60/4770499
agaact

SEQ ID NO: 139835 - DNA, 6 bp, Unknown
  misc_feature (1)..( 6): Result.003 file - promoters60/4770499
aacgat

SEQ ID NO: 139836 - DNA, 6 bp, Unknown
  misc_feature (1)..( 6): Result.003 file - promoters60/4770499
aacgat

SEQ ID NO: 139837 - DNA, 8 bp, Unknown
  misc_feature (1)..( 8): Result.003 file - promoters60/4770499
gttcggtt

SEQ ID NO: 139838 - DNA, 8 bp, Unknown
  misc_feature (1)..( 8): Result.003 file - promoters60/4770499
gttctgtt

SEQ ID NO: 139839 - DNA, 7 bp, Unknown
  misc_feature (1)..( 7): Result.003 file - promoters60/4770499
tcagtgt

SEQ ID NO: 139840 - DNA, 7 bp, Unknown
  misc_feature (1)..( 7): Result.003 file - promoters60/4770499
tcattgt

SEQ ID NO: 139841 - DNA, 6 bp, Unknown
  misc_feature (1)..( 6): Result.003 file - promoters60/4770499
agtaaa

SEQ ID NO: 139842 - DNA, 6 bp, Unknown
  misc_feature (1)..( 6): Result.003 file - promoters60/4770499
agtaaa

SEQ ID NO: 139843 - DNA, 7 bp, Unknown
  misc_feature (1)..( 7): Result.003 file - promoters60/4770499
aatcggg

SEQ ID NO: 139844 - DNA, 7 bp, Unknown
  misc_feature (1)..( 7): Result.003 file - promoters60/4770499
aattggg

SEQ ID NO: 139845 - DNA, 8 bp, Unknown
  misc_feature (1)..( 8): Result.003 file - promoters60/4770499
gaaagaaa

SEQ ID NO: 139846 - DNA, 8 bp, Unknown
  misc_feature (1)..( 8): Result.003 file - promoters60/4770499
gaaacaaa

SEQ ID NO: 139847 - DNA, 10 bp, Unknown
  misc_feature (1)..( 10): Result.003 file - promoters60/4770499
ggaaaagaaa

SEQ ID NO: 139848 - DNA, 10 bp, Unknown
  misc_feature (1)..( 10): Result.003 file - promoters60/4770499
ggaaatgaaa

SEQ ID NO: 139849 - DNA, 7 bp, Unknown
  misc_feature (1)..( 7): Result.003 file - promoters60/4770499
cccacta

SEQ ID NO: 139850 - DNA, 7 bp, Unknown
  misc_feature (1)..( 7): Result.003 file - promoters60/4770499
cccacta

SEQ ID NO: 139851 - DNA, 9 bp, Unknown
  misc_feature (1)..( 9): Result.003 file - promoters60/4770499
aaagaaaag

SEQ ID NO: 139852 - DNA, 9 bp, Unknown
  misc_feature (1)..( 9): Result.003 file - promoters60/4770499
aaagtaaag

SEQ ID NO: 139853 - DNA, 7 bp, Unknown
  misc_feature (1)..( 7): Result.003 file - promoters60/4770499
gtatata

SEQ ID NO: 139854 - DNA, 7 bp, Unknown
  misc_feature (1)..( 7): Result.003 file - promoters60/4770499
gtatata

SEQ ID NO: 139855 - DNA, 14 bp, Unknown
  misc_feature (1)..( 14): Result.003 file - promoters60/4770594
aaacgaataccata

SEQ ID NO: 139856 - DNA, 14 bp, Unknown
  misc_feature (1)..( 14): Result.003 file - promoters60/4770594
aaatcattacaata

SEQ ID NO: 139857 - DNA, 14 bp, Unknown
  misc_feature (1)..( 14): Result.003 file - promoters60/4770594
cttactttataatg

SEQ ID NO: 139858 - DNA, 14 bp, Unknown
  misc_feature (1)..( 14): Result.003 file - promoters60/4770594
aaaacattaaaatc

SEQ ID NO: 139859 - DNA, 9 bp, Unknown
  misc_feature (1)..( 9): Result.003 file - promoters60/4770604
tatattcta

SEQ ID NO: 139860 - DNA, 9 bp, Unknown
  misc_feature (1)..( 9): Result.003 file - promoters60/4770604
catatacta

SEQ ID NO: 139861 - DNA, 9 bp, Unknown
  misc_feature (1)..( 9): Result.003 file - promoters60/4770604
tatattaaa

SEQ ID NO: 139862 - DNA, 10 bp, Unknown
  misc_feature (1)..( 10): Result.003 file - promoters60/4770604
caaaaaagaa

SEQ ID NO: 139863 - DNA, 10 bp, Unknown
  misc_feature (1)..( 10): Result.003 file - promoters60/4770604
caaaaatgaa

SEQ ID NO: 139864 - DNA, 10 bp, Unknown
  misc_feature (1)..( 10): Result.003 file - promoters60/4770604
ggcaaaggaa

SEQ ID NO: 139865 - DNA, 9 bp, Unknown
  misc_feature (1)..( 9): Result.003 file - promoters60/4770604
cctcaataa

SEQ ID NO: 139866 - DNA, 9 bp, Unknown
  misc_feature (1)..( 9): Result.003 file - promoters60/4770604
aatcattaa

SEQ ID NO: 139867 - DNA, 9 bp, Unknown
  misc_feature (1)..( 9): Result.003 file - promoters60/4770604
attcacatt

SEQ ID NO: 139868 - DNA, 9 bp, Unknown
  misc_feature (1)..( 9): Result.003 file - promoters60/4770604
aaatattct

SEQ ID NO: 139869 - DNA, 9 bp, Unknown
  misc_feature (1)..( 9): Result.003 file - promoters60/4770604
acataatct

SEQ ID NO: 139870 - DNA, 9 bp, Unknown
  misc_feature (1)..( 9): Result.003 file - promoters60/4770604
aaatattag

SEQ ID NO: 139871 - DNA, 7 bp, Unknown
  misc_feature (1)..( 7): Result.003 file - promoters60/4770604
tatataa

SEQ ID NO: 139872 - DNA, 7 bp, Unknown
  misc_feature (1)..( 7): Result.003 file - promoters60/4770604
tatatat

SEQ ID NO: 139873 - DNA, 7 bp, Unknown
  misc_feature (1)..( 7): Result.003 file - promoters60/4770604
tatttat

SEQ ID NO: 139874 - DNA, 8 bp, Unknown
  misc_feature (1)..( 8): Result.003 file - promoters60/4770620
gaaagatc

SEQ ID NO: 139875 - DNA, 8 bp, Unknown
  misc_feature (1)..( 8): Result.003 file - promoters60/4770620
aaaatatc

SEQ ID NO: 139876 - DNA, 8 bp, Unknown
  misc_feature (1)..( 8): Result.003 file - promoters60/4770620
ataagatc

SEQ ID NO: 139877 - DNA, 8 bp, Unknown
  misc_feature (1)..( 8): Result.003 file - promoters60/4770620
aaaataat

SEQ ID NO: 139878 - DNA, 12 bp, Unknown
  misc_feature (1)..( 12): Result.003 file - promoters60/4770620
tctgaaaattag

SEQ ID NO: 139879 - DNA, 12 bp, Unknown
  misc_feature (1)..( 12): Result.003 file - promoters60/4770620
caacaaaattaa

SEQ ID NO: 139880 - DNA, 12 bp, Unknown
  misc_feature (1)..( 12): Result.003 file - promoters60/4770620
tcttaaatttaa

SEQ ID NO: 139881 - DNA, 12 bp, Unknown
  misc_feature (1)..( 12): Result.003 file - promoters60/4770620
gatcaacattaa

SEQ ID NO: 139882 - DNA, 7 bp, Unknown
  misc_feature (1)..( 7): Result.003 file - promoters60/4770624
aaattaa

SEQ ID NO: 139883 - DNA, 7 bp, Unknown
  misc_feature (1)..( 7): Result.003 file - promoters60/4770624
aaactaa

SEQ ID NO: 139884 - DNA, 6 bp, Unknown
  misc_feature (1)..( 6): Result.003 file - promoters60/4770624
ttatta

SEQ ID NO: 139885 - DNA, 6 bp, Unknown
  misc_feature (1)..( 6): Result.003 file - promoters60/4770624
ttatta

SEQ ID NO: 139886 - DNA, 8 bp, Unknown
  misc_feature (1)..( 8): Result.003 file - promoters60/4770624
aatgtata

SEQ ID NO: 139887 - DNA, 8 bp, Unknown
  misc_feature (1)..( 8): Result.003 file - promoters60/4770624
aatttata

SEQ ID NO: 139888 - DNA, 6 bp, Unknown
  misc_feature (1)..( 6): Result.003 file - promoters60/4770624
ctaaac

SEQ ID NO: 139889 - DNA, 6 bp, Unknown
  misc_feature (1)..( 6): Result.003 file - promoters60/4770624
ctaaac

SEQ ID NO: 139890 - DNA, 6 bp, Unknown
  misc_feature (1)..( 6): Result.003 file - promoters60/4770624
ttaaac

SEQ ID NO: 139891 - DNA, 6 bp, Unknown
  misc_feature (1)..( 6): Result.003 file - promoters60/4770624
ttaaac

SEQ ID NO: 139892 - DNA, 8 bp, Unknown
  misc_feature (1)..( 8): Result.003 file - promoters60/4770624
aaaaatag

SEQ ID NO: 139893 - DNA, 8 bp, Unknown
  misc_feature (1)..( 8): Result.003 file - promoters60/4770624
aaaagtag

SEQ ID NO: 139894 - DNA, 8 bp, Unknown
  misc_feature (1)..( 8): Result.003 file - promoters60/4770624
aaacataa

SEQ ID NO: 139895 - DNA, 6 bp, Unknown
  misc_feature (1)..( 6): Result.003 file - promoters60/4770624
agaaaa

SEQ ID NO: 139896 - DNA, 6 bp, Unknown
  misc_feature (1)..( 6): Result.003 file - promoters60/4770624
agaaaa

SEQ ID NO: 139897 - DNA, 6 bp, Unknown
  misc_feature (1)..( 6): Result.003 file - promoters60/4770624
aaacac

SEQ ID NO: 139898 - DNA, 6 bp, Unknown
  misc_feature (1)..( 6): Result.003 file - promoters60/4770624
aaacac

SEQ ID NO: 139899 - DNA, 10 bp, Unknown
  misc_feature (1)..( 10): Result.003 file - promoters60/4770624
gtatacataa

SEQ ID NO: 139900 - DNA, 10 bp, Unknown
  misc_feature (1)..( 10): Result.003 file - promoters60/4770624
ttgtacataa

SEQ ID NO: 139901 - DNA, 10 bp, Unknown
  misc_feature (1)..( 10): Result.003 file - promoters60/4770624
ttgtaaatac

SEQ ID NO: 139902 - DNA, 6 bp, Unknown
  misc_feature (1)..( 6): Result.003 file - promoters60/4770624
aattaa

SEQ ID NO: 139903 - DNA, 6 bp, Unknown
  misc_feature (1)..( 6): Result.003 file - promoters60/4770624
aattaa

SEQ ID NO: 139904 - DNA, 6 bp, Unknown
  misc_feature (1)..( 6): Result.003 file - promoters60/4770624
ttgaca

SEQ ID NO: 139905 - DNA, 6 bp, Unknown
  misc_feature (1)..( 6): Result.003 file - promoters60/4770624
ttgaca

SEQ ID NO: 139906 - DNA, 6 bp, Unknown
  misc_feature (1)..( 6): Result.003 file - promoters60/4770624
atcatg

SEQ ID NO: 139907 - DNA, 6 bp, Unknown
  misc_feature (1)..( 6): Result.003 file - promoters60/4770624
atcatg

SEQ ID NO: 139908 - DNA, 6 bp, Unknown
  misc_feature (1)..( 6): Result.003 file - promoters60/4770624
aaacct

SEQ ID NO: 139909 - DNA, 6 bp, Unknown
  misc_feature (1)..( 6): Result.003 file - promoters60/4770624
aaacct

SEQ ID NO: 139910 - DNA, 7 bp, Unknown
  misc_feature (1)..( 7): Result.003 file - promoters60/4770624
aattcaa

SEQ ID NO: 139911 - DNA, 7 bp, Unknown
  misc_feature (1)..( 7): Result.003 file - promoters60/4770624
aattcaa

SEQ ID NO: 139912 - DNA, 6 bp, Unknown
  misc_feature (1)..( 6): Result.003 file - promoters60/4770624
aaaatt

SEQ ID NO: 139913 - DNA, 6 bp, Unknown
  misc_feature (1)..( 6): Result.003 file - promoters60/4770624
aaaatt

SEQ ID NO: 139914 - DNA, 6 bp, Unknown
  misc_feature (1)..( 6): Result.003 file - promoters60/4770624
caatca

SEQ ID NO: 139915 - DNA, 6 bp, Unknown
  misc_feature (1)..( 6): Result.003 file - promoters60/4770624
caatca

SEQ ID NO: 139916 - DNA, 7 bp, Unknown
  misc_feature (1)..( 7): Result.003 file - promoters60/4770624
aattttt

SEQ ID NO: 139917 - DNA, 7 bp, Unknown
  misc_feature (1)..( 7): Result.003 file - promoters60/4770624
aatcttt

SEQ ID NO: 139918 - DNA, 8 bp, Unknown
  misc_feature (1)..( 8): Result.003 file - promoters60/4770624
aaataaca

SEQ ID NO: 139919 - DNA, 8 bp, Unknown
  misc_feature (1)..( 8): Result.003 file - promoters60/4770624
aaaaaaca

SEQ ID NO: 139920 - DNA, 6 bp, Unknown
  misc_feature (1)..( 6): Result.003 file - promoters60/4770624
tcaaaa

SEQ ID NO: 139921 - DNA, 6 bp, Unknown
  misc_feature (1)..( 6): Result.003 file - promoters60/4770624
tcaaaa

SEQ ID NO: 139922 - DNA, 7 bp, Unknown
  misc_feature (1)..( 7): Result.003 file - promoters60/4770624
agtttaa

SEQ ID NO: 139923 - DNA, 7 bp, Unknown
  misc_feature (1)..( 7): Result.003 file - promoters60/4770624
agtataa

SEQ ID NO: 139924 - DNA, 7 bp, Unknown
  misc_feature (1)..( 7): Result.003 file - promoters60/4770659
aactctg

SEQ ID NO: 139925 - DNA, 7 bp, Unknown
  misc_feature (1)..( 7): Result.003 file - promoters60/4770659
aactctg

SEQ ID NO: 139926 - DNA, 7 bp, Unknown
  misc_feature (1)..( 7): Result.003 file - promoters60/4770659
agtatat

SEQ ID NO: 139927 - DNA, 7 bp, Unknown
  misc_feature (1)..( 7): Result.003 file - promoters60/4770659
tgtatat

SEQ ID NO: 139928 - DNA, 7 bp, Unknown
  misc_feature (1)..( 7): Result.003 file - promoters60/4770659
agtatat

SEQ ID NO: 139929 - DNA, 6 bp, Unknown
  misc_feature (1)..( 6): Result.003 file - promoters60/4770659
aaactt

SEQ ID NO: 139930 - DNA, 6 bp, Unknown
  misc_feature (1)..( 6): Result.003 file - promoters60/4770659
aaactt

SEQ ID NO: 139931 - DNA, 10 bp, Unknown
  misc_feature (1)..( 10): Result.003 file - promoters60/4770659
aaactaagaa

SEQ ID NO: 139932 - DNA, 10 bp, Unknown
  misc_feature (1)..( 10): Result.003 file - promoters60/4770659
aaaataaata

SEQ ID NO: 139933 - DNA, 10 bp, Unknown
  misc_feature (1)..( 10): Result.003 file - promoters60/4770659
acaatagata

SEQ ID NO: 139934 - DNA, 8 bp, Unknown
  misc_feature (1)..( 8): Result.003 file - promoters60/4770659
atattttt

SEQ ID NO: 139935 - DNA, 8 bp, Unknown
  misc_feature (1)..( 8): Result.003 file - promoters60/4770659
atattttt

SEQ ID NO: 139936 - DNA, 6 bp, Unknown
  misc_feature (1)..( 6): Result.003 file - promoters60/4770659
ataata

SEQ ID NO: 139937 - DNA, 6 bp, Unknown
  misc_feature (1)..( 6): Result.003 file - promoters60/4770659
ataata

SEQ ID NO: 139938 - DNA, 6 bp, Unknown
  misc_feature (1)..( 6): Result.003 file - promoters60/4770659
tgattt

SEQ ID NO: 139939 - DNA, 6 bp, Unknown
  misc_feature (1)..( 6): Result.003 file - promoters60/4770659
tgattt

SEQ ID NO: 139940 - DNA, 7 bp, Unknown
  misc_feature (1)..( 7): Result.003 file - promoters60/4770659
attagtt

SEQ ID NO: 139941 - DNA, 7 bp, Unknown
  misc_feature (1)..( 7): Result.003 file - promoters60/4770659
atttgtt

SEQ ID NO: 139942 - DNA, 6 bp, Unknown
  misc_feature (1)..( 6): Result.003 file - promoters60/4770659
attcaa

SEQ ID NO: 139943 - DNA, 6 bp, Unknown
  misc_feature (1)..( 6): Result.003 file - promoters60/4770659
attcaa

SEQ ID NO: 139944 - DNA, 8 bp, Unknown
  misc_feature (1)..( 8): Result.003 file - promoters60/4770659
tattgatg

SEQ ID NO: 139945 - DNA, 8 bp, Unknown
  misc_feature (1)..( 8): Result.003 file - promoters60/4770659
tattcatg

SEQ ID NO: 139946 - DNA, 6 bp, Unknown
  misc_feature (1)..( 6): Result.003 file - promoters60/4770659
aacaaa

SEQ ID NO: 139947 - DNA, 6 bp, Unknown
  misc_feature (1)..( 6): Result.003 file - promoters60/4770659
aacaaa

SEQ ID NO: 139948 - DNA, 8 bp, Unknown
  misc_feature (1)..( 8): Result.003 file - promoters60/4770659
tttagata

SEQ ID NO: 139949 - DNA, 8 bp, Unknown
  misc_feature (1)..( 8): Result.003 file - promoters60/4770659
aatagata

SEQ ID NO: 139950 - DNA, 8 bp, Unknown
  misc_feature (1)..( 8): Result.003 file - promoters60/4770659
aataaata

SEQ ID NO: 139951 - DNA, 6 bp, Unknown
  misc_feature (1)..( 6): Result.003 file - promoters60/4770659
ttttta

SEQ ID NO: 139952 - DNA, 6 bp, Unknown
  misc_feature (1)..( 6): Result.003 file - promoters60/4770659
ttttta

SEQ ID NO: 139953 - DNA, 6 bp, Unknown
  misc_feature (1)..( 6): Result.003 file - promoters60/4770659
ttaatt

SEQ ID NO: 139954 - DNA, 6 bp, Unknown
  misc_feature (1)..( 6): Result.003 file - promoters60/4770659
ttaatt

SEQ ID NO: 139955 - DNA, 6 bp, Unknown
  misc_feature (1)..( 6): Result.003 file - promoters60/4770659
ttctaa

SEQ ID NO: 139956 - DNA, 6 bp, Unknown
  misc_feature (1)..( 6): Result.003 file - promoters60/4770659
ttctaa

SEQ ID NO: 139957 - DNA, 7 bp, Unknown
  misc_feature (1)..( 7): Result.003 file - promoters60/4770666
gtggatt

SEQ ID NO: 139958 - DNA, 7 bp, Unknown
  misc_feature (1)..( 7): Result.003 file - promoters60/4770666
ttggatt

SEQ ID NO: 139959 - DNA, 7 bp, Unknown
  misc_feature (1)..( 7): Result.003 file - promoters60/4770666
ttgcatt

SEQ ID NO: 139960 - DNA, 7 bp, Unknown
  misc_feature (1)..( 7): Result.003 file - promoters60/4770666
aattata

SEQ ID NO: 139961 - DNA, 7 bp, Unknown
  misc_feature (1)..( 7): Result.003 file - promoters60/4770666
aattata

SEQ ID NO: 139962 - DNA, 7 bp, Unknown
  misc_feature (1)..( 7): Result.003 file - promoters60/4770666
aaaacct

SEQ ID NO: 139963 - DNA, 7 bp, Unknown
  misc_feature (1)..( 7): Result.003 file - promoters60/4770666
aaaacct

SEQ ID NO: 139964 - DNA, 7 bp, Unknown
  misc_feature (1)..( 7): Result.003 file - promoters60/4770666
tcttacg

SEQ ID NO: 139965 - DNA, 7 bp, Unknown
  misc_feature (1)..( 7): Result.003 file - promoters60/4770666
tctcacg

SEQ ID NO: 139966 - DNA, 6 bp, Unknown
  misc_feature (1)..( 6): Result.003 file - promoters60/4770666
tttcaa

SEQ ID NO: 139967 - DNA, 6 bp, Unknown
  misc_feature (1)..( 6): Result.003 file - promoters60/4770666
tttcaa

SEQ ID NO: 139968 - DNA, 7 bp, Unknown
  misc_feature (1)..( 7): Result.003 file - promoters60/4770666
atatttg

SEQ ID NO: 139969 - DNA, 7 bp, Unknown
  misc_feature (1)..( 7): Result.003 file - promoters60/4770666
ataattg

SEQ ID NO: 139970 - DNA, 7 bp, Unknown
  misc_feature (1)..( 7): Result.003 file - promoters60/4770666
ataattc

SEQ ID NO: 139971 - DNA, 6 bp, Unknown
  misc_feature (1)..( 6): Result.003 file - promoters60/4770666
agatat

SEQ ID NO: 139972 - DNA, 6 bp, Unknown
  misc_feature (1)..( 6): Result.003 file - promoters60/4770666
agatat

SEQ ID NO: 139973 - DNA, 7 bp, Unknown
  misc_feature (1)..( 7): Result.003 file - promoters60/4770666
gaaaaaa

SEQ ID NO: 139974 - DNA, 7 bp, Unknown
  misc_feature (1)..( 7): Result.003 file - promoters60/4770666
gaaaaaa

SEQ ID NO: 139975 - DNA, 7 bp, Unknown
  misc_feature (1)..( 7): Result.003 file - promoters60/4770666
caccata

SEQ ID NO: 139976 - DNA, 7 bp, Unknown
  misc_feature (1)..( 7): Result.003 file - promoters60/4770666
cactata

SEQ ID NO: 139977 - DNA, 8 bp, Unknown
  misc_feature (1)..( 8): Result.003 file - promoters60/4770666
ttaattca

SEQ ID NO: 139978 - DNA, 8 bp, Unknown
  misc_feature (1)..( 8): Result.003 file - promoters60/4770666
ttatttca

SEQ ID NO: 139979 - DNA, 6 bp, Unknown
  misc_feature (1)..( 6): Result.003 file - promoters60/4770666
atatgt

SEQ ID NO: 139980 - DNA, 6 bp, Unknown
  misc_feature (1)..( 6): Result.003 file - promoters60/4770666
atatgt

SEQ ID NO: 139981 - DNA, 6 bp, Unknown
  misc_feature (1)..( 6): Result.003 file - promoters60/4770666
aaccta

SEQ ID NO: 139982 - DNA, 6 bp, Unknown
  misc_feature (1)..( 6): Result.003 file - promoters60/4770666
aaccta

SEQ ID NO: 139983 - DNA, 6 bp, Unknown
  misc_feature (1)..( 6): Result.003 file - promoters60/4770666
tatcat

SEQ ID NO: 139984 - DNA, 6 bp, Unknown
  misc_feature (1)..( 6): Result.003 file - promoters60/4770666
tatcat

SEQ ID NO: 139985 - DNA, 6 bp, Unknown
  misc_feature (1)..( 6): Result.003 file - promoters60/4770666
ttaaaa

SEQ ID NO: 139986 - DNA, 6 bp, Unknown
  misc_feature (1)..( 6): Result.003 file - promoters60/4770666
ttaaaa

SEQ ID NO: 139987 - DNA, 7 bp, Unknown
  misc_feature (1)..( 7): Result.003 file - promoters60/4770666
tcaaata

SEQ ID NO: 139988 - DNA, 7 bp, Unknown
  misc_feature (1)..( 7): Result.003 file - promoters60/4770666
tcaaata

SEQ ID NO: 139989 - DNA, 8 bp, Unknown
  misc_feature (1)..( 8): Result.003 file - promoters60/4770666
tttaatct

SEQ ID NO: 139990 - DNA, 8 bp, Unknown
  misc_feature (1)..( 8): Result.003 file - promoters60/4770666
ttttatct

SEQ ID NO: 139991 - DNA, 8 bp, Unknown
  misc_feature (1)..( 8): Result.003 file - promoters60/4770666
aattgtaa

SEQ ID NO: 139992 - DNA, 8 bp, Unknown
  misc_feature (1)..( 8): Result.003 file - promoters60/4770666
aatggtaa

SEQ ID NO: 139993 - DNA, 8 bp, Unknown
  misc_feature (1)..( 8): Result.003 file - promoters60/4770666
aagctgag

SEQ ID NO: 139994 - DNA, 8 bp, Unknown
  misc_feature (1)..( 8): Result.003 file - promoters60/4770666
aagcagag

SEQ ID NO: 139995 - DNA, 6 bp, Unknown
  misc_feature (1)..( 6): Result.003 file - promoters60/4770666
aataat

SEQ ID NO: 139996 - DNA, 6 bp, Unknown
  misc_feature (1)..( 6): Result.003 file - promoters60/4770666
aataat

SEQ ID NO: 139997 - DNA, 10 bp, Unknown
  misc_feature (1)..( 10): Result.003 file - promoters60/4770666
aactattcat

SEQ ID NO: 139998 - DNA, 10 bp, Unknown
  misc_feature (1)..( 10): Result.003 file - promoters60/4770666
aactaatcat

SEQ ID NO: 139999 - DNA, 10 bp, Unknown
  misc_feature (1)..( 10): Result.003 file - promoters60/4770666
attattttaa

SEQ ID NO: 140000 - DNA, 10 bp, Unknown
  misc_feature (1)..( 10): Result.003 file - promoters60/4770666
attagtttaa

SEQ ID NO: 140001 - DNA, 14 bp, Unknown
  misc_feature (1)..( 14): Result.003 file - promoters60/4770666
ctacaaatagaggc

SEQ ID NO: 140002 - DNA, 14 bp, Unknown
  misc_feature (1)..( 14): Result.003 file - promoters60/4770666
ctacaaatagaggc

SEQ ID NO: 140003 - DNA, 8 bp, Unknown
  misc_feature (1)..( 8): Result.003 file - promoters60/4770865
acatattg

SEQ ID NO: 140004 - DNA, 8 bp, Unknown
  misc_feature (1)..( 8): Result.003 file - promoters60/4770865
acattttg

SEQ ID NO: 140005 - DNA, 8 bp, Unknown
  misc_feature (1)..( 8): Result.003 file - promoters60/4770865
ttattttg

SEQ ID NO: 140006 - DNA, 8 bp, Unknown
  misc_feature (1)..( 8): Result.003 file - promoters60/4770865
ccatatta

SEQ ID NO: 140007 - DNA, 9 bp, Unknown
  misc_feature (1)..( 9): Result.003 file - promoters60/4770865
gtatataaa

SEQ ID NO: 140008 - DNA, 9 bp, Unknown
  misc_feature (1)..( 9): Result.003 file - promoters60/4770865
ttataaaaa

SEQ ID NO: 140009 - DNA, 9 bp, Unknown
  misc_feature (1)..( 9): Result.003 file - promoters60/4770865
ttataaata

SEQ ID NO: 140010 - DNA, 9 bp, Unknown
  misc_feature (1)..( 9): Result.003 file - promoters60/4770865
tgataaatc

SEQ ID NO: 140011 - DNA, 9 bp, Unknown
  misc_feature (1)..( 9): Result.003 file - promoters60/4771271
gaaacaagt

SEQ ID NO: 140012 - DNA, 9 bp, Unknown
  misc_feature (1)..( 9): Result.003 file - promoters60/4771271
gaaagaaga

SEQ ID NO: 140013 - DNA, 9 bp, Unknown
  misc_feature (1)..( 9): Result.003 file - promoters60/4771271
taaaaaagg

SEQ ID NO: 140014 - DNA, 10 bp, Unknown
  misc_feature (1)..( 10): Result.003 file - promoters60/4771271
tgagagaaga

SEQ ID NO: 140015 - DNA, 10 bp, Unknown
  misc_feature (1)..( 10): Result.003 file - promoters60/4771271
caatataaag

SEQ ID NO: 140016 - DNA, 10 bp, Unknown
  misc_feature (1)..( 10): Result.003 file - promoters60/4771271
agatacaaat

SEQ ID NO: 140017 - DNA, 7 bp, Unknown
  misc_feature (1)..( 7): Result.003 file - promoters60/4771286
aacttat

SEQ ID NO: 140018 - DNA, 7 bp, Unknown
  misc_feature (1)..( 7): Result.003 file - promoters60/4771286
aacatat

SEQ ID NO: 140019 - DNA, 12 bp, Unknown
  misc_feature (1)..( 12): Result.003 file - promoters60/4771286
tttgtattttag

SEQ ID NO: 140020 - DNA, 12 bp, Unknown
  misc_feature (1)..( 12): Result.003 file - promoters60/4771286
tttggattcaaa

SEQ ID NO: 140021 - DNA, 12 bp, Unknown
  misc_feature (1)..( 12): Result.003 file - promoters60/4771286
tttatattttag

SEQ ID NO: 140022 - DNA, 7 bp, Unknown
  misc_feature (1)..( 7): Result.003 file - promoters60/4771286
attcaaa

SEQ ID NO: 140023 - DNA, 7 bp, Unknown
  misc_feature (1)..( 7): Result.003 file - promoters60/4771286
attcaaa

SEQ ID NO: 140024 - DNA, 7 bp, Unknown
  misc_feature (1)..( 7): Result.003 file - promoters60/4771286
aatttgt

SEQ ID NO: 140025 - DNA, 7 bp, Unknown
  misc_feature (1)..( 7): Result.003 file - promoters60/4771286
aatatgt

SEQ ID NO: 140026 - DNA, 9 bp, Unknown
  misc_feature (1)..( 9): Result.003 file - promoters60/4771286
gttattttt

SEQ ID NO: 140027 - DNA, 9 bp, Unknown
  misc_feature (1)..( 9): Result.003 file - promoters60/4771286
gtttttttt

SEQ ID NO: 140028 - DNA, 9 bp, Unknown
  misc_feature (1)..( 9): Result.003 file - promoters60/4771286
ataattatg

SEQ ID NO: 140029 - DNA, 9 bp, Unknown
  misc_feature (1)..( 9): Result.003 file - promoters60/4771286
ataataatg

SEQ ID NO: 140030 - DNA, 11 bp, Unknown
  misc_feature (1)..( 11): Result.003 file - promoters60/4771286
gataggaaaaa

SEQ ID NO: 140031 - DNA, 11 bp, Unknown
  misc_feature (1)..( 11): Result.003 file - promoters60/4771286
gatagtaaaaa

SEQ ID NO: 140032 - DNA, 6 bp, Unknown
  misc_feature (1)..( 6): Result.003 file - promoters60/4771286
tatcca

SEQ ID NO: 140033 - DNA, 6 bp, Unknown
  misc_feature (1)..( 6): Result.003 file - promoters60/4771286
tatcca

SEQ ID NO: 140034 - DNA, 6 bp, Unknown
  misc_feature (1)..( 6): Result.003 file - promoters60/4771286
cattaa

SEQ ID NO: 140035 - DNA, 6 bp, Unknown
  misc_feature (1)..( 6): Result.003 file - promoters60/4771286
cattaa

SEQ ID NO: 140036 - DNA, 11 bp, Unknown
  misc_feature (1)..( 11): Result.003 file - promoters60/4771286
caaaacccttc

SEQ ID NO: 140037 - DNA, 11 bp, Unknown
  misc_feature (1)..( 11): Result.003 file - promoters60/4771286
ataaacctttc

SEQ ID NO: 140038 - DNA, 11 bp, Unknown
  misc_feature (1)..( 11): Result.003 file - promoters60/4771286
ataaaccgtcg

SEQ ID NO: 140039 - DNA, 10 bp, Unknown
  misc_feature (1)..( 10): Result.003 file - promoters60/4771286
tataaacaaa

SEQ ID NO: 140040 - DNA, 10 bp, Unknown
  misc_feature (1)..( 10): Result.003 file - promoters60/4771286
tataaataaa

SEQ ID NO: 140041 - DNA, 10 bp, Unknown
  misc_feature (1)..( 10): Result.003 file - promoters60/4771286
tataaaatca

SEQ ID NO: 140042 - DNA, 6 bp, Unknown
  misc_feature (1)..( 6): Result.003 file - promoters60/4771286
aaattc

SEQ ID NO: 140043 - DNA, 6 bp, Unknown
  misc_feature (1)..( 6): Result.003 file - promoters60/4771286
aaattc

SEQ ID NO: 140044 - DNA, 7 bp, Unknown
  misc_feature (1)..( 7): Result.003 file - promoters60/4771286
tttgaaa

SEQ ID NO: 140045 - DNA, 7 bp, Unknown
  misc_feature (1)..( 7): Result.003 file - promoters60/4771286
ttttaaa

SEQ ID NO: 140046 - DNA, 10 bp, Unknown
  misc_feature (1)..( 10): Result.003 file - promoters60/4771286
aaaatgttag

SEQ ID NO: 140047 - DNA, 10 bp, Unknown
  misc_feature (1)..( 10): Result.003 file - promoters60/4771286
aaactgttag

SEQ ID NO: 140048 - DNA, 7 bp, Unknown
  misc_feature (1)..( 7): Result.003 file - promoters60/4771286
actttgt

SEQ ID NO: 140049 - DNA, 7 bp, Unknown
  misc_feature (1)..( 7): Result.003 file - promoters60/4771286
actctgt

SEQ ID NO: 140050 - DNA, 6 bp, Unknown
  misc_feature (1)..( 6): Result.003 file - promoters60/4771286
atctcc

SEQ ID NO: 140051 - DNA, 6 bp, Unknown
  misc_feature (1)..( 6): Result.003 file - promoters60/4771286
atctcc

SEQ ID NO: 140052 - DNA, 8 bp, Unknown
  misc_feature (1)..( 8): Result.003 file - promoters60/4771286
atccgcgt

SEQ ID NO: 140053 - DNA, 8 bp, Unknown
  misc_feature (1)..( 8): Result.003 file - promoters60/4771286
atcctcgt

SEQ ID NO: 140054 - DNA, 14 bp, Unknown
  misc_feature (1)..( 14): Result.003 file - promoters60/4771286
taactaatcagatc

SEQ ID NO: 140055 - DNA, 14 bp, Unknown
  misc_feature (1)..( 14): Result.003 file - promoters60/4771286
taaccaatcatatc

SEQ ID NO: 140056 - DNA, 6 bp, Unknown
  misc_feature (1)..( 6): Result.003 file - promoters60/4771286
tattct

SEQ ID NO: 140057 - DNA, 6 bp, Unknown
  misc_feature (1)..( 6): Result.003 file - promoters60/4771286
tattct

SEQ ID NO: 140058 - DNA, 8 bp, Unknown
  misc_feature (1)..( 8): Result.003 file - promoters60/4771286
ataccaca

SEQ ID NO: 140059 - DNA, 8 bp, Unknown
  misc_feature (1)..( 8): Result.003 file - promoters60/4771286
atacaaca

SEQ ID NO: 140060 - DNA, 9 bp, Unknown
  misc_feature (1)..( 9): Result.003 file - promoters60/4771286
tcaacttgt

SEQ ID NO: 140061 - DNA, 9 bp, Unknown
  misc_feature (1)..( 9): Result.003 file - promoters60/4771286
tcagcttgt

SEQ ID NO: 140062 - DNA, 7 bp, Unknown
  misc_feature (1)..( 7): Result.003 file - promoters60/4771286
tttcgat

SEQ ID NO: 140063 - DNA, 7 bp, Unknown
  misc_feature (1)..( 7): Result.003 file - promoters60/4771286
tttggat

SEQ ID NO: 140064 - DNA, 7 bp, Unknown
  misc_feature (1)..( 7): Result.003 file - promoters60/4771286
aacataa

SEQ ID NO: 140065 - DNA, 7 bp, Unknown
  misc_feature (1)..( 7): Result.003 file - promoters60/4771286
aacataa

SEQ ID NO: 140066 - DNA, 10 bp, Unknown
  misc_feature (1)..( 10): Result.003 file - promoters60/4771286
ataacccaat

SEQ ID NO: 140067 - DNA, 10 bp, Unknown
  misc_feature (1)..( 10): Result.003 file - promoters60/4771286
ataaaccaat

SEQ ID NO: 140068 - DNA, 7 bp, Unknown
  misc_feature (1)..( 7): Result.003 file - promoters60/4771286
tccgatc

SEQ ID NO: 140069 - DNA, 7 bp, Unknown
  misc_feature (1)..( 7): Result.003 file - promoters60/4771286
tcccatc

SEQ ID NO: 140070 - DNA, 8 bp, Unknown
  misc_feature (1)..( 8): Result.003 file - promoters60/4771321
attataaa

SEQ ID NO: 140071 - DNA, 8 bp, Unknown
  misc_feature (1)..( 8): Result.003 file - promoters60/4771321
tttataat

SEQ ID NO: 140072 - DNA, 9 bp, Unknown
  misc_feature (1)..( 9): Result.003 file - promoters60/4771321
ggtatcaaa

SEQ ID NO: 140073 - DNA, 9 bp, Unknown
  misc_feature (1)..( 9): Result.003 file - promoters60/4771321
tttgataag

SEQ ID NO: 140074 - DNA, 9 bp, Unknown
  misc_feature (1)..( 9): Result.003 file - promoters60/4771321
cacatcaaa

SEQ ID NO: 140075 - DNA, 9 bp, Unknown
  misc_feature (1)..( 9): Result.003 file - promoters60/4771321
gttatttga

SEQ ID NO: 140076 - DNA, 7 bp, Unknown
  misc_feature (1)..( 7): Result.003 file - promoters60/4771348
atgaaga

SEQ ID NO: 140077 - DNA, 7 bp, Unknown
  misc_feature (1)..( 7): Result.003 file - promoters60/4771348
atgaaga

SEQ ID NO: 140078 - DNA, 8 bp, Unknown
  misc_feature (1)..( 8): Result.003 file - promoters60/4771348
tgtcttta

SEQ ID NO: 140079 - DNA, 8 bp, Unknown
  misc_feature (1)..( 8): Result.003 file - promoters60/4771348
cgtcatta

SEQ ID NO: 140080 - DNA, 8 bp, Unknown
  misc_feature (1)..( 8): Result.003 file - promoters60/4771348
tgtctttc

SEQ ID NO: 140081 - DNA, 6 bp, Unknown
  misc_feature (1)..( 6): Result.003 file - promoters60/4771348
ttgttt

SEQ ID NO: 140082 - DNA, 6 bp, Unknown
  misc_feature (1)..( 6): Result.003 file - promoters60/4771348
ttgttt

SEQ ID NO: 140083 - DNA, 8 bp, Unknown
  misc_feature (1)..( 8): Result.003 file - promoters60/4771348
catttgta

SEQ ID NO: 140084 - DNA, 8 bp, Unknown
  misc_feature (1)..( 8): Result.003 file - promoters60/4771348
cattggta

SEQ ID NO: 140085 - DNA, 8 bp, Unknown
  misc_feature (1)..( 8): Result.003 file - promoters60/4771348
gattagta

SEQ ID NO: 140086 - DNA, 7 bp, Unknown
  misc_feature (1)..( 7): Result.003 file - promoters60/4771348
caacatt

SEQ ID NO: 140087 - DNA, 7 bp, Unknown
  misc_feature (1)..( 7): Result.003 file - promoters60/4771348
caacatt

SEQ ID NO: 140088 - DNA, 6 bp, Unknown
  misc_feature (1)..( 6): Result.003 file - promoters60/4771348
tgacag

SEQ ID NO: 140089 - DNA, 6 bp, Unknown
  misc_feature (1)..( 6): Result.003 file - promoters60/4771348
tgacag

SEQ ID NO: 140090 - DNA, 8 bp, Unknown
  misc_feature (1)..( 8): Result.003 file - promoters60/4771348
ctcttcac

SEQ ID NO: 140091 - DNA, 8 bp, Unknown
  misc_feature (1)..( 8): Result.003 file - promoters60/4771348
ctctccac

SEQ ID NO: 140092 - DNA, 7 bp, Unknown
  misc_feature (1)..( 7): Result.003 file - promoters60/4771348
tttggtt

SEQ ID NO: 140093 - DNA, 7 bp, Unknown
  misc_feature (1)..( 7): Result.003 file - promoters60/4771348
tttagtt

SEQ ID NO: 140094 - DNA, 7 bp, Unknown
  misc_feature (1)..( 7): Result.003 file - promoters60/4771348
atagaaa

SEQ ID NO: 140095 - DNA, 7 bp, Unknown
  misc_feature (1)..( 7): Result.003 file - promoters60/4771348
atataaa

SEQ ID NO: 140096 - DNA, 7 bp, Unknown
  misc_feature (1)..( 7): Result.003 file - promoters60/4771348
ttaattt

SEQ ID NO: 140097 - DNA, 7 bp, Unknown
  misc_feature (1)..( 7): Result.003 file - promoters60/4771348
ttacttt

SEQ ID NO: 140098 - DNA, 7 bp, Unknown
  misc_feature (1)..( 7): Result.003 file - promoters60/4771348
acactgt

SEQ ID NO: 140099 - DNA, 7 bp, Unknown
  misc_feature (1)..( 7): Result.003 file - promoters60/4771348
acattgt

SEQ ID NO: 140100 - DNA, 6 bp, Unknown
  misc_feature (1)..( 6): Result.003 file - promoters60/4771348
catttt

SEQ ID NO: 140101 - DNA, 6 bp, Unknown
  misc_feature (1)..( 6): Result.003 file - promoters60/4771348
catttt

SEQ ID NO: 140102 - DNA, 6 bp, Unknown
  misc_feature (1)..( 6): Result.003 file - promoters60/4771348
agatta

SEQ ID NO: 140103 - DNA, 6 bp, Unknown
  misc_feature (1)..( 6): Result.003 file - promoters60/4771348
agatta

SEQ ID NO: 140104 - DNA, 9 bp, Unknown
  misc_feature (1)..( 9): Result.003 file - promoters60/4771348
aagacaaag

SEQ ID NO: 140105 - DNA, 9 bp, Unknown
  misc_feature (1)..( 9): Result.003 file - promoters60/4771348
aagtcaaag

SEQ ID NO: 140106 - DNA, 7 bp, Unknown
  misc_feature (1)..( 7): Result.003 file - promoters60/4771348
tagaaaa

SEQ ID NO: 140107 - DNA, 7 bp, Unknown
  misc_feature (1)..( 7): Result.003 file - promoters60/4771348
tagcaaa

SEQ ID NO: 140108 - DNA, 7 bp, Unknown
  misc_feature (1)..( 7): Result.003 file - promoters60/4771348
gagagaa

SEQ ID NO: 140109 - DNA, 7 bp, Unknown
  misc_feature (1)..( 7): Result.003 file - promoters60/4771348
gagagaa

SEQ ID NO: 140110 - DNA, 7 bp, Unknown
  misc_feature (1)..( 7): Result.003 file - promoters60/4771348
ttatgtc

SEQ ID NO: 140111 - DNA, 7 bp, Unknown
  misc_feature (1)..( 7): Result.003 file - promoters60/4771348
ttatgtc

SEQ ID NO: 140112 - DNA, 10 bp, Unknown
  misc_feature (1)..( 10): Result.003 file - promoters60/4771348
ttttactaac

SEQ ID NO: 140113 - DNA, 10 bp, Unknown
  misc_feature (1)..( 10): Result.003 file - promoters60/4771348
ttttaataac

SEQ ID NO: 140114 - DNA, 6 bp, Unknown
  misc_feature (1)..( 6): Result.003 file - promoters60/4771348
aaaatc

SEQ ID NO: 140115 - DNA, 6 bp, Unknown
  misc_feature (1)..( 6): Result.003 file - promoters60/4771348
aaaatc

SEQ ID NO: 140116 - DNA, 7 bp, Unknown
  misc_feature (1)..( 7): Result.003 file - promoters60/4771348
gattcag

SEQ ID NO: 140117 - DNA, 7 bp, Unknown
  misc_feature (1)..( 7): Result.003 file - promoters60/4771348
gattcag

SEQ ID NO: 140118 - DNA, 7 bp, Unknown
  misc_feature (1)..( 7): Result.003 file - promoters60/4771348
gatggat

SEQ ID NO: 140119 - DNA, 7 bp, Unknown
  misc_feature (1)..( 7): Result.003 file - promoters60/4771348
gatcgat

SEQ ID NO: 140120 - DNA, 10 bp, Unknown
  misc_feature (1)..( 10): Result.003 file - promoters60/4771360
acaaacaaaa

SEQ ID NO: 140121 - DNA, 10 bp, Unknown
  misc_feature (1)..( 10): Result.003 file - promoters60/4771360
cggaacaaag

SEQ ID NO: 140122 - DNA, 10 bp, Unknown
  misc_feature (1)..( 10): Result.003 file - promoters60/4771360
ttcaacaaac

SEQ ID NO: 140123 - DNA, 10 bp, Unknown
  misc_feature (1)..( 10): Result.003 file - promoters60/4771360
aaaaacaatt

SEQ ID NO: 140124 - DNA, 10 bp, Unknown
  misc_feature (1)..( 10): Result.003 file - promoters60/4771360
ccaaaaaaaa

SEQ ID NO: 140125 - DNA, 10 bp, Unknown
  misc_feature (1)..( 10): Result.003 file - promoters60/4771360
ggaaaaaaca

SEQ ID NO: 140126 - DNA, 7 bp, Unknown
  misc_feature (1)..( 7): Result.003 file - promoters60/4771360
tttgttt

SEQ ID NO: 140127 - DNA, 7 bp, Unknown
  misc_feature (1)..( 7): Result.003 file - promoters60/4771360
tttattt

SEQ ID NO: 140128 - DNA, 7 bp, Unknown
  misc_feature (1)..( 7): Result.003 file - promoters60/4771360
tttattt

SEQ ID NO: 140129 - DNA, 7 bp, Unknown
  misc_feature (1)..( 7): Result.003 file - promoters60/4771360
tttgttc

SEQ ID NO: 140130 - DNA, 7 bp, Unknown
  misc_feature (1)..( 7): Result.003 file - promoters60/4771360
ttaattg

SEQ ID NO: 140131 - DNA, 7 bp, Unknown
  misc_feature (1)..( 7): Result.003 file - promoters60/4771360
cttattt

SEQ ID NO: 140132 - DNA, 13 bp, Unknown
  misc_feature (1)..( 13): Result.003 file - promoters60/4771360
acattattgcgtt

SEQ ID NO: 140133 - DNA, 13 bp, Unknown
  misc_feature (1)..( 13): Result.003 file - promoters60/4771360
acaatataagtta

SEQ ID NO: 140134 - DNA, 13 bp, Unknown
  misc_feature (1)..( 13): Result.003 file - promoters60/4771360
aaaataaaagtta

SEQ ID NO: 140135 - DNA, 13 bp, Unknown
  misc_feature (1)..( 13): Result.003 file - promoters60/4771360
ctaatataaataa

SEQ ID NO: 140136 - DNA, 13 bp, Unknown
  misc_feature (1)..( 13): Result.003 file - promoters60/4771360
ctaaggtaatggg

SEQ ID NO: 140137 - DNA, 13 bp, Unknown
  misc_feature (1)..( 13): Result.003 file - promoters60/4771360
acaaagttgtttt

SEQ ID NO: 140138 - DNA, 13 bp, Unknown
  misc_feature (1)..( 13): Result.003 file - promoters60/4771360
ccaaaaaaaagtc

SEQ ID NO: 140139 - DNA, 12 bp, Unknown
  misc_feature (1)..( 12): Result.003 file - promoters60/4771360
atactgtaattg

SEQ ID NO: 140140 - DNA, 12 bp, Unknown
  misc_feature (1)..( 12): Result.003 file - promoters60/4771360
tcgtgttaattg

SEQ ID NO: 140141 - DNA, 12 bp, Unknown
  misc_feature (1)..( 12): Result.003 file - promoters60/4771360
taaatttatttg

SEQ ID NO: 140142 - DNA, 12 bp, Unknown
  misc_feature (1)..( 12): Result.003 file - promoters60/4771360
tttatttattta

SEQ ID NO: 140143 - DNA, 12 bp, Unknown
  misc_feature (1)..( 12): Result.003 file - promoters60/4771360
acttcttatttt

SEQ ID NO: 140144 - DNA, 12 bp, Unknown
  misc_feature (1)..( 12): Result.003 file - promoters60/4771360
ttcatatctttg

SEQ ID NO: 140145 - DNA, 15 bp, Unknown
  misc_feature (1)..( 15): Result.003 file - promoters60/4771360
tattcaacgttgacg

SEQ ID NO: 140146 - DNA, 15 bp, Unknown
  misc_feature (1)..( 15): Result.003 file - promoters60/4771360
ccaacaaagttgttt

SEQ ID NO: 140147 - DNA, 15 bp, Unknown
  misc_feature (1)..( 15): Result.003 file - promoters60/4771360
caatataagttattt

SEQ ID NO: 140148 - DNA, 15 bp, Unknown
  misc_feature (1)..( 15): Result.003 file - promoters60/4771360
aaataaaagttaata

SEQ ID NO: 140149 - DNA, 15 bp, Unknown
  misc_feature (1)..( 15): Result.003 file - promoters60/4771360
gttcaaacgaaggag

SEQ ID NO: 140150 - DNA, 15 bp, Unknown
  misc_feature (1)..( 15): Result.003 file - promoters60/4771360
aatataaataatcaa

SEQ ID NO: 140151 - DNA, 15 bp, Unknown
  misc_feature (1)..( 15): Result.003 file - promoters60/4771360
aaaaaaaagtcttat

SEQ ID NO: 140152 - DNA, 7 bp, Unknown
  misc_feature (1)..( 7): Result.003 file - promoters60/4771385
tggtaaa

SEQ ID NO: 140153 - DNA, 7 bp, Unknown
  misc_feature (1)..( 7): Result.003 file - promoters60/4771385
tgggaaa

SEQ ID NO: 140154 - DNA, 7 bp, Unknown
  misc_feature (1)..( 7): Result.003 file - promoters60/4771385
ttcattt

SEQ ID NO: 140155 - DNA, 7 bp, Unknown
  misc_feature (1)..( 7): Result.003 file - promoters60/4771385
ttcgttt

SEQ ID NO: 140156 - DNA, 9 bp, Unknown
  misc_feature (1)..( 9): Result.003 file - promoters60/4771385
atgtttctc

SEQ ID NO: 140157 - DNA, 9 bp, Unknown
  misc_feature (1)..( 9): Result.003 file - promoters60/4771385
atgtttaat

SEQ ID NO: 140158 - DNA, 9 bp, Unknown
  misc_feature (1)..( 9): Result.003 file - promoters60/4771385
ctgttcctc

SEQ ID NO: 140159 - DNA, 9 bp, Unknown
  misc_feature (1)..( 9): Result.003 file - promoters60/4771385
tttgtgttt

SEQ ID NO: 140160 - DNA, 9 bp, Unknown
  misc_feature (1)..( 9): Result.003 file - promoters60/4771385
tttctgttt

SEQ ID NO: 140161 - DNA, 7 bp, Unknown
  misc_feature (1)..( 7): Result.003 file - promoters60/4771385
gttcctt

SEQ ID NO: 140162 - DNA, 7 bp, Unknown
  misc_feature (1)..( 7): Result.003 file - promoters60/4771385
gttcctt

SEQ ID NO: 140163 - DNA, 9 bp, Unknown
  misc_feature (1)..( 9): Result.003 file - promoters60/4771385
aactagaaa

SEQ ID NO: 140164 - DNA, 9 bp, Unknown
  misc_feature (1)..( 9): Result.003 file - promoters60/4771385
aacaagaaa

SEQ ID NO: 140165 - DNA, 11 bp, Unknown
  misc_feature (1)..( 11): Result.003 file - promoters60/4771385
tttttaagaac

SEQ ID NO: 140166 - DNA, 11 bp, Unknown
  misc_feature (1)..( 11): Result.003 file - promoters60/4771385
tttttaggaac

SEQ ID NO: 140167 - DNA, 8 bp, Unknown
  misc_feature (1)..( 8): Result.003 file - promoters60/4771385
gtcaccga

SEQ ID NO: 140168 - DNA, 8 bp, Unknown
  misc_feature (1)..( 8): Result.003 file - promoters60/4771385
gtcagcga

SEQ ID NO: 140169 - DNA, 7 bp, Unknown
  misc_feature (1)..( 7): Result.003 file - promoters60/4771385
tcccgtg

SEQ ID NO: 140170 - DNA, 7 bp, Unknown
  misc_feature (1)..( 7): Result.003 file - promoters60/4771385
tccagtg

SEQ ID NO: 140171 - DNA, 7 bp, Unknown
  misc_feature (1)..( 7): Result.003 file - promoters60/4771385
ataccct

SEQ ID NO: 140172 - DNA, 7 bp, Unknown
  misc_feature (1)..( 7): Result.003 file - promoters60/4771385
atatcct

SEQ ID NO: 140173 - DNA, 8 bp, Unknown
  misc_feature (1)..( 8): Result.003 file - promoters60/4771385
cttccaag

SEQ ID NO: 140174 - DNA, 8 bp, Unknown
  misc_feature (1)..( 8): Result.003 file - promoters60/4771385
cttcaaag

SEQ ID NO: 140175 - DNA, 6 bp, Unknown
  misc_feature (1)..( 6): Result.003 file - promoters60/4771385
caccaa

SEQ ID NO: 140176 - DNA, 6 bp, Unknown
  misc_feature (1)..( 6): Result.003 file - promoters60/4771385
caccaa

SEQ ID NO: 140177 - DNA, 12 bp, Unknown
  misc_feature (1)..( 12): Result.003 file - promoters60/4771385
atagagaagcaa

SEQ ID NO: 140178 - DNA, 12 bp, Unknown
  misc_feature (1)..( 12): Result.003 file - promoters60/4771385
atagagaaacaa

SEQ ID NO: 140179 - DNA, 8 bp, Unknown
  misc_feature (1)..( 8): Result.003 file - promoters60/4771385
gattgatg

SEQ ID NO: 140180 - DNA, 8 bp, Unknown
  misc_feature (1)..( 8): Result.003 file - promoters60/4771385
gatcgatg

SEQ ID NO: 140181 - DNA, 7 bp, Unknown
  misc_feature (1)..( 7): Result.003 file - promoters60/4771385
tggtgtt

SEQ ID NO: 140182 - DNA, 7 bp, Unknown
  misc_feature (1)..( 7): Result.003 file - promoters60/4771385
tggagtt

SEQ ID NO: 140183 - DNA, 10 bp, Unknown
  misc_feature (1)..( 10): Result.003 file - promoters60/4771385
atatagtata

SEQ ID NO: 140184 - DNA, 10 bp, Unknown
  misc_feature (1)..( 10): Result.003 file - promoters60/4771385
atatggtata

SEQ ID NO: 140185 - DNA, 7 bp, Unknown
  misc_feature (1)..( 7): Result.003 file - promoters60/4771385
gattaaa

SEQ ID NO: 140186 - DNA, 7 bp, Unknown
  misc_feature (1)..( 7): Result.003 file - promoters60/4771385
gatcaaa

SEQ ID NO: 140187 - DNA, 8 bp, Unknown
  misc_feature (1)..( 8): Result.003 file - promoters60/4771385
agtcagaa

SEQ ID NO: 140188 - DNA, 8 bp, Unknown
  misc_feature (1)..( 8): Result.003 file - promoters60/4771385
agttagaa

SEQ ID NO: 140189 - DNA, 7 bp, Unknown
  misc_feature (1)..( 7): Result.003 file - promoters60/4771385
tttcggt

SEQ ID NO: 140190 - DNA, 7 bp, Unknown
  misc_feature (1)..( 7): Result.003 file - promoters60/4771385
ttttggt

SEQ ID NO: 140191 - DNA, 8 bp, Unknown
  misc_feature (1)..( 8): Result.003 file - promoters60/4771407
tagaatat

SEQ ID NO: 140192 - DNA, 8 bp, Unknown
  misc_feature (1)..( 8): Result.003 file - promoters60/4771407
cagattat

SEQ ID NO: 140193 - DNA, 8 bp, Unknown
  misc_feature (1)..( 8): Result.003 file - promoters60/4771407
cagtttat

SEQ ID NO: 140194 - DNA, 12 bp, Unknown
  misc_feature (1)..( 12): Result.003 file - promoters60/4771407
atcagtcaattt

SEQ ID NO: 140195 - DNA, 12 bp, Unknown
  misc_feature (1)..( 12): Result.003 file - promoters60/4771407
aaatgtcatttt

SEQ ID NO: 140196 - DNA, 12 bp, Unknown
  misc_feature (1)..( 12): Result.003 file - promoters60/4771407
aaatgttatttg

SEQ ID NO: 140197 - DNA, 7 bp, Unknown
  misc_feature (1)..( 7): Result.003 file - promoters60/4771407
attgtgt

SEQ ID NO: 140198 - DNA, 7 bp, Unknown
  misc_feature (1)..( 7): Result.003 file - promoters60/4771407
attttgt

SEQ ID NO: 140199 - DNA, 7 bp, Unknown
  misc_feature (1)..( 7): Result.003 file - promoters60/4771407
attttga

SEQ ID NO: 140200 - DNA, 9 bp, Unknown
  misc_feature (1)..( 9): Result.003 file - promoters60/4771407
aaaggaaga

SEQ ID NO: 140201 - DNA, 9 bp, Unknown
  misc_feature (1)..( 9): Result.003 file - promoters60/4771407
aatggaaga

SEQ ID NO: 140202 - DNA, 9 bp, Unknown
  misc_feature (1)..( 9): Result.003 file - promoters60/4771407
aattgaaga

SEQ ID NO: 140203 - DNA, 11 bp, Unknown
  misc_feature (1)..( 11): Result.003 file - promoters60/4771407
gatttttgtta

SEQ ID NO: 140204 - DNA, 11 bp, Unknown
  misc_feature (1)..( 11): Result.003 file - promoters60/4771407
gatttttgtta

SEQ ID NO: 140205 - DNA, 11 bp, Unknown
  misc_feature (1)..( 11): Result.003 file - promoters60/4771407
gattttgaatt

SEQ ID NO: 140206 - DNA, 11 bp, Unknown
  misc_feature (1)..( 11): Result.003 file - promoters60/4771410
aacctatattt

SEQ ID NO: 140207 - DNA, 11 bp, Unknown
  misc_feature (1)..( 11): Result.003 file - promoters60/4771410
tccctttataa

SEQ ID NO: 140208 - DNA, 11 bp, Unknown
  misc_feature (1)..( 11): Result.003 file - promoters60/4771410
tcactatatat

SEQ ID NO: 140209 - DNA, 11 bp, Unknown
  misc_feature (1)..( 11): Result.003 file - promoters60/4771410
gggttttctaa

SEQ ID NO: 140210 - DNA, 11 bp, Unknown
  misc_feature (1)..( 11): Result.003 file - promoters60/4771410
cttatttatga

SEQ ID NO: 140211 - DNA, 11 bp, Unknown
  misc_feature (1)..( 11): Result.003 file - promoters60/4771410
cttatatataa

SEQ ID NO: 140212 - DNA, 6 bp, Unknown
  misc_feature (1)..( 6): Result.003 file - promoters60/4771426
atattg

SEQ ID NO: 140213 - DNA, 6 bp, Unknown
  misc_feature (1)..( 6): Result.003 file - promoters60/4771426
atattg

SEQ ID NO: 140214 - DNA, 10 bp, Unknown
  misc_feature (1)..( 10): Result.003 file - promoters60/4771426
attacaatat

SEQ ID NO: 140215 - DNA, 10 bp, Unknown
  misc_feature (1)..( 10): Result.003 file - promoters60/4771426
attacaatat

SEQ ID NO: 140216 - DNA, 25 bp, Unknown
  misc_feature (1)..( 25): Result.003 file - promoters60/4771426
aaagttgcttcaaattatagattct

SEQ ID NO: 140217 - DNA, 25 bp, Unknown
  misc_feature (1)..( 25): Result.003 file - promoters60/4771426
aaagttgctacaaattatagattct

SEQ ID NO: 140218 - DNA, 25 bp, Unknown
  misc_feature (1)..( 25): Result.003 file - promoters60/4771426
gagtttgctagcatcaataatcaca

SEQ ID NO: 140219 - DNA, 22 bp, Unknown
  misc_feature (1)..( 22): Result.003 file - promoters60/4771426
tcttttctgattttgtttctca

SEQ ID NO: 140220 - DNA, 22 bp, Unknown
  misc_feature (1)..( 22): Result.003 file - promoters60/4771426
tcttttctgatattgtttctca

SEQ ID NO: 140221 - DNA, 22 bp, Unknown
  misc_feature (1)..( 22): Result.003 file - promoters60/4771426
atgtatcttattttgagaggtc

SEQ ID NO: 140222 - DNA, 7 bp, Unknown
  misc_feature (1)..( 7): Result.003 file - promoters60/4771426
taccaaa

SEQ ID NO: 140223 - DNA, 7 bp, Unknown
  misc_feature (1)..( 7): Result.003 file - promoters60/4771426
taccaaa

SEQ ID NO: 140224 - DNA, 8 bp, Unknown
  misc_feature (1)..( 8): Result.003 file - promoters60/4771426
caatgtga

SEQ ID NO: 140225 - DNA, 8 bp, Unknown
  misc_feature (1)..( 8): Result.003 file - promoters60/4771426
caatatga

SEQ ID NO: 140226 - DNA, 7 bp, Unknown
  misc_feature (1)..( 7): Result.003 file - promoters60/4771426
ctcaaat

SEQ ID NO: 140227 - DNA, 7 bp, Unknown
  misc_feature (1)..( 7): Result.003 file - promoters60/4771426
ctcaaat

SEQ ID NO: 140228 - DNA, 7 bp, Unknown
  misc_feature (1)..( 7): Result.003 file - promoters60/4771426
aaatata

SEQ ID NO: 140229 - DNA, 7 bp, Unknown
  misc_feature (1)..( 7): Result.003 file - promoters60/4771426
aaatata

SEQ ID NO: 140230 - DNA, 7 bp, Unknown
  misc_feature (1)..( 7): Result.003 file - promoters60/4771426
aaatata

SEQ ID NO: 140231 - DNA, 7 bp, Unknown
  misc_feature (1)..( 7): Result.003 file - promoters60/4771426
ttcaatg

SEQ ID NO: 140232 - DNA, 7 bp, Unknown
  misc_feature (1)..( 7): Result.003 file - promoters60/4771426
ttcaatg

SEQ ID NO: 140233 - DNA, 7 bp, Unknown
  misc_feature (1)..( 7): Result.003 file - promoters60/4771426
caattct

SEQ ID NO: 140234 - DNA, 7 bp, Unknown
  misc_feature (1)..( 7): Result.003 file - promoters60/4771426
caaatct

SEQ ID NO: 140235 - DNA, 7 bp, Unknown
  misc_feature (1)..( 7): Result.003 file - promoters60/4771426
aattctt

SEQ ID NO: 140236 - DNA, 7 bp, Unknown
  misc_feature (1)..( 7): Result.003 file - promoters60/4771426
aattctt

SEQ ID NO: 140237 - DNA, 8 bp, Unknown
  misc_feature (1)..( 8): Result.003 file - promoters60/4771426
tcttttct

SEQ ID NO: 140238 - DNA, 8 bp, Unknown
  misc_feature (1)..( 8): Result.003 file - promoters60/4771426
tcttttct

SEQ ID NO: 140239 - DNA, 8 bp, Unknown
  misc_feature (1)..( 8): Result.003 file - promoters60/4771426
aataaaat

SEQ ID NO: 140240 - DNA, 8 bp, Unknown
  misc_feature (1)..( 8): Result.003 file - promoters60/4771426
gataaaat

SEQ ID NO: 140241 - DNA, 8 bp, Unknown
  misc_feature (1)..( 8): Result.003 file - promoters60/4771426
gataaatt

SEQ ID NO: 140242 - DNA, 6 bp, Unknown
  misc_feature (1)..( 6): Result.003 file - promoters60/4771426
atagga

SEQ ID NO: 140243 - DNA, 6 bp, Unknown
  misc_feature (1)..( 6): Result.003 file - promoters60/4771426
atagga

SEQ ID NO: 140244 - DNA, 6 bp, Unknown
  misc_feature (1)..( 6): Result.003 file - promoters60/4771426
atagga

SEQ ID NO: 140245 - DNA, 6 bp, Unknown
  misc_feature (1)..( 6): Result.003 file - promoters60/4771426
atagga

SEQ ID NO: 140246 - DNA, 6 bp, Unknown
  misc_feature (1)..( 6): Result.003 file - promoters60/4771426
atagga

SEQ ID NO: 140247 - DNA, 8 bp, Unknown
  misc_feature (1)..( 8): Result.003 file - promoters60/4771426
ataatatt

SEQ ID NO: 140248 - DNA, 8 bp, Unknown
  misc_feature (1)..( 8): Result.003 file - promoters60/4771426
ataaaatt

SEQ ID NO: 140249 - DNA, 8 bp, Unknown
  misc_feature (1)..( 8): Result.003 file - promoters60/4771426
ataaaata

SEQ ID NO: 140250 - DNA, 6 bp, Unknown
  misc_feature (1)..( 6): Result.003 file - promoters60/4771426
aaaaaa

SEQ ID NO: 140251 - DNA, 6 bp, Unknown
  misc_feature (1)..( 6): Result.003 file - promoters60/4771426
aaaaaa

SEQ ID NO: 140252 - DNA, 12 bp, Unknown
  misc_feature (1)..( 12): Result.003 file - promoters60/4771426
aaaaaataaaaa

SEQ ID NO: 140253 - DNA, 12 bp, Unknown
  misc_feature (1)..( 12): Result.003 file - promoters60/4771426
aaaaattaaaaa

SEQ ID NO: 140254 - DNA, 12 bp, Unknown
  misc_feature (1)..( 12): Result.003 file - promoters60/4771426
ctcaaataaaat

SEQ ID NO: 140255 - DNA, 7 bp, Unknown
  misc_feature (1)..( 7): Result.003 file - promoters60/4771426
gcataaa

SEQ ID NO: 140256 - DNA, 7 bp, Unknown
  misc_feature (1)..( 7): Result.003 file - promoters60/4771426
gcacaaa

SEQ ID NO: 140257 - DNA, 6 bp, Unknown
  misc_feature (1)..( 6): Result.003 file - promoters60/4771426
ttgata

SEQ ID NO: 140258 - DNA, 6 bp, Unknown
  misc_feature (1)..( 6): Result.003 file - promoters60/4771426
ttgata

SEQ ID NO: 140259 - DNA, 7 bp, Unknown
  misc_feature (1)..( 7): Result.003 file - promoters60/4771426
tttccta

SEQ ID NO: 140260 - DNA, 7 bp, Unknown
  misc_feature (1)..( 7): Result.003 file - promoters60/4771426
tttgcta

SEQ ID NO: 140261 - DNA, 9 bp, Unknown
  misc_feature (1)..( 9): Result.003 file - promoters60/4771426
aaaaataaa

SEQ ID NO: 140262 - DNA, 9 bp, Unknown
  misc_feature (1)..( 9): Result.003 file - promoters60/4771426
aaatataaa

SEQ ID NO: 140263 - DNA, 9 bp, Unknown
  misc_feature (1)..( 9): Result.003 file - promoters60/4771426
aaataaaaa

SEQ ID NO: 140264 - DNA, 9 bp, Unknown
  misc_feature (1)..( 9): Result.003 file - promoters60/4771426
aaacaaaaa

SEQ ID NO: 140265 - DNA, 8 bp, Unknown
  misc_feature (1)..( 8): Result.003 file - promoters60/4771426
ctaaatat

SEQ ID NO: 140266 - DNA, 8 bp, Unknown
  misc_feature (1)..( 8): Result.003 file - promoters60/4771426
ctatatat

SEQ ID NO: 140267 - DNA, 6 bp, Unknown
  misc_feature (1)..( 6): Result.003 file - promoters60/4771426
aaatta

SEQ ID NO: 140268 - DNA, 6 bp, Unknown
  misc_feature (1)..( 6): Result.003 file - promoters60/4771426
aaatta

SEQ ID NO: 140269 - DNA, 7 bp, Unknown
  misc_feature (1)..( 7): Result.003 file - promoters60/4771441
atttttt

SEQ ID NO: 140270 - DNA, 7 bp, Unknown
  misc_feature (1)..( 7): Result.003 file - promoters60/4771441
gtttttt

SEQ ID NO: 140271 - DNA, 8 bp, Unknown
  misc_feature (1)..( 8): Result.003 file - promoters60/4771441
gtttgttt

SEQ ID NO: 140272 - DNA, 10 bp, Unknown
  misc_feature (1)..( 10): Result.003 file - promoters60/4771441
gtttctcatt

SEQ ID NO: 140273 - DNA, 10 bp, Unknown
  misc_feature (1)..( 10): Result.003 file - promoters60/4771441
ttttttcatt

SEQ ID NO: 140274 - DNA, 10 bp, Unknown
  misc_feature (1)..( 10): Result.003 file - promoters60/4771441
gtttgtttat

SEQ ID NO: 140275 - DNA, 10 bp, Unknown
  misc_feature (1)..( 10): Result.003 file - promoters60/4771441
tctattcttt

SEQ ID NO: 140276 - DNA, 10 bp, Unknown
  misc_feature (1)..( 10): Result.003 file - promoters60/4771441
cgaatttttt

SEQ ID NO: 140277 - DNA, 10 bp, Unknown
  misc_feature (1)..( 10): Result.003 file - promoters60/4771441
tctaatctca

SEQ ID NO: 140278 - DNA, 7 bp, Unknown
  misc_feature (1)..( 7): Result.003 file - promoters60/4771441
tttaata

SEQ ID NO: 140279 - DNA, 7 bp, Unknown
  misc_feature (1)..( 7): Result.003 file - promoters60/4771441
ttttata

SEQ ID NO: 140280 - DNA, 8 bp, Unknown
  misc_feature (1)..( 8): Result.003 file - promoters60/4771441
catgtact

SEQ ID NO: 140281 - DNA, 8 bp, Unknown
  misc_feature (1)..( 8): Result.003 file - promoters60/4771441
catatact

SEQ ID NO: 140282 - DNA, 15 bp, Unknown
  misc_feature (1)..( 15): Result.003 file - promoters60/4771441
ctatataatagtagc

SEQ ID NO: 140283 - DNA, 15 bp, Unknown
  misc_feature (1)..( 15): Result.003 file - promoters60/4771441
ctatataatggtagc

SEQ ID NO: 140284 - DNA, 6 bp, Unknown
  misc_feature (1)..( 6): Result.003 file - promoters60/4771441
catttt

SEQ ID NO: 140285 - DNA, 6 bp, Unknown
  misc_feature (1)..( 6): Result.003 file - promoters60/4771441
catttt

SEQ ID NO: 140286 - DNA, 7 bp, Unknown
  misc_feature (1)..( 7): Result.003 file - promoters60/4771441
ataccca

SEQ ID NO: 140287 - DNA, 7 bp, Unknown
  misc_feature (1)..( 7): Result.003 file - promoters60/4771441
ataacca

SEQ ID NO: 140288 - DNA, 6 bp, Unknown
  misc_feature (1)..( 6): Result.003 file - promoters60/4771441
ttatat

SEQ ID NO: 140289 - DNA, 6 bp, Unknown
  misc_feature (1)..( 6): Result.003 file - promoters60/4771441
ttatat

SEQ ID NO: 140290 - DNA, 7 bp, Unknown
  misc_feature (1)..( 7): Result.003 file - promoters60/4771441
tcaatat

SEQ ID NO: 140291 - DNA, 7 bp, Unknown
  misc_feature (1)..( 7): Result.003 file - promoters60/4771441
tcaatat

SEQ ID NO: 140292 - DNA, 6 bp, Unknown
  misc_feature (1)..( 6): Result.003 file - promoters60/4771441
ttgctt

SEQ ID NO: 140293 - DNA, 6 bp, Unknown
  misc_feature (1)..( 6): Result.003 file - promoters60/4771441
ttgctt

SEQ ID NO: 140294 - DNA, 8 bp, Unknown
  misc_feature (1)..( 8): Result.003 file - promoters60/4771441
tatcatgt

SEQ ID NO: 140295 - DNA, 8 bp, Unknown
  misc_feature (1)..( 8): Result.003 file - promoters60/4771441
tataatgt

SEQ ID NO: 140296 - DNA, 7 bp, Unknown
  misc_feature (1)..( 7): Result.003 file - promoters60/4771441
ctatttt

SEQ ID NO: 140297 - DNA, 7 bp, Unknown
  misc_feature (1)..( 7): Result.003 file - promoters60/4771441
ctatttt

SEQ ID NO: 140298 - DNA, 6 bp, Unknown
  misc_feature (1)..( 6): Result.003 file - promoters60/4771441
cagaaa

SEQ ID NO: 140299 - DNA, 6 bp, Unknown
  misc_feature (1)..( 6): Result.003 file - promoters60/4771441
cagaaa

SEQ ID NO: 140300 - DNA, 6 bp, Unknown
  misc_feature (1)..( 6): Result.003 file - promoters60/4771441
aaagag

SEQ ID NO: 140301 - DNA, 6 bp, Unknown
  misc_feature (1)..( 6): Result.003 file - promoters60/4771441
aaagag

SEQ ID NO: 140302 - DNA, 6 bp, Unknown
  misc_feature (1)..( 6): Result.003 file - promoters60/4771441
ctgaaa

SEQ ID NO: 140303 - DNA, 6 bp, Unknown
  misc_feature (1)..( 6): Result.003 file - promoters60/4771441
ctgaaa

SEQ ID NO: 140304 - DNA, 12 bp, Unknown
  misc_feature (1)..( 12): Result.003 file - promoters60/4771457
ataaaacctaaa

SEQ ID NO: 140305 - DNA, 12 bp, Unknown
  misc_feature (1)..( 12): Result.003 file - promoters60/4771457
caaaaacctgtg

SEQ ID NO: 140306 - DNA, 12 bp, Unknown
  misc_feature (1)..( 12): Result.003 file - promoters60/4771457
ataagaccgaaa

SEQ ID NO: 140307 - DNA, 7 bp, Unknown
  misc_feature (1)..( 7): Result.003 file - promoters60/4771457
atttctt

SEQ ID NO: 140308 - DNA, 7 bp, Unknown
  misc_feature (1)..( 7): Result.003 file - promoters60/4771457
attcctt

SEQ ID NO: 140309 - DNA, 7 bp, Unknown
  misc_feature (1)..( 7): Result.003 file - promoters60/4771457
cttcctt

SEQ ID NO: 140310 - DNA, 10 bp, Unknown
  misc_feature (1)..( 10): Result.003 file - promoters60/4771457
ggtttatttt

SEQ ID NO: 140311 - DNA, 10 bp, Unknown
  misc_feature (1)..( 10): Result.003 file - promoters60/4771457
ggtttattca

SEQ ID NO: 140312 - DNA, 10 bp, Unknown
  misc_feature (1)..( 10): Result.003 file - promoters60/4771457
attttatttt

SEQ ID NO: 140313 - DNA, 15 bp, Unknown
  misc_feature (1)..( 15): Result.003 file - promoters60/4771464
tctctgttctgaaac

SEQ ID NO: 140314 - DNA, 15 bp, Unknown
  misc_feature (1)..( 15): Result.003 file - promoters60/4771464
atttggttttgaagc

SEQ ID NO: 140315 - DNA, 15 bp, Unknown
  misc_feature (1)..( 15): Result.003 file - promoters60/4771464
tctttgttctttttg

SEQ ID NO: 140316 - DNA, 15 bp, Unknown
  misc_feature (1)..( 15): Result.003 file - promoters60/4771464
atattgttttgaaaa

SEQ ID NO: 140317 - DNA, 15 bp, Unknown
  misc_feature (1)..( 15): Result.003 file - promoters60/4771464
ggcaaatgttgcaaa

SEQ ID NO: 140318 - DNA, 15 bp, Unknown
  misc_feature (1)..( 15): Result.003 file - promoters60/4771464
taaaatgtctatgtg

SEQ ID NO: 140319 - DNA, 8 bp, Unknown
  misc_feature (1)..( 8): Result.003 file - promoters60/4771467
aaatatgt

SEQ ID NO: 140320 - DNA, 8 bp, Unknown
  misc_feature (1)..( 8): Result.003 file - promoters60/4771467
aaaaatgt

SEQ ID NO: 140321 - DNA, 7 bp, Unknown
  misc_feature (1)..( 7): Result.003 file - promoters60/4771467
ttcaatt

SEQ ID NO: 140322 - DNA, 7 bp, Unknown
  misc_feature (1)..( 7): Result.003 file - promoters60/4771467
ttcaatt

SEQ ID NO: 140323 - DNA, 9 bp, Unknown
  misc_feature (1)..( 9): Result.003 file - promoters60/4771467
tataatttg

SEQ ID NO: 140324 - DNA, 9 bp, Unknown
  misc_feature (1)..( 9): Result.003 file - promoters60/4771467
cataatttg

SEQ ID NO: 140325 - DNA, 9 bp, Unknown
  misc_feature (1)..( 9): Result.003 file - promoters60/4771467
tattattac

SEQ ID NO: 140326 - DNA, 7 bp, Unknown
  misc_feature (1)..( 7): Result.003 file - promoters60/4771467
tatgaaa

SEQ ID NO: 140327 - DNA, 7 bp, Unknown
  misc_feature (1)..( 7): Result.003 file - promoters60/4771467
tataaaa

SEQ ID NO: 140328 - DNA, 7 bp, Unknown
  misc_feature (1)..( 7): Result.003 file - promoters60/4771467
tgaatat

SEQ ID NO: 140329 - DNA, 7 bp, Unknown
  misc_feature (1)..( 7): Result.003 file - promoters60/4771467
tgattat

SEQ ID NO: 140330 - DNA, 7 bp, Unknown
  misc_feature (1)..( 7): Result.003 file - promoters60/4771467
aaaacaa

SEQ ID NO: 140331 - DNA, 7 bp, Unknown
  misc_feature (1)..( 7): Result.003 file - promoters60/4771467
aaaccaa

SEQ ID NO: 140332 - DNA, 7 bp, Unknown
  misc_feature (1)..( 7): Result.003 file - promoters60/4771467
atatcaa

SEQ ID NO: 140333 - DNA, 7 bp, Unknown
  misc_feature (1)..( 7): Result.003 file - promoters60/4771467
ataccaa

SEQ ID NO: 140334 - DNA, 6 bp, Unknown
  misc_feature (1)..( 6): Result.003 file - promoters60/4771467
aaaaat

SEQ ID NO: 140335 - DNA, 6 bp, Unknown
  misc_feature (1)..( 6): Result.003 file - promoters60/4771467
aaaaat

SEQ ID NO: 140336 - DNA, 7 bp, Unknown
  misc_feature (1)..( 7): Result.003 file - promoters60/4771467
aagaaag

SEQ ID NO: 140337 - DNA, 7 bp, Unknown
  misc_feature (1)..( 7): Result.003 file - promoters60/4771467
aagaaag

SEQ ID NO: 140338 - DNA, 7 bp, Unknown
  misc_feature (1)..( 7): Result.003 file - promoters60/4771467
tcataat

SEQ ID NO: 140339 - DNA, 7 bp, Unknown
  misc_feature (1)..( 7): Result.003 file - promoters60/4771467
tcataat

SEQ ID NO: 140340 - DNA, 6 bp, Unknown
  misc_feature (1)..( 6): Result.003 file - promoters60/4771467
attgtt

SEQ ID NO: 140341 - DNA, 6 bp, Unknown
  misc_feature (1)..( 6): Result.003 file - promoters60/4771467
attgtt

SEQ ID NO: 140342 - DNA, 8 bp, Unknown
  misc_feature (1)..( 8): Result.003 file - promoters60/4771472
caaatgtg

SEQ ID NO: 140343 - DNA, 8 bp, Unknown
  misc_feature (1)..( 8): Result.003 file - promoters60/4771472
ctaatgtg

SEQ ID NO: 140344 - DNA, 8 bp, Unknown
  misc_feature (1)..( 8): Result.003 file - promoters60/4771472
caaatgtc

SEQ ID NO: 140345 - DNA, 9 bp, Unknown
  misc_feature (1)..( 9): Result.003 file - promoters60/4771472
tcttctttg

SEQ ID NO: 140346 - DNA, 9 bp, Unknown
  misc_feature (1)..( 9): Result.003 file - promoters60/4771472
tcttcttta

SEQ ID NO: 140347 - DNA, 9 bp, Unknown
  misc_feature (1)..( 9): Result.003 file - promoters60/4771472
tcttcctta

SEQ ID NO: 140348 - DNA, 9 bp, Unknown
  misc_feature (1)..( 9): Result.003 file - promoters60/4771472
atacatcta

SEQ ID NO: 140349 - DNA, 9 bp, Unknown
  misc_feature (1)..( 9): Result.003 file - promoters60/4771472
ataaatcta

SEQ ID NO: 140350 - DNA, 9 bp, Unknown
  misc_feature (1)..( 9): Result.003 file - promoters60/4771472
ataaattct

SEQ ID NO: 140351 - DNA, 10 bp, Unknown
  misc_feature (1)..( 10): Result.003 file - promoters60/4771472
tgtatcgtaa

SEQ ID NO: 140352 - DNA, 10 bp, Unknown
  misc_feature (1)..( 10): Result.003 file - promoters60/4771472
tgtttcgctc

SEQ ID NO: 140353 - DNA, 10 bp, Unknown
  misc_feature (1)..( 10): Result.003 file - promoters60/4771472
gatatagtaa

SEQ ID NO: 140354 - DNA, 8 bp, Unknown
  misc_feature (1)..( 8): Result.003 file - promoters60/4771472
aagttttc

SEQ ID NO: 140355 - DNA, 8 bp, Unknown
  misc_feature (1)..( 8): Result.003 file - promoters60/4771472
aaggtttt

SEQ ID NO: 140356 - DNA, 8 bp, Unknown
  misc_feature (1)..( 8): Result.003 file - promoters60/4771472
agggtttt

SEQ ID NO: 140357 - DNA, 21 bp, Unknown
  misc_feature (1)..( 21): Result.003 file - promoters60/4771472
aacggctaatttctccttttt

SEQ ID NO: 140358 - DNA, 21 bp, Unknown
  misc_feature (1)..( 21): Result.003 file - promoters60/4771472
aacggctagtttctcttcttc

SEQ ID NO: 140359 - DNA, 21 bp, Unknown
  misc_feature (1)..( 21): Result.003 file - promoters60/4771472
tagaaactttttctcttcttc

SEQ ID NO: 140360 - DNA, 12 bp, Unknown
  misc_feature (1)..( 12): Result.003 file - promoters60/4771472
aatttctccttt

SEQ ID NO: 140361 - DNA, 12 bp, Unknown
  misc_feature (1)..( 12): Result.003 file - promoters60/4771472
tttctcttcttc

SEQ ID NO: 140362 - DNA, 12 bp, Unknown
  misc_feature (1)..( 12): Result.003 file - promoters60/4771472
tttctcttcttc

SEQ ID NO: 140363 - DNA, 7 bp, Unknown
  misc_feature (1)..( 7): Result.003 file - promoters60/4771472
caattta

SEQ ID NO: 140364 - DNA, 7 bp, Unknown
  misc_feature (1)..( 7): Result.003 file - promoters60/4771472
aaattta

SEQ ID NO: 140365 - DNA, 8 bp, Unknown
  misc_feature (1)..( 8): Result.003 file - promoters60/4771472
aaacttta

SEQ ID NO: 140366 - DNA, 12 bp, Unknown
  misc_feature (1)..( 12): Result.003 file - promoters60/4771472
ttttttttttgt

SEQ ID NO: 140367 - DNA, 12 bp, Unknown
  misc_feature (1)..( 12): Result.003 file - promoters60/4771472
tttattttctgt

SEQ ID NO: 140368 - DNA, 12 bp, Unknown
  misc_feature (1)..( 12): Result.003 file - promoters60/4771472
agtgtattctgt

SEQ ID NO: 140369 - DNA, 13 bp, Unknown
  misc_feature (1)..( 13): Result.003 file - promoters60/4771478
tatttagttaaaa

SEQ ID NO: 140370 - DNA, 13 bp, Unknown
  misc_feature (1)..( 13): Result.003 file - promoters60/4771478
aattttgtttttg

SEQ ID NO: 140371 - DNA, 14 bp, Unknown
  misc_feature (1)..( 14): Result.003 file - promoters60/4771478
tttgttagttcaaa

SEQ ID NO: 140372 - DNA, 14 bp, Unknown
  misc_feature (1)..( 14): Result.003 file - promoters60/4771478
ggggtttgttgttg

SEQ ID NO: 140373 - DNA, 13 bp, Unknown
  misc_feature (1)..( 13): Result.003 file - promoters60/4771478
aatttttctgttc

SEQ ID NO: 140374 - DNA, 14 bp, Unknown
  misc_feature (1)..( 14): Result.003 file - promoters60/4771478
tattattctctgca

SEQ ID NO: 140375 - DNA, 14 bp, Unknown
  misc_feature (1)..( 14): Result.003 file - promoters60/4771478
catttttctgatga

SEQ ID NO: 140376 - DNA, 14 bp, Unknown
  misc_feature (1)..( 14): Result.003 file - promoters60/4771478
ctaagaaaccctag

SEQ ID NO: 140377 - DNA, 14 bp, Unknown
  misc_feature (1)..( 14): Result.003 file - promoters60/4771478
tatataaatccttc

SEQ ID NO: 140378 - DNA, 14 bp, Unknown
  misc_feature (1)..( 14): Result.003 file - promoters60/4771478
actataaattcttc

SEQ ID NO: 140379 - DNA, 14 bp, Unknown
  misc_feature (1)..( 14): Result.003 file - promoters60/4771478
tttatgaatccata

SEQ ID NO: 140380 - DNA, 14 bp, Unknown
  misc_feature (1)..( 14): Result.003 file - promoters60/4771478
catataaatgaggg

SEQ ID NO: 140381 - DNA, 14 bp, Unknown
  misc_feature (1)..( 14): Result.003 file - promoters60/4771478
actataaattcaat

SEQ ID NO: 140382 - DNA, 9 bp, Unknown
  misc_feature (1)..( 9): Result.003 file - promoters60/4771478
ggtttttat

SEQ ID NO: 140383 - DNA, 9 bp, Unknown
  misc_feature (1)..( 9): Result.003 file - promoters60/4771478
tctttttac

SEQ ID NO: 140384 - DNA, 9 bp, Unknown
  misc_feature (1)..( 9): Result.003 file - promoters60/4771478
tgttgttac

SEQ ID NO: 140385 - DNA, 9 bp, Unknown
  misc_feature (1)..( 9): Result.003 file - promoters60/4771478
aatttttat

SEQ ID NO: 140386 - DNA, 9 bp, Unknown
  misc_feature (1)..( 9): Result.003 file - promoters60/4771478
tcttgttaa

SEQ ID NO: 140387 - DNA, 9 bp, Unknown
  misc_feature (1)..( 9): Result.003 file - promoters60/4771478
gcttattaa

SEQ ID NO: 140388 - DNA, 9 bp, Unknown
  misc_feature (1)..( 9): Result.003 file - promoters60/4771478
cattttttt

SEQ ID NO: 140389 - DNA, 9 bp, Unknown
  misc_feature (1)..( 9): Result.003 file - promoters60/4771478
aatttttct

SEQ ID NO: 140390 - DNA, 10 bp, Unknown
  misc_feature (1)..( 10): Result.003 file - promoters60/4771478
tttttgtttc

SEQ ID NO: 140391 - DNA, 10 bp, Unknown
  misc_feature (1)..( 10): Result.003 file - promoters60/4771478
catttttctg

SEQ ID NO: 140392 - DNA, 10 bp, Unknown
  misc_feature (1)..( 10): Result.003 file - promoters60/4771478
cgtttttttt

SEQ ID NO: 140393 - DNA, 10 bp, Unknown
  misc_feature (1)..( 10): Result.003 file - promoters60/4771478
aattttatat

SEQ ID NO: 140394 - DNA, 9 bp, Unknown
  misc_feature (1)..( 9): Result.003 file - promoters60/4771495
ttcttagta

SEQ ID NO: 140395 - DNA, 9 bp, Unknown
  misc_feature (1)..( 9): Result.003 file - promoters60/4771495
ttcttaagg

SEQ ID NO: 140396 - DNA, 9 bp, Unknown
  misc_feature (1)..( 9): Result.003 file - promoters60/4771495
ttcataaat

SEQ ID NO: 140397 - DNA, 9 bp, Unknown
  misc_feature (1)..( 9): Result.003 file - promoters60/4771495
cacataaac

SEQ ID NO: 140398 - DNA, 9 bp, Unknown
  misc_feature (1)..( 9): Result.003 file - promoters60/4771495
tacataaaa

SEQ ID NO: 140399 - DNA, 9 bp, Unknown
  misc_feature (1)..( 9): Result.003 file - promoters60/4771495
gccattaat

SEQ ID NO: 140400 - DNA, 9 bp, Unknown
  misc_feature (1)..( 9): Result.003 file - promoters60/4771495
atcattaat

SEQ ID NO: 140401 - DNA, 13 bp, Unknown
  misc_feature (1)..( 13): Result.003 file - promoters60/4771495
ttgttaggataga

SEQ ID NO: 140402 - DNA, 13 bp, Unknown
  misc_feature (1)..( 13): Result.003 file - promoters60/4771495
tcttaaggatatc

SEQ ID NO: 140403 - DNA, 13 bp, Unknown
  misc_feature (1)..( 13): Result.003 file - promoters60/4771495
ttttaaagatttt

SEQ ID NO: 140404 - DNA, 13 bp, Unknown
  misc_feature (1)..( 13): Result.003 file - promoters60/4771495
aaacaaaaattat

SEQ ID NO: 140405 - DNA, 13 bp, Unknown
  misc_feature (1)..( 13): Result.003 file - promoters60/4771495
ctaaaaaaatcct

SEQ ID NO: 140406 - DNA, 13 bp, Unknown
  misc_feature (1)..( 13): Result.003 file - promoters60/4771495
aactacaaatatc

SEQ ID NO: 140407 - DNA, 15 bp, Unknown
  misc_feature (1)..( 15): Result.003 file - promoters60/4771495
tttattgttacaaat

SEQ ID NO: 140408 - DNA, 15 bp, Unknown
  misc_feature (1)..( 15): Result.003 file - promoters60/4771495
tttaatgttactaat

SEQ ID NO: 140409 - DNA, 16 bp, Unknown
  misc_feature (1)..( 16): Result.003 file - promoters60/4771495
ggagctatcaacaaat

SEQ ID NO: 140410 - DNA, 15 bp, Unknown
  misc_feature (1)..( 15): Result.003 file - promoters60/4771495
aatattgttttatga

SEQ ID NO: 140411 - DNA, 16 bp, Unknown
  misc_feature (1)..( 16): Result.003 file - promoters60/4771495
cttctctcttaaaaaa

SEQ ID NO: 140412 - DNA, 16 bp, Unknown
  misc_feature (1)..( 16): Result.003 file - promoters60/4771495
gattttgattttctca

SEQ ID NO: 140413 - DNA, 7 bp, Unknown
  misc_feature (1)..( 7): Result.003 file - promoters60/4771502
attattt

SEQ ID NO: 140414 - DNA, 7 bp, Unknown
  misc_feature (1)..( 7): Result.003 file - promoters60/4771502
attattt

SEQ ID NO: 140415 - DNA, 7 bp, Unknown
  misc_feature (1)..( 7): Result.003 file - promoters60/4771502
caatttt

SEQ ID NO: 140416 - DNA, 7 bp, Unknown
  misc_feature (1)..( 7): Result.003 file - promoters60/4771502
taatttt

SEQ ID NO: 140417 - DNA, 7 bp, Unknown
  misc_feature (1)..( 7): Result.003 file - promoters60/4771502
caatttg

SEQ ID NO: 140418 - DNA, 13 bp, Unknown
  misc_feature (1)..( 13): Result.003 file - promoters60/4771502
ataaattacattt

SEQ ID NO: 140419 - DNA, 13 bp, Unknown
  misc_feature (1)..( 13): Result.003 file - promoters60/4771502
atatatttcattt

SEQ ID NO: 140420 - DNA, 13 bp, Unknown
  misc_feature (1)..( 13): Result.003 file - promoters60/4771502
aggtctttccttt

SEQ ID NO: 140421 - DNA, 8 bp, Unknown
  misc_feature (1)..( 8): Result.003 file - promoters60/4771502
taatcgat

SEQ ID NO: 140422 - DNA, 8 bp, Unknown
  misc_feature (1)..( 8): Result.003 file - promoters60/4771502
taatggat

SEQ ID NO: 140423 - DNA, 6 bp, Unknown
  misc_feature (1)..( 6): Result.003 file - promoters60/4771502
gtaatt

SEQ ID NO: 140424 - DNA, 6 bp, Unknown
  misc_feature (1)..( 6): Result.003 file - promoters60/4771502
gtaatt

SEQ ID NO: 140425 - DNA, 7 bp, Unknown
  misc_feature (1)..( 7): Result.003 file - promoters60/4771502
tttgata

SEQ ID NO: 140426 - DNA, 7 bp, Unknown
  misc_feature (1)..( 7): Result.003 file - promoters60/4771502
tttaata

SEQ ID NO: 140427 - DNA, 8 bp, Unknown
  misc_feature (1)..( 8): Result.003 file - promoters60/4771502
tttggttt

SEQ ID NO: 140428 - DNA, 8 bp, Unknown
  misc_feature (1)..( 8): Result.003 file - promoters60/4771502
ttttgttt

SEQ ID NO: 140429 - DNA, 6 bp, Unknown
  misc_feature (1)..( 6): Result.003 file - promoters60/4771502
attgga

SEQ ID NO: 140430 - DNA, 6 bp, Unknown
  misc_feature (1)..( 6): Result.003 file - promoters60/4771502
attgga

SEQ ID NO: 140431 - DNA, 7 bp, Unknown
  misc_feature (1)..( 7): Result.003 file - promoters60/4771502
aggccca

SEQ ID NO: 140432 - DNA, 7 bp, Unknown
  misc_feature (1)..( 7): Result.003 file - promoters60/4771502
aggccca

SEQ ID NO: 140433 - DNA, 6 bp, Unknown
  misc_feature (1)..( 6): Result.003 file - promoters60/4771502
cccaat

SEQ ID NO: 140434 - DNA, 6 bp, Unknown
  misc_feature (1)..( 6): Result.003 file - promoters60/4771502
cccaat

SEQ ID NO: 140435 - DNA, 6 bp, Unknown
  misc_feature (1)..( 6): Result.003 file - promoters60/4771502
caatta

SEQ ID NO: 140436 - DNA, 6 bp, Unknown
  misc_feature (1)..( 6): Result.003 file - promoters60/4771502
caatta

SEQ ID NO: 140437 - DNA, 7 bp, Unknown
  misc_feature (1)..( 7): Result.003 file - promoters60/4771502
tttcact

SEQ ID NO: 140438 - DNA, 7 bp, Unknown
  misc_feature (1)..( 7): Result.003 file - promoters60/4771502
tttcact

SEQ ID NO: 140439 - DNA, 13 bp, Unknown
  misc_feature (1)..( 13): Result.003 file - promoters60/4771502
caacactatactg

SEQ ID NO: 140440 - DNA, 13 bp, Unknown
  misc_feature (1)..( 13): Result.003 file - promoters60/4771502
caactctattctg

SEQ ID NO: 140441 - DNA, 6 bp, Unknown
  misc_feature (1)..( 6): Result.003 file - promoters60/4771502
tctaaa

SEQ ID NO: 140442 - DNA, 6 bp, Unknown
  misc_feature (1)..( 6): Result.003 file - promoters60/4771502
tctaaa

SEQ ID NO: 140443 - DNA, 8 bp, Unknown
  misc_feature (1)..( 8): Result.003 file - promoters60/4771502
attttcta

SEQ ID NO: 140444 - DNA, 8 bp, Unknown
  misc_feature (1)..( 8): Result.003 file - promoters60/4771502
attttcta

SEQ ID NO: 140445 - DNA, 9 bp, Unknown
  misc_feature (1)..( 9): Result.003 file - promoters60/4771502
taaaatccg

SEQ ID NO: 140446 - DNA, 9 bp, Unknown
  misc_feature (1)..( 9): Result.003 file - promoters60/4771502
taaaagccg

SEQ ID NO: 140447 - DNA, 6 bp, Unknown
  misc_feature (1)..( 6): Result.003 file - promoters60/4771502
gataaa

SEQ ID NO: 140448 - DNA, 6 bp, Unknown
  misc_feature (1)..( 6): Result.003 file - promoters60/4771502
gataaa

SEQ ID NO: 140449 - DNA, 6 bp, Unknown
  misc_feature (1)..( 6): Result.003 file - promoters60/4771502
tcacag

SEQ ID NO: 140450 - DNA, 6 bp, Unknown
  misc_feature (1)..( 6): Result.003 file - promoters60/4771502
tcacag

SEQ ID NO: 140451 - DNA, 7 bp, Unknown
  misc_feature (1)..( 7): Result.003 file - promoters60/4771502
tcagagg

SEQ ID NO: 140452 - DNA, 7 bp, Unknown
  misc_feature (1)..( 7): Result.003 file - promoters60/4771502
tcaaagg

SEQ ID NO: 140453 - DNA, 6 bp, Unknown
  misc_feature (1)..( 6): Result.003 file - promoters60/4771502
ccactt

SEQ ID NO: 140454 - DNA, 6 bp, Unknown
  misc_feature (1)..( 6): Result.003 file - promoters60/4771502
ccactt

SEQ ID NO: 140455 - DNA, 13 bp, Unknown
  misc_feature (1)..( 13): Result.003 file - promoters60/4771519
aaacctccgccga

SEQ ID NO: 140456 - DNA, 13 bp, Unknown
  misc_feature (1)..( 13): Result.003 file - promoters60/4771519
aaatctccctcta

SEQ ID NO: 140457 - DNA, 13 bp, Unknown
  misc_feature (1)..( 13): Result.003 file - promoters60/4771519
ttttctcgctcgg

SEQ ID NO: 140458 - DNA, 13 bp, Unknown
  misc_feature (1)..( 13): Result.003 file - promoters60/4771519
aaatctgtgatat

SEQ ID NO: 140459 - DNA, 13 bp, Unknown
  misc_feature (1)..( 13): Result.003 file - promoters60/4771519
taatttgttataa

SEQ ID NO: 140460 - DNA, 13 bp, Unknown
  misc_feature (1)..( 13): Result.003 file - promoters60/4771519
gaatgtgtaatat

SEQ ID NO: 140461 - DNA, 9 bp, Unknown
  misc_feature (1)..( 9): Result.003 file - promoters60/4771523
tagaaagag

SEQ ID NO: 140462 - DNA, 9 bp, Unknown
  misc_feature (1)..( 9): Result.003 file - promoters60/4771523
aagaaagta

SEQ ID NO: 140463 - DNA, 9 bp, Unknown
  misc_feature (1)..( 9): Result.003 file - promoters60/4771523
aagaaaatc

SEQ ID NO: 140464 - DNA, 9 bp, Unknown
  misc_feature (1)..( 9): Result.003 file - promoters60/4771523
tagaggaag

SEQ ID NO: 140465 - DNA, 9 bp, Unknown
  misc_feature (1)..( 9): Result.003 file - promoters60/4771523
cagatgaat

SEQ ID NO: 140466 - DNA, 9 bp, Unknown
  misc_feature (1)..( 9): Result.003 file - promoters60/4771523
gtcatgaat

SEQ ID NO: 140467 - DNA, 10 bp, Unknown
  misc_feature (1)..( 10): Result.003 file - promoters60/4771586
actatttaaa

SEQ ID NO: 140468 - DNA, 10 bp, Unknown
  misc_feature (1)..( 10): Result.003 file - promoters60/4771586
actttttttt

SEQ ID NO: 140469 - DNA, 10 bp, Unknown
  misc_feature (1)..( 10): Result.003 file - promoters60/4771586
catatataaa

SEQ ID NO: 140470 - DNA, 10 bp, Unknown
  misc_feature (1)..( 10): Result.003 file - promoters60/4771586
tctttttgtt

SEQ ID NO: 140471 - DNA, 8 bp, Unknown
  misc_feature (1)..( 8): Result.003 file - promoters60/4771638
aaaaaaaa

SEQ ID NO: 140472 - DNA, 8 bp, Unknown
  misc_feature (1)..( 8): Result.003 file - promoters60/4771638
aaaacaaa

SEQ ID NO: 140473 - DNA, 7 bp, Unknown
  misc_feature (1)..( 7): Result.003 file - promoters60/4771638
tattaaa

SEQ ID NO: 140474 - DNA, 7 bp, Unknown
  misc_feature (1)..( 7): Result.003 file - promoters60/4771638
tatcaaa

SEQ ID NO: 140475 - DNA, 6 bp, Unknown
  misc_feature (1)..( 6): Result.003 file - promoters60/4771638
tataat

SEQ ID NO: 140476 - DNA, 6 bp, Unknown
  misc_feature (1)..( 6): Result.003 file - promoters60/4771638
tataat

SEQ ID NO: 140477 - DNA, 6 bp, Unknown
  misc_feature (1)..( 6): Result.003 file - promoters60/4771638
ttttgt

SEQ ID NO: 140478 - DNA, 6 bp, Unknown
  misc_feature (1)..( 6): Result.003 file - promoters60/4771638
ttttgt

SEQ ID NO: 140479 - DNA, 11 bp, Unknown
  misc_feature (1)..( 11): Result.003 file - promoters60/4771638
atagattaatg

SEQ ID NO: 140480 - DNA, 11 bp, Unknown
  misc_feature (1)..( 11): Result.003 file - promoters60/4771638
agttattaatc

SEQ ID NO: 140481 - DNA, 11 bp, Unknown
  misc_feature (1)..( 11): Result.003 file - promoters60/4771638
agtgattcatc

SEQ ID NO: 140482 - DNA, 10 bp, Unknown
  misc_feature (1)..( 10): Result.003 file - promoters60/4771638
gcgattaaag

SEQ ID NO: 140483 - DNA, 10 bp, Unknown
  misc_feature (1)..( 10): Result.003 file - promoters60/4771638
tttattaaag

SEQ ID NO: 140484 - DNA, 10 bp, Unknown
  misc_feature (1)..( 10): Result.003 file - promoters60/4771638
ttttttaaac

SEQ ID NO: 140485 - DNA, 6 bp, Unknown
  misc_feature (1)..( 6): Result.003 file - promoters60/4771638
agctct

SEQ ID NO: 140486 - DNA, 6 bp, Unknown
  misc_feature (1)..( 6): Result.003 file - promoters60/4771638
agctct

SEQ ID NO: 140487 - DNA, 9 bp, Unknown
  misc_feature (1)..( 9): Result.003 file - promoters60/4771638
aacaatttt

SEQ ID NO: 140488 - DNA, 9 bp, Unknown
  misc_feature (1)..( 9): Result.003 file - promoters60/4771638
aacaacttt

SEQ ID NO: 140489 - DNA, 8 bp, Unknown
  misc_feature (1)..( 8): Result.003 file - promoters60/4771638
tttataca

SEQ ID NO: 140490 - DNA, 8 bp, Unknown
  misc_feature (1)..( 8): Result.003 file - promoters60/4771638
cttataca

SEQ ID NO: 140491 - DNA, 9 bp, Unknown
  misc_feature (1)..( 9): Result.003 file - promoters60/4771638
tttaataag

SEQ ID NO: 140492 - DNA, 6 bp, Unknown
  misc_feature (1)..( 6): Result.003 file - promoters60/4771638
cactat

SEQ ID NO: 140493 - DNA, 6 bp, Unknown
  misc_feature (1)..( 6): Result.003 file - promoters60/4771638
cactat

SEQ ID NO: 140494 - DNA, 8 bp, Unknown
  misc_feature (1)..( 8): Result.003 file - promoters60/4771638
acagctaa

SEQ ID NO: 140495 - DNA, 8 bp, Unknown
  misc_feature (1)..( 8): Result.003 file - promoters60/4771638
acagctaa

SEQ ID NO: 140496 - DNA, 9 bp, Unknown
  misc_feature (1)..( 9): Result.003 file - promoters60/4771638
acattaaaa

SEQ ID NO: 140497 - DNA, 9 bp, Unknown
  misc_feature (1)..( 9): Result.003 file - promoters60/4771638
acataaaaa

SEQ ID NO: 140498 - DNA, 7 bp, Unknown
  misc_feature (1)..( 7): Result.003 file - promoters60/4771638
ttgtaac

SEQ ID NO: 140499 - DNA, 7 bp, Unknown
  misc_feature (1)..( 7): Result.003 file - promoters60/4771638
ttgaaac

SEQ ID NO: 140500 - DNA, 7 bp, Unknown
  misc_feature (1)..( 7): Result.003 file - promoters60/4771638
atgtttt

SEQ ID NO: 140501 - DNA, 7 bp, Unknown
  misc_feature (1)..( 7): Result.003 file - promoters60/4771638
atgtttt

SEQ ID NO: 140502 - DNA, 7 bp, Unknown
  misc_feature (1)..( 7): Result.003 file - promoters60/4771638
ctatctc

SEQ ID NO: 140503 - DNA, 7 bp, Unknown
  misc_feature (1)..( 7): Result.003 file - promoters60/4771638
ctacctc

SEQ ID NO: 140504 - DNA, 7 bp, Unknown
  misc_feature (1)..( 7): Result.003 file - promoters60/4771638
ctctgga

SEQ ID NO: 140505 - DNA, 7 bp, Unknown
  misc_feature (1)..( 7): Result.003 file - promoters60/4771638
ctctgga

SEQ ID NO: 140506 - DNA, 7 bp, Unknown
  misc_feature (1)..( 7): Result.003 file - promoters60/4771638
agacaaa

SEQ ID NO: 140507 - DNA, 7 bp, Unknown
  misc_feature (1)..( 7): Result.003 file - promoters60/4771638
agagaaa

SEQ ID NO: 140508 - DNA, 6 bp, Unknown
  misc_feature (1)..( 6): Result.003 file - promoters60/4771638
taactc

SEQ ID NO: 140509 - DNA, 6 bp, Unknown
  misc_feature (1)..( 6): Result.003 file - promoters60/4771638
taactc

SEQ ID NO: 140510 - DNA, 6 bp, Unknown
  misc_feature (1)..( 6): Result.003 file - promoters60/4771638
acaaaa

SEQ ID NO: 140511 - DNA, 6 bp, Unknown
  misc_feature (1)..( 6): Result.003 file - promoters60/4771638
acaaaa

SEQ ID NO: 140512 - DNA, 7 bp, Unknown
  misc_feature (1)..( 7): Result.003 file - promoters60/4771638
aaaagtt

SEQ ID NO: 140513 - DNA, 7 bp, Unknown
  misc_feature (1)..( 7): Result.003 file - promoters60/4771638
aaaagtt

SEQ ID NO: 140514 - DNA, 7 bp, Unknown
  misc_feature (1)..( 7): Result.003 file - promoters60/4771638
tttctta

SEQ ID NO: 140515 - DNA, 7 bp, Unknown
  misc_feature (1)..( 7): Result.003 file - promoters60/4771638
tttttta

SEQ ID NO: 140516 - DNA, 11 bp, Unknown
  misc_feature (1)..( 11): Result.003 file - promoters60/4771646
cttttctctat

SEQ ID NO: 140517 - DNA, 11 bp, Unknown
  misc_feature (1)..( 11): Result.003 file - promoters60/4771646
tttttatctgt

SEQ ID NO: 140518 - DNA, 11 bp, Unknown
  misc_feature (1)..( 11): Result.003 file - promoters60/4771646
tttttctttgc

SEQ ID NO: 140519 - DNA, 11 bp, Unknown
  misc_feature (1)..( 11): Result.003 file - promoters60/4771646
tatttctgtgc

SEQ ID NO: 140520 - DNA, 14 bp, Unknown
  misc_feature (1)..( 14): Result.003 file - promoters60/4771677
atattattagtagg

SEQ ID NO: 140521 - DNA, 14 bp, Unknown
  misc_feature (1)..( 14): Result.003 file - promoters60/4771677
ttattatattgaga

SEQ ID NO: 140522 - DNA, 14 bp, Unknown
  misc_feature (1)..( 14): Result.003 file - promoters60/4771677
atataattattttg

SEQ ID NO: 140523 - DNA, 14 bp, Unknown
  misc_feature (1)..( 14): Result.003 file - promoters60/4771677
gattaattcttttc

SEQ ID NO: 140524 - DNA, 14 bp, Unknown
  misc_feature (1)..( 14): Result.003 file - promoters60/4771677
ttttaatgattttg

SEQ ID NO: 140525 - DNA, 15 bp, Unknown
  misc_feature (1)..( 15): Result.003 file - promoters60/4771677
cgtttacttcaaaat

SEQ ID NO: 140526 - DNA, 12 bp, Unknown
  misc_feature (1)..( 12): Result.003 file - promoters60/4771677
caaaatgaaaaa

SEQ ID NO: 140527 - DNA, 12 bp, Unknown
  misc_feature (1)..( 12): Result.003 file - promoters60/4771677
tttaatgaaatt

SEQ ID NO: 140528 - DNA, 13 bp, Unknown
  misc_feature (1)..( 13): Result.003 file - promoters60/4771677
cactatgagaaat

SEQ ID NO: 140529 - DNA, 13 bp, Unknown
  misc_feature (1)..( 13): Result.003 file - promoters60/4771677
accaatgatattc

SEQ ID NO: 140530 - DNA, 13 bp, Unknown
  misc_feature (1)..( 13): Result.003 file - promoters60/4771677
aaaaatgttattt

SEQ ID NO: 140531 - DNA, 13 bp, Unknown
  misc_feature (1)..( 13): Result.003 file - promoters60/4771677
atgctatttattt

SEQ ID NO: 140532 - DNA, 13 bp, Unknown
  misc_feature (1)..( 13): Result.003 file - promoters60/4771677
aaagattttattt

SEQ ID NO: 140533 - DNA, 13 bp, Unknown
  misc_feature (1)..( 13): Result.003 file - promoters60/4771677
aaatatgttaaca

SEQ ID NO: 140534 - DNA, 11 bp, Unknown
  misc_feature (1)..( 11): Result.003 file - promoters60/4771677
ccttgagttta

SEQ ID NO: 140535 - DNA, 11 bp, Unknown
  misc_feature (1)..( 11): Result.003 file - promoters60/4771677
tgttgagtttc

SEQ ID NO: 140536 - DNA, 11 bp, Unknown
  misc_feature (1)..( 11): Result.003 file - promoters60/4771677
tgttgaatttt

SEQ ID NO: 140537 - DNA, 11 bp, Unknown
  misc_feature (1)..( 11): Result.003 file - promoters60/4771677
attctaatttt

SEQ ID NO: 140538 - DNA, 11 bp, Unknown
  misc_feature (1)..( 11): Result.003 file - promoters60/4771677
agttaactttg

SEQ ID NO: 140539 - DNA, 11 bp, Unknown
  misc_feature (1)..( 11): Result.003 file - promoters60/4771677
agtcaacttgt

SEQ ID NO: 140540 - DNA, 11 bp, Unknown
  misc_feature (1)..( 11): Result.003 file - promoters60/4771677
tgttgactggt

SEQ ID NO: 140541 - DNA, 11 bp, Unknown
  misc_feature (1)..( 11): Result.003 file - promoters60/4771677
gaaatgtcaac

SEQ ID NO: 140542 - DNA, 11 bp, Unknown
  misc_feature (1)..( 11): Result.003 file - promoters60/4771677
aaaatgttatt

SEQ ID NO: 140543 - DNA, 11 bp, Unknown
  misc_feature (1)..( 11): Result.003 file - promoters60/4771677
ccaatgatatt

SEQ ID NO: 140544 - DNA, 12 bp, Unknown
  misc_feature (1)..( 12): Result.003 file - promoters60/4771677
caaattgtttaa

SEQ ID NO: 140545 - DNA, 12 bp, Unknown
  misc_feature (1)..( 12): Result.003 file - promoters60/4771677
aaatatgttaac

SEQ ID NO: 140546 - DNA, 12 bp, Unknown
  misc_feature (1)..( 12): Result.003 file - promoters60/4771677
ttttattttaat

SEQ ID NO: 140547 - DNA, 11 bp, Unknown
  misc_feature (1)..( 11): Result.003 file - promoters60/4771677
ataatatttca

SEQ ID NO: 140548 - DNA, 11 bp, Unknown
  misc_feature (1)..( 11): Result.003 file - promoters60/4771677
gtagtatatca

SEQ ID NO: 140549 - DNA, 11 bp, Unknown
  misc_feature (1)..( 11): Result.003 file - promoters60/4771677
tatttatttcc

SEQ ID NO: 140550 - DNA, 11 bp, Unknown
  misc_feature (1)..( 11): Result.003 file - promoters60/4771677
aaagaattttt

SEQ ID NO: 140551 - DNA, 11 bp, Unknown
  misc_feature (1)..( 11): Result.003 file - promoters60/4771677
attttatttta

SEQ ID NO: 140552 - DNA, 11 bp, Unknown
  misc_feature (1)..( 11): Result.003 file - promoters60/4771677
atgttattttt

SEQ ID NO: 140553 - DNA, 11 bp, Unknown
  misc_feature (1)..( 11): Result.003 file - promoters60/4771677
aaactttttac

SEQ ID NO: 140554 - DNA, 10 bp, Unknown
  misc_feature (1)..( 10): Result.003 file - promoters60/4771677
gtaaaatttc

SEQ ID NO: 140555 - DNA, 10 bp, Unknown
  misc_feature (1)..( 10): Result.003 file - promoters60/4771677
ccaaaattga

SEQ ID NO: 140556 - DNA, 10 bp, Unknown
  misc_feature (1)..( 10): Result.003 file - promoters60/4771677
gtaaaatttt

SEQ ID NO: 140557 - DNA, 10 bp, Unknown
  misc_feature (1)..( 10): Result.003 file - promoters60/4771677
ttctaatttt

SEQ ID NO: 140558 - DNA, 10 bp, Unknown
  misc_feature (1)..( 10): Result.003 file - promoters60/4771677
gttgaatttt

SEQ ID NO: 140559 - DNA, 10 bp, Unknown
  misc_feature (1)..( 10): Result.003 file - promoters60/4771677
gttaactttg

SEQ ID NO: 140560 - DNA, 10 bp, Unknown
  misc_feature (1)..( 10): Result.003 file - promoters60/4771677
gttgactggt

SEQ ID NO: 140561 - DNA, 11 bp, Unknown
  misc_feature (1)..( 11): Result.003 file - promoters60/4771713
gcacaataatt

SEQ ID NO: 140562 - DNA, 11 bp, Unknown
  misc_feature (1)..( 11): Result.003 file - promoters60/4771713
aaacaattatt

SEQ ID NO: 140563 - DNA, 11 bp, Unknown
  misc_feature (1)..( 11): Result.003 file - promoters60/4771713
aaacgattcca

SEQ ID NO: 140564 - DNA, 7 bp, Unknown
  misc_feature (1)..( 7): Result.003 file - promoters60/4771713
atttatt

SEQ ID NO: 140565 - DNA, 7 bp, Unknown
  misc_feature (1)..( 7): Result.003 file - promoters60/4771713
attaatt

SEQ ID NO: 140566 - DNA, 6 bp, Unknown
  misc_feature (1)..( 6): Result.003 file - promoters60/4771713
ttattt

SEQ ID NO: 140567 - DNA, 6 bp, Unknown
  misc_feature (1)..( 6): Result.003 file - promoters60/4771713
ttattt

SEQ ID NO: 140568 - DNA, 7 bp, Unknown
  misc_feature (1)..( 7): Result.003 file - promoters60/4771713
aaaattg

SEQ ID NO: 140569 - DNA, 7 bp, Unknown
  misc_feature (1)..( 7): Result.003 file - promoters60/4771713
aaatttg

SEQ ID NO: 140570 - DNA, 7 bp, Unknown
  misc_feature (1)..( 7): Result.003 file - promoters60/4771713
ccagata

SEQ ID NO: 140571 - DNA, 7 bp, Unknown
  misc_feature (1)..( 7): Result.003 file - promoters60/4771713
ccaaata

SEQ ID NO: 140572 - DNA, 7 bp, Unknown
  misc_feature (1)..( 7): Result.003 file - promoters60/4771713
ctcggca

SEQ ID NO: 140573 - DNA, 7 bp, Unknown
  misc_feature (1)..( 7): Result.003 file - promoters60/4771713
ctcagca

SEQ ID NO: 140574 - DNA, 7 bp, Unknown
  misc_feature (1)..( 7): Result.003 file - promoters60/4771713
atctgag

SEQ ID NO: 140575 - DNA, 7 bp, Unknown
  misc_feature (1)..( 7): Result.003 file - promoters60/4771713
atctgag

SEQ ID NO: 140576 - DNA, 6 bp, Unknown
  misc_feature (1)..( 6): Result.003 file - promoters60/4771713
aaattg

SEQ ID NO: 140577 - DNA, 6 bp, Unknown
  misc_feature (1)..( 6): Result.003 file - promoters60/4771713
aaattg

SEQ ID NO: 140578 - DNA, 8 bp, Unknown
  misc_feature (1)..( 8): Result.003 file - promoters60/4771713
atataaag

SEQ ID NO: 140579 - DNA, 8 bp, Unknown
  misc_feature (1)..( 8): Result.003 file - promoters60/4771713
ttattaag

SEQ ID NO: 140580 - DNA, 8 bp, Unknown
  misc_feature (1)..( 8): Result.003 file - promoters60/4771713
ttagtaat

SEQ ID NO: 140581 - DNA, 8 bp, Unknown
  misc_feature (1)..( 8): Result.003 file - promoters60/4771713
aacaaatt

SEQ ID NO: 140582 - DNA, 8 bp, Unknown
  misc_feature (1)..( 8): Result.003 file - promoters60/4771713
aaccaatt

SEQ ID NO: 140583 - DNA, 8 bp, Unknown
  misc_feature (1)..( 8): Result.003 file - promoters60/4771713
cgaatcca

SEQ ID NO: 140584 - DNA, 8 bp, Unknown
  misc_feature (1)..( 8): Result.003 file - promoters60/4771713
cgaaccca

SEQ ID NO: 140585 - DNA, 7 bp, Unknown
  misc_feature (1)..( 7): Result.003 file - promoters60/4771713
aaataaa

SEQ ID NO: 140586 - DNA, 7 bp, Unknown
  misc_feature (1)..( 7): Result.003 file - promoters60/4771713
aaagaaa

SEQ ID NO: 140587 - DNA, 7 bp, Unknown
  misc_feature (1)..( 7): Result.003 file - promoters60/4771713
aataaaa

SEQ ID NO: 140588 - DNA, 7 bp, Unknown
  misc_feature (1)..( 7): Result.003 file - promoters60/4771713
aataaaa

SEQ ID NO: 140589 - DNA, 7 bp, Unknown
  misc_feature (1)..( 7): Result.003 file - promoters60/4771713
aaatttt

SEQ ID NO: 140590 - DNA, 7 bp, Unknown
  misc_feature (1)..( 7): Result.003 file - promoters60/4771713
aaacttt

SEQ ID NO: 140591 - DNA, 7 bp, Unknown
  misc_feature (1)..( 7): Result.003 file - promoters60/4771713
ctaaaat

SEQ ID NO: 140592 - DNA, 7 bp, Unknown
  misc_feature (1)..( 7): Result.003 file - promoters60/4771713
ctacaat

SEQ ID NO: 140593 - DNA, 7 bp, Unknown
  misc_feature (1)..( 7): Result.003 file - promoters60/4771713
ttttgtt

SEQ ID NO: 140594 - DNA, 7 bp, Unknown
  misc_feature (1)..( 7): Result.003 file - promoters60/4771713
ttttgtt

SEQ ID NO: 140595 - DNA, 7 bp, Unknown
  misc_feature (1)..( 7): Result.003 file - promoters60/4771713
tcttttc

SEQ ID NO: 140596 - DNA, 7 bp, Unknown
  misc_feature (1)..( 7): Result.003 file - promoters60/4771713
tctgttc

SEQ ID NO: 140597 - DNA, 6 bp, Unknown
  misc_feature (1)..( 6): Result.003 file - promoters60/4771713
aataat

SEQ ID NO: 140598 - DNA, 6 bp, Unknown
  misc_feature (1)..( 6): Result.003 file - promoters60/4771713
aataat

SEQ ID NO: 140599 - DNA, 6 bp, Unknown
  misc_feature (1)..( 6): Result.003 file - promoters60/4771725
atcaat

SEQ ID NO: 140600 - DNA, 6 bp, Unknown
  misc_feature (1)..( 6): Result.003 file - promoters60/4771725
atcaat

SEQ ID NO: 140601 - DNA, 6 bp, Unknown
  misc_feature (1)..( 6): Result.003 file - promoters60/4771725
acactt

SEQ ID NO: 140602 - DNA, 6 bp, Unknown
  misc_feature (1)..( 6): Result.003 file - promoters60/4771725
acactt

SEQ ID NO: 140603 - DNA, 11 bp, Unknown
  misc_feature (1)..( 11): Result.003 file - promoters60/4771725
ctgcagagtaa

SEQ ID NO: 140604 - DNA, 11 bp, Unknown
  misc_feature (1)..( 11): Result.003 file - promoters60/4771725
taacagaataa

SEQ ID NO: 140605 - DNA, 11 bp, Unknown
  misc_feature (1)..( 11): Result.003 file - promoters60/4771725
taaaagaaaat

SEQ ID NO: 140606 - DNA, 6 bp, Unknown
  misc_feature (1)..( 6): Result.003 file - promoters60/4771725
gtgatc

SEQ ID NO: 140607 - DNA, 6 bp, Unknown
  misc_feature (1)..( 6): Result.003 file - promoters60/4771725
gtgatc

SEQ ID NO: 140608 - DNA, 6 bp, Unknown
  misc_feature (1)..( 6): Result.003 file - promoters60/4771725
gatcgt

SEQ ID NO: 140609 - DNA, 6 bp, Unknown
  misc_feature (1)..( 6): Result.003 file - promoters60/4771725
gatcgt

SEQ ID NO: 140610 - DNA, 13 bp, Unknown
  misc_feature (1)..( 13): Result.003 file - promoters60/4771725
aaataataataat

SEQ ID NO: 140611 - DNA, 13 bp, Unknown
  misc_feature (1)..( 13): Result.003 file - promoters60/4771725
aaagaataaaaat

SEQ ID NO: 140612 - DNA, 13 bp, Unknown
  misc_feature (1)..( 13): Result.003 file - promoters60/4771725
cgttaatcaaata

SEQ ID NO: 140613 - DNA, 6 bp, Unknown
  misc_feature (1)..( 6): Result.003 file - promoters60/4771725
agaatc

SEQ ID NO: 140614 - DNA, 6 bp, Unknown
  misc_feature (1)..( 6): Result.003 file - promoters60/4771725
agaatc

SEQ ID NO: 140615 - DNA, 8 bp, Unknown
  misc_feature (1)..( 8): Result.003 file - promoters60/4771725
agagaaga

SEQ ID NO: 140616 - DNA, 8 bp, Unknown
  misc_feature (1)..( 8): Result.003 file - promoters60/4771725
agagaaga

SEQ ID NO: 140617 - DNA, 8 bp, Unknown
  misc_feature (1)..( 8): Result.003 file - promoters60/4771725
tttaaaat

SEQ ID NO: 140618 - DNA, 8 bp, Unknown
  misc_feature (1)..( 8): Result.003 file - promoters60/4771725
aataaaat

SEQ ID NO: 140619 - DNA, 8 bp, Unknown
  misc_feature (1)..( 8): Result.003 file - promoters60/4771725
aataaaaa

SEQ ID NO: 140620 - DNA, 7 bp, Unknown
  misc_feature (1)..( 7): Result.003 file - promoters60/4771725
aaaagaa

SEQ ID NO: 140621 - DNA, 7 bp, Unknown
  misc_feature (1)..( 7): Result.003 file - promoters60/4771725
aaacgaa

SEQ ID NO: 140622 - DNA, 9 bp, Unknown
  misc_feature (1)..( 9): Result.003 file - promoters60/4771725
cttagatat

SEQ ID NO: 140623 - DNA, 9 bp, Unknown
  misc_feature (1)..( 9): Result.003 file - promoters60/4771725
cttaaatat

SEQ ID NO: 140624 - DNA, 8 bp, Unknown
  misc_feature (1)..( 8): Result.003 file - promoters60/4771725
cttcaaaa

SEQ ID NO: 140625 - DNA, 8 bp, Unknown
  misc_feature (1)..( 8): Result.003 file - promoters60/4771725
ctttaaaa

SEQ ID NO: 140626 - DNA, 6 bp, Unknown
  misc_feature (1)..( 6): Result.003 file - promoters60/4771725
atcaaa

SEQ ID NO: 140627 - DNA, 6 bp, Unknown
  misc_feature (1)..( 6): Result.003 file - promoters60/4771725
atcaaa

SEQ ID NO: 140628 - DNA, 7 bp, Unknown
  misc_feature (1)..( 7): Result.003 file - promoters60/4771725
aatagtt

SEQ ID NO: 140629 - DNA, 7 bp, Unknown
  misc_feature (1)..( 7): Result.003 file - promoters60/4771725
aattgtt

SEQ ID NO: 140630 - DNA, 7 bp, Unknown
  misc_feature (1)..( 7): Result.003 file - promoters60/4771733
aaattaa

SEQ ID NO: 140631 - DNA, 7 bp, Unknown
  misc_feature (1)..( 7): Result.003 file - promoters60/4771733
aaattaa

SEQ ID NO: 140632 - DNA, 6 bp, Unknown
  misc_feature (1)..( 6): Result.003 file - promoters60/4771733
atacaa

SEQ ID NO: 140633 - DNA, 6 bp, Unknown
  misc_feature (1)..( 6): Result.003 file - promoters60/4771733
atacaa

SEQ ID NO: 140634 - DNA, 7 bp, Unknown
  misc_feature (1)..( 7): Result.003 file - promoters60/4771733
aaatgtt

SEQ ID NO: 140635 - DNA, 7 bp, Unknown
  misc_feature (1)..( 7): Result.003 file - promoters60/4771733
aaaagtt

SEQ ID NO: 140636 - DNA, 9 bp, Unknown
  misc_feature (1)..( 9): Result.003 file - promoters60/4771733
caaaaaaaa

SEQ ID NO: 140637 - DNA, 9 bp, Unknown
  misc_feature (1)..( 9): Result.003 file - promoters60/4771733
caaaaaaaa

SEQ ID NO: 140638 - DNA, 7 bp, Unknown
  misc_feature (1)..( 7): Result.003 file - promoters60/4771733
aaaaaaa

SEQ ID NO: 140639 - DNA, 7 bp, Unknown
  misc_feature (1)..( 7): Result.003 file - promoters60/4771733
aaaaaaa

SEQ ID NO: 140640 - DNA, 8 bp, Unknown
  misc_feature (1)..( 8): Result.003 file - promoters60/4771733
ccttttta

SEQ ID NO: 140641 - DNA, 8 bp, Unknown
  misc_feature (1)..( 8): Result.003 file - promoters60/4771733
ccttatta

SEQ ID NO: 140642 - DNA, 10 bp, Unknown
  misc_feature (1)..( 10): Result.003 file - promoters60/4771733
gtgacgtaac

SEQ ID NO: 140643 - DNA, 10 bp, Unknown
  misc_feature (1)..( 10): Result.003 file - promoters60/4771733
gtgacataac

SEQ ID NO: 140644 - DNA, 7 bp, Unknown
  misc_feature (1)..( 7): Result.003 file - promoters60/4771733
tacgatt

SEQ ID NO: 140645 - DNA, 7 bp, Unknown
  misc_feature (1)..( 7): Result.003 file - promoters60/4771733
taccatt

SEQ ID NO: 140646 - DNA, 6 bp, Unknown
  misc_feature (1)..( 6): Result.003 file - promoters60/4771733
caagag

SEQ ID NO: 140647 - DNA, 6 bp, Unknown
  misc_feature (1)..( 6): Result.003 file - promoters60/4771733
caagag

SEQ ID NO: 140648 - DNA, 7 bp, Unknown
  misc_feature (1)..( 7): Result.003 file - promoters60/4771733
agattga

SEQ ID NO: 140649 - DNA, 7 bp, Unknown
  misc_feature (1)..( 7): Result.003 file - promoters60/4771733
agagtga

SEQ ID NO: 140650 - DNA, 8 bp, Unknown
  misc_feature (1)..( 8): Result.003 file - promoters60/4771733
gccgacaa

SEQ ID NO: 140651 - DNA, 8 bp, Unknown
  misc_feature (1)..( 8): Result.003 file - promoters60/4771733
gcctacaa

SEQ ID NO: 140652 - DNA, 9 bp, Unknown
  misc_feature (1)..( 9): Result.003 file - promoters60/4771733
gtcattgaa

SEQ ID NO: 140653 - DNA, 9 bp, Unknown
  misc_feature (1)..( 9): Result.003 file - promoters60/4771733
gtccttgaa

SEQ ID NO: 140654 - DNA, 7 bp, Unknown
  misc_feature (1)..( 7): Result.003 file - promoters60/4771733
aaataaa

SEQ ID NO: 140655 - DNA, 7 bp, Unknown
  misc_feature (1)..( 7): Result.003 file - promoters60/4771733
aaacaaa

SEQ ID NO: 140656 - DNA, 7 bp, Unknown
  misc_feature (1)..( 7): Result.003 file - promoters60/4771733
acgtgcc

SEQ ID NO: 140657 - DNA, 7 bp, Unknown
  misc_feature (1)..( 7): Result.003 file - promoters60/4771733
acgagcc

SEQ ID NO: 140658 - DNA, 8 bp, Unknown
  misc_feature (1)..( 8): Result.003 file - promoters60/4771733
taaattaa

SEQ ID NO: 140659 - DNA, 8 bp, Unknown
  misc_feature (1)..( 8): Result.003 file - promoters60/4771733
taaagtaa

SEQ ID NO: 140660 - DNA, 7 bp, Unknown
  misc_feature (1)..( 7): Result.003 file - promoters60/4771733
ttctaaa

SEQ ID NO: 140661 - DNA, 7 bp, Unknown
  misc_feature (1)..( 7): Result.003 file - promoters60/4771733
ttccaaa

SEQ ID NO: 140662 - DNA, 6 bp, Unknown
  misc_feature (1)..( 6): Result.003 file - promoters60/4771733
ccaaac

SEQ ID NO: 140663 - DNA, 6 bp, Unknown
  misc_feature (1)..( 6): Result.003 file - promoters60/4771733
ccaaac

SEQ ID NO: 140664 - DNA, 6 bp, Unknown
  misc_feature (1)..( 6): Result.003 file - promoters60/4771733
ggtttt

SEQ ID NO: 140665 - DNA, 6 bp, Unknown
  misc_feature (1)..( 6): Result.003 file - promoters60/4771733
ggtttt

SEQ ID NO: 140666 - DNA, 6 bp, Unknown
  misc_feature (1)..( 6): Result.003 file - promoters60/4771733
ttaatt

SEQ ID NO: 140667 - DNA, 6 bp, Unknown
  misc_feature (1)..( 6): Result.003 file - promoters60/4771733
ttaatt

SEQ ID NO: 140668 - DNA, 8 bp, Unknown
  misc_feature (1)..( 8): Result.003 file - promoters60/4771733
gttagtat

SEQ ID NO: 140669 - DNA, 8 bp, Unknown
  misc_feature (1)..( 8): Result.003 file - promoters60/4771733
gttcgtat

SEQ ID NO: 140670 - DNA, 6 bp, Unknown
  misc_feature (1)..( 6): Result.003 file - promoters60/4771733
ttggcg

SEQ ID NO: 140671 - DNA, 6 bp, Unknown
  misc_feature (1)..( 6): Result.003 file - promoters60/4771733
ttggcg

SEQ ID NO: 140672 - DNA, 7 bp, Unknown
  misc_feature (1)..( 7): Result.003 file - promoters60/4771733
atattta

SEQ ID NO: 140673 - DNA, 7 bp, Unknown
  misc_feature (1)..( 7): Result.003 file - promoters60/4771733
atattta

SEQ ID NO: 140674 - DNA, 11 bp, Unknown
  misc_feature (1)..( 11): Result.003 file - promoters60/4771745
ttaacttttaa

SEQ ID NO: 140675 - DNA, 11 bp, Unknown
  misc_feature (1)..( 11): Result.003 file - promoters60/4771745
ttaaattttaa

SEQ ID NO: 140676 - DNA, 7 bp, Unknown
  misc_feature (1)..( 7): Result.003 file - promoters60/4771745
attttgt

SEQ ID NO: 140677 - DNA, 7 bp, Unknown
  misc_feature (1)..( 7): Result.003 file - promoters60/4771745
attttgt

SEQ ID NO: 140678 - DNA, 6 bp, Unknown
  misc_feature (1)..( 6): Result.003 file - promoters60/4771745
ttaaaa

SEQ ID NO: 140679 - DNA, 6 bp, Unknown
  misc_feature (1)..( 6): Result.003 file - promoters60/4771745
ttaaaa

SEQ ID NO: 140680 - DNA, 10 bp, Unknown
  misc_feature (1)..( 10): Result.003 file - promoters60/4771745
gatcagaaat

SEQ ID NO: 140681 - DNA, 10 bp, Unknown
  misc_feature (1)..( 10): Result.003 file - promoters60/4771745
gatgagaaat

SEQ ID NO: 140682 - DNA, 6 bp, Unknown
  misc_feature (1)..( 6): Result.003 file - promoters60/4771745
gataat

SEQ ID NO: 140683 - DNA, 6 bp, Unknown
  misc_feature (1)..( 6): Result.003 file - promoters60/4771745
gataat

SEQ ID NO: 140684 - DNA, 8 bp, Unknown
  misc_feature (1)..( 8): Result.003 file - promoters60/4771745
tgaaaaaa

SEQ ID NO: 140685 - DNA, 8 bp, Unknown
  misc_feature (1)..( 8): Result.003 file - promoters60/4771745
tgaagaaa

SEQ ID NO: 140686 - DNA, 7 bp, Unknown
  misc_feature (1)..( 7): Result.003 file - promoters60/4771745
aaaatga

SEQ ID NO: 140687 - DNA, 7 bp, Unknown
  misc_feature (1)..( 7): Result.003 file - promoters60/4771745
aaattga

SEQ ID NO: 140688 - DNA, 7 bp, Unknown
  misc_feature (1)..( 7): Result.003 file - promoters60/4771745
agattgt

SEQ ID NO: 140689 - DNA, 7 bp, Unknown
  misc_feature (1)..( 7): Result.003 file - promoters60/4771745
agactgt

SEQ ID NO: 140690 - DNA, 9 bp, Unknown
  misc_feature (1)..( 9): Result.003 file - promoters60/4771745
atattatat

SEQ ID NO: 140691 - DNA, 9 bp, Unknown
  misc_feature (1)..( 9): Result.003 file - promoters60/4771745
ataatatat

SEQ ID NO: 140692 - DNA, 7 bp, Unknown
  misc_feature (1)..( 7): Result.003 file - promoters60/4771745
ttgggct

SEQ ID NO: 140693 - DNA, 7 bp, Unknown
  misc_feature (1)..( 7): Result.003 file - promoters60/4771745
ttgggct

SEQ ID NO: 140694 - DNA, 7 bp, Unknown
  misc_feature (1)..( 7): Result.003 file - promoters60/4771745
tactcaa

SEQ ID NO: 140695 - DNA, 7 bp, Unknown
  misc_feature (1)..( 7): Result.003 file - promoters60/4771745
tactcaa

SEQ ID NO: 140696 - DNA, 7 bp, Unknown
  misc_feature (1)..( 7): Result.003 file - promoters60/4771745
atttttt

SEQ ID NO: 140697 - DNA, 7 bp, Unknown
  misc_feature (1)..( 7): Result.003 file - promoters60/4771745
attgttt

SEQ ID NO: 140698 - DNA, 7 bp, Unknown
  misc_feature (1)..( 7): Result.003 file - promoters60/4771745
tagaaaa

SEQ ID NO: 140699 - DNA, 7 bp, Unknown
  misc_feature (1)..( 7): Result.003 file - promoters60/4771745
tagaaaa

SEQ ID NO: 140700 - DNA, 8 bp, Unknown
  misc_feature (1)..( 8): Result.003 file - promoters60/4771745
aaattaga

SEQ ID NO: 140701 - DNA, 8 bp, Unknown
  misc_feature (1)..( 8): Result.003 file - promoters60/4771745
aaattaga

SEQ ID NO: 140702 - DNA, 8 bp, Unknown
  misc_feature (1)..( 8): Result.003 file - promoters60/4771745
caaagtaa

SEQ ID NO: 140703 - DNA, 8 bp, Unknown
  misc_feature (1)..( 8): Result.003 file - promoters60/4771745
caaagtaa

SEQ ID NO: 140704 - DNA, 7 bp, Unknown
  misc_feature (1)..( 7): Result.003 file - promoters60/4771793
aagaata

SEQ ID NO: 140705 - DNA, 7 bp, Unknown
  misc_feature (1)..( 7): Result.003 file - promoters60/4771793
aagaata

SEQ ID NO: 140706 - DNA, 7 bp, Unknown
  misc_feature (1)..( 7): Result.003 file - promoters60/4771793
aagaatt

SEQ ID NO: 140707 - DNA, 9 bp, Unknown
  misc_feature (1)..( 9): Result.003 file - promoters60/4771793
atacttttt

SEQ ID NO: 140708 - DNA, 9 bp, Unknown
  misc_feature (1)..( 9): Result.003 file - promoters60/4771793
gtacattta

SEQ ID NO: 140709 - DNA, 9 bp, Unknown
  misc_feature (1)..( 9): Result.003 file - promoters60/4771793
atacttttt

SEQ ID NO: 140710 - DNA, 9 bp, Unknown
  misc_feature (1)..( 9): Result.003 file - promoters60/4771793
ttttttctt

SEQ ID NO: 140711 - DNA, 9 bp, Unknown
  misc_feature (1)..( 9): Result.003 file - promoters60/4771793
tttattctt

SEQ ID NO: 140712 - DNA, 9 bp, Unknown
  misc_feature (1)..( 9): Result.003 file - promoters60/4771793
ctttttctg

SEQ ID NO: 140713 - DNA, 9 bp, Unknown
  misc_feature (1)..( 9): Result.003 file - promoters60/4771793
tatatattt

SEQ ID NO: 140714 - DNA, 9 bp, Unknown
  misc_feature (1)..( 9): Result.003 file - promoters60/4771793
tatttattt

SEQ ID NO: 140715 - DNA, 9 bp, Unknown
  misc_feature (1)..( 9): Result.003 file - promoters60/4771793
tgcatattt

SEQ ID NO: 140716 - DNA, 8 bp, Unknown
  misc_feature (1)..( 8): Result.003 file - promoters60/4771793
ttgaaatt

SEQ ID NO: 140717 - DNA, 8 bp, Unknown
  misc_feature (1)..( 8): Result.003 file - promoters60/4771793
aagaaatt

SEQ ID NO: 140718 - DNA, 8 bp, Unknown
  misc_feature (1)..( 8): Result.003 file - promoters60/4771793
atgaaatt

SEQ ID NO: 140719 - DNA, 8 bp, Unknown
  misc_feature (1)..( 8): Result.003 file - promoters60/4771793
aagcaatt

SEQ ID NO: 140720 - DNA, 8 bp, Unknown
  misc_feature (1)..( 8): Result.003 file - promoters60/4771808
taggtttt

SEQ ID NO: 140721 - DNA, 8 bp, Unknown
  misc_feature (1)..( 8): Result.003 file - promoters60/4771808
tagggttt

SEQ ID NO: 140722 - DNA, 7 bp, Unknown
  misc_feature (1)..( 7): Result.003 file - promoters60/4771808
tttggat

SEQ ID NO: 140723 - DNA, 7 bp, Unknown
  misc_feature (1)..( 7): Result.003 file - promoters60/4771808
ttttgat

SEQ ID NO: 140724 - DNA, 10 bp, Unknown
  misc_feature (1)..( 10): Result.003 file - promoters60/4771808
ttgttaatgt

SEQ ID NO: 140725 - DNA, 10 bp, Unknown
  misc_feature (1)..( 10): Result.003 file - promoters60/4771808
ttgtgaatgt

SEQ ID NO: 140726 - DNA, 7 bp, Unknown
  misc_feature (1)..( 7): Result.003 file - promoters60/4771808
caataaa

SEQ ID NO: 140727 - DNA, 7 bp, Unknown
  misc_feature (1)..( 7): Result.003 file - promoters60/4771808
caaaaaa

SEQ ID NO: 140728 - DNA, 7 bp, Unknown
  misc_feature (1)..( 7): Result.003 file - promoters60/4771808
caaaaag

SEQ ID NO: 140729 - DNA, 7 bp, Unknown
  misc_feature (1)..( 7): Result.003 file - promoters60/4771808
caaaaag

SEQ ID NO: 140730 - DNA, 8 bp, Unknown
  misc_feature (1)..( 8): Result.003 file - promoters60/4771808
ctgattct

SEQ ID NO: 140731 - DNA, 8 bp, Unknown
  misc_feature (1)..( 8): Result.003 file - promoters60/4771808
ctgtttct

SEQ ID NO: 140732 - DNA, 8 bp, Unknown
  misc_feature (1)..( 8): Result.003 file - promoters60/4771808
ttttctgt

SEQ ID NO: 140733 - DNA, 8 bp, Unknown
  misc_feature (1)..( 8): Result.003 file - promoters60/4771808
tttcctgt

SEQ ID NO: 140734 - DNA, 7 bp, Unknown
  misc_feature (1)..( 7): Result.003 file - promoters60/4771808
tctttat

SEQ ID NO: 140735 - DNA, 7 bp, Unknown
  misc_feature (1)..( 7): Result.003 file - promoters60/4771808
tctgtat

SEQ ID NO: 140736 - DNA, 7 bp, Unknown
  misc_feature (1)..( 7): Result.003 file - promoters60/4771808
catatta

SEQ ID NO: 140737 - DNA, 7 bp, Unknown
  misc_feature (1)..( 7): Result.003 file - promoters60/4771808
aatatta

SEQ ID NO: 140738 - DNA, 7 bp, Unknown
  misc_feature (1)..( 7): Result.003 file - promoters60/4771808
aatattg

SEQ ID NO: 140739 - DNA, 7 bp, Unknown
  misc_feature (1)..( 7): Result.003 file - promoters60/4771808
gccttta

SEQ ID NO: 140740 - DNA, 7 bp, Unknown
  misc_feature (1)..( 7): Result.003 file - promoters60/4771808
gccatta

SEQ ID NO: 140741 - DNA, 6 bp, Unknown
  misc_feature (1)..( 6): Result.003 file - promoters60/4771808
gtacaa

SEQ ID NO: 140742 - DNA, 6 bp, Unknown
  misc_feature (1)..( 6): Result.003 file - promoters60/4771808
gtacaa

SEQ ID NO: 140743 - DNA, 9 bp, Unknown
  misc_feature (1)..( 9): Result.003 file - promoters60/4771808
tttccaatt

SEQ ID NO: 140744 - DNA, 9 bp, Unknown
  misc_feature (1)..( 9): Result.003 file - promoters60/4771808
ttttcaatt

SEQ ID NO: 140745 - DNA, 7 bp, Unknown
  misc_feature (1)..( 7): Result.003 file - promoters60/4771808
ttcaaag

SEQ ID NO: 140746 - DNA, 7 bp, Unknown
  misc_feature (1)..( 7): Result.003 file - promoters60/4771808
ttcaaag

SEQ ID NO: 140747 - DNA, 7 bp, Unknown
  misc_feature (1)..( 7): Result.003 file - promoters60/4771808
aacattt

SEQ ID NO: 140748 - DNA, 7 bp, Unknown
  misc_feature (1)..( 7): Result.003 file - promoters60/4771808
aacgttt

SEQ ID NO: 140749 - DNA, 6 bp, Unknown
  misc_feature (1)..( 6): Result.003 file - promoters60/4771808
ataatt

SEQ ID NO: 140750 - DNA, 6 bp, Unknown
  misc_feature (1)..( 6): Result.003 file - promoters60/4771808
ataatt

SEQ ID NO: 140751 - DNA, 8 bp, Unknown
  misc_feature (1)..( 8): Result.003 file - promoters60/4771808
attagtgt

SEQ ID NO: 140752 - DNA, 8 bp, Unknown
  misc_feature (1)..( 8): Result.003 file - promoters60/4771808
attattgt

SEQ ID NO: 140753 - DNA, 9 bp, Unknown
  misc_feature (1)..( 9): Result.003 file - promoters60/4771808
ataaagcaa

SEQ ID NO: 140754 - DNA, 9 bp, Unknown
  misc_feature (1)..( 9): Result.003 file - promoters60/4771808
ataaaccaa

SEQ ID NO: 140755 - DNA, 6 bp, Unknown
  misc_feature (1)..( 6): Result.003 file - promoters60/4771808
acctct

SEQ ID NO: 140756 - DNA, 6 bp, Unknown
  misc_feature (1)..( 6): Result.003 file - promoters60/4771808
acctct

SEQ ID NO: 140757 - DNA, 7 bp, Unknown
  misc_feature (1)..( 7): Result.003 file - promoters60/4771808
tttattt

SEQ ID NO: 140758 - DNA, 7 bp, Unknown
  misc_feature (1)..( 7): Result.003 file - promoters60/4771808
ttttttt

SEQ ID NO: 140759 - DNA, 9 bp, Unknown
  misc_feature (1)..( 9): Result.003 file - promoters60/4771853
gtttccttt

SEQ ID NO: 140760 - DNA, 9 bp, Unknown
  misc_feature (1)..( 9): Result.003 file - promoters60/4771853
gttaccttt

SEQ ID NO: 140761 - DNA, 9 bp, Unknown
  misc_feature (1)..( 9): Result.003 file - promoters60/4771853
gcttcgttt

SEQ ID NO: 140762 - DNA, 8 bp, Unknown
  misc_feature (1)..( 8): Result.003 file - promoters60/4771853
caccaata

SEQ ID NO: 140763 - DNA, 8 bp, Unknown
  misc_feature (1)..( 8): Result.003 file - promoters60/4771853
aaccaata

SEQ ID NO: 140764 - DNA, 8 bp, Unknown
  misc_feature (1)..( 8): Result.003 file - promoters60/4771853
aacaaata

SEQ ID NO: 140765 - DNA, 9 bp, Unknown
  misc_feature (1)..( 9): Result.003 file - promoters60/4771853
tttcctttt

SEQ ID NO: 140766 - DNA, 9 bp, Unknown
  misc_feature (1)..( 9): Result.003 file - promoters60/4771853
ttttcttaa

SEQ ID NO: 140767 - DNA, 9 bp, Unknown
  misc_feature (1)..( 9): Result.003 file - promoters60/4771853
gttcctaat

SEQ ID NO: 140768 - DNA, 11 bp, Unknown
  misc_feature (1)..( 11): Result.003 file - promoters60/4771872
aaataattttc

SEQ ID NO: 140769 - DNA, 11 bp, Unknown
  misc_feature (1)..( 11): Result.003 file - promoters60/4771872
caatcattccc

SEQ ID NO: 140770 - DNA, 12 bp, Unknown
  misc_feature (1)..( 12): Result.003 file - promoters60/4771872
ggataaatttat

SEQ ID NO: 140771 - DNA, 12 bp, Unknown
  misc_feature (1)..( 12): Result.003 file - promoters60/4771872
caggcgatcatt

SEQ ID NO: 140772 - DNA, 12 bp, Unknown
  misc_feature (1)..( 12): Result.003 file - promoters60/4771872
caaacatgagag

SEQ ID NO: 140773 - DNA, 11 bp, Unknown
  misc_feature (1)..( 11): Result.003 file - promoters60/4771872
cattaaattaa

SEQ ID NO: 140774 - DNA, 11 bp, Unknown
  misc_feature (1)..( 11): Result.003 file - promoters60/4771872
catgaaacttt

SEQ ID NO: 140775 - DNA, 11 bp, Unknown
  misc_feature (1)..( 11): Result.003 file - promoters60/4771872
aattaaattgt

SEQ ID NO: 140776 - DNA, 11 bp, Unknown
  misc_feature (1)..( 11): Result.003 file - promoters60/4771872
aattaacatat

SEQ ID NO: 140777 - DNA, 11 bp, Unknown
  misc_feature (1)..( 11): Result.003 file - promoters60/4771872
tgagaaattga

SEQ ID NO: 140778 - DNA, 11 bp, Unknown
  misc_feature (1)..( 11): Result.003 file - promoters60/4771872
aaagaaagtgt

SEQ ID NO: 140779 - DNA, 10 bp, Unknown
  misc_feature (1)..( 10): Result.003 file - promoters60/4771872
gaagataagg

SEQ ID NO: 140780 - DNA, 10 bp, Unknown
  misc_feature (1)..( 10): Result.003 file - promoters60/4771872
agagataaag

SEQ ID NO: 140781 - DNA, 10 bp, Unknown
  misc_feature (1)..( 10): Result.003 file - promoters60/4771872
tgagagaagt

SEQ ID NO: 140782 - DNA, 10 bp, Unknown
  misc_feature (1)..( 10): Result.003 file - promoters60/4771872
gaagacaagg

SEQ ID NO: 140783 - DNA, 10 bp, Unknown
  misc_feature (1)..( 10): Result.003 file - promoters60/4771872
gaaaatatat

SEQ ID NO: 140784 - DNA, 13 bp, Unknown
  misc_feature (1)..( 13): Result.003 file - promoters60/4771879
tcgtcgttttata

SEQ ID NO: 140785 - DNA, 13 bp, Unknown
  misc_feature (1)..( 13): Result.003 file - promoters60/4771879
tcgtcgtatctaa

SEQ ID NO: 140786 - DNA, 13 bp, Unknown
  misc_feature (1)..( 13): Result.003 file - promoters60/4771879
tagtcctatgtaa

SEQ ID NO: 140787 - DNA, 8 bp, Unknown
  misc_feature (1)..( 8): Result.003 file - promoters60/4771879
tatttaat

SEQ ID NO: 140788 - DNA, 8 bp, Unknown
  misc_feature (1)..( 8): Result.003 file - promoters60/4771879
tatctaag

SEQ ID NO: 140789 - DNA, 8 bp, Unknown
  misc_feature (1)..( 8): Result.003 file - promoters60/4771879
tatgtaat

SEQ ID NO: 140790 - DNA, 7 bp, Unknown
  misc_feature (1)..( 7): Result.003 file - promoters60/4771879
aatagta

SEQ ID NO: 140791 - DNA, 7 bp, Unknown
  misc_feature (1)..( 7): Result.003 file - promoters60/4771879
aatcgta

SEQ ID NO: 140792 - DNA, 6 bp, Unknown
  misc_feature (1)..( 6): Result.003 file - promoters60/4771879
aagaaa

SEQ ID NO: 140793 - DNA, 6 bp, Unknown
  misc_feature (1)..( 6): Result.003 file - promoters60/4771879
aagaaa

SEQ ID NO: 140794 - DNA, 7 bp, Unknown
  misc_feature (1)..( 7): Result.003 file - promoters60/4771879
tatatgt

SEQ ID NO: 140795 - DNA, 7 bp, Unknown
  misc_feature (1)..( 7): Result.003 file - promoters60/4771879
tatttgt

SEQ ID NO: 140796 - DNA, 8 bp, Unknown
  misc_feature (1)..( 8): Result.003 file - promoters60/4771879
gtaatttg

SEQ ID NO: 140797 - DNA, 8 bp, Unknown
  misc_feature (1)..( 8): Result.003 file - promoters60/4771879
gtaattta

SEQ ID NO: 140798 - DNA, 8 bp, Unknown
  misc_feature (1)..( 8): Result.003 file - promoters60/4771879
ataaattg

SEQ ID NO: 140799 - DNA, 6 bp, Unknown
  misc_feature (1)..( 6): Result.003 file - promoters60/4771879
caaata

SEQ ID NO: 140800 - DNA, 6 bp, Unknown
  misc_feature (1)..( 6): Result.003 file - promoters60/4771879
caaata

SEQ ID NO: 140801 - DNA, 6 bp, Unknown
  misc_feature (1)..( 6): Result.003 file - promoters60/4771879
aataaa

SEQ ID NO: 140802 - DNA, 6 bp, Unknown
  misc_feature (1)..( 6): Result.003 file - promoters60/4771879
aataaa

SEQ ID NO: 140803 - DNA, 6 bp, Unknown
  misc_feature (1)..( 6): Result.003 file - promoters60/4771879
taatat

SEQ ID NO: 140804 - DNA, 6 bp, Unknown
  misc_feature (1)..( 6): Result.003 file - promoters60/4771879
taatat

SEQ ID NO: 140805 - DNA, 8 bp, Unknown
  misc_feature (1)..( 8): Result.003 file - promoters60/4771879
ccttaatt

SEQ ID NO: 140806 - DNA, 8 bp, Unknown
  misc_feature (1)..( 8): Result.003 file - promoters60/4771879
cctgaatt

SEQ ID NO: 140807 - DNA, 8 bp, Unknown
  misc_feature (1)..( 8): Result.003 file - promoters60/4771879
taaaatat

SEQ ID NO: 140808 - DNA, 8 bp, Unknown
  misc_feature (1)..( 8): Result.003 file - promoters60/4771879
taagatat

SEQ ID NO: 140809 - DNA, 8 bp, Unknown
  misc_feature (1)..( 8): Result.003 file - promoters60/4771879
ttctcatt

SEQ ID NO: 140810 - DNA, 8 bp, Unknown
  misc_feature (1)..( 8): Result.003 file - promoters60/4771879
ttctaatt

SEQ ID NO: 140811 - DNA, 7 bp, Unknown
  misc_feature (1)..( 7): Result.003 file - promoters60/4771879
aaaaaat

SEQ ID NO: 140812 - DNA, 7 bp, Unknown
  misc_feature (1)..( 7): Result.003 file - promoters60/4771879
aaaaaat

SEQ ID NO: 140813 - DNA, 7 bp, Unknown
  misc_feature (1)..( 7): Result.003 file - promoters60/4771879
accgtat

SEQ ID NO: 140814 - DNA, 7 bp, Unknown
  misc_feature (1)..( 7): Result.003 file - promoters60/4771879
accctat

SEQ ID NO: 140815 - DNA, 6 bp, Unknown
  misc_feature (1)..( 6): Result.003 file - promoters60/4771879
aaattc

SEQ ID NO: 140816 - DNA, 6 bp, Unknown
  misc_feature (1)..( 6): Result.003 file - promoters60/4771879
aaattc

SEQ ID NO: 140817 - DNA, 8 bp, Unknown
  misc_feature (1)..( 8): Result.003 file - promoters60/4771879
catccaga

SEQ ID NO: 140818 - DNA, 8 bp, Unknown
  misc_feature (1)..( 8): Result.003 file - promoters60/4771879
catacaga

SEQ ID NO: 140819 - DNA, 11 bp, Unknown
  misc_feature (1)..( 11): Result.003 file - promoters60/4771895
ttcattaatta

SEQ ID NO: 140820 - DNA, 11 bp, Unknown
  misc_feature (1)..( 11): Result.003 file - promoters60/4771895
ttcattgatta

SEQ ID NO: 140821 - DNA, 11 bp, Unknown
  misc_feature (1)..( 11): Result.003 file - promoters60/4771895
accattaataa

SEQ ID NO: 140822 - DNA, 8 bp, Unknown
  misc_feature (1)..( 8): Result.003 file - promoters60/4771895
ttcatatc

SEQ ID NO: 140823 - DNA, 8 bp, Unknown
  misc_feature (1)..( 8): Result.003 file - promoters60/4771895
cccatatc

SEQ ID NO: 140824 - DNA, 8 bp, Unknown
  misc_feature (1)..( 8): Result.003 file - promoters60/4771895
ttcatatt

SEQ ID NO: 140825 - DNA, 7 bp, Unknown
  misc_feature (1)..( 7): Result.003 file - promoters60/4771895
tttacaa

SEQ ID NO: 140826 - DNA, 7 bp, Unknown
  misc_feature (1)..( 7): Result.003 file - promoters60/4771895
tttacaa

SEQ ID NO: 140827 - DNA, 8 bp, Unknown
  misc_feature (1)..( 8): Result.003 file - promoters60/4771895
gaaaattc

SEQ ID NO: 140828 - DNA, 8 bp, Unknown
  misc_feature (1)..( 8): Result.003 file - promoters60/4771895
gaaacttc

SEQ ID NO: 140829 - DNA, 13 bp, Unknown
  misc_feature (1)..( 13): Result.003 file - promoters60/4771895
ttcagaatcattt

SEQ ID NO: 140830 - DNA, 13 bp, Unknown
  misc_feature (1)..( 13): Result.003 file - promoters60/4771895
ttctgaataattc

SEQ ID NO: 140831 - DNA, 13 bp, Unknown
  misc_feature (1)..( 13): Result.003 file - promoters60/4771895
caaaatttcattt

SEQ ID NO: 140832 - DNA, 7 bp, Unknown
  misc_feature (1)..( 7): Result.003 file - promoters60/4771895
aatcaaa

SEQ ID NO: 140833 - DNA, 7 bp, Unknown
  misc_feature (1)..( 7): Result.003 file - promoters60/4771895
aataaaa

SEQ ID NO: 140834 - DNA, 8 bp, Unknown
  misc_feature (1)..( 8): Result.003 file - promoters60/4771895
aaaattta

SEQ ID NO: 140835 - DNA, 8 bp, Unknown
  misc_feature (1)..( 8): Result.003 file - promoters60/4771895
aaaattta

SEQ ID NO: 140836 - DNA, 6 bp, Unknown
  misc_feature (1)..( 6): Result.003 file - promoters60/4771895
tttaaa

SEQ ID NO: 140837 - DNA, 6 bp, Unknown
  misc_feature (1)..( 6): Result.003 file - promoters60/4771895
tttaaa

SEQ ID NO: 140838 - DNA, 9 bp, Unknown
  misc_feature (1)..( 9): Result.003 file - promoters60/4771895
tacttcttt

SEQ ID NO: 140839 - DNA, 9 bp, Unknown
  misc_feature (1)..( 9): Result.003 file - promoters60/4771895
atcttcttc

SEQ ID NO: 140840 - DNA, 9 bp, Unknown
  misc_feature (1)..( 9): Result.003 file - promoters60/4771895
atcatcttc

SEQ ID NO: 140841 - DNA, 6 bp, Unknown
  misc_feature (1)..( 6): Result.003 file - promoters60/4771895
tagaat

SEQ ID NO: 140842 - DNA, 6 bp, Unknown
  misc_feature (1)..( 6): Result.003 file - promoters60/4771895
tagaat

SEQ ID NO: 140843 - DNA, 9 bp, Unknown
  misc_feature (1)..( 9): Result.003 file - promoters60/4771895
attagtttg

SEQ ID NO: 140844 - DNA, 9 bp, Unknown
  misc_feature (1)..( 9): Result.003 file - promoters60/4771895
atttgtttg

SEQ ID NO: 140845 - DNA, 6 bp, Unknown
  misc_feature (1)..( 6): Result.003 file - promoters60/4771895
aaacta

SEQ ID NO: 140846 - DNA, 6 bp, Unknown
  misc_feature (1)..( 6): Result.003 file - promoters60/4771895
aaacta

SEQ ID NO: 140847 - DNA, 6 bp, Unknown
  misc_feature (1)..( 6): Result.003 file - promoters60/4771895
tatttt

SEQ ID NO: 140848 - DNA, 6 bp, Unknown
  misc_feature (1)..( 6): Result.003 file - promoters60/4771895
tatttt

SEQ ID NO: 140849 - DNA, 6 bp, Unknown
  misc_feature (1)..( 6): Result.003 file - promoters60/4771895
cgtgat

SEQ ID NO: 140850 - DNA, 6 bp, Unknown
  misc_feature (1)..( 6): Result.003 file - promoters60/4771895
cgtgat

SEQ ID NO: 140851 - DNA, 10 bp, Unknown
  misc_feature (1)..( 10): Result.003 file - promoters60/4771895
aaattagata

SEQ ID NO: 140852 - DNA, 10 bp, Unknown
  misc_feature (1)..( 10): Result.003 file - promoters60/4771895
aaattaaata

SEQ ID NO: 140853 - DNA, 7 bp, Unknown
  misc_feature (1)..( 7): Result.003 file - promoters60/4771895
tttgtta

SEQ ID NO: 140854 - DNA, 7 bp, Unknown
  misc_feature (1)..( 7): Result.003 file - promoters60/4771895
tttttta

SEQ ID NO: 140855 - DNA, 6 bp, Unknown
  misc_feature (1)..( 6): Result.003 file - promoters60/4771895
aaaaca

SEQ ID NO: 140856 - DNA, 6 bp, Unknown
  misc_feature (1)..( 6): Result.003 file - promoters60/4771895
aaaaca

SEQ ID NO: 140857 - DNA, 7 bp, Unknown
  misc_feature (1)..( 7): Result.003 file - promoters60/4771895
aaagaaa

SEQ ID NO: 140858 - DNA, 7 bp, Unknown
  misc_feature (1)..( 7): Result.003 file - promoters60/4771895
aaataaa

SEQ ID NO: 140859 - DNA, 6 bp, Unknown
  misc_feature (1)..( 6): Result.003 file - promoters60/4771895
gagaaa

SEQ ID NO: 140860 - DNA, 6 bp, Unknown
  misc_feature (1)..( 6): Result.003 file - promoters60/4771895
gagaaa

SEQ ID NO: 140861 - DNA, 8 bp, Unknown
  misc_feature (1)..( 8): Result.003 file - promoters60/4771911
ttatttag

SEQ ID NO: 140862 - DNA, 8 bp, Unknown
  misc_feature (1)..( 8): Result.003 file - promoters60/4771911
ttatttat

SEQ ID NO: 140863 - DNA, 8 bp, Unknown
  misc_feature (1)..( 8): Result.003 file - promoters60/4771911
aaatttat

SEQ ID NO: 140864 - DNA, 13 bp, Unknown
  misc_feature (1)..( 13): Result.003 file - promoters60/4771911
aaaaaaagaaaaa

SEQ ID NO: 140865 - DNA, 13 bp, Unknown
  misc_feature (1)..( 13): Result.003 file - promoters60/4771911
gccaaaagagtaa

SEQ ID NO: 140866 - DNA, 13 bp, Unknown
  misc_feature (1)..( 13): Result.003 file - promoters60/4771911
aaaaaaagaaaaa

SEQ ID NO: 140867 - DNA, 13 bp, Unknown
  misc_feature (1)..( 13): Result.003 file - promoters60/4771911
tttagaaaaataa

SEQ ID NO: 140868 - DNA, 13 bp, Unknown
  misc_feature (1)..( 13): Result.003 file - promoters60/4771911
tttggaaaagaaa

SEQ ID NO: 140869 - DNA, 13 bp, Unknown
  misc_feature (1)..( 13): Result.003 file - promoters60/4771911
aagggaaatgaaa

SEQ ID NO: 140870 - DNA, 9 bp, Unknown
  misc_feature (1)..( 9): Result.003 file - promoters60/4771911
aaaataaaa

SEQ ID NO: 140871 - DNA, 9 bp, Unknown
  misc_feature (1)..( 9): Result.003 file - promoters60/4771911
aaaataaaa

SEQ ID NO: 140872 - DNA, 9 bp, Unknown
  misc_feature (1)..( 9): Result.003 file - promoters60/4771911
gaaatgaaa

SEQ ID NO: 140873 - DNA, 8 bp, Unknown
  misc_feature (1)..( 8): Result.003 file - promoters60/4771911
aaaatatc

SEQ ID NO: 140874 - DNA, 8 bp, Unknown
  misc_feature (1)..( 8): Result.003 file - promoters60/4771911
aaaataaa

SEQ ID NO: 140875 - DNA, 8 bp, Unknown
  misc_feature (1)..( 8): Result.003 file - promoters60/4771911
gaaatatc

SEQ ID NO: 140876 - DNA, 8 bp, Unknown
  misc_feature (1)..( 8): Result.003 file - promoters60/4771911
aacaaaat

SEQ ID NO: 140877 - DNA, 8 bp, Unknown
  misc_feature (1)..( 8): Result.003 file - promoters60/4771911
cacaaaat

SEQ ID NO: 140878 - DNA, 8 bp, Unknown
  misc_feature (1)..( 8): Result.003 file - promoters60/4771911
aactaaac

SEQ ID NO: 140879 - DNA, 13 bp, Unknown
  misc_feature (1)..( 13): Result.003 file - promoters60/4771911
tatacaaatacat

SEQ ID NO: 140880 - DNA, 13 bp, Unknown
  misc_feature (1)..( 13): Result.003 file - promoters60/4771911
gaaacaaaaacat

SEQ ID NO: 140881 - DNA, 13 bp, Unknown
  misc_feature (1)..( 13): Result.003 file - promoters60/4771911
gaaagaaagcttt

SEQ ID NO: 140882 - DNA, 9 bp, Unknown
  misc_feature (1)..( 9): Result.003 file - promoters60/4771913
tgtttaaac

SEQ ID NO: 140883 - DNA, 9 bp, Unknown
  misc_feature (1)..( 9): Result.003 file - promoters60/4771913
tttttaaaa

SEQ ID NO: 140884 - DNA, 9 bp, Unknown
  misc_feature (1)..( 9): Result.003 file - promoters60/4771913
tttttaatt

SEQ ID NO: 140885 - DNA, 10 bp, Unknown
  misc_feature (1)..( 10): Result.003 file - promoters60/4771913
aatttacaaa

SEQ ID NO: 140886 - DNA, 10 bp, Unknown
  misc_feature (1)..( 10): Result.003 file - promoters60/4771913
tcaaaaaacg

SEQ ID NO: 140887 - DNA, 10 bp, Unknown
  misc_feature (1)..( 10): Result.003 file - promoters60/4771913
aaaaaaaact

SEQ ID NO: 140888 - DNA, 10 bp, Unknown
  misc_feature (1)..( 10): Result.003 file - promoters60/4771913
acaaaaaaaa

SEQ ID NO: 140889 - DNA, 10 bp, Unknown
  misc_feature (1)..( 10): Result.003 file - promoters60/4771913
acaaaaaaaa

SEQ ID NO: 140890 - DNA, 10 bp, Unknown
  misc_feature (1)..( 10): Result.003 file - promoters60/4771913
acaaaaagac

SEQ ID NO: 140891 - DNA, 8 bp, Unknown
  misc_feature (1)..( 8): Result.003 file - promoters60/4771913
gaaataaa

SEQ ID NO: 140892 - DNA, 8 bp, Unknown
  misc_feature (1)..( 8): Result.003 file - promoters60/4771913
taaataaa

SEQ ID NO: 140893 - DNA, 8 bp, Unknown
  misc_feature (1)..( 8): Result.003 file - promoters60/4771913
caaagaaa

SEQ ID NO: 140894 - DNA, 8 bp, Unknown
  misc_feature (1)..( 8): Result.003 file - promoters60/4771913
caaagata

SEQ ID NO: 140895 - DNA, 10 bp, Unknown
  misc_feature (1)..( 10): Result.003 file - promoters60/4771913
caaatttatt

SEQ ID NO: 140896 - DNA, 10 bp, Unknown
  misc_feature (1)..( 10): Result.003 file - promoters60/4771913
aaaatatatt

SEQ ID NO: 140897 - DNA, 10 bp, Unknown
  misc_feature (1)..( 10): Result.003 file - promoters60/4771913
gaaatttctg

SEQ ID NO: 140898 - DNA, 11 bp, Unknown
  misc_feature (1)..( 11): Result.003 file - promoters60/4771913
aaagatatatc

SEQ ID NO: 140899 - DNA, 12 bp, Unknown
  misc_feature (1)..( 12): Result.003 file - promoters60/4771913
tctcttttattt

SEQ ID NO: 140900 - DNA, 12 bp, Unknown
  misc_feature (1)..( 12): Result.003 file - promoters60/4771913
caactttcattt

SEQ ID NO: 140901 - DNA, 12 bp, Unknown
  misc_feature (1)..( 12): Result.003 file - promoters60/4771913
taaattttataa

SEQ ID NO: 140902 - DNA, 12 bp, Unknown
  misc_feature (1)..( 12): Result.003 file - promoters60/4771913
aatcttactcgt

SEQ ID NO: 140903 - DNA, 7 bp, Unknown
  misc_feature (1)..( 7): Result.003 file - promoters60/4771913
aaataaa

SEQ ID NO: 140904 - DNA, 7 bp, Unknown
  misc_feature (1)..( 7): Result.003 file - promoters60/4771913
aaaaaaa

SEQ ID NO: 140905 - DNA, 7 bp, Unknown
  misc_feature (1)..( 7): Result.003 file - promoters60/4771913
aaaaaaa

SEQ ID NO: 140906 - DNA, 7 bp, Unknown
  misc_feature (1)..( 7): Result.003 file - promoters60/4771913
acaaaaa

SEQ ID NO: 140907 - DNA, 10 bp, Unknown
  misc_feature (1)..( 10): Result.003 file - promoters60/4771913
ttaaatttga

SEQ ID NO: 140908 - DNA, 10 bp, Unknown
  misc_feature (1)..( 10): Result.003 file - promoters60/4771913
ttatattaac

SEQ ID NO: 140909 - DNA, 10 bp, Unknown
  misc_feature (1)..( 10): Result.003 file - promoters60/4771913
caaaattgac

SEQ ID NO: 140910 - DNA, 10 bp, Unknown
  misc_feature (1)..( 10): Result.003 file - promoters60/4771913
caatattaca

SEQ ID NO: 140911 - DNA, 10 bp, Unknown
  misc_feature (1)..( 10): Result.003 file - promoters60/4771928
atttataata

SEQ ID NO: 140912 - DNA, 10 bp, Unknown
  misc_feature (1)..( 10): Result.003 file - promoters60/4771928
gattatgata

SEQ ID NO: 140913 - DNA, 10 bp, Unknown
  misc_feature (1)..( 10): Result.003 file - promoters60/4771928
atttatagaa

SEQ ID NO: 140914 - DNA, 14 bp, Unknown
  misc_feature (1)..( 14): Result.003 file - promoters60/4771928
ggtcttacaatttt

SEQ ID NO: 140915 - DNA, 14 bp, Unknown
  misc_feature (1)..( 14): Result.003 file - promoters60/4771928
agaaatacaatttt

SEQ ID NO: 140916 - DNA, 14 bp, Unknown
  misc_feature (1)..( 14): Result.003 file - promoters60/4771928
agaactactattcg

SEQ ID NO: 140917 - DNA, 8 bp, Unknown
  misc_feature (1)..( 8): Result.003 file - promoters60/4771928
ctaaaata

SEQ ID NO: 140918 - DNA, 8 bp, Unknown
  misc_feature (1)..( 8): Result.003 file - promoters60/4771928
ctaaaaaa

SEQ ID NO: 140919 - DNA, 8 bp, Unknown
  misc_feature (1)..( 8): Result.003 file - promoters60/4771928
ttaaaaaa

SEQ ID NO: 140920 - DNA, 8 bp, Unknown
  misc_feature (1)..( 8): Result.003 file - promoters60/4771928
acttttgg

SEQ ID NO: 140921 - DNA, 8 bp, Unknown
  misc_feature (1)..( 8): Result.003 file - promoters60/4771928
atttttgg

SEQ ID NO: 140922 - DNA, 8 bp, Unknown
  misc_feature (1)..( 8): Result.003 file - promoters60/4771928
gtttttgt

SEQ ID NO: 140923 - DNA, 8 bp, Unknown
  misc_feature (1)..( 8): Result.003 file - promoters60/4771928
attgttgt

SEQ ID NO: 140924 - DNA, 10 bp, Unknown
  misc_feature (1)..( 10): Result.003 file - promoters60/4771928
ttttaaaaga

SEQ ID NO: 140925 - DNA, 10 bp, Unknown
  misc_feature (1)..( 10): Result.003 file - promoters60/4771928
tttcaaaaaa

SEQ ID NO: 140926 - DNA, 10 bp, Unknown
  misc_feature (1)..( 10): Result.003 file - promoters60/4771928
ttgcaaaaaa

SEQ ID NO: 140927 - DNA, 10 bp, Unknown
  misc_feature (1)..( 10): Result.003 file - promoters60/4771928
cttcacaaac

SEQ ID NO: 140928 - DNA, 16 bp, Unknown
  misc_feature (1)..( 16): Result.003 file - promoters60/4771928
agaactactattcgtg

SEQ ID NO: 140929 - DNA, 16 bp, Unknown
  misc_feature (1)..( 16): Result.003 file - promoters60/4771928
aagtcagctatttgtg

SEQ ID NO: 140930 - DNA, 16 bp, Unknown
  misc_feature (1)..( 16): Result.003 file - promoters60/4771928
agaaatacaattttgt

SEQ ID NO: 140931 - DNA, 6 bp, Unknown
  misc_feature (1)..( 6): Result.003 file - promoters60/4771952
attctc

SEQ ID NO: 140932 - DNA, 6 bp, Unknown
  misc_feature (1)..( 6): Result.003 file - promoters60/4771952
attctc

SEQ ID NO: 140933 - DNA, 8 bp, Unknown
  misc_feature (1)..( 8): Result.003 file - promoters60/4771952
aacaaatt

SEQ ID NO: 140934 - DNA, 8 bp, Unknown
  misc_feature (1)..( 8): Result.003 file - promoters60/4771952
ctcaaatt

SEQ ID NO: 140935 - DNA, 8 bp, Unknown
  misc_feature (1)..( 8): Result.003 file - promoters60/4771952
ctcacatt

SEQ ID NO: 140936 - DNA, 7 bp, Unknown
  misc_feature (1)..( 7): Result.003 file - promoters60/4771952
tacaaaa

SEQ ID NO: 140937 - DNA, 7 bp, Unknown
  misc_feature (1)..( 7): Result.003 file - promoters60/4771952
tacgaaa

SEQ ID NO: 140938 - DNA, 7 bp, Unknown
  misc_feature (1)..( 7): Result.003 file - promoters60/4771952
aaagagg

SEQ ID NO: 140939 - DNA, 7 bp, Unknown
  misc_feature (1)..( 7): Result.003 file - promoters60/4771952
aaaaagg

SEQ ID NO: 140940 - DNA, 6 bp, Unknown
  misc_feature (1)..( 6): Result.003 file - promoters60/4771952
tattta

SEQ ID NO: 140941 - DNA, 6 bp, Unknown
  misc_feature (1)..( 6): Result.003 file - promoters60/4771952
tattta

SEQ ID NO: 140942 - DNA, 6 bp, Unknown
  misc_feature (1)..( 6): Result.003 file - promoters60/4771952
cttcaa

SEQ ID NO: 140943 - DNA, 6 bp, Unknown
  misc_feature (1)..( 6): Result.003 file - promoters60/4771952
cttcaa

SEQ ID NO: 140944 - DNA, 6 bp, Unknown
  misc_feature (1)..( 6): Result.003 file - promoters60/4771952
tcttac

SEQ ID NO: 140945 - DNA, 6 bp, Unknown
  misc_feature (1)..( 6): Result.003 file - promoters60/4771952
tcttac

SEQ ID NO: 140946 - DNA, 6 bp, Unknown
  misc_feature (1)..( 6): Result.003 file - promoters60/4771952
tgataa

SEQ ID NO: 140947 - DNA, 6 bp, Unknown
  misc_feature (1)..( 6): Result.003 file - promoters60/4771952
tgataa

SEQ ID NO: 140948 - DNA, 7 bp, Unknown
  misc_feature (1)..( 7): Result.003 file - promoters60/4771952
ttaagtt

SEQ ID NO: 140949 - DNA, 7 bp, Unknown
  misc_feature (1)..( 7): Result.003 file - promoters60/4771952
ttaggtt

SEQ ID NO: 140950 - DNA, 8 bp, Unknown
  misc_feature (1)..( 8): Result.003 file - promoters60/4771952
tattgttg

SEQ ID NO: 140951 - DNA, 8 bp, Unknown
  misc_feature (1)..( 8): Result.003 file - promoters60/4771952
tatagttg

SEQ ID NO: 140952 - DNA, 6 bp, Unknown
  misc_feature (1)..( 6): Result.003 file - promoters60/4771952
gaaaaa

SEQ ID NO: 140953 - DNA, 6 bp, Unknown
  misc_feature (1)..( 6): Result.003 file - promoters60/4771952
gaaaaa

SEQ ID NO: 140954 - DNA, 8 bp, Unknown
  misc_feature (1)..( 8): Result.003 file - promoters60/4771952
tgtataga

SEQ ID NO: 140955 - DNA, 8 bp, Unknown
  misc_feature (1)..( 8): Result.003 file - promoters60/4771952
tgtttaga

SEQ ID NO: 140956 - DNA, 7 bp, Unknown
  misc_feature (1)..( 7): Result.003 file - promoters60/4771952
aaagata

SEQ ID NO: 140957 - DNA, 7 bp, Unknown
  misc_feature (1)..( 7): Result.003 file - promoters60/4771952
aaaaata

SEQ ID NO: 140958 - DNA, 7 bp, Unknown
  misc_feature (1)..( 7): Result.003 file - promoters60/4771952
ataatat

SEQ ID NO: 140959 - DNA, 7 bp, Unknown
  misc_feature (1)..( 7): Result.003 file - promoters60/4771952
ataatat

SEQ ID NO: 140960 - DNA, 7 bp, Unknown
  misc_feature (1)..( 7): Result.003 file - promoters60/4771952
aaatgct

SEQ ID NO: 140961 - DNA, 7 bp, Unknown
  misc_feature (1)..( 7): Result.003 file - promoters60/4771952
aaacgct

SEQ ID NO: 140962 - DNA, 9 bp, Unknown
  misc_feature (1)..( 9): Result.003 file - promoters60/4771952
aaaagaaaa

SEQ ID NO: 140963 - DNA, 9 bp, Unknown
  misc_feature (1)..( 9): Result.003 file - promoters60/4771952
aaatgaaaa

SEQ ID NO: 140964 - DNA, 7 bp, Unknown
  misc_feature (1)..( 7): Result.003 file - promoters60/4771952
ctggaat

SEQ ID NO: 140965 - DNA, 7 bp, Unknown
  misc_feature (1)..( 7): Result.003 file - promoters60/4771952
ctgtaat

SEQ ID NO: 140966 - DNA, 7 bp, Unknown
  misc_feature (1)..( 7): Result.003 file - promoters60/4771952
aaacctt

SEQ ID NO: 140967 - DNA, 7 bp, Unknown
  misc_feature (1)..( 7): Result.003 file - promoters60/4771952
aaaactt

SEQ ID NO: 140968 - DNA, 8 bp, Unknown
  misc_feature (1)..( 8): Result.003 file - promoters60/4771952
cttaatta

SEQ ID NO: 140969 - DNA, 8 bp, Unknown
  misc_feature (1)..( 8): Result.003 file - promoters60/4771952
cttattta

SEQ ID NO: 140970 - DNA, 7 bp, Unknown
  misc_feature (1)..( 7): Result.003 file - promoters60/4771952
cacatat

SEQ ID NO: 140971 - DNA, 7 bp, Unknown
  misc_feature (1)..( 7): Result.003 file - promoters60/4771952
cacctat

SEQ ID NO: 140972 - DNA, 6 bp, Unknown
  misc_feature (1)..( 6): Result.003 file - promoters60/4771956
acactg

SEQ ID NO: 140973 - DNA, 6 bp, Unknown
  misc_feature (1)..( 6): Result.003 file - promoters60/4771956
acactg

SEQ ID NO: 140974 - DNA, 6 bp, Unknown
  misc_feature (1)..( 6): Result.003 file - promoters60/4771956
ccgttg

SEQ ID NO: 140975 - DNA, 6 bp, Unknown
  misc_feature (1)..( 6): Result.003 file - promoters60/4771956
ccgttg

SEQ ID NO: 140976 - DNA, 7 bp, Unknown
  misc_feature (1)..( 7): Result.003 file - promoters60/4771956
gtttatg

SEQ ID NO: 140977 - DNA, 7 bp, Unknown
  misc_feature (1)..( 7): Result.003 file - promoters60/4771956
gtttatt

SEQ ID NO: 140978 - DNA, 7 bp, Unknown
  misc_feature (1)..( 7): Result.003 file - promoters60/4771956
ttttatt

SEQ ID NO: 140979 - DNA, 6 bp, Unknown
  misc_feature (1)..( 6): Result.003 file - promoters60/4771956
cataat

SEQ ID NO: 140980 - DNA, 6 bp, Unknown
  misc_feature (1)..( 6): Result.003 file - promoters60/4771956
cataat

SEQ ID NO: 140981 - DNA, 6 bp, Unknown
  misc_feature (1)..( 6): Result.003 file - promoters60/4771956
ataagt

SEQ ID NO: 140982 - DNA, 6 bp, Unknown
  misc_feature (1)..( 6): Result.003 file - promoters60/4771956
ataagt

SEQ ID NO: 140983 - DNA, 6 bp, Unknown
  misc_feature (1)..( 6): Result.003 file - promoters60/4771956
aacaaa

SEQ ID NO: 140984 - DNA, 6 bp, Unknown
  misc_feature (1)..( 6): Result.003 file - promoters60/4771956
aacaaa

SEQ ID NO: 140985 - DNA, 7 bp, Unknown
  misc_feature (1)..( 7): Result.003 file - promoters60/4771956
tctcaac

SEQ ID NO: 140986 - DNA, 7 bp, Unknown
  misc_feature (1)..( 7): Result.003 file - promoters60/4771956
tctgaac

SEQ ID NO: 140987 - DNA, 6 bp, Unknown
  misc_feature (1)..( 6): Result.003 file - promoters60/4771956
tagaaa

SEQ ID NO: 140988 - DNA, 6 bp, Unknown
  misc_feature (1)..( 6): Result.003 file - promoters60/4771956
tagaaa

SEQ ID NO: 140989 - DNA, 7 bp, Unknown
  misc_feature (1)..( 7): Result.003 file - promoters60/4771956
aaagtag

SEQ ID NO: 140990 - DNA, 7 bp, Unknown
  misc_feature (1)..( 7): Result.003 file - promoters60/4771956
aaaatag

SEQ ID NO: 140991 - DNA, 6 bp, Unknown
  misc_feature (1)..( 6): Result.003 file - promoters60/4771956
aaaaaa

SEQ ID NO: 140992 - DNA, 6 bp, Unknown
  misc_feature (1)..( 6): Result.003 file - promoters60/4771956
aaaaaa

SEQ ID NO: 140993 - DNA, 8 bp, Unknown
  misc_feature (1)..( 8): Result.003 file - promoters60/4771956
atttgtca

SEQ ID NO: 140994 - DNA, 8 bp, Unknown
  misc_feature (1)..( 8): Result.003 file - promoters60/4771956
atttttca

SEQ ID NO: 140995 - DNA, 7 bp, Unknown
  misc_feature (1)..( 7): Result.003 file - promoters60/4771956
ttaatta

SEQ ID NO: 140996 - DNA, 7 bp, Unknown
  misc_feature (1)..( 7): Result.003 file - promoters60/4771956
ttactta

SEQ ID NO: 140997 - DNA, 8 bp, Unknown
  misc_feature (1)..( 8): Result.003 file - promoters60/4771956
ccatcaac

SEQ ID NO: 140998 - DNA, 8 bp, Unknown
  misc_feature (1)..( 8): Result.003 file - promoters60/4771956
ccagcaac

SEQ ID NO: 140999 - DNA, 6 bp, Unknown
  misc_feature (1)..( 6): Result.003 file - promoters60/4771956
ataatt

SEQ ID NO: 141000 - DNA, 6 bp, Unknown
  misc_feature (1)..( 6): Result.003 file - promoters60/4771956
ataatt

SEQ ID NO: 141001 - DNA, 7 bp, Unknown
  misc_feature (1)..( 7): Result.003 file - promoters60/4771956
ctagttt

SEQ ID NO: 141002 - DNA, 7 bp, Unknown
  misc_feature (1)..( 7): Result.003 file - promoters60/4771956
ctatttt

SEQ ID NO: 141003 - DNA, 7 bp, Unknown
  misc_feature (1)..( 7): Result.003 file - promoters60/4771956
cactcaa

SEQ ID NO: 141004 - DNA, 7 bp, Unknown
  misc_feature (1)..( 7): Result.003 file - promoters60/4771956
cacacaa

SEQ ID NO: 141005 - DNA, 6 bp, Unknown
  misc_feature (1)..( 6): Result.003 file - promoters60/4771956
cctttt

SEQ ID NO: 141006 - DNA, 6 bp, Unknown
  misc_feature (1)..( 6): Result.003 file - promoters60/4771956
cctttt

SEQ ID NO: 141007 - DNA, 6 bp, Unknown
  misc_feature (1)..( 6): Result.003 file - promoters60/4771956
cataaa

SEQ ID NO: 141008 - DNA, 6 bp, Unknown
  misc_feature (1)..( 6): Result.003 file - promoters60/4771956
cataaa

SEQ ID NO: 141009 - DNA, 7 bp, Unknown
  misc_feature (1)..( 7): Result.003 file - promoters60/4771956
aaaactc

SEQ ID NO: 141010 - DNA, 7 bp, Unknown
  misc_feature (1)..( 7): Result.003 file - promoters60/4771956
aaatctc

SEQ ID NO: 141011 - DNA, 8 bp, Unknown
  misc_feature (1)..( 8): Result.003 file - promoters60/4771960
ttagttgc

SEQ ID NO: 141012 - DNA, 8 bp, Unknown
  misc_feature (1)..( 8): Result.003 file - promoters60/4771960
ttagttgc

SEQ ID NO: 141013 - DNA, 8 bp, Unknown
  misc_feature (1)..( 8): Result.003 file - promoters60/4771960
attacatc

SEQ ID NO: 141014 - DNA, 8 bp, Unknown
  misc_feature (1)..( 8): Result.003 file - promoters60/4771960
attaaatc

SEQ ID NO: 141015 - DNA, 9 bp, Unknown
  misc_feature (1)..( 9): Result.003 file - promoters60/4771960
gaaaattat

SEQ ID NO: 141016 - DNA, 9 bp, Unknown
  misc_feature (1)..( 9): Result.003 file - promoters60/4771960
gaaatttat

SEQ ID NO: 141017 - DNA, 8 bp, Unknown
  misc_feature (1)..( 8): Result.003 file - promoters60/4771960
tagaattc

SEQ ID NO: 141018 - DNA, 8 bp, Unknown
  misc_feature (1)..( 8): Result.003 file - promoters60/4771960
tagacttc

SEQ ID NO: 141019 - DNA, 8 bp, Unknown
  misc_feature (1)..( 8): Result.003 file - promoters60/4771960
ctttgaaa

SEQ ID NO: 141020 - DNA, 8 bp, Unknown
  misc_feature (1)..( 8): Result.003 file - promoters60/4771960
cttttaaa

SEQ ID NO: 141021 - DNA, 9 bp, Unknown
  misc_feature (1)..( 9): Result.003 file - promoters60/4771960
ctataaata

SEQ ID NO: 141022 - DNA, 9 bp, Unknown
  misc_feature (1)..( 9): Result.003 file - promoters60/4771960
ctattaata

SEQ ID NO: 141023 - DNA, 6 bp, Unknown
  misc_feature (1)..( 6): Result.003 file - promoters60/4771960
aagatt

SEQ ID NO: 141024 - DNA, 6 bp, Unknown
  misc_feature (1)..( 6): Result.003 file - promoters60/4771960
aagatt

SEQ ID NO: 141025 - DNA, 8 bp, Unknown
  misc_feature (1)..( 8): Result.003 file - promoters60/4771960
gttgtttt

SEQ ID NO: 141026 - DNA, 8 bp, Unknown
  misc_feature (1)..( 8): Result.003 file - promoters60/4771960
gttgcttt

SEQ ID NO: 141027 - DNA, 6 bp, Unknown
  misc_feature (1)..( 6): Result.003 file - promoters60/4771960
agaaga

SEQ ID NO: 141028 - DNA, 6 bp, Unknown
  misc_feature (1)..( 6): Result.003 file - promoters60/4771960
agaaga

SEQ ID NO: 141029 - DNA, 11 bp, Unknown
  misc_feature (1)..( 11): Result.003 file - promoters60/4771960
aaagtgacata

SEQ ID NO: 141030 - DNA, 11 bp, Unknown
  misc_feature (1)..( 11): Result.003 file - promoters60/4771960
aaattgatata

SEQ ID NO: 141031 - DNA, 8 bp, Unknown
  misc_feature (1)..( 8): Result.003 file - promoters60/4771960
aaaaaagt

SEQ ID NO: 141032 - DNA, 8 bp, Unknown
  misc_feature (1)..( 8): Result.003 file - promoters60/4771960
caaaaaga

SEQ ID NO: 141033 - DNA, 8 bp, Unknown
  misc_feature (1)..( 8): Result.003 file - promoters60/4771960
caataaga

SEQ ID NO: 141034 - DNA, 8 bp, Unknown
  misc_feature (1)..( 8): Result.003 file - promoters60/4771960
ccgaaaat

SEQ ID NO: 141035 - DNA, 8 bp, Unknown
  misc_feature (1)..( 8): Result.003 file - promoters60/4771960
ccgaaaat

SEQ ID NO: 141036 - DNA, 6 bp, Unknown
  misc_feature (1)..( 6): Result.003 file - promoters60/4771960
tgaaca

SEQ ID NO: 141037 - DNA, 6 bp, Unknown
  misc_feature (1)..( 6): Result.003 file - promoters60/4771960
tgaaca

SEQ ID NO: 141038 - DNA, 7 bp, Unknown
  misc_feature (1)..( 7): Result.003 file - promoters60/4771960
aaaaaca

SEQ ID NO: 141039 - DNA, 7 bp, Unknown
  misc_feature (1)..( 7): Result.003 file - promoters60/4771960
aaagaca

SEQ ID NO: 141040 - DNA, 8 bp, Unknown
  misc_feature (1)..( 8): Result.003 file - promoters60/4771960
aatacttg

SEQ ID NO: 141041 - DNA, 8 bp, Unknown
  misc_feature (1)..( 8): Result.003 file - promoters60/4771960
aatagttg

SEQ ID NO: 141042 - DNA, 8 bp, Unknown
  misc_feature (1)..( 8): Result.003 file - promoters60/4771960
aaaattac

SEQ ID NO: 141043 - DNA, 8 bp, Unknown
  misc_feature (1)..( 8): Result.003 file - promoters60/4771960
aaaattac

SEQ ID NO: 141044 - DNA, 6 bp, Unknown
  misc_feature (1)..( 6): Result.003 file - promoters60/4771960
atcaat

SEQ ID NO: 141045 - DNA, 6 bp, Unknown
  misc_feature (1)..( 6): Result.003 file - promoters60/4771960
atcaat

SEQ ID NO: 141046 - DNA, 11 bp, Unknown
  misc_feature (1)..( 11): Result.003 file - promoters60/4771960
caaaaacaaaa

SEQ ID NO: 141047 - DNA, 11 bp, Unknown
  misc_feature (1)..( 11): Result.003 file - promoters60/4771960
caaaaataaaa

SEQ ID NO: 141048 - DNA, 10 bp, Unknown
  misc_feature (1)..( 10): Result.003 file - promoters60/4771968
taaaaatgtc

SEQ ID NO: 141049 - DNA, 10 bp, Unknown
  misc_feature (1)..( 10): Result.003 file - promoters60/4771968
taaaaaaatg

SEQ ID NO: 141050 - DNA, 10 bp, Unknown
  misc_feature (1)..( 10): Result.003 file - promoters60/4771968
gaaaataatg

SEQ ID NO: 141051 - DNA, 8 bp, Unknown
  misc_feature (1)..( 8): Result.003 file - promoters60/4771968
aaaagtgt

SEQ ID NO: 141052 - DNA, 8 bp, Unknown
  misc_feature (1)..( 8): Result.003 file - promoters60/4771968
aaaaatgt

SEQ ID NO: 141053 - DNA, 8 bp, Unknown
  misc_feature (1)..( 8): Result.003 file - promoters60/4771968
aaaaatga

SEQ ID NO: 141054 - DNA, 11 bp, Unknown
  misc_feature (1)..( 11): Result.003 file - promoters60/4771968
taaagaaatct

SEQ ID NO: 141055 - DNA, 11 bp, Unknown
  misc_feature (1)..( 11): Result.003 file - promoters60/4771968
taaaaaaagga

SEQ ID NO: 141056 - DNA, 11 bp, Unknown
  misc_feature (1)..( 11): Result.003 file - promoters60/4771968
aaaaataagga

SEQ ID NO: 141057 - DNA, 9 bp, Unknown
  misc_feature (1)..( 9): Result.003 file - promoters60/4771972
ttttttttg

SEQ ID NO: 141058 - DNA, 9 bp, Unknown
  misc_feature (1)..( 9): Result.003 file - promoters60/4771972
ttttctttg

SEQ ID NO: 141059 - DNA, 7 bp, Unknown
  misc_feature (1)..( 7): Result.003 file - promoters60/4771972
taaaaat

SEQ ID NO: 141060 - DNA, 7 bp, Unknown
  misc_feature (1)..( 7): Result.003 file - promoters60/4771972
taaaaag

SEQ ID NO: 141061 - DNA, 7 bp, Unknown
  misc_feature (1)..( 7): Result.003 file - promoters60/4771972
taataat

SEQ ID NO: 141062 - DNA, 8 bp, Unknown
  misc_feature (1)..( 8): Result.003 file - promoters60/4771972
aagttatg

SEQ ID NO: 141063 - DNA, 8 bp, Unknown
  misc_feature (1)..( 8): Result.003 file - promoters60/4771972
aagatatg

SEQ ID NO: 141064 - DNA, 8 bp, Unknown
  misc_feature (1)..( 8): Result.003 file - promoters60/4771972
ttttattt

SEQ ID NO: 141065 - DNA, 8 bp, Unknown
  misc_feature (1)..( 8): Result.003 file - promoters60/4771972
ttttgttt

SEQ ID NO: 141066 - DNA, 7 bp, Unknown
  misc_feature (1)..( 7): Result.003 file - promoters60/4771972
tttcatt

SEQ ID NO: 141067 - DNA, 7 bp, Unknown
  misc_feature (1)..( 7): Result.003 file - promoters60/4771972
tttaatt

SEQ ID NO: 141068 - DNA, 9 bp, Unknown
  misc_feature (1)..( 9): Result.003 file - promoters60/4771972
ctaactaaa

SEQ ID NO: 141069 - DNA, 9 bp, Unknown
  misc_feature (1)..( 9): Result.003 file - promoters60/4771972
gaaacaaaa

SEQ ID NO: 141070 - DNA, 9 bp, Unknown
  misc_feature (1)..( 9): Result.003 file - promoters60/4771972
gaaagaaag

SEQ ID NO: 141071 - DNA, 6 bp, Unknown
  misc_feature (1)..( 6): Result.003 file - promoters60/4771972
tttgtt

SEQ ID NO: 141072 - DNA, 6 bp, Unknown
  misc_feature (1)..( 6): Result.003 file - promoters60/4771972
tttgtt

SEQ ID NO: 141073 - DNA, 6 bp, Unknown
  misc_feature (1)..( 6): Result.003 file - promoters60/4771972
aaaact

SEQ ID NO: 141074 - DNA, 6 bp, Unknown
  misc_feature (1)..( 6): Result.003 file - promoters60/4771972
aaaact

SEQ ID NO: 141075 - DNA, 7 bp, Unknown
  misc_feature (1)..( 7): Result.003 file - promoters60/4771972
atataaa

SEQ ID NO: 141076 - DNA, 7 bp, Unknown
  misc_feature (1)..( 7): Result.003 file - promoters60/4771972
ataaaaa

SEQ ID NO: 141077 - DNA, 10 bp, Unknown
  misc_feature (1)..( 10): Result.003 file - promoters60/4771972
taaaataaca

SEQ ID NO: 141078 - DNA, 10 bp, Unknown
  misc_feature (1)..( 10): Result.003 file - promoters60/4771972
taaagtaaag

SEQ ID NO: 141079 - DNA, 10 bp, Unknown
  misc_feature (1)..( 10): Result.003 file - promoters60/4771972
aaaagaaaag

SEQ ID NO: 141080 - DNA, 6 bp, Unknown
  misc_feature (1)..( 6): Result.003 file - promoters60/4771972
aaagct

SEQ ID NO: 141081 - DNA, 6 bp, Unknown
  misc_feature (1)..( 6): Result.003 file - promoters60/4771972
aaagct

SEQ ID NO: 141082 - DNA, 6 bp, Unknown
  misc_feature (1)..( 6): Result.003 file - promoters60/4771972
agtaaa

SEQ ID NO: 141083 - DNA, 6 bp, Unknown
  misc_feature (1)..( 6): Result.003 file - promoters60/4771972
agtaaa

SEQ ID NO: 141084 - DNA, 7 bp, Unknown
  misc_feature (1)..( 7): Result.003 file - promoters60/4771972
aatcggg

SEQ ID NO: 141085 - DNA, 7 bp, Unknown
  misc_feature (1)..( 7): Result.003 file - promoters60/4771972
aattggg

SEQ ID NO: 141086 - DNA, 10 bp, Unknown
  misc_feature (1)..( 10): Result.003 file - promoters60/4771972
ggaaaagaaa

SEQ ID NO: 141087 - DNA, 10 bp, Unknown
  misc_feature (1)..( 10): Result.003 file - promoters60/4771972
ggaaatgaaa

SEQ ID NO: 141088 - DNA, 7 bp, Unknown
  misc_feature (1)..( 7): Result.003 file - promoters60/4771972
cccacta

SEQ ID NO: 141089 - DNA, 7 bp, Unknown
  misc_feature (1)..( 7): Result.003 file - promoters60/4771972
cccacta

SEQ ID NO: 141090 - DNA, 7 bp, Unknown
  misc_feature (1)..( 7): Result.003 file - promoters60/4771972
gtatata

SEQ ID NO: 141091 - DNA, 7 bp, Unknown
  misc_feature (1)..( 7): Result.003 file - promoters60/4771972
gtatata

SEQ ID NO: 141092 - DNA, 7 bp, Unknown
  misc_feature (1)..( 7): Result.003 file - promoters60/4771983
aattttt

SEQ ID NO: 141093 - DNA, 7 bp, Unknown
  misc_feature (1)..( 7): Result.003 file - promoters60/4771983
aattttt

SEQ ID NO: 141094 - DNA, 8 bp, Unknown
  misc_feature (1)..( 8): Result.003 file - promoters60/4771983
tttttgtt

SEQ ID NO: 141095 - DNA, 8 bp, Unknown
  misc_feature (1)..( 8): Result.003 file - promoters60/4771983
tttttgtt

SEQ ID NO: 141096 - DNA, 7 bp, Unknown
  misc_feature (1)..( 7): Result.003 file - promoters60/4771983
ataaaat

SEQ ID NO: 141097 - DNA, 7 bp, Unknown
  misc_feature (1)..( 7): Result.003 file - promoters60/4771983
ataaaat

SEQ ID NO: 141098 - DNA, 11 bp, Unknown
  misc_feature (1)..( 11): Result.003 file - promoters60/4771983
ctaatttgata

SEQ ID NO: 141099 - DNA, 11 bp, Unknown
  misc_feature (1)..( 11): Result.003 file - promoters60/4771983
ttaattttata

SEQ ID NO: 141100 - DNA, 11 bp, Unknown
  misc_feature (1)..( 11): Result.003 file - promoters60/4771983
ttaatttattt

SEQ ID NO: 141101 - DNA, 7 bp, Unknown
  misc_feature (1)..( 7): Result.003 file - promoters60/4771983
tagcttt

SEQ ID NO: 141102 - DNA, 7 bp, Unknown
  misc_feature (1)..( 7): Result.003 file - promoters60/4771983
tagtttt

SEQ ID NO: 141103 - DNA, 7 bp, Unknown
  misc_feature (1)..( 7): Result.003 file - promoters60/4771983
tagtttt

SEQ ID NO: 141104 - DNA, 7 bp, Unknown
  misc_feature (1)..( 7): Result.003 file - promoters60/4771983
ttctctt

SEQ ID NO: 141105 - DNA, 7 bp, Unknown
  misc_feature (1)..( 7): Result.003 file - promoters60/4771983
ttctctt

SEQ ID NO: 141106 - DNA, 8 bp, Unknown
  misc_feature (1)..( 8): Result.003 file - promoters60/4771983
gttttttt

SEQ ID NO: 141107 - DNA, 8 bp, Unknown
  misc_feature (1)..( 8): Result.003 file - promoters60/4771983
gttttttt

SEQ ID NO: 141108 - DNA, 8 bp, Unknown
  misc_feature (1)..( 8): Result.003 file - promoters60/4771983
aattttcg

SEQ ID NO: 141109 - DNA, 8 bp, Unknown
  misc_feature (1)..( 8): Result.003 file - promoters60/4771983
aatattcg

SEQ ID NO: 141110 - DNA, 7 bp, Unknown
  misc_feature (1)..( 7): Result.003 file - promoters60/4771983
ttttttt

SEQ ID NO: 141111 - DNA, 7 bp, Unknown
  misc_feature (1)..( 7): Result.003 file - promoters60/4771983
tttattt

SEQ ID NO: 141112 - DNA, 7 bp, Unknown
  misc_feature (1)..( 7): Result.003 file - promoters60/4771983
taaacaa

SEQ ID NO: 141113 - DNA, 7 bp, Unknown
  misc_feature (1)..( 7): Result.003 file - promoters60/4771983
taatcaa

SEQ ID NO: 141114 - DNA, 6 bp, Unknown
  misc_feature (1)..( 6): Result.003 file - promoters60/4771983
taagaa

SEQ ID NO: 141115 - DNA, 6 bp, Unknown
  misc_feature (1)..( 6): Result.003 file - promoters60/4771983
taagaa

SEQ ID NO: 141116 - DNA, 6 bp, Unknown
  misc_feature (1)..( 6): Result.003 file - promoters60/4771983
tttggt

SEQ ID NO: 141117 - DNA, 6 bp, Unknown
  misc_feature (1)..( 6): Result.003 file - promoters60/4771983
tttggt

SEQ ID NO: 141118 - DNA, 7 bp, Unknown
  misc_feature (1)..( 7): Result.003 file - promoters60/4771983
ttaaatt

SEQ ID NO: 141119 - DNA, 7 bp, Unknown
  misc_feature (1)..( 7): Result.003 file - promoters60/4771983
ttacatt

SEQ ID NO: 141120 - DNA, 6 bp, Unknown
  misc_feature (1)..( 6): Result.003 file - promoters60/4771983
atggaa

SEQ ID NO: 141121 - DNA, 6 bp, Unknown
  misc_feature (1)..( 6): Result.003 file - promoters60/4771983
atggaa

SEQ ID NO: 141122 - DNA, 8 bp, Unknown
  misc_feature (1)..( 8): Result.003 file - promoters60/4771983
aacctttt

SEQ ID NO: 141123 - DNA, 8 bp, Unknown
  misc_feature (1)..( 8): Result.003 file - promoters60/4771983
aacatttt

SEQ ID NO: 141124 - DNA, 7 bp, Unknown
  misc_feature (1)..( 7): Result.003 file - promoters60/4771983
tatgact

SEQ ID NO: 141125 - DNA, 7 bp, Unknown
  misc_feature (1)..( 7): Result.003 file - promoters60/4771983
tataact

SEQ ID NO: 141126 - DNA, 6 bp, Unknown
  misc_feature (1)..( 6): Result.003 file - promoters60/4771983
ttttta

SEQ ID NO: 141127 - DNA, 6 bp, Unknown
  misc_feature (1)..( 6): Result.003 file - promoters60/4771983
ttttta

SEQ ID NO: 141128 - DNA, 6 bp, Unknown
  misc_feature (1)..( 6): Result.003 file - promoters60/4771990
tttatt

SEQ ID NO: 141129 - DNA, 6 bp, Unknown
  misc_feature (1)..( 6): Result.003 file - promoters60/4771990
tttatt

SEQ ID NO: 141130 - DNA, 8 bp, Unknown
  misc_feature (1)..( 8): Result.003 file - promoters60/4771990
aattaaat

SEQ ID NO: 141131 - DNA, 8 bp, Unknown
  misc_feature (1)..( 8): Result.003 file - promoters60/4771990
aataaaat

SEQ ID NO: 141132 - DNA, 8 bp, Unknown
  misc_feature (1)..( 8): Result.003 file - promoters60/4771990
aatgaaat

SEQ ID NO: 141133 - DNA, 7 bp, Unknown
  misc_feature (1)..( 7): Result.003 file - promoters60/4771990
aaaaaaa

SEQ ID NO: 141134 - DNA, 7 bp, Unknown
  misc_feature (1)..( 7): Result.003 file - promoters60/4771990
aaataaa

SEQ ID NO: 141135 - DNA, 6 bp, Unknown
  misc_feature (1)..( 6): Result.003 file - promoters60/4771990
aaataa

SEQ ID NO: 141136 - DNA, 6 bp, Unknown
  misc_feature (1)..( 6): Result.003 file - promoters60/4771990
aaataa

SEQ ID NO: 141137 - DNA, 6 bp, Unknown
  misc_feature (1)..( 6): Result.003 file - promoters60/4771990
aacatt

SEQ ID NO: 141138 - DNA, 6 bp, Unknown
  misc_feature (1)..( 6): Result.003 file - promoters60/4771990
aacatt

SEQ ID NO: 141139 - DNA, 7 bp, Unknown
  misc_feature (1)..( 7): Result.003 file - promoters60/4771990
aaaacaa

SEQ ID NO: 141140 - DNA, 7 bp, Unknown
  misc_feature (1)..( 7): Result.003 file - promoters60/4771990
aaaccaa

SEQ ID NO: 141141 - DNA, 10 bp, Unknown
  misc_feature (1)..( 10): Result.003 file - promoters60/4771990
taaacaaaaa

SEQ ID NO: 141142 - DNA, 10 bp, Unknown
  misc_feature (1)..( 10): Result.003 file - promoters60/4771990
taaagaaaaa

SEQ ID NO: 141143 - DNA, 8 bp, Unknown
  misc_feature (1)..( 8): Result.003 file - promoters60/4771990
aaaataaa

SEQ ID NO: 141144 - DNA, 8 bp, Unknown
  misc_feature (1)..( 8): Result.003 file - promoters60/4771990
aaaagaaa

SEQ ID NO: 141145 - DNA, 6 bp, Unknown
  misc_feature (1)..( 6): Result.003 file - promoters60/4771990
ttattt

SEQ ID NO: 141146 - DNA, 6 bp, Unknown
  misc_feature (1)..( 6): Result.003 file - promoters60/4771990
ttattt

SEQ ID NO: 141147 - DNA, 6 bp, Unknown
  misc_feature (1)..( 6): Result.003 file - promoters60/4771990
agtaaa

SEQ ID NO: 141148 - DNA, 6 bp, Unknown
  misc_feature (1)..( 6): Result.003 file - promoters60/4771990
agtaaa

SEQ ID NO: 141149 - DNA, 7 bp, Unknown
  misc_feature (1)..( 7): Result.003 file - promoters60/4771990
aatcggg

SEQ ID NO: 141150 - DNA, 7 bp, Unknown
  misc_feature (1)..( 7): Result.003 file - promoters60/4771990
aattggg

SEQ ID NO: 141151 - DNA, 8 bp, Unknown
  misc_feature (1)..( 8): Result.003 file - promoters60/4771990
gaaagaaa

SEQ ID NO: 141152 - DNA, 8 bp, Unknown
  misc_feature (1)..( 8): Result.003 file - promoters60/4771990
gaaacaaa

SEQ ID NO: 141153 - DNA, 7 bp, Unknown
  misc_feature (1)..( 7): Result.003 file - promoters60/4771990
cccacta

SEQ ID NO: 141154 - DNA, 7 bp, Unknown
  misc_feature (1)..( 7): Result.003 file - promoters60/4771990
cccacta

SEQ ID NO: 141155 - DNA, 9 bp, Unknown
  misc_feature (1)..( 9): Result.003 file - promoters60/4771990
aaagaaaag

SEQ ID NO: 141156 - DNA, 9 bp, Unknown
  misc_feature (1)..( 9): Result.003 file - promoters60/4771990
aaagtaaag

SEQ ID NO: 141157 - DNA, 7 bp, Unknown
  misc_feature (1)..( 7): Result.003 file - promoters60/4771990
gtatata

SEQ ID NO: 141158 - DNA, 7 bp, Unknown
  misc_feature (1)..( 7): Result.003 file - promoters60/4771990
gtatata

SEQ ID NO: 141159 - DNA, 9 bp, Unknown
  misc_feature (1)..( 9): Result.003 file - promoters60/4772062
aacaattaa

SEQ ID NO: 141160 - DNA, 9 bp, Unknown
  misc_feature (1)..( 9): Result.003 file - promoters60/4772062
tataattaa

SEQ ID NO: 141161 - DNA, 9 bp, Unknown
  misc_feature (1)..( 9): Result.003 file - promoters60/4772062
cacaactaa

SEQ ID NO: 141162 - DNA, 9 bp, Unknown
  misc_feature (1)..( 9): Result.003 file - promoters60/4772062
tatgattat

SEQ ID NO: 141163 - DNA, 9 bp, Unknown
  misc_feature (1)..( 9): Result.003 file - promoters60/4772062
tatgattat

SEQ ID NO: 141164 - DNA, 8 bp, Unknown
  misc_feature (1)..( 8): Result.003 file - promoters60/4772062
ctttctta

SEQ ID NO: 141165 - DNA, 8 bp, Unknown
  misc_feature (1)..( 8): Result.003 file - promoters60/4772062
cttacttg

SEQ ID NO: 141166 - DNA, 8 bp, Unknown
  misc_feature (1)..( 8): Result.003 file - promoters60/4772062
atttttta

SEQ ID NO: 141167 - DNA, 8 bp, Unknown
  misc_feature (1)..( 8): Result.003 file - promoters60/4772062
attatttc

SEQ ID NO: 141168 - DNA, 8 bp, Unknown
  misc_feature (1)..( 8): Result.003 file - promoters60/4772062
tatattta

SEQ ID NO: 141169 - DNA, 10 bp, Unknown
  misc_feature (1)..( 10): Result.003 file - promoters60/4772062
tgaacaaaaa

SEQ ID NO: 141170 - DNA, 10 bp, Unknown
  misc_feature (1)..( 10): Result.003 file - promoters60/4772062
ataaccaaaa

SEQ ID NO: 141171 - DNA, 10 bp, Unknown
  misc_feature (1)..( 10): Result.003 file - promoters60/4772062
agaacaatag

SEQ ID NO: 141172 - DNA, 10 bp, Unknown
  misc_feature (1)..( 10): Result.003 file - promoters60/4772062
agaacatggc

SEQ ID NO: 141173 - DNA, 9 bp, Unknown
  misc_feature (1)..( 9): Result.003 file - promoters60/4772062
atatatatg

SEQ ID NO: 141174 - DNA, 9 bp, Unknown
  misc_feature (1)..( 9): Result.003 file - promoters60/4772062
ttatataag

SEQ ID NO: 141175 - DNA, 9 bp, Unknown
  misc_feature (1)..( 9): Result.003 file - promoters60/4772062
ctataaaag

SEQ ID NO: 141176 - DNA, 9 bp, Unknown
  misc_feature (1)..( 9): Result.003 file - promoters60/4772062
ctataagaa

SEQ ID NO: 141177 - DNA, 13 bp, Unknown
  misc_feature (1)..( 13): Result.003 file - promoters60/4772062
taaaccaaaaaaa

SEQ ID NO: 141178 - DNA, 13 bp, Unknown
  misc_feature (1)..( 13): Result.003 file - promoters60/4772062
aaaactaaatgat

SEQ ID NO: 141179 - DNA, 13 bp, Unknown
  misc_feature (1)..( 13): Result.003 file - promoters60/4772062
aaaattaaaaaaa

SEQ ID NO: 141180 - DNA, 13 bp, Unknown
  misc_feature (1)..( 13): Result.003 file - promoters60/4772062
tcggctatatgat

SEQ ID NO: 141181 - DNA, 9 bp, Unknown
  misc_feature (1)..( 9): Result.003 file - promoters60/4772062
aaaagatgc

SEQ ID NO: 141182 - DNA, 9 bp, Unknown
  misc_feature (1)..( 9): Result.003 file - promoters60/4772062
aaatgatat

SEQ ID NO: 141183 - DNA, 9 bp, Unknown
  misc_feature (1)..( 9): Result.003 file - promoters60/4772062
taattataa

SEQ ID NO: 141184 - DNA, 9 bp, Unknown
  misc_feature (1)..( 9): Result.003 file - promoters60/4772062
tgattataa

SEQ ID NO: 141185 - DNA, 8 bp, Unknown
  misc_feature (1)..( 8): Result.003 file - promoters60/4772062
caaagatt

SEQ ID NO: 141186 - DNA, 8 bp, Unknown
  misc_feature (1)..( 8): Result.003 file - promoters60/4772062
gaaaaatt

SEQ ID NO: 141187 - DNA, 8 bp, Unknown
  misc_feature (1)..( 8): Result.003 file - promoters60/4772062
gaaaaaga

SEQ ID NO: 141188 - DNA, 8 bp, Unknown
  misc_feature (1)..( 8): Result.003 file - promoters60/4772062
gaaaaaag

SEQ ID NO: 141189 - DNA, 11 bp, Unknown
  misc_feature (1)..( 11): Result.003 file - promoters60/4772062
agcctttgtga

SEQ ID NO: 141190 - DNA, 11 bp, Unknown
  misc_feature (1)..( 11): Result.003 file - promoters60/4772062
catttttgtga

SEQ ID NO: 141191 - DNA, 11 bp, Unknown
  misc_feature (1)..( 11): Result.003 file - promoters60/4772062
catttttgtcg

SEQ ID NO: 141192 - DNA, 11 bp, Unknown
  misc_feature (1)..( 11): Result.003 file - promoters60/4772062
aactttagtca

SEQ ID NO: 141193 - DNA, 10 bp, Unknown
  misc_feature (1)..( 10): Result.003 file - promoters60/4772062
gaagaaatat

SEQ ID NO: 141194 - DNA, 10 bp, Unknown
  misc_feature (1)..( 10): Result.003 file - promoters60/4772062
acttaaatat

SEQ ID NO: 141195 - DNA, 10 bp, Unknown
  misc_feature (1)..( 10): Result.003 file - promoters60/4772062
tgttaattat

SEQ ID NO: 141196 - DNA, 10 bp, Unknown
  misc_feature (1)..( 10): Result.003 file - promoters60/4772062
tgtcaatttt

SEQ ID NO: 141197 - DNA, 9 bp, Unknown
  misc_feature (1)..( 9): Result.003 file - promoters60/4772062
taaacaaag

SEQ ID NO: 141198 - DNA, 9 bp, Unknown
  misc_feature (1)..( 9): Result.003 file - promoters60/4772062
aaaagaaaa

SEQ ID NO: 141199 - DNA, 9 bp, Unknown
  misc_feature (1)..( 9): Result.003 file - promoters60/4772062
aaaagaatc

SEQ ID NO: 141200 - DNA, 9 bp, Unknown
  misc_feature (1)..( 9): Result.003 file - promoters60/4772062
aaaagaaga

SEQ ID NO: 141201 - DNA, 9 bp, Unknown
  misc_feature (1)..( 9): Result.003 file - promoters60/4772062
agaaaaaga

SEQ ID NO: 141202 - DNA, 9 bp, Unknown
  misc_feature (1)..( 9): Result.003 file - promoters60/4772062
agaaaaaga

SEQ ID NO: 141203 - DNA, 9 bp, Unknown
  misc_feature (1)..( 9): Result.003 file - promoters60/4772062
cgaaaaagg

SEQ ID NO: 141204 - DNA, 9 bp, Unknown
  misc_feature (1)..( 9): Result.003 file - promoters60/4772062
gaaaaaaga

SEQ ID NO: 141205 - DNA, 7 bp, Unknown
  misc_feature (1)..( 7): Result.003 file - promoters60/4772062
tgaaaag

SEQ ID NO: 141206 - DNA, 7 bp, Unknown
  misc_feature (1)..( 7): Result.003 file - promoters60/4772062
tgaaaaa

SEQ ID NO: 141207 - DNA, 7 bp, Unknown
  misc_feature (1)..( 7): Result.003 file - promoters60/4772062
agaaaaa

SEQ ID NO: 141208 - DNA, 7 bp, Unknown
  misc_feature (1)..( 7): Result.003 file - promoters60/4772062
agaaaaa

SEQ ID NO: 141209 - DNA, 12 bp, Unknown
  misc_feature (1)..( 12): Result.003 file - promoters60/4772070
ttcttcatttat

SEQ ID NO: 141210 - DNA, 12 bp, Unknown
  misc_feature (1)..( 12): Result.003 file - promoters60/4772070
ccaatcatatat

SEQ ID NO: 141211 - DNA, 12 bp, Unknown
  misc_feature (1)..( 12): Result.003 file - promoters60/4772070
tataaaatttat

SEQ ID NO: 141212 - DNA, 12 bp, Unknown
  misc_feature (1)..( 12): Result.003 file - promoters60/4772070
ttcttctttttt

SEQ ID NO: 141213 - DNA, 10 bp, Unknown
  misc_feature (1)..( 10): Result.003 file - promoters60/4772070
aataactttt

SEQ ID NO: 141214 - DNA, 10 bp, Unknown
  misc_feature (1)..( 10): Result.003 file - promoters60/4772070
aatcactaca

SEQ ID NO: 141215 - DNA, 10 bp, Unknown
  misc_feature (1)..( 10): Result.003 file - promoters60/4772070
tatatcttaa

SEQ ID NO: 141216 - DNA, 11 bp, Unknown
  misc_feature (1)..( 11): Result.003 file - promoters60/4772070
gctaacgtttc

SEQ ID NO: 141217 - DNA, 9 bp, Unknown
  misc_feature (1)..( 9): Result.003 file - promoters60/4772070
tgatgatac

SEQ ID NO: 141218 - DNA, 9 bp, Unknown
  misc_feature (1)..( 9): Result.003 file - promoters60/4772070
agatggtac

SEQ ID NO: 141219 - DNA, 9 bp, Unknown
  misc_feature (1)..( 9): Result.003 file - promoters60/4772070
tgatgaatc

SEQ ID NO: 141220 - DNA, 9 bp, Unknown
  misc_feature (1)..( 9): Result.003 file - promoters60/4772070
ttatggtat

SEQ ID NO: 141221 - DNA, 11 bp, Unknown
  misc_feature (1)..( 11): Result.003 file - promoters60/4772070
gaaaaacaaaa

SEQ ID NO: 141222 - DNA, 11 bp, Unknown
  misc_feature (1)..( 11): Result.003 file - promoters60/4772070
caaacacaaag

SEQ ID NO: 141223 - DNA, 11 bp, Unknown
  misc_feature (1)..( 11): Result.003 file - promoters60/4772070
tctttacaaag

SEQ ID NO: 141224 - DNA, 11 bp, Unknown
  misc_feature (1)..( 11): Result.003 file - promoters60/4772070
caatcactagt

SEQ ID NO: 141225 - DNA, 7 bp, Unknown
  misc_feature (1)..( 7): Result.003 file - promoters60/4772070
tttctta

SEQ ID NO: 141226 - DNA, 7 bp, Unknown
  misc_feature (1)..( 7): Result.003 file - promoters60/4772070
tttgtta

SEQ ID NO: 141227 - DNA, 7 bp, Unknown
  misc_feature (1)..( 7): Result.003 file - promoters60/4772070
tttatta

SEQ ID NO: 141228 - DNA, 8 bp, Unknown
  misc_feature (1)..( 8): Result.003 file - promoters60/4772070
tttcgtta

SEQ ID NO: 141229 - DNA, 7 bp, Unknown
  misc_feature (1)..( 7): Result.003 file - promoters60/4772084
aaaatct

SEQ ID NO: 141230 - DNA, 7 bp, Unknown
  misc_feature (1)..( 7): Result.003 file - promoters60/4772084
aaactct

SEQ ID NO: 141231 - DNA, 7 bp, Unknown
  misc_feature (1)..( 7): Result.003 file - promoters60/4772084
ggtactt

SEQ ID NO: 141232 - DNA, 7 bp, Unknown
  misc_feature (1)..( 7): Result.003 file - promoters60/4772084
ggtactt

SEQ ID NO: 141233 - DNA, 9 bp, Unknown
  misc_feature (1)..( 9): Result.003 file - promoters60/4772084
tcactcact

SEQ ID NO: 141234 - DNA, 9 bp, Unknown
  misc_feature (1)..( 9): Result.003 file - promoters60/4772084
tcactaact

SEQ ID NO: 141235 - DNA, 6 bp, Unknown
  misc_feature (1)..( 6): Result.003 file - promoters60/4772084
aactta

SEQ ID NO: 141236 - DNA, 6 bp, Unknown
  misc_feature (1)..( 6): Result.003 file - promoters60/4772084
aactta

SEQ ID NO: 141237 - DNA, 6 bp, Unknown
  misc_feature (1)..( 6): Result.003 file - promoters60/4772084
tttctt

SEQ ID NO: 141238 - DNA, 6 bp, Unknown
  misc_feature (1)..( 6): Result.003 file - promoters60/4772084
tttctt

SEQ ID NO: 141239 - DNA, 8 bp, Unknown
  misc_feature (1)..( 8): Result.003 file - promoters60/4772084
attctatt

SEQ ID NO: 141240 - DNA, 8 bp, Unknown
  misc_feature (1)..( 8): Result.003 file - promoters60/4772084
attcaatt

SEQ ID NO: 141241 - DNA, 6 bp, Unknown
  misc_feature (1)..( 6): Result.003 file - promoters60/4772084
aaatct

SEQ ID NO: 141242 - DNA, 6 bp, Unknown
  misc_feature (1)..( 6): Result.003 file - promoters60/4772084
aaatct

SEQ ID NO: 141243 - DNA, 8 bp, Unknown
  misc_feature (1)..( 8): Result.003 file - promoters60/4772084
actccaaa

SEQ ID NO: 141244 - DNA, 8 bp, Unknown
  misc_feature (1)..( 8): Result.003 file - promoters60/4772084
actgcaaa

SEQ ID NO: 141245 - DNA, 6 bp, Unknown
  misc_feature (1)..( 6): Result.003 file - promoters60/4772084
gaagat

SEQ ID NO: 141246 - DNA, 6 bp, Unknown
  misc_feature (1)..( 6): Result.003 file - promoters60/4772084
gaagat

SEQ ID NO: 141247 - DNA, 17 bp, Unknown
  misc_feature (1)..( 17): Result.003 file - promoters60/4772103
aaaaacaaaaaagttaa

SEQ ID NO: 141248 - DNA, 17 bp, Unknown
  misc_feature (1)..( 17): Result.003 file - promoters60/4772103
aaaaagaaaaaagttaa

SEQ ID NO: 141249 - DNA, 8 bp, Unknown
  misc_feature (1)..( 8): Result.003 file - promoters60/4772103
gaaaagtc

SEQ ID NO: 141250 - DNA, 8 bp, Unknown
  misc_feature (1)..( 8): Result.003 file - promoters60/4772103
gaatagtc

SEQ ID NO: 141251 - DNA, 9 bp, Unknown
  misc_feature (1)..( 9): Result.003 file - promoters60/4772103
cgcaaattt

SEQ ID NO: 141252 - DNA, 9 bp, Unknown
  misc_feature (1)..( 9): Result.003 file - promoters60/4772103
cgcatattt

SEQ ID NO: 141253 - DNA, 7 bp, Unknown
  misc_feature (1)..( 7): Result.003 file - promoters60/4772103
tgataca

SEQ ID NO: 141254 - DNA, 7 bp, Unknown
  misc_feature (1)..( 7): Result.003 file - promoters60/4772103
tgataca

SEQ ID NO: 141255 - DNA, 15 bp, Unknown
  misc_feature (1)..( 15): Result.003 file - promoters60/4772103
accaatcagaattgt

SEQ ID NO: 141256 - DNA, 15 bp, Unknown
  misc_feature (1)..( 15): Result.003 file - promoters60/4772103
accaatcagatttgt

SEQ ID NO: 141257 - DNA, 7 bp, Unknown
  misc_feature (1)..( 7): Result.003 file - promoters60/4772103
tctagtg

SEQ ID NO: 141258 - DNA, 7 bp, Unknown
  misc_feature (1)..( 7): Result.003 file - promoters60/4772103
tctcgtg

SEQ ID NO: 141259 - DNA, 6 bp, Unknown
  misc_feature (1)..( 6): Result.003 file - promoters60/4772103
ttaaag

SEQ ID NO: 141260 - DNA, 6 bp, Unknown
  misc_feature (1)..( 6): Result.003 file - promoters60/4772103
ttaaag

SEQ ID NO: 141261 - DNA, 6 bp, Unknown
  misc_feature (1)..( 6): Result.003 file - promoters60/4772103
gtggta

SEQ ID NO: 141262 - DNA, 6 bp, Unknown
  misc_feature (1)..( 6): Result.003 file - promoters60/4772103
gtggta

SEQ ID NO: 141263 - DNA, 6 bp, Unknown
  misc_feature (1)..( 6): Result.003 file - promoters60/4772103
tttctt

SEQ ID NO: 141264 - DNA, 6 bp, Unknown
  misc_feature (1)..( 6): Result.003 file - promoters60/4772103
tttctt

SEQ ID NO: 141265 - DNA, 9 bp, Unknown
  misc_feature (1)..( 9): Result.003 file - promoters60/4772103
ttattatat

SEQ ID NO: 141266 - DNA, 9 bp, Unknown
  misc_feature (1)..( 9): Result.003 file - promoters60/4772103
ttatcatat

SEQ ID NO: 141267 - DNA, 7 bp, Unknown
  misc_feature (1)..( 7): Result.003 file - promoters60/4772103
gacaaaa

SEQ ID NO: 141268 - DNA, 7 bp, Unknown
  misc_feature (1)..( 7): Result.003 file - promoters60/4772103
gaccaaa

SEQ ID NO: 141269 - DNA, 8 bp, Unknown
  misc_feature (1)..( 8): Result.003 file - promoters60/4772122
ggacaaaa

SEQ ID NO: 141270 - DNA, 8 bp, Unknown
  misc_feature (1)..( 8): Result.003 file - promoters60/4772122
ggataaaa

SEQ ID NO: 141271 - DNA, 8 bp, Unknown
  misc_feature (1)..( 8): Result.003 file - promoters60/4772122
aaataaaa

SEQ ID NO: 141272 - DNA, 7 bp, Unknown
  misc_feature (1)..( 7): Result.003 file - promoters60/4772122
ttattac

SEQ ID NO: 141273 - DNA, 7 bp, Unknown
  misc_feature (1)..( 7): Result.003 file - promoters60/4772122
ttactac

SEQ ID NO: 141274 - DNA, 7 bp, Unknown
  misc_feature (1)..( 7): Result.003 file - promoters60/4772122
ttactaa

SEQ ID NO: 141275 - DNA, 7 bp, Unknown
  misc_feature (1)..( 7): Result.003 file - promoters60/4772122
aacaaat

SEQ ID NO: 141276 - DNA, 7 bp, Unknown
  misc_feature (1)..( 7): Result.003 file - promoters60/4772122
tacaaat

SEQ ID NO: 141277 - DNA, 7 bp, Unknown
  misc_feature (1)..( 7): Result.003 file - promoters60/4772122
aacaaac

SEQ ID NO: 141278 - DNA, 11 bp, Unknown
  misc_feature (1)..( 11): Result.003 file - promoters60/4772130
cgattgcacaa

SEQ ID NO: 141279 - DNA, 11 bp, Unknown
  misc_feature (1)..( 11): Result.003 file - promoters60/4772130
cgaatgcagcg

SEQ ID NO: 141280 - DNA, 11 bp, Unknown
  misc_feature (1)..( 11): Result.003 file - promoters60/4772130
aaatttcacaa

SEQ ID NO: 141281 - DNA, 11 bp, Unknown
  misc_feature (1)..( 11): Result.003 file - promoters60/4772130
caatttctact

SEQ ID NO: 141282 - DNA, 9 bp, Unknown
  misc_feature (1)..( 9): Result.003 file - promoters60/4772137
gagatctta

SEQ ID NO: 141283 - DNA, 9 bp, Unknown
  misc_feature (1)..( 9): Result.003 file - promoters60/4772137
ctgatttta

SEQ ID NO: 141284 - DNA, 9 bp, Unknown
  misc_feature (1)..( 9): Result.003 file - promoters60/4772137
ctgattttg

SEQ ID NO: 141285 - DNA, 7 bp, Unknown
  misc_feature (1)..( 7): Result.003 file - promoters60/4772137
tgacttg

SEQ ID NO: 141286 - DNA, 7 bp, Unknown
  misc_feature (1)..( 7): Result.003 file - promoters60/4772137
agacttg

SEQ ID NO: 141287 - DNA, 7 bp, Unknown
  misc_feature (1)..( 7): Result.003 file - promoters60/4772137
agatttg

SEQ ID NO: 141288 - DNA, 7 bp, Unknown
  misc_feature (1)..( 7): Result.003 file - promoters60/4772137
agacttg

SEQ ID NO: 141289 - DNA, 7 bp, Unknown
  misc_feature (1)..( 7): Result.003 file - promoters60/4772137
aaagtaa

SEQ ID NO: 141290 - DNA, 7 bp, Unknown
  misc_feature (1)..( 7): Result.003 file - promoters60/4772137
aaagtat

SEQ ID NO: 141291 - DNA, 8 bp, Unknown
  misc_feature (1)..( 8): Result.003 file - promoters60/4772137
aaacgtaa

SEQ ID NO: 141292 - DNA, 9 bp, Unknown
  misc_feature (1)..( 9): Result.003 file - promoters60/4772137
tatttaaaa

SEQ ID NO: 141293 - DNA, 9 bp, Unknown
  misc_feature (1)..( 9): Result.003 file - promoters60/4772137
tattcaaac

SEQ ID NO: 141294 - DNA, 9 bp, Unknown
  misc_feature (1)..( 9): Result.003 file - promoters60/4772137
actttaaaa

SEQ ID NO: 141295 - DNA, 7 bp, Unknown
  misc_feature (1)..( 7): Result.003 file - promoters60/4772137
tttatat

SEQ ID NO: 141296 - DNA, 7 bp, Unknown
  misc_feature (1)..( 7): Result.003 file - promoters60/4772137
tttttat

SEQ ID NO: 141297 - DNA, 7 bp, Unknown
  misc_feature (1)..( 7): Result.003 file - promoters60/4772137
ttttttc

SEQ ID NO: 141298 - DNA, 8 bp, Unknown
  misc_feature (1)..( 8): Result.003 file - promoters60/4772137
caatttga

SEQ ID NO: 141299 - DNA, 8 bp, Unknown
  misc_feature (1)..( 8): Result.003 file - promoters60/4772137
agatttga

SEQ ID NO: 141300 - DNA, 8 bp, Unknown
  misc_feature (1)..( 8): Result.003 file - promoters60/4772137
agacttgg

SEQ ID NO: 141301 - DNA, 8 bp, Unknown
  misc_feature (1)..( 8): Result.003 file - promoters60/4772137
agacttga

SEQ ID NO: 141302 - DNA, 8 bp, Unknown
  misc_feature (1)..( 8): Result.003 file - promoters60/4772155
aatttttt

SEQ ID NO: 141303 - DNA, 8 bp, Unknown
  misc_feature (1)..( 8): Result.003 file - promoters60/4772155
aattttaa

SEQ ID NO: 141304 - DNA, 8 bp, Unknown
  misc_feature (1)..( 8): Result.003 file - promoters60/4772155
tatttttt

SEQ ID NO: 141305 - DNA, 10 bp, Unknown
  misc_feature (1)..( 10): Result.003 file - promoters60/4772155
aaattcttgt

SEQ ID NO: 141306 - DNA, 10 bp, Unknown
  misc_feature (1)..( 10): Result.003 file - promoters60/4772155
aaaatcttgt

SEQ ID NO: 141307 - DNA, 7 bp, Unknown
  misc_feature (1)..( 7): Result.003 file - promoters60/4772155
taccatt

SEQ ID NO: 141308 - DNA, 7 bp, Unknown
  misc_feature (1)..( 7): Result.003 file - promoters60/4772155
tacgatt

SEQ ID NO: 141309 - DNA, 6 bp, Unknown
  misc_feature (1)..( 6): Result.003 file - promoters60/4772155
tcaaat

SEQ ID NO: 141310 - DNA, 6 bp, Unknown
  misc_feature (1)..( 6): Result.003 file - promoters60/4772155
tcaaat

SEQ ID NO: 141311 - DNA, 10 bp, Unknown
  misc_feature (1)..( 10): Result.003 file - promoters60/4772155
gatcataaca

SEQ ID NO: 141312 - DNA, 10 bp, Unknown
  misc_feature (1)..( 10): Result.003 file - promoters60/4772155
gatcacaaca

SEQ ID NO: 141313 - DNA, 10 bp, Unknown
  misc_feature (1)..( 10): Result.003 file - promoters60/4772155
tatcttaacc

SEQ ID NO: 141314 - DNA, 7 bp, Unknown
  misc_feature (1)..( 7): Result.003 file - promoters60/4772155
ttccact

SEQ ID NO: 141315 - DNA, 7 bp, Unknown
  misc_feature (1)..( 7): Result.003 file - promoters60/4772155
ttctact

SEQ ID NO: 141316 - DNA, 7 bp, Unknown
  misc_feature (1)..( 7): Result.003 file - promoters60/4772155
atggtca

SEQ ID NO: 141317 - DNA, 7 bp, Unknown
  misc_feature (1)..( 7): Result.003 file - promoters60/4772155
atgttca

SEQ ID NO: 141318 - DNA, 10 bp, Unknown
  misc_feature (1)..( 10): Result.003 file - promoters60/4772155
caaaaaaaaa

SEQ ID NO: 141319 - DNA, 10 bp, Unknown
  misc_feature (1)..( 10): Result.003 file - promoters60/4772155
caataaaatc

SEQ ID NO: 141320 - DNA, 10 bp, Unknown
  misc_feature (1)..( 10): Result.003 file - promoters60/4772155
ttctaaaatc

SEQ ID NO: 141321 - DNA, 6 bp, Unknown
  misc_feature (1)..( 6): Result.003 file - promoters60/4772155
tttttt

SEQ ID NO: 141322 - DNA, 6 bp, Unknown
  misc_feature (1)..( 6): Result.003 file - promoters60/4772155
tttttt

SEQ ID NO: 141323 - DNA, 7 bp, Unknown
  misc_feature (1)..( 7): Result.003 file - promoters60/4772155
atttttc

SEQ ID NO: 141324 - DNA, 7 bp, Unknown
  misc_feature (1)..( 7): Result.003 file - promoters60/4772155
atttttc

SEQ ID NO: 141325 - DNA, 8 bp, Unknown
  misc_feature (1)..( 8): Result.003 file - promoters60/4772155
ttttttct

SEQ ID NO: 141326 - DNA, 8 bp, Unknown
  misc_feature (1)..( 8): Result.003 file - promoters60/4772155
ttttatct

SEQ ID NO: 141327 - DNA, 8 bp, Unknown
  misc_feature (1)..( 8): Result.003 file - promoters60/4772155
tttgttac

SEQ ID NO: 141328 - DNA, 7 bp, Unknown
  misc_feature (1)..( 7): Result.003 file - promoters60/4772155
aggaaaa

SEQ ID NO: 141329 - DNA, 7 bp, Unknown
  misc_feature (1)..( 7): Result.003 file - promoters60/4772155
aggaaaa

SEQ ID NO: 141330 - DNA, 11 bp, Unknown
  misc_feature (1)..( 11): Result.003 file - promoters60/4772155
aaaaacagaaa

SEQ ID NO: 141331 - DNA, 11 bp, Unknown
  misc_feature (1)..( 11): Result.003 file - promoters60/4772155
aaaaacaaaaa

SEQ ID NO: 141332 - DNA, 7 bp, Unknown
  misc_feature (1)..( 7): Result.003 file - promoters60/4772155
tttgcat

SEQ ID NO: 141333 - DNA, 7 bp, Unknown
  misc_feature (1)..( 7): Result.003 file - promoters60/4772155
tttgcat

SEQ ID NO: 141334 - DNA, 8 bp, Unknown
  misc_feature (1)..( 8): Result.003 file - promoters60/4772155
tctataga

SEQ ID NO: 141335 - DNA, 8 bp, Unknown
  misc_feature (1)..( 8): Result.003 file - promoters60/4772155
tctttaga

SEQ ID NO: 141336 - DNA, 6 bp, Unknown
  misc_feature (1)..( 6): Result.003 file - promoters60/4772155
taacat

SEQ ID NO: 141337 - DNA, 6 bp, Unknown
  misc_feature (1)..( 6): Result.003 file - promoters60/4772155
taacat

SEQ ID NO: 141338 - DNA, 7 bp, Unknown
  misc_feature (1)..( 7): Result.003 file - promoters60/4772155
aacaaaa

SEQ ID NO: 141339 - DNA, 7 bp, Unknown
  misc_feature (1)..( 7): Result.003 file - promoters60/4772155
aactaaa

SEQ ID NO: 141340 - DNA, 6 bp, Unknown
  misc_feature (1)..( 6): Result.003 file - promoters60/4772155
ttctta

SEQ ID NO: 141341 - DNA, 6 bp, Unknown
  misc_feature (1)..( 6): Result.003 file - promoters60/4772155
ttctta

SEQ ID NO: 141342 - DNA, 8 bp, Unknown
  misc_feature (1)..( 8): Result.003 file - promoters60/4772155
ttttttta

SEQ ID NO: 141343 - DNA, 8 bp, Unknown
  misc_feature (1)..( 8): Result.003 file - promoters60/4772155
tttgttta

SEQ ID NO: 141344 - DNA, 10 bp, Unknown
  misc_feature (1)..( 10): Result.003 file - promoters60/4772195
gaacatgaca

SEQ ID NO: 141345 - DNA, 10 bp, Unknown
  misc_feature (1)..( 10): Result.003 file - promoters60/4772195
agacaagaca

SEQ ID NO: 141346 - DNA, 10 bp, Unknown
  misc_feature (1)..( 10): Result.003 file - promoters60/4772195
gaaaatgaac

SEQ ID NO: 141347 - DNA, 8 bp, Unknown
  misc_feature (1)..( 8): Result.003 file - promoters60/4772195
cgaaatta

SEQ ID NO: 141348 - DNA, 8 bp, Unknown
  misc_feature (1)..( 8): Result.003 file - promoters60/4772195
agaaatta

SEQ ID NO: 141349 - DNA, 8 bp, Unknown
  misc_feature (1)..( 8): Result.003 file - promoters60/4772195
cgaaatcc

SEQ ID NO: 141350 - DNA, 8 bp, Unknown
  misc_feature (1)..( 8): Result.003 file - promoters60/4772195
ctgtttaa

SEQ ID NO: 141351 - DNA, 8 bp, Unknown
  misc_feature (1)..( 8): Result.003 file - promoters60/4772195
gagtttaa

SEQ ID NO: 141352 - DNA, 8 bp, Unknown
  misc_feature (1)..( 8): Result.003 file - promoters60/4772195
ctgattat

SEQ ID NO: 141353 - DNA, 13 bp, Unknown
  misc_feature (1)..( 13): Result.003 file - promoters60/4772195
attctttaattac

SEQ ID NO: 141354 - DNA, 13 bp, Unknown
  misc_feature (1)..( 13): Result.003 file - promoters60/4772195
ttcattttatttt

SEQ ID NO: 141355 - DNA, 13 bp, Unknown
  misc_feature (1)..( 13): Result.003 file - promoters60/4772195
ttctttttctttt

SEQ ID NO: 141356 - DNA, 12 bp, Unknown
  misc_feature (1)..( 12): Result.003 file - promoters60/4772195
ttctttaattac

SEQ ID NO: 141357 - DNA, 12 bp, Unknown
  misc_feature (1)..( 12): Result.003 file - promoters60/4772195
ttctttttcttt

SEQ ID NO: 141358 - DNA, 13 bp, Unknown
  misc_feature (1)..( 13): Result.003 file - promoters60/4772195
ttcattttatttt

SEQ ID NO: 141359 - DNA, 9 bp, Unknown
  misc_feature (1)..( 9): Result.003 file - promoters60/4772195
agggtttta

SEQ ID NO: 141360 - DNA, 9 bp, Unknown
  misc_feature (1)..( 9): Result.003 file - promoters60/4772195
aggattttc

SEQ ID NO: 141361 - DNA, 9 bp, Unknown
  misc_feature (1)..( 9): Result.003 file - promoters60/4772195
tagatattc

SEQ ID NO: 141362 - DNA, 12 bp, Unknown
  misc_feature (1)..( 12): Result.003 file - promoters60/4772208
ttaaatgaagat

SEQ ID NO: 141363 - DNA, 12 bp, Unknown
  misc_feature (1)..( 12): Result.003 file - promoters60/4772208
aataatgatgat

SEQ ID NO: 141364 - DNA, 12 bp, Unknown
  misc_feature (1)..( 12): Result.003 file - promoters60/4772208
gacaatgaattg

SEQ ID NO: 141365 - DNA, 12 bp, Unknown
  misc_feature (1)..( 12): Result.003 file - promoters60/4772208
ttacatgaacag

SEQ ID NO: 141366 - DNA, 12 bp, Unknown
  misc_feature (1)..( 12): Result.003 file - promoters60/4772208
cgaaatcaatga

SEQ ID NO: 141367 - DNA, 10 bp, Unknown
  misc_feature (1)..( 10): Result.003 file - promoters60/4772208
gtcatcaaat

SEQ ID NO: 141368 - DNA, 10 bp, Unknown
  misc_feature (1)..( 10): Result.003 file - promoters60/4772208
aatttcaaat

SEQ ID NO: 141369 - DNA, 10 bp, Unknown
  misc_feature (1)..( 10): Result.003 file - promoters60/4772208
atgttcaaaa

SEQ ID NO: 141370 - DNA, 10 bp, Unknown
  misc_feature (1)..( 10): Result.003 file - promoters60/4772208
tctttcaaaa

SEQ ID NO: 141371 - DNA, 10 bp, Unknown
  misc_feature (1)..( 10): Result.003 file - promoters60/4772208
tctttcagac

SEQ ID NO: 141372 - DNA, 8 bp, Unknown
  misc_feature (1)..( 8): Result.003 file - promoters60/4772208
caaatgta

SEQ ID NO: 141373 - DNA, 8 bp, Unknown
  misc_feature (1)..( 8): Result.003 file - promoters60/4772208
taaatgtt

SEQ ID NO: 141374 - DNA, 8 bp, Unknown
  misc_feature (1)..( 8): Result.003 file - promoters60/4772208
agaatgtt

SEQ ID NO: 141375 - DNA, 8 bp, Unknown
  misc_feature (1)..( 8): Result.003 file - promoters60/4772208
taactgtc

SEQ ID NO: 141376 - DNA, 9 bp, Unknown
  misc_feature (1)..( 9): Result.003 file - promoters60/4772223
actaataaa

SEQ ID NO: 141377 - DNA, 9 bp, Unknown
  misc_feature (1)..( 9): Result.003 file - promoters60/4772223
acttatata

SEQ ID NO: 141378 - DNA, 9 bp, Unknown
  misc_feature (1)..( 9): Result.003 file - promoters60/4772223
tcttaaata

SEQ ID NO: 141379 - DNA, 8 bp, Unknown
  misc_feature (1)..( 8): Result.003 file - promoters60/4772223
atttcaaa

SEQ ID NO: 141380 - DNA, 8 bp, Unknown
  misc_feature (1)..( 8): Result.003 file - promoters60/4772223
gtttaaaa

SEQ ID NO: 141381 - DNA, 8 bp, Unknown
  misc_feature (1)..( 8): Result.003 file - promoters60/4772223
atttcaat

SEQ ID NO: 141382 - DNA, 9 bp, Unknown
  misc_feature (1)..( 9): Result.003 file - promoters60/4772223
caaaacaaa

SEQ ID NO: 141383 - DNA, 9 bp, Unknown
  misc_feature (1)..( 9): Result.003 file - promoters60/4772223
tgaaaaaaa

SEQ ID NO: 141384 - DNA, 10 bp, Unknown
  misc_feature (1)..( 10): Result.003 file - promoters60/4772223
tcaaatcaat

SEQ ID NO: 141385 - DNA, 9 bp, Unknown
  misc_feature (1)..( 9): Result.003 file - promoters60/4772223
gaaatacta

SEQ ID NO: 141386 - DNA, 9 bp, Unknown
  misc_feature (1)..( 9): Result.003 file - promoters60/4772223
caaacacta

SEQ ID NO: 141387 - DNA, 9 bp, Unknown
  misc_feature (1)..( 9): Result.003 file - promoters60/4772223
aaaacacac

SEQ ID NO: 141388 - DNA, 9 bp, Unknown
  misc_feature (1)..( 9): Result.003 file - promoters60/4772223
caatcactt

SEQ ID NO: 141389 - DNA, 8 bp, Unknown
  misc_feature (1)..( 8): Result.003 file - promoters60/4772223
ctaatttt

SEQ ID NO: 141390 - DNA, 8 bp, Unknown
  misc_feature (1)..( 8): Result.003 file - promoters60/4772223
ataatttt

SEQ ID NO: 141391 - DNA, 8 bp, Unknown
  misc_feature (1)..( 8): Result.003 file - promoters60/4772223
ataattgt

SEQ ID NO: 141392 - DNA, 9 bp, Unknown
  misc_feature (1)..( 9): Result.003 file - promoters60/4772223
caaagtaaa

SEQ ID NO: 141393 - DNA, 9 bp, Unknown
  misc_feature (1)..( 9): Result.003 file - promoters60/4772223
acaagaaaa

SEQ ID NO: 141394 - DNA, 9 bp, Unknown
  misc_feature (1)..( 9): Result.003 file - promoters60/4772223
acatgaaac

SEQ ID NO: 141395 - DNA, 10 bp, Unknown
  misc_feature (1)..( 10): Result.003 file - promoters60/4772223
cgatgagaat

SEQ ID NO: 141396 - DNA, 10 bp, Unknown
  misc_feature (1)..( 10): Result.003 file - promoters60/4772223
ttttgacaat

SEQ ID NO: 141397 - DNA, 10 bp, Unknown
  misc_feature (1)..( 10): Result.003 file - promoters60/4772223
tttagacaca

SEQ ID NO: 141398 - DNA, 12 bp, Unknown
  misc_feature (1)..( 12): Result.003 file - promoters60/4772223
ttaccaaaatga

SEQ ID NO: 141399 - DNA, 12 bp, Unknown
  misc_feature (1)..( 12): Result.003 file - promoters60/4772223
ttatcaaattga

SEQ ID NO: 141400 - DNA, 12 bp, Unknown
  misc_feature (1)..( 12): Result.003 file - promoters60/4772223
atattaaatttt

SEQ ID NO: 141401 - DNA, 8 bp, Unknown
  misc_feature (1)..( 8): Result.003 file - promoters60/4772223
ccatcaaa

SEQ ID NO: 141402 - DNA, 8 bp, Unknown
  misc_feature (1)..( 8): Result.003 file - promoters60/4772223
acatgaaa

SEQ ID NO: 141403 - DNA, 8 bp, Unknown
  misc_feature (1)..( 8): Result.003 file - promoters60/4772223
acaagaaa

SEQ ID NO: 141404 - DNA, 7 bp, Unknown
  misc_feature (1)..( 7): Result.003 file - promoters60/4772230
atttatt

SEQ ID NO: 141405 - DNA, 7 bp, Unknown
  misc_feature (1)..( 7): Result.003 file - promoters60/4772230
atttatt

SEQ ID NO: 141406 - DNA, 6 bp, Unknown
  misc_feature (1)..( 6): Result.003 file - promoters60/4772230
ttaaaa

SEQ ID NO: 141407 - DNA, 6 bp, Unknown
  misc_feature (1)..( 6): Result.003 file - promoters60/4772230
ttaaaa

SEQ ID NO: 141408 - DNA, 7 bp, Unknown
  misc_feature (1)..( 7): Result.003 file - promoters60/4772230
actaatt

SEQ ID NO: 141409 - DNA, 7 bp, Unknown
  misc_feature (1)..( 7): Result.003 file - promoters60/4772230
actaatt

SEQ ID NO: 141410 - DNA, 7 bp, Unknown
  misc_feature (1)..( 7): Result.003 file - promoters60/4772230
tctaatt

SEQ ID NO: 141411 - DNA, 6 bp, Unknown
  misc_feature (1)..( 6): Result.003 file - promoters60/4772230
tttttc

SEQ ID NO: 141412 - DNA, 6 bp, Unknown
  misc_feature (1)..( 6): Result.003 file - promoters60/4772230
tttttc

SEQ ID NO: 141413 - DNA, 9 bp, Unknown
  misc_feature (1)..( 9): Result.003 file - promoters60/4772230
aatagattt

SEQ ID NO: 141414 - DNA, 9 bp, Unknown
  misc_feature (1)..( 9): Result.003 file - promoters60/4772230
tgtagattc

SEQ ID NO: 141415 - DNA, 9 bp, Unknown
  misc_feature (1)..( 9): Result.003 file - promoters60/4772230
aatagtttt

SEQ ID NO: 141416 - DNA, 7 bp, Unknown
  misc_feature (1)..( 7): Result.003 file - promoters60/4772230
taaattt

SEQ ID NO: 141417 - DNA, 7 bp, Unknown
  misc_feature (1)..( 7): Result.003 file - promoters60/4772230
taatttt

SEQ ID NO: 141418 - DNA, 6 bp, Unknown
  misc_feature (1)..( 6): Result.003 file - promoters60/4772230
tcaaga

SEQ ID NO: 141419 - DNA, 6 bp, Unknown
  misc_feature (1)..( 6): Result.003 file - promoters60/4772230
tcaaga

SEQ ID NO: 141420 - DNA, 10 bp, Unknown
  misc_feature (1)..( 10): Result.003 file - promoters60/4772230
aaatattcac

SEQ ID NO: 141421 - DNA, 10 bp, Unknown
  misc_feature (1)..( 10): Result.003 file - promoters60/4772230
ctatatacac

SEQ ID NO: 141422 - DNA, 10 bp, Unknown
  misc_feature (1)..( 10): Result.003 file - promoters60/4772230
aaatattaat

SEQ ID NO: 141423 - DNA, 6 bp, Unknown
  misc_feature (1)..( 6): Result.003 file - promoters60/4772230
caaaca

SEQ ID NO: 141424 - DNA, 6 bp, Unknown
  misc_feature (1)..( 6): Result.003 file - promoters60/4772230
caaaca

SEQ ID NO: 141425 - DNA, 8 bp, Unknown
  misc_feature (1)..( 8): Result.003 file - promoters60/4772230
tatcttca

SEQ ID NO: 141426 - DNA, 8 bp, Unknown
  misc_feature (1)..( 8): Result.003 file - promoters60/4772230
tatcttca

SEQ ID NO: 141427 - DNA, 7 bp, Unknown
  misc_feature (1)..( 7): Result.003 file - promoters60/4772230
atagatt

SEQ ID NO: 141428 - DNA, 7 bp, Unknown
  misc_feature (1)..( 7): Result.003 file - promoters60/4772230
atatatt

SEQ ID NO: 141429 - DNA, 8 bp, Unknown
  misc_feature (1)..( 8): Result.003 file - promoters60/4772230
tttcaatt

SEQ ID NO: 141430 - DNA, 8 bp, Unknown
  misc_feature (1)..( 8): Result.003 file - promoters60/4772230
tttctatt

SEQ ID NO: 141431 - DNA, 6 bp, Unknown
  misc_feature (1)..( 6): Result.003 file - promoters60/4772230
ttttct

SEQ ID NO: 141432 - DNA, 6 bp, Unknown
  misc_feature (1)..( 6): Result.003 file - promoters60/4772230
ttttct

SEQ ID NO: 141433 - DNA, 7 bp, Unknown
  misc_feature (1)..( 7): Result.003 file - promoters60/4772230
ataaaat

SEQ ID NO: 141434 - DNA, 7 bp, Unknown
  misc_feature (1)..( 7): Result.003 file - promoters60/4772230
ataaaat

SEQ ID NO: 141435 - DNA, 7 bp, Unknown
  misc_feature (1)..( 7): Result.003 file - promoters60/4772230
aacccaa

SEQ ID NO: 141436 - DNA, 7 bp, Unknown
  misc_feature (1)..( 7): Result.003 file - promoters60/4772230
aactcaa

SEQ ID NO: 141437 - DNA, 8 bp, Unknown
  misc_feature (1)..( 8): Result.003 file - promoters60/4772230
cacgtgtc

SEQ ID NO: 141438 - DNA, 8 bp, Unknown
  misc_feature (1)..( 8): Result.003 file - promoters60/4772230
cacatgtc

SEQ ID NO: 141439 - DNA, 8 bp, Unknown
  misc_feature (1)..( 8): Result.003 file - promoters60/4772230
tttattaa

SEQ ID NO: 141440 - DNA, 8 bp, Unknown
  misc_feature (1)..( 8): Result.003 file - promoters60/4772230
tttcttaa

SEQ ID NO: 141441 - DNA, 8 bp, Unknown
  misc_feature (1)..( 8): Result.003 file - promoters60/4772230
aatttatc

SEQ ID NO: 141442 - DNA, 8 bp, Unknown
  misc_feature (1)..( 8): Result.003 file - promoters60/4772230
aatttatc

SEQ ID NO: 141443 - DNA, 8 bp, Unknown
  misc_feature (1)..( 8): Result.003 file - promoters60/4772230
atatatat

SEQ ID NO: 141444 - DNA, 8 bp, Unknown
  misc_feature (1)..( 8): Result.003 file - promoters60/4772230
atagatat

SEQ ID NO: 141445 - DNA, 7 bp, Unknown
  misc_feature (1)..( 7): Result.003 file - promoters60/4772230
tcataca

SEQ ID NO: 141446 - DNA, 7 bp, Unknown
  misc_feature (1)..( 7): Result.003 file - promoters60/4772230
tcataca

SEQ ID NO: 141447 - DNA, 7 bp, Unknown
  misc_feature (1)..( 7): Result.003 file - promoters60/4772230
catctat

SEQ ID NO: 141448 - DNA, 7 bp, Unknown
  misc_feature (1)..( 7): Result.003 file - promoters60/4772230
catctat

SEQ ID NO: 141449 - DNA, 7 bp, Unknown
  misc_feature (1)..( 7): Result.003 file - promoters60/4772230
tatatac

SEQ ID NO: 141450 - DNA, 7 bp, Unknown
  misc_feature (1)..( 7): Result.003 file - promoters60/4772230
tatttac

SEQ ID NO: 141451 - DNA, 8 bp, Unknown
  misc_feature (1)..( 8): Result.003 file - promoters60/4772230
aaacaaaa

SEQ ID NO: 141452 - DNA, 8 bp, Unknown
  misc_feature (1)..( 8): Result.003 file - promoters60/4772230
aaataaaa

SEQ ID NO: 141453 - DNA, 7 bp, Unknown
  misc_feature (1)..( 7): Result.003 file - promoters60/4772230
aaaccaa

SEQ ID NO: 141454 - DNA, 7 bp, Unknown
  misc_feature (1)..( 7): Result.003 file - promoters60/4772230
aaatcaa

SEQ ID NO: 141455 - DNA, 11 bp, Unknown
  misc_feature (1)..( 11): Result.003 file - promoters60/4772240
tagattcttca

SEQ ID NO: 141456 - DNA, 11 bp, Unknown
  misc_feature (1)..( 11): Result.003 file - promoters60/4772240
tagtttcttac

SEQ ID NO: 141457 - DNA, 11 bp, Unknown
  misc_feature (1)..( 11): Result.003 file - promoters60/4772240
caaatttttct

SEQ ID NO: 141458 - DNA, 11 bp, Unknown
  misc_feature (1)..( 11): Result.003 file - promoters60/4772240
agtattattca

SEQ ID NO: 141459 - DNA, 11 bp, Unknown
  misc_feature (1)..( 11): Result.003 file - promoters60/4772240
atttttcttca

SEQ ID NO: 141460 - DNA, 11 bp, Unknown
  misc_feature (1)..( 11): Result.003 file - promoters60/4772240
attatgatttt

SEQ ID NO: 141461 - DNA, 9 bp, Unknown
  misc_feature (1)..( 9): Result.003 file - promoters60/4772240
gctgaaaac

SEQ ID NO: 141462 - DNA, 9 bp, Unknown
  misc_feature (1)..( 9): Result.003 file - promoters60/4772240
tgagaaaac

SEQ ID NO: 141463 - DNA, 9 bp, Unknown
  misc_feature (1)..( 9): Result.003 file - promoters60/4772240
taagaaaag

SEQ ID NO: 141464 - DNA, 9 bp, Unknown
  misc_feature (1)..( 9): Result.003 file - promoters60/4772240
acagaaaaa

SEQ ID NO: 141465 - DNA, 9 bp, Unknown
  misc_feature (1)..( 9): Result.003 file - promoters60/4772240
gaaggaaat

SEQ ID NO: 141466 - DNA, 9 bp, Unknown
  misc_feature (1)..( 9): Result.003 file - promoters60/4772240
taaaaaaaa

SEQ ID NO: 141467 - DNA, 12 bp, Unknown
  misc_feature (1)..( 12): Result.003 file - promoters60/4772240
aacgaagaggaa

SEQ ID NO: 141468 - DNA, 12 bp, Unknown
  misc_feature (1)..( 12): Result.003 file - promoters60/4772240
taagaaaaggat

SEQ ID NO: 141469 - DNA, 12 bp, Unknown
  misc_feature (1)..( 12): Result.003 file - promoters60/4772240
tgagaaaactat

SEQ ID NO: 141470 - DNA, 12 bp, Unknown
  misc_feature (1)..( 12): Result.003 file - promoters60/4772240
acagaaaaatca

SEQ ID NO: 141471 - DNA, 12 bp, Unknown
  misc_feature (1)..( 12): Result.003 file - promoters60/4772240
gaaggaaataga

SEQ ID NO: 141472 - DNA, 12 bp, Unknown
  misc_feature (1)..( 12): Result.003 file - promoters60/4772240
taaaaaaaaaat

SEQ ID NO: 141473 - DNA, 12 bp, Unknown
  misc_feature (1)..( 12): Result.003 file - promoters60/4772240
ttaccaaaggat

SEQ ID NO: 141474 - DNA, 12 bp, Unknown
  misc_feature (1)..( 12): Result.003 file - promoters60/4772240
aagaacattatt

SEQ ID NO: 141475 - DNA, 12 bp, Unknown
  misc_feature (1)..( 12): Result.003 file - promoters60/4772240
gagaatattaaa

SEQ ID NO: 141476 - DNA, 12 bp, Unknown
  misc_feature (1)..( 12): Result.003 file - promoters60/4772240
cgagacattatg

SEQ ID NO: 141477 - DNA, 12 bp, Unknown
  misc_feature (1)..( 12): Result.003 file - promoters60/4772240
tcaaatattttt

SEQ ID NO: 141478 - DNA, 12 bp, Unknown
  misc_feature (1)..( 12): Result.003 file - promoters60/4772240
tataaaagttga

SEQ ID NO: 141479 - DNA, 12 bp, Unknown
  misc_feature (1)..( 12): Result.003 file - promoters60/4772240
tttgatagtaaa

SEQ ID NO: 141480 - DNA, 10 bp, Unknown
  misc_feature (1)..( 10): Result.003 file - promoters60/4772248
taaaactaaa

SEQ ID NO: 141481 - DNA, 10 bp, Unknown
  misc_feature (1)..( 10): Result.003 file - promoters60/4772248
caaaacttga

SEQ ID NO: 141482 - DNA, 10 bp, Unknown
  misc_feature (1)..( 10): Result.003 file - promoters60/4772248
taaaacgtga

SEQ ID NO: 141483 - DNA, 10 bp, Unknown
  misc_feature (1)..( 10): Result.003 file - promoters60/4772248
gcaaaccaaa

SEQ ID NO: 141484 - DNA, 10 bp, Unknown
  misc_feature (1)..( 10): Result.003 file - promoters60/4772248
tcaaaccttc

SEQ ID NO: 141485 - DNA, 10 bp, Unknown
  misc_feature (1)..( 10): Result.003 file - promoters60/4772248
cgaaaccgta

SEQ ID NO: 141486 - DNA, 13 bp, Unknown
  misc_feature (1)..( 13): Result.003 file - promoters60/4772248
cttgttttctacc

SEQ ID NO: 141487 - DNA, 13 bp, Unknown
  misc_feature (1)..( 13): Result.003 file - promoters60/4772248
ccatttttctact

SEQ ID NO: 141488 - DNA, 13 bp, Unknown
  misc_feature (1)..( 13): Result.003 file - promoters60/4772248
taacacttcaacc

SEQ ID NO: 141489 - DNA, 13 bp, Unknown
  misc_feature (1)..( 13): Result.003 file - promoters60/4772248
atatttttcataa

SEQ ID NO: 141490 - DNA, 13 bp, Unknown
  misc_feature (1)..( 13): Result.003 file - promoters60/4772248
gattttttgcatc

SEQ ID NO: 141491 - DNA, 13 bp, Unknown
  misc_feature (1)..( 13): Result.003 file - promoters60/4772248
atatctttgattt

SEQ ID NO: 141492 - DNA, 13 bp, Unknown
  misc_feature (1)..( 13): Result.003 file - promoters60/4772248
caatttatctaac

SEQ ID NO: 141493 - DNA, 14 bp, Unknown
  misc_feature (1)..( 14): Result.003 file - promoters60/4772248
atttttgaagcaca

SEQ ID NO: 141494 - DNA, 14 bp, Unknown
  misc_feature (1)..( 14): Result.003 file - promoters60/4772248
atttttaaagcatg

SEQ ID NO: 141495 - DNA, 14 bp, Unknown
  misc_feature (1)..( 14): Result.003 file - promoters60/4772248
ctttttgttctata

SEQ ID NO: 141496 - DNA, 14 bp, Unknown
  misc_feature (1)..( 14): Result.003 file - promoters60/4772248
ctttttgtgcagaa

SEQ ID NO: 141497 - DNA, 14 bp, Unknown
  misc_feature (1)..( 14): Result.003 file - promoters60/4772248
ggtttagaatgaga

SEQ ID NO: 141498 - DNA, 14 bp, Unknown
  misc_feature (1)..( 14): Result.003 file - promoters60/4772248
atcctaaaatcatg

SEQ ID NO: 141499 - DNA, 12 bp, Unknown
  misc_feature (1)..( 12): Result.003 file - promoters60/4772248
caattaagacaa

SEQ ID NO: 141500 - DNA, 12 bp, Unknown
  misc_feature (1)..( 12): Result.003 file - promoters60/4772248
aaattaaaacat

SEQ ID NO: 141501 - DNA, 13 bp, Unknown
  misc_feature (1)..( 13): Result.003 file - promoters60/4772248
aaacttataagtc

SEQ ID NO: 141502 - DNA, 13 bp, Unknown
  misc_feature (1)..( 13): Result.003 file - promoters60/4772248
ttaatcaaataat

SEQ ID NO: 141503 - DNA, 13 bp, Unknown
  misc_feature (1)..( 13): Result.003 file - promoters60/4772248
aacaaagaaacat

SEQ ID NO: 141504 - DNA, 13 bp, Unknown
  misc_feature (1)..( 13): Result.003 file - promoters60/4772248
tcacttgtaaatg

SEQ ID NO: 141505 - DNA, 13 bp, Unknown
  misc_feature (1)..( 13): Result.003 file - promoters60/4772248
ttttttttttttt

SEQ ID NO: 141506 - DNA, 13 bp, Unknown
  misc_feature (1)..( 13): Result.003 file - promoters60/4772248
tgtaatttttttc

SEQ ID NO: 141507 - DNA, 13 bp, Unknown
  misc_feature (1)..( 13): Result.003 file - promoters60/4772248
atttgttttttaa

SEQ ID NO: 141508 - DNA, 13 bp, Unknown
  misc_feature (1)..( 13): Result.003 file - promoters60/4772248
taatgtttttcta

SEQ ID NO: 141509 - DNA, 13 bp, Unknown
  misc_feature (1)..( 13): Result.003 file - promoters60/4772248
cccagttattctc

SEQ ID NO: 141510 - DNA, 13 bp, Unknown
  misc_feature (1)..( 13): Result.003 file - promoters60/4772248
acttgtgtttgat

SEQ ID NO: 141511 - DNA, 14 bp, Unknown
  misc_feature (1)..( 14): Result.003 file - promoters60/4772248
atacaaacatatat

SEQ ID NO: 141512 - DNA, 14 bp, Unknown
  misc_feature (1)..( 14): Result.003 file - promoters60/4772248
tatcaaacttataa

SEQ ID NO: 141513 - DNA, 14 bp, Unknown
  misc_feature (1)..( 14): Result.003 file - promoters60/4772248
aaagaaacatacca

SEQ ID NO: 141514 - DNA, 14 bp, Unknown
  misc_feature (1)..( 14): Result.003 file - promoters60/4772248
tagaaaaattaaaa

SEQ ID NO: 141515 - DNA, 14 bp, Unknown
  misc_feature (1)..( 14): Result.003 file - promoters60/4772248
aatcaaataataaa

SEQ ID NO: 141516 - DNA, 14 bp, Unknown
  misc_feature (1)..( 14): Result.003 file - promoters60/4772248
gtaatcacttgtaa

SEQ ID NO: 141517 - DNA, 8 bp, Unknown
  misc_feature (1)..( 8): Result.003 file - promoters60/4772258
ttttatta

SEQ ID NO: 141518 - DNA, 8 bp, Unknown
  misc_feature (1)..( 8): Result.003 file - promoters60/4772258
ttttgtta

SEQ ID NO: 141519 - DNA, 8 bp, Unknown
  misc_feature (1)..( 8): Result.003 file - promoters60/4772258
ccttgtta

SEQ ID NO: 141520 - DNA, 8 bp, Unknown
  misc_feature (1)..( 8): Result.003 file - promoters60/4772258
tcttattt

SEQ ID NO: 141521 - DNA, 8 bp, Unknown
  misc_feature (1)..( 8): Result.003 file - promoters60/4772258
tcttcttt

SEQ ID NO: 141522 - DNA, 8 bp, Unknown
  misc_feature (1)..( 8): Result.003 file - promoters60/4772258
tcttctct

SEQ ID NO: 141523 - DNA, 9 bp, Unknown
  misc_feature (1)..( 9): Result.003 file - promoters60/4772258
attttttat

SEQ ID NO: 141524 - DNA, 9 bp, Unknown
  misc_feature (1)..( 9): Result.003 file - promoters60/4772258
gttttatat

SEQ ID NO: 141525 - DNA, 9 bp, Unknown
  misc_feature (1)..( 9): Result.003 file - promoters60/4772258
atttttcgt

SEQ ID NO: 141526 - DNA, 8 bp, Unknown
  misc_feature (1)..( 8): Result.003 file - promoters60/4772258
ttaatata

SEQ ID NO: 141527 - DNA, 8 bp, Unknown
  misc_feature (1)..( 8): Result.003 file - promoters60/4772258
ttactatt

SEQ ID NO: 141528 - DNA, 8 bp, Unknown
  misc_feature (1)..( 8): Result.003 file - promoters60/4772258
ctaatata

SEQ ID NO: 141529 - DNA, 7 bp, Unknown
  misc_feature (1)..( 7): Result.003 file - promoters60/4772258
attttgg

SEQ ID NO: 141530 - DNA, 7 bp, Unknown
  misc_feature (1)..( 7): Result.003 file - promoters60/4772258
attttga

SEQ ID NO: 141531 - DNA, 7 bp, Unknown
  misc_feature (1)..( 7): Result.003 file - promoters60/4772258
attctgg

SEQ ID NO: 141532 - DNA, 9 bp, Unknown
  misc_feature (1)..( 9): Result.003 file - promoters60/4772258
agattctac

SEQ ID NO: 141533 - DNA, 9 bp, Unknown
  misc_feature (1)..( 9): Result.003 file - promoters60/4772258
agattcata

SEQ ID NO: 141534 - DNA, 9 bp, Unknown
  misc_feature (1)..( 9): Result.003 file - promoters60/4772258
tgatttata

SEQ ID NO: 141535 - DNA, 7 bp, Unknown
  misc_feature (1)..( 7): Result.003 file - promoters60/4772258
tttcttg

SEQ ID NO: 141536 - DNA, 7 bp, Unknown
  misc_feature (1)..( 7): Result.003 file - promoters60/4772258
tttcttt

SEQ ID NO: 141537 - DNA, 8 bp, Unknown
  misc_feature (1)..( 8): Result.003 file - promoters60/4772258
gttcattt

SEQ ID NO: 141538 - DNA, 8 bp, Unknown
  misc_feature (1)..( 8): Result.003 file - promoters60/4772258
agtttttt

SEQ ID NO: 141539 - DNA, 8 bp, Unknown
  misc_feature (1)..( 8): Result.003 file - promoters60/4772258
tgttgttt

SEQ ID NO: 141540 - DNA, 8 bp, Unknown
  misc_feature (1)..( 8): Result.003 file - promoters60/4772258
tgttgttg

SEQ ID NO: 141541 - DNA, 9 bp, Unknown
  misc_feature (1)..( 9): Result.003 file - promoters60/4772258
tttaacctt

SEQ ID NO: 141542 - DNA, 9 bp, Unknown
  misc_feature (1)..( 9): Result.003 file - promoters60/4772258
tttgaccaa

SEQ ID NO: 141543 - DNA, 9 bp, Unknown
  misc_feature (1)..( 9): Result.003 file - promoters60/4772258
gctgagcaa

SEQ ID NO: 141544 - DNA, 6 bp, Unknown
  misc_feature (1)..( 6): Result.003 file - promoters60/4772270
agagca

SEQ ID NO: 141545 - DNA, 6 bp, Unknown
  misc_feature (1)..( 6): Result.003 file - promoters60/4772270
agagca

SEQ ID NO: 141546 - DNA, 6 bp, Unknown
  misc_feature (1)..( 6): Result.003 file - promoters60/4772270
atagag

SEQ ID NO: 141547 - DNA, 6 bp, Unknown
  misc_feature (1)..( 6): Result.003 file - promoters60/4772270
atagag

SEQ ID NO: 141548 - DNA, 7 bp, Unknown
  misc_feature (1)..( 7): Result.003 file - promoters60/4772270
tatcttg

SEQ ID NO: 141549 - DNA, 7 bp, Unknown
  misc_feature (1)..( 7): Result.003 file - promoters60/4772270
tatattg

SEQ ID NO: 141550 - DNA, 6 bp, Unknown
  misc_feature (1)..( 6): Result.003 file - promoters60/4772270
aaagac

SEQ ID NO: 141551 - DNA, 6 bp, Unknown
  misc_feature (1)..( 6): Result.003 file - promoters60/4772270
aaagac

SEQ ID NO: 141552 - DNA, 7 bp, Unknown
  misc_feature (1)..( 7): Result.003 file - promoters60/4772270
taataaa

SEQ ID NO: 141553 - DNA, 7 bp, Unknown
  misc_feature (1)..( 7): Result.003 file - promoters60/4772270
taaaaaa

SEQ ID NO: 141554 - DNA, 6 bp, Unknown
  misc_feature (1)..( 6): Result.003 file - promoters60/4772270
taaaaa

SEQ ID NO: 141555 - DNA, 6 bp, Unknown
  misc_feature (1)..( 6): Result.003 file - promoters60/4772270
taaaaa

SEQ ID NO: 141556 - DNA, 6 bp, Unknown
  misc_feature (1)..( 6): Result.003 file - promoters60/4772270
cttcta

SEQ ID NO: 141557 - DNA, 6 bp, Unknown
  misc_feature (1)..( 6): Result.003 file - promoters60/4772270
cttcta

SEQ ID NO: 141558 - DNA, 7 bp, Unknown
  misc_feature (1)..( 7): Result.003 file - promoters60/4772270
tttctat

SEQ ID NO: 141559 - DNA, 7 bp, Unknown
  misc_feature (1)..( 7): Result.003 file - promoters60/4772270
tttgtat

SEQ ID NO: 141560 - DNA, 7 bp, Unknown
  misc_feature (1)..( 7): Result.003 file - promoters60/4772270
tatattg

SEQ ID NO: 141561 - DNA, 7 bp, Unknown
  misc_feature (1)..( 7): Result.003 file - promoters60/4772270
tatgttg

SEQ ID NO: 141562 - DNA, 8 bp, Unknown
  misc_feature (1)..( 8): Result.003 file - promoters60/4772270
tgttaaaa

SEQ ID NO: 141563 - DNA, 8 bp, Unknown
  misc_feature (1)..( 8): Result.003 file - promoters60/4772270
tgttgaaa

SEQ ID NO: 141564 - DNA, 8 bp, Unknown
  misc_feature (1)..( 8): Result.003 file - promoters60/4772270
cattaaac

SEQ ID NO: 141565 - DNA, 8 bp, Unknown
  misc_feature (1)..( 8): Result.003 file - promoters60/4772270
catttaac

SEQ ID NO: 141566 - DNA, 6 bp, Unknown
  misc_feature (1)..( 6): Result.003 file - promoters60/4772270
tctcca

SEQ ID NO: 141567 - DNA, 6 bp, Unknown
  misc_feature (1)..( 6): Result.003 file - promoters60/4772270
tctcca

SEQ ID NO: 141568 - DNA, 7 bp, Unknown
  misc_feature (1)..( 7): Result.003 file - promoters60/4772270
ccatttt

SEQ ID NO: 141569 - DNA, 7 bp, Unknown
  misc_feature (1)..( 7): Result.003 file - promoters60/4772270
ccatttt

SEQ ID NO: 141570 - DNA, 6 bp, Unknown
  misc_feature (1)..( 6): Result.003 file - promoters60/4772270
ttttca

SEQ ID NO: 141571 - DNA, 6 bp, Unknown
  misc_feature (1)..( 6): Result.003 file - promoters60/4772270
ttttca

SEQ ID NO: 141572 - DNA, 6 bp, Unknown
  misc_feature (1)..( 6): Result.003 file - promoters60/4772270
tgtctt

SEQ ID NO: 141573 - DNA, 6 bp, Unknown
  misc_feature (1)..( 6): Result.003 file - promoters60/4772270
tgtctt

SEQ ID NO: 141574 - DNA, 6 bp, Unknown
  misc_feature (1)..( 6): Result.003 file - promoters60/4772270
caagct

SEQ ID NO: 141575 - DNA, 6 bp, Unknown
  misc_feature (1)..( 6): Result.003 file - promoters60/4772270
caagct

SEQ ID NO: 141576 - DNA, 7 bp, Unknown
  misc_feature (1)..( 7): Result.003 file - promoters60/4772270
ataaata

SEQ ID NO: 141577 - DNA, 7 bp, Unknown
  misc_feature (1)..( 7): Result.003 file - promoters60/4772270
atacata

SEQ ID NO: 141578 - DNA, 6 bp, Unknown
  misc_feature (1)..( 6): Result.003 file - promoters60/4772274
ttcaga

SEQ ID NO: 141579 - DNA, 6 bp, Unknown
  misc_feature (1)..( 6): Result.003 file - promoters60/4772274
ttcaga

SEQ ID NO: 141580 - DNA, 6 bp, Unknown
  misc_feature (1)..( 6): Result.003 file - promoters60/4772274
tctgtt

SEQ ID NO: 141581 - DNA, 6 bp, Unknown
  misc_feature (1)..( 6): Result.003 file - promoters60/4772274
tctgtt

SEQ ID NO: 141582 - DNA, 6 bp, Unknown
  misc_feature (1)..( 6): Result.003 file - promoters60/4772274
ttcttt

SEQ ID NO: 141583 - DNA, 6 bp, Unknown
  misc_feature (1)..( 6): Result.003 file - promoters60/4772274
ttcttt

SEQ ID NO: 141584 - DNA, 6 bp, Unknown
  misc_feature (1)..( 6): Result.003 file - promoters60/4772274
ttcttt

SEQ ID NO: 141585 - DNA, 12 bp, Unknown
  misc_feature (1)..( 12): Result.003 file - promoters60/4772274
aaaagttatcat

SEQ ID NO: 141586 - DNA, 12 bp, Unknown
  misc_feature (1)..( 12): Result.003 file - promoters60/4772274
ttagtttaccat

SEQ ID NO: 141587 - DNA, 12 bp, Unknown
  misc_feature (1)..( 12): Result.003 file - promoters60/4772274
aaaggttatctc

SEQ ID NO: 141588 - DNA, 8 bp, Unknown
  misc_feature (1)..( 8): Result.003 file - promoters60/4772274
gtttggga

SEQ ID NO: 141589 - DNA, 8 bp, Unknown
  misc_feature (1)..( 8): Result.003 file - promoters60/4772274
gttaggga

SEQ ID NO: 141590 - DNA, 6 bp, Unknown
  misc_feature (1)..( 6): Result.003 file - promoters60/4772274
gggcct

SEQ ID NO: 141591 - DNA, 6 bp, Unknown
  misc_feature (1)..( 6): Result.003 file - promoters60/4772274
gggcct

SEQ ID NO: 141592 - DNA, 9 bp, Unknown
  misc_feature (1)..( 9): Result.003 file - promoters60/4772274
taaaaccac

SEQ ID NO: 141593 - DNA, 9 bp, Unknown
  misc_feature (1)..( 9): Result.003 file - promoters60/4772274
taaaagcac

SEQ ID NO: 141594 - DNA, 6 bp, Unknown
  misc_feature (1)..( 6): Result.003 file - promoters60/4772274
acaaaa

SEQ ID NO: 141595 - DNA, 6 bp, Unknown
  misc_feature (1)..( 6): Result.003 file - promoters60/4772274
acaaaa

SEQ ID NO: 141596 - DNA, 7 bp, Unknown
  misc_feature (1)..( 7): Result.003 file - promoters60/4772274
tatctct

SEQ ID NO: 141597 - DNA, 7 bp, Unknown
  misc_feature (1)..( 7): Result.003 file - promoters60/4772274
tatctct

SEQ ID NO: 141598 - DNA, 6 bp, Unknown
  misc_feature (1)..( 6): Result.003 file - promoters60/4772274
ttaatc

SEQ ID NO: 141599 - DNA, 6 bp, Unknown
  misc_feature (1)..( 6): Result.003 file - promoters60/4772274
ttaatc

SEQ ID NO: 141600 - DNA, 10 bp, Unknown
  misc_feature (1)..( 10): Result.003 file - promoters60/4772274
atcaaaagtg

SEQ ID NO: 141601 - DNA, 10 bp, Unknown
  misc_feature (1)..( 10): Result.003 file - promoters60/4772274
atcaaaatgt

SEQ ID NO: 141602 - DNA, 10 bp, Unknown
  misc_feature (1)..( 10): Result.003 file - promoters60/4772274
cccaaaatgt

SEQ ID NO: 141603 - DNA, 9 bp, Unknown
  misc_feature (1)..( 9): Result.003 file - promoters60/4772274
tcaaaagtg

SEQ ID NO: 141604 - DNA, 9 bp, Unknown
  misc_feature (1)..( 9): Result.003 file - promoters60/4772274
caaaatgtg

SEQ ID NO: 141605 - DNA, 9 bp, Unknown
  misc_feature (1)..( 9): Result.003 file - promoters60/4772274
caaaatgtt

SEQ ID NO: 141606 - DNA, 6 bp, Unknown
  misc_feature (1)..( 6): Result.003 file - promoters60/4772274
ttatta

SEQ ID NO: 141607 - DNA, 6 bp, Unknown
  misc_feature (1)..( 6): Result.003 file - promoters60/4772274
ttatta

SEQ ID NO: 141608 - DNA, 8 bp, Unknown
  misc_feature (1)..( 8): Result.003 file - promoters60/4772274
attttaag

SEQ ID NO: 141609 - DNA, 8 bp, Unknown
  misc_feature (1)..( 8): Result.003 file - promoters60/4772274
attgtaag

SEQ ID NO: 141610 - DNA, 6 bp, Unknown
  misc_feature (1)..( 6): Result.003 file - promoters60/4772274
tttcca

SEQ ID NO: 141611 - DNA, 6 bp, Unknown
  misc_feature (1)..( 6): Result.003 file - promoters60/4772274
tttcca

SEQ ID NO: 141612 - DNA, 7 bp, Unknown
  misc_feature (1)..( 7): Result.003 file - promoters60/4772274
ttgtatt

SEQ ID NO: 141613 - DNA, 7 bp, Unknown
  misc_feature (1)..( 7): Result.003 file - promoters60/4772274
ttgaatt

SEQ ID NO: 141614 - DNA, 7 bp, Unknown
  misc_feature (1)..( 7): Result.003 file - promoters60/4772274
tctcaga

SEQ ID NO: 141615 - DNA, 7 bp, Unknown
  misc_feature (1)..( 7): Result.003 file - promoters60/4772274
tctcaga

SEQ ID NO: 141616 - DNA, 9 bp, Unknown
  misc_feature (1)..( 9): Result.003 file - promoters60/4772274
aattgatca

SEQ ID NO: 141617 - DNA, 9 bp, Unknown
  misc_feature (1)..( 9): Result.003 file - promoters60/4772274
aatagatca

SEQ ID NO: 141618 - DNA, 7 bp, Unknown
  misc_feature (1)..( 7): Result.003 file - promoters60/4772274
caaaatt

SEQ ID NO: 141619 - DNA, 7 bp, Unknown
  misc_feature (1)..( 7): Result.003 file - promoters60/4772274
caacatt

SEQ ID NO: 141620 - DNA, 7 bp, Unknown
  misc_feature (1)..( 7): Result.003 file - promoters60/4772277
gattata

SEQ ID NO: 141621 - DNA, 7 bp, Unknown
  misc_feature (1)..( 7): Result.003 file - promoters60/4772277
gattata

SEQ ID NO: 141622 - DNA, 7 bp, Unknown
  misc_feature (1)..( 7): Result.003 file - promoters60/4772277
taaatga

SEQ ID NO: 141623 - DNA, 7 bp, Unknown
  misc_feature (1)..( 7): Result.003 file - promoters60/4772277
taaatga

SEQ ID NO: 141624 - DNA, 6 bp, Unknown
  misc_feature (1)..( 6): Result.003 file - promoters60/4772277
gtgaca

SEQ ID NO: 141625 - DNA, 6 bp, Unknown
  misc_feature (1)..( 6): Result.003 file - promoters60/4772277
gtgaca

SEQ ID NO: 141626 - DNA, 10 bp, Unknown
  misc_feature (1)..( 10): Result.003 file - promoters60/4772277
aaaacaaaaa

SEQ ID NO: 141627 - DNA, 10 bp, Unknown
  misc_feature (1)..( 10): Result.003 file - promoters60/4772277
aaaacaaaaa

SEQ ID NO: 141628 - DNA, 7 bp, Unknown
  misc_feature (1)..( 7): Result.003 file - promoters60/4772277
gcagcat

SEQ ID NO: 141629 - DNA, 7 bp, Unknown
  misc_feature (1)..( 7): Result.003 file - promoters60/4772277
gcatcat

SEQ ID NO: 141630 - DNA, 6 bp, Unknown
  misc_feature (1)..( 6): Result.003 file - promoters60/4772277
ttttat

SEQ ID NO: 141631 - DNA, 6 bp, Unknown
  misc_feature (1)..( 6): Result.003 file - promoters60/4772277
ttttat

SEQ ID NO: 141632 - DNA, 7 bp, Unknown
  misc_feature (1)..( 7): Result.003 file - promoters60/4772277
tctatgt

SEQ ID NO: 141633 - DNA, 7 bp, Unknown
  misc_feature (1)..( 7): Result.003 file - promoters60/4772277
tctgtgt

SEQ ID NO: 141634 - DNA, 6 bp, Unknown
  misc_feature (1)..( 6): Result.003 file - promoters60/4772277
aaatgt

SEQ ID NO: 141635 - DNA, 6 bp, Unknown
  misc_feature (1)..( 6): Result.003 file - promoters60/4772277
aaatgt

SEQ ID NO: 141636 - DNA, 10 bp, Unknown
  misc_feature (1)..( 10): Result.003 file - promoters60/4772277
gaaaatgtga

SEQ ID NO: 141637 - DNA, 10 bp, Unknown
  misc_feature (1)..( 10): Result.003 file - promoters60/4772277
gaaaaggtga

SEQ ID NO: 141638 - DNA, 7 bp, Unknown
  misc_feature (1)..( 7): Result.003 file - promoters60/4772277
caattta

SEQ ID NO: 141639 - DNA, 7 bp, Unknown
  misc_feature (1)..( 7): Result.003 file - promoters60/4772277
caagtta

SEQ ID NO: 141640 - DNA, 6 bp, Unknown
  misc_feature (1)..( 6): Result.003 file - promoters60/4772277
aacaaa

SEQ ID NO: 141641 - DNA, 6 bp, Unknown
  misc_feature (1)..( 6): Result.003 file - promoters60/4772277
aacaaa

SEQ ID NO: 141642 - DNA, 7 bp, Unknown
  misc_feature (1)..( 7): Result.003 file - promoters60/4772277
tgaagaa

SEQ ID NO: 141643 - DNA, 7 bp, Unknown
  misc_feature (1)..( 7): Result.003 file - promoters60/4772277
tgaagaa

SEQ ID NO: 141644 - DNA, 8 bp, Unknown
  misc_feature (1)..( 8): Result.003 file - promoters60/4772277
tatataat

SEQ ID NO: 141645 - DNA, 8 bp, Unknown
  misc_feature (1)..( 8): Result.003 file - promoters60/4772277
tatgtaat

SEQ ID NO: 141646 - DNA, 7 bp, Unknown
  misc_feature (1)..( 7): Result.003 file - promoters60/4772277
taagttg

SEQ ID NO: 141647 - DNA, 7 bp, Unknown
  misc_feature (1)..( 7): Result.003 file - promoters60/4772277
taagttg

SEQ ID NO: 141648 - DNA, 6 bp, Unknown
  misc_feature (1)..( 6): Result.003 file - promoters60/4772277
gttgac

SEQ ID NO: 141649 - DNA, 6 bp, Unknown
  misc_feature (1)..( 6): Result.003 file - promoters60/4772277
gttgac

SEQ ID NO: 141650 - DNA, 6 bp, Unknown
  misc_feature (1)..( 6): Result.003 file - promoters60/4772277
aagaaa

SEQ ID NO: 141651 - DNA, 6 bp, Unknown
  misc_feature (1)..( 6): Result.003 file - promoters60/4772277
aagaaa

SEQ ID NO: 141652 - DNA, 7 bp, Unknown
  misc_feature (1)..( 7): Result.003 file - promoters60/4772277
atgctct

SEQ ID NO: 141653 - DNA, 7 bp, Unknown
  misc_feature (1)..( 7): Result.003 file - promoters60/4772277
atgctct

SEQ ID NO: 141654 - DNA, 7 bp, Unknown
  misc_feature (1)..( 7): Result.003 file - promoters60/4772289
caacgat

SEQ ID NO: 141655 - DNA, 7 bp, Unknown
  misc_feature (1)..( 7): Result.003 file - promoters60/4772289
caaggat

SEQ ID NO: 141656 - DNA, 6 bp, Unknown
  misc_feature (1)..( 6): Result.003 file - promoters60/4772289
agatgt

SEQ ID NO: 141657 - DNA, 6 bp, Unknown
  misc_feature (1)..( 6): Result.003 file - promoters60/4772289
agatgt

SEQ ID NO: 141658 - DNA, 8 bp, Unknown
  misc_feature (1)..( 8): Result.003 file - promoters60/4772289
atgcgttg

SEQ ID NO: 141659 - DNA, 8 bp, Unknown
  misc_feature (1)..( 8): Result.003 file - promoters60/4772289
atgctttg

SEQ ID NO: 141660 - DNA, 7 bp, Unknown
  misc_feature (1)..( 7): Result.003 file - promoters60/4772289
tcaagtt

SEQ ID NO: 141661 - DNA, 7 bp, Unknown
  misc_feature (1)..( 7): Result.003 file - promoters60/4772289
tcaagtt

SEQ ID NO: 141662 - DNA, 6 bp, Unknown
  misc_feature (1)..( 6): Result.003 file - promoters60/4772289
aataaa

SEQ ID NO: 141663 - DNA, 6 bp, Unknown
  misc_feature (1)..( 6): Result.003 file - promoters60/4772289
aataaa

SEQ ID NO: 141664 - DNA, 6 bp, Unknown
  misc_feature (1)..( 6): Result.003 file - promoters60/4772289
agagct

SEQ ID NO: 141665 - DNA, 6 bp, Unknown
  misc_feature (1)..( 6): Result.003 file - promoters60/4772289
agagct

SEQ ID NO: 141666 - DNA, 8 bp, Unknown
  misc_feature (1)..( 8): Result.003 file - promoters60/4772289
gaatcaat

SEQ ID NO: 141667 - DNA, 8 bp, Unknown
  misc_feature (1)..( 8): Result.003 file - promoters60/4772289
gaaacaaa

SEQ ID NO: 141668 - DNA, 8 bp, Unknown
  misc_feature (1)..( 8): Result.003 file - promoters60/4772289
gaaagaaa

SEQ ID NO: 141669 - DNA, 6 bp, Unknown
  misc_feature (1)..( 6): Result.003 file - promoters60/4772289
ttgtta

SEQ ID NO: 141670 - DNA, 6 bp, Unknown
  misc_feature (1)..( 6): Result.003 file - promoters60/4772289
ttgtta

SEQ ID NO: 141671 - DNA, 6 bp, Unknown
  misc_feature (1)..( 6): Result.003 file - promoters60/4772289
agtaaa

SEQ ID NO: 141672 - DNA, 6 bp, Unknown
  misc_feature (1)..( 6): Result.003 file - promoters60/4772289
agtaaa

SEQ ID NO: 141673 - DNA, 7 bp, Unknown
  misc_feature (1)..( 7): Result.003 file - promoters60/4772289
aatcggg

SEQ ID NO: 141674 - DNA, 7 bp, Unknown
  misc_feature (1)..( 7): Result.003 file - promoters60/4772289
aattggg

SEQ ID NO: 141675 - DNA, 10 bp, Unknown
  misc_feature (1)..( 10): Result.003 file - promoters60/4772289
ggaaaagaaa

SEQ ID NO: 141676 - DNA, 10 bp, Unknown
  misc_feature (1)..( 10): Result.003 file - promoters60/4772289
ggaaatgaaa

SEQ ID NO: 141677 - DNA, 7 bp, Unknown
  misc_feature (1)..( 7): Result.003 file - promoters60/4772289
cccacta

SEQ ID NO: 141678 - DNA, 7 bp, Unknown
  misc_feature (1)..( 7): Result.003 file - promoters60/4772289
cccacta

SEQ ID NO: 141679 - DNA, 9 bp, Unknown
  misc_feature (1)..( 9): Result.003 file - promoters60/4772289
aaagaaaag

SEQ ID NO: 141680 - DNA, 9 bp, Unknown
  misc_feature (1)..( 9): Result.003 file - promoters60/4772289
aaagtaaag

SEQ ID NO: 141681 - DNA, 7 bp, Unknown
  misc_feature (1)..( 7): Result.003 file - promoters60/4772289
gtatata

SEQ ID NO: 141682 - DNA, 7 bp, Unknown
  misc_feature (1)..( 7): Result.003 file - promoters60/4772289
gtatata

SEQ ID NO: 141683 - DNA, 7 bp, Unknown
  misc_feature (1)..( 7): Result.003 file - promoters60/4772311
cctaaaa

SEQ ID NO: 141684 - DNA, 7 bp, Unknown
  misc_feature (1)..( 7): Result.003 file - promoters60/4772311
cctaaaa

SEQ ID NO: 141685 - DNA, 7 bp, Unknown
  misc_feature (1)..( 7): Result.003 file - promoters60/4772311
cctaaaa

SEQ ID NO: 141686 - DNA, 8 bp, Unknown
  misc_feature (1)..( 8): Result.003 file - promoters60/4772311
aaaatcgt

SEQ ID NO: 141687 - DNA, 8 bp, Unknown
  misc_feature (1)..( 8): Result.003 file - promoters60/4772311
aaaatcaa

SEQ ID NO: 141688 - DNA, 8 bp, Unknown
  misc_feature (1)..( 8): Result.003 file - promoters60/4772311
aaaacaag

SEQ ID NO: 141689 - DNA, 9 bp, Unknown
  misc_feature (1)..( 9): Result.003 file - promoters60/4772311
gtaaaattc

SEQ ID NO: 141690 - DNA, 9 bp, Unknown
  misc_feature (1)..( 9): Result.003 file - promoters60/4772311
gtaaaattt

SEQ ID NO: 141691 - DNA, 9 bp, Unknown
  misc_feature (1)..( 9): Result.003 file - promoters60/4772311
tgaaacttc

SEQ ID NO: 141692 - DNA, 6 bp, Unknown
  misc_feature (1)..( 6): Result.003 file - promoters60/4772311
tttcta

SEQ ID NO: 141693 - DNA, 6 bp, Unknown
  misc_feature (1)..( 6): Result.003 file - promoters60/4772311
tttcta

SEQ ID NO: 141694 - DNA, 6 bp, Unknown
  misc_feature (1)..( 6): Result.003 file - promoters60/4772311
ggtttg

SEQ ID NO: 141695 - DNA, 6 bp, Unknown
  misc_feature (1)..( 6): Result.003 file - promoters60/4772311
ggtttg

SEQ ID NO: 141696 - DNA, 8 bp, Unknown
  misc_feature (1)..( 8): Result.003 file - promoters60/4772311
catccaga

SEQ ID NO: 141697 - DNA, 8 bp, Unknown
  misc_feature (1)..( 8): Result.003 file - promoters60/4772311
catccaat

SEQ ID NO: 141698 - DNA, 8 bp, Unknown
  misc_feature (1)..( 8): Result.003 file - promoters60/4772311
catacaat

SEQ ID NO: 141699 - DNA, 8 bp, Unknown
  misc_feature (1)..( 8): Result.003 file - promoters60/4772311
tatcaaaa

SEQ ID NO: 141700 - DNA, 8 bp, Unknown
  misc_feature (1)..( 8): Result.003 file - promoters60/4772311
tatctaaa

SEQ ID NO: 141701 - DNA, 6 bp, Unknown
  misc_feature (1)..( 6): Result.003 file - promoters60/4772311
aaacga

SEQ ID NO: 141702 - DNA, 6 bp, Unknown
  misc_feature (1)..( 6): Result.003 file - promoters60/4772311
aaacga

SEQ ID NO: 141703 - DNA, 6 bp, Unknown
  misc_feature (1)..( 6): Result.003 file - promoters60/4772311
aagatg

SEQ ID NO: 141704 - DNA, 6 bp, Unknown
  misc_feature (1)..( 6): Result.003 file - promoters60/4772311
aagatg

SEQ ID NO: 141705 - DNA, 10 bp, Unknown
  misc_feature (1)..( 10): Result.003 file - promoters60/4772311
atgtttgtct

SEQ ID NO: 141706 - DNA, 10 bp, Unknown
  misc_feature (1)..( 10): Result.003 file - promoters60/4772311
atgtttctct

SEQ ID NO: 141707 - DNA, 7 bp, Unknown
  misc_feature (1)..( 7): Result.003 file - promoters60/4772311
gaaacaa

SEQ ID NO: 141708 - DNA, 7 bp, Unknown
  misc_feature (1)..( 7): Result.003 file - promoters60/4772311
gaaacaa

SEQ ID NO: 141709 - DNA, 6 bp, Unknown
  misc_feature (1)..( 6): Result.003 file - promoters60/4772311
tccata

SEQ ID NO: 141710 - DNA, 6 bp, Unknown
  misc_feature (1)..( 6): Result.003 file - promoters60/4772311
tccata

SEQ ID NO: 141711 - DNA, 8 bp, Unknown
  misc_feature (1)..( 8): Result.003 file - promoters60/4772329
atatataa

SEQ ID NO: 141712 - DNA, 8 bp, Unknown
  misc_feature (1)..( 8): Result.003 file - promoters60/4772329
atagataa

SEQ ID NO: 141713 - DNA, 7 bp, Unknown
  misc_feature (1)..( 7): Result.003 file - promoters60/4772329
ttatata

SEQ ID NO: 141714 - DNA, 7 bp, Unknown
  misc_feature (1)..( 7): Result.003 file - promoters60/4772329
gtatata

SEQ ID NO: 141715 - DNA, 7 bp, Unknown
  misc_feature (1)..( 7): Result.003 file - promoters60/4772329
ttatatc

SEQ ID NO: 141716 - DNA, 6 bp, Unknown
  misc_feature (1)..( 6): Result.003 file - promoters60/4772329
tatact

SEQ ID NO: 141717 - DNA, 6 bp, Unknown
  misc_feature (1)..( 6): Result.003 file - promoters60/4772329
tatact

SEQ ID NO: 141718 - DNA, 7 bp, Unknown
  misc_feature (1)..( 7): Result.003 file - promoters60/4772329
cgtatga

SEQ ID NO: 141719 - DNA, 7 bp, Unknown
  misc_feature (1)..( 7): Result.003 file - promoters60/4772329
cgtctga

SEQ ID NO: 141720 - DNA, 6 bp, Unknown
  misc_feature (1)..( 6): Result.003 file - promoters60/4772329
ttttct

SEQ ID NO: 141721 - DNA, 6 bp, Unknown
  misc_feature (1)..( 6): Result.003 file - promoters60/4772329
ttttct

SEQ ID NO: 141722 - DNA, 7 bp, Unknown
  misc_feature (1)..( 7): Result.003 file - promoters60/4772329
ttgtcta

SEQ ID NO: 141723 - DNA, 7 bp, Unknown
  misc_feature (1)..( 7): Result.003 file - promoters60/4772329
ttgtcta

SEQ ID NO: 141724 - DNA, 12 bp, Unknown
  misc_feature (1)..( 12): Result.003 file - promoters60/4772329
tatttaaacccc

SEQ ID NO: 141725 - DNA, 12 bp, Unknown
  misc_feature (1)..( 12): Result.003 file - promoters60/4772329
tatataacactc

SEQ ID NO: 141726 - DNA, 12 bp, Unknown
  misc_feature (1)..( 12): Result.003 file - promoters60/4772329
tatataaacccc

SEQ ID NO: 141727 - DNA, 6 bp, Unknown
  misc_feature (1)..( 6): Result.003 file - promoters60/4772329
aaaaca

SEQ ID NO: 141728 - DNA, 6 bp, Unknown
  misc_feature (1)..( 6): Result.003 file - promoters60/4772329
aaaaca

SEQ ID NO: 141729 - DNA, 7 bp, Unknown
  misc_feature (1)..( 7): Result.003 file - promoters60/4772329
ttgttta

SEQ ID NO: 141730 - DNA, 7 bp, Unknown
  misc_feature (1)..( 7): Result.003 file - promoters60/4772329
ttgttta

SEQ ID NO: 141731 - DNA, 9 bp, Unknown
  misc_feature (1)..( 9): Result.003 file - promoters60/4772329
taagttata

SEQ ID NO: 141732 - DNA, 9 bp, Unknown
  misc_feature (1)..( 9): Result.003 file - promoters60/4772329
taacttaat

SEQ ID NO: 141733 - DNA, 9 bp, Unknown
  misc_feature (1)..( 9): Result.003 file - promoters60/4772329
ttactcaat

SEQ ID NO: 141734 - DNA, 7 bp, Unknown
  misc_feature (1)..( 7): Result.003 file - promoters60/4772329
atactgc

SEQ ID NO: 141735 - DNA, 7 bp, Unknown
  misc_feature (1)..( 7): Result.003 file - promoters60/4772329
ataatgc

SEQ ID NO: 141736 - DNA, 9 bp, Unknown
  misc_feature (1)..( 9): Result.003 file - promoters60/4772329
tcattcatt

SEQ ID NO: 141737 - DNA, 9 bp, Unknown
  misc_feature (1)..( 9): Result.003 file - promoters60/4772329
atattcatt

SEQ ID NO: 141738 - DNA, 9 bp, Unknown
  misc_feature (1)..( 9): Result.003 file - promoters60/4772329
atattcaac

SEQ ID NO: 141739 - DNA, 7 bp, Unknown
  misc_feature (1)..( 7): Result.003 file - promoters60/4772329
aatataa

SEQ ID NO: 141740 - DNA, 7 bp, Unknown
  misc_feature (1)..( 7): Result.003 file - promoters60/4772329
aatttaa

SEQ ID NO: 141741 - DNA, 6 bp, Unknown
  misc_feature (1)..( 6): Result.003 file - promoters60/4772329
aaataa

SEQ ID NO: 141742 - DNA, 6 bp, Unknown
  misc_feature (1)..( 6): Result.003 file - promoters60/4772329
aaataa

SEQ ID NO: 141743 - DNA, 8 bp, Unknown
  misc_feature (1)..( 8): Result.003 file - promoters60/4772329
caacctga

SEQ ID NO: 141744 - DNA, 8 bp, Unknown
  misc_feature (1)..( 8): Result.003 file - promoters60/4772329
caacgtga

SEQ ID NO: 141745 - DNA, 6 bp, Unknown
  misc_feature (1)..( 6): Result.003 file - promoters60/4772329
attatt

SEQ ID NO: 141746 - DNA, 6 bp, Unknown
  misc_feature (1)..( 6): Result.003 file - promoters60/4772329
attatt

SEQ ID NO: 141747 - DNA, 7 bp, Unknown
  misc_feature (1)..( 7): Result.003 file - promoters60/4772329
tcatatt

SEQ ID NO: 141748 - DNA, 7 bp, Unknown
  misc_feature (1)..( 7): Result.003 file - promoters60/4772329
tcagatt

SEQ ID NO: 141749 - DNA, 9 bp, Unknown
  misc_feature (1)..( 9): Result.003 file - promoters60/4772329
gtagttctt

SEQ ID NO: 141750 - DNA, 9 bp, Unknown
  misc_feature (1)..( 9): Result.003 file - promoters60/4772329
gtacttctc

SEQ ID NO: 141751 - DNA, 9 bp, Unknown
  misc_feature (1)..( 9): Result.003 file - promoters60/4772329
tttcttctc

SEQ ID NO: 141752 - DNA, 9 bp, Unknown
  misc_feature (1)..( 9): Result.003 file - promoters60/4772329
aaaaggaac

SEQ ID NO: 141753 - DNA, 9 bp, Unknown
  misc_feature (1)..( 9): Result.003 file - promoters60/4772329
aaaagtaac

SEQ ID NO: 141754 - DNA, 10 bp, Unknown
  misc_feature (1)..( 10): Result.003 file - promoters60/4772329
atagtttaca

SEQ ID NO: 141755 - DNA, 10 bp, Unknown
  misc_feature (1)..( 10): Result.003 file - promoters60/4772329
atagtataca

SEQ ID NO: 141756 - DNA, 7 bp, Unknown
  misc_feature (1)..( 7): Result.003 file - promoters60/4772329
tgaaaaa

SEQ ID NO: 141757 - DNA, 7 bp, Unknown
  misc_feature (1)..( 7): Result.003 file - promoters60/4772329
tgacaaa

SEQ ID NO: 141758 - DNA, 6 bp, Unknown
  misc_feature (1)..( 6): Result.003 file - promoters60/4772329
tattta

SEQ ID NO: 141759 - DNA, 6 bp, Unknown
  misc_feature (1)..( 6): Result.003 file - promoters60/4772329
tattta

SEQ ID NO: 141760 - DNA, 8 bp, Unknown
  misc_feature (1)..( 8): Result.003 file - promoters60/4772329
aaatatta

SEQ ID NO: 141761 - DNA, 8 bp, Unknown
  misc_feature (1)..( 8): Result.003 file - promoters60/4772329
aaacatta

SEQ ID NO: 141762 - DNA, 6 bp, Unknown
  misc_feature (1)..( 6): Result.003 file - promoters60/4772329
tattat

SEQ ID NO: 141763 - DNA, 6 bp, Unknown
  misc_feature (1)..( 6): Result.003 file - promoters60/4772329
tattat

SEQ ID NO: 141764 - DNA, 8 bp, Unknown
  misc_feature (1)..( 8): Result.003 file - promoters60/4772329
caatttga

SEQ ID NO: 141765 - DNA, 8 bp, Unknown
  misc_feature (1)..( 8): Result.003 file - promoters60/4772329
caatatga

SEQ ID NO: 141766 - DNA, 7 bp, Unknown
  misc_feature (1)..( 7): Result.003 file - promoters60/4772332
aatctgt

SEQ ID NO: 141767 - DNA, 7 bp, Unknown
  misc_feature (1)..( 7): Result.003 file - promoters60/4772332
aatttgt

SEQ ID NO: 141768 - DNA, 7 bp, Unknown
  misc_feature (1)..( 7): Result.003 file - promoters60/4772332
cctacaa

SEQ ID NO: 141769 - DNA, 7 bp, Unknown
  misc_feature (1)..( 7): Result.003 file - promoters60/4772332
ccttcaa

SEQ ID NO: 141770 - DNA, 6 bp, Unknown
  misc_feature (1)..( 6): Result.003 file - promoters60/4772332
aagaga

SEQ ID NO: 141771 - DNA, 6 bp, Unknown
  misc_feature (1)..( 6): Result.003 file - promoters60/4772332
aagaga

SEQ ID NO: 141772 - DNA, 8 bp, Unknown
  misc_feature (1)..( 8): Result.003 file - promoters60/4772332
ttattttt

SEQ ID NO: 141773 - DNA, 8 bp, Unknown
  misc_feature (1)..( 8): Result.003 file - promoters60/4772332
ttattttt

SEQ ID NO: 141774 - DNA, 6 bp, Unknown
  misc_feature (1)..( 6): Result.003 file - promoters60/4772332
aaaaaa

SEQ ID NO: 141775 - DNA, 6 bp, Unknown
  misc_feature (1)..( 6): Result.003 file - promoters60/4772332
aaaaaa

SEQ ID NO: 141776 - DNA, 9 bp, Unknown
  misc_feature (1)..( 9): Result.003 file - promoters60/4772332
ttttgttat

SEQ ID NO: 141777 - DNA, 9 bp, Unknown
  misc_feature (1)..( 9): Result.003 file - promoters60/4772332
ttttggtat

SEQ ID NO: 141778 - DNA, 7 bp, Unknown
  misc_feature (1)..( 7): Result.003 file - promoters60/4772332
ttttatg

SEQ ID NO: 141779 - DNA, 7 bp, Unknown
  misc_feature (1)..( 7): Result.003 file - promoters60/4772332
tttaatg

SEQ ID NO: 141780 - DNA, 9 bp, Unknown
  misc_feature (1)..( 9): Result.003 file - promoters60/4772332
gtgtattgg

SEQ ID NO: 141781 - DNA, 9 bp, Unknown
  misc_feature (1)..( 9): Result.003 file - promoters60/4772332
gtgttttgg

SEQ ID NO: 141782 - DNA, 7 bp, Unknown
  misc_feature (1)..( 7): Result.003 file - promoters60/4772332
tgttgta

SEQ ID NO: 141783 - DNA, 7 bp, Unknown
  misc_feature (1)..( 7): Result.003 file - promoters60/4772332
tgttgta

SEQ ID NO: 141784 - DNA, 6 bp, Unknown
  misc_feature (1)..( 6): Result.003 file - promoters60/4772332
caagag

SEQ ID NO: 141785 - DNA, 6 bp, Unknown
  misc_feature (1)..( 6): Result.003 file - promoters60/4772332
caagag

SEQ ID NO: 141786 - DNA, 7 bp, Unknown
  misc_feature (1)..( 7): Result.003 file - promoters60/4772332
gactata

SEQ ID NO: 141787 - DNA, 7 bp, Unknown
  misc_feature (1)..( 7): Result.003 file - promoters60/4772332
gaccata

SEQ ID NO: 141788 - DNA, 12 bp, Unknown
  misc_feature (1)..( 12): Result.003 file - promoters60/4772336
ttatatatagaa

SEQ ID NO: 141789 - DNA, 12 bp, Unknown
  misc_feature (1)..( 12): Result.003 file - promoters60/4772336
ctatatataaaa

SEQ ID NO: 141790 - DNA, 12 bp, Unknown
  misc_feature (1)..( 12): Result.003 file - promoters60/4772336
ttatatataacc

SEQ ID NO: 141791 - DNA, 12 bp, Unknown
  misc_feature (1)..( 12): Result.003 file - promoters60/4772336
atataaataaca

SEQ ID NO: 141792 - DNA, 12 bp, Unknown
  misc_feature (1)..( 12): Result.003 file - promoters60/4772336
ctataaattaca

SEQ ID NO: 141793 - DNA, 12 bp, Unknown
  misc_feature (1)..( 12): Result.003 file - promoters60/4772336
agatataataca

SEQ ID NO: 141794 - DNA, 12 bp, Unknown
  misc_feature (1)..( 12): Result.003 file - promoters60/4772336
gtataaattgta

SEQ ID NO: 141795 - DNA, 15 bp, Unknown
  misc_feature (1)..( 15): Result.003 file - promoters60/4772336
agaatacatttcata

SEQ ID NO: 141796 - DNA, 15 bp, Unknown
  misc_feature (1)..( 15): Result.003 file - promoters60/4772336
tgataacatttcgtt

SEQ ID NO: 141797 - DNA, 15 bp, Unknown
  misc_feature (1)..( 15): Result.003 file - promoters60/4772336
ttcgtagattgcgtg

SEQ ID NO: 141798 - DNA, 15 bp, Unknown
  misc_feature (1)..( 15): Result.003 file - promoters60/4772336
tttttagtttgtgtg

SEQ ID NO: 141799 - DNA, 15 bp, Unknown
  misc_feature (1)..( 15): Result.003 file - promoters60/4772336
aatctcgtgtgcaag

SEQ ID NO: 141800 - DNA, 15 bp, Unknown
  misc_feature (1)..( 15): Result.003 file - promoters60/4772336
tttttaatttgtgtc

SEQ ID NO: 141801 - DNA, 15 bp, Unknown
  misc_feature (1)..( 15): Result.003 file - promoters60/4772336
attgtatatttagtt

SEQ ID NO: 141802 - DNA, 9 bp, Unknown
  misc_feature (1)..( 9): Result.003 file - promoters60/4772336
ataagaaat

SEQ ID NO: 141803 - DNA, 9 bp, Unknown
  misc_feature (1)..( 9): Result.003 file - promoters60/4772336
acaagaaaa

SEQ ID NO: 141804 - DNA, 9 bp, Unknown
  misc_feature (1)..( 9): Result.003 file - promoters60/4772336
ttaaaaaag

SEQ ID NO: 141805 - DNA, 9 bp, Unknown
  misc_feature (1)..( 9): Result.003 file - promoters60/4772336
acaggaaaa

SEQ ID NO: 141806 - DNA, 10 bp, Unknown
  misc_feature (1)..( 10): Result.003 file - promoters60/4772336
taaagcaaac

SEQ ID NO: 141807 - DNA, 10 bp, Unknown
  misc_feature (1)..( 10): Result.003 file - promoters60/4772336
atcttaaaat

SEQ ID NO: 141808 - DNA, 8 bp, Unknown
  misc_feature (1)..( 8): Result.003 file - promoters60/4772346
agatactt

SEQ ID NO: 141809 - DNA, 8 bp, Unknown
  misc_feature (1)..( 8): Result.003 file - promoters60/4772346
agatacag

SEQ ID NO: 141810 - DNA, 8 bp, Unknown
  misc_feature (1)..( 8): Result.003 file - promoters60/4772346
agagacat

SEQ ID NO: 141811 - DNA, 8 bp, Unknown
  misc_feature (1)..( 8): Result.003 file - promoters60/4772346
cgatccag

SEQ ID NO: 141812 - DNA, 8 bp, Unknown
  misc_feature (1)..( 8): Result.003 file - promoters60/4772370
attaaaaa

SEQ ID NO: 141813 - DNA, 8 bp, Unknown
  misc_feature (1)..( 8): Result.003 file - promoters60/4772370
attgaaaa

SEQ ID NO: 141814 - DNA, 8 bp, Unknown
  misc_feature (1)..( 8): Result.003 file - promoters60/4772370
attaaaag

SEQ ID NO: 141815 - DNA, 12 bp, Unknown
  misc_feature (1)..( 12): Result.003 file - promoters60/4772370
aagtaataacac

SEQ ID NO: 141816 - DNA, 12 bp, Unknown
  misc_feature (1)..( 12): Result.003 file - promoters60/4772370
atgtaatgacac

SEQ ID NO: 141817 - DNA, 12 bp, Unknown
  misc_feature (1)..( 12): Result.003 file - promoters60/4772370
atggaatagatc

SEQ ID NO: 141818 - DNA, 8 bp, Unknown
  misc_feature (1)..( 8): Result.003 file - promoters60/4772370
tataaaaa

SEQ ID NO: 141819 - DNA, 8 bp, Unknown
  misc_feature (1)..( 8): Result.003 file - promoters60/4772370
attaaaaa

SEQ ID NO: 141820 - DNA, 8 bp, Unknown
  misc_feature (1)..( 8): Result.003 file - promoters60/4772370
tataaaag

SEQ ID NO: 141821 - DNA, 12 bp, Unknown
  misc_feature (1)..( 12): Result.003 file - promoters60/4772370
aaaagaaacaaa

SEQ ID NO: 141822 - DNA, 12 bp, Unknown
  misc_feature (1)..( 12): Result.003 file - promoters60/4772370
aaaagaaaaaaa

SEQ ID NO: 141823 - DNA, 12 bp, Unknown
  misc_feature (1)..( 12): Result.003 file - promoters60/4772370
caattaaaaaag

SEQ ID NO: 141824 - DNA, 8 bp, Unknown
  misc_feature (1)..( 8): Result.003 file - promoters60/4772378
cttttaga

SEQ ID NO: 141825 - DNA, 8 bp, Unknown
  misc_feature (1)..( 8): Result.003 file - promoters60/4772378
gttttaga

SEQ ID NO: 141826 - DNA, 8 bp, Unknown
  misc_feature (1)..( 8): Result.003 file - promoters60/4772378
tgtttaga

SEQ ID NO: 141827 - DNA, 8 bp, Unknown
  misc_feature (1)..( 8): Result.003 file - promoters60/4772378
tgttgaga

SEQ ID NO: 141828 - DNA, 8 bp, Unknown
  misc_feature (1)..( 8): Result.003 file - promoters60/4772382
atgcagga

SEQ ID NO: 141829 - DNA, 8 bp, Unknown
  misc_feature (1)..( 8): Result.003 file - promoters60/4772382
atggagga

SEQ ID NO: 141830 - DNA, 8 bp, Unknown
  misc_feature (1)..( 8): Result.003 file - promoters60/4772382
aagtgttt

SEQ ID NO: 141831 - DNA, 8 bp, Unknown
  misc_feature (1)..( 8): Result.003 file - promoters60/4772382
gagtattt

SEQ ID NO: 141832 - DNA, 8 bp, Unknown
  misc_feature (1)..( 8): Result.003 file - promoters60/4772382
aagttttt

SEQ ID NO: 141833 - DNA, 6 bp, Unknown
  misc_feature (1)..( 6): Result.003 file - promoters60/4772382
gtaaag

SEQ ID NO: 141834 - DNA, 6 bp, Unknown
  misc_feature (1)..( 6): Result.003 file - promoters60/4772382
gtaaag

SEQ ID NO: 141835 - DNA, 8 bp, Unknown
  misc_feature (1)..( 8): Result.003 file - promoters60/4772382
gttacaac

SEQ ID NO: 141836 - DNA, 8 bp, Unknown
  misc_feature (1)..( 8): Result.003 file - promoters60/4772382
gttataac

SEQ ID NO: 141837 - DNA, 9 bp, Unknown
  misc_feature (1)..( 9): Result.003 file - promoters60/4772382
ccttttaaa

SEQ ID NO: 141838 - DNA, 9 bp, Unknown
  misc_feature (1)..( 9): Result.003 file - promoters60/4772382
ccttataaa

SEQ ID NO: 141839 - DNA, 9 bp, Unknown
  misc_feature (1)..( 9): Result.003 file - promoters60/4772382
atatataaa

SEQ ID NO: 141840 - DNA, 10 bp, Unknown
  misc_feature (1)..( 10): Result.003 file - promoters60/4772382
acatatgatt

SEQ ID NO: 141841 - DNA, 10 bp, Unknown
  misc_feature (1)..( 10): Result.003 file - promoters60/4772382
acataagatt

SEQ ID NO: 141842 - DNA, 8 bp, Unknown
  misc_feature (1)..( 8): Result.003 file - promoters60/4772382
atttacat

SEQ ID NO: 141843 - DNA, 8 bp, Unknown
  misc_feature (1)..( 8): Result.003 file - promoters60/4772382
attcacat

SEQ ID NO: 141844 - DNA, 6 bp, Unknown
  misc_feature (1)..( 6): Result.003 file - promoters60/4772382
tttcaa

SEQ ID NO: 141845 - DNA, 6 bp, Unknown
  misc_feature (1)..( 6): Result.003 file - promoters60/4772382
tttcaa

SEQ ID NO: 141846 - DNA, 7 bp, Unknown
  misc_feature (1)..( 7): Result.003 file - promoters60/4772382
attttag

SEQ ID NO: 141847 - DNA, 7 bp, Unknown
  misc_feature (1)..( 7): Result.003 file - promoters60/4772382
attttag

SEQ ID NO: 141848 - DNA, 7 bp, Unknown
  misc_feature (1)..( 7): Result.003 file - promoters60/4772382
ttttagt

SEQ ID NO: 141849 - DNA, 7 bp, Unknown
  misc_feature (1)..( 7): Result.003 file - promoters60/4772382
tttaagt

SEQ ID NO: 141850 - DNA, 8 bp, Unknown
  misc_feature (1)..( 8): Result.003 file - promoters60/4772382
tttattta

SEQ ID NO: 141851 - DNA, 8 bp, Unknown
  misc_feature (1)..( 8): Result.003 file - promoters60/4772382
ttttttta

SEQ ID NO: 141852 - DNA, 6 bp, Unknown
  misc_feature (1)..( 6): Result.003 file - promoters60/4772382
taaacg

SEQ ID NO: 141853 - DNA, 6 bp, Unknown
  misc_feature (1)..( 6): Result.003 file - promoters60/4772382
taaacg

SEQ ID NO: 141854 - DNA, 9 bp, Unknown
  misc_feature (1)..( 9): Result.003 file - promoters60/4772382
atattacca

SEQ ID NO: 141855 - DNA, 9 bp, Unknown
  misc_feature (1)..( 9): Result.003 file - promoters60/4772382
atatttcca

SEQ ID NO: 141856 - DNA, 11 bp, Unknown
  misc_feature (1)..( 11): Result.003 file - promoters60/4772382
caaaatttcaa

SEQ ID NO: 141857 - DNA, 11 bp, Unknown
  misc_feature (1)..( 11): Result.003 file - promoters60/4772382
caaaatgtcaa

SEQ ID NO: 141858 - DNA, 6 bp, Unknown
  misc_feature (1)..( 6): Result.003 file - promoters60/4772382
aaacat

SEQ ID NO: 141859 - DNA, 6 bp, Unknown
  misc_feature (1)..( 6): Result.003 file - promoters60/4772382
aaacat

SEQ ID NO: 141860 - DNA, 10 bp, Unknown
  misc_feature (1)..( 10): Result.003 file - promoters60/4772382
aaaaagaaaa

SEQ ID NO: 141861 - DNA, 10 bp, Unknown
  misc_feature (1)..( 10): Result.003 file - promoters60/4772382
aaaaaaaaaa

SEQ ID NO: 141862 - DNA, 9 bp, Unknown
  misc_feature (1)..( 9): Result.003 file - promoters60/4772382
caaaatcta

SEQ ID NO: 141863 - DNA, 9 bp, Unknown
  misc_feature (1)..( 9): Result.003 file - promoters60/4772382
caaaaccta

SEQ ID NO: 141864 - DNA, 6 bp, Unknown
  misc_feature (1)..( 6): Result.003 file - promoters60/4772382
gaaaaa

SEQ ID NO: 141865 - DNA, 6 bp, Unknown
  misc_feature (1)..( 6): Result.003 file - promoters60/4772382
gaaaaa

SEQ ID NO: 141866 - DNA, 6 bp, Unknown
  misc_feature (1)..( 6): Result.003 file - promoters60/4772382
aattca

SEQ ID NO: 141867 - DNA, 6 bp, Unknown
  misc_feature (1)..( 6): Result.003 file - promoters60/4772382
aattca

SEQ ID NO: 141868 - DNA, 7 bp, Unknown
  misc_feature (1)..( 7): Result.003 file - promoters60/4772382
attgaaa

SEQ ID NO: 141869 - DNA, 7 bp, Unknown
  misc_feature (1)..( 7): Result.003 file - promoters60/4772382
attaaaa

SEQ ID NO: 141870 - DNA, 17 bp, Unknown
  misc_feature (1)..( 17): Result.003 file - promoters60/4772389
ttggggaaaaaaaagac

SEQ ID NO: 141871 - DNA, 17 bp, Unknown
  misc_feature (1)..( 17): Result.003 file - promoters60/4772389
agacggaacaaaaccgt

SEQ ID NO: 141872 - DNA, 17 bp, Unknown
  misc_feature (1)..( 17): Result.003 file - promoters60/4772389
tgagttaaaaaatatta

SEQ ID NO: 141873 - DNA, 17 bp, Unknown
  misc_feature (1)..( 17): Result.003 file - promoters60/4772389
aaaaagaagaaaaaata

SEQ ID NO: 141874 - DNA, 17 bp, Unknown
  misc_feature (1)..( 17): Result.003 file - promoters60/4772389
tcgattaacaaactaat

SEQ ID NO: 141875 - DNA, 17 bp, Unknown
  misc_feature (1)..( 17): Result.003 file - promoters60/4772389
tgttaaaccaaaacgac

SEQ ID NO: 141876 - DNA, 17 bp, Unknown
  misc_feature (1)..( 17): Result.003 file - promoters60/4772389
ccgtaagccaaaacatc

SEQ ID NO: 141877 - DNA, 17 bp, Unknown
  misc_feature (1)..( 17): Result.003 file - promoters60/4772389
atatataagaaaatata

SEQ ID NO: 141878 - DNA, 10 bp, Unknown
  misc_feature (1)..( 10): Result.003 file - promoters60/4772389
ccaaaaataa

SEQ ID NO: 141879 - DNA, 10 bp, Unknown
  misc_feature (1)..( 10): Result.003 file - promoters60/4772389
acaaaaaaag

SEQ ID NO: 141880 - DNA, 10 bp, Unknown
  misc_feature (1)..( 10): Result.003 file - promoters60/4772389
ataaacatat

SEQ ID NO: 141881 - DNA, 10 bp, Unknown
  misc_feature (1)..( 10): Result.003 file - promoters60/4772389
acaaaagaca

SEQ ID NO: 141882 - DNA, 10 bp, Unknown
  misc_feature (1)..( 10): Result.003 file - promoters60/4772389
taaaaaaaaa

SEQ ID NO: 141883 - DNA, 10 bp, Unknown
  misc_feature (1)..( 10): Result.003 file - promoters60/4772389
ttaaacatat

SEQ ID NO: 141884 - DNA, 10 bp, Unknown
  misc_feature (1)..( 10): Result.003 file - promoters60/4772389
ttaaactgtt

SEQ ID NO: 141885 - DNA, 10 bp, Unknown
  misc_feature (1)..( 10): Result.003 file - promoters60/4772389
atttatttcg

SEQ ID NO: 141886 - DNA, 10 bp, Unknown
  misc_feature (1)..( 10): Result.003 file - promoters60/4772389
atttatgtcg

SEQ ID NO: 141887 - DNA, 10 bp, Unknown
  misc_feature (1)..( 10): Result.003 file - promoters60/4772389
attcatttta

SEQ ID NO: 141888 - DNA, 10 bp, Unknown
  misc_feature (1)..( 10): Result.003 file - promoters60/4772389
atttttttac

SEQ ID NO: 141889 - DNA, 10 bp, Unknown
  misc_feature (1)..( 10): Result.003 file - promoters60/4772389
gttttttcta

SEQ ID NO: 141890 - DNA, 10 bp, Unknown
  misc_feature (1)..( 10): Result.003 file - promoters60/4772389
ctttttacgg

SEQ ID NO: 141891 - DNA, 17 bp, Unknown
  misc_feature (1)..( 17): Result.003 file - promoters60/4772389
aagacaaacggtctaaa

SEQ ID NO: 141892 - DNA, 17 bp, Unknown
  misc_feature (1)..( 17): Result.003 file - promoters60/4772389
ttaacaaactaattaaa

SEQ ID NO: 141893 - DNA, 17 bp, Unknown
  misc_feature (1)..( 17): Result.003 file - promoters60/4772389
taaaaaaagaagaaaaa

SEQ ID NO: 141894 - DNA, 17 bp, Unknown
  misc_feature (1)..( 17): Result.003 file - promoters60/4772389
ggaacaaaaccgtgatc

SEQ ID NO: 141895 - DNA, 17 bp, Unknown
  misc_feature (1)..( 17): Result.003 file - promoters60/4772389
taaataaatttttgagt

SEQ ID NO: 141896 - DNA, 17 bp, Unknown
  misc_feature (1)..( 17): Result.003 file - promoters60/4772389
aaaataaactcattcaa

SEQ ID NO: 141897 - DNA, 12 bp, Unknown
  misc_feature (1)..( 12): Result.003 file - promoters60/4772389
gaaaaaaaagac

SEQ ID NO: 141898 - DNA, 12 bp, Unknown
  misc_feature (1)..( 12): Result.003 file - promoters60/4772389
agttaaaaagtg

SEQ ID NO: 141899 - DNA, 12 bp, Unknown
  misc_feature (1)..( 12): Result.003 file - promoters60/4772389
aaccaaaacgac

SEQ ID NO: 141900 - DNA, 12 bp, Unknown
  misc_feature (1)..( 12): Result.003 file - promoters60/4772389
gaacaaaaccgt

SEQ ID NO: 141901 - DNA, 12 bp, Unknown
  misc_feature (1)..( 12): Result.003 file - promoters60/4772389
agccaaaacatc

SEQ ID NO: 141902 - DNA, 12 bp, Unknown
  misc_feature (1)..( 12): Result.003 file - promoters60/4772389
agttaaaaaata

SEQ ID NO: 141903 - DNA, 12 bp, Unknown
  misc_feature (1)..( 12): Result.003 file - promoters60/4772389
taagaaaatata

SEQ ID NO: 141904 - DNA, 11 bp, Unknown
  misc_feature (1)..( 11): Result.003 file - promoters60/4772389
caaaaataaga

SEQ ID NO: 141905 - DNA, 11 bp, Unknown
  misc_feature (1)..( 11): Result.003 file - promoters60/4772389
gacaaataaat

SEQ ID NO: 141906 - DNA, 11 bp, Unknown
  misc_feature (1)..( 11): Result.003 file - promoters60/4772389
tacaaaaaaag

SEQ ID NO: 141907 - DNA, 11 bp, Unknown
  misc_feature (1)..( 11): Result.003 file - promoters60/4772389
ttaaaaaaaaa

SEQ ID NO: 141908 - DNA, 11 bp, Unknown
  misc_feature (1)..( 11): Result.003 file - promoters60/4772389
aacatataata

SEQ ID NO: 141909 - DNA, 11 bp, Unknown
  misc_feature (1)..( 11): Result.003 file - promoters60/4772389
gacaaataaac

SEQ ID NO: 141910 - DNA, 11 bp, Unknown
  misc_feature (1)..( 11): Result.003 file - promoters60/4772389
ttgtaatgaac

SEQ ID NO: 141911 - DNA, 12 bp, Unknown
  misc_feature (1)..( 12): Result.003 file - promoters60/4772389
ccttaattaccg

SEQ ID NO: 141912 - DNA, 12 bp, Unknown
  misc_feature (1)..( 12): Result.003 file - promoters60/4772389
atataattattt

SEQ ID NO: 141913 - DNA, 12 bp, Unknown
  misc_feature (1)..( 12): Result.003 file - promoters60/4772389
tattaattagtc

SEQ ID NO: 141914 - DNA, 12 bp, Unknown
  misc_feature (1)..( 12): Result.003 file - promoters60/4772389
aaaatattatta

SEQ ID NO: 141915 - DNA, 12 bp, Unknown
  misc_feature (1)..( 12): Result.003 file - promoters60/4772389
aactaattaaac

SEQ ID NO: 141916 - DNA, 12 bp, Unknown
  misc_feature (1)..( 12): Result.003 file - promoters60/4772389
tatgaattggat

SEQ ID NO: 141917 - DNA, 13 bp, Unknown
  misc_feature (1)..( 13): Result.003 file - promoters60/4772393
tgattgatctgtg

SEQ ID NO: 141918 - DNA, 13 bp, Unknown
  misc_feature (1)..( 13): Result.003 file - promoters60/4772393
caatttatctaac

SEQ ID NO: 141919 - DNA, 13 bp, Unknown
  misc_feature (1)..( 13): Result.003 file - promoters60/4772393
caacttaattctt

SEQ ID NO: 141920 - DNA, 13 bp, Unknown
  misc_feature (1)..( 13): Result.003 file - promoters60/4772393
ccatttttctact

SEQ ID NO: 141921 - DNA, 13 bp, Unknown
  misc_feature (1)..( 13): Result.003 file - promoters60/4772393
aaatttacgctca

SEQ ID NO: 141922 - DNA, 13 bp, Unknown
  misc_feature (1)..( 13): Result.003 file - promoters60/4772393
aatactatgtaaa

SEQ ID NO: 141923 - DNA, 13 bp, Unknown
  misc_feature (1)..( 13): Result.003 file - promoters60/4772393
cctcaaatgcaaa

SEQ ID NO: 141924 - DNA, 11 bp, Unknown
  misc_feature (1)..( 11): Result.003 file - promoters60/4772393
tctttttacag

SEQ ID NO: 141925 - DNA, 11 bp, Unknown
  misc_feature (1)..( 11): Result.003 file - promoters60/4772393
tttttctactt

SEQ ID NO: 141926 - DNA, 12 bp, Unknown
  misc_feature (1)..( 12): Result.003 file - promoters60/4772393
cactttctattt

SEQ ID NO: 141927 - DNA, 12 bp, Unknown
  misc_feature (1)..( 12): Result.003 file - promoters60/4772393
atttatctaaca

SEQ ID NO: 141928 - DNA, 12 bp, Unknown
  misc_feature (1)..( 12): Result.003 file - promoters60/4772393
tactatgtaaag

SEQ ID NO: 141929 - DNA, 12 bp, Unknown
  misc_feature (1)..( 12): Result.003 file - promoters60/4772393
tcaaatgcaaac

SEQ ID NO: 141930 - DNA, 13 bp, Unknown
  misc_feature (1)..( 13): Result.003 file - promoters60/4772398
aatgggctgggcc

SEQ ID NO: 141931 - DNA, 13 bp, Unknown
  misc_feature (1)..( 13): Result.003 file - promoters60/4772398
aatgggcctaatt

SEQ ID NO: 141932 - DNA, 13 bp, Unknown
  misc_feature (1)..( 13): Result.003 file - promoters60/4772398
tttgggcttctta

SEQ ID NO: 141933 - DNA, 13 bp, Unknown
  misc_feature (1)..( 13): Result.003 file - promoters60/4772398
aataggcccaaca

SEQ ID NO: 141934 - DNA, 13 bp, Unknown
  misc_feature (1)..( 13): Result.003 file - promoters60/4772398
gttgggcttttaa

SEQ ID NO: 141935 - DNA, 13 bp, Unknown
  misc_feature (1)..( 13): Result.003 file - promoters60/4772398
attgggcttttta

SEQ ID NO: 141936 - DNA, 8 bp, Unknown
  misc_feature (1)..( 8): Result.003 file - promoters60/4772700
tatatatt

SEQ ID NO: 141937 - DNA, 8 bp, Unknown
  misc_feature (1)..( 8): Result.003 file - promoters60/4772700
attatatt

SEQ ID NO: 141938 - DNA, 8 bp, Unknown
  misc_feature (1)..( 8): Result.003 file - promoters60/4772700
tatgtatt

SEQ ID NO: 141939 - DNA, 8 bp, Unknown
  misc_feature (1)..( 8): Result.003 file - promoters60/4772700
tatatatt

SEQ ID NO: 141940 - DNA, 8 bp, Unknown
  misc_feature (1)..( 8): Result.003 file - promoters60/4772700
cttacatt

SEQ ID NO: 141941 - DNA, 8 bp, Unknown
  misc_feature (1)..( 8): Result.003 file - promoters60/4772700
aatggatt

SEQ ID NO: 141942 - DNA, 6 bp, Unknown
  misc_feature (1)..( 6): Result.003 file - promoters60/4772706
tgatgt

SEQ ID NO: 141943 - DNA, 6 bp, Unknown
  misc_feature (1)..( 6): Result.003 file - promoters60/4772706
tgatgt

SEQ ID NO: 141944 - DNA, 7 bp, Unknown
  misc_feature (1)..( 7): Result.003 file - promoters60/4772706
cattaga

SEQ ID NO: 141945 - DNA, 7 bp, Unknown
  misc_feature (1)..( 7): Result.003 file - promoters60/4772706
catgaga

SEQ ID NO: 141946 - DNA, 6 bp, Unknown
  misc_feature (1)..( 6): Result.003 file - promoters60/4772706
taatag

SEQ ID NO: 141947 - DNA, 6 bp, Unknown
  misc_feature (1)..( 6): Result.003 file - promoters60/4772706
taatag

SEQ ID NO: 141948 - DNA, 7 bp, Unknown
  misc_feature (1)..( 7): Result.003 file - promoters60/4772706
tcagaat

SEQ ID NO: 141949 - DNA, 7 bp, Unknown
  misc_feature (1)..( 7): Result.003 file - promoters60/4772706
tcaaaat

SEQ ID NO: 141950 - DNA, 6 bp, Unknown
  misc_feature (1)..( 6): Result.003 file - promoters60/4772706
tgtctt

SEQ ID NO: 141951 - DNA, 6 bp, Unknown
  misc_feature (1)..( 6): Result.003 file - promoters60/4772706
tgtctt

SEQ ID NO: 141952 - DNA, 8 bp, Unknown
  misc_feature (1)..( 8): Result.003 file - promoters60/4772706
aacagaag

SEQ ID NO: 141953 - DNA, 8 bp, Unknown
  misc_feature (1)..( 8): Result.003 file - promoters60/4772706
aacaaaag

SEQ ID NO: 141954 - DNA, 7 bp, Unknown
  misc_feature (1)..( 7): Result.003 file - promoters60/4772706
ttttgtt

SEQ ID NO: 141955 - DNA, 7 bp, Unknown
  misc_feature (1)..( 7): Result.003 file - promoters60/4772706
gtttgtt

SEQ ID NO: 141956 - DNA, 7 bp, Unknown
  misc_feature (1)..( 7): Result.003 file - promoters60/4772706
gttagtt

SEQ ID NO: 141957 - DNA, 6 bp, Unknown
  misc_feature (1)..( 6): Result.003 file - promoters60/4772706
attttt

SEQ ID NO: 141958 - DNA, 6 bp, Unknown
  misc_feature (1)..( 6): Result.003 file - promoters60/4772706
attttt

SEQ ID NO: 141959 - DNA, 6 bp, Unknown
  misc_feature (1)..( 6): Result.003 file - promoters60/4772706
ttttgt

SEQ ID NO: 141960 - DNA, 6 bp, Unknown
  misc_feature (1)..( 6): Result.003 file - promoters60/4772706
ttttgt

SEQ ID NO: 141961 - DNA, 6 bp, Unknown
  misc_feature (1)..( 6): Result.003 file - promoters60/4772706
tgggtc

SEQ ID NO: 141962 - DNA, 6 bp, Unknown
  misc_feature (1)..( 6): Result.003 file - promoters60/4772706
tgggtc

SEQ ID NO: 141963 - DNA, 6 bp, Unknown
  misc_feature (1)..( 6): Result.003 file - promoters60/4772706
cttctt

SEQ ID NO: 141964 - DNA, 6 bp, Unknown
  misc_feature (1)..( 6): Result.003 file - promoters60/4772706
cttctt

SEQ ID NO: 141965 - DNA, 6 bp, Unknown
  misc_feature (1)..( 6): Result.003 file - promoters60/4772706
tgataa

SEQ ID NO: 141966 - DNA, 6 bp, Unknown
  misc_feature (1)..( 6): Result.003 file - promoters60/4772706
tgataa

SEQ ID NO: 141967 - DNA, 6 bp, Unknown
  misc_feature (1)..( 6): Result.003 file - promoters60/4772710
tttctt

SEQ ID NO: 141968 - DNA, 6 bp, Unknown
  misc_feature (1)..( 6): Result.003 file - promoters60/4772710
tttctt

SEQ ID NO: 141969 - DNA, 7 bp, Unknown
  misc_feature (1)..( 7): Result.003 file - promoters60/4772710
tttgctt

SEQ ID NO: 141970 - DNA, 8 bp, Unknown
  misc_feature (1)..( 8): Result.003 file - promoters60/4772710
gaatcaaa

SEQ ID NO: 141971 - DNA, 8 bp, Unknown
  misc_feature (1)..( 8): Result.003 file - promoters60/4772710
gaatcaca

SEQ ID NO: 141972 - DNA, 8 bp, Unknown
  misc_feature (1)..( 8): Result.003 file - promoters60/4772710
taataaaa

SEQ ID NO: 141973 - DNA, 10 bp, Unknown
  misc_feature (1)..( 10): Result.003 file - promoters60/4772710
gttcttttgt

SEQ ID NO: 141974 - DNA, 10 bp, Unknown
  misc_feature (1)..( 10): Result.003 file - promoters60/4772710
tttcttttgt

SEQ ID NO: 141975 - DNA, 10 bp, Unknown
  misc_feature (1)..( 10): Result.003 file - promoters60/4772710
tttattttac

SEQ ID NO: 141976 - DNA, 7 bp, Unknown
  misc_feature (1)..( 7): Result.003 file - promoters60/4772710
tttgctc

SEQ ID NO: 141977 - DNA, 7 bp, Unknown
  misc_feature (1)..( 7): Result.003 file - promoters60/4772710
tttgctt

SEQ ID NO: 141978 - DNA, 7 bp, Unknown
  misc_feature (1)..( 7): Result.003 file - promoters60/4772710
ttttctt

SEQ ID NO: 141979 - DNA, 7 bp, Unknown
  misc_feature (1)..( 7): Result.003 file - promoters60/4772710
ttttaat

SEQ ID NO: 141980 - DNA, 7 bp, Unknown
  misc_feature (1)..( 7): Result.003 file - promoters60/4772710
ctttaat

SEQ ID NO: 141981 - DNA, 7 bp, Unknown
  misc_feature (1)..( 7): Result.003 file - promoters60/4772710
cttaaat

SEQ ID NO: 141982 - DNA, 7 bp, Unknown
  misc_feature (1)..( 7): Result.003 file - promoters60/4772710
aaaattg

SEQ ID NO: 141983 - DNA, 7 bp, Unknown
  misc_feature (1)..( 7): Result.003 file - promoters60/4772710
aaaattg

SEQ ID NO: 141984 - DNA, 7 bp, Unknown
  misc_feature (1)..( 7): Result.003 file - promoters60/4772710
aaatttg

SEQ ID NO: 141985 - DNA, 10 bp, Unknown
  misc_feature (1)..( 10): Result.003 file - promoters60/4772710
atttaaattt

SEQ ID NO: 141986 - DNA, 10 bp, Unknown
  misc_feature (1)..( 10): Result.003 file - promoters60/4772710
attgaaatat

SEQ ID NO: 141987 - DNA, 10 bp, Unknown
  misc_feature (1)..( 10): Result.003 file - promoters60/4772710
gagaaaatta

SEQ ID NO: 141988 - DNA, 9 bp, Unknown
  misc_feature (1)..( 9): Result.003 file - promoters60/4772710
aattcagaa

SEQ ID NO: 141989 - DNA, 9 bp, Unknown
  misc_feature (1)..( 9): Result.003 file - promoters60/4772710
aattcaatt

SEQ ID NO: 141990 - DNA, 9 bp, Unknown
  misc_feature (1)..( 9): Result.003 file - promoters60/4772710
aattcagaa

SEQ ID NO: 141991 - DNA, 8 bp, Unknown
  misc_feature (1)..( 8): Result.003 file - promoters60/4772710
ttaattta

SEQ ID NO: 141992 - DNA, 8 bp, Unknown
  misc_feature (1)..( 8): Result.003 file - promoters60/4772710
ttattttg

SEQ ID NO: 141993 - DNA, 8 bp, Unknown
  misc_feature (1)..( 8): Result.003 file - promoters60/4772710
gtatattg

SEQ ID NO: 141994 - DNA, 7 bp, Unknown
  misc_feature (1)..( 7): Result.003 file - promoters60/4772724
ttagcct

SEQ ID NO: 141995 - DNA, 7 bp, Unknown
  misc_feature (1)..( 7): Result.003 file - promoters60/4772724
ttaccct

SEQ ID NO: 141996 - DNA, 6 bp, Unknown
  misc_feature (1)..( 6): Result.003 file - promoters60/4772724
taaccg

SEQ ID NO: 141997 - DNA, 6 bp, Unknown
  misc_feature (1)..( 6): Result.003 file - promoters60/4772724
taaccg

SEQ ID NO: 141998 - DNA, 6 bp, Unknown
  misc_feature (1)..( 6): Result.003 file - promoters60/4772724
gttaaa

SEQ ID NO: 141999 - DNA, 6 bp, Unknown
  misc_feature (1)..( 6): Result.003 file - promoters60/4772724
gttaaa

SEQ ID NO: 142000 - DNA, 7 bp, Unknown
  misc_feature (1)..( 7): Result.003 file - promoters60/4772724
caaagtc

SEQ ID NO: 142001 - DNA, 7 bp, Unknown
  misc_feature (1)..( 7): Result.003 file - promoters60/4772724
caatgtc

SEQ ID NO: 142002 - DNA, 8 bp, Unknown
  misc_feature (1)..( 8): Result.003 file - promoters60/4772724
atattttc

SEQ ID NO: 142003 - DNA, 8 bp, Unknown
  misc_feature (1)..( 8): Result.003 file - promoters60/4772724
atatcttc

SEQ ID NO: 142004 - DNA, 6 bp, Unknown
  misc_feature (1)..( 6): Result.003 file - promoters60/4772724
gagata

SEQ ID NO: 142005 - DNA, 6 bp, Unknown
  misc_feature (1)..( 6): Result.003 file - promoters60/4772724
gagata

SEQ ID NO: 142006 - DNA, 7 bp, Unknown
  misc_feature (1)..( 7): Result.003 file - promoters60/4772724
atgtggt

SEQ ID NO: 142007 - DNA, 7 bp, Unknown
  misc_feature (1)..( 7): Result.003 file - promoters60/4772724
atgtgga

SEQ ID NO: 142008 - DNA, 7 bp, Unknown
  misc_feature (1)..( 7): Result.003 file - promoters60/4772724
atgagga

SEQ ID NO: 142009 - DNA, 7 bp, Unknown
  misc_feature (1)..( 7): Result.003 file - promoters60/4772724
agctaat

SEQ ID NO: 142010 - DNA, 7 bp, Unknown
  misc_feature (1)..( 7): Result.003 file - promoters60/4772724
agcaaat

SEQ ID NO: 142011 - DNA, 6 bp, Unknown
  misc_feature (1)..( 6): Result.003 file - promoters60/4772724
aatgct

SEQ ID NO: 142012 - DNA, 6 bp, Unknown
  misc_feature (1)..( 6): Result.003 file - promoters60/4772724
aatgct

SEQ ID NO: 142013 - DNA, 7 bp, Unknown
  misc_feature (1)..( 7): Result.003 file - promoters60/4772724
caatcta

SEQ ID NO: 142014 - DNA, 7 bp, Unknown
  misc_feature (1)..( 7): Result.003 file - promoters60/4772724
caatcta

SEQ ID NO: 142015 - DNA, 8 bp, Unknown
  misc_feature (1)..( 8): Result.003 file - promoters60/4772724
atttcaaa

SEQ ID NO: 142016 - DNA, 8 bp, Unknown
  misc_feature (1)..( 8): Result.003 file - promoters60/4772724
atttcaaa

SEQ ID NO: 142017 - DNA, 8 bp, Unknown
  misc_feature (1)..( 8): Result.003 file - promoters60/4772724
tttgggaa

SEQ ID NO: 142018 - DNA, 8 bp, Unknown
  misc_feature (1)..( 8): Result.003 file - promoters60/4772724
tttgcgaa

SEQ ID NO: 142019 - DNA, 10 bp, Unknown
  misc_feature (1)..( 10): Result.003 file - promoters60/4772724
ttcaagaaga

SEQ ID NO: 142020 - DNA, 10 bp, Unknown
  misc_feature (1)..( 10): Result.003 file - promoters60/4772724
ttcaagaaga

SEQ ID NO: 142021 - DNA, 6 bp, Unknown
  misc_feature (1)..( 6): Result.003 file - promoters60/4772724
cgttga

SEQ ID NO: 142022 - DNA, 6 bp, Unknown
  misc_feature (1)..( 6): Result.003 file - promoters60/4772724
cgttga

SEQ ID NO: 142023 - DNA, 9 bp, Unknown
  misc_feature (1)..( 9): Result.003 file - promoters60/4772724
aatcaagat

SEQ ID NO: 142024 - DNA, 9 bp, Unknown
  misc_feature (1)..( 9): Result.003 file - promoters60/4772724
aataaagat

SEQ ID NO: 142025 - DNA, 6 bp, Unknown
  misc_feature (1)..( 6): Result.003 file - promoters60/4772743
attttt

SEQ ID NO: 142026 - DNA, 6 bp, Unknown
  misc_feature (1)..( 6): Result.003 file - promoters60/4772743
attttt

SEQ ID NO: 142027 - DNA, 6 bp, Unknown
  misc_feature (1)..( 6): Result.003 file - promoters60/4772743
tttact

SEQ ID NO: 142028 - DNA, 6 bp, Unknown
  misc_feature (1)..( 6): Result.003 file - promoters60/4772743
tttact

SEQ ID NO: 142029 - DNA, 8 bp, Unknown
  misc_feature (1)..( 8): Result.003 file - promoters60/4772743
tactagct

SEQ ID NO: 142030 - DNA, 8 bp, Unknown
  misc_feature (1)..( 8): Result.003 file - promoters60/4772743
tactggct

SEQ ID NO: 142031 - DNA, 6 bp, Unknown
  misc_feature (1)..( 6): Result.003 file - promoters60/4772743
agaatg

SEQ ID NO: 142032 - DNA, 6 bp, Unknown
  misc_feature (1)..( 6): Result.003 file - promoters60/4772743
agaatg

SEQ ID NO: 142033 - DNA, 13 bp, Unknown
  misc_feature (1)..( 13): Result.003 file - promoters60/4772772
agaaatataggat

SEQ ID NO: 142034 - DNA, 13 bp, Unknown
  misc_feature (1)..( 13): Result.003 file - promoters60/4772772
gaaaatattaacc

SEQ ID NO: 142035 - DNA, 13 bp, Unknown
  misc_feature (1)..( 13): Result.003 file - promoters60/4772772
ttagatatattta

SEQ ID NO: 142036 - DNA, 13 bp, Unknown
  misc_feature (1)..( 13): Result.003 file - promoters60/4772772
ttaaaaattaaat

SEQ ID NO: 142037 - DNA, 13 bp, Unknown
  misc_feature (1)..( 13): Result.003 file - promoters60/4772772
tcaaatattgcgg

SEQ ID NO: 142038 - DNA, 13 bp, Unknown
  misc_feature (1)..( 13): Result.003 file - promoters60/4772772
ttatatatgttta

SEQ ID NO: 142039 - DNA, 13 bp, Unknown
  misc_feature (1)..( 13): Result.003 file - promoters60/4772772
ggtaaaatttcat

SEQ ID NO: 142040 - DNA, 13 bp, Unknown
  misc_feature (1)..( 13): Result.003 file - promoters60/4772772
gtaacaattctaa

SEQ ID NO: 142041 - DNA, 10 bp, Unknown
  misc_feature (1)..( 10): Result.003 file - promoters60/4772772
acaacaaagt

SEQ ID NO: 142042 - DNA, 10 bp, Unknown
  misc_feature (1)..( 10): Result.003 file - promoters60/4772772
aaaacaaacg

SEQ ID NO: 142043 - DNA, 10 bp, Unknown
  misc_feature (1)..( 10): Result.003 file - promoters60/4772772
taaataaatt

SEQ ID NO: 142044 - DNA, 10 bp, Unknown
  misc_feature (1)..( 10): Result.003 file - promoters60/4772772
caaacaaatg

SEQ ID NO: 142045 - DNA, 10 bp, Unknown
  misc_feature (1)..( 10): Result.003 file - promoters60/4772772
taaaaaaaga

SEQ ID NO: 142046 - DNA, 10 bp, Unknown
  misc_feature (1)..( 10): Result.003 file - promoters60/4772772
aaaacaattc

SEQ ID NO: 142047 - DNA, 10 bp, Unknown
  misc_feature (1)..( 10): Result.003 file - promoters60/4772772
tgtatatatt

SEQ ID NO: 142048 - DNA, 10 bp, Unknown
  misc_feature (1)..( 10): Result.003 file - promoters60/4772772
tcaatcaaac

SEQ ID NO: 142049 - DNA, 10 bp, Unknown
  misc_feature (1)..( 10): Result.003 file - promoters60/4772772
tcaaccaact

SEQ ID NO: 142050 - DNA, 11 bp, Unknown
  misc_feature (1)..( 11): Result.003 file - promoters60/4772772
aagatctaaat

SEQ ID NO: 142051 - DNA, 11 bp, Unknown
  misc_feature (1)..( 11): Result.003 file - promoters60/4772772
aaaatcaaata

SEQ ID NO: 142052 - DNA, 11 bp, Unknown
  misc_feature (1)..( 11): Result.003 file - promoters60/4772772
tgaatgaaaaa

SEQ ID NO: 142053 - DNA, 11 bp, Unknown
  misc_feature (1)..( 11): Result.003 file - promoters60/4772772
tctttcaaata

SEQ ID NO: 142054 - DNA, 12 bp, Unknown
  misc_feature (1)..( 12): Result.003 file - promoters60/4772772
ccactatataag

SEQ ID NO: 142055 - DNA, 12 bp, Unknown
  misc_feature (1)..( 12): Result.003 file - promoters60/4772772
ccattatatata

SEQ ID NO: 142056 - DNA, 12 bp, Unknown
  misc_feature (1)..( 12): Result.003 file - promoters60/4772772
cgcctatatata

SEQ ID NO: 142057 - DNA, 12 bp, Unknown
  misc_feature (1)..( 12): Result.003 file - promoters60/4772772
cttttatatata

SEQ ID NO: 142058 - DNA, 12 bp, Unknown
  misc_feature (1)..( 12): Result.003 file - promoters60/4772772
cttgtatatata

SEQ ID NO: 142059 - DNA, 12 bp, Unknown
  misc_feature (1)..( 12): Result.003 file - promoters60/4772772
catatatttata

SEQ ID NO: 142060 - DNA, 13 bp, Unknown
  misc_feature (1)..( 13): Result.003 file - promoters60/4772772
tgtttgattgaat

SEQ ID NO: 142061 - DNA, 13 bp, Unknown
  misc_feature (1)..( 13): Result.003 file - promoters60/4772772
tgtttaattaaac

SEQ ID NO: 142062 - DNA, 13 bp, Unknown
  misc_feature (1)..( 13): Result.003 file - promoters60/4772772
tatttcatttcca

SEQ ID NO: 142063 - DNA, 13 bp, Unknown
  misc_feature (1)..( 13): Result.003 file - promoters60/4772772
aaataaataaaag

SEQ ID NO: 142064 - DNA, 13 bp, Unknown
  misc_feature (1)..( 13): Result.003 file - promoters60/4772772
aataaaattaata

SEQ ID NO: 142065 - DNA, 13 bp, Unknown
  misc_feature (1)..( 13): Result.003 file - promoters60/4772772
gacattataaaat

SEQ ID NO: 142066 - DNA, 13 bp, Unknown
  misc_feature (1)..( 13): Result.003 file - promoters60/4772772
tctaacataggca

SEQ ID NO: 142067 - DNA, 13 bp, Unknown
  misc_feature (1)..( 13): Result.003 file - promoters60/4772772
atttacaaacttt

SEQ ID NO: 142068 - DNA, 12 bp, Unknown
  misc_feature (1)..( 12): Result.003 file - promoters60/4772772
ttttaaaaattc

SEQ ID NO: 142069 - DNA, 12 bp, Unknown
  misc_feature (1)..( 12): Result.003 file - promoters60/4772772
ggctaaaaatga

SEQ ID NO: 142070 - DNA, 12 bp, Unknown
  misc_feature (1)..( 12): Result.003 file - promoters60/4772772
gtttcaaataca

SEQ ID NO: 142071 - DNA, 12 bp, Unknown
  misc_feature (1)..( 12): Result.003 file - promoters60/4772772
gtttccaatatg

SEQ ID NO: 142072 - DNA, 12 bp, Unknown
  misc_feature (1)..( 12): Result.003 file - promoters60/4772772
agagtaaagtga

SEQ ID NO: 142073 - DNA, 12 bp, Unknown
  misc_feature (1)..( 12): Result.003 file - promoters60/4772772
agatcaaatagg

SEQ ID NO: 142074 - DNA, 12 bp, Unknown
  misc_feature (1)..( 12): Result.003 file - promoters60/4772772
cctggaaataga

SEQ ID NO: 142075 - DNA, 12 bp, Unknown
  misc_feature (1)..( 12): Result.003 file - promoters60/4772772
aaaataaagaaa

SEQ ID NO: 142076 - DNA, 12 bp, Unknown
  misc_feature (1)..( 12): Result.003 file - promoters60/4772772
aaactaatgaca

SEQ ID NO: 142077 - DNA, 12 bp, Unknown
  misc_feature (1)..( 12): Result.003 file - promoters60/4772772
aaaataaaagtc

SEQ ID NO: 142078 - DNA, 12 bp, Unknown
  misc_feature (1)..( 12): Result.003 file - promoters60/4772772
aaaataataaat

SEQ ID NO: 142079 - DNA, 13 bp, Unknown
  misc_feature (1)..( 13): Result.003 file - promoters60/4772772
aaacctaaatcaa

SEQ ID NO: 142080 - DNA, 13 bp, Unknown
  misc_feature (1)..( 13): Result.003 file - promoters60/4772772
gaatataatataa

SEQ ID NO: 142081 - DNA, 11 bp, Unknown
  misc_feature (1)..( 11): Result.003 file - promoters60/4772772
taactttgagt

SEQ ID NO: 142082 - DNA, 11 bp, Unknown
  misc_feature (1)..( 11): Result.003 file - promoters60/4772772
taagtttcaaa

SEQ ID NO: 142083 - DNA, 11 bp, Unknown
  misc_feature (1)..( 11): Result.003 file - promoters60/4772772
atagtttaaaa

SEQ ID NO: 142084 - DNA, 12 bp, Unknown
  misc_feature (1)..( 12): Result.003 file - promoters60/4772772
taacaattctaa

SEQ ID NO: 142085 - DNA, 12 bp, Unknown
  misc_feature (1)..( 12): Result.003 file - promoters60/4772772
tgaagtatcatc

SEQ ID NO: 142086 - DNA, 12 bp, Unknown
  misc_feature (1)..( 12): Result.003 file - promoters60/4772772
atatgtttatat

SEQ ID NO: 142087 - DNA, 12 bp, Unknown
  misc_feature (1)..( 12): Result.003 file - promoters60/4772772
ttgagtttaggc

SEQ ID NO: 142088 - DNA, 12 bp, Unknown
  misc_feature (1)..( 12): Result.003 file - promoters60/4772772
ttaagtctagta

SEQ ID NO: 142089 - DNA, 12 bp, Unknown
  misc_feature (1)..( 12): Result.003 file - promoters60/4772772
gatagtttaaaa

SEQ ID NO: 142090 - DNA, 12 bp, Unknown
  misc_feature (1)..( 12): Result.003 file - promoters60/4772772
ataagtttcaaa

SEQ ID NO: 142091 - DNA, 12 bp, Unknown
  misc_feature (1)..( 12): Result.003 file - promoters60/4772772
tgaagtatcatc

SEQ ID NO: 142092 - DNA, 12 bp, Unknown
  misc_feature (1)..( 12): Result.003 file - promoters60/4772772
acaattctaatt

SEQ ID NO: 142093 - DNA, 12 bp, Unknown
  misc_feature (1)..( 12): Result.003 file - promoters60/4772772
atatgtttatat

SEQ ID NO: 142094 - DNA, 9 bp, Unknown
  misc_feature (1)..( 9): Result.003 file - promoters60/4772772
aaaaataaa

SEQ ID NO: 142095 - DNA, 9 bp, Unknown
  misc_feature (1)..( 9): Result.003 file - promoters60/4772772
aaacatata

SEQ ID NO: 142096 - DNA, 9 bp, Unknown
  misc_feature (1)..( 9): Result.003 file - promoters60/4772772
aaaattaat

SEQ ID NO: 142097 - DNA, 9 bp, Unknown
  misc_feature (1)..( 9): Result.003 file - promoters60/4772772
taaaataca

SEQ ID NO: 142098 - DNA, 9 bp, Unknown
  misc_feature (1)..( 9): Result.003 file - promoters60/4772772
aaaaattta

SEQ ID NO: 142099 - DNA, 9 bp, Unknown
  misc_feature (1)..( 9): Result.003 file - promoters60/4772772
taacatagg

SEQ ID NO: 142100 - DNA, 9 bp, Unknown
  misc_feature (1)..( 9): Result.003 file - promoters60/4772772
gataatatt

SEQ ID NO: 142101 - DNA, 10 bp, Unknown
  misc_feature (1)..( 10): Result.003 file - promoters60/4772772
atattattag

SEQ ID NO: 142102 - DNA, 10 bp, Unknown
  misc_feature (1)..( 10): Result.003 file - promoters60/4772772
atattaataa

SEQ ID NO: 142103 - DNA, 10 bp, Unknown
  misc_feature (1)..( 10): Result.003 file - promoters60/4772772
atattattag

SEQ ID NO: 142104 - DNA, 10 bp, Unknown
  misc_feature (1)..( 10): Result.003 file - promoters60/4772772
ttattatatt

SEQ ID NO: 142105 - DNA, 10 bp, Unknown
  misc_feature (1)..( 10): Result.003 file - promoters60/4772772
atataattat

SEQ ID NO: 142106 - DNA, 10 bp, Unknown
  misc_feature (1)..( 10): Result.003 file - promoters60/4772772
atataactaa

SEQ ID NO: 142107 - DNA, 9 bp, Unknown
  misc_feature (1)..( 9): Result.003 file - promoters60/4772772
gtttgttta

SEQ ID NO: 142108 - DNA, 9 bp, Unknown
  misc_feature (1)..( 9): Result.003 file - promoters60/4772772
atttattta

SEQ ID NO: 142109 - DNA, 9 bp, Unknown
  misc_feature (1)..( 9): Result.003 file - promoters60/4772772
ttttatttc

SEQ ID NO: 142110 - DNA, 9 bp, Unknown
  misc_feature (1)..( 9): Result.003 file - promoters60/4772772
ttttgtttc

SEQ ID NO: 142111 - DNA, 9 bp, Unknown
  misc_feature (1)..( 9): Result.003 file - promoters60/4772772
atttttttc

SEQ ID NO: 142112 - DNA, 9 bp, Unknown
  misc_feature (1)..( 9): Result.003 file - promoters60/4772772
ttttctttc

SEQ ID NO: 142113 - DNA, 10 bp, Unknown
  misc_feature (1)..( 10): Result.003 file - promoters60/4772776
cttttagttt

SEQ ID NO: 142114 - DNA, 10 bp, Unknown
  misc_feature (1)..( 10): Result.003 file - promoters60/4772776
aatttagtgg

SEQ ID NO: 142115 - DNA, 10 bp, Unknown
  misc_feature (1)..( 10): Result.003 file - promoters60/4772776
aaattatttt

SEQ ID NO: 142116 - DNA, 10 bp, Unknown
  misc_feature (1)..( 10): Result.003 file - promoters60/4772776
atattagttc

SEQ ID NO: 142117 - DNA, 10 bp, Unknown
  misc_feature (1)..( 10): Result.003 file - promoters60/4772776
aaattattga

SEQ ID NO: 142118 - DNA, 10 bp, Unknown
  misc_feature (1)..( 10): Result.003 file - promoters60/4772776
aaattcttga

SEQ ID NO: 142119 - DNA, 14 bp, Unknown
  misc_feature (1)..( 14): Result.003 file - promoters60/4772776
ttcttcaattgaaa

SEQ ID NO: 142120 - DNA, 14 bp, Unknown
  misc_feature (1)..( 14): Result.003 file - promoters60/4772776
tacttcaaaattta

SEQ ID NO: 142121 - DNA, 14 bp, Unknown
  misc_feature (1)..( 14): Result.003 file - promoters60/4772776
ttcttaaattaaaa

SEQ ID NO: 142122 - DNA, 14 bp, Unknown
  misc_feature (1)..( 14): Result.003 file - promoters60/4772776
atctcaaaataccg

SEQ ID NO: 142123 - DNA, 14 bp, Unknown
  misc_feature (1)..( 14): Result.003 file - promoters60/4772776
ttctcaatgaataa

SEQ ID NO: 142124 - DNA, 14 bp, Unknown
  misc_feature (1)..( 14): Result.003 file - promoters60/4772776
aacataacattggt

SEQ ID NO: 142125 - DNA, 10 bp, Unknown
  misc_feature (1)..( 10): Result.003 file - promoters60/4772813
agaatttttg

SEQ ID NO: 142126 - DNA, 10 bp, Unknown
  misc_feature (1)..( 10): Result.003 file - promoters60/4772813
taaattttct

SEQ ID NO: 142127 - DNA, 10 bp, Unknown
  misc_feature (1)..( 10): Result.003 file - promoters60/4772813
taaagtttct

SEQ ID NO: 142128 - DNA, 8 bp, Unknown
  misc_feature (1)..( 8): Result.003 file - promoters60/4772813
atttgatc

SEQ ID NO: 142129 - DNA, 8 bp, Unknown
  misc_feature (1)..( 8): Result.003 file - promoters60/4772813
attcgata

SEQ ID NO: 142130 - DNA, 8 bp, Unknown
  misc_feature (1)..( 8): Result.003 file - promoters60/4772813
gttcgata

SEQ ID NO: 142131 - DNA, 15 bp, Unknown
  misc_feature (1)..( 15): Result.003 file - promoters60/4772813
aaagttttgtgtttc

SEQ ID NO: 142132 - DNA, 15 bp, Unknown
  misc_feature (1)..( 15): Result.003 file - promoters60/4772813
aaagttttctaatca

SEQ ID NO: 142133 - DNA, 15 bp, Unknown
  misc_feature (1)..( 15): Result.003 file - promoters60/4772813
taagctttctgtttc

SEQ ID NO: 142134 - DNA, 7 bp, Unknown
  misc_feature (1)..( 7): Result.003 file - promoters60/4772813
tttcttt

SEQ ID NO: 142135 - DNA, 7 bp, Unknown
  misc_feature (1)..( 7): Result.003 file - promoters60/4772813
cttcttt

SEQ ID NO: 142136 - DNA, 7 bp, Unknown
  misc_feature (1)..( 7): Result.003 file - promoters60/4772813
cttcttg

SEQ ID NO: 142137 - DNA, 12 bp, Unknown
  misc_feature (1)..( 12): Result.003 file - promoters60/4772820
cacatttcagac

SEQ ID NO: 142138 - DNA, 12 bp, Unknown
  misc_feature (1)..( 12): Result.003 file - promoters60/4772820
ttggtttaagac

SEQ ID NO: 142139 - DNA, 12 bp, Unknown
  misc_feature (1)..( 12): Result.003 file - promoters60/4772820
ttgttttaaact

SEQ ID NO: 142140 - DNA, 11 bp, Unknown
  misc_feature (1)..( 11): Result.003 file - promoters60/4772820
tggaaaacgaa

SEQ ID NO: 142141 - DNA, 11 bp, Unknown
  misc_feature (1)..( 11): Result.003 file - promoters60/4772820
aagtaaacgaa

SEQ ID NO: 142142 - DNA, 12 bp, Unknown
  misc_feature (1)..( 12): Result.003 file - promoters60/4772820
attgaaatcgat

SEQ ID NO: 142143 - DNA, 12 bp, Unknown
  misc_feature (1)..( 12): Result.003 file - promoters60/4772820
ttggaataaaaa

SEQ ID NO: 142144 - DNA, 8 bp, Unknown
  misc_feature (1)..( 8): Result.003 file - promoters60/4772846
aatcttct

SEQ ID NO: 142145 - DNA, 8 bp, Unknown
  misc_feature (1)..( 8): Result.003 file - promoters60/4772846
aatattct

SEQ ID NO: 142146 - DNA, 8 bp, Unknown
  misc_feature (1)..( 8): Result.003 file - promoters60/4772846
aatgttct

SEQ ID NO: 142147 - DNA, 10 bp, Unknown
  misc_feature (1)..( 10): Result.003 file - promoters60/4772846
ggaaggagag

SEQ ID NO: 142148 - DNA, 10 bp, Unknown
  misc_feature (1)..( 10): Result.003 file - promoters60/4772846
gttaggagag

SEQ ID NO: 142149 - DNA, 10 bp, Unknown
  misc_feature (1)..( 10): Result.003 file - promoters60/4772846
ggaagtagag

SEQ ID NO: 142150 - DNA, 9 bp, Unknown
  misc_feature (1)..( 9): Result.003 file - promoters60/4772855
caatatgtt

SEQ ID NO: 142151 - DNA, 9 bp, Unknown
  misc_feature (1)..( 9): Result.003 file - promoters60/4772855
caatatgtt

SEQ ID NO: 142152 - DNA, 7 bp, Unknown
  misc_feature (1)..( 7): Result.003 file - promoters60/4772855
aaattta

SEQ ID NO: 142153 - DNA, 7 bp, Unknown
  misc_feature (1)..( 7): Result.003 file - promoters60/4772855
taattta

SEQ ID NO: 142154 - DNA, 7 bp, Unknown
  misc_feature (1)..( 7): Result.003 file - promoters60/4772855
aaatttt

SEQ ID NO: 142155 - DNA, 7 bp, Unknown
  misc_feature (1)..( 7): Result.003 file - promoters60/4772855
aaataaa

SEQ ID NO: 142156 - DNA, 7 bp, Unknown
  misc_feature (1)..( 7): Result.003 file - promoters60/4772855
aaataaa

SEQ ID NO: 142157 - DNA, 6 bp, Unknown
  misc_feature (1)..( 6): Result.003 file - promoters60/4772855
atatgt

SEQ ID NO: 142158 - DNA, 6 bp, Unknown
  misc_feature (1)..( 6): Result.003 file - promoters60/4772855
atatgt

SEQ ID NO: 142159 - DNA, 6 bp, Unknown
  misc_feature (1)..( 6): Result.003 file - promoters60/4772855
ttatta

SEQ ID NO: 142160 - DNA, 6 bp, Unknown
  misc_feature (1)..( 6): Result.003 file - promoters60/4772855
ttatta

SEQ ID NO: 142161 - DNA, 6 bp, Unknown
  misc_feature (1)..( 6): Result.003 file - promoters60/4772855
actaaa

SEQ ID NO: 142162 - DNA, 6 bp, Unknown
  misc_feature (1)..( 6): Result.003 file - promoters60/4772855
actaaa

SEQ ID NO: 142163 - DNA, 8 bp, Unknown
  misc_feature (1)..( 8): Result.003 file - promoters60/4772855
aaaataag

SEQ ID NO: 142164 - DNA, 8 bp, Unknown
  misc_feature (1)..( 8): Result.003 file - promoters60/4772855
aaactaag

SEQ ID NO: 142165 - DNA, 8 bp, Unknown
  misc_feature (1)..( 8): Result.003 file - promoters60/4772855
taagttgt

SEQ ID NO: 142166 - DNA, 8 bp, Unknown
  misc_feature (1)..( 8): Result.003 file - promoters60/4772855
taaattgt

SEQ ID NO: 142167 - DNA, 6 bp, Unknown
  misc_feature (1)..( 6): Result.003 file - promoters60/4772855
atagat

SEQ ID NO: 142168 - DNA, 6 bp, Unknown
  misc_feature (1)..( 6): Result.003 file - promoters60/4772855
atagat

SEQ ID NO: 142169 - DNA, 7 bp, Unknown
  misc_feature (1)..( 7): Result.003 file - promoters60/4772855
agatata

SEQ ID NO: 142170 - DNA, 7 bp, Unknown
  misc_feature (1)..( 7): Result.003 file - promoters60/4772855
agagata

SEQ ID NO: 142171 - DNA, 6 bp, Unknown
  misc_feature (1)..( 6): Result.003 file - promoters60/4772855
ttttgg

SEQ ID NO: 142172 - DNA, 6 bp, Unknown
  misc_feature (1)..( 6): Result.003 file - promoters60/4772855
ttttgg

SEQ ID NO: 142173 - DNA, 6 bp, Unknown
  misc_feature (1)..( 6): Result.003 file - promoters60/4772855
taagat

SEQ ID NO: 142174 - DNA, 6 bp, Unknown
  misc_feature (1)..( 6): Result.003 file - promoters60/4772855
taagat

SEQ ID NO: 142175 - DNA, 6 bp, Unknown
  misc_feature (1)..( 6): Result.003 file - promoters60/4772855
aaagaa

SEQ ID NO: 142176 - DNA, 6 bp, Unknown
  misc_feature (1)..( 6): Result.003 file - promoters60/4772855
aaagaa

SEQ ID NO: 142177 - DNA, 12 bp, Unknown
  misc_feature (1)..( 12): Result.003 file - promoters60/4772855
aaaaacaaaaca

SEQ ID NO: 142178 - DNA, 12 bp, Unknown
  misc_feature (1)..( 12): Result.003 file - promoters60/4772855
aaacacaataca

SEQ ID NO: 142179 - DNA, 6 bp, Unknown
  misc_feature (1)..( 6): Result.003 file - promoters60/4772855
aaaaat

SEQ ID NO: 142180 - DNA, 6 bp, Unknown
  misc_feature (1)..( 6): Result.003 file - promoters60/4772855
aaaaat

SEQ ID NO: 142181 - DNA, 6 bp, Unknown
  misc_feature (1)..( 6): Result.003 file - promoters60/4772855
taaccc

SEQ ID NO: 142182 - DNA, 6 bp, Unknown
  misc_feature (1)..( 6): Result.003 file - promoters60/4772855
taaccc

SEQ ID NO: 142183 - DNA, 10 bp, Unknown
  misc_feature (1)..( 10): Result.003 file - promoters60/4772879
taaaaatgaa

SEQ ID NO: 142184 - DNA, 10 bp, Unknown
  misc_feature (1)..( 10): Result.003 file - promoters60/4772879
taaaaagtct

SEQ ID NO: 142185 - DNA, 10 bp, Unknown
  misc_feature (1)..( 10): Result.003 file - promoters60/4772879
aaaaaaagaa

SEQ ID NO: 142186 - DNA, 10 bp, Unknown
  misc_feature (1)..( 10): Result.003 file - promoters60/4772879
caaaaatctt

SEQ ID NO: 142187 - DNA, 10 bp, Unknown
  misc_feature (1)..( 10): Result.003 file - promoters60/4772879
gaaaaagggt

SEQ ID NO: 142188 - DNA, 14 bp, Unknown
  misc_feature (1)..( 14): Result.003 file - promoters60/4772879
actcataataaata

SEQ ID NO: 142189 - DNA, 14 bp, Unknown
  misc_feature (1)..( 14): Result.003 file - promoters60/4772879
tcatataatagtaa

SEQ ID NO: 142190 - DNA, 14 bp, Unknown
  misc_feature (1)..( 14): Result.003 file - promoters60/4772879
atttataatataat

SEQ ID NO: 142191 - DNA, 14 bp, Unknown
  misc_feature (1)..( 14): Result.003 file - promoters60/4772879
acttataatgaatt

SEQ ID NO: 142192 - DNA, 14 bp, Unknown
  misc_feature (1)..( 14): Result.003 file - promoters60/4772879
taaaataaggaatt

SEQ ID NO: 142193 - DNA, 14 bp, Unknown
  misc_feature (1)..( 14): Result.003 file - promoters60/4772879
atatataataaata

SEQ ID NO: 142194 - DNA, 14 bp, Unknown
  misc_feature (1)..( 14): Result.003 file - promoters60/4772879
aagcataaaaaata

SEQ ID NO: 142195 - DNA, 14 bp, Unknown
  misc_feature (1)..( 14): Result.003 file - promoters60/4772879
aattattatacttc

SEQ ID NO: 142196 - DNA, 14 bp, Unknown
  misc_feature (1)..( 14): Result.003 file - promoters60/4772879
tcatataattatct

SEQ ID NO: 142197 - DNA, 14 bp, Unknown
  misc_feature (1)..( 14): Result.003 file - promoters60/4772879
cagtttaataacaa

SEQ ID NO: 142198 - DNA, 14 bp, Unknown
  misc_feature (1)..( 14): Result.003 file - promoters60/4772879
gcctaaaatataat

SEQ ID NO: 142199 - DNA, 14 bp, Unknown
  misc_feature (1)..( 14): Result.003 file - promoters60/4772879
tcatataacaattt

SEQ ID NO: 142200 - DNA, 11 bp, Unknown
  misc_feature (1)..( 11): Result.003 file - promoters60/4772879
tgtatatatat

SEQ ID NO: 142201 - DNA, 11 bp, Unknown
  misc_feature (1)..( 11): Result.003 file - promoters60/4772879
aaaataaatag

SEQ ID NO: 142202 - DNA, 11 bp, Unknown
  misc_feature (1)..( 11): Result.003 file - promoters60/4772879
aaaatatataa

SEQ ID NO: 142203 - DNA, 11 bp, Unknown
  misc_feature (1)..( 11): Result.003 file - promoters60/4772879
agaataaaaat

SEQ ID NO: 142204 - DNA, 11 bp, Unknown
  misc_feature (1)..( 11): Result.003 file - promoters60/4772879
aaaatataata

SEQ ID NO: 142205 - DNA, 12 bp, Unknown
  misc_feature (1)..( 12): Result.003 file - promoters60/4772879
tagaaattaata

SEQ ID NO: 142206 - DNA, 12 bp, Unknown
  misc_feature (1)..( 12): Result.003 file - promoters60/4772879
agataattaagt

SEQ ID NO: 142207 - DNA, 11 bp, Unknown
  misc_feature (1)..( 11): Result.003 file - promoters60/4772879
taaaatcaata

SEQ ID NO: 142208 - DNA, 11 bp, Unknown
  misc_feature (1)..( 11): Result.003 file - promoters60/4772879
tttaattatta

SEQ ID NO: 142209 - DNA, 12 bp, Unknown
  misc_feature (1)..( 12): Result.003 file - promoters60/4772879
ataacatcactt

SEQ ID NO: 142210 - DNA, 12 bp, Unknown
  misc_feature (1)..( 12): Result.003 file - promoters60/4772879
ggtacatcactg

SEQ ID NO: 142211 - DNA, 13 bp, Unknown
  misc_feature (1)..( 13): Result.003 file - promoters60/4772879
tttgttatataag

SEQ ID NO: 142212 - DNA, 13 bp, Unknown
  misc_feature (1)..( 13): Result.003 file - promoters60/4772879
tcctttatatatt

SEQ ID NO: 142213 - DNA, 13 bp, Unknown
  misc_feature (1)..( 13): Result.003 file - promoters60/4772879
cttattatataga

SEQ ID NO: 142214 - DNA, 13 bp, Unknown
  misc_feature (1)..( 13): Result.003 file - promoters60/4772879
cgtcccataaaga

SEQ ID NO: 142215 - DNA, 13 bp, Unknown
  misc_feature (1)..( 13): Result.003 file - promoters60/4772879
cgtcctataaata

SEQ ID NO: 142216 - DNA, 10 bp, Unknown
  misc_feature (1)..( 10): Result.003 file - promoters60/4772879
ttttatcaca

SEQ ID NO: 142217 - DNA, 10 bp, Unknown
  misc_feature (1)..( 10): Result.003 file - promoters60/4772879
ttttgtcaac

SEQ ID NO: 142218 - DNA, 10 bp, Unknown
  misc_feature (1)..( 10): Result.003 file - promoters60/4772879
ctttatccta

SEQ ID NO: 142219 - DNA, 10 bp, Unknown
  misc_feature (1)..( 10): Result.003 file - promoters60/4772879
gtataacaat

SEQ ID NO: 142220 - DNA, 10 bp, Unknown
  misc_feature (1)..( 10): Result.003 file - promoters60/4772879
gtgtaaacga

SEQ ID NO: 142221 - DNA, 10 bp, Unknown
  misc_feature (1)..( 10): Result.003 file - promoters60/4772879
ttttgtatct

SEQ ID NO: 142222 - DNA, 10 bp, Unknown
  misc_feature (1)..( 10): Result.003 file - promoters60/4772879
tcaatcaaaa

SEQ ID NO: 142223 - DNA, 10 bp, Unknown
  misc_feature (1)..( 10): Result.003 file - promoters60/4772879
caaatcaaat

SEQ ID NO: 142224 - DNA, 11 bp, Unknown
  misc_feature (1)..( 11): Result.003 file - promoters60/4772879
ttgatccaaac

SEQ ID NO: 142225 - DNA, 11 bp, Unknown
  misc_feature (1)..( 11): Result.003 file - promoters60/4772879
tcaattaaaag

SEQ ID NO: 142226 - DNA, 11 bp, Unknown
  misc_feature (1)..( 11): Result.003 file - promoters60/4772879
acctttcaaat

SEQ ID NO: 142227 - DNA, 11 bp, Unknown
  misc_feature (1)..( 11): Result.003 file - promoters60/4772879
attatcctaac

SEQ ID NO: 142228 - DNA, 8 bp, Unknown
  misc_feature (1)..( 8): Result.003 file - promoters60/4772879
ttttgttt

SEQ ID NO: 142229 - DNA, 8 bp, Unknown
  misc_feature (1)..( 8): Result.003 file - promoters60/4772879
ttttgtat

SEQ ID NO: 142230 - DNA, 8 bp, Unknown
  misc_feature (1)..( 8): Result.003 file - promoters60/4772879
atttgttt

SEQ ID NO: 142231 - DNA, 8 bp, Unknown
  misc_feature (1)..( 8): Result.003 file - promoters60/4772879
ctttgttg

SEQ ID NO: 142232 - DNA, 8 bp, Unknown
  misc_feature (1)..( 8): Result.003 file - promoters60/4772879
atttattt

SEQ ID NO: 142233 - DNA, 12 bp, Unknown
  misc_feature (1)..( 12): Result.003 file - promoters60/4772883
gaaaaaaaaaaa

SEQ ID NO: 142234 - DNA, 12 bp, Unknown
  misc_feature (1)..( 12): Result.003 file - promoters60/4772883
gaaaaaaaaaaa

SEQ ID NO: 142235 - DNA, 12 bp, Unknown
  misc_feature (1)..( 12): Result.003 file - promoters60/4772883
taaaaatcaaaa

SEQ ID NO: 142236 - DNA, 12 bp, Unknown
  misc_feature (1)..( 12): Result.003 file - promoters60/4772883
atataaacaatt

SEQ ID NO: 142237 - DNA, 11 bp, Unknown
  misc_feature (1)..( 11): Result.003 file - promoters60/4772883
atttattatgt

SEQ ID NO: 142238 - DNA, 11 bp, Unknown
  misc_feature (1)..( 11): Result.003 file - promoters60/4772883
acatattatgt

SEQ ID NO: 142239 - DNA, 11 bp, Unknown
  misc_feature (1)..( 11): Result.003 file - promoters60/4772883
atttgttaaaa

SEQ ID NO: 142240 - DNA, 11 bp, Unknown
  misc_feature (1)..( 11): Result.003 file - promoters60/4772883
tttttttaaca

SEQ ID NO: 142241 - DNA, 8 bp, Unknown
  misc_feature (1)..( 8): Result.003 file - promoters60/4772883
tgaacaaa

SEQ ID NO: 142242 - DNA, 8 bp, Unknown
  misc_feature (1)..( 8): Result.003 file - promoters60/4772883
agaataaa

SEQ ID NO: 142243 - DNA, 9 bp, Unknown
  misc_feature (1)..( 9): Result.003 file - promoters60/4772883
tgaaaataa

SEQ ID NO: 142244 - DNA, 9 bp, Unknown
  misc_feature (1)..( 9): Result.003 file - promoters60/4772883
aaagactaa

SEQ ID NO: 142245 - DNA, 14 bp, Unknown
  misc_feature (1)..( 14): Result.003 file - promoters60/4772883
tggtgaaaaaaaaa

SEQ ID NO: 142246 - DNA, 14 bp, Unknown
  misc_feature (1)..( 14): Result.003 file - promoters60/4772883
ctaataaaataaaa

SEQ ID NO: 142247 - DNA, 14 bp, Unknown
  misc_feature (1)..( 14): Result.003 file - promoters60/4772883
ctcataaaataagt

SEQ ID NO: 142248 - DNA, 14 bp, Unknown
  misc_feature (1)..( 14): Result.003 file - promoters60/4772883
ctcttaaaacttaa

SEQ ID NO: 142249 - DNA, 8 bp, Unknown
  misc_feature (1)..( 8): Result.003 file - promoters60/4772883
ataaataa

SEQ ID NO: 142250 - DNA, 8 bp, Unknown
  misc_feature (1)..( 8): Result.003 file - promoters60/4772883
ataaataa

SEQ ID NO: 142251 - DNA, 8 bp, Unknown
  misc_feature (1)..( 8): Result.003 file - promoters60/4772883
ataaatgc

SEQ ID NO: 142252 - DNA, 8 bp, Unknown
  misc_feature (1)..( 8): Result.003 file - promoters60/4772883
aaaccaat

SEQ ID NO: 142253 - DNA, 8 bp, Unknown
  misc_feature (1)..( 8): Result.003 file - promoters60/4772883
aaacaaat

SEQ ID NO: 142254 - DNA, 8 bp, Unknown
  misc_feature (1)..( 8): Result.003 file - promoters60/4772883
taacaaac

SEQ ID NO: 142255 - DNA, 9 bp, Unknown
  misc_feature (1)..( 9): Result.003 file - promoters60/4772883
taaataaat

SEQ ID NO: 142256 - DNA, 9 bp, Unknown
  misc_feature (1)..( 9): Result.003 file - promoters60/4772883
taaatacaa

SEQ ID NO: 142257 - DNA, 9 bp, Unknown
  misc_feature (1)..( 9): Result.003 file - promoters60/4772883
aaaatgcaa

SEQ ID NO: 142258 - DNA, 9 bp, Unknown
  misc_feature (1)..( 9): Result.003 file - promoters60/4772883
ataaatttt

SEQ ID NO: 142259 - DNA, 9 bp, Unknown
  misc_feature (1)..( 9): Result.003 file - promoters60/4772883
aaaaatttg

SEQ ID NO: 142260 - DNA, 9 bp, Unknown
  misc_feature (1)..( 9): Result.003 file - promoters60/4772883
ttaacttta

SEQ ID NO: 142261 - DNA, 9 bp, Unknown
  misc_feature (1)..( 9): Result.003 file - promoters60/4772883
aaaaatgca

SEQ ID NO: 142262 - DNA, 8 bp, Unknown
  misc_feature (1)..( 8): Result.003 file - promoters60/4772883
gaaacttc

SEQ ID NO: 142263 - DNA, 8 bp, Unknown
  misc_feature (1)..( 8): Result.003 file - promoters60/4772883
aaaacttc

SEQ ID NO: 142264 - DNA, 9 bp, Unknown
  misc_feature (1)..( 9): Result.003 file - promoters60/4772883
aaacactta

SEQ ID NO: 142265 - DNA, 7 bp, Unknown
  misc_feature (1)..( 7): Result.003 file - promoters60/4772883
caatttg

SEQ ID NO: 142266 - DNA, 7 bp, Unknown
  misc_feature (1)..( 7): Result.003 file - promoters60/4772883
caatttt

SEQ ID NO: 142267 - DNA, 8 bp, Unknown
  misc_feature (1)..( 8): Result.003 file - promoters60/4772883
taatatta

SEQ ID NO: 142268 - DNA, 8 bp, Unknown
  misc_feature (1)..( 8): Result.003 file - promoters60/4772883
aaaaacaa

SEQ ID NO: 142269 - DNA, 8 bp, Unknown
  misc_feature (1)..( 8): Result.003 file - promoters60/4772883
caaaacac

SEQ ID NO: 142270 - DNA, 8 bp, Unknown
  misc_feature (1)..( 8): Result.003 file - promoters60/4772883
aaaaactt

SEQ ID NO: 142271 - DNA, 10 bp, Unknown
  misc_feature (1)..( 10): Result.003 file - promoters60/4772883
aatatcaaaa

SEQ ID NO: 142272 - DNA, 10 bp, Unknown
  misc_feature (1)..( 10): Result.003 file - promoters60/4772883
aatattaaaa

SEQ ID NO: 142273 - DNA, 10 bp, Unknown
  misc_feature (1)..( 10): Result.003 file - promoters60/4772883
aattttatat

SEQ ID NO: 142274 - DNA, 8 bp, Unknown
  misc_feature (1)..( 8): Result.003 file - promoters60/4772883
gcttataa

SEQ ID NO: 142275 - DNA, 8 bp, Unknown
  misc_feature (1)..( 8): Result.003 file - promoters60/4772883
tcttttaa

SEQ ID NO: 142276 - DNA, 8 bp, Unknown
  misc_feature (1)..( 8): Result.003 file - promoters60/4772883
tattattg

SEQ ID NO: 142277 - DNA, 7 bp, Unknown
  misc_feature (1)..( 7): Result.003 file - promoters60/4772991
gttggat

SEQ ID NO: 142278 - DNA, 7 bp, Unknown
  misc_feature (1)..( 7): Result.003 file - promoters60/4772991
gtttgat

SEQ ID NO: 142279 - DNA, 7 bp, Unknown
  misc_feature (1)..( 7): Result.003 file - promoters60/4772991
cttggat

SEQ ID NO: 142280 - DNA, 6 bp, Unknown
  misc_feature (1)..( 6): Result.003 file - promoters60/4772991
tcattt

SEQ ID NO: 142281 - DNA, 6 bp, Unknown
  misc_feature (1)..( 6): Result.003 file - promoters60/4772991
tcattt

SEQ ID NO: 142282 - DNA, 7 bp, Unknown
  misc_feature (1)..( 7): Result.003 file - promoters60/4772991
ataaatg

SEQ ID NO: 142283 - DNA, 7 bp, Unknown
  misc_feature (1)..( 7): Result.003 file - promoters60/4772991
atatatg

SEQ ID NO: 142284 - DNA, 7 bp, Unknown
  misc_feature (1)..( 7): Result.003 file - promoters60/4772991
caaattg

SEQ ID NO: 142285 - DNA, 7 bp, Unknown
  misc_feature (1)..( 7): Result.003 file - promoters60/4772991
caaattt

SEQ ID NO: 142286 - DNA, 7 bp, Unknown
  misc_feature (1)..( 7): Result.003 file - promoters60/4772991
aaaattt

SEQ ID NO: 142287 - DNA, 8 bp, Unknown
  misc_feature (1)..( 8): Result.003 file - promoters60/4772991
aagtcaaa

SEQ ID NO: 142288 - DNA, 8 bp, Unknown
  misc_feature (1)..( 8): Result.003 file - promoters60/4772991
aagttaaa

SEQ ID NO: 142289 - DNA, 6 bp, Unknown
  misc_feature (1)..( 6): Result.003 file - promoters60/4772991
tctata

SEQ ID NO: 142290 - DNA, 6 bp, Unknown
  misc_feature (1)..( 6): Result.003 file - promoters60/4772991
tctata

SEQ ID NO: 142291 - DNA, 8 bp, Unknown
  misc_feature (1)..( 8): Result.003 file - promoters60/4772991
aaagtgtt

SEQ ID NO: 142292 - DNA, 8 bp, Unknown
  misc_feature (1)..( 8): Result.003 file - promoters60/4772991
aaactgtt

SEQ ID NO: 142293 - DNA, 6 bp, Unknown
  misc_feature (1)..( 6): Result.003 file - promoters60/4772991
tcaaca

SEQ ID NO: 142294 - DNA, 6 bp, Unknown
  misc_feature (1)..( 6): Result.003 file - promoters60/4772991
tcaaca

SEQ ID NO: 142295 - DNA, 6 bp, Unknown
  misc_feature (1)..( 6): Result.003 file - promoters60/4772991
gtttgt

SEQ ID NO: 142296 - DNA, 6 bp, Unknown
  misc_feature (1)..( 6): Result.003 file - promoters60/4772991
gtttgt

SEQ ID NO: 142297 - DNA, 6 bp, Unknown
  misc_feature (1)..( 6): Result.003 file - promoters60/4772991
cttcac

SEQ ID NO: 142298 - DNA, 6 bp, Unknown
  misc_feature (1)..( 6): Result.003 file - promoters60/4772991
cttcac

SEQ ID NO: 142299 - DNA, 9 bp, Unknown
  misc_feature (1)..( 9): Result.003 file - promoters60/4772991
aaaacatac

SEQ ID NO: 142300 - DNA, 9 bp, Unknown
  misc_feature (1)..( 9): Result.003 file - promoters60/4772991
aaaccatac

SEQ ID NO: 142301 - DNA, 6 bp, Unknown
  misc_feature (1)..( 6): Result.003 file - promoters60/4772991
tagaaa

SEQ ID NO: 142302 - DNA, 6 bp, Unknown
  misc_feature (1)..( 6): Result.003 file - promoters60/4772991
tagaaa

SEQ ID NO: 142303 - DNA, 8 bp, Unknown
  misc_feature (1)..( 8): Result.003 file - promoters60/4772991
aaactaac

SEQ ID NO: 142304 - DNA, 8 bp, Unknown
  misc_feature (1)..( 8): Result.003 file - promoters60/4772991
aaattaac

SEQ ID NO: 142305 - DNA, 7 bp, Unknown
  misc_feature (1)..( 7): Result.003 file - promoters60/4772991
taaccat

SEQ ID NO: 142306 - DNA, 7 bp, Unknown
  misc_feature (1)..( 7): Result.003 file - promoters60/4772991
taagcat

SEQ ID NO: 142307 - DNA, 6 bp, Unknown
  misc_feature (1)..( 6): Result.003 file - promoters60/4772991
ttcaca

SEQ ID NO: 142308 - DNA, 6 bp, Unknown
  misc_feature (1)..( 6): Result.003 file - promoters60/4772991
ttcaca

SEQ ID NO: 142309 - DNA, 8 bp, Unknown
  misc_feature (1)..( 8): Result.003 file - promoters60/4772991
tgtcgatt

SEQ ID NO: 142310 - DNA, 8 bp, Unknown
  misc_feature (1)..( 8): Result.003 file - promoters60/4772991
tgttgatt

SEQ ID NO: 142311 - DNA, 8 bp, Unknown
  misc_feature (1)..( 8): Result.003 file - promoters60/4772991
aacacaat

SEQ ID NO: 142312 - DNA, 8 bp, Unknown
  misc_feature (1)..( 8): Result.003 file - promoters60/4772991
aacaaaat

SEQ ID NO: 142313 - DNA, 8 bp, Unknown
  misc_feature (1)..( 8): Result.003 file - promoters60/4772991
ttttaagt

SEQ ID NO: 142314 - DNA, 8 bp, Unknown
  misc_feature (1)..( 8): Result.003 file - promoters60/4772991
tttaaagt

SEQ ID NO: 142315 - DNA, 7 bp, Unknown
  misc_feature (1)..( 7): Result.003 file - promoters60/4772991
tgaaaaa

SEQ ID NO: 142316 - DNA, 7 bp, Unknown
  misc_feature (1)..( 7): Result.003 file - promoters60/4772991
tgataaa

SEQ ID NO: 142317 - DNA, 7 bp, Unknown
  misc_feature (1)..( 7): Result.003 file - promoters60/4772991
ttctaag

SEQ ID NO: 142318 - DNA, 7 bp, Unknown
  misc_feature (1)..( 7): Result.003 file - promoters60/4772991
ttcaaag

SEQ ID NO: 142319 - DNA, 8 bp, Unknown
  misc_feature (1)..( 8): Result.003 file - promoters60/4772991
aaatccat

SEQ ID NO: 142320 - DNA, 8 bp, Unknown
  misc_feature (1)..( 8): Result.003 file - promoters60/4772991
aaaaccat

SEQ ID NO: 142321 - DNA, 11 bp, Unknown
  misc_feature (1)..( 11): Result.003 file - promoters60/4773011
atttgtttatt

SEQ ID NO: 142322 - DNA, 11 bp, Unknown
  misc_feature (1)..( 11): Result.003 file - promoters60/4773011
attagtttatc

SEQ ID NO: 142323 - DNA, 11 bp, Unknown
  misc_feature (1)..( 11): Result.003 file - promoters60/4773011
aactttttatt

SEQ ID NO: 142324 - DNA, 11 bp, Unknown
  misc_feature (1)..( 11): Result.003 file - promoters60/4773011
ttttgttgctg

SEQ ID NO: 142325 - DNA, 11 bp, Unknown
  misc_feature (1)..( 11): Result.003 file - promoters60/4773011
ctttttttgaa

SEQ ID NO: 142326 - DNA, 11 bp, Unknown
  misc_feature (1)..( 11): Result.003 file - promoters60/4773011
tgattctttga

SEQ ID NO: 142327 - DNA, 11 bp, Unknown
  misc_feature (1)..( 11): Result.003 file - promoters60/4773011
acatttttttc

SEQ ID NO: 142328 - DNA, 11 bp, Unknown
  misc_feature (1)..( 11): Result.003 file - promoters60/4773011
tgactctcttg

SEQ ID NO: 142329 - DNA, 11 bp, Unknown
  misc_feature (1)..( 11): Result.003 file - promoters60/4773011
ttgtttgttca

SEQ ID NO: 142330 - DNA, 11 bp, Unknown
  misc_feature (1)..( 11): Result.003 file - promoters60/4773011
tgattctttga

SEQ ID NO: 142331 - DNA, 9 bp, Unknown
  misc_feature (1)..( 9): Result.003 file - promoters60/4773011
ctttttatt

SEQ ID NO: 142332 - DNA, 9 bp, Unknown
  misc_feature (1)..( 9): Result.003 file - promoters60/4773011
ctttttacc

SEQ ID NO: 142333 - DNA, 9 bp, Unknown
  misc_feature (1)..( 9): Result.003 file - promoters60/4773011
ctttttttg

SEQ ID NO: 142334 - DNA, 9 bp, Unknown
  misc_feature (1)..( 9): Result.003 file - promoters60/4773011
ctttttatt

SEQ ID NO: 142335 - DNA, 9 bp, Unknown
  misc_feature (1)..( 9): Result.003 file - promoters60/4773011
attttgttg

SEQ ID NO: 142336 - DNA, 6 bp, Unknown
  misc_feature (1)..( 6): Result.003 file - promoters60/4773015
ttttct

SEQ ID NO: 142337 - DNA, 6 bp, Unknown
  misc_feature (1)..( 6): Result.003 file - promoters60/4773015
ttttct

SEQ ID NO: 142338 - DNA, 9 bp, Unknown
  misc_feature (1)..( 9): Result.003 file - promoters60/4773015
tttcgtttc

SEQ ID NO: 142339 - DNA, 9 bp, Unknown
  misc_feature (1)..( 9): Result.003 file - promoters60/4773015
ttttgtttc

SEQ ID NO: 142340 - DNA, 10 bp, Unknown
  misc_feature (1)..( 10): Result.003 file - promoters60/4773015
cacaaaaaaa

SEQ ID NO: 142341 - DNA, 10 bp, Unknown
  misc_feature (1)..( 10): Result.003 file - promoters60/4773015
accaaaaaaa

SEQ ID NO: 142342 - DNA, 10 bp, Unknown
  misc_feature (1)..( 10): Result.003 file - promoters60/4773015
accaaaatca

SEQ ID NO: 142343 - DNA, 9 bp, Unknown
  misc_feature (1)..( 9): Result.003 file - promoters60/4773015
gtattttct

SEQ ID NO: 142344 - DNA, 9 bp, Unknown
  misc_feature (1)..( 9): Result.003 file - promoters60/4773015
gtattatct

SEQ ID NO: 142345 - DNA, 7 bp, Unknown
  misc_feature (1)..( 7): Result.003 file - promoters60/4773015
tttcgaa

SEQ ID NO: 142346 - DNA, 7 bp, Unknown
  misc_feature (1)..( 7): Result.003 file - promoters60/4773015
tttagaa

SEQ ID NO: 142347 - DNA, 7 bp, Unknown
  misc_feature (1)..( 7): Result.003 file - promoters60/4773015
ttttttc

SEQ ID NO: 142348 - DNA, 7 bp, Unknown
  misc_feature (1)..( 7): Result.003 file - promoters60/4773015
ttttttc

SEQ ID NO: 142349 - DNA, 7 bp, Unknown
  misc_feature (1)..( 7): Result.003 file - promoters60/4773015
ttgcttc

SEQ ID NO: 142350 - DNA, 7 bp, Unknown
  misc_feature (1)..( 7): Result.003 file - promoters60/4773015
ttgattc

SEQ ID NO: 142351 - DNA, 6 bp, Unknown
  misc_feature (1)..( 6): Result.003 file - promoters60/4773015
aaagaa

SEQ ID NO: 142352 - DNA, 6 bp, Unknown
  misc_feature (1)..( 6): Result.003 file - promoters60/4773015
aaagaa

SEQ ID NO: 142353 - DNA, 7 bp, Unknown
  misc_feature (1)..( 7): Result.003 file - promoters60/4773015
ttcattt

SEQ ID NO: 142354 - DNA, 7 bp, Unknown
  misc_feature (1)..( 7): Result.003 file - promoters60/4773015
ttctttt

SEQ ID NO: 142355 - DNA, 9 bp, Unknown
  misc_feature (1)..( 9): Result.003 file - promoters60/4773015
ctttctttt

SEQ ID NO: 142356 - DNA, 9 bp, Unknown
  misc_feature (1)..( 9): Result.003 file - promoters60/4773015
ctttgtttt

SEQ ID NO: 142357 - DNA, 7 bp, Unknown
  misc_feature (1)..( 7): Result.003 file - promoters60/4773015
attacag

SEQ ID NO: 142358 - DNA, 7 bp, Unknown
  misc_feature (1)..( 7): Result.003 file - promoters60/4773015
attgcag

SEQ ID NO: 142359 - DNA, 7 bp, Unknown
  misc_feature (1)..( 7): Result.003 file - promoters60/4773027
tattttt

SEQ ID NO: 142360 - DNA, 7 bp, Unknown
  misc_feature (1)..( 7): Result.003 file - promoters60/4773027
tatattt

SEQ ID NO: 142361 - DNA, 8 bp, Unknown
  misc_feature (1)..( 8): Result.003 file - promoters60/4773027
tatgttct

SEQ ID NO: 142362 - DNA, 8 bp, Unknown
  misc_feature (1)..( 8): Result.003 file - promoters60/4773027
tattttct

SEQ ID NO: 142363 - DNA, 6 bp, Unknown
  misc_feature (1)..( 6): Result.003 file - promoters60/4773027
atattt

SEQ ID NO: 142364 - DNA, 6 bp, Unknown
  misc_feature (1)..( 6): Result.003 file - promoters60/4773027
atattt

SEQ ID NO: 142365 - DNA, 6 bp, Unknown
  misc_feature (1)..( 6): Result.003 file - promoters60/4773027
atttat

SEQ ID NO: 142366 - DNA, 6 bp, Unknown
  misc_feature (1)..( 6): Result.003 file - promoters60/4773027
atttat

SEQ ID NO: 142367 - DNA, 6 bp, Unknown
  misc_feature (1)..( 6): Result.003 file - promoters60/4773027
cctttt

SEQ ID NO: 142368 - DNA, 6 bp, Unknown
  misc_feature (1)..( 6): Result.003 file - promoters60/4773027
cctttt

SEQ ID NO: 142369 - DNA, 6 bp, Unknown
  misc_feature (1)..( 6): Result.003 file - promoters60/4773027
cttata

SEQ ID NO: 142370 - DNA, 6 bp, Unknown
  misc_feature (1)..( 6): Result.003 file - promoters60/4773027
cttata

SEQ ID NO: 142371 - DNA, 6 bp, Unknown
  misc_feature (1)..( 6): Result.003 file - promoters60/4773027
gttgga

SEQ ID NO: 142372 - DNA, 6 bp, Unknown
  misc_feature (1)..( 6): Result.003 file - promoters60/4773027
gttgga

SEQ ID NO: 142373 - DNA, 6 bp, Unknown
  misc_feature (1)..( 6): Result.003 file - promoters60/4773027
ttcgag

SEQ ID NO: 142374 - DNA, 6 bp, Unknown
  misc_feature (1)..( 6): Result.003 file - promoters60/4773027
ttcgag

SEQ ID NO: 142375 - DNA, 7 bp, Unknown
  misc_feature (1)..( 7): Result.003 file - promoters60/4773027
gacgata

SEQ ID NO: 142376 - DNA, 7 bp, Unknown
  misc_feature (1)..( 7): Result.003 file - promoters60/4773027
gacaata

SEQ ID NO: 142377 - DNA, 6 bp, Unknown
  misc_feature (1)..( 6): Result.003 file - promoters60/4773027
tatctg

SEQ ID NO: 142378 - DNA, 6 bp, Unknown
  misc_feature (1)..( 6): Result.003 file - promoters60/4773027
tatctg

SEQ ID NO: 142379 - DNA, 7 bp, Unknown
  misc_feature (1)..( 7): Result.003 file - promoters60/4773027
gaaatca

SEQ ID NO: 142380 - DNA, 7 bp, Unknown
  misc_feature (1)..( 7): Result.003 file - promoters60/4773027
gaactca

SEQ ID NO: 142381 - DNA, 7 bp, Unknown
  misc_feature (1)..( 7): Result.003 file - promoters60/4773027
ggtgctt

SEQ ID NO: 142382 - DNA, 7 bp, Unknown
  misc_feature (1)..( 7): Result.003 file - promoters60/4773027
ggtcctt

SEQ ID NO: 142383 - DNA, 6 bp, Unknown
  misc_feature (1)..( 6): Result.003 file - promoters60/4773027
atatct

SEQ ID NO: 142384 - DNA, 6 bp, Unknown
  misc_feature (1)..( 6): Result.003 file - promoters60/4773027
atatct

SEQ ID NO: 142385 - DNA, 6 bp, Unknown
  misc_feature (1)..( 6): Result.003 file - promoters60/4773027
aactaa

SEQ ID NO: 142386 - DNA, 6 bp, Unknown
  misc_feature (1)..( 6): Result.003 file - promoters60/4773027
aactaa

SEQ ID NO: 142387 - DNA, 7 bp, Unknown
  misc_feature (1)..( 7): Result.003 file - promoters60/4773027
ctaatgt

SEQ ID NO: 142388 - DNA, 7 bp, Unknown
  misc_feature (1)..( 7): Result.003 file - promoters60/4773027
ctattgt

SEQ ID NO: 142389 - DNA, 6 bp, Unknown
  misc_feature (1)..( 6): Result.003 file - promoters60/4773027
tgtgct

SEQ ID NO: 142390 - DNA, 6 bp, Unknown
  misc_feature (1)..( 6): Result.003 file - promoters60/4773027
tgtgct

SEQ ID NO: 142391 - DNA, 8 bp, Unknown
  misc_feature (1)..( 8): Result.003 file - promoters60/4773027
aaacaatt

SEQ ID NO: 142392 - DNA, 8 bp, Unknown
  misc_feature (1)..( 8): Result.003 file - promoters60/4773027
aaacgatt

SEQ ID NO: 142393 - DNA, 7 bp, Unknown
  misc_feature (1)..( 7): Result.003 file - promoters60/4773027
ctaaaat

SEQ ID NO: 142394 - DNA, 7 bp, Unknown
  misc_feature (1)..( 7): Result.003 file - promoters60/4773027
ctacaat

SEQ ID NO: 142395 - DNA, 7 bp, Unknown
  misc_feature (1)..( 7): Result.003 file - promoters60/4773027
ttttgtt

SEQ ID NO: 142396 - DNA, 7 bp, Unknown
  misc_feature (1)..( 7): Result.003 file - promoters60/4773027
ttttgtt

SEQ ID NO: 142397 - DNA, 7 bp, Unknown
  misc_feature (1)..( 7): Result.003 file - promoters60/4773027
ttagtaa

SEQ ID NO: 142398 - DNA, 7 bp, Unknown
  misc_feature (1)..( 7): Result.003 file - promoters60/4773027
ttattaa

SEQ ID NO: 142399 - DNA, 7 bp, Unknown
  misc_feature (1)..( 7): Result.003 file - promoters60/4773027
tcttttc

SEQ ID NO: 142400 - DNA, 7 bp, Unknown
  misc_feature (1)..( 7): Result.003 file - promoters60/4773027
tctgttc

SEQ ID NO: 142401 - DNA, 6 bp, Unknown
  misc_feature (1)..( 6): Result.003 file - promoters60/4773027
aataat

SEQ ID NO: 142402 - DNA, 6 bp, Unknown
  misc_feature (1)..( 6): Result.003 file - promoters60/4773027
aataat

SEQ ID NO: 142403 - DNA, 11 bp, Unknown
  misc_feature (1)..( 11): Result.003 file - promoters60/4773035
aaataaattaa

SEQ ID NO: 142404 - DNA, 11 bp, Unknown
  misc_feature (1)..( 11): Result.003 file - promoters60/4773035
gaataaacgcc

SEQ ID NO: 142405 - DNA, 11 bp, Unknown
  misc_feature (1)..( 11): Result.003 file - promoters60/4773035
caataaataat

SEQ ID NO: 142406 - DNA, 11 bp, Unknown
  misc_feature (1)..( 11): Result.003 file - promoters60/4773035
atatacattac

SEQ ID NO: 142407 - DNA, 11 bp, Unknown
  misc_feature (1)..( 11): Result.003 file - promoters60/4773035
gaaaaaacata

SEQ ID NO: 142408 - DNA, 11 bp, Unknown
  misc_feature (1)..( 11): Result.003 file - promoters60/4773035
aatgaaatcat

SEQ ID NO: 142409 - DNA, 11 bp, Unknown
  misc_feature (1)..( 11): Result.003 file - promoters60/4773035
tttcaaaaaag

SEQ ID NO: 142410 - DNA, 11 bp, Unknown
  misc_feature (1)..( 11): Result.003 file - promoters60/4773035
acccaataaag

SEQ ID NO: 142411 - DNA, 11 bp, Unknown
  misc_feature (1)..( 11): Result.003 file - promoters60/4773035
tactaattaag

SEQ ID NO: 142412 - DNA, 11 bp, Unknown
  misc_feature (1)..( 11): Result.003 file - promoters60/4773035
ttactatttat

SEQ ID NO: 142413 - DNA, 11 bp, Unknown
  misc_feature (1)..( 11): Result.003 file - promoters60/4773035
attccactaat

SEQ ID NO: 142414 - DNA, 11 bp, Unknown
  misc_feature (1)..( 11): Result.003 file - promoters60/4773035
tatccacttgt

SEQ ID NO: 142415 - DNA, 10 bp, Unknown
  misc_feature (1)..( 10): Result.003 file - promoters60/4773035
gcatataaag

SEQ ID NO: 142416 - DNA, 10 bp, Unknown
  misc_feature (1)..( 10): Result.003 file - promoters60/4773035
gtatataaat

SEQ ID NO: 142417 - DNA, 10 bp, Unknown
  misc_feature (1)..( 10): Result.003 file - promoters60/4773035
taatataaag

SEQ ID NO: 142418 - DNA, 10 bp, Unknown
  misc_feature (1)..( 10): Result.003 file - promoters60/4773035
ccatataaat

SEQ ID NO: 142419 - DNA, 10 bp, Unknown
  misc_feature (1)..( 10): Result.003 file - promoters60/4773035
ctatataaag

SEQ ID NO: 142420 - DNA, 10 bp, Unknown
  misc_feature (1)..( 10): Result.003 file - promoters60/4773035
gtatatataa

SEQ ID NO: 142421 - DNA, 10 bp, Unknown
  misc_feature (1)..( 10): Result.003 file - promoters60/4773035
ctatttaaag

SEQ ID NO: 142422 - DNA, 8 bp, Unknown
  misc_feature (1)..( 8): Result.003 file - promoters60/4773068
caataaaa

SEQ ID NO: 142423 - DNA, 8 bp, Unknown
  misc_feature (1)..( 8): Result.003 file - promoters60/4773068
caaaaaaa

SEQ ID NO: 142424 - DNA, 6 bp, Unknown
  misc_feature (1)..( 6): Result.003 file - promoters60/4773068
aaaaca

SEQ ID NO: 142425 - DNA, 6 bp, Unknown
  misc_feature (1)..( 6): Result.003 file - promoters60/4773068
aaaaca

SEQ ID NO: 142426 - DNA, 8 bp, Unknown
  misc_feature (1)..( 8): Result.003 file - promoters60/4773068
gaattaaa

SEQ ID NO: 142427 - DNA, 8 bp, Unknown
  misc_feature (1)..( 8): Result.003 file - promoters60/4773068
gaaataaa

SEQ ID NO: 142428 - DNA, 7 bp, Unknown
  misc_feature (1)..( 7): Result.003 file - promoters60/4773068
caaattt

SEQ ID NO: 142429 - DNA, 7 bp, Unknown
  misc_feature (1)..( 7): Result.003 file - promoters60/4773068
caatttt

SEQ ID NO: 142430 - DNA, 6 bp, Unknown
  misc_feature (1)..( 6): Result.003 file - promoters60/4773068
ttaaaa

SEQ ID NO: 142431 - DNA, 6 bp, Unknown
  misc_feature (1)..( 6): Result.003 file - promoters60/4773068
ttaaaa

SEQ ID NO: 142432 - DNA, 6 bp, Unknown
  misc_feature (1)..( 6): Result.003 file - promoters60/4773068
gtaacg

SEQ ID NO: 142433 - DNA, 6 bp, Unknown
  misc_feature (1)..( 6): Result.003 file - promoters60/4773068
gtaacg

SEQ ID NO: 142434 - DNA, 7 bp, Unknown
  misc_feature (1)..( 7): Result.003 file - promoters60/4773068
gtggtta

SEQ ID NO: 142435 - DNA, 7 bp, Unknown
  misc_feature (1)..( 7): Result.003 file - promoters60/4773068
gtgttta

SEQ ID NO: 142436 - DNA, 10 bp, Unknown
  misc_feature (1)..( 10): Result.003 file - promoters60/4773068
tacgtgtcaa

SEQ ID NO: 142437 - DNA, 10 bp, Unknown
  misc_feature (1)..( 10): Result.003 file - promoters60/4773068
cacgtgtcat

SEQ ID NO: 142438 - DNA, 10 bp, Unknown
  misc_feature (1)..( 10): Result.003 file - promoters60/4773068
tacgtgtcaa

SEQ ID NO: 142439 - DNA, 20 bp, Unknown
  misc_feature (1)..( 20): Result.003 file - promoters60/4773068
ttggttattgcttcaccgcc

SEQ ID NO: 142440 - DNA, 20 bp, Unknown
  misc_feature (1)..( 20): Result.003 file - promoters60/4773068
ttagctattgcttcaccgcc

SEQ ID NO: 142441 - DNA, 20 bp, Unknown
  misc_feature (1)..( 20): Result.003 file - promoters60/4773068
ttggctattgcttccacgcc

SEQ ID NO: 142442 - DNA, 22 bp, Unknown
  misc_feature (1)..( 22): Result.003 file - promoters60/4773068
tctcgtgaccgactcgtcctcg

SEQ ID NO: 142443 - DNA, 22 bp, Unknown
  misc_feature (1)..( 22): Result.003 file - promoters60/4773068
gacctagtcgtcctcgtctttt

SEQ ID NO: 142444 - DNA, 22 bp, Unknown
  misc_feature (1)..( 22): Result.003 file - promoters60/4773068
gaccgagtcgtcctcgtctttt

SEQ ID NO: 142445 - DNA, 19 bp, Unknown
  misc_feature (1)..( 19): Result.003 file - promoters60/4773068
ttcttcttctataaattaa

SEQ ID NO: 142446 - DNA, 19 bp, Unknown
  misc_feature (1)..( 19): Result.003 file - promoters60/4773068
ttcttcttctataaaacaa

SEQ ID NO: 142447 - DNA, 19 bp, Unknown
  misc_feature (1)..( 19): Result.003 file - promoters60/4773068
ttttgcttctataaatcaa

SEQ ID NO: 142448 - DNA, 6 bp, Unknown
  misc_feature (1)..( 6): Result.003 file - promoters60/4773068
gcttct

SEQ ID NO: 142449 - DNA, 6 bp, Unknown
  misc_feature (1)..( 6): Result.003 file - promoters60/4773068
gcttct

SEQ ID NO: 142450 - DNA, 8 bp, Unknown
  misc_feature (1)..( 8): Result.003 file - promoters60/4773068
ttctggcc

SEQ ID NO: 142451 - DNA, 8 bp, Unknown
  misc_feature (1)..( 8): Result.003 file - promoters60/4773068
ttcttgcc

SEQ ID NO: 142452 - DNA, 7 bp, Unknown
  misc_feature (1)..( 7): Result.003 file - promoters60/4773068
tacatat

SEQ ID NO: 142453 - DNA, 7 bp, Unknown
  misc_feature (1)..( 7): Result.003 file - promoters60/4773068
tacttat

SEQ ID NO: 142454 - DNA, 15 bp, Unknown
  misc_feature (1)..( 15): Result.003 file - promoters60/4773068
cgccttagctttctc

SEQ ID NO: 142455 - DNA, 15 bp, Unknown
  misc_feature (1)..( 15): Result.003 file - promoters60/4773068
cgccttagctttctc

SEQ ID NO: 142456 - DNA, 15 bp, Unknown
  misc_feature (1)..( 15): Result.003 file - promoters60/4773068
cgccttagctttctc

SEQ ID NO: 142457 - DNA, 6 bp, Unknown
  misc_feature (1)..( 6): Result.003 file - promoters60/4773068
tttttt

SEQ ID NO: 142458 - DNA, 6 bp, Unknown
  misc_feature (1)..( 6): Result.003 file - promoters60/4773068
tttttt

SEQ ID NO: 142459 - DNA, 9 bp, Unknown
  misc_feature (1)..( 9): Result.003 file - promoters60/4773068
acaaaaagg

SEQ ID NO: 142460 - DNA, 9 bp, Unknown
  misc_feature (1)..( 9): Result.003 file - promoters60/4773068
acacaaagg

SEQ ID NO: 142461 - DNA, 7 bp, Unknown
  misc_feature (1)..( 7): Result.003 file - promoters60/4773068
acgaaga

SEQ ID NO: 142462 - DNA, 7 bp, Unknown
  misc_feature (1)..( 7): Result.003 file - promoters60/4773068
acgcaga

SEQ ID NO: 142463 - DNA, 6 bp, Unknown
  misc_feature (1)..( 6): Result.003 file - promoters60/4773068
gttcaa

SEQ ID NO: 142464 - DNA, 6 bp, Unknown
  misc_feature (1)..( 6): Result.003 file - promoters60/4773068
gttcaa

SEQ ID NO: 142465 - DNA, 6 bp, Unknown
  misc_feature (1)..( 6): Result.003 file - promoters60/4773068
gtatat

SEQ ID NO: 142466 - DNA, 6 bp, Unknown
  misc_feature (1)..( 6): Result.003 file - promoters60/4773068
gtatat

SEQ ID NO: 142467 - DNA, 9 bp, Unknown
  misc_feature (1)..( 9): Result.003 file - promoters60/4773068
atcttatga

SEQ ID NO: 142468 - DNA, 9 bp, Unknown
  misc_feature (1)..( 9): Result.003 file - promoters60/4773068
atctaatga

SEQ ID NO: 142469 - DNA, 6 bp, Unknown
  misc_feature (1)..( 6): Result.003 file - promoters60/4773068
tcagta

SEQ ID NO: 142470 - DNA, 6 bp, Unknown
  misc_feature (1)..( 6): Result.003 file - promoters60/4773068
tcagta

SEQ ID NO: 142471 - DNA, 6 bp, Unknown
  misc_feature (1)..( 6): Result.003 file - promoters60/4773068
aacaac

SEQ ID NO: 142472 - DNA, 6 bp, Unknown
  misc_feature (1)..( 6): Result.003 file - promoters60/4773068
aacaac

SEQ ID NO: 142473 - DNA, 15 bp, Unknown
  misc_feature (1)..( 15): Result.003 file - promoters60/4773068
aatacccaaagagct

SEQ ID NO: 142474 - DNA, 15 bp, Unknown
  misc_feature (1)..( 15): Result.003 file - promoters60/4773068
aatacccaaagagct

SEQ ID NO: 142475 - DNA, 12 bp, Unknown
  misc_feature (1)..( 12): Result.003 file - promoters60/4773074
cagaatttttgc

SEQ ID NO: 142476 - DNA, 12 bp, Unknown
  misc_feature (1)..( 12): Result.003 file - promoters60/4773074
aaagattattga

SEQ ID NO: 142477 - DNA, 12 bp, Unknown
  misc_feature (1)..( 12): Result.003 file - promoters60/4773074
cactctttttga

SEQ ID NO: 142478 - DNA, 12 bp, Unknown
  misc_feature (1)..( 12): Result.003 file - promoters60/4773074
aaagactatttg

SEQ ID NO: 142479 - DNA, 12 bp, Unknown
  misc_feature (1)..( 12): Result.003 file - promoters60/4773074
gtttggttttga

SEQ ID NO: 142480 - DNA, 12 bp, Unknown
  misc_feature (1)..( 12): Result.003 file - promoters60/4773074
aaggcctattta

SEQ ID NO: 142481 - DNA, 6 bp, Unknown
  misc_feature (1)..( 6): Result.003 file - promoters60/4773077
atccaa

SEQ ID NO: 142482 - DNA, 6 bp, Unknown
  misc_feature (1)..( 6): Result.003 file - promoters60/4773077
atccaa

SEQ ID NO: 142483 - DNA, 6 bp, Unknown
  misc_feature (1)..( 6): Result.003 file - promoters60/4773077
ctcctc

SEQ ID NO: 142484 - DNA, 6 bp, Unknown
  misc_feature (1)..( 6): Result.003 file - promoters60/4773077
ctcctc

SEQ ID NO: 142485 - DNA, 7 bp, Unknown
  misc_feature (1)..( 7): Result.003 file - promoters60/4773077
acctctc

SEQ ID NO: 142486 - DNA, 7 bp, Unknown
  misc_feature (1)..( 7): Result.003 file - promoters60/4773077
accactc

SEQ ID NO: 142487 - DNA, 8 bp, Unknown
  misc_feature (1)..( 8): Result.003 file - promoters60/4773077
ctctctca

SEQ ID NO: 142488 - DNA, 8 bp, Unknown
  misc_feature (1)..( 8): Result.003 file - promoters60/4773077
ctctctca

SEQ ID NO: 142489 - DNA, 6 bp, Unknown
  misc_feature (1)..( 6): Result.003 file - promoters60/4773077
tctttc

SEQ ID NO: 142490 - DNA, 6 bp, Unknown
  misc_feature (1)..( 6): Result.003 file - promoters60/4773077
tctttc

SEQ ID NO: 142491 - DNA, 8 bp, Unknown
  misc_feature (1)..( 8): Result.003 file - promoters60/4773077
cctcttct

SEQ ID NO: 142492 - DNA, 8 bp, Unknown
  misc_feature (1)..( 8): Result.003 file - promoters60/4773077
tatcttct

SEQ ID NO: 142493 - DNA, 8 bp, Unknown
  misc_feature (1)..( 8): Result.003 file - promoters60/4773077
tattttcg

SEQ ID NO: 142494 - DNA, 9 bp, Unknown
  misc_feature (1)..( 9): Result.003 file - promoters60/4773077
tctcgttaa

SEQ ID NO: 142495 - DNA, 9 bp, Unknown
  misc_feature (1)..( 9): Result.003 file - promoters60/4773077
tctcgctaa

SEQ ID NO: 142496 - DNA, 8 bp, Unknown
  misc_feature (1)..( 8): Result.003 file - promoters60/4773077
tttagctt

SEQ ID NO: 142497 - DNA, 8 bp, Unknown
  misc_feature (1)..( 8): Result.003 file - promoters60/4773077
tttatctt

SEQ ID NO: 142498 - DNA, 6 bp, Unknown
  misc_feature (1)..( 6): Result.003 file - promoters60/4773077
gaatta

SEQ ID NO: 142499 - DNA, 6 bp, Unknown
  misc_feature (1)..( 6): Result.003 file - promoters60/4773077
gaatta

SEQ ID NO: 142500 - DNA, 6 bp, Unknown
  misc_feature (1)..( 6): Result.003 file - promoters60/4773077
gcggaa

SEQ ID NO: 142501 - DNA, 6 bp, Unknown
  misc_feature (1)..( 6): Result.003 file - promoters60/4773077
gcggaa

SEQ ID NO: 142502 - DNA, 6 bp, Unknown
  misc_feature (1)..( 6): Result.003 file - promoters60/4773077
aaagaa

SEQ ID NO: 142503 - DNA, 6 bp, Unknown
  misc_feature (1)..( 6): Result.003 file - promoters60/4773077
aaagaa

SEQ ID NO: 142504 - DNA, 6 bp, Unknown
  misc_feature (1)..( 6): Result.003 file - promoters60/4773077
tccttg

SEQ ID NO: 142505 - DNA, 6 bp, Unknown
  misc_feature (1)..( 6): Result.003 file - promoters60/4773077
tccttg

SEQ ID NO: 142506 - DNA, 7 bp, Unknown
  misc_feature (1)..( 7): Result.003 file - promoters60/4773077
gatatat

SEQ ID NO: 142507 - DNA, 7 bp, Unknown
  misc_feature (1)..( 7): Result.003 file - promoters60/4773077
gatgtat

SEQ ID NO: 142508 - DNA, 13 bp, Unknown
  misc_feature (1)..( 13): Result.003 file - promoters60/4773089
caaaaataagatt

SEQ ID NO: 142509 - DNA, 13 bp, Unknown
  misc_feature (1)..( 13): Result.003 file - promoters60/4773089
aaaacataagttt

SEQ ID NO: 142510 - DNA, 13 bp, Unknown
  misc_feature (1)..( 13): Result.003 file - promoters60/4773089
gacaaataaatcg

SEQ ID NO: 142511 - DNA, 13 bp, Unknown
  misc_feature (1)..( 13): Result.003 file - promoters60/4773089
taacgataagaga

SEQ ID NO: 142512 - DNA, 13 bp, Unknown
  misc_feature (1)..( 13): Result.003 file - promoters60/4773089
gaaaaataaacta

SEQ ID NO: 142513 - DNA, 13 bp, Unknown
  misc_feature (1)..( 13): Result.003 file - promoters60/4773089
ttgtcataaattt

SEQ ID NO: 142514 - DNA, 13 bp, Unknown
  misc_feature (1)..( 13): Result.003 file - promoters60/4773089
aaaaaacaatttg

SEQ ID NO: 142515 - DNA, 10 bp, Unknown
  misc_feature (1)..( 10): Result.003 file - promoters60/4773089
ataagattag

SEQ ID NO: 142516 - DNA, 10 bp, Unknown
  misc_feature (1)..( 10): Result.003 file - promoters60/4773089
gtaaaatttt

SEQ ID NO: 142517 - DNA, 10 bp, Unknown
  misc_feature (1)..( 10): Result.003 file - promoters60/4773089
ataagagatg

SEQ ID NO: 142518 - DNA, 10 bp, Unknown
  misc_feature (1)..( 10): Result.003 file - promoters60/4773089
cataaatttg

SEQ ID NO: 142519 - DNA, 10 bp, Unknown
  misc_feature (1)..( 10): Result.003 file - promoters60/4773089
ggaaacttta

SEQ ID NO: 142520 - DNA, 10 bp, Unknown
  misc_feature (1)..( 10): Result.003 file - promoters60/4773089
aaacaatttg

SEQ ID NO: 142521 - DNA, 12 bp, Unknown
  misc_feature (1)..( 12): Result.003 file - promoters60/4773089
aaaaaagacaaa

SEQ ID NO: 142522 - DNA, 12 bp, Unknown
  misc_feature (1)..( 12): Result.003 file - promoters60/4773089
caaaacgacgtc

SEQ ID NO: 142523 - DNA, 12 bp, Unknown
  misc_feature (1)..( 12): Result.003 file - promoters60/4773089
aaaaaatacaaa

SEQ ID NO: 142524 - DNA, 12 bp, Unknown
  misc_feature (1)..( 12): Result.003 file - promoters60/4773089
aaaaaatacgac

SEQ ID NO: 142525 - DNA, 12 bp, Unknown
  misc_feature (1)..( 12): Result.003 file - promoters60/4773089
ccaaaatataac

SEQ ID NO: 142526 - DNA, 10 bp, Unknown
  misc_feature (1)..( 10): Result.003 file - promoters60/4773089
tacatgtata

SEQ ID NO: 142527 - DNA, 10 bp, Unknown
  misc_feature (1)..( 10): Result.003 file - promoters60/4773089
agaatgtatg

SEQ ID NO: 142528 - DNA, 10 bp, Unknown
  misc_feature (1)..( 10): Result.003 file - promoters60/4773089
caaatttatt

SEQ ID NO: 142529 - DNA, 10 bp, Unknown
  misc_feature (1)..( 10): Result.003 file - promoters60/4773089
gatatttatt

SEQ ID NO: 142530 - DNA, 10 bp, Unknown
  misc_feature (1)..( 10): Result.003 file - promoters60/4773089
acaatttttc

SEQ ID NO: 142531 - DNA, 13 bp, Unknown
  misc_feature (1)..( 13): Result.003 file - promoters60/4773089
taactaaacttta

SEQ ID NO: 142532 - DNA, 13 bp, Unknown
  misc_feature (1)..( 13): Result.003 file - promoters60/4773089
aatataatcttaa

SEQ ID NO: 142533 - DNA, 13 bp, Unknown
  misc_feature (1)..( 13): Result.003 file - promoters60/4773089
ataatcaacttta

SEQ ID NO: 142534 - DNA, 13 bp, Unknown
  misc_feature (1)..( 13): Result.003 file - promoters60/4773089
atcttaaatttaa

SEQ ID NO: 142535 - DNA, 13 bp, Unknown
  misc_feature (1)..( 13): Result.003 file - promoters60/4773089
aatgtaattttat

SEQ ID NO: 142536 - DNA, 7 bp, Unknown
  misc_feature (1)..( 7): Result.003 file - promoters60/4773093
tttgcca

SEQ ID NO: 142537 - DNA, 7 bp, Unknown
  misc_feature (1)..( 7): Result.003 file - promoters60/4773093
tttccca

SEQ ID NO: 142538 - DNA, 7 bp, Unknown
  misc_feature (1)..( 7): Result.003 file - promoters60/4773093
gcaaatt

SEQ ID NO: 142539 - DNA, 7 bp, Unknown
  misc_feature (1)..( 7): Result.003 file - promoters60/4773093
gcatatt

SEQ ID NO: 142540 - DNA, 6 bp, Unknown
  misc_feature (1)..( 6): Result.003 file - promoters60/4773093
tttgat

SEQ ID NO: 142541 - DNA, 6 bp, Unknown
  misc_feature (1)..( 6): Result.003 file - promoters60/4773093
tttgat

SEQ ID NO: 142542 - DNA, 6 bp, Unknown
  misc_feature (1)..( 6): Result.003 file - promoters60/4773093
tttgat

SEQ ID NO: 142543 - DNA, 8 bp, Unknown
  misc_feature (1)..( 8): Result.003 file - promoters60/4773093
tttttatc

SEQ ID NO: 142544 - DNA, 8 bp, Unknown
  misc_feature (1)..( 8): Result.003 file - promoters60/4773093
ttttcatc

SEQ ID NO: 142545 - DNA, 8 bp, Unknown
  misc_feature (1)..( 8): Result.003 file - promoters60/4773093
ctttctct

SEQ ID NO: 142546 - DNA, 8 bp, Unknown
  misc_feature (1)..( 8): Result.003 file - promoters60/4773093
attttttt

SEQ ID NO: 142547 - DNA, 8 bp, Unknown
  misc_feature (1)..( 8): Result.003 file - promoters60/4773093
attttttt

SEQ ID NO: 142548 - DNA, 6 bp, Unknown
  misc_feature (1)..( 6): Result.003 file - promoters60/4773093
tgttat

SEQ ID NO: 142549 - DNA, 6 bp, Unknown
  misc_feature (1)..( 6): Result.003 file - promoters60/4773093
tgttat

SEQ ID NO: 142550 - DNA, 8 bp, Unknown
  misc_feature (1)..( 8): Result.003 file - promoters60/4773093
tgtttgtt

SEQ ID NO: 142551 - DNA, 8 bp, Unknown
  misc_feature (1)..( 8): Result.003 file - promoters60/4773093
tgtatgtt

SEQ ID NO: 142552 - DNA, 6 bp, Unknown
  misc_feature (1)..( 6): Result.003 file - promoters60/4773093
ctctta

SEQ ID NO: 142553 - DNA, 6 bp, Unknown
  misc_feature (1)..( 6): Result.003 file - promoters60/4773093
ctctta

SEQ ID NO: 142554 - DNA, 6 bp, Unknown
  misc_feature (1)..( 6): Result.003 file - promoters60/4773093
atttaa

SEQ ID NO: 142555 - DNA, 6 bp, Unknown
  misc_feature (1)..( 6): Result.003 file - promoters60/4773093
atttaa

SEQ ID NO: 142556 - DNA, 6 bp, Unknown
  misc_feature (1)..( 6): Result.003 file - promoters60/4773093
aaattt

SEQ ID NO: 142557 - DNA, 6 bp, Unknown
  misc_feature (1)..( 6): Result.003 file - promoters60/4773093
aaattt

SEQ ID NO: 142558 - DNA, 10 bp, Unknown
  misc_feature (1)..( 10): Result.003 file - promoters60/4773093
aatattgggc

SEQ ID NO: 142559 - DNA, 10 bp, Unknown
  misc_feature (1)..( 10): Result.003 file - promoters60/4773093
aatattcggc

SEQ ID NO: 142560 - DNA, 10 bp, Unknown
  misc_feature (1)..( 10): Result.003 file - promoters60/4773093
tacattgggc

SEQ ID NO: 142561 - DNA, 7 bp, Unknown
  misc_feature (1)..( 7): Result.003 file - promoters60/4773093
attgggc

SEQ ID NO: 142562 - DNA, 7 bp, Unknown
  misc_feature (1)..( 7): Result.003 file - promoters60/4773093
atttggc

SEQ ID NO: 142563 - DNA, 7 bp, Unknown
  misc_feature (1)..( 7): Result.003 file - promoters60/4773093
tatttga

SEQ ID NO: 142564 - DNA, 7 bp, Unknown
  misc_feature (1)..( 7): Result.003 file - promoters60/4773093
tatatga

SEQ ID NO: 142565 - DNA, 7 bp, Unknown
  misc_feature (1)..( 7): Result.003 file - promoters60/4773093
ctataaa

SEQ ID NO: 142566 - DNA, 7 bp, Unknown
  misc_feature (1)..( 7): Result.003 file - promoters60/4773093
ctagaaa

SEQ ID NO: 142567 - DNA, 7 bp, Unknown
  misc_feature (1)..( 7): Result.003 file - promoters60/4773093
tttttct

SEQ ID NO: 142568 - DNA, 7 bp, Unknown
  misc_feature (1)..( 7): Result.003 file - promoters60/4773093
tttctct

SEQ ID NO: 142569 - DNA, 7 bp, Unknown
  misc_feature (1)..( 7): Result.003 file - promoters60/4773093
gttttct

SEQ ID NO: 142570 - DNA, 7 bp, Unknown
  misc_feature (1)..( 7): Result.003 file - promoters60/4773093
gttatct

SEQ ID NO: 142571 - DNA, 8 bp, Unknown
  misc_feature (1)..( 8): Result.003 file - promoters60/4773093
caattgtc

SEQ ID NO: 142572 - DNA, 8 bp, Unknown
  misc_feature (1)..( 8): Result.003 file - promoters60/4773093
caatagtc

SEQ ID NO: 142573 - DNA, 7 bp, Unknown
  misc_feature (1)..( 7): Result.003 file - promoters60/4773093
aaagcag

SEQ ID NO: 142574 - DNA, 7 bp, Unknown
  misc_feature (1)..( 7): Result.003 file - promoters60/4773093
aaatcag

SEQ ID NO: 142575 - DNA, 10 bp, Unknown
  misc_feature (1)..( 10): Result.003 file - promoters60/4773093
aactttaaat

SEQ ID NO: 142576 - DNA, 10 bp, Unknown
  misc_feature (1)..( 10): Result.003 file - promoters60/4773093
aacttgaaat

SEQ ID NO: 142577 - DNA, 8 bp, Unknown
  misc_feature (1)..( 8): Result.003 file - promoters60/4773093
aaccctaa

SEQ ID NO: 142578 - DNA, 8 bp, Unknown
  misc_feature (1)..( 8): Result.003 file - promoters60/4773093
aaccctaa

SEQ ID NO: 142579 - DNA, 8 bp, Unknown
  misc_feature (1)..( 8): Result.003 file - promoters60/4773093
ttagcaat

SEQ ID NO: 142580 - DNA, 8 bp, Unknown
  misc_feature (1)..( 8): Result.003 file - promoters60/4773093
ttaccaat

SEQ ID NO: 142581 - DNA, 6 bp, Unknown
  misc_feature (1)..( 6): Result.003 file - promoters60/4773093
tgttcc

SEQ ID NO: 142582 - DNA, 6 bp, Unknown
  misc_feature (1)..( 6): Result.003 file - promoters60/4773093
tgttcc

SEQ ID NO: 142583 - DNA, 6 bp, Unknown
  misc_feature (1)..( 6): Result.003 file - promoters60/4773093
tgtttt

SEQ ID NO: 142584 - DNA, 6 bp, Unknown
  misc_feature (1)..( 6): Result.003 file - promoters60/4773093
tgtttt

SEQ ID NO: 142585 - DNA, 6 bp, Unknown
  misc_feature (1)..( 6): Result.003 file - promoters60/4773093
tgattt

SEQ ID NO: 142586 - DNA, 6 bp, Unknown
  misc_feature (1)..( 6): Result.003 file - promoters60/4773093
tgattt

SEQ ID NO: 142587 - DNA, 7 bp, Unknown
  misc_feature (1)..( 7): Result.003 file - promoters60/4773093
tatcgtc

SEQ ID NO: 142588 - DNA, 7 bp, Unknown
  misc_feature (1)..( 7): Result.003 file - promoters60/4773093
tattgtc

SEQ ID NO: 142589 - DNA, 8 bp, Unknown
  misc_feature (1)..( 8): Result.003 file - promoters60/4773093
ccttcttg

SEQ ID NO: 142590 - DNA, 8 bp, Unknown
  misc_feature (1)..( 8): Result.003 file - promoters60/4773093
cctttttg

SEQ ID NO: 142591 - DNA, 6 bp, Unknown
  misc_feature (1)..( 6): Result.003 file - promoters60/4773093
aaccaa

SEQ ID NO: 142592 - DNA, 6 bp, Unknown
  misc_feature (1)..( 6): Result.003 file - promoters60/4773093
aaccaa

SEQ ID NO: 142593 - DNA, 7 bp, Unknown
  misc_feature (1)..( 7): Result.003 file - promoters60/4773093
tatgaaa

SEQ ID NO: 142594 - DNA, 7 bp, Unknown
  misc_feature (1)..( 7): Result.003 file - promoters60/4773093
tatcaaa

SEQ ID NO: 142595 - DNA, 8 bp, Unknown
  misc_feature (1)..( 8): Result.003 file - promoters60/4773093
aaacaaga

SEQ ID NO: 142596 - DNA, 8 bp, Unknown
  misc_feature (1)..( 8): Result.003 file - promoters60/4773093
aaaccaga

SEQ ID NO: 142597 - DNA, 7 bp, Unknown
  misc_feature (1)..( 7): Result.003 file - promoters60/4773112
tgtattt

SEQ ID NO: 142598 - DNA, 7 bp, Unknown
  misc_feature (1)..( 7): Result.003 file - promoters60/4773112
tgtcttt

SEQ ID NO: 142599 - DNA, 8 bp, Unknown
  misc_feature (1)..( 8): Result.003 file - promoters60/4773112
cattagga

SEQ ID NO: 142600 - DNA, 8 bp, Unknown
  misc_feature (1)..( 8): Result.003 file - promoters60/4773112
cattcgga

SEQ ID NO: 142601 - DNA, 8 bp, Unknown
  misc_feature (1)..( 8): Result.003 file - promoters60/4773112
cattcggt

SEQ ID NO: 142602 - DNA, 9 bp, Unknown
  misc_feature (1)..( 9): Result.003 file - promoters60/4773112
tgttaattt

SEQ ID NO: 142603 - DNA, 9 bp, Unknown
  misc_feature (1)..( 9): Result.003 file - promoters60/4773112
tgttaaaca

SEQ ID NO: 142604 - DNA, 9 bp, Unknown
  misc_feature (1)..( 9): Result.003 file - promoters60/4773112
ggttatttt

SEQ ID NO: 142605 - DNA, 7 bp, Unknown
  misc_feature (1)..( 7): Result.003 file - promoters60/4773112
acaaatg

SEQ ID NO: 142606 - DNA, 7 bp, Unknown
  misc_feature (1)..( 7): Result.003 file - promoters60/4773112
acatatg

SEQ ID NO: 142607 - DNA, 6 bp, Unknown
  misc_feature (1)..( 6): Result.003 file - promoters60/4773112
ttcata

SEQ ID NO: 142608 - DNA, 6 bp, Unknown
  misc_feature (1)..( 6): Result.003 file - promoters60/4773112
ttcata

SEQ ID NO: 142609 - DNA, 7 bp, Unknown
  misc_feature (1)..( 7): Result.003 file - promoters60/4773112
tatatta

SEQ ID NO: 142610 - DNA, 7 bp, Unknown
  misc_feature (1)..( 7): Result.003 file - promoters60/4773112
tatttta

SEQ ID NO: 142611 - DNA, 6 bp, Unknown
  misc_feature (1)..( 6): Result.003 file - promoters60/4773112
tagtat

SEQ ID NO: 142612 - DNA, 6 bp, Unknown
  misc_feature (1)..( 6): Result.003 file - promoters60/4773112
tagtat

SEQ ID NO: 142613 - DNA, 11 bp, Unknown
  misc_feature (1)..( 11): Result.003 file - promoters60/4773112
aaacttttttt

SEQ ID NO: 142614 - DNA, 11 bp, Unknown
  misc_feature (1)..( 11): Result.003 file - promoters60/4773112
aaagtttattt

SEQ ID NO: 142615 - DNA, 8 bp, Unknown
  misc_feature (1)..( 8): Result.003 file - promoters60/4773112
ttaaattt

SEQ ID NO: 142616 - DNA, 8 bp, Unknown
  misc_feature (1)..( 8): Result.003 file - promoters60/4773112
ttaatttt

SEQ ID NO: 142617 - DNA, 7 bp, Unknown
  misc_feature (1)..( 7): Result.003 file - promoters60/4773112
tttagat

SEQ ID NO: 142618 - DNA, 7 bp, Unknown
  misc_feature (1)..( 7): Result.003 file - promoters60/4773112
tttggat

SEQ ID NO: 142619 - DNA, 6 bp, Unknown
  misc_feature (1)..( 6): Result.003 file - promoters60/4773112
tttttt

SEQ ID NO: 142620 - DNA, 6 bp, Unknown
  misc_feature (1)..( 6): Result.003 file - promoters60/4773112
tttttt

SEQ ID NO: 142621 - DNA, 7 bp, Unknown
  misc_feature (1)..( 7): Result.003 file - promoters60/4773112
atattat

SEQ ID NO: 142622 - DNA, 7 bp, Unknown
  misc_feature (1)..( 7): Result.003 file - promoters60/4773112
atattat

SEQ ID NO: 142623 - DNA, 7 bp, Unknown
  misc_feature (1)..( 7): Result.003 file - promoters60/4773112
ttacttt

SEQ ID NO: 142624 - DNA, 7 bp, Unknown
  misc_feature (1)..( 7): Result.003 file - promoters60/4773112
ttaattt

SEQ ID NO: 142625 - DNA, 6 bp, Unknown
  misc_feature (1)..( 6): Result.003 file - promoters60/4773112
tttaaa

SEQ ID NO: 142626 - DNA, 6 bp, Unknown
  misc_feature (1)..( 6): Result.003 file - promoters60/4773112
tttaaa

SEQ ID NO: 142627 - DNA, 9 bp, Unknown
  misc_feature (1)..( 9): Result.003 file - promoters60/4773112
aatcttttt

SEQ ID NO: 142628 - DNA, 9 bp, Unknown
  misc_feature (1)..( 9): Result.003 file - promoters60/4773112
aatattttt

SEQ ID NO: 142629 - DNA, 6 bp, Unknown
  misc_feature (1)..( 6): Result.003 file - promoters60/4773112
atatcc

SEQ ID NO: 142630 - DNA, 6 bp, Unknown
  misc_feature (1)..( 6): Result.003 file - promoters60/4773112
atatcc

SEQ ID NO: 142631 - DNA, 7 bp, Unknown
  misc_feature (1)..( 7): Result.003 file - promoters60/4773112
cggatat

SEQ ID NO: 142632 - DNA, 7 bp, Unknown
  misc_feature (1)..( 7): Result.003 file - promoters60/4773112
cggatat

SEQ ID NO: 142633 - DNA, 6 bp, Unknown
  misc_feature (1)..( 6): Result.003 file - promoters60/4773112
gtttca

SEQ ID NO: 142634 - DNA, 6 bp, Unknown
  misc_feature (1)..( 6): Result.003 file - promoters60/4773112
gtttca

SEQ ID NO: 142635 - DNA, 6 bp, Unknown
  misc_feature (1)..( 6): Result.003 file - promoters60/4773112
cattcg

SEQ ID NO: 142636 - DNA, 6 bp, Unknown
  misc_feature (1)..( 6): Result.003 file - promoters60/4773112
cattcg

SEQ ID NO: 142637 - DNA, 6 bp, Unknown
  misc_feature (1)..( 6): Result.003 file - promoters60/4773112
ttttat

SEQ ID NO: 142638 - DNA, 6 bp, Unknown
  misc_feature (1)..( 6): Result.003 file - promoters60/4773112
ttttat

SEQ ID NO: 142639 - DNA, 6 bp, Unknown
  misc_feature (1)..( 6): Result.003 file - promoters60/4773112
tatata

SEQ ID NO: 142640 - DNA, 6 bp, Unknown
  misc_feature (1)..( 6): Result.003 file - promoters60/4773112
tatata

SEQ ID NO: 142641 - DNA, 7 bp, Unknown
  misc_feature (1)..( 7): Result.003 file - promoters60/4773112
tatgcat

SEQ ID NO: 142642 - DNA, 7 bp, Unknown
  misc_feature (1)..( 7): Result.003 file - promoters60/4773112
tatccat

SEQ ID NO: 142643 - DNA, 6 bp, Unknown
  misc_feature (1)..( 6): Result.003 file - promoters60/4773112
tggtta

SEQ ID NO: 142644 - DNA, 6 bp, Unknown
  misc_feature (1)..( 6): Result.003 file - promoters60/4773112
tggtta

SEQ ID NO: 142645 - DNA, 6 bp, Unknown
  misc_feature (1)..( 6): Result.003 file - promoters60/4773112
ttcggt

SEQ ID NO: 142646 - DNA, 6 bp, Unknown
  misc_feature (1)..( 6): Result.003 file - promoters60/4773112
ttcggt

SEQ ID NO: 142647 - DNA, 7 bp, Unknown
  misc_feature (1)..( 7): Result.003 file - promoters60/4773112
ggtttag

SEQ ID NO: 142648 - DNA, 7 bp, Unknown
  misc_feature (1)..( 7): Result.003 file - promoters60/4773112
ggtttag

SEQ ID NO: 142649 - DNA, 7 bp, Unknown
  misc_feature (1)..( 7): Result.003 file - promoters60/4773124
atatatt

SEQ ID NO: 142650 - DNA, 7 bp, Unknown
  misc_feature (1)..( 7): Result.003 file - promoters60/4773124
atatatt

SEQ ID NO: 142651 - DNA, 6 bp, Unknown
  misc_feature (1)..( 6): Result.003 file - promoters60/4773124
acaaat

SEQ ID NO: 142652 - DNA, 6 bp, Unknown
  misc_feature (1)..( 6): Result.003 file - promoters60/4773124
acaaat

SEQ ID NO: 142653 - DNA, 6 bp, Unknown
  misc_feature (1)..( 6): Result.003 file - promoters60/4773124
ttctaa

SEQ ID NO: 142654 - DNA, 6 bp, Unknown
  misc_feature (1)..( 6): Result.003 file - promoters60/4773124
ttctaa

SEQ ID NO: 142655 - DNA, 9 bp, Unknown
  misc_feature (1)..( 9): Result.003 file - promoters60/4773124
taagtaaaa

SEQ ID NO: 142656 - DNA, 9 bp, Unknown
  misc_feature (1)..( 9): Result.003 file - promoters60/4773124
taactaaaa

SEQ ID NO: 142657 - DNA, 7 bp, Unknown
  misc_feature (1)..( 7): Result.003 file - promoters60/4773124
taaaaac

SEQ ID NO: 142658 - DNA, 7 bp, Unknown
  misc_feature (1)..( 7): Result.003 file - promoters60/4773124
taataac

SEQ ID NO: 142659 - DNA, 6 bp, Unknown
  misc_feature (1)..( 6): Result.003 file - promoters60/4773124
aagaaa

SEQ ID NO: 142660 - DNA, 6 bp, Unknown
  misc_feature (1)..( 6): Result.003 file - promoters60/4773124
aagaaa

SEQ ID NO: 142661 - DNA, 7 bp, Unknown
  misc_feature (1)..( 7): Result.003 file - promoters60/4773124
taattag

SEQ ID NO: 142662 - DNA, 7 bp, Unknown
  misc_feature (1)..( 7): Result.003 file - promoters60/4773124
taattag

SEQ ID NO: 142663 - DNA, 8 bp, Unknown
  misc_feature (1)..( 8): Result.003 file - promoters60/4773124
tgtttttg

SEQ ID NO: 142664 - DNA, 8 bp, Unknown
  misc_feature (1)..( 8): Result.003 file - promoters60/4773124
tgttgttg

SEQ ID NO: 142665 - DNA, 6 bp, Unknown
  misc_feature (1)..( 6): Result.003 file - promoters60/4773124
ttttct

SEQ ID NO: 142666 - DNA, 6 bp, Unknown
  misc_feature (1)..( 6): Result.003 file - promoters60/4773124
ttttct

SEQ ID NO: 142667 - DNA, 8 bp, Unknown
  misc_feature (1)..( 8): Result.003 file - promoters60/4773124
tttgattc

SEQ ID NO: 142668 - DNA, 8 bp, Unknown
  misc_feature (1)..( 8): Result.003 file - promoters60/4773124
tttgtttc

SEQ ID NO: 142669 - DNA, 7 bp, Unknown
  misc_feature (1)..( 7): Result.003 file - promoters60/4773124
gaattct

SEQ ID NO: 142670 - DNA, 7 bp, Unknown
  misc_feature (1)..( 7): Result.003 file - promoters60/4773124
gaattct

SEQ ID NO: 142671 - DNA, 6 bp, Unknown
  misc_feature (1)..( 6): Result.003 file - promoters60/4773124
tctctt

SEQ ID NO: 142672 - DNA, 6 bp, Unknown
  misc_feature (1)..( 6): Result.003 file - promoters60/4773124
tctctt

SEQ ID NO: 142673 - DNA, 8 bp, Unknown
  misc_feature (1)..( 8): Result.003 file - promoters60/4773124
tgatcttt

SEQ ID NO: 142674 - DNA, 8 bp, Unknown
  misc_feature (1)..( 8): Result.003 file - promoters60/4773124
tgattttt

SEQ ID NO: 142675 - DNA, 6 bp, Unknown
  misc_feature (1)..( 6): Result.003 file - promoters60/4773124
aatctc

SEQ ID NO: 142676 - DNA, 6 bp, Unknown
  misc_feature (1)..( 6): Result.003 file - promoters60/4773124
aatctc

SEQ ID NO: 142677 - DNA, 7 bp, Unknown
  misc_feature (1)..( 7): Result.003 file - promoters60/4773124
ttaactc

SEQ ID NO: 142678 - DNA, 7 bp, Unknown
  misc_feature (1)..( 7): Result.003 file - promoters60/4773124
ttatctc

SEQ ID NO: 142679 - DNA, 6 bp, Unknown
  misc_feature (1)..( 6): Result.003 file - promoters60/4773124
ttcata

SEQ ID NO: 142680 - DNA, 6 bp, Unknown
  misc_feature (1)..( 6): Result.003 file - promoters60/4773124
ttcata

SEQ ID NO: 142681 - DNA, 8 bp, Unknown
  misc_feature (1)..( 8): Result.003 file - promoters60/4773127
caatttgt

SEQ ID NO: 142682 - DNA, 8 bp, Unknown
  misc_feature (1)..( 8): Result.003 file - promoters60/4773127
caatgtgt

SEQ ID NO: 142683 - DNA, 10 bp, Unknown
  misc_feature (1)..( 10): Result.003 file - promoters60/4773127
atatcatttt

SEQ ID NO: 142684 - DNA, 10 bp, Unknown
  misc_feature (1)..( 10): Result.003 file - promoters60/4773127
atataatttt

SEQ ID NO: 142685 - DNA, 10 bp, Unknown
  misc_feature (1)..( 10): Result.003 file - promoters60/4773127
taattatagt

SEQ ID NO: 142686 - DNA, 8 bp, Unknown
  misc_feature (1)..( 8): Result.003 file - promoters60/4773127
aaaccaaa

SEQ ID NO: 142687 - DNA, 8 bp, Unknown
  misc_feature (1)..( 8): Result.003 file - promoters60/4773127
aaatcaaa

SEQ ID NO: 142688 - DNA, 7 bp, Unknown
  misc_feature (1)..( 7): Result.003 file - promoters60/4773127
tcgtcaa

SEQ ID NO: 142689 - DNA, 7 bp, Unknown
  misc_feature (1)..( 7): Result.003 file - promoters60/4773127
tcgtcaa

SEQ ID NO: 142690 - DNA, 7 bp, Unknown
  misc_feature (1)..( 7): Result.003 file - promoters60/4773127
aaagaaa

SEQ ID NO: 142691 - DNA, 7 bp, Unknown
  misc_feature (1)..( 7): Result.003 file - promoters60/4773127
aaacaaa

SEQ ID NO: 142692 - DNA, 8 bp, Unknown
  misc_feature (1)..( 8): Result.003 file - promoters60/4773127
taaatata

SEQ ID NO: 142693 - DNA, 8 bp, Unknown
  misc_feature (1)..( 8): Result.003 file - promoters60/4773127
taattata

SEQ ID NO: 142694 - DNA, 8 bp, Unknown
  misc_feature (1)..( 8): Result.003 file - promoters60/4773127
taatctta

SEQ ID NO: 142695 - DNA, 8 bp, Unknown
  misc_feature (1)..( 8): Result.003 file - promoters60/4773127
taatatta

SEQ ID NO: 142696 - DNA, 6 bp, Unknown
  misc_feature (1)..( 6): Result.003 file - promoters60/4773127
tttaaa

SEQ ID NO: 142697 - DNA, 6 bp, Unknown
  misc_feature (1)..( 6): Result.003 file - promoters60/4773127
tttaaa

SEQ ID NO: 142698 - DNA, 10 bp, Unknown
  misc_feature (1)..( 10): Result.003 file - promoters60/4773127
ttaaaaattc

SEQ ID NO: 142699 - DNA, 10 bp, Unknown
  misc_feature (1)..( 10): Result.003 file - promoters60/4773127
ttaataattc

SEQ ID NO: 142700 - DNA, 7 bp, Unknown
  misc_feature (1)..( 7): Result.003 file - promoters60/4773127
gttggtt

SEQ ID NO: 142701 - DNA, 7 bp, Unknown
  misc_feature (1)..( 7): Result.003 file - promoters60/4773127
gttggtt

SEQ ID NO: 142702 - DNA, 7 bp, Unknown
  misc_feature (1)..( 7): Result.003 file - promoters60/4773127
aaccgaa

SEQ ID NO: 142703 - DNA, 7 bp, Unknown
  misc_feature (1)..( 7): Result.003 file - promoters60/4773127
aactgaa

SEQ ID NO: 142704 - DNA, 11 bp, Unknown
  misc_feature (1)..( 11): Result.003 file - promoters60/4773127
aatccaaacac

SEQ ID NO: 142705 - DNA, 11 bp, Unknown
  misc_feature (1)..( 11): Result.003 file - promoters60/4773127
aatccaatcac

SEQ ID NO: 142706 - DNA, 9 bp, Unknown
  misc_feature (1)..( 9): Result.003 file - promoters60/4773127
tgttgcata

SEQ ID NO: 142707 - DNA, 9 bp, Unknown
  misc_feature (1)..( 9): Result.003 file - promoters60/4773127
tgtcgcata

SEQ ID NO: 142708 - DNA, 7 bp, Unknown
  misc_feature (1)..( 7): Result.003 file - promoters60/4773127
ttttttg

SEQ ID NO: 142709 - DNA, 7 bp, Unknown
  misc_feature (1)..( 7): Result.003 file - promoters60/4773127
tttattg

SEQ ID NO: 142710 - DNA, 7 bp, Unknown
  misc_feature (1)..( 7): Result.003 file - promoters60/4773134
aattttt

SEQ ID NO: 142711 - DNA, 7 bp, Unknown
  misc_feature (1)..( 7): Result.003 file - promoters60/4773134
tattttt

SEQ ID NO: 142712 - DNA, 8 bp, Unknown
  misc_feature (1)..( 8): Result.003 file - promoters60/4773134
tattgttt

SEQ ID NO: 142713 - DNA, 8 bp, Unknown
  misc_feature (1)..( 8): Result.003 file - promoters60/4773134
tgttttgg

SEQ ID NO: 142714 - DNA, 8 bp, Unknown
  misc_feature (1)..( 8): Result.003 file - promoters60/4773134
aattttgg

SEQ ID NO: 142715 - DNA, 8 bp, Unknown
  misc_feature (1)..( 8): Result.003 file - promoters60/4773134
aatattga

SEQ ID NO: 142716 - DNA, 8 bp, Unknown
  misc_feature (1)..( 8): Result.003 file - promoters60/4773134
attacaca

SEQ ID NO: 142717 - DNA, 8 bp, Unknown
  misc_feature (1)..( 8): Result.003 file - promoters60/4773134
attacaat

SEQ ID NO: 142718 - DNA, 8 bp, Unknown
  misc_feature (1)..( 8): Result.003 file - promoters60/4773134
cttaaaca

SEQ ID NO: 142719 - DNA, 14 bp, Unknown
  misc_feature (1)..( 14): Result.003 file - promoters60/4773134
atttgatagtgatt

SEQ ID NO: 142720 - DNA, 14 bp, Unknown
  misc_feature (1)..( 14): Result.003 file - promoters60/4773134
atttaatagtcatt

SEQ ID NO: 142721 - DNA, 14 bp, Unknown
  misc_feature (1)..( 14): Result.003 file - promoters60/4773134
tactaatactcaaa

SEQ ID NO: 142722 - DNA, 9 bp, Unknown
  misc_feature (1)..( 9): Result.003 file - promoters60/4773134
tatatgatt

SEQ ID NO: 142723 - DNA, 9 bp, Unknown
  misc_feature (1)..( 9): Result.003 file - promoters60/4773134
tatttgatt

SEQ ID NO: 142724 - DNA, 9 bp, Unknown
  misc_feature (1)..( 9): Result.003 file - promoters60/4773134
tatttttgt

SEQ ID NO: 142725 - DNA, 9 bp, Unknown
  misc_feature (1)..( 9): Result.003 file - promoters60/4773182
aattcatta

SEQ ID NO: 142726 - DNA, 9 bp, Unknown
  misc_feature (1)..( 9): Result.003 file - promoters60/4773182
tcttcattt

SEQ ID NO: 142727 - DNA, 10 bp, Unknown
  misc_feature (1)..( 10): Result.003 file - promoters60/4773182
aattcaatta

SEQ ID NO: 142728 - DNA, 10 bp, Unknown
  misc_feature (1)..( 10): Result.003 file - promoters60/4773182
tcttcattgt

SEQ ID NO: 142729 - DNA, 11 bp, Unknown
  misc_feature (1)..( 11): Result.003 file - promoters60/4773185
aaataataaat

SEQ ID NO: 142730 - DNA, 11 bp, Unknown
  misc_feature (1)..( 11): Result.003 file - promoters60/4773185
taattatatac

SEQ ID NO: 142731 - DNA, 11 bp, Unknown
  misc_feature (1)..( 11): Result.003 file - promoters60/4773185
ttataatataa

SEQ ID NO: 142732 - DNA, 11 bp, Unknown
  misc_feature (1)..( 11): Result.003 file - promoters60/4773185
ttttaacaaat

SEQ ID NO: 142733 - DNA, 11 bp, Unknown
  misc_feature (1)..( 11): Result.003 file - promoters60/4773185
aaatagtaaaa

SEQ ID NO: 142734 - DNA, 11 bp, Unknown
  misc_feature (1)..( 11): Result.003 file - promoters60/4773185
atatatttaat

SEQ ID NO: 142735 - DNA, 11 bp, Unknown
  misc_feature (1)..( 11): Result.003 file - promoters60/4773185
agatagtacta

SEQ ID NO: 142736 - DNA, 12 bp, Unknown
  misc_feature (1)..( 12): Result.003 file - promoters60/4773185
aaataataaata

SEQ ID NO: 142737 - DNA, 12 bp, Unknown
  misc_feature (1)..( 12): Result.003 file - promoters60/4773185
attaaataaatg

SEQ ID NO: 142738 - DNA, 12 bp, Unknown
  misc_feature (1)..( 12): Result.003 file - promoters60/4773185
ataatataaata

SEQ ID NO: 142739 - DNA, 12 bp, Unknown
  misc_feature (1)..( 12): Result.003 file - promoters60/4773185
ttttaacaaatt

SEQ ID NO: 142740 - DNA, 12 bp, Unknown
  misc_feature (1)..( 12): Result.003 file - promoters60/4773185
aaatagtaaaaa

SEQ ID NO: 142741 - DNA, 12 bp, Unknown
  misc_feature (1)..( 12): Result.003 file - promoters60/4773185
agatagtactat

SEQ ID NO: 142742 - DNA, 11 bp, Unknown
  misc_feature (1)..( 11): Result.003 file - promoters60/4773185
tgataaaacaa

SEQ ID NO: 142743 - DNA, 11 bp, Unknown
  misc_feature (1)..( 11): Result.003 file - promoters60/4773185
acataaaaatt

SEQ ID NO: 142744 - DNA, 11 bp, Unknown
  misc_feature (1)..( 11): Result.003 file - promoters60/4773185
atataaaggat

SEQ ID NO: 142745 - DNA, 11 bp, Unknown
  misc_feature (1)..( 11): Result.003 file - promoters60/4773185
ttataaattag

SEQ ID NO: 142746 - DNA, 11 bp, Unknown
  misc_feature (1)..( 11): Result.003 file - promoters60/4773185
aaatacattag

SEQ ID NO: 142747 - DNA, 8 bp, Unknown
  misc_feature (1)..( 8): Result.003 file - promoters60/4773185
aaaacaat

SEQ ID NO: 142748 - DNA, 8 bp, Unknown
  misc_feature (1)..( 8): Result.003 file - promoters60/4773185
aaaacaat

SEQ ID NO: 142749 - DNA, 8 bp, Unknown
  misc_feature (1)..( 8): Result.003 file - promoters60/4773185
aaaagaat

SEQ ID NO: 142750 - DNA, 8 bp, Unknown
  misc_feature (1)..( 8): Result.003 file - promoters60/4773185
aaaaaaat

SEQ ID NO: 142751 - DNA, 8 bp, Unknown
  misc_feature (1)..( 8): Result.003 file - promoters60/4773185
tgaagaat

SEQ ID NO: 142752 - DNA, 9 bp, Unknown
  misc_feature (1)..( 9): Result.003 file - promoters60/4773185
agatcttaa

SEQ ID NO: 142753 - DNA, 9 bp, Unknown
  misc_feature (1)..( 9): Result.003 file - promoters60/4773185
taatcttac

SEQ ID NO: 142754 - DNA, 9 bp, Unknown
  misc_feature (1)..( 9): Result.003 file - promoters60/4773185
agatattat

SEQ ID NO: 142755 - DNA, 9 bp, Unknown
  misc_feature (1)..( 9): Result.003 file - promoters60/4773185
tcatattac

SEQ ID NO: 142756 - DNA, 9 bp, Unknown
  misc_feature (1)..( 9): Result.003 file - promoters60/4773185
gaatagtat

SEQ ID NO: 142757 - DNA, 6 bp, Unknown
  misc_feature (1)..( 6): Result.003 file - promoters60/4773187
ttttta

SEQ ID NO: 142758 - DNA, 6 bp, Unknown
  misc_feature (1)..( 6): Result.003 file - promoters60/4773187
ttttta

SEQ ID NO: 142759 - DNA, 8 bp, Unknown
  misc_feature (1)..( 8): Result.003 file - promoters60/4773187
cttttgtt

SEQ ID NO: 142760 - DNA, 8 bp, Unknown
  misc_feature (1)..( 8): Result.003 file - promoters60/4773187
cttatgtt

SEQ ID NO: 142761 - DNA, 13 bp, Unknown
  misc_feature (1)..( 13): Result.003 file - promoters60/4773187
atatatttttttt

SEQ ID NO: 142762 - DNA, 13 bp, Unknown
  misc_feature (1)..( 13): Result.003 file - promoters60/4773187
atatgttttattt

SEQ ID NO: 142763 - DNA, 8 bp, Unknown
  misc_feature (1)..( 8): Result.003 file - promoters60/4773187
gtatataa

SEQ ID NO: 142764 - DNA, 8 bp, Unknown
  misc_feature (1)..( 8): Result.003 file - promoters60/4773187
gtatgtaa

SEQ ID NO: 142765 - DNA, 6 bp, Unknown
  misc_feature (1)..( 6): Result.003 file - promoters60/4773187
aattta

SEQ ID NO: 142766 - DNA, 6 bp, Unknown
  misc_feature (1)..( 6): Result.003 file - promoters60/4773187
aattta

SEQ ID NO: 142767 - DNA, 7 bp, Unknown
  misc_feature (1)..( 7): Result.003 file - promoters60/4773187
taaaata

SEQ ID NO: 142768 - DNA, 7 bp, Unknown
  misc_feature (1)..( 7): Result.003 file - promoters60/4773187
taaaata

SEQ ID NO: 142769 - DNA, 6 bp, Unknown
  misc_feature (1)..( 6): Result.003 file - promoters60/4773187
aaaaaa

SEQ ID NO: 142770 - DNA, 6 bp, Unknown
  misc_feature (1)..( 6): Result.003 file - promoters60/4773187
aaaaaa

SEQ ID NO: 142771 - DNA, 7 bp, Unknown
  misc_feature (1)..( 7): Result.003 file - promoters60/4773187
atataaa

SEQ ID NO: 142772 - DNA, 7 bp, Unknown
  misc_feature (1)..( 7): Result.003 file - promoters60/4773187
atacaaa

SEQ ID NO: 142773 - DNA, 6 bp, Unknown
  misc_feature (1)..( 6): Result.003 file - promoters60/4773187
atgtct

SEQ ID NO: 142774 - DNA, 6 bp, Unknown
  misc_feature (1)..( 6): Result.003 file - promoters60/4773187
atgtct

SEQ ID NO: 142775 - DNA, 7 bp, Unknown
  misc_feature (1)..( 7): Result.003 file - promoters60/4773187
ttggaga

SEQ ID NO: 142776 - DNA, 7 bp, Unknown
  misc_feature (1)..( 7): Result.003 file - promoters60/4773187
ttggaga

SEQ ID NO: 142777 - DNA, 6 bp, Unknown
  misc_feature (1)..( 6): Result.003 file - promoters60/4773187
gaagat

SEQ ID NO: 142778 - DNA, 6 bp, Unknown
  misc_feature (1)..( 6): Result.003 file - promoters60/4773187
gaagat

SEQ ID NO: 142779 - DNA, 6 bp, Unknown
  misc_feature (1)..( 6): Result.003 file - promoters60/4773187
gatcga

SEQ ID NO: 142780 - DNA, 6 bp, Unknown
  misc_feature (1)..( 6): Result.003 file - promoters60/4773187
gatcga

SEQ ID NO: 142781 - DNA, 6 bp, Unknown
  misc_feature (1)..( 6): Result.003 file - promoters60/4773187
aaatgc

SEQ ID NO: 142782 - DNA, 6 bp, Unknown
  misc_feature (1)..( 6): Result.003 file - promoters60/4773187
aaatgc

SEQ ID NO: 142783 - DNA, 8 bp, Unknown
  misc_feature (1)..( 8): Result.003 file - promoters60/4773187
ggatttgt

SEQ ID NO: 142784 - DNA, 8 bp, Unknown
  misc_feature (1)..( 8): Result.003 file - promoters60/4773187
ggacttgt

SEQ ID NO: 142785 - DNA, 7 bp, Unknown
  misc_feature (1)..( 7): Result.003 file - promoters60/4773205
tcataaa

SEQ ID NO: 142786 - DNA, 7 bp, Unknown
  misc_feature (1)..( 7): Result.003 file - promoters60/4773205
tcataaa

SEQ ID NO: 142787 - DNA, 7 bp, Unknown
  misc_feature (1)..( 7): Result.003 file - promoters60/4773205
ataatta

SEQ ID NO: 142788 - DNA, 7 bp, Unknown
  misc_feature (1)..( 7): Result.003 file - promoters60/4773205
atattta

SEQ ID NO: 142789 - DNA, 7 bp, Unknown
  misc_feature (1)..( 7): Result.003 file - promoters60/4773205
tttaaaa

SEQ ID NO: 142790 - DNA, 7 bp, Unknown
  misc_feature (1)..( 7): Result.003 file - promoters60/4773205
tttcaaa

SEQ ID NO: 142791 - DNA, 6 bp, Unknown
  misc_feature (1)..( 6): Result.003 file - promoters60/4773205
atttac

SEQ ID NO: 142792 - DNA, 6 bp, Unknown
  misc_feature (1)..( 6): Result.003 file - promoters60/4773205
atttac

SEQ ID NO: 142793 - DNA, 6 bp, Unknown
  misc_feature (1)..( 6): Result.003 file - promoters60/4773205
ataaaa

SEQ ID NO: 142794 - DNA, 6 bp, Unknown
  misc_feature (1)..( 6): Result.003 file - promoters60/4773205
ataaaa

SEQ ID NO: 142795 - DNA, 10 bp, Unknown
  misc_feature (1)..( 10): Result.003 file - promoters60/4773205
aaaacaattt

SEQ ID NO: 142796 - DNA, 10 bp, Unknown
  misc_feature (1)..( 10): Result.003 file - promoters60/4773205
aaaacagttt

SEQ ID NO: 142797 - DNA, 7 bp, Unknown
  misc_feature (1)..( 7): Result.003 file - promoters60/4773205
aaacgaa

SEQ ID NO: 142798 - DNA, 7 bp, Unknown
  misc_feature (1)..( 7): Result.003 file - promoters60/4773205
aaaagaa

SEQ ID NO: 142799 - DNA, 8 bp, Unknown
  misc_feature (1)..( 8): Result.003 file - promoters60/4773205
tgaaacag

SEQ ID NO: 142800 - DNA, 8 bp, Unknown
  misc_feature (1)..( 8): Result.003 file - promoters60/4773205
tgacacag

SEQ ID NO: 142801 - DNA, 7 bp, Unknown
  misc_feature (1)..( 7): Result.003 file - promoters60/4773205
gatcact

SEQ ID NO: 142802 - DNA, 7 bp, Unknown
  misc_feature (1)..( 7): Result.003 file - promoters60/4773205
gatgact

SEQ ID NO: 142803 - DNA, 6 bp, Unknown
  misc_feature (1)..( 6): Result.003 file - promoters60/4773205
ttttat

SEQ ID NO: 142804 - DNA, 6 bp, Unknown
  misc_feature (1)..( 6): Result.003 file - promoters60/4773205
ttttat

SEQ ID NO: 142805 - DNA, 7 bp, Unknown
  misc_feature (1)..( 7): Result.003 file - promoters60/4773205
tattata

SEQ ID NO: 142806 - DNA, 7 bp, Unknown
  misc_feature (1)..( 7): Result.003 file - promoters60/4773205
tatgata

SEQ ID NO: 142807 - DNA, 6 bp, Unknown
  misc_feature (1)..( 6): Result.003 file - promoters60/4773205
atggtt

SEQ ID NO: 142808 - DNA, 6 bp, Unknown
  misc_feature (1)..( 6): Result.003 file - promoters60/4773205
atggtt

SEQ ID NO: 142809 - DNA, 6 bp, Unknown
  misc_feature (1)..( 6): Result.003 file - promoters60/4773205
gagttc

SEQ ID NO: 142810 - DNA, 6 bp, Unknown
  misc_feature (1)..( 6): Result.003 file - promoters60/4773205
gagttc

SEQ ID NO: 142811 - DNA, 6 bp, Unknown
  misc_feature (1)..( 6): Result.003 file - promoters60/4773205
taaaaa

SEQ ID NO: 142812 - DNA, 6 bp, Unknown
  misc_feature (1)..( 6): Result.003 file - promoters60/4773205
taaaaa

SEQ ID NO: 142813 - DNA, 6 bp, Unknown
  misc_feature (1)..( 6): Result.003 file - promoters60/4773205
cccaaa

SEQ ID NO: 142814 - DNA, 6 bp, Unknown
  misc_feature (1)..( 6): Result.003 file - promoters60/4773205
cccaaa

SEQ ID NO: 142815 - DNA, 6 bp, Unknown
  misc_feature (1)..( 6): Result.003 file - promoters60/4773205
tttatt

SEQ ID NO: 142816 - DNA, 6 bp, Unknown
  misc_feature (1)..( 6): Result.003 file - promoters60/4773205
tttatt

SEQ ID NO: 142817 - DNA, 12 bp, Unknown
  misc_feature (1)..( 12): Result.003 file - promoters60/4773205
aataatgatgat

SEQ ID NO: 142818 - DNA, 12 bp, Unknown
  misc_feature (1)..( 12): Result.003 file - promoters60/4773205
aatgatgatgat

SEQ ID NO: 142819 - DNA, 6 bp, Unknown
  misc_feature (1)..( 6): Result.003 file - promoters60/4773205
ttgttg

SEQ ID NO: 142820 - DNA, 6 bp, Unknown
  misc_feature (1)..( 6): Result.003 file - promoters60/4773205
ttgttg

SEQ ID NO: 142821 - DNA, 6 bp, Unknown
  misc_feature (1)..( 6): Result.003 file - promoters60/4773223
tgcaag

SEQ ID NO: 142822 - DNA, 6 bp, Unknown
  misc_feature (1)..( 6): Result.003 file - promoters60/4773223
tgcaag

SEQ ID NO: 142823 - DNA, 8 bp, Unknown
  misc_feature (1)..( 8): Result.003 file - promoters60/4773223
ttggtact

SEQ ID NO: 142824 - DNA, 8 bp, Unknown
  misc_feature (1)..( 8): Result.003 file - promoters60/4773223
ttggcact

SEQ ID NO: 142825 - DNA, 9 bp, Unknown
  misc_feature (1)..( 9): Result.003 file - promoters60/4773223
tttgatttt

SEQ ID NO: 142826 - DNA, 9 bp, Unknown
  misc_feature (1)..( 9): Result.003 file - promoters60/4773223
tttggtttt

SEQ ID NO: 142827 - DNA, 9 bp, Unknown
  misc_feature (1)..( 9): Result.003 file - promoters60/4773223
tttttattt

SEQ ID NO: 142828 - DNA, 9 bp, Unknown
  misc_feature (1)..( 9): Result.003 file - promoters60/4773223
atttgattt

SEQ ID NO: 142829 - DNA, 9 bp, Unknown
  misc_feature (1)..( 9): Result.003 file - promoters60/4773223
atttaattt

SEQ ID NO: 142830 - DNA, 7 bp, Unknown
  misc_feature (1)..( 7): Result.003 file - promoters60/4773223
tcatttt

SEQ ID NO: 142831 - DNA, 7 bp, Unknown
  misc_feature (1)..( 7): Result.003 file - promoters60/4773223
tcagttt

SEQ ID NO: 142832 - DNA, 8 bp, Unknown
  misc_feature (1)..( 8): Result.003 file - promoters60/4773223
taaagtga

SEQ ID NO: 142833 - DNA, 8 bp, Unknown
  misc_feature (1)..( 8): Result.003 file - promoters60/4773223
taatgtga

SEQ ID NO: 142834 - DNA, 7 bp, Unknown
  misc_feature (1)..( 7): Result.003 file - promoters60/4773223
atatttg

SEQ ID NO: 142835 - DNA, 7 bp, Unknown
  misc_feature (1)..( 7): Result.003 file - promoters60/4773223
ataattg

SEQ ID NO: 142836 - DNA, 6 bp, Unknown
  misc_feature (1)..( 6): Result.003 file - promoters60/4773223
tatagg

SEQ ID NO: 142837 - DNA, 6 bp, Unknown
  misc_feature (1)..( 6): Result.003 file - promoters60/4773223
tatagg

SEQ ID NO: 142838 - DNA, 8 bp, Unknown
  misc_feature (1)..( 8): Result.003 file - promoters60/4773223
gccctgaa

SEQ ID NO: 142839 - DNA, 8 bp, Unknown
  misc_feature (1)..( 8): Result.003 file - promoters60/4773223
gccatgaa

SEQ ID NO: 142840 - DNA, 8 bp, Unknown
  misc_feature (1)..( 8): Result.003 file - promoters60/4773223
ctgcgatt

SEQ ID NO: 142841 - DNA, 8 bp, Unknown
  misc_feature (1)..( 8): Result.003 file - promoters60/4773223
ctgctatt

SEQ ID NO: 142842 - DNA, 7 bp, Unknown
  misc_feature (1)..( 7): Result.003 file - promoters60/4773223
gatccag

SEQ ID NO: 142843 - DNA, 7 bp, Unknown
  misc_feature (1)..( 7): Result.003 file - promoters60/4773223
gatacag

SEQ ID NO: 142844 - DNA, 6 bp, Unknown
  misc_feature (1)..( 6): Result.003 file - promoters60/4773223
attcca

SEQ ID NO: 142845 - DNA, 6 bp, Unknown
  misc_feature (1)..( 6): Result.003 file - promoters60/4773223
attcca

SEQ ID NO: 142846 - DNA, 7 bp, Unknown
  misc_feature (1)..( 7): Result.003 file - promoters60/4773223
aaacctg

SEQ ID NO: 142847 - DNA, 7 bp, Unknown
  misc_feature (1)..( 7): Result.003 file - promoters60/4773223
aaagctg

SEQ ID NO: 142848 - DNA, 6 bp, Unknown
  misc_feature (1)..( 6): Result.003 file - promoters60/4773223
tttgac

SEQ ID NO: 142849 - DNA, 6 bp, Unknown
  misc_feature (1)..( 6): Result.003 file - promoters60/4773223
tttgac

SEQ ID NO: 142850 - DNA, 6 bp, Unknown
  misc_feature (1)..( 6): Result.003 file - promoters60/4773223
acggta

SEQ ID NO: 142851 - DNA, 6 bp, Unknown
  misc_feature (1)..( 6): Result.003 file - promoters60/4773223
acggta

SEQ ID NO: 142852 - DNA, 7 bp, Unknown
  misc_feature (1)..( 7): Result.003 file - promoters60/4773223
tcacgtt

SEQ ID NO: 142853 - DNA, 7 bp, Unknown
  misc_feature (1)..( 7): Result.003 file - promoters60/4773223
tcaagtt

SEQ ID NO: 142854 - DNA, 9 bp, Unknown
  misc_feature (1)..( 9): Result.003 file - promoters60/4773225
atttagaca

SEQ ID NO: 142855 - DNA, 9 bp, Unknown
  misc_feature (1)..( 9): Result.003 file - promoters60/4773225
atttagctt

SEQ ID NO: 142856 - DNA, 9 bp, Unknown
  misc_feature (1)..( 9): Result.003 file - promoters60/4773225
ttttatctt

SEQ ID NO: 142857 - DNA, 6 bp, Unknown
  misc_feature (1)..( 6): Result.003 file - promoters60/4773225
ttaaaa

SEQ ID NO: 142858 - DNA, 6 bp, Unknown
  misc_feature (1)..( 6): Result.003 file - promoters60/4773225
ttaaaa

SEQ ID NO: 142859 - DNA, 7 bp, Unknown
  misc_feature (1)..( 7): Result.003 file - promoters60/4773225
taaaata

SEQ ID NO: 142860 - DNA, 7 bp, Unknown
  misc_feature (1)..( 7): Result.003 file - promoters60/4773225
taaaata

SEQ ID NO: 142861 - DNA, 7 bp, Unknown
  misc_feature (1)..( 7): Result.003 file - promoters60/4773225
ctgaaaa

SEQ ID NO: 142862 - DNA, 7 bp, Unknown
  misc_feature (1)..( 7): Result.003 file - promoters60/4773225
atgaaaa

SEQ ID NO: 142863 - DNA, 7 bp, Unknown
  misc_feature (1)..( 7): Result.003 file - promoters60/4773225
ctgaaag

SEQ ID NO: 142864 - DNA, 6 bp, Unknown
  misc_feature (1)..( 6): Result.003 file - promoters60/4773225
tccaaa

SEQ ID NO: 142865 - DNA, 6 bp, Unknown
  misc_feature (1)..( 6): Result.003 file - promoters60/4773225
tccaaa

SEQ ID NO: 142866 - DNA, 9 bp, Unknown
  misc_feature (1)..( 9): Result.003 file - promoters60/4773225
aaacaataa

SEQ ID NO: 142867 - DNA, 9 bp, Unknown
  misc_feature (1)..( 9): Result.003 file - promoters60/4773225
aaaaaataa

SEQ ID NO: 142868 - DNA, 9 bp, Unknown
  misc_feature (1)..( 9): Result.003 file - promoters60/4773225
aaagaatat

SEQ ID NO: 142869 - DNA, 7 bp, Unknown
  misc_feature (1)..( 7): Result.003 file - promoters60/4773225
cgaaaaa

SEQ ID NO: 142870 - DNA, 7 bp, Unknown
  misc_feature (1)..( 7): Result.003 file - promoters60/4773225
cgaaaaa

SEQ ID NO: 142871 - DNA, 8 bp, Unknown
  misc_feature (1)..( 8): Result.003 file - promoters60/4773225
cgaggtca

SEQ ID NO: 142872 - DNA, 8 bp, Unknown
  misc_feature (1)..( 8): Result.003 file - promoters60/4773225
cgatgtca

SEQ ID NO: 142873 - DNA, 7 bp, Unknown
  misc_feature (1)..( 7): Result.003 file - promoters60/4773225
attagca

SEQ ID NO: 142874 - DNA, 7 bp, Unknown
  misc_feature (1)..( 7): Result.003 file - promoters60/4773225
attggca

SEQ ID NO: 142875 - DNA, 8 bp, Unknown
  misc_feature (1)..( 8): Result.003 file - promoters60/4773225
ataattat

SEQ ID NO: 142876 - DNA, 8 bp, Unknown
  misc_feature (1)..( 8): Result.003 file - promoters60/4773225
ataattat

SEQ ID NO: 142877 - DNA, 6 bp, Unknown
  misc_feature (1)..( 6): Result.003 file - promoters60/4773225
gaatta

SEQ ID NO: 142878 - DNA, 6 bp, Unknown
  misc_feature (1)..( 6): Result.003 file - promoters60/4773225
gaatta

SEQ ID NO: 142879 - DNA, 6 bp, Unknown
  misc_feature (1)..( 6): Result.003 file - promoters60/4773225
gcggaa

SEQ ID NO: 142880 - DNA, 6 bp, Unknown
  misc_feature (1)..( 6): Result.003 file - promoters60/4773225
gcggaa

SEQ ID NO: 142881 - DNA, 7 bp, Unknown
  misc_feature (1)..( 7): Result.003 file - promoters60/4773225
tattttc

SEQ ID NO: 142882 - DNA, 7 bp, Unknown
  misc_feature (1)..( 7): Result.003 file - promoters60/4773225
tatcttc

SEQ ID NO: 142883 - DNA, 6 bp, Unknown
  misc_feature (1)..( 6): Result.003 file - promoters60/4773225
tccttg

SEQ ID NO: 142884 - DNA, 6 bp, Unknown
  misc_feature (1)..( 6): Result.003 file - promoters60/4773225
tccttg

SEQ ID NO: 142885 - DNA, 7 bp, Unknown
  misc_feature (1)..( 7): Result.003 file - promoters60/4773225
gatatat

SEQ ID NO: 142886 - DNA, 7 bp, Unknown
  misc_feature (1)..( 7): Result.003 file - promoters60/4773225
gatgtat

SEQ ID NO: 142887 - DNA, 6 bp, Unknown
  misc_feature (1)..( 6): Result.003 file - promoters60/4773229
caagac

SEQ ID NO: 142888 - DNA, 6 bp, Unknown
  misc_feature (1)..( 6): Result.003 file - promoters60/4773229
caagac

SEQ ID NO: 142889 - DNA, 8 bp, Unknown
  misc_feature (1)..( 8): Result.003 file - promoters60/4773229
tggcaaga

SEQ ID NO: 142890 - DNA, 8 bp, Unknown
  misc_feature (1)..( 8): Result.003 file - promoters60/4773229
tggaaaga

SEQ ID NO: 142891 - DNA, 6 bp, Unknown
  misc_feature (1)..( 6): Result.003 file - promoters60/4773229
tattga

SEQ ID NO: 142892 - DNA, 6 bp, Unknown
  misc_feature (1)..( 6): Result.003 file - promoters60/4773229
tattga

SEQ ID NO: 142893 - DNA, 8 bp, Unknown
  misc_feature (1)..( 8): Result.003 file - promoters60/4773229
aggacaag

SEQ ID NO: 142894 - DNA, 8 bp, Unknown
  misc_feature (1)..( 8): Result.003 file - promoters60/4773229
aggaaaag

SEQ ID NO: 142895 - DNA, 6 bp, Unknown
  misc_feature (1)..( 6): Result.003 file - promoters60/4773229
aagcag

SEQ ID NO: 142896 - DNA, 6 bp, Unknown
  misc_feature (1)..( 6): Result.003 file - promoters60/4773229
aagcag

SEQ ID NO: 142897 - DNA, 6 bp, Unknown
  misc_feature (1)..( 6): Result.003 file - promoters60/4773229
gagtcg

SEQ ID NO: 142898 - DNA, 6 bp, Unknown
  misc_feature (1)..( 6): Result.003 file - promoters60/4773229
gagtcg

SEQ ID NO: 142899 - DNA, 8 bp, Unknown
  misc_feature (1)..( 8): Result.003 file - promoters60/4773229
ttgtcaag

SEQ ID NO: 142900 - DNA, 8 bp, Unknown
  misc_feature (1)..( 8): Result.003 file - promoters60/4773229
ttgttaag

SEQ ID NO: 142901 - DNA, 7 bp, Unknown
  misc_feature (1)..( 7): Result.003 file - promoters60/4773229
tgacact

SEQ ID NO: 142902 - DNA, 7 bp, Unknown
  misc_feature (1)..( 7): Result.003 file - promoters60/4773229
tgatact

SEQ ID NO: 142903 - DNA, 6 bp, Unknown
  misc_feature (1)..( 6): Result.003 file - promoters60/4773229
gatcca

SEQ ID NO: 142904 - DNA, 6 bp, Unknown
  misc_feature (1)..( 6): Result.003 file - promoters60/4773229
gatcca

SEQ ID NO: 142905 - DNA, 9 bp, Unknown
  misc_feature (1)..( 9): Result.003 file - promoters60/4773229
cttatcttt

SEQ ID NO: 142906 - DNA, 9 bp, Unknown
  misc_feature (1)..( 9): Result.003 file - promoters60/4773229
cttgtcttt

SEQ ID NO: 142907 - DNA, 6 bp, Unknown
  misc_feature (1)..( 6): Result.003 file - promoters60/4773229
aagaag

SEQ ID NO: 142908 - DNA, 6 bp, Unknown
  misc_feature (1)..( 6): Result.003 file - promoters60/4773229
aagaag

SEQ ID NO: 142909 - DNA, 9 bp, Unknown
  misc_feature (1)..( 9): Result.003 file - promoters60/4773229
agaaaaatc

SEQ ID NO: 142910 - DNA, 9 bp, Unknown
  misc_feature (1)..( 9): Result.003 file - promoters60/4773229
agaaaaatc

SEQ ID NO: 142911 - DNA, 9 bp, Unknown
  misc_feature (1)..( 9): Result.003 file - promoters60/4773229
atattatga

SEQ ID NO: 142912 - DNA, 9 bp, Unknown
  misc_feature (1)..( 9): Result.003 file - promoters60/4773229
atatgatga

SEQ ID NO: 142913 - DNA, 7 bp, Unknown
  misc_feature (1)..( 7): Result.003 file - promoters60/4773229
atctttt

SEQ ID NO: 142914 - DNA, 7 bp, Unknown
  misc_feature (1)..( 7): Result.003 file - promoters60/4773229
atcattt

SEQ ID NO: 142915 - DNA, 7 bp, Unknown
  misc_feature (1)..( 7): Result.003 file - promoters60/4773229
tttcctt

SEQ ID NO: 142916 - DNA, 7 bp, Unknown
  misc_feature (1)..( 7): Result.003 file - promoters60/4773229
tttactt

SEQ ID NO: 142917 - DNA, 7 bp, Unknown
  misc_feature (1)..( 7): Result.003 file - promoters60/4773229
aattatt

SEQ ID NO: 142918 - DNA, 7 bp, Unknown
  misc_feature (1)..( 7): Result.003 file - promoters60/4773229
aataatt

SEQ ID NO: 142919 - DNA, 8 bp, Unknown
  misc_feature (1)..( 8): Result.003 file - promoters60/4773229
aatagaaa

SEQ ID NO: 142920 - DNA, 8 bp, Unknown
  misc_feature (1)..( 8): Result.003 file - promoters60/4773229
aatggaaa

SEQ ID NO: 142921 - DNA, 7 bp, Unknown
  misc_feature (1)..( 7): Result.003 file - promoters60/4773229
aaaatgt

SEQ ID NO: 142922 - DNA, 7 bp, Unknown
  misc_feature (1)..( 7): Result.003 file - promoters60/4773229
aaattgt

SEQ ID NO: 142923 - DNA, 6 bp, Unknown
  misc_feature (1)..( 6): Result.003 file - promoters60/4773229
tctttt

SEQ ID NO: 142924 - DNA, 6 bp, Unknown
  misc_feature (1)..( 6): Result.003 file - promoters60/4773229
tctttt

SEQ ID NO: 142925 - DNA, 6 bp, Unknown
  misc_feature (1)..( 6): Result.003 file - promoters60/4773229
ggaaaa

SEQ ID NO: 142926 - DNA, 6 bp, Unknown
  misc_feature (1)..( 6): Result.003 file - promoters60/4773229
ggaaaa

SEQ ID NO: 142927 - DNA, 7 bp, Unknown
  misc_feature (1)..( 7): Result.003 file - promoters60/4773245
attccat

SEQ ID NO: 142928 - DNA, 7 bp, Unknown
  misc_feature (1)..( 7): Result.003 file - promoters60/4773245
attccat

SEQ ID NO: 142929 - DNA, 7 bp, Unknown
  misc_feature (1)..( 7): Result.003 file - promoters60/4773245
cacccaa

SEQ ID NO: 142930 - DNA, 7 bp, Unknown
  misc_feature (1)..( 7): Result.003 file - promoters60/4773245
cacacaa

SEQ ID NO: 142931 - DNA, 8 bp, Unknown
  misc_feature (1)..( 8): Result.003 file - promoters60/4773245
ctctgttt

SEQ ID NO: 142932 - DNA, 8 bp, Unknown
  misc_feature (1)..( 8): Result.003 file - promoters60/4773245
ctcttttt

SEQ ID NO: 142933 - DNA, 9 bp, Unknown
  misc_feature (1)..( 9): Result.003 file - promoters60/4773245
atgtgtctt

SEQ ID NO: 142934 - DNA, 6 bp, Unknown
  misc_feature (1)..( 6): Result.003 file - promoters60/4773245
ccaatg

SEQ ID NO: 142935 - DNA, 6 bp, Unknown
  misc_feature (1)..( 6): Result.003 file - promoters60/4773245
ccaatg

SEQ ID NO: 142936 - DNA, 7 bp, Unknown
  misc_feature (1)..( 7): Result.003 file - promoters60/4773245
aaaactc

SEQ ID NO: 142937 - DNA, 7 bp, Unknown
  misc_feature (1)..( 7): Result.003 file - promoters60/4773245
aaagctc

SEQ ID NO: 142938 - DNA, 6 bp, Unknown
  misc_feature (1)..( 6): Result.003 file - promoters60/4773245
attgtt

SEQ ID NO: 142939 - DNA, 6 bp, Unknown
  misc_feature (1)..( 6): Result.003 file - promoters60/4773245
attgtt

SEQ ID NO: 142940 - DNA, 6 bp, Unknown
  misc_feature (1)..( 6): Result.003 file - promoters60/4773245
actgaa

SEQ ID NO: 142941 - DNA, 6 bp, Unknown
  misc_feature (1)..( 6): Result.003 file - promoters60/4773245
actgaa

SEQ ID NO: 142942 - DNA, 7 bp, Unknown
  misc_feature (1)..( 7): Result.003 file - promoters60/4773245
gaatgtg

SEQ ID NO: 142943 - DNA, 7 bp, Unknown
  misc_feature (1)..( 7): Result.003 file - promoters60/4773245
gaaggtg

SEQ ID NO: 142944 - DNA, 7 bp, Unknown
  misc_feature (1)..( 7): Result.003 file - promoters60/4773245
acaagta

SEQ ID NO: 142945 - DNA, 7 bp, Unknown
  misc_feature (1)..( 7): Result.003 file - promoters60/4773245
acaggta

SEQ ID NO: 142946 - DNA, 6 bp, Unknown
  misc_feature (1)..( 6): Result.003 file - promoters60/4773245
ccaaaa

SEQ ID NO: 142947 - DNA, 6 bp, Unknown
  misc_feature (1)..( 6): Result.003 file - promoters60/4773245
ccaaaa

SEQ ID NO: 142948 - DNA, 7 bp, Unknown
  misc_feature (1)..( 7): Result.003 file - promoters60/4773245
ttgtaga

SEQ ID NO: 142949 - DNA, 7 bp, Unknown
  misc_feature (1)..( 7): Result.003 file - promoters60/4773245
ttgcaga

SEQ ID NO: 142950 - DNA, 6 bp, Unknown
  misc_feature (1)..( 6): Result.003 file - promoters60/4773245
ggagat

SEQ ID NO: 142951 - DNA, 6 bp, Unknown
  misc_feature (1)..( 6): Result.003 file - promoters60/4773245
ggagat

SEQ ID NO: 142952 - DNA, 8 bp, Unknown
  misc_feature (1)..( 8): Result.003 file - promoters60/4773245
tgcataga

SEQ ID NO: 142953 - DNA, 8 bp, Unknown
  misc_feature (1)..( 8): Result.003 file - promoters60/4773245
tgcaaaga

SEQ ID NO: 142954 - DNA, 7 bp, Unknown
  misc_feature (1)..( 7): Result.003 file - promoters60/4773245
aacacca

SEQ ID NO: 142955 - DNA, 7 bp, Unknown
  misc_feature (1)..( 7): Result.003 file - promoters60/4773245
aacacca

SEQ ID NO: 142956 - DNA, 7 bp, Unknown
  misc_feature (1)..( 7): Result.003 file - promoters60/4773245
ttcaatt

SEQ ID NO: 142957 - DNA, 7 bp, Unknown
  misc_feature (1)..( 7): Result.003 file - promoters60/4773245
ttccatt

SEQ ID NO: 142958 - DNA, 8 bp, Unknown
  misc_feature (1)..( 8): Result.003 file - promoters60/4773264
attgtaga

SEQ ID NO: 142959 - DNA, 8 bp, Unknown
  misc_feature (1)..( 8): Result.003 file - promoters60/4773264
attggaga

SEQ ID NO: 142960 - DNA, 8 bp, Unknown
  misc_feature (1)..( 8): Result.003 file - promoters60/4773264
tagtgatt

SEQ ID NO: 142961 - DNA, 8 bp, Unknown
  misc_feature (1)..( 8): Result.003 file - promoters60/4773264
tagttatt

SEQ ID NO: 142962 - DNA, 8 bp, Unknown
  misc_feature (1)..( 8): Result.003 file - promoters60/4773264
cagtaatt

SEQ ID NO: 142963 - DNA, 8 bp, Unknown
  misc_feature (1)..( 8): Result.003 file - promoters60/4773264
ttttcgtg

SEQ ID NO: 142964 - DNA, 8 bp, Unknown
  misc_feature (1)..( 8): Result.003 file - promoters60/4773264
tttgcgtg

SEQ ID NO: 142965 - DNA, 6 bp, Unknown
  misc_feature (1)..( 6): Result.003 file - promoters60/4773264
gagatc

SEQ ID NO: 142966 - DNA, 6 bp, Unknown
  misc_feature (1)..( 6): Result.003 file - promoters60/4773264
gagatc

SEQ ID NO: 142967 - DNA, 7 bp, Unknown
  misc_feature (1)..( 7): Result.003 file - promoters60/4773264
taacgaa

SEQ ID NO: 142968 - DNA, 7 bp, Unknown
  misc_feature (1)..( 7): Result.003 file - promoters60/4773264
aaacgaa

SEQ ID NO: 142969 - DNA, 7 bp, Unknown
  misc_feature (1)..( 7): Result.003 file - promoters60/4773264
taaagaa

SEQ ID NO: 142970 - DNA, 7 bp, Unknown
  misc_feature (1)..( 7): Result.003 file - promoters60/4773264
agtatta

SEQ ID NO: 142971 - DNA, 7 bp, Unknown
  misc_feature (1)..( 7): Result.003 file - promoters60/4773264
agtttta

SEQ ID NO: 142972 - DNA, 6 bp, Unknown
  misc_feature (1)..( 6): Result.003 file - promoters60/4773264
tttgag

SEQ ID NO: 142973 - DNA, 6 bp, Unknown
  misc_feature (1)..( 6): Result.003 file - promoters60/4773264
tttgag

SEQ ID NO: 142974 - DNA, 8 bp, Unknown
  misc_feature (1)..( 8): Result.003 file - promoters60/4773264
tatttctc

SEQ ID NO: 142975 - DNA, 8 bp, Unknown
  misc_feature (1)..( 8): Result.003 file - promoters60/4773264
tatgtctc

SEQ ID NO: 142976 - DNA, 8 bp, Unknown
  misc_feature (1)..( 8): Result.003 file - promoters60/4773264
ttgttttt

SEQ ID NO: 142977 - DNA, 8 bp, Unknown
  misc_feature (1)..( 8): Result.003 file - promoters60/4773264
ttgttttt

SEQ ID NO: 142978 - DNA, 8 bp, Unknown
  misc_feature (1)..( 8): Result.003 file - promoters60/4773264
ttttaact

SEQ ID NO: 142979 - DNA, 8 bp, Unknown
  misc_feature (1)..( 8): Result.003 file - promoters60/4773264
tttttact

SEQ ID NO: 142980 - DNA, 8 bp, Unknown
  misc_feature (1)..( 8): Result.003 file - promoters60/4773264
aaagcaaa

SEQ ID NO: 142981 - DNA, 8 bp, Unknown
  misc_feature (1)..( 8): Result.003 file - promoters60/4773264
aaagcaaa

SEQ ID NO: 142982 - DNA, 6 bp, Unknown
  misc_feature (1)..( 6): Result.003 file - promoters60/4773264
atacaa

SEQ ID NO: 142983 - DNA, 6 bp, Unknown
  misc_feature (1)..( 6): Result.003 file - promoters60/4773264
atacaa

SEQ ID NO: 142984 - DNA, 7 bp, Unknown
  misc_feature (1)..( 7): Result.003 file - promoters60/4773264
agaaaat

SEQ ID NO: 142985 - DNA, 7 bp, Unknown
  misc_feature (1)..( 7): Result.003 file - promoters60/4773264
agaaaat

SEQ ID NO: 142986 - DNA, 7 bp, Unknown
  misc_feature (1)..( 7): Result.003 file - promoters60/4773264
tctttga

SEQ ID NO: 142987 - DNA, 7 bp, Unknown
  misc_feature (1)..( 7): Result.003 file - promoters60/4773264
tctctga

SEQ ID NO: 142988 - DNA, 6 bp, Unknown
  misc_feature (1)..( 6): Result.003 file - promoters60/4773264
ttaaaa

SEQ ID NO: 142989 - DNA, 6 bp, Unknown
  misc_feature (1)..( 6): Result.003 file - promoters60/4773264
ttaaaa

SEQ ID NO: 142990 - DNA, 9 bp, Unknown
  misc_feature (1)..( 9): Result.003 file - promoters60/4773355
ttaatgttt

SEQ ID NO: 142991 - DNA, 9 bp, Unknown
  misc_feature (1)..( 9): Result.003 file - promoters60/4773355
tccatgttt

SEQ ID NO: 142992 - DNA, 9 bp, Unknown
  misc_feature (1)..( 9): Result.003 file - promoters60/4773355
ttaattttt

SEQ ID NO: 142993 - DNA, 7 bp, Unknown
  misc_feature (1)..( 7): Result.003 file - promoters60/4773355
gattaat

SEQ ID NO: 142994 - DNA, 7 bp, Unknown
  misc_feature (1)..( 7): Result.003 file - promoters60/4773355
gattaaa

SEQ ID NO: 142995 - DNA, 7 bp, Unknown
  misc_feature (1)..( 7): Result.003 file - promoters60/4773355
aattaaa

SEQ ID NO: 142996 - DNA, 8 bp, Unknown
  misc_feature (1)..( 8): Result.003 file - promoters60/4773355
taatgtct

SEQ ID NO: 142997 - DNA, 8 bp, Unknown
  misc_feature (1)..( 8): Result.003 file - promoters60/4773355
aaatgtct

SEQ ID NO: 142998 - DNA, 8 bp, Unknown
  misc_feature (1)..( 8): Result.003 file - promoters60/4773355
taatgtta

SEQ ID NO: 142999 - DNA, 9 bp, Unknown
  misc_feature (1)..( 9): Result.003 file - promoters60/4773355
aaaattata

SEQ ID NO: 143000 - DNA, 9 bp, Unknown
  misc_feature (1)..( 9): Result.003 file - promoters60/4773355
aacattata

SEQ ID NO: 143001 - DNA, 9 bp, Unknown
  misc_feature (1)..( 9): Result.003 file - promoters60/4773355
aacgttatg

SEQ ID NO: 143002 - DNA, 11 bp, Unknown
  misc_feature (1)..( 11): Result.003 file - promoters60/4773355
ttacttttatt

SEQ ID NO: 143003 - DNA, 11 bp, Unknown
  misc_feature (1)..( 11): Result.003 file - promoters60/4773355
ttacttttaac

SEQ ID NO: 143004 - DNA, 11 bp, Unknown
  misc_feature (1)..( 11): Result.003 file - promoters60/4773355
ctaatttgaac

SEQ ID NO: 143005 - DNA, 9 bp, Unknown
  misc_feature (1)..( 9): Result.003 file - promoters60/4773355
ttaacaaaa

SEQ ID NO: 143006 - DNA, 9 bp, Unknown
  misc_feature (1)..( 9): Result.003 file - promoters60/4773355
ttaagaaaa

SEQ ID NO: 143007 - DNA, 9 bp, Unknown
  misc_feature (1)..( 9): Result.003 file - promoters60/4773355
ttatcaaat

SEQ ID NO: 143008 - DNA, 8 bp, Unknown
  misc_feature (1)..( 8): Result.003 file - promoters60/4773355
aaacaatt

SEQ ID NO: 143009 - DNA, 8 bp, Unknown
  misc_feature (1)..( 8): Result.003 file - promoters60/4773355
aaataatc

SEQ ID NO: 143010 - DNA, 8 bp, Unknown
  misc_feature (1)..( 8): Result.003 file - promoters60/4773355
caactatt

SEQ ID NO: 143011 - DNA, 7 bp, Unknown
  misc_feature (1)..( 7): Result.003 file - promoters60/4773355
aaaatta

SEQ ID NO: 143012 - DNA, 7 bp, Unknown
  misc_feature (1)..( 7): Result.003 file - promoters60/4773355
taaatta

SEQ ID NO: 143013 - DNA, 7 bp, Unknown
  misc_feature (1)..( 7): Result.003 file - promoters60/4773355
taaattt

SEQ ID NO: 143014 - DNA, 8 bp, Unknown
  misc_feature (1)..( 8): Result.003 file - promoters60/4773355
ttttctgt

SEQ ID NO: 143015 - DNA, 8 bp, Unknown
  misc_feature (1)..( 8): Result.003 file - promoters60/4773355
tttgctgc

SEQ ID NO: 143016 - DNA, 8 bp, Unknown
  misc_feature (1)..( 8): Result.003 file - promoters60/4773355
gtttctct

SEQ ID NO: 143017 - DNA, 12 bp, Unknown
  misc_feature (1)..( 12): Result.003 file - promoters60/4773392
ataatatccaat

SEQ ID NO: 143018 - DNA, 12 bp, Unknown
  misc_feature (1)..( 12): Result.003 file - promoters60/4773392
ataatattcaat

SEQ ID NO: 143019 - DNA, 6 bp, Unknown
  misc_feature (1)..( 6): Result.003 file - promoters60/4773392
aaaaac

SEQ ID NO: 143020 - DNA, 6 bp, Unknown
  misc_feature (1)..( 6): Result.003 file - promoters60/4773392
aaaaac

SEQ ID NO: 143021 - DNA, 6 bp, Unknown
  misc_feature (1)..( 6): Result.003 file - promoters60/4773392
aagttt

SEQ ID NO: 143022 - DNA, 6 bp, Unknown
  misc_feature (1)..( 6): Result.003 file - promoters60/4773392
aagttt

SEQ ID NO: 143023 - DNA, 7 bp, Unknown
  misc_feature (1)..( 7): Result.003 file - promoters60/4773392
aaatcat

SEQ ID NO: 143024 - DNA, 7 bp, Unknown
  misc_feature (1)..( 7): Result.003 file - promoters60/4773392
aaatcat

SEQ ID NO: 143025 - DNA, 8 bp, Unknown
  misc_feature (1)..( 8): Result.003 file - promoters60/4773392
atatttaa

SEQ ID NO: 143026 - DNA, 8 bp, Unknown
  misc_feature (1)..( 8): Result.003 file - promoters60/4773392
atatttaa

SEQ ID NO: 143027 - DNA, 6 bp, Unknown
  misc_feature (1)..( 6): Result.003 file - promoters60/4773392
agaaag

SEQ ID NO: 143028 - DNA, 6 bp, Unknown
  misc_feature (1)..( 6): Result.003 file - promoters60/4773392
agaaag

SEQ ID NO: 143029 - DNA, 7 bp, Unknown
  misc_feature (1)..( 7): Result.003 file - promoters60/4773392
aatatgc

SEQ ID NO: 143030 - DNA, 7 bp, Unknown
  misc_feature (1)..( 7): Result.003 file - promoters60/4773392
aatctgc

SEQ ID NO: 143031 - DNA, 9 bp, Unknown
  misc_feature (1)..( 9): Result.003 file - promoters60/4773392
tcagagaaa

SEQ ID NO: 143032 - DNA, 9 bp, Unknown
  misc_feature (1)..( 9): Result.003 file - promoters60/4773392
tcagagaaa

SEQ ID NO: 143033 - DNA, 6 bp, Unknown
  misc_feature (1)..( 6): Result.003 file - promoters60/4773392
aaagat

SEQ ID NO: 143034 - DNA, 6 bp, Unknown
  misc_feature (1)..( 6): Result.003 file - promoters60/4773392
aaagat

SEQ ID NO: 143035 - DNA, 7 bp, Unknown
  misc_feature (1)..( 7): Result.003 file - promoters60/4773392
gcatggc

SEQ ID NO: 143036 - DNA, 7 bp, Unknown
  misc_feature (1)..( 7): Result.003 file - promoters60/4773392
gcacggc

SEQ ID NO: 143037 - DNA, 14 bp, Unknown
  misc_feature (1)..( 14): Result.003 file - promoters60/4773392
ttggtaaaatattt

SEQ ID NO: 143038 - DNA, 14 bp, Unknown
  misc_feature (1)..( 14): Result.003 file - promoters60/4773392
aaacaaaaataaat

SEQ ID NO: 143039 - DNA, 14 bp, Unknown
  misc_feature (1)..( 14): Result.003 file - promoters60/4773392
taaacaaaaaaaaa

SEQ ID NO: 143040 - DNA, 6 bp, Unknown
  misc_feature (1)..( 6): Result.003 file - promoters60/4773392
tcaaaa

SEQ ID NO: 143041 - DNA, 6 bp, Unknown
  misc_feature (1)..( 6): Result.003 file - promoters60/4773392
tcaaaa

SEQ ID NO: 143042 - DNA, 7 bp, Unknown
  misc_feature (1)..( 7): Result.003 file - promoters60/4773392
aaaatta

SEQ ID NO: 143043 - DNA, 7 bp, Unknown
  misc_feature (1)..( 7): Result.003 file - promoters60/4773392
aaaatta

SEQ ID NO: 143044 - DNA, 7 bp, Unknown
  misc_feature (1)..( 7): Result.003 file - promoters60/4773392
atattat

SEQ ID NO: 143045 - DNA, 7 bp, Unknown
  misc_feature (1)..( 7): Result.003 file - promoters60/4773392
atagtat

SEQ ID NO: 143046 - DNA, 6 bp, Unknown
  misc_feature (1)..( 6): Result.003 file - promoters60/4773392
tttttt

SEQ ID NO: 143047 - DNA, 6 bp, Unknown
  misc_feature (1)..( 6): Result.003 file - promoters60/4773392
tttttt

SEQ ID NO: 143048 - DNA, 7 bp, Unknown
  misc_feature (1)..( 7): Result.003 file - promoters60/4773392
tttgttt

SEQ ID NO: 143049 - DNA, 7 bp, Unknown
  misc_feature (1)..( 7): Result.003 file - promoters60/4773392
tttcttt

SEQ ID NO: 143050 - DNA, 6 bp, Unknown
  misc_feature (1)..( 6): Result.003 file - promoters60/4773392
cgttta

SEQ ID NO: 143051 - DNA, 6 bp, Unknown
  misc_feature (1)..( 6): Result.003 file - promoters60/4773392
cgttta

SEQ ID NO: 143052 - DNA, 6 bp, Unknown
  misc_feature (1)..( 6): Result.003 file - promoters60/4773795
gctttc

SEQ ID NO: 143053 - DNA, 6 bp, Unknown
  misc_feature (1)..( 6): Result.003 file - promoters60/4773795
gctttc

SEQ ID NO: 143054 - DNA, 6 bp, Unknown
  misc_feature (1)..( 6): Result.003 file - promoters60/4773795
tctctc

SEQ ID NO: 143055 - DNA, 6 bp, Unknown
  misc_feature (1)..( 6): Result.003 file - promoters60/4773795
tctctc

SEQ ID NO: 143056 - DNA, 7 bp, Unknown
  misc_feature (1)..( 7): Result.003 file - promoters60/4773795
tctgctc

SEQ ID NO: 143057 - DNA, 7 bp, Unknown
  misc_feature (1)..( 7): Result.003 file - promoters60/4773795
tctcctc

SEQ ID NO: 143058 - DNA, 9 bp, Unknown
  misc_feature (1)..( 9): Result.003 file - promoters60/4773795
taaatgcaa

SEQ ID NO: 143059 - DNA, 9 bp, Unknown
  misc_feature (1)..( 9): Result.003 file - promoters60/4773795
taaatacaa

SEQ ID NO: 143060 - DNA, 7 bp, Unknown
  misc_feature (1)..( 7): Result.003 file - promoters60/4773795
agtggga

SEQ ID NO: 143061 - DNA, 7 bp, Unknown
  misc_feature (1)..( 7): Result.003 file - promoters60/4773795
agtggga

SEQ ID NO: 143062 - DNA, 9 bp, Unknown
  misc_feature (1)..( 9): Result.003 file - promoters60/4773795
tttaatttt

SEQ ID NO: 143063 - DNA, 9 bp, Unknown
  misc_feature (1)..( 9): Result.003 file - promoters60/4773795
tttgatttt

SEQ ID NO: 143064 - DNA, 6 bp, Unknown
  misc_feature (1)..( 6): Result.003 file - promoters60/4773795
ctctgt

SEQ ID NO: 143065 - DNA, 6 bp, Unknown
  misc_feature (1)..( 6): Result.003 file - promoters60/4773795
ctctgt

SEQ ID NO: 143066 - DNA, 6 bp, Unknown
  misc_feature (1)..( 6): Result.003 file - promoters60/4773795
tctatc

SEQ ID NO: 143067 - DNA, 6 bp, Unknown
  misc_feature (1)..( 6): Result.003 file - promoters60/4773795
tctatc

SEQ ID NO: 143068 - DNA, 12 bp, Unknown
  misc_feature (1)..( 12): Result.003 file - promoters60/4773795
tcaatgatattt

SEQ ID NO: 143069 - DNA, 12 bp, Unknown
  misc_feature (1)..( 12): Result.003 file - promoters60/4773795
tcactgattttt

SEQ ID NO: 143070 - DNA, 7 bp, Unknown
  misc_feature (1)..( 7): Result.003 file - promoters60/4773795
attaaag

SEQ ID NO: 143071 - DNA, 7 bp, Unknown
  misc_feature (1)..( 7): Result.003 file - promoters60/4773795
attcaag

SEQ ID NO: 143072 - DNA, 7 bp, Unknown
  misc_feature (1)..( 7): Result.003 file - promoters60/4773795
tgtatat

SEQ ID NO: 143073 - DNA, 7 bp, Unknown
  misc_feature (1)..( 7): Result.003 file - promoters60/4773795
tgtctat

SEQ ID NO: 143074 - DNA, 8 bp, Unknown
  misc_feature (1)..( 8): Result.003 file - promoters60/4773795
tctggttt

SEQ ID NO: 143075 - DNA, 8 bp, Unknown
  misc_feature (1)..( 8): Result.003 file - promoters60/4773795
tctggttt

SEQ ID NO: 143076 - DNA, 7 bp, Unknown
  misc_feature (1)..( 7): Result.003 file - promoters60/4773795
tttactt

SEQ ID NO: 143077 - DNA, 7 bp, Unknown
  misc_feature (1)..( 7): Result.003 file - promoters60/4773795
tttgctt

SEQ ID NO: 143078 - DNA, 8 bp, Unknown
  misc_feature (1)..( 8): Result.003 file - promoters60/4773795
cttttctc

SEQ ID NO: 143079 - DNA, 8 bp, Unknown
  misc_feature (1)..( 8): Result.003 file - promoters60/4773795
cttgtctc

SEQ ID NO: 143080 - DNA, 7 bp, Unknown
  misc_feature (1)..( 7): Result.003 file - promoters60/4773795
ttgaagc

SEQ ID NO: 143081 - DNA, 7 bp, Unknown
  misc_feature (1)..( 7): Result.003 file - promoters60/4773795
ttgaagc

SEQ ID NO: 143082 - DNA, 6 bp, Unknown
  misc_feature (1)..( 6): Result.003 file - promoters60/4773795
cctttt

SEQ ID NO: 143083 - DNA, 6 bp, Unknown
  misc_feature (1)..( 6): Result.003 file - promoters60/4773795
cctttt

SEQ ID NO: 143084 - DNA, 7 bp, Unknown
  misc_feature (1)..( 7): Result.003 file - promoters60/4773795
ttttttt

SEQ ID NO: 143085 - DNA, 7 bp, Unknown
  misc_feature (1)..( 7): Result.003 file - promoters60/4773795
ttttttt

SEQ ID NO: 143086 - DNA, 7 bp, Unknown
  misc_feature (1)..( 7): Result.003 file - promoters60/4773795
ggcctat

SEQ ID NO: 143087 - DNA, 7 bp, Unknown
  misc_feature (1)..( 7): Result.003 file - promoters60/4773795
ggcctat

SEQ ID NO: 143088 - DNA, 12 bp, Unknown
  misc_feature (1)..( 12): Result.003 file - promoters60/4773819
cttgaaaaagag

SEQ ID NO: 143089 - DNA, 12 bp, Unknown
  misc_feature (1)..( 12): Result.003 file - promoters60/4773819
gtataaaaagaa

SEQ ID NO: 143090 - DNA, 12 bp, Unknown
  misc_feature (1)..( 12): Result.003 file - promoters60/4773819
ttggtgaaagag

SEQ ID NO: 143091 - DNA, 12 bp, Unknown
  misc_feature (1)..( 12): Result.003 file - promoters60/4773819
tatcaaaatttg

SEQ ID NO: 143092 - DNA, 12 bp, Unknown
  misc_feature (1)..( 12): Result.003 file - promoters60/4773819
tatctaaacgct

SEQ ID NO: 143093 - DNA, 12 bp, Unknown
  misc_feature (1)..( 12): Result.003 file - promoters60/4773819
tctcaaaatgta

SEQ ID NO: 143094 - DNA, 12 bp, Unknown
  misc_feature (1)..( 12): Result.003 file - promoters60/4773819
agtctaaaactg

SEQ ID NO: 143095 - DNA, 12 bp, Unknown
  misc_feature (1)..( 12): Result.003 file - promoters60/4773819
tcttcttttctt

SEQ ID NO: 143096 - DNA, 12 bp, Unknown
  misc_feature (1)..( 12): Result.003 file - promoters60/4773819
ggttcatttcaa

SEQ ID NO: 143097 - DNA, 12 bp, Unknown
  misc_feature (1)..( 12): Result.003 file - promoters60/4773819
gattctttgacg

SEQ ID NO: 143098 - DNA, 12 bp, Unknown
  misc_feature (1)..( 12): Result.003 file - promoters60/4773819
gatgctttttaa

SEQ ID NO: 143099 - DNA, 12 bp, Unknown
  misc_feature (1)..( 12): Result.003 file - promoters60/4773819
tatgatttagcc

SEQ ID NO: 143100 - DNA, 12 bp, Unknown
  misc_feature (1)..( 12): Result.003 file - promoters60/4773819
gaaaaattgcaa

SEQ ID NO: 143101 - DNA, 7 bp, Unknown
  misc_feature (1)..( 7): Result.003 file - promoters60/4773819
ttttaac

SEQ ID NO: 143102 - DNA, 7 bp, Unknown
  misc_feature (1)..( 7): Result.003 file - promoters60/4773819
gtttaac

SEQ ID NO: 143103 - DNA, 8 bp, Unknown
  misc_feature (1)..( 8): Result.003 file - promoters60/4773819
atttcaac

SEQ ID NO: 143104 - DNA, 8 bp, Unknown
  misc_feature (1)..( 8): Result.003 file - promoters60/4773819
attttaca

SEQ ID NO: 143105 - DNA, 8 bp, Unknown
  misc_feature (1)..( 8): Result.003 file - promoters60/4773819
attgcaat

SEQ ID NO: 143106 - DNA, 8 bp, Unknown
  misc_feature (1)..( 8): Result.003 file - promoters60/4773819
ctttcaag

SEQ ID NO: 143107 - DNA, 8 bp, Unknown
  misc_feature (1)..( 8): Result.003 file - promoters60/4773823
cctctctt

SEQ ID NO: 143108 - DNA, 8 bp, Unknown
  misc_feature (1)..( 8): Result.003 file - promoters60/4773823
tctctctc

SEQ ID NO: 143109 - DNA, 8 bp, Unknown
  misc_feature (1)..( 8): Result.003 file - promoters60/4773823
tctttctc

SEQ ID NO: 143110 - DNA, 8 bp, Unknown
  misc_feature (1)..( 8): Result.003 file - promoters60/4773823
actttttt

SEQ ID NO: 143111 - DNA, 8 bp, Unknown
  misc_feature (1)..( 8): Result.003 file - promoters60/4773823
actttttg

SEQ ID NO: 143112 - DNA, 8 bp, Unknown
  misc_feature (1)..( 8): Result.003 file - promoters60/4773823
cctttttt

SEQ ID NO: 143113 - DNA, 11 bp, Unknown
  misc_feature (1)..( 11): Result.003 file - promoters60/4773823
ttgtattctaa

SEQ ID NO: 143114 - DNA, 11 bp, Unknown
  misc_feature (1)..( 11): Result.003 file - promoters60/4773823
atgtattttac

SEQ ID NO: 143115 - DNA, 12 bp, Unknown
  misc_feature (1)..( 12): Result.003 file - promoters60/4773823
atgtaatttgaa

SEQ ID NO: 143116 - DNA, 12 bp, Unknown
  misc_feature (1)..( 12): Result.003 file - promoters60/4773823
ttgtttttcaca

SEQ ID NO: 143117 - DNA, 12 bp, Unknown
  misc_feature (1)..( 12): Result.003 file - promoters60/4773823
gtgtcattcaat

SEQ ID NO: 143118 - DNA, 12 bp, Unknown
  misc_feature (1)..( 12): Result.003 file - promoters60/4773823
aagtttttttgc

SEQ ID NO: 143119 - DNA, 13 bp, Unknown
  misc_feature (1)..( 13): Result.003 file - promoters60/4773823
aatttgttgtatt

SEQ ID NO: 143120 - DNA, 13 bp, Unknown
  misc_feature (1)..( 13): Result.003 file - promoters60/4773823
agtttgttaagtt

SEQ ID NO: 143121 - DNA, 13 bp, Unknown
  misc_feature (1)..( 13): Result.003 file - promoters60/4773823
aatatgtaatttg

SEQ ID NO: 143122 - DNA, 13 bp, Unknown
  misc_feature (1)..( 13): Result.003 file - promoters60/4773823
gtttttttgctga

SEQ ID NO: 143123 - DNA, 13 bp, Unknown
  misc_feature (1)..( 13): Result.003 file - promoters60/4773823
catttgtttttca

SEQ ID NO: 143124 - DNA, 13 bp, Unknown
  misc_feature (1)..( 13): Result.003 file - promoters60/4773823
attttgctgaatc

SEQ ID NO: 143125 - DNA, 9 bp, Unknown
  misc_feature (1)..( 9): Result.003 file - promoters60/4773836
atttatcgc

SEQ ID NO: 143126 - DNA, 9 bp, Unknown
  misc_feature (1)..( 9): Result.003 file - promoters60/4773836
atttatcat

SEQ ID NO: 143127 - DNA, 9 bp, Unknown
  misc_feature (1)..( 9): Result.003 file - promoters60/4773836
ttttatcat

SEQ ID NO: 143128 - DNA, 9 bp, Unknown
  misc_feature (1)..( 9): Result.003 file - promoters60/4773836
ctcaaaaaa

SEQ ID NO: 143129 - DNA, 9 bp, Unknown
  misc_feature (1)..( 9): Result.003 file - promoters60/4773836
gtcaaaaaa

SEQ ID NO: 143130 - DNA, 9 bp, Unknown
  misc_feature (1)..( 9): Result.003 file - promoters60/4773836
gtcaaatcc

SEQ ID NO: 143131 - DNA, 10 bp, Unknown
  misc_feature (1)..( 10): Result.003 file - promoters60/4773846
tattaaaaaa

SEQ ID NO: 143132 - DNA, 10 bp, Unknown
  misc_feature (1)..( 10): Result.003 file - promoters60/4773846
tattaaaaaa

SEQ ID NO: 143133 - DNA, 10 bp, Unknown
  misc_feature (1)..( 10): Result.003 file - promoters60/4773846
gatgaaaaaa

SEQ ID NO: 143134 - DNA, 6 bp, Unknown
  misc_feature (1)..( 6): Result.003 file - promoters60/4773846
aataca

SEQ ID NO: 143135 - DNA, 6 bp, Unknown
  misc_feature (1)..( 6): Result.003 file - promoters60/4773846
aataca

SEQ ID NO: 143136 - DNA, 8 bp, Unknown
  misc_feature (1)..( 8): Result.003 file - promoters60/4773846
attatatt

SEQ ID NO: 143137 - DNA, 8 bp, Unknown
  misc_feature (1)..( 8): Result.003 file - promoters60/4773846
gatatatt

SEQ ID NO: 143138 - DNA, 8 bp, Unknown
  misc_feature (1)..( 8): Result.003 file - promoters60/4773846
attttatc

SEQ ID NO: 143139 - DNA, 7 bp, Unknown
  misc_feature (1)..( 7): Result.003 file - promoters60/4773846
tattgta

SEQ ID NO: 143140 - DNA, 7 bp, Unknown
  misc_feature (1)..( 7): Result.003 file - promoters60/4773846
tatggta

SEQ ID NO: 143141 - DNA, 8 bp, Unknown
  misc_feature (1)..( 8): Result.003 file - promoters60/4773846
tatccaca

SEQ ID NO: 143142 - DNA, 8 bp, Unknown
  misc_feature (1)..( 8): Result.003 file - promoters60/4773846
tatctaca

SEQ ID NO: 143143 - DNA, 6 bp, Unknown
  misc_feature (1)..( 6): Result.003 file - promoters60/4773846
aataat

SEQ ID NO: 143144 - DNA, 6 bp, Unknown
  misc_feature (1)..( 6): Result.003 file - promoters60/4773846
aataat

SEQ ID NO: 143145 - DNA, 6 bp, Unknown
  misc_feature (1)..( 6): Result.003 file - promoters60/4773846
tacttg

SEQ ID NO: 143146 - DNA, 6 bp, Unknown
  misc_feature (1)..( 6): Result.003 file - promoters60/4773846
tacttg

SEQ ID NO: 143147 - DNA, 6 bp, Unknown
  misc_feature (1)..( 6): Result.003 file - promoters60/4773846
agacaa

SEQ ID NO: 143148 - DNA, 6 bp, Unknown
  misc_feature (1)..( 6): Result.003 file - promoters60/4773846
agacaa

SEQ ID NO: 143149 - DNA, 8 bp, Unknown
  misc_feature (1)..( 8): Result.003 file - promoters60/4773846
tatagaac

SEQ ID NO: 143150 - DNA, 8 bp, Unknown
  misc_feature (1)..( 8): Result.003 file - promoters60/4773846
aatacaac

SEQ ID NO: 143151 - DNA, 8 bp, Unknown
  misc_feature (1)..( 8): Result.003 file - promoters60/4773846
aattcaaa

SEQ ID NO: 143152 - DNA, 7 bp, Unknown
  misc_feature (1)..( 7): Result.003 file - promoters60/4773846
aaaaata

SEQ ID NO: 143153 - DNA, 7 bp, Unknown
  misc_feature (1)..( 7): Result.003 file - promoters60/4773846
aaagata

SEQ ID NO: 143154 - DNA, 9 bp, Unknown
  misc_feature (1)..( 9): Result.003 file - promoters60/4773846
tttttataa

SEQ ID NO: 143155 - DNA, 9 bp, Unknown
  misc_feature (1)..( 9): Result.003 file - promoters60/4773846
attttatct

SEQ ID NO: 143156 - DNA, 9 bp, Unknown
  misc_feature (1)..( 9): Result.003 file - promoters60/4773846
atttgatct

SEQ ID NO: 143157 - DNA, 9 bp, Unknown
  misc_feature (1)..( 9): Result.003 file - promoters60/4773846
ttttgttat

SEQ ID NO: 143158 - DNA, 9 bp, Unknown
  misc_feature (1)..( 9): Result.003 file - promoters60/4773846
ttttcttat

SEQ ID NO: 143159 - DNA, 7 bp, Unknown
  misc_feature (1)..( 7): Result.003 file - promoters60/4773846
gattaaa

SEQ ID NO: 143160 - DNA, 7 bp, Unknown
  misc_feature (1)..( 7): Result.003 file - promoters60/4773846
gataaaa

SEQ ID NO: 143161 - DNA, 6 bp, Unknown
  misc_feature (1)..( 6): Result.003 file - promoters60/4773846
catata

SEQ ID NO: 143162 - DNA, 6 bp, Unknown
  misc_feature (1)..( 6): Result.003 file - promoters60/4773846
catata

SEQ ID NO: 143163 - DNA, 10 bp, Unknown
  misc_feature (1)..( 10): Result.003 file - promoters60/4773846
cattaaaata

SEQ ID NO: 143164 - DNA, 10 bp, Unknown
  misc_feature (1)..( 10): Result.003 file - promoters60/4773846
aattcaaata

SEQ ID NO: 143165 - DNA, 10 bp, Unknown
  misc_feature (1)..( 10): Result.003 file - promoters60/4773846
aatacaacca

SEQ ID NO: 143166 - DNA, 8 bp, Unknown
  misc_feature (1)..( 8): Result.003 file - promoters60/4773846
tctcaaat

SEQ ID NO: 143167 - DNA, 8 bp, Unknown
  misc_feature (1)..( 8): Result.003 file - promoters60/4773846
attcaaat

SEQ ID NO: 143168 - DNA, 8 bp, Unknown
  misc_feature (1)..( 8): Result.003 file - promoters60/4773846
attcaaag

SEQ ID NO: 143169 - DNA, 7 bp, Unknown
  misc_feature (1)..( 7): Result.003 file - promoters60/4773846
aagcaaa

SEQ ID NO: 143170 - DNA, 7 bp, Unknown
  misc_feature (1)..( 7): Result.003 file - promoters60/4773846
aagaaaa

SEQ ID NO: 143171 - DNA, 6 bp, Unknown
  misc_feature (1)..( 6): Result.003 file - promoters60/4773846
cagcaa

SEQ ID NO: 143172 - DNA, 6 bp, Unknown
  misc_feature (1)..( 6): Result.003 file - promoters60/4773846
cagcaa

SEQ ID NO: 143173 - DNA, 6 bp, Unknown
  misc_feature (1)..( 6): Result.003 file - promoters60/4773846
acgtac

SEQ ID NO: 143174 - DNA, 6 bp, Unknown
  misc_feature (1)..( 6): Result.003 file - promoters60/4773846
acgtac

SEQ ID NO: 143175 - DNA, 7 bp, Unknown
  misc_feature (1)..( 7): Result.003 file - promoters60/4773846
aatcaaa

SEQ ID NO: 143176 - DNA, 7 bp, Unknown
  misc_feature (1)..( 7): Result.003 file - promoters60/4773846
aattaaa

SEQ ID NO: 143177 - DNA, 12 bp, Unknown
  misc_feature (1)..( 12): Result.003 file - promoters60/4773846
atttgatacttt

SEQ ID NO: 143178 - DNA, 12 bp, Unknown
  misc_feature (1)..( 12): Result.003 file - promoters60/4773846
attagataattt

SEQ ID NO: 143179 - DNA, 9 bp, Unknown
  misc_feature (1)..( 9): Result.003 file - promoters60/4802537
aaattaatt

SEQ ID NO: 143180 - DNA, 9 bp, Unknown
  misc_feature (1)..( 9): Result.003 file - promoters60/4802537
tgattgatt

SEQ ID NO: 143181 - DNA, 9 bp, Unknown
  misc_feature (1)..( 9): Result.003 file - promoters60/4802537
aaagtaaat

SEQ ID NO: 143182 - DNA, 9 bp, Unknown
  misc_feature (1)..( 9): Result.003 file - promoters60/4802537
aaactaaat

SEQ ID NO: 143183 - DNA, 14 bp, Unknown
  misc_feature (1)..( 14): Result.003 file - promoters60/4802537
aaaaaaatactaat

SEQ ID NO: 143184 - DNA, 14 bp, Unknown
  misc_feature (1)..( 14): Result.003 file - promoters60/4802537
aaataaaccaaagt

SEQ ID NO: 143185 - DNA, 14 bp, Unknown
  misc_feature (1)..( 14): Result.003 file - promoters60/4802537
taataaactaaagt

SEQ ID NO: 143186 - DNA, 14 bp, Unknown
  misc_feature (1)..( 14): Result.003 file - promoters60/4802537
tactgaagaagact

SEQ ID NO: 143187 - DNA, 10 bp, Unknown
  misc_feature (1)..( 10): Result.003 file - promoters60/4802537
tatttatata

SEQ ID NO: 143188 - DNA, 10 bp, Unknown
  misc_feature (1)..( 10): Result.003 file - promoters60/4802537
atattaaata

SEQ ID NO: 143189 - DNA, 10 bp, Unknown
  misc_feature (1)..( 10): Result.003 file - promoters60/4802537
tatttaaaca

SEQ ID NO: 143190 - DNA, 10 bp, Unknown
  misc_feature (1)..( 10): Result.003 file - promoters60/4802537
gctataaaag

SEQ ID NO: 143191 - DNA, 13 bp, Unknown
  misc_feature (1)..( 13): Result.003 file - promoters60/4802537
atatggaaaagaa

SEQ ID NO: 143192 - DNA, 13 bp, Unknown
  misc_feature (1)..( 13): Result.003 file - promoters60/4802537
tttacgaaaagtg

SEQ ID NO: 143193 - DNA, 13 bp, Unknown
  misc_feature (1)..( 13): Result.003 file - promoters60/4802537
aagtgaaaaagaa

SEQ ID NO: 143194 - DNA, 13 bp, Unknown
  misc_feature (1)..( 13): Result.003 file - promoters60/4802537
tttacgaaaaagg

SEQ ID NO: 143195 - DNA, 8 bp, Unknown
  misc_feature (1)..( 8): Result.003 file - promoters60/4803329
ctttttac

SEQ ID NO: 143196 - DNA, 8 bp, Unknown
  misc_feature (1)..( 8): Result.003 file - promoters60/4803329
ctttttat

SEQ ID NO: 143197 - DNA, 8 bp, Unknown
  misc_feature (1)..( 8): Result.003 file - promoters60/4803329
atttttaa

SEQ ID NO: 143198 - DNA, 8 bp, Unknown
  misc_feature (1)..( 8): Result.003 file - promoters60/4803329
atttgtac

SEQ ID NO: 143199 - DNA, 10 bp, Unknown
  misc_feature (1)..( 10): Result.003 file - promoters60/4803329
tttttttttt

SEQ ID NO: 143200 - DNA, 10 bp, Unknown
  misc_feature (1)..( 10): Result.003 file - promoters60/4803329
tttattttaa

SEQ ID NO: 143201 - DNA, 10 bp, Unknown
  misc_feature (1)..( 10): Result.003 file - promoters60/4803329
tctattttaa

SEQ ID NO: 143202 - DNA, 10 bp, Unknown
  misc_feature (1)..( 10): Result.003 file - promoters60/4803329
catatattat

SEQ ID NO: 143203 - DNA, 11 bp, Unknown
  misc_feature (1)..( 11): Result.003 file - promoters60/4803329
gaagataaaga

SEQ ID NO: 143204 - DNA, 11 bp, Unknown
  misc_feature (1)..( 11): Result.003 file - promoters60/4803329
gaagacaaacc

SEQ ID NO: 143205 - DNA, 11 bp, Unknown
  misc_feature (1)..( 11): Result.003 file - promoters60/4803329
gtggataaaat

SEQ ID NO: 143206 - DNA, 11 bp, Unknown
  misc_feature (1)..( 11): Result.003 file - promoters60/4803329
ttctacaaact

SEQ ID NO: 143207 - DNA, 11 bp, Unknown
  misc_feature (1)..( 11): Result.003 file - promoters60/4803329
acgactaaaaa

SEQ ID NO: 143208 - DNA, 13 bp, Unknown
  misc_feature (1)..( 13): Result.003 file - promoters60/4803329
tttgttgactttg

SEQ ID NO: 143209 - DNA, 13 bp, Unknown
  misc_feature (1)..( 13): Result.003 file - promoters60/4803329
aaaattgaatttg

SEQ ID NO: 143210 - DNA, 13 bp, Unknown
  misc_feature (1)..( 13): Result.003 file - promoters60/4803329
aaaactgaaatca

SEQ ID NO: 143211 - DNA, 13 bp, Unknown
  misc_feature (1)..( 13): Result.003 file - promoters60/4803329
tatattgaagttt

SEQ ID NO: 143212 - DNA, 7 bp, Unknown
  misc_feature (1)..( 7): Result.003 file - promoters60/4806023
cagcttt

SEQ ID NO: 143213 - DNA, 7 bp, Unknown
  misc_feature (1)..( 7): Result.003 file - promoters60/4806023
cagtttt

SEQ ID NO: 143214 - DNA, 8 bp, Unknown
  misc_feature (1)..( 8): Result.003 file - promoters60/4806023
aaatttat

SEQ ID NO: 143215 - DNA, 8 bp, Unknown
  misc_feature (1)..( 8): Result.003 file - promoters60/4806023
aaacttat

SEQ ID NO: 143216 - DNA, 6 bp, Unknown
  misc_feature (1)..( 6): Result.003 file - promoters60/4806023
caactt

SEQ ID NO: 143217 - DNA, 6 bp, Unknown
  misc_feature (1)..( 6): Result.003 file - promoters60/4806023
caactt

SEQ ID NO: 143218 - DNA, 6 bp, Unknown
  misc_feature (1)..( 6): Result.003 file - promoters60/4806023
ggccca

SEQ ID NO: 143219 - DNA, 6 bp, Unknown
  misc_feature (1)..( 6): Result.003 file - promoters60/4806023
ggccca

SEQ ID NO: 143220 - DNA, 6 bp, Unknown
  misc_feature (1)..( 6): Result.003 file - promoters60/4806023
aacaaa

SEQ ID NO: 143221 - DNA, 6 bp, Unknown
  misc_feature (1)..( 6): Result.003 file - promoters60/4806023
aacaaa

SEQ ID NO: 143222 - DNA, 6 bp, Unknown
  misc_feature (1)..( 6): Result.003 file - promoters60/4806023
caaaaa

SEQ ID NO: 143223 - DNA, 6 bp, Unknown
  misc_feature (1)..( 6): Result.003 file - promoters60/4806023
caaaaa

SEQ ID NO: 143224 - DNA, 6 bp, Unknown
  misc_feature (1)..( 6): Result.003 file - promoters60/4806023
tcactt

SEQ ID NO: 143225 - DNA, 6 bp, Unknown
  misc_feature (1)..( 6): Result.003 file - promoters60/4806023
tcactt

SEQ ID NO: 143226 - DNA, 7 bp, Unknown
  misc_feature (1)..( 7): Result.003 file - promoters60/4806023
aaccgtt

SEQ ID NO: 143227 - DNA, 7 bp, Unknown
  misc_feature (1)..( 7): Result.003 file - promoters60/4806023
gaccgtt

SEQ ID NO: 143228 - DNA, 7 bp, Unknown
  misc_feature (1)..( 7): Result.003 file - promoters60/4806023
gaccgtg

SEQ ID NO: 143229 - DNA, 10 bp, Unknown
  misc_feature (1)..( 10): Result.003 file - promoters60/4806023
ctctttattt

SEQ ID NO: 143230 - DNA, 10 bp, Unknown
  misc_feature (1)..( 10): Result.003 file - promoters60/4806023
atcttgattt

SEQ ID NO: 143231 - DNA, 10 bp, Unknown
  misc_feature (1)..( 10): Result.003 file - promoters60/4806023
atcttgaata

SEQ ID NO: 143232 - DNA, 7 bp, Unknown
  misc_feature (1)..( 7): Result.003 file - promoters60/4806023
ggtgtca

SEQ ID NO: 143233 - DNA, 7 bp, Unknown
  misc_feature (1)..( 7): Result.003 file - promoters60/4806023
ggtctca

SEQ ID NO: 143234 - DNA, 6 bp, Unknown
  misc_feature (1)..( 6): Result.003 file - promoters60/4806023
tcaaga

SEQ ID NO: 143235 - DNA, 6 bp, Unknown
  misc_feature (1)..( 6): Result.003 file - promoters60/4806023
tcaaga

SEQ ID NO: 143236 - DNA, 6 bp, Unknown
  misc_feature (1)..( 6): Result.003 file - promoters60/4806023
ctgttt

SEQ ID NO: 143237 - DNA, 6 bp, Unknown
  misc_feature (1)..( 6): Result.003 file - promoters60/4806023
ctgttt

SEQ ID NO: 143238 - DNA, 9 bp, Unknown
  misc_feature (1)..( 9): Result.003 file - promoters60/4806023
tcacaattc

SEQ ID NO: 143239 - DNA, 9 bp, Unknown
  misc_feature (1)..( 9): Result.003 file - promoters60/4806023
tcataattc

SEQ ID NO: 143240 - DNA, 7 bp, Unknown
  misc_feature (1)..( 7): Result.003 file - promoters60/4806023
tcaaata

SEQ ID NO: 143241 - DNA, 7 bp, Unknown
  misc_feature (1)..( 7): Result.003 file - promoters60/4806023
tcacata

SEQ ID NO: 143242 - DNA, 6 bp, Unknown
  misc_feature (1)..( 6): Result.003 file - promoters60/4806023
ccattg

SEQ ID NO: 143243 - DNA, 6 bp, Unknown
  misc_feature (1)..( 6): Result.003 file - promoters60/4806023
ccattg

SEQ ID NO: 143244 - DNA, 7 bp, Unknown
  misc_feature (1)..( 7): Result.003 file - promoters60/4806023
ttctgga

SEQ ID NO: 143245 - DNA, 7 bp, Unknown
  misc_feature (1)..( 7): Result.003 file - promoters60/4806023
ttccgga

SEQ ID NO: 143246 - DNA, 8 bp, Unknown
  misc_feature (1)..( 8): Result.003 file - promoters60/4806023
gtttaaat

SEQ ID NO: 143247 - DNA, 8 bp, Unknown
  misc_feature (1)..( 8): Result.003 file - promoters60/4806023
gttttaat

SEQ ID NO: 143248 - DNA, 12 bp, Unknown
  misc_feature (1)..( 12): Result.003 file - promoters60/4807018
caatttcactcc

SEQ ID NO: 143249 - DNA, 12 bp, Unknown
  misc_feature (1)..( 12): Result.003 file - promoters60/4807018
acgttttactga

SEQ ID NO: 143250 - DNA, 12 bp, Unknown
  misc_feature (1)..( 12): Result.003 file - promoters60/4807018
aaatatcagtgg

SEQ ID NO: 143251 - DNA, 12 bp, Unknown
  misc_feature (1)..( 12): Result.003 file - promoters60/4807018
tgtttttacgtg

SEQ ID NO: 143252 - DNA, 12 bp, Unknown
  misc_feature (1)..( 12): Result.003 file - promoters60/4807018
actttttagtga

SEQ ID NO: 143253 - DNA, 13 bp, Unknown
  misc_feature (1)..( 13): Result.003 file - promoters60/4807018
tacttcttattgg

SEQ ID NO: 143254 - DNA, 13 bp, Unknown
  misc_feature (1)..( 13): Result.003 file - promoters60/4807018
ctctgcttgtaaa

SEQ ID NO: 143255 - DNA, 10 bp, Unknown
  misc_feature (1)..( 10): Result.003 file - promoters60/4807018
caaaaccaaa

SEQ ID NO: 143256 - DNA, 10 bp, Unknown
  misc_feature (1)..( 10): Result.003 file - promoters60/4807018
aaaaatcaaa

SEQ ID NO: 143257 - DNA, 10 bp, Unknown
  misc_feature (1)..( 10): Result.003 file - promoters60/4807018
caaaacatag

SEQ ID NO: 143258 - DNA, 10 bp, Unknown
  misc_feature (1)..( 10): Result.003 file - promoters60/4807018
aagaaccaat

SEQ ID NO: 143259 - DNA, 10 bp, Unknown
  misc_feature (1)..( 10): Result.003 file - promoters60/4807018
tataaccaaa

SEQ ID NO: 143260 - DNA, 10 bp, Unknown
  misc_feature (1)..( 10): Result.003 file - promoters60/4807018
aataacaaat

SEQ ID NO: 143261 - DNA, 14 bp, Unknown
  misc_feature (1)..( 14): Result.003 file - promoters60/4807018
ttcttttatttcct

SEQ ID NO: 143262 - DNA, 14 bp, Unknown
  misc_feature (1)..( 14): Result.003 file - promoters60/4807018
atctattagtgtgg

SEQ ID NO: 143263 - DNA, 14 bp, Unknown
  misc_feature (1)..( 14): Result.003 file - promoters60/4807018
actttttgtttcct

SEQ ID NO: 143264 - DNA, 14 bp, Unknown
  misc_feature (1)..( 14): Result.003 file - promoters60/4807018
tattattagatccg

SEQ ID NO: 143265 - DNA, 14 bp, Unknown
  misc_feature (1)..( 14): Result.003 file - promoters60/4807018
atctatgatttctt

SEQ ID NO: 143266 - DNA, 14 bp, Unknown
  misc_feature (1)..( 14): Result.003 file - promoters60/4807018
tcctttttgtatca

SEQ ID NO: 143267 - DNA, 18 bp, Unknown
  misc_feature (1)..( 18): Result.003 file - promoters60/4807026
tacaacaaagttttgata

SEQ ID NO: 143268 - DNA, 18 bp, Unknown
  misc_feature (1)..( 18): Result.003 file - promoters60/4807026
accaaaaaagaagagcga

SEQ ID NO: 143269 - DNA, 18 bp, Unknown
  misc_feature (1)..( 18): Result.003 file - promoters60/4807026
gaaaaaaaagacaaacgg

SEQ ID NO: 143270 - DNA, 18 bp, Unknown
  misc_feature (1)..( 18): Result.003 file - promoters60/4807026
gttaaaaaatattattag

SEQ ID NO: 143271 - DNA, 18 bp, Unknown
  misc_feature (1)..( 18): Result.003 file - promoters60/4807026
ttaaaaaaagaagaaaaa

SEQ ID NO: 143272 - DNA, 18 bp, Unknown
  misc_feature (1)..( 18): Result.003 file - promoters60/4807026
atcgaaatagataacgtt

SEQ ID NO: 143273 - DNA, 18 bp, Unknown
  misc_feature (1)..( 18): Result.003 file - promoters60/4807026
accagaaatgaatttaga

SEQ ID NO: 143274 - DNA, 11 bp, Unknown
  misc_feature (1)..( 11): Result.003 file - promoters60/4807026
actatataaga

SEQ ID NO: 143275 - DNA, 11 bp, Unknown
  misc_feature (1)..( 11): Result.003 file - promoters60/4807026
catatataaat

SEQ ID NO: 143276 - DNA, 11 bp, Unknown
  misc_feature (1)..( 11): Result.003 file - promoters60/4807026
gagatataata

SEQ ID NO: 143277 - DNA, 11 bp, Unknown
  misc_feature (1)..( 11): Result.003 file - promoters60/4807026
tccctataaat

SEQ ID NO: 143278 - DNA, 11 bp, Unknown
  misc_feature (1)..( 11): Result.003 file - promoters60/4807026
tccttataaat

SEQ ID NO: 143279 - DNA, 11 bp, Unknown
  misc_feature (1)..( 11): Result.003 file - promoters60/4807026
tgatgatcctt

SEQ ID NO: 143280 - DNA, 11 bp, Unknown
  misc_feature (1)..( 11): Result.003 file - promoters60/4807026
gccttaaaaac

SEQ ID NO: 143281 - DNA, 11 bp, Unknown
  misc_feature (1)..( 11): Result.003 file - promoters60/4807026
ttcttatatct

SEQ ID NO: 143282 - DNA, 9 bp, Unknown
  misc_feature (1)..( 9): Result.003 file - promoters60/4807026
atattaata

SEQ ID NO: 143283 - DNA, 9 bp, Unknown
  misc_feature (1)..( 9): Result.003 file - promoters60/4807026
atataaata

SEQ ID NO: 143284 - DNA, 9 bp, Unknown
  misc_feature (1)..( 9): Result.003 file - promoters60/4807026
aaattaata

SEQ ID NO: 143285 - DNA, 9 bp, Unknown
  misc_feature (1)..( 9): Result.003 file - promoters60/4807026
ttataaaat

SEQ ID NO: 143286 - DNA, 9 bp, Unknown
  misc_feature (1)..( 9): Result.003 file - promoters60/4807026
ttataatca

SEQ ID NO: 143287 - DNA, 9 bp, Unknown
  misc_feature (1)..( 9): Result.003 file - promoters60/4807026
gtatcaaac

SEQ ID NO: 143288 - DNA, 15 bp, Unknown
  misc_feature (1)..( 15): Result.003 file - promoters60/4807026
atttggataaaacgc

SEQ ID NO: 143289 - DNA, 15 bp, Unknown
  misc_feature (1)..( 15): Result.003 file - promoters60/4807026
ctttgaataaaagct

SEQ ID NO: 143290 - DNA, 15 bp, Unknown
  misc_feature (1)..( 15): Result.003 file - promoters60/4807026
atatggataagtata

SEQ ID NO: 143291 - DNA, 15 bp, Unknown
  misc_feature (1)..( 15): Result.003 file - promoters60/4807026
gcttctttaacagct

SEQ ID NO: 143292 - DNA, 15 bp, Unknown
  misc_feature (1)..( 15): Result.003 file - promoters60/4807026
atcccacaaacagca

SEQ ID NO: 143293 - DNA, 15 bp, Unknown
  misc_feature (1)..( 15): Result.003 file - promoters60/4807026
ctttgaacattaaag

SEQ ID NO: 143294 - DNA, 15 bp, Unknown
  misc_feature (1)..( 15): Result.003 file - promoters60/4807026
atttgaacgtcgaat

SEQ ID NO: 143295 - DNA, 13 bp, Unknown
  misc_feature (1)..( 13): Result.003 file - promoters60/4807236
ttttaagtaaact

SEQ ID NO: 143296 - DNA, 13 bp, Unknown
  misc_feature (1)..( 13): Result.003 file - promoters60/4807236
ttttaacaataag

SEQ ID NO: 143297 - DNA, 13 bp, Unknown
  misc_feature (1)..( 13): Result.003 file - promoters60/4807236
atttagcaaaaag

SEQ ID NO: 143298 - DNA, 13 bp, Unknown
  misc_feature (1)..( 13): Result.003 file - promoters60/4807236
tcttagcaataaa

SEQ ID NO: 143299 - DNA, 9 bp, Unknown
  misc_feature (1)..( 9): Result.003 file - promoters60/4807258
cttgttttg

SEQ ID NO: 143300 - DNA, 9 bp, Unknown
  misc_feature (1)..( 9): Result.003 file - promoters60/4807258
tatgttttt

SEQ ID NO: 143301 - DNA, 9 bp, Unknown
  misc_feature (1)..( 9): Result.003 file - promoters60/4807258
cttgtttca

SEQ ID NO: 143302 - DNA, 9 bp, Unknown
  misc_feature (1)..( 9): Result.003 file - promoters60/4807258
tgagttttt

SEQ ID NO: 143303 - DNA, 7 bp, Unknown
  misc_feature (1)..( 7): Result.003 file - promoters60/4808052
gaaccat

SEQ ID NO: 143304 - DNA, 7 bp, Unknown
  misc_feature (1)..( 7): Result.003 file - promoters60/4808052
aaaccat

SEQ ID NO: 143305 - DNA, 7 bp, Unknown
  misc_feature (1)..( 7): Result.003 file - promoters60/4808052
aaaccaa

SEQ ID NO: 143306 - DNA, 10 bp, Unknown
  misc_feature (1)..( 10): Result.003 file - promoters60/4808052
ggtcaaaaac

SEQ ID NO: 143307 - DNA, 10 bp, Unknown
  misc_feature (1)..( 10): Result.003 file - promoters60/4808052
ggacaaaaac

SEQ ID NO: 143308 - DNA, 10 bp, Unknown
  misc_feature (1)..( 10): Result.003 file - promoters60/4808052
gaccaaaaga

SEQ ID NO: 143309 - DNA, 7 bp, Unknown
  misc_feature (1)..( 7): Result.003 file - promoters60/4808052
ttacaaa

SEQ ID NO: 143310 - DNA, 7 bp, Unknown
  misc_feature (1)..( 7): Result.003 file - promoters60/4808052
ttaaaaa

SEQ ID NO: 143311 - DNA, 7 bp, Unknown
  misc_feature (1)..( 7): Result.003 file - promoters60/4808052
ttaaaat

SEQ ID NO: 143312 - DNA, 7 bp, Unknown
  misc_feature (1)..( 7): Result.003 file - promoters60/4808052
caaatta

SEQ ID NO: 143313 - DNA, 7 bp, Unknown
  misc_feature (1)..( 7): Result.003 file - promoters60/4808052
aaaatta

SEQ ID NO: 143314 - DNA, 7 bp, Unknown
  misc_feature (1)..( 7): Result.003 file - promoters60/4808052
aaaattt

SEQ ID NO: 143315 - DNA, 7 bp, Unknown
  misc_feature (1)..( 7): Result.003 file - promoters60/4808052
agaccaa

SEQ ID NO: 143316 - DNA, 7 bp, Unknown
  misc_feature (1)..( 7): Result.003 file - promoters60/4808052
agatcaa

SEQ ID NO: 143317 - DNA, 7 bp, Unknown
  misc_feature (1)..( 7): Result.003 file - promoters60/4808052
ggatcaa

SEQ ID NO: 143318 - DNA, 6 bp, Unknown
  misc_feature (1)..( 6): Result.003 file - promoters60/4809801
ttttgc

SEQ ID NO: 143319 - DNA, 6 bp, Unknown
  misc_feature (1)..( 6): Result.003 file - promoters60/4809801
ttttgc

SEQ ID NO: 143320 - DNA, 9 bp, Unknown
  misc_feature (1)..( 9): Result.003 file - promoters60/4809801
atttccatg

SEQ ID NO: 143321 - DNA, 9 bp, Unknown
  misc_feature (1)..( 9): Result.003 file - promoters60/4809801
tcctccatg

SEQ ID NO: 143322 - DNA, 9 bp, Unknown
  misc_feature (1)..( 9): Result.003 file - promoters60/4809801
attgccatc

SEQ ID NO: 143323 - DNA, 7 bp, Unknown
  misc_feature (1)..( 7): Result.003 file - promoters60/4809801
atgtatg

SEQ ID NO: 143324 - DNA, 7 bp, Unknown
  misc_feature (1)..( 7): Result.003 file - promoters60/4809801
atgcatg

SEQ ID NO: 143325 - DNA, 7 bp, Unknown
  misc_feature (1)..( 7): Result.003 file - promoters60/4809801
ctaagga

SEQ ID NO: 143326 - DNA, 7 bp, Unknown
  misc_feature (1)..( 7): Result.003 file - promoters60/4809801
ctatgga

SEQ ID NO: 143327 - DNA, 7 bp, Unknown
  misc_feature (1)..( 7): Result.003 file - promoters60/4809801
ttgtgtt

SEQ ID NO: 143328 - DNA, 7 bp, Unknown
  misc_feature (1)..( 7): Result.003 file - promoters60/4809801
ttgtgtt

SEQ ID NO: 143329 - DNA, 7 bp, Unknown
  misc_feature (1)..( 7): Result.003 file - promoters60/4809801
caggaga

SEQ ID NO: 143330 - DNA, 7 bp, Unknown
  misc_feature (1)..( 7): Result.003 file - promoters60/4809801
cagaaga

SEQ ID NO: 143331 - DNA, 6 bp, Unknown
  misc_feature (1)..( 6): Result.003 file - promoters60/4809801
agatct

SEQ ID NO: 143332 - DNA, 6 bp, Unknown
  misc_feature (1)..( 6): Result.003 file - promoters60/4809801
agatct

SEQ ID NO: 143333 - DNA, 6 bp, Unknown
  misc_feature (1)..( 6): Result.003 file - promoters60/4809801
gaagaa

SEQ ID NO: 143334 - DNA, 6 bp, Unknown
  misc_feature (1)..( 6): Result.003 file - promoters60/4809801
gaagaa

SEQ ID NO: 143335 - DNA, 6 bp, Unknown
  misc_feature (1)..( 6): Result.003 file - promoters60/4809801
tttctt

SEQ ID NO: 143336 - DNA, 6 bp, Unknown
  misc_feature (1)..( 6): Result.003 file - promoters60/4809801
tttctt

SEQ ID NO: 143337 - DNA, 6 bp, Unknown
  misc_feature (1)..( 6): Result.003 file - promoters60/4809801
tttcaa

SEQ ID NO: 143338 - DNA, 6 bp, Unknown
  misc_feature (1)..( 6): Result.003 file - promoters60/4809801
tttcaa

SEQ ID NO: 143339 - DNA, 6 bp, Unknown
  misc_feature (1)..( 6): Result.003 file - promoters60/4809801
ctcatt

SEQ ID NO: 143340 - DNA, 6 bp, Unknown
  misc_feature (1)..( 6): Result.003 file - promoters60/4809801
ctcatt

SEQ ID NO: 143341 - DNA, 7 bp, Unknown
  misc_feature (1)..( 7): Result.003 file - promoters60/4809801
ctcttcc

SEQ ID NO: 143342 - DNA, 7 bp, Unknown
  misc_feature (1)..( 7): Result.003 file - promoters60/4809801
ctcctcc

SEQ ID NO: 143343 - DNA, 6 bp, Unknown
  misc_feature (1)..( 6): Result.003 file - promoters60/4811854
atctct

SEQ ID NO: 143344 - DNA, 6 bp, Unknown
  misc_feature (1)..( 6): Result.003 file - promoters60/4811854
atctct

SEQ ID NO: 143345 - DNA, 6 bp, Unknown
  misc_feature (1)..( 6): Result.003 file - promoters60/4811854
atatgt

SEQ ID NO: 143346 - DNA, 6 bp, Unknown
  misc_feature (1)..( 6): Result.003 file - promoters60/4811854
atatgt

SEQ ID NO: 143347 - DNA, 8 bp, Unknown
  misc_feature (1)..( 8): Result.003 file - promoters60/4811854
tttaattt

SEQ ID NO: 143348 - DNA, 8 bp, Unknown
  misc_feature (1)..( 8): Result.003 file - promoters60/4811854
attagttt

SEQ ID NO: 143349 - DNA, 8 bp, Unknown
  misc_feature (1)..( 8): Result.003 file - promoters60/4811854
tttcattc

SEQ ID NO: 143350 - DNA, 6 bp, Unknown
  misc_feature (1)..( 6): Result.003 file - promoters60/4811854
tttcat

SEQ ID NO: 143351 - DNA, 6 bp, Unknown
  misc_feature (1)..( 6): Result.003 file - promoters60/4811854
tttcat

SEQ ID NO: 143352 - DNA, 6 bp, Unknown
  misc_feature (1)..( 6): Result.003 file - promoters60/4811854
tttcat

SEQ ID NO: 143353 - DNA, 8 bp, Unknown
  misc_feature (1)..( 8): Result.003 file - promoters60/4811854
aagtataa

SEQ ID NO: 143354 - DNA, 8 bp, Unknown
  misc_feature (1)..( 8): Result.003 file - promoters60/4811854
aagtttaa

SEQ ID NO: 143355 - DNA, 13 bp, Unknown
  misc_feature (1)..( 13): Result.003 file - promoters60/4811854
cgacgattatata

SEQ ID NO: 143356 - DNA, 13 bp, Unknown
  misc_feature (1)..( 13): Result.003 file - promoters60/4811854
aaattattttata

SEQ ID NO: 143357 - DNA, 13 bp, Unknown
  misc_feature (1)..( 13): Result.003 file - promoters60/4811854
ttaaaattaattt

SEQ ID NO: 143358 - DNA, 7 bp, Unknown
  misc_feature (1)..( 7): Result.003 file - promoters60/4811854
aaatatg

SEQ ID NO: 143359 - DNA, 7 bp, Unknown
  misc_feature (1)..( 7): Result.003 file - promoters60/4811854
aaaaatg

SEQ ID NO: 143360 - DNA, 12 bp, Unknown
  misc_feature (1)..( 12): Result.003 file - promoters60/4811854
tcctcacgatta

SEQ ID NO: 143361 - DNA, 12 bp, Unknown
  misc_feature (1)..( 12): Result.003 file - promoters60/4811854
tcctcgcgatta

SEQ ID NO: 143362 - DNA, 6 bp, Unknown
  misc_feature (1)..( 6): Result.003 file - promoters60/4811854
gctctt

SEQ ID NO: 143363 - DNA, 6 bp, Unknown
  misc_feature (1)..( 6): Result.003 file - promoters60/4811854
gctctt

SEQ ID NO: 143364 - DNA, 6 bp, Unknown
  misc_feature (1)..( 6): Result.003 file - promoters60/4811854
cctcaa

SEQ ID NO: 143365 - DNA, 6 bp, Unknown
  misc_feature (1)..( 6): Result.003 file - promoters60/4811854
cctcaa

SEQ ID NO: 143366 - DNA, 8 bp, Unknown
  misc_feature (1)..( 8): Result.003 file - promoters60/4811854
tctaaatt

SEQ ID NO: 143367 - DNA, 8 bp, Unknown
  misc_feature (1)..( 8): Result.003 file - promoters60/4811854
tctatatt

SEQ ID NO: 143368 - DNA, 8 bp, Unknown
  misc_feature (1)..( 8): Result.003 file - promoters60/4811854
tctctatc

SEQ ID NO: 143369 - DNA, 6 bp, Unknown
  misc_feature (1)..( 6): Result.003 file - promoters60/4811854
gatttt

SEQ ID NO: 143370 - DNA, 6 bp, Unknown
  misc_feature (1)..( 6): Result.003 file - promoters60/4811854
gatttt

SEQ ID NO: 143371 - DNA, 6 bp, Unknown
  misc_feature (1)..( 6): Result.003 file - promoters60/4811854
tacata

SEQ ID NO: 143372 - DNA, 6 bp, Unknown
  misc_feature (1)..( 6): Result.003 file - promoters60/4811854
tacata

SEQ ID NO: 143373 - DNA, 10 bp, Unknown
  misc_feature (1)..( 10): Result.003 file - promoters60/4811854
attaatattt

SEQ ID NO: 143374 - DNA, 10 bp, Unknown
  misc_feature (1)..( 10): Result.003 file - promoters60/4811854
attaattttt

SEQ ID NO: 143375 - DNA, 10 bp, Unknown
  misc_feature (1)..( 10): Result.003 file - promoters60/4811854
tataatttaa

SEQ ID NO: 143376 - DNA, 7 bp, Unknown
  misc_feature (1)..( 7): Result.003 file - promoters60/4811854
catcaca

SEQ ID NO: 143377 - DNA, 7 bp, Unknown
  misc_feature (1)..( 7): Result.003 file - promoters60/4811854
catcaca

SEQ ID NO: 143378 - DNA, 8 bp, Unknown
  misc_feature (1)..( 8): Result.003 file - promoters60/4811854
aaaataca

SEQ ID NO: 143379 - DNA, 8 bp, Unknown
  misc_feature (1)..( 8): Result.003 file - promoters60/4811854
aaaaaaca

SEQ ID NO: 143380 - DNA, 6 bp, Unknown
  misc_feature (1)..( 6): Result.003 file - promoters60/4811854
tttaaa

SEQ ID NO: 143381 - DNA, 6 bp, Unknown
  misc_feature (1)..( 6): Result.003 file - promoters60/4811854
tttaaa

SEQ ID NO: 143382 - DNA, 9 bp, Unknown
  misc_feature (1)..( 9): Result.003 file - promoters60/4811854
atctaattt

SEQ ID NO: 143383 - DNA, 9 bp, Unknown
  misc_feature (1)..( 9): Result.003 file - promoters60/4811854
atctcattt

SEQ ID NO: 143384 - DNA, 7 bp, Unknown
  misc_feature (1)..( 7): Result.003 file - promoters60/4811854
ttaaaat

SEQ ID NO: 143385 - DNA, 7 bp, Unknown
  misc_feature (1)..( 7): Result.003 file - promoters60/4811854
ttaaaat

SEQ ID NO: 143386 - DNA, 6 bp, Unknown
  misc_feature (1)..( 6): Result.003 file - promoters60/4811854
aaatta

SEQ ID NO: 143387 - DNA, 6 bp, Unknown
  misc_feature (1)..( 6): Result.003 file - promoters60/4811854
aaatta

SEQ ID NO: 143388 - DNA, 9 bp, Unknown
  misc_feature (1)..( 9): Result.003 file - promoters60/4811854
gtatttttc

SEQ ID NO: 143389 - DNA, 9 bp, Unknown
  misc_feature (1)..( 9): Result.003 file - promoters60/4811854
gtatatttc

SEQ ID NO: 143390 - DNA, 7 bp, Unknown
  misc_feature (1)..( 7): Result.003 file - promoters60/4811854
ggatgct

SEQ ID NO: 143391 - DNA, 7 bp, Unknown
  misc_feature (1)..( 7): Result.003 file - promoters60/4811854
ggacgct

SEQ ID NO: 143392 - DNA, 6 bp, Unknown
  misc_feature (1)..( 6): Result.003 file - promoters60/4811854
aaataa

SEQ ID NO: 143393 - DNA, 6 bp, Unknown
  misc_feature (1)..( 6): Result.003 file - promoters60/4811854
aaataa

SEQ ID NO: 143394 - DNA, 6 bp, Unknown
  misc_feature (1)..( 6): Result.003 file - promoters60/4811854
taaata

SEQ ID NO: 143395 - DNA, 6 bp, Unknown
  misc_feature (1)..( 6): Result.003 file - promoters60/4811854
taaata

SEQ ID NO: 143396 - DNA, 6 bp, Unknown
  misc_feature (1)..( 6): Result.003 file - promoters60/4811854
attaaa

SEQ ID NO: 143397 - DNA, 6 bp, Unknown
  misc_feature (1)..( 6): Result.003 file - promoters60/4811854
attaaa

SEQ ID NO: 143398 - DNA, 8 bp, Unknown
  misc_feature (1)..( 8): Result.003 file - promoters60/4811854
aaaagtta

SEQ ID NO: 143399 - DNA, 8 bp, Unknown
  misc_feature (1)..( 8): Result.003 file - promoters60/4811854
aaaagtta

SEQ ID NO: 143400 - DNA, 7 bp, Unknown
  misc_feature (1)..( 7): Result.003 file - promoters60/4811854
catctat

SEQ ID NO: 143401 - DNA, 7 bp, Unknown
  misc_feature (1)..( 7): Result.003 file - promoters60/4811854
catttat

SEQ ID NO: 143402 - DNA, 8 bp, Unknown
  misc_feature (1)..( 8): Result.003 file - promoters60/4811975
atattact

SEQ ID NO: 143403 - DNA, 8 bp, Unknown
  misc_feature (1)..( 8): Result.003 file - promoters60/4811975
atactact

SEQ ID NO: 143404 - DNA, 7 bp, Unknown
  misc_feature (1)..( 7): Result.003 file - promoters60/4811975
caaatac

SEQ ID NO: 143405 - DNA, 7 bp, Unknown
  misc_feature (1)..( 7): Result.003 file - promoters60/4811975
caattac

SEQ ID NO: 143406 - DNA, 11 bp, Unknown
  misc_feature (1)..( 11): Result.003 file - promoters60/4811975
tatattaaata

SEQ ID NO: 143407 - DNA, 11 bp, Unknown
  misc_feature (1)..( 11): Result.003 file - promoters60/4811975
tatattttttt

SEQ ID NO: 143408 - DNA, 11 bp, Unknown
  misc_feature (1)..( 11): Result.003 file - promoters60/4811975
gatattttttt

SEQ ID NO: 143409 - DNA, 6 bp, Unknown
  misc_feature (1)..( 6): Result.003 file - promoters60/4811975
tatatg

SEQ ID NO: 143410 - DNA, 6 bp, Unknown
  misc_feature (1)..( 6): Result.003 file - promoters60/4811975
tatatg

SEQ ID NO: 143411 - DNA, 6 bp, Unknown
  misc_feature (1)..( 6): Result.003 file - promoters60/4811975
ttcaaa

SEQ ID NO: 143412 - DNA, 6 bp, Unknown
  misc_feature (1)..( 6): Result.003 file - promoters60/4811975
ttcaaa

SEQ ID NO: 143413 - DNA, 9 bp, Unknown
  misc_feature (1)..( 9): Result.003 file - promoters60/4811975
atactctca

SEQ ID NO: 143414 - DNA, 9 bp, Unknown
  misc_feature (1)..( 9): Result.003 file - promoters60/4811975
atattctca

SEQ ID NO: 143415 - DNA, 6 bp, Unknown
  misc_feature (1)..( 6): Result.003 file - promoters60/4811975
tcaaac

SEQ ID NO: 143416 - DNA, 6 bp, Unknown
  misc_feature (1)..( 6): Result.003 file - promoters60/4811975
tcaaac

SEQ ID NO: 143417 - DNA, 6 bp, Unknown
  misc_feature (1)..( 6): Result.003 file - promoters60/4811975
ttttct

SEQ ID NO: 143418 - DNA, 6 bp, Unknown
  misc_feature (1)..( 6): Result.003 file - promoters60/4811975
ttttct

SEQ ID NO: 143419 - DNA, 7 bp, Unknown
  misc_feature (1)..( 7): Result.003 file - promoters60/4811975
gaattca

SEQ ID NO: 143420 - DNA, 7 bp, Unknown
  misc_feature (1)..( 7): Result.003 file - promoters60/4811975
gaaatca

SEQ ID NO: 143421 - DNA, 6 bp, Unknown
  misc_feature (1)..( 6): Result.003 file - promoters60/4811975
atcttg

SEQ ID NO: 143422 - DNA, 6 bp, Unknown
  misc_feature (1)..( 6): Result.003 file - promoters60/4811975
atcttg

SEQ ID NO: 143423 - DNA, 6 bp, Unknown
  misc_feature (1)..( 6): Result.003 file - promoters60/4811975
acacaa

SEQ ID NO: 143424 - DNA, 6 bp, Unknown
  misc_feature (1)..( 6): Result.003 file - promoters60/4811975
acacaa

SEQ ID NO: 143425 - DNA, 12 bp, Unknown
  misc_feature (1)..( 12): Result.003 file - promoters60/4811975
atgttttcaata

SEQ ID NO: 143426 - DNA, 12 bp, Unknown
  misc_feature (1)..( 12): Result.003 file - promoters60/4811975
atttttttaata

SEQ ID NO: 143427 - DNA, 12 bp, Unknown
  misc_feature (1)..( 12): Result.003 file - promoters60/4811975
atattttttttt

SEQ ID NO: 143428 - DNA, 7 bp, Unknown
  misc_feature (1)..( 7): Result.003 file - promoters60/4811975
actattc

SEQ ID NO: 143429 - DNA, 7 bp, Unknown
  misc_feature (1)..( 7): Result.003 file - promoters60/4811975
actcttc

SEQ ID NO: 143430 - DNA, 11 bp, Unknown
  misc_feature (1)..( 11): Result.003 file - promoters60/4811975
accggttatta

SEQ ID NO: 143431 - DNA, 11 bp, Unknown
  misc_feature (1)..( 11): Result.003 file - promoters60/4811975
accggatatta

SEQ ID NO: 143432 - DNA, 6 bp, Unknown
  misc_feature (1)..( 6): Result.003 file - promoters60/4811975
tactgt

SEQ ID NO: 143433 - DNA, 6 bp, Unknown
  misc_feature (1)..( 6): Result.003 file - promoters60/4811975
tactgt

SEQ ID NO: 143434 - DNA, 9 bp, Unknown
  misc_feature (1)..( 9): Result.003 file - promoters60/4811975
tcaaaattt

SEQ ID NO: 143435 - DNA, 9 bp, Unknown
  misc_feature (1)..( 9): Result.003 file - promoters60/4811975
tcagaattt

SEQ ID NO: 143436 - DNA, 6 bp, Unknown
  misc_feature (1)..( 6): Result.003 file - promoters60/4811975
ttgaaa

SEQ ID NO: 143437 - DNA, 6 bp, Unknown
  misc_feature (1)..( 6): Result.003 file - promoters60/4811975
ttgaaa

SEQ ID NO: 143438 - DNA, 7 bp, Unknown
  misc_feature (1)..( 7): Result.003 file - promoters60/4811975
cttctcc

SEQ ID NO: 143439 - DNA, 7 bp, Unknown
  misc_feature (1)..( 7): Result.003 file - promoters60/4811975
cttgtcc

SEQ ID NO: 143440 - DNA, 7 bp, Unknown
  misc_feature (1)..( 7): Result.003 file - promoters60/4811975
ttcatgt

SEQ ID NO: 143441 - DNA, 7 bp, Unknown
  misc_feature (1)..( 7): Result.003 file - promoters60/4811975
ttcatgt

SEQ ID NO: 143442 - DNA, 7 bp, Unknown
  misc_feature (1)..( 7): Result.003 file - promoters60/4811975
aagcttt

SEQ ID NO: 143443 - DNA, 7 bp, Unknown
  misc_feature (1)..( 7): Result.003 file - promoters60/4811975
aagattt

SEQ ID NO: 143444 - DNA, 7 bp, Unknown
  misc_feature (1)..( 7): Result.003 file - promoters60/4811975
tacctca

SEQ ID NO: 143445 - DNA, 7 bp, Unknown
  misc_feature (1)..( 7): Result.003 file - promoters60/4811975
tacctca

SEQ ID NO: 143446 - DNA, 7 bp, Unknown
  misc_feature (1)..( 7): Result.003 file - promoters60/4811975
ttttata

SEQ ID NO: 143447 - DNA, 7 bp, Unknown
  misc_feature (1)..( 7): Result.003 file - promoters60/4811975
tttgata

SEQ ID NO: 143448 - DNA, 9 bp, Unknown
  misc_feature (1)..( 9): Result.003 file - promoters60/4811975
catccttat

SEQ ID NO: 143449 - DNA, 9 bp, Unknown
  misc_feature (1)..( 9): Result.003 file - promoters60/4811975
catcattat

SEQ ID NO: 143450 - DNA, 7 bp, Unknown
  misc_feature (1)..( 7): Result.003 file - promoters60/4854186
caccgaa

SEQ ID NO: 143451 - DNA, 7 bp, Unknown
  misc_feature (1)..( 7): Result.003 file - promoters60/4854186
cacagaa

SEQ ID NO: 143452 - DNA, 8 bp, Unknown
  misc_feature (1)..( 8): Result.003 file - promoters60/4854186
aatcgata

SEQ ID NO: 143453 - DNA, 8 bp, Unknown
  misc_feature (1)..( 8): Result.003 file - promoters60/4854186
aatagata

SEQ ID NO: 143454 - DNA, 8 bp, Unknown
  misc_feature (1)..( 8): Result.003 file - promoters60/4854186
aatctata

SEQ ID NO: 143455 - DNA, 7 bp, Unknown
  misc_feature (1)..( 7): Result.003 file - promoters60/4854186
agaacgg

SEQ ID NO: 143456 - DNA, 7 bp, Unknown
  misc_feature (1)..( 7): Result.003 file - promoters60/4854186
agagcgg

SEQ ID NO: 143457 - DNA, 6 bp, Unknown
  misc_feature (1)..( 6): Result.003 file - promoters60/4854186
tgggct

SEQ ID NO: 143458 - DNA, 6 bp, Unknown
  misc_feature (1)..( 6): Result.003 file - promoters60/4854186
tgggct

SEQ ID NO: 143459 - DNA, 8 bp, Unknown
  misc_feature (1)..( 8): Result.003 file - promoters60/4854186
tttgatta

SEQ ID NO: 143460 - DNA, 8 bp, Unknown
  misc_feature (1)..( 8): Result.003 file - promoters60/4854186
ttttatta

SEQ ID NO: 143461 - DNA, 8 bp, Unknown
  misc_feature (1)..( 8): Result.003 file - promoters60/4854186
tattcata

SEQ ID NO: 143462 - DNA, 8 bp, Unknown
  misc_feature (1)..( 8): Result.003 file - promoters60/4854186
tatgcata

SEQ ID NO: 143463 - DNA, 6 bp, Unknown
  misc_feature (1)..( 6): Result.003 file - promoters60/4854186
ttagtg

SEQ ID NO: 143464 - DNA, 6 bp, Unknown
  misc_feature (1)..( 6): Result.003 file - promoters60/4854186
ttagtg

SEQ ID NO: 143465 - DNA, 7 bp, Unknown
  misc_feature (1)..( 7): Result.003 file - promoters60/4854186
ccctaat

SEQ ID NO: 143466 - DNA, 7 bp, Unknown
  misc_feature (1)..( 7): Result.003 file - promoters60/4854186
cccaaat

SEQ ID NO: 143467 - DNA, 7 bp, Unknown
  misc_feature (1)..( 7): Result.003 file - promoters60/4854186
aactaat

SEQ ID NO: 143468 - DNA, 7 bp, Unknown
  misc_feature (1)..( 7): Result.003 file - promoters60/4854186
aacaaat

SEQ ID NO: 143469 - DNA, 6 bp, Unknown
  misc_feature (1)..( 6): Result.003 file - promoters60/4854186
aaaatt

SEQ ID NO: 143470 - DNA, 6 bp, Unknown
  misc_feature (1)..( 6): Result.003 file - promoters60/4854186
aaaatt

SEQ ID NO: 143471 - DNA, 7 bp, Unknown
  misc_feature (1)..( 7): Result.003 file - promoters60/4854186
ataaaaa

SEQ ID NO: 143472 - DNA, 7 bp, Unknown
  misc_feature (1)..( 7): Result.003 file - promoters60/4854186
ataaaaa

SEQ ID NO: 143473 - DNA, 6 bp, Unknown
  misc_feature (1)..( 6): Result.003 file - promoters60/4854186
ggccca

SEQ ID NO: 143474 - DNA, 6 bp, Unknown
  misc_feature (1)..( 6): Result.003 file - promoters60/4854186
ggccca

SEQ ID NO: 143475 - DNA, 8 bp, Unknown
  misc_feature (1)..( 8): Result.003 file - promoters60/4899822
ttagaaaa

SEQ ID NO: 143476 - DNA, 8 bp, Unknown
  misc_feature (1)..( 8): Result.003 file - promoters60/4899822
aaagaaaa

SEQ ID NO: 143477 - DNA, 8 bp, Unknown
  misc_feature (1)..( 8): Result.003 file - promoters60/4899822
aaacaaaa

SEQ ID NO: 143478 - DNA, 8 bp, Unknown
  misc_feature (1)..( 8): Result.003 file - promoters60/4899822
aaataaaa

SEQ ID NO: 143479 - DNA, 8 bp, Unknown
  misc_feature (1)..( 8): Result.003 file - promoters60/4899822
taagaaaa

SEQ ID NO: 143480 - DNA, 13 bp, Unknown
  misc_feature (1)..( 13): Result.003 file - promoters60/4899822
aaattatataaag

SEQ ID NO: 143481 - DNA, 13 bp, Unknown
  misc_feature (1)..( 13): Result.003 file - promoters60/4899822
tgtaaataaaaag

SEQ ID NO: 143482 - DNA, 13 bp, Unknown
  misc_feature (1)..( 13): Result.003 file - promoters60/4899822
accaaacaaaacc

SEQ ID NO: 143483 - DNA, 13 bp, Unknown
  misc_feature (1)..( 13): Result.003 file - promoters60/4899822
tgtaaagaaaaga

SEQ ID NO: 143484 - DNA, 13 bp, Unknown
  misc_feature (1)..( 13): Result.003 file - promoters60/4899822
ctttaagaaaagc

SEQ ID NO: 143485 - DNA, 14 bp, Unknown
  misc_feature (1)..( 14): Result.003 file - promoters60/4899822
aaacaaaaccgaat

SEQ ID NO: 143486 - DNA, 14 bp, Unknown
  misc_feature (1)..( 14): Result.003 file - promoters60/4899822
aaaagaaactgaat

SEQ ID NO: 143487 - DNA, 14 bp, Unknown
  misc_feature (1)..( 14): Result.003 file - promoters60/4899822
aaaagaaaatgata

SEQ ID NO: 143488 - DNA, 14 bp, Unknown
  misc_feature (1)..( 14): Result.003 file - promoters60/4899822
ttaagaaaagccca

SEQ ID NO: 143489 - DNA, 15 bp, Unknown
  misc_feature (1)..( 15): Result.003 file - promoters60/4899822
ggctgaataataatt

SEQ ID NO: 143490 - DNA, 8 bp, Unknown
  misc_feature (1)..( 8): Result.003 file - promoters60/4899880
attattag

SEQ ID NO: 143491 - DNA, 8 bp, Unknown
  misc_feature (1)..( 8): Result.003 file - promoters60/4899880
atttttag

SEQ ID NO: 143492 - DNA, 8 bp, Unknown
  misc_feature (1)..( 8): Result.003 file - promoters60/4899880
atttgtag

SEQ ID NO: 143493 - DNA, 8 bp, Unknown
  misc_feature (1)..( 8): Result.003 file - promoters60/4899880
tcaccatg

SEQ ID NO: 143494 - DNA, 8 bp, Unknown
  misc_feature (1)..( 8): Result.003 file - promoters60/4899880
tcagcatg

SEQ ID NO: 143495 - DNA, 6 bp, Unknown
  misc_feature (1)..( 6): Result.003 file - promoters60/4899880
catgag

SEQ ID NO: 143496 - DNA, 6 bp, Unknown
  misc_feature (1)..( 6): Result.003 file - promoters60/4899880
catgag

SEQ ID NO: 143497 - DNA, 6 bp, Unknown
  misc_feature (1)..( 6): Result.003 file - promoters60/4899880
tatcat

SEQ ID NO: 143498 - DNA, 6 bp, Unknown
  misc_feature (1)..( 6): Result.003 file - promoters60/4899880
tatcat

SEQ ID NO: 143499 - DNA, 7 bp, Unknown
  misc_feature (1)..( 7): Result.003 file - promoters60/4899880
gacaagt

SEQ ID NO: 143500 - DNA, 7 bp, Unknown
  misc_feature (1)..( 7): Result.003 file - promoters60/4899880
gacaagt

SEQ ID NO: 143501 - DNA, 8 bp, Unknown
  misc_feature (1)..( 8): Result.003 file - promoters60/4899880
ccaacaaa

SEQ ID NO: 143502 - DNA, 8 bp, Unknown
  misc_feature (1)..( 8): Result.003 file - promoters60/4899880
ccaataaa

SEQ ID NO: 143503 - DNA, 7 bp, Unknown
  misc_feature (1)..( 7): Result.003 file - promoters60/4899880
gaatagt

SEQ ID NO: 143504 - DNA, 7 bp, Unknown
  misc_feature (1)..( 7): Result.003 file - promoters60/4899880
gaaaagt

SEQ ID NO: 143505 - DNA, 6 bp, Unknown
  misc_feature (1)..( 6): Result.003 file - promoters60/4899880
ttaaat

SEQ ID NO: 143506 - DNA, 6 bp, Unknown
  misc_feature (1)..( 6): Result.003 file - promoters60/4899880
ttaaat

SEQ ID NO: 143507 - DNA, 6 bp, Unknown
  misc_feature (1)..( 6): Result.003 file - promoters60/4899880
tttgta

SEQ ID NO: 143508 - DNA, 6 bp, Unknown
  misc_feature (1)..( 6): Result.003 file - promoters60/4899880
tttgta

SEQ ID NO: 143509 - DNA, 8 bp, Unknown
  misc_feature (1)..( 8): Result.003 file - promoters60/4899880
taaagaag

SEQ ID NO: 143510 - DNA, 8 bp, Unknown
  misc_feature (1)..( 8): Result.003 file - promoters60/4899880
taaacaag

SEQ ID NO: 143511 - DNA, 6 bp, Unknown
  misc_feature (1)..( 6): Result.003 file - promoters60/4899880
gaaaaa

SEQ ID NO: 143512 - DNA, 6 bp, Unknown
  misc_feature (1)..( 6): Result.003 file - promoters60/4899880
gaaaaa

SEQ ID NO: 143513 - DNA, 10 bp, Unknown
  misc_feature (1)..( 10): Result.003 file - promoters60/4899880
aaaacaattc

SEQ ID NO: 143514 - DNA, 10 bp, Unknown
  misc_feature (1)..( 10): Result.003 file - promoters60/4899880
aaaataattc

SEQ ID NO: 143515 - DNA, 9 bp, Unknown
  misc_feature (1)..( 9): Result.003 file - promoters60/4899880
ctataattt

SEQ ID NO: 143516 - DNA, 9 bp, Unknown
  misc_feature (1)..( 9): Result.003 file - promoters60/4899880
ctatcattt

SEQ ID NO: 143517 - DNA, 11 bp, Unknown
  misc_feature (1)..( 11): Result.003 file - promoters60/4899880
aaaataaaaat

SEQ ID NO: 143518 - DNA, 11 bp, Unknown
  misc_feature (1)..( 11): Result.003 file - promoters60/4899880
aaaataaaaat

SEQ ID NO: 143519 - DNA, 10 bp, Unknown
  misc_feature (1)..( 10): Result.003 file - promoters60/4899880
taaaatcggt

SEQ ID NO: 143520 - DNA, 10 bp, Unknown
  misc_feature (1)..( 10): Result.003 file - promoters60/4899880
taaaataagt

SEQ ID NO: 143521 - DNA, 10 bp, Unknown
  misc_feature (1)..( 10): Result.003 file - promoters60/4899880
tcaaatcaaa

SEQ ID NO: 143522 - DNA, 6 bp, Unknown
  misc_feature (1)..( 6): Result.003 file - promoters60/4899880
caaaga

SEQ ID NO: 143523 - DNA, 6 bp, Unknown
  misc_feature (1)..( 6): Result.003 file - promoters60/4899880
caaaga

SEQ ID NO: 143524 - DNA, 7 bp, Unknown
  misc_feature (1)..( 7): Result.003 file - promoters60/4899880
gtacgag

SEQ ID NO: 143525 - DNA, 7 bp, Unknown
  misc_feature (1)..( 7): Result.003 file - promoters60/4899880
gtaggag

SEQ ID NO: 143526 - DNA, 8 bp, Unknown
  misc_feature (1)..( 8): Result.003 file - promoters60/4899880
ctttggaa

SEQ ID NO: 143527 - DNA, 8 bp, Unknown
  misc_feature (1)..( 8): Result.003 file - promoters60/4899880
ctttggaa

SEQ ID NO: 143528 - DNA, 6 bp, Unknown
  misc_feature (1)..( 6): Result.003 file - promoters60/4899880
gtggtt

SEQ ID NO: 143529 - DNA, 6 bp, Unknown
  misc_feature (1)..( 6): Result.003 file - promoters60/4899880
gtggtt

SEQ ID NO: 143530 - DNA, 6 bp, Unknown
  misc_feature (1)..( 6): Result.003 file - promoters60/4899880
aggaaa

SEQ ID NO: 143531 - DNA, 6 bp, Unknown
  misc_feature (1)..( 6): Result.003 file - promoters60/4899880
aggaaa

SEQ ID NO: 143532 - DNA, 6 bp, Unknown
  misc_feature (1)..( 6): Result.003 file - promoters60/4899880
atctac

SEQ ID NO: 143533 - DNA, 6 bp, Unknown
  misc_feature (1)..( 6): Result.003 file - promoters60/4899880
atctac

SEQ ID NO: 143534 - DNA, 6 bp, Unknown
  misc_feature (1)..( 6): Result.003 file - promoters60/4899880
tctttt

SEQ ID NO: 143535 - DNA, 6 bp, Unknown
  misc_feature (1)..( 6): Result.003 file - promoters60/4899880
tctttt

SEQ ID NO: 143536 - DNA, 7 bp, Unknown
  misc_feature (1)..( 7): Result.003 file - promoters60/4899880
ttttgta

SEQ ID NO: 143537 - DNA, 7 bp, Unknown
  misc_feature (1)..( 7): Result.003 file - promoters60/4899880
ttttgta

SEQ ID NO: 143538 - DNA, 8 bp, Unknown
  misc_feature (1)..( 8): Result.003 file - promoters60/4899880
tttaagtg

SEQ ID NO: 143539 - DNA, 8 bp, Unknown
  misc_feature (1)..( 8): Result.003 file - promoters60/4899880
tttatgtg

SEQ ID NO: 143540 - DNA, 8 bp, Unknown
  misc_feature (1)..( 8): Result.003 file - promoters60/4899880
ttgagata

SEQ ID NO: 143541 - DNA, 8 bp, Unknown
  misc_feature (1)..( 8): Result.003 file - promoters60/4899880
ttgatata

SEQ ID NO: 143542 - DNA, 11 bp, Unknown
  misc_feature (1)..( 11): Result.003 file - promoters60/4900035
taataattaaa

SEQ ID NO: 143543 - DNA, 11 bp, Unknown
  misc_feature (1)..( 11): Result.003 file - promoters60/4900035
caataatggcc

SEQ ID NO: 143544 - DNA, 11 bp, Unknown
  misc_feature (1)..( 11): Result.003 file - promoters60/4900035
aaataattctt

SEQ ID NO: 143545 - DNA, 11 bp, Unknown
  misc_feature (1)..( 11): Result.003 file - promoters60/4900035
gaatagttaaa

SEQ ID NO: 143546 - DNA, 11 bp, Unknown
  misc_feature (1)..( 11): Result.003 file - promoters60/4900035
aaaaaattact

SEQ ID NO: 143547 - DNA, 12 bp, Unknown
  misc_feature (1)..( 12): Result.003 file - promoters60/4900035
atttagatcgga

SEQ ID NO: 143548 - DNA, 10 bp, Unknown
  misc_feature (1)..( 10): Result.003 file - promoters60/4900035
agaatgtatt

SEQ ID NO: 143549 - DNA, 10 bp, Unknown
  misc_feature (1)..( 10): Result.003 file - promoters60/4900035
aaaatatatt

SEQ ID NO: 143550 - DNA, 10 bp, Unknown
  misc_feature (1)..( 10): Result.003 file - promoters60/4900035
agagtgtaca

SEQ ID NO: 143551 - DNA, 10 bp, Unknown
  misc_feature (1)..( 10): Result.003 file - promoters60/4900035
aaaacataac

SEQ ID NO: 143552 - DNA, 10 bp, Unknown
  misc_feature (1)..( 10): Result.003 file - promoters60/4900035
aaaacaaatt

SEQ ID NO: 143553 - DNA, 10 bp, Unknown
  misc_feature (1)..( 10): Result.003 file - promoters60/4900035
taaacttaat

SEQ ID NO: 143554 - DNA, 9 bp, Unknown
  misc_feature (1)..( 9): Result.003 file - promoters60/4900035
gataaaacc

SEQ ID NO: 143555 - DNA, 9 bp, Unknown
  misc_feature (1)..( 9): Result.003 file - promoters60/4900035
tataaaaat

SEQ ID NO: 143556 - DNA, 9 bp, Unknown
  misc_feature (1)..( 9): Result.003 file - promoters60/4900035
gattaaatt

SEQ ID NO: 143557 - DNA, 9 bp, Unknown
  misc_feature (1)..( 9): Result.003 file - promoters60/4900035
gatgaaaga

SEQ ID NO: 143558 - DNA, 9 bp, Unknown
  misc_feature (1)..( 9): Result.003 file - promoters60/4900035
gattaatac

SEQ ID NO: 143559 - DNA, 9 bp, Unknown
  misc_feature (1)..( 9): Result.003 file - promoters60/4900035
agttaaatc

SEQ ID NO: 143560 - DNA, 9 bp, Unknown
  misc_feature (1)..( 9): Result.003 file - promoters60/4900035
aatgagaga

SEQ ID NO: 143561 - DNA, 13 bp, Unknown
  misc_feature (1)..( 13): Result.003 file - promoters60/4900035
gttatatcaatca

SEQ ID NO: 143562 - DNA, 13 bp, Unknown
  misc_feature (1)..( 13): Result.003 file - promoters60/4900035
tttatctcacaaa

SEQ ID NO: 143563 - DNA, 13 bp, Unknown
  misc_feature (1)..( 13): Result.003 file - promoters60/4900035
cttagatccgcca

SEQ ID NO: 143564 - DNA, 13 bp, Unknown
  misc_feature (1)..( 13): Result.003 file - promoters60/4900035
aagttatcaatca

SEQ ID NO: 143565 - DNA, 13 bp, Unknown
  misc_feature (1)..( 13): Result.003 file - promoters60/4900035
tttttctttgaaa

SEQ ID NO: 143566 - DNA, 13 bp, Unknown
  misc_feature (1)..( 13): Result.003 file - promoters60/4900035
ggtttatccggat

SEQ ID NO: 143567 - DNA, 15 bp, Unknown
  misc_feature (1)..( 15): Result.003 file - promoters60/4900353
ccaaacaaaacatat

SEQ ID NO: 143568 - DNA, 15 bp, Unknown
  misc_feature (1)..( 15): Result.003 file - promoters60/4900353
ttctataaaaaatat

SEQ ID NO: 143569 - DNA, 15 bp, Unknown
  misc_feature (1)..( 15): Result.003 file - promoters60/4900353
agatacaaaacccta

SEQ ID NO: 143570 - DNA, 15 bp, Unknown
  misc_feature (1)..( 15): Result.003 file - promoters60/4900353
aattttaaaaaatgt

SEQ ID NO: 143571 - DNA, 15 bp, Unknown
  misc_feature (1)..( 15): Result.003 file - promoters60/4900353
ctatataaaaccaag

SEQ ID NO: 143572 - DNA, 15 bp, Unknown
  misc_feature (1)..( 15): Result.003 file - promoters60/4900353
tggtgataaatattc

SEQ ID NO: 143573 - DNA, 15 bp, Unknown
  misc_feature (1)..( 15): Result.003 file - promoters60/4900353
ggctttataatattg

SEQ ID NO: 143574 - DNA, 7 bp, Unknown
  misc_feature (1)..( 7): Result.003 file - promoters60/4900589
gtagatc

SEQ ID NO: 143575 - DNA, 7 bp, Unknown
  misc_feature (1)..( 7): Result.003 file - promoters60/4900589
gtaaatc

SEQ ID NO: 143576 - DNA, 7 bp, Unknown
  misc_feature (1)..( 7): Result.003 file - promoters60/4900589
ttagatc

SEQ ID NO: 143577 - DNA, 11 bp, Unknown
  misc_feature (1)..( 11): Result.003 file - promoters60/4900589
taataaattga

SEQ ID NO: 143578 - DNA, 11 bp, Unknown
  misc_feature (1)..( 11): Result.003 file - promoters60/4900589
gtataaattga

SEQ ID NO: 143579 - DNA, 11 bp, Unknown
  misc_feature (1)..( 11): Result.003 file - promoters60/4900589
gtaaaaatatc

SEQ ID NO: 143580 - DNA, 8 bp, Unknown
  misc_feature (1)..( 8): Result.003 file - promoters60/4900589
tttctttt

SEQ ID NO: 143581 - DNA, 8 bp, Unknown
  misc_feature (1)..( 8): Result.003 file - promoters60/4900589
tttgtttg

SEQ ID NO: 143582 - DNA, 8 bp, Unknown
  misc_feature (1)..( 8): Result.003 file - promoters60/4900589
tttgtttt

SEQ ID NO: 143583 - DNA, 12 bp, Unknown
  misc_feature (1)..( 12): Result.003 file - promoters60/4900589
atctaaattttg

SEQ ID NO: 143584 - DNA, 12 bp, Unknown
  misc_feature (1)..( 12): Result.003 file - promoters60/4900589
atccaaaatttg

SEQ ID NO: 143585 - DNA, 12 bp, Unknown
  misc_feature (1)..( 12): Result.003 file - promoters60/4900589
cctacaattttg

SEQ ID NO: 143586 - DNA, 8 bp, Unknown
  misc_feature (1)..( 8): Result.003 file - promoters60/4900589
ctataatt

SEQ ID NO: 143587 - DNA, 8 bp, Unknown
  misc_feature (1)..( 8): Result.003 file - promoters60/4900589
ctattatt

SEQ ID NO: 143588 - DNA, 7 bp, Unknown
  misc_feature (1)..( 7): Result.003 file - promoters60/4900589
tcttaat

SEQ ID NO: 143589 - DNA, 7 bp, Unknown
  misc_feature (1)..( 7): Result.003 file - promoters60/4900589
tctaaat

SEQ ID NO: 143590 - DNA, 7 bp, Unknown
  misc_feature (1)..( 7): Result.003 file - promoters60/4900589
tggattt

SEQ ID NO: 143591 - DNA, 7 bp, Unknown
  misc_feature (1)..( 7): Result.003 file - promoters60/4900589
tgggttt

SEQ ID NO: 143592 - DNA, 8 bp, Unknown
  misc_feature (1)..( 8): Result.003 file - promoters60/4900589
ttttaatt

SEQ ID NO: 143593 - DNA, 8 bp, Unknown
  misc_feature (1)..( 8): Result.003 file - promoters60/4900589
ttttaatt

SEQ ID NO: 143594 - DNA, 6 bp, Unknown
  misc_feature (1)..( 6): Result.003 file - promoters60/4900589
aatttt

SEQ ID NO: 143595 - DNA, 6 bp, Unknown
  misc_feature (1)..( 6): Result.003 file - promoters60/4900589
aatttt

SEQ ID NO: 143596 - DNA, 11 bp, Unknown
  misc_feature (1)..( 11): Result.003 file - promoters60/4900589
ctatacataaa

SEQ ID NO: 143597 - DNA, 11 bp, Unknown
  misc_feature (1)..( 11): Result.003 file - promoters60/4900589
tgaaacaaaaa

SEQ ID NO: 143598 - DNA, 11 bp, Unknown
  misc_feature (1)..( 11): Result.003 file - promoters60/4900589
tgaagcaaacc

SEQ ID NO: 143599 - DNA, 7 bp, Unknown
  misc_feature (1)..( 7): Result.003 file - promoters60/4900589
tcttctg

SEQ ID NO: 143600 - DNA, 7 bp, Unknown
  misc_feature (1)..( 7): Result.003 file - promoters60/4900589
tctactg

SEQ ID NO: 143601 - DNA, 6 bp, Unknown
  misc_feature (1)..( 6): Result.003 file - promoters60/4900589
taaaga

SEQ ID NO: 143602 - DNA, 6 bp, Unknown
  misc_feature (1)..( 6): Result.003 file - promoters60/4900589
taaaga

SEQ ID NO: 143603 - DNA, 9 bp, Unknown
  misc_feature (1)..( 9): Result.003 file - promoters60/4900589
caaaaagag

SEQ ID NO: 143604 - DNA, 9 bp, Unknown
  misc_feature (1)..( 9): Result.003 file - promoters60/4900589
caaagagag

SEQ ID NO: 143605 - DNA, 6 bp, Unknown
  misc_feature (1)..( 6): Result.003 file - promoters60/4900589
aaattg

SEQ ID NO: 143606 - DNA, 6 bp, Unknown
  misc_feature (1)..( 6): Result.003 file - promoters60/4900589
aaattg

SEQ ID NO: 143607 - DNA, 7 bp, Unknown
  misc_feature (1)..( 7): Result.003 file - promoters60/4900589
tattgtg

SEQ ID NO: 143608 - DNA, 7 bp, Unknown
  misc_feature (1)..( 7): Result.003 file - promoters60/4900589
tattgtg

SEQ ID NO: 143609 - DNA, 9 bp, Unknown
  misc_feature (1)..( 9): Result.003 file - promoters60/4900589
tatttattt

SEQ ID NO: 143610 - DNA, 9 bp, Unknown
  misc_feature (1)..( 9): Result.003 file - promoters60/4900589
tatttattt

SEQ ID NO: 143611 - DNA, 11 bp, Unknown
  misc_feature (1)..( 11): Result.003 file - promoters60/4900643
atacaaaatca

SEQ ID NO: 143612 - DNA, 11 bp, Unknown
  misc_feature (1)..( 11): Result.003 file - promoters60/4900643
atacaacatca

SEQ ID NO: 143613 - DNA, 9 bp, Unknown
  misc_feature (1)..( 9): Result.003 file - promoters60/4900643
aaaaatcaa

SEQ ID NO: 143614 - DNA, 9 bp, Unknown
  misc_feature (1)..( 9): Result.003 file - promoters60/4900643
aaaaaccaa

SEQ ID NO: 143615 - DNA, 9 bp, Unknown
  misc_feature (1)..( 9): Result.003 file - promoters60/4900643
aagatctcc

SEQ ID NO: 143616 - DNA, 9 bp, Unknown
  misc_feature (1)..( 9): Result.003 file - promoters60/4900643
aagttctcc

SEQ ID NO: 143617 - DNA, 8 bp, Unknown
  misc_feature (1)..( 8): Result.003 file - promoters60/4900643
tgtgggtt

SEQ ID NO: 143618 - DNA, 8 bp, Unknown
  misc_feature (1)..( 8): Result.003 file - promoters60/4900643
tgtcggtt

SEQ ID NO: 143619 - DNA, 8 bp, Unknown
  misc_feature (1)..( 8): Result.003 file - promoters60/4900643
attgggtt

SEQ ID NO: 143620 - DNA, 6 bp, Unknown
  misc_feature (1)..( 6): Result.003 file - promoters60/4900643
ctttga

SEQ ID NO: 143621 - DNA, 6 bp, Unknown
  misc_feature (1)..( 6): Result.003 file - promoters60/4900643
ctttga

SEQ ID NO: 143622 - DNA, 7 bp, Unknown
  misc_feature (1)..( 7): Result.003 file - promoters60/4900643
tgtaata

SEQ ID NO: 143623 - DNA, 7 bp, Unknown
  misc_feature (1)..( 7): Result.003 file - promoters60/4900643
tgtaata

SEQ ID NO: 143624 - DNA, 16 bp, Unknown
  misc_feature (1)..( 16): Result.003 file - promoters60/4900643
ggaaaacgtgaggact

SEQ ID NO: 143625 - DNA, 16 bp, Unknown
  misc_feature (1)..( 16): Result.003 file - promoters60/4900643
ggataacttgagaact

SEQ ID NO: 143626 - DNA, 6 bp, Unknown
  misc_feature (1)..( 6): Result.003 file - promoters60/4900643
tgtttt

SEQ ID NO: 143627 - DNA, 6 bp, Unknown
  misc_feature (1)..( 6): Result.003 file - promoters60/4900643
tgtttt

SEQ ID NO: 143628 - DNA, 8 bp, Unknown
  misc_feature (1)..( 8): Result.003 file - promoters60/4900643
tgtcatta

SEQ ID NO: 143629 - DNA, 8 bp, Unknown
  misc_feature (1)..( 8): Result.003 file - promoters60/4900643
tgttatta

SEQ ID NO: 143630 - DNA, 7 bp, Unknown
  misc_feature (1)..( 7): Result.003 file - promoters60/4900643
ctctact

SEQ ID NO: 143631 - DNA, 7 bp, Unknown
  misc_feature (1)..( 7): Result.003 file - promoters60/4900643
ctctact

SEQ ID NO: 143632 - DNA, 8 bp, Unknown
  misc_feature (1)..( 8): Result.003 file - promoters60/4900643
tgtgttct

SEQ ID NO: 143633 - DNA, 8 bp, Unknown
  misc_feature (1)..( 8): Result.003 file - promoters60/4900643
tgtgctct

SEQ ID NO: 143634 - DNA, 9 bp, Unknown
  misc_feature (1)..( 9): Result.003 file - promoters60/4900643
agaagaaaa

SEQ ID NO: 143635 - DNA, 9 bp, Unknown
  misc_feature (1)..( 9): Result.003 file - promoters60/4900643
agaaaaaaa

SEQ ID NO: 143636 - DNA, 7 bp, Unknown
  misc_feature (1)..( 7): Result.003 file - promoters60/4900643
aaaactt

SEQ ID NO: 143637 - DNA, 7 bp, Unknown
  misc_feature (1)..( 7): Result.003 file - promoters60/4900643
aaaactt

SEQ ID NO: 143638 - DNA, 9 bp, Unknown
  misc_feature (1)..( 9): Result.003 file - promoters60/4900643
tttcttttc

SEQ ID NO: 143639 - DNA, 9 bp, Unknown
  misc_feature (1)..( 9): Result.003 file - promoters60/4900643
tttatttac

SEQ ID NO: 143640 - DNA, 9 bp, Unknown
  misc_feature (1)..( 9): Result.003 file - promoters60/4900643
catatttac

SEQ ID NO: 143641 - DNA, 7 bp, Unknown
  misc_feature (1)..( 7): Result.003 file - promoters60/4900643
ttctaaa

SEQ ID NO: 143642 - DNA, 7 bp, Unknown
  misc_feature (1)..( 7): Result.003 file - promoters60/4900643
ttccaaa

SEQ ID NO: 143643 - DNA, 6 bp, Unknown
  misc_feature (1)..( 6): Result.003 file - promoters60/4900643
ccaaac

SEQ ID NO: 143644 - DNA, 6 bp, Unknown
  misc_feature (1)..( 6): Result.003 file - promoters60/4900643
ccaaac

SEQ ID NO: 143645 - DNA, 6 bp, Unknown
  misc_feature (1)..( 6): Result.003 file - promoters60/4900643
ggtttt

SEQ ID NO: 143646 - DNA, 6 bp, Unknown
  misc_feature (1)..( 6): Result.003 file - promoters60/4900643
ggtttt

SEQ ID NO: 143647 - DNA, 6 bp, Unknown
  misc_feature (1)..( 6): Result.003 file - promoters60/4900643
ttaatt

SEQ ID NO: 143648 - DNA, 6 bp, Unknown
  misc_feature (1)..( 6): Result.003 file - promoters60/4900643
ttaatt

SEQ ID NO: 143649 - DNA, 8 bp, Unknown
  misc_feature (1)..( 8): Result.003 file - promoters60/4900643
gttagtat

SEQ ID NO: 143650 - DNA, 8 bp, Unknown
  misc_feature (1)..( 8): Result.003 file - promoters60/4900643
gttcgtat

SEQ ID NO: 143651 - DNA, 6 bp, Unknown
  misc_feature (1)..( 6): Result.003 file - promoters60/4900643
ttggcg

SEQ ID NO: 143652 - DNA, 6 bp, Unknown
  misc_feature (1)..( 6): Result.003 file - promoters60/4900643
ttggcg

SEQ ID NO: 143653 - DNA, 7 bp, Unknown
  misc_feature (1)..( 7): Result.003 file - promoters60/4900643
atattta

SEQ ID NO: 143654 - DNA, 7 bp, Unknown
  misc_feature (1)..( 7): Result.003 file - promoters60/4900643
atattta

SEQ ID NO: 143655 - DNA, 7 bp, Unknown
  misc_feature (1)..( 7): Result.003 file - promoters60/4900722
ctagatt

SEQ ID NO: 143656 - DNA, 7 bp, Unknown
  misc_feature (1)..( 7): Result.003 file - promoters60/4900722
ctacatt

SEQ ID NO: 143657 - DNA, 8 bp, Unknown
  misc_feature (1)..( 8): Result.003 file - promoters60/4900722
ttataaat

SEQ ID NO: 143658 - DNA, 8 bp, Unknown
  misc_feature (1)..( 8): Result.003 file - promoters60/4900722
ttataaat

SEQ ID NO: 143659 - DNA, 6 bp, Unknown
  misc_feature (1)..( 6): Result.003 file - promoters60/4900722
agattt

SEQ ID NO: 143660 - DNA, 6 bp, Unknown
  misc_feature (1)..( 6): Result.003 file - promoters60/4900722
agattt

SEQ ID NO: 143661 - DNA, 7 bp, Unknown
  misc_feature (1)..( 7): Result.003 file - promoters60/4900722
atttaca

SEQ ID NO: 143662 - DNA, 7 bp, Unknown
  misc_feature (1)..( 7): Result.003 file - promoters60/4900722
atttacc

SEQ ID NO: 143663 - DNA, 7 bp, Unknown
  misc_feature (1)..( 7): Result.003 file - promoters60/4900722
attaacc

SEQ ID NO: 143664 - DNA, 8 bp, Unknown
  misc_feature (1)..( 8): Result.003 file - promoters60/4900722
atatctga

SEQ ID NO: 143665 - DNA, 8 bp, Unknown
  misc_feature (1)..( 8): Result.003 file - promoters60/4900722
atatatga

SEQ ID NO: 143666 - DNA, 7 bp, Unknown
  misc_feature (1)..( 7): Result.003 file - promoters60/4900722
tttaata

SEQ ID NO: 143667 - DNA, 7 bp, Unknown
  misc_feature (1)..( 7): Result.003 file - promoters60/4900722
tttgata

SEQ ID NO: 143668 - DNA, 6 bp, Unknown
  misc_feature (1)..( 6): Result.003 file - promoters60/4900722
gtgtgt

SEQ ID NO: 143669 - DNA, 6 bp, Unknown
  misc_feature (1)..( 6): Result.003 file - promoters60/4900722
gtgtgt

SEQ ID NO: 143670 - DNA, 6 bp, Unknown
  misc_feature (1)..( 6): Result.003 file - promoters60/4900722
acagct

SEQ ID NO: 143671 - DNA, 6 bp, Unknown
  misc_feature (1)..( 6): Result.003 file - promoters60/4900722
acagct

SEQ ID NO: 143672 - DNA, 6 bp, Unknown
  misc_feature (1)..( 6): Result.003 file - promoters60/4900722
ccatat

SEQ ID NO: 143673 - DNA, 6 bp, Unknown
  misc_feature (1)..( 6): Result.003 file - promoters60/4900722
ccatat

SEQ ID NO: 143674 - DNA, 8 bp, Unknown
  misc_feature (1)..( 8): Result.003 file - promoters60/4900722
tgcgtcag

SEQ ID NO: 143675 - DNA, 8 bp, Unknown
  misc_feature (1)..( 8): Result.003 file - promoters60/4900722
tgcctcag

SEQ ID NO: 143676 - DNA, 7 bp, Unknown
  misc_feature (1)..( 7): Result.003 file - promoters60/4900722
ttctgtt

SEQ ID NO: 143677 - DNA, 7 bp, Unknown
  misc_feature (1)..( 7): Result.003 file - promoters60/4900722
ttcggtt

SEQ ID NO: 143678 - DNA, 8 bp, Unknown
  misc_feature (1)..( 8): Result.003 file - promoters60/4900722
gtgtgtat

SEQ ID NO: 143679 - DNA, 8 bp, Unknown
  misc_feature (1)..( 8): Result.003 file - promoters60/4900722
gtgggtat

SEQ ID NO: 143680 - DNA, 12 bp, Unknown
  misc_feature (1)..( 12): Result.003 file - promoters60/4900939
aaaataaaaagt

SEQ ID NO: 143681 - DNA, 12 bp, Unknown
  misc_feature (1)..( 12): Result.003 file - promoters60/4900939
taaacaaataat

SEQ ID NO: 143682 - DNA, 12 bp, Unknown
  misc_feature (1)..( 12): Result.003 file - promoters60/4900939
ataataagtcaa

SEQ ID NO: 143683 - DNA, 7 bp, Unknown
  misc_feature (1)..( 7): Result.003 file - promoters60/4900939
aaaattc

SEQ ID NO: 143684 - DNA, 7 bp, Unknown
  misc_feature (1)..( 7): Result.003 file - promoters60/4900939
aaaattt

SEQ ID NO: 143685 - DNA, 7 bp, Unknown
  misc_feature (1)..( 7): Result.003 file - promoters60/4900939
caaattc

SEQ ID NO: 143686 - DNA, 9 bp, Unknown
  misc_feature (1)..( 9): Result.003 file - promoters60/4900939
ttagacgct

SEQ ID NO: 143687 - DNA, 9 bp, Unknown
  misc_feature (1)..( 9): Result.003 file - promoters60/4900939
ttaaacgaa

SEQ ID NO: 143688 - DNA, 9 bp, Unknown
  misc_feature (1)..( 9): Result.003 file - promoters60/4900939
gaaaacgaa

SEQ ID NO: 143689 - DNA, 7 bp, Unknown
  misc_feature (1)..( 7): Result.003 file - promoters60/4900939
ttttgtt

SEQ ID NO: 143690 - DNA, 7 bp, Unknown
  misc_feature (1)..( 7): Result.003 file - promoters60/4900939
ttttgtt

SEQ ID NO: 143691 - DNA, 7 bp, Unknown
  misc_feature (1)..( 7): Result.003 file - promoters60/4900939
ttttgtg

SEQ ID NO: 143692 - DNA, 12 bp, Unknown
  misc_feature (1)..( 12): Result.003 file - promoters60/4901133
aaataggcccaa

SEQ ID NO: 143693 - DNA, 12 bp, Unknown
  misc_feature (1)..( 12): Result.003 file - promoters60/4901133
aaatgggcctct

SEQ ID NO: 143694 - DNA, 12 bp, Unknown
  misc_feature (1)..( 12): Result.003 file - promoters60/4901133
aaataggcccaa

SEQ ID NO: 143695 - DNA, 12 bp, Unknown
  misc_feature (1)..( 12): Result.003 file - promoters60/4901133
gaaaaggcccat

SEQ ID NO: 143696 - DNA, 12 bp, Unknown
  misc_feature (1)..( 12): Result.003 file - promoters60/4901133
taatgggccgaa

SEQ ID NO: 143697 - DNA, 12 bp, Unknown
  misc_feature (1)..( 12): Result.003 file - promoters60/4901133
atatgggcctta

SEQ ID NO: 143698 - DNA, 9 bp, Unknown
  misc_feature (1)..( 9): Result.003 file - promoters60/4901133
tatttatat

SEQ ID NO: 143699 - DNA, 9 bp, Unknown
  misc_feature (1)..( 9): Result.003 file - promoters60/4901133
tatttaagg

SEQ ID NO: 143700 - DNA, 9 bp, Unknown
  misc_feature (1)..( 9): Result.003 file - promoters60/4901133
tatataaat

SEQ ID NO: 143701 - DNA, 9 bp, Unknown
  misc_feature (1)..( 9): Result.003 file - promoters60/4901133
tatataaag

SEQ ID NO: 143702 - DNA, 9 bp, Unknown
  misc_feature (1)..( 9): Result.003 file - promoters60/4901133
actataaat

SEQ ID NO: 143703 - DNA, 9 bp, Unknown
  misc_feature (1)..( 9): Result.003 file - promoters60/4901133
tatatatta

SEQ ID NO: 143704 - DNA, 13 bp, Unknown
  misc_feature (1)..( 13): Result.003 file - promoters60/4901133
caaaaattatact

SEQ ID NO: 143705 - DNA, 13 bp, Unknown
  misc_feature (1)..( 13): Result.003 file - promoters60/4901133
aaagaattatttt

SEQ ID NO: 143706 - DNA, 13 bp, Unknown
  misc_feature (1)..( 13): Result.003 file - promoters60/4901133
cttaaattattct

SEQ ID NO: 143707 - DNA, 13 bp, Unknown
  misc_feature (1)..( 13): Result.003 file - promoters60/4901133
caaaaattaaact

SEQ ID NO: 143708 - DNA, 13 bp, Unknown
  misc_feature (1)..( 13): Result.003 file - promoters60/4901133
agagaattaaaat

SEQ ID NO: 143709 - DNA, 13 bp, Unknown
  misc_feature (1)..( 13): Result.003 file - promoters60/4901133
ttaaacttacatg

SEQ ID NO: 143710 - DNA, 6 bp, Unknown
  misc_feature (1)..( 6): Result.003 file - promoters60/4901225
tgattg

SEQ ID NO: 143711 - DNA, 6 bp, Unknown
  misc_feature (1)..( 6): Result.003 file - promoters60/4901225
tgattg

SEQ ID NO: 143712 - DNA, 13 bp, Unknown
  misc_feature (1)..( 13): Result.003 file - promoters60/4901225
acacaaaaaaaaa

SEQ ID NO: 143713 - DNA, 13 bp, Unknown
  misc_feature (1)..( 13): Result.003 file - promoters60/4901225
acacacaaacaaa

SEQ ID NO: 143714 - DNA, 7 bp, Unknown
  misc_feature (1)..( 7): Result.003 file - promoters60/4901225
aaagctg

SEQ ID NO: 143715 - DNA, 7 bp, Unknown
  misc_feature (1)..( 7): Result.003 file - promoters60/4901225
aaaactg

SEQ ID NO: 143716 - DNA, 7 bp, Unknown
  misc_feature (1)..( 7): Result.003 file - promoters60/4901225
aagaaga

SEQ ID NO: 143717 - DNA, 7 bp, Unknown
  misc_feature (1)..( 7): Result.003 file - promoters60/4901225
aagaaga

SEQ ID NO: 143718 - DNA, 11 bp, Unknown
  misc_feature (1)..( 11): Result.003 file - promoters60/4901225
agaagaagaag

SEQ ID NO: 143719 - DNA, 11 bp, Unknown
  misc_feature (1)..( 11): Result.003 file - promoters60/4901225
agaagaaaaag

SEQ ID NO: 143720 - DNA, 10 bp, Unknown
  misc_feature (1)..( 10): Result.003 file - promoters60/4901225
acaaaacacg

SEQ ID NO: 143721 - DNA, 10 bp, Unknown
  misc_feature (1)..( 10): Result.003 file - promoters60/4901225
taaaaaaacg

SEQ ID NO: 143722 - DNA, 10 bp, Unknown
  misc_feature (1)..( 10): Result.003 file - promoters60/4901225
acaatacact

SEQ ID NO: 143723 - DNA, 10 bp, Unknown
  misc_feature (1)..( 10): Result.003 file - promoters60/4901225
acatttttcc

SEQ ID NO: 143724 - DNA, 10 bp, Unknown
  misc_feature (1)..( 10): Result.003 file - promoters60/4901225
acatttatcc

SEQ ID NO: 143725 - DNA, 6 bp, Unknown
  misc_feature (1)..( 6): Result.003 file - promoters60/4901225
aatttt

SEQ ID NO: 143726 - DNA, 6 bp, Unknown
  misc_feature (1)..( 6): Result.003 file - promoters60/4901225
aatttt

SEQ ID NO: 143727 - DNA, 7 bp, Unknown
  misc_feature (1)..( 7): Result.003 file - promoters60/4901225
aaaaagg

SEQ ID NO: 143728 - DNA, 7 bp, Unknown
  misc_feature (1)..( 7): Result.003 file - promoters60/4901225
aaaaagg

SEQ ID NO: 143729 - DNA, 7 bp, Unknown
  misc_feature (1)..( 7): Result.003 file - promoters60/4901225
tttcgac

SEQ ID NO: 143730 - DNA, 7 bp, Unknown
  misc_feature (1)..( 7): Result.003 file - promoters60/4901225
ttttgac

SEQ ID NO: 143731 - DNA, 8 bp, Unknown
  misc_feature (1)..( 8): Result.003 file - promoters60/4901225
ttatcaat

SEQ ID NO: 143732 - DNA, 8 bp, Unknown
  misc_feature (1)..( 8): Result.003 file - promoters60/4901225
ttaacaat

SEQ ID NO: 143733 - DNA, 8 bp, Unknown
  misc_feature (1)..( 8): Result.003 file - promoters60/4901225
atctcatc

SEQ ID NO: 143734 - DNA, 8 bp, Unknown
  misc_feature (1)..( 8): Result.003 file - promoters60/4901225
atcacatc

SEQ ID NO: 143735 - DNA, 7 bp, Unknown
  misc_feature (1)..( 7): Result.003 file - promoters60/4901225
tgggtcg

SEQ ID NO: 143736 - DNA, 7 bp, Unknown
  misc_feature (1)..( 7): Result.003 file - promoters60/4901225
tggatcg

SEQ ID NO: 143737 - DNA, 13 bp, Unknown
  misc_feature (1)..( 13): Result.003 file - promoters60/4901241
acaaatctattaa

SEQ ID NO: 143738 - DNA, 13 bp, Unknown
  misc_feature (1)..( 13): Result.003 file - promoters60/4901241
tcaaatcaaaatg

SEQ ID NO: 143739 - DNA, 13 bp, Unknown
  misc_feature (1)..( 13): Result.003 file - promoters60/4901241
taaaatatattta

SEQ ID NO: 143740 - DNA, 14 bp, Unknown
  misc_feature (1)..( 14): Result.003 file - promoters60/4901241
ttaaactatagttg

SEQ ID NO: 143741 - DNA, 14 bp, Unknown
  misc_feature (1)..( 14): Result.003 file - promoters60/4901241
ttgacatattttta

SEQ ID NO: 143742 - DNA, 14 bp, Unknown
  misc_feature (1)..( 14): Result.003 file - promoters60/4901241
agaaatatttttat

SEQ ID NO: 143743 - DNA, 14 bp, Unknown
  misc_feature (1)..( 14): Result.003 file - promoters60/4901241
aataatattcaaat

SEQ ID NO: 143744 - DNA, 14 bp, Unknown
  misc_feature (1)..( 14): Result.003 file - promoters60/4901241
taaaatatatttaa

SEQ ID NO: 143745 - DNA, 15 bp, Unknown
  misc_feature (1)..( 15): Result.003 file - promoters60/4901241
ttgacatatttttat

SEQ ID NO: 143746 - DNA, 15 bp, Unknown
  misc_feature (1)..( 15): Result.003 file - promoters60/4901241
ttaaactatagttgg

SEQ ID NO: 143747 - DNA, 10 bp, Unknown
  misc_feature (1)..( 10): Result.003 file - promoters60/4901241
atgaataatt

SEQ ID NO: 143748 - DNA, 10 bp, Unknown
  misc_feature (1)..( 10): Result.003 file - promoters60/4901241
ataaattatt

SEQ ID NO: 143749 - DNA, 10 bp, Unknown
  misc_feature (1)..( 10): Result.003 file - promoters60/4901241
atgaagaatc

SEQ ID NO: 143750 - DNA, 10 bp, Unknown
  misc_feature (1)..( 10): Result.003 file - promoters60/4901241
cgaaaatata

SEQ ID NO: 143751 - DNA, 10 bp, Unknown
  misc_feature (1)..( 10): Result.003 file - promoters60/4901241
aaaaagaatt

SEQ ID NO: 143752 - DNA, 12 bp, Unknown
  misc_feature (1)..( 12): Result.003 file - promoters60/4901241
cattcaaaagat

SEQ ID NO: 143753 - DNA, 12 bp, Unknown
  misc_feature (1)..( 12): Result.003 file - promoters60/4901241
catgcaacgaat

SEQ ID NO: 143754 - DNA, 12 bp, Unknown
  misc_feature (1)..( 12): Result.003 file - promoters60/4901241
gttgcaactaat

SEQ ID NO: 143755 - DNA, 12 bp, Unknown
  misc_feature (1)..( 12): Result.003 file - promoters60/4901241
ctcctaattccc

SEQ ID NO: 143756 - DNA, 11 bp, Unknown
  misc_feature (1)..( 11): Result.003 file - promoters60/4901241
cgactaattaa

SEQ ID NO: 143757 - DNA, 11 bp, Unknown
  misc_feature (1)..( 11): Result.003 file - promoters60/4901241
agactaattaa

SEQ ID NO: 143758 - DNA, 11 bp, Unknown
  misc_feature (1)..( 11): Result.003 file - promoters60/4901241
attgtaaataa

SEQ ID NO: 143759 - DNA, 11 bp, Unknown
  misc_feature (1)..( 11): Result.003 file - promoters60/4901241
cgattaaatga

SEQ ID NO: 143760 - DNA, 9 bp, Unknown
  misc_feature (1)..( 9): Result.003 file - promoters60/4901241
tataaaagc

SEQ ID NO: 143761 - DNA, 9 bp, Unknown
  misc_feature (1)..( 9): Result.003 file - promoters60/4901241
tataaagac

SEQ ID NO: 143762 - DNA, 9 bp, Unknown
  misc_feature (1)..( 9): Result.003 file - promoters60/4901241
tataaacaa

SEQ ID NO: 143763 - DNA, 9 bp, Unknown
  misc_feature (1)..( 9): Result.003 file - promoters60/4901241
tataaaaag

SEQ ID NO: 143764 - DNA, 11 bp, Unknown
  misc_feature (1)..( 11): Result.003 file - promoters60/4901241
ctgaaaataca

SEQ ID NO: 143765 - DNA, 11 bp, Unknown
  misc_feature (1)..( 11): Result.003 file - promoters60/4901241
attaaaatata

SEQ ID NO: 143766 - DNA, 11 bp, Unknown
  misc_feature (1)..( 11): Result.003 file - promoters60/4901241
attcaaatcaa

SEQ ID NO: 143767 - DNA, 11 bp, Unknown
  misc_feature (1)..( 11): Result.003 file - promoters60/4901241
tttaaactata

SEQ ID NO: 143768 - DNA, 13 bp, Unknown
  misc_feature (1)..( 13): Result.003 file - promoters60/4901241
ttaaacattgtcc

SEQ ID NO: 143769 - DNA, 13 bp, Unknown
  misc_feature (1)..( 13): Result.003 file - promoters60/4901241
ttaatcataggag

SEQ ID NO: 143770 - DNA, 13 bp, Unknown
  misc_feature (1)..( 13): Result.003 file - promoters60/4901241
aaaaacatcttat

SEQ ID NO: 143771 - DNA, 13 bp, Unknown
  misc_feature (1)..( 13): Result.003 file - promoters60/4901241
tgcaacttcttat

SEQ ID NO: 143772 - DNA, 8 bp, Unknown
  misc_feature (1)..( 8): Result.003 file - promoters60/4901241
tctatttt

SEQ ID NO: 143773 - DNA, 8 bp, Unknown
  misc_feature (1)..( 8): Result.003 file - promoters60/4901241
tctgtttg

SEQ ID NO: 143774 - DNA, 9 bp, Unknown
  misc_feature (1)..( 9): Result.003 file - promoters60/4901241
cctaatttg

SEQ ID NO: 143775 - DNA, 9 bp, Unknown
  misc_feature (1)..( 9): Result.003 file - promoters60/4901241
cctaatttc

SEQ ID NO: 143776 - DNA, 9 bp, Unknown
  misc_feature (1)..( 9): Result.003 file - promoters60/4901241
taaccttac

SEQ ID NO: 143777 - DNA, 9 bp, Unknown
  misc_feature (1)..( 9): Result.003 file - promoters60/4901241
aaactttaa

SEQ ID NO: 143778 - DNA, 9 bp, Unknown
  misc_feature (1)..( 9): Result.003 file - promoters60/4901241
taatcttac

SEQ ID NO: 143779 - DNA, 9 bp, Unknown
  misc_feature (1)..( 9): Result.003 file - promoters60/4901241
taacttttc

SEQ ID NO: 143780 - DNA, 10 bp, Unknown
  misc_feature (1)..( 10): Result.003 file - promoters60/4901241
actacataag

SEQ ID NO: 143781 - DNA, 10 bp, Unknown
  misc_feature (1)..( 10): Result.003 file - promoters60/4901241
tctatatata

SEQ ID NO: 143782 - DNA, 10 bp, Unknown
  misc_feature (1)..( 10): Result.003 file - promoters60/4901241
tctataaaaa

SEQ ID NO: 143783 - DNA, 10 bp, Unknown
  misc_feature (1)..( 10): Result.003 file - promoters60/4901241
agtatatata

SEQ ID NO: 143784 - DNA, 6 bp, Unknown
  misc_feature (1)..( 6): Result.003 file - promoters60/4901333
ttcatc

SEQ ID NO: 143785 - DNA, 6 bp, Unknown
  misc_feature (1)..( 6): Result.003 file - promoters60/4901333
ttcatc

SEQ ID NO: 143786 - DNA, 7 bp, Unknown
  misc_feature (1)..( 7): Result.003 file - promoters60/4901333
atttgtt

SEQ ID NO: 143787 - DNA, 7 bp, Unknown
  misc_feature (1)..( 7): Result.003 file - promoters60/4901333
atttgtt

SEQ ID NO: 143788 - DNA, 6 bp, Unknown
  misc_feature (1)..( 6): Result.003 file - promoters60/4901333
tctcgc

SEQ ID NO: 143789 - DNA, 6 bp, Unknown
  misc_feature (1)..( 6): Result.003 file - promoters60/4901333
tctcgc

SEQ ID NO: 143790 - DNA, 11 bp, Unknown
  misc_feature (1)..( 11): Result.003 file - promoters60/4901333
ctttatttgat

SEQ ID NO: 143791 - DNA, 11 bp, Unknown
  misc_feature (1)..( 11): Result.003 file - promoters60/4901333
ctttattcgat

SEQ ID NO: 143792 - DNA, 6 bp, Unknown
  misc_feature (1)..( 6): Result.003 file - promoters60/4901333
gaacat

SEQ ID NO: 143793 - DNA, 6 bp, Unknown
  misc_feature (1)..( 6): Result.003 file - promoters60/4901333
gaacat

SEQ ID NO: 143794 - DNA, 6 bp, Unknown
  misc_feature (1)..( 6): Result.003 file - promoters60/4901333
aagaaa

SEQ ID NO: 143795 - DNA, 6 bp, Unknown
  misc_feature (1)..( 6): Result.003 file - promoters60/4901333
aagaaa

SEQ ID NO: 143796 - DNA, 6 bp, Unknown
  misc_feature (1)..( 6): Result.003 file - promoters60/4901333
ttttaa

SEQ ID NO: 143797 - DNA, 6 bp, Unknown
  misc_feature (1)..( 6): Result.003 file - promoters60/4901333
ttttaa

SEQ ID NO: 143798 - DNA, 6 bp, Unknown
  misc_feature (1)..( 6): Result.003 file - promoters60/4901333
aacttc

SEQ ID NO: 143799 - DNA, 6 bp, Unknown
  misc_feature (1)..( 6): Result.003 file - promoters60/4901333
aacttc

SEQ ID NO: 143800 - DNA, 7 bp, Unknown
  misc_feature (1)..( 7): Result.003 file - promoters60/4901333
attcatc

SEQ ID NO: 143801 - DNA, 7 bp, Unknown
  misc_feature (1)..( 7): Result.003 file - promoters60/4901333
atttatc

SEQ ID NO: 143802 - DNA, 7 bp, Unknown
  misc_feature (1)..( 7): Result.003 file - promoters60/4901333
atttttg

SEQ ID NO: 143803 - DNA, 7 bp, Unknown
  misc_feature (1)..( 7): Result.003 file - promoters60/4901333
atttttg

SEQ ID NO: 143804 - DNA, 7 bp, Unknown
  misc_feature (1)..( 7): Result.003 file - promoters60/4901333
agtcttt

SEQ ID NO: 143805 - DNA, 7 bp, Unknown
  misc_feature (1)..( 7): Result.003 file - promoters60/4901333
agtgttt

SEQ ID NO: 143806 - DNA, 8 bp, Unknown
  misc_feature (1)..( 8): Result.003 file - promoters60/4901333
cgacttct

SEQ ID NO: 143807 - DNA, 8 bp, Unknown
  misc_feature (1)..( 8): Result.003 file - promoters60/4901333
cgacttct

SEQ ID NO: 143808 - DNA, 6 bp, Unknown
  misc_feature (1)..( 6): Result.003 file - promoters60/4901333
tttaat

SEQ ID NO: 143809 - DNA, 6 bp, Unknown
  misc_feature (1)..( 6): Result.003 file - promoters60/4901333
tttaat

SEQ ID NO: 143810 - DNA, 7 bp, Unknown
  misc_feature (1)..( 7): Result.003 file - promoters60/4901333
tagataa

SEQ ID NO: 143811 - DNA, 7 bp, Unknown
  misc_feature (1)..( 7): Result.003 file - promoters60/4901333
tagataa

SEQ ID NO: 143812 - DNA, 7 bp, Unknown
  misc_feature (1)..( 7): Result.003 file - promoters60/4901333
aaagaca

SEQ ID NO: 143813 - DNA, 7 bp, Unknown
  misc_feature (1)..( 7): Result.003 file - promoters60/4901333
aaaaaca

SEQ ID NO: 143814 - DNA, 9 bp, Unknown
  misc_feature (1)..( 9): Result.003 file - promoters60/4901333
acgttttag

SEQ ID NO: 143815 - DNA, 9 bp, Unknown
  misc_feature (1)..( 9): Result.003 file - promoters60/4901333
acgttatag

SEQ ID NO: 143816 - DNA, 7 bp, Unknown
  misc_feature (1)..( 7): Result.003 file - promoters60/4901333
ttataat

SEQ ID NO: 143817 - DNA, 7 bp, Unknown
  misc_feature (1)..( 7): Result.003 file - promoters60/4901333
ttataat

SEQ ID NO: 143818 - DNA, 10 bp, Unknown
  misc_feature (1)..( 10): Result.003 file - promoters60/4901333
taattggttc

SEQ ID NO: 143819 - DNA, 10 bp, Unknown
  misc_feature (1)..( 10): Result.003 file - promoters60/4901333
taatgggttc

SEQ ID NO: 143820 - DNA, 6 bp, Unknown
  misc_feature (1)..( 6): Result.003 file - promoters60/4901516
gttttg

SEQ ID NO: 143821 - DNA, 6 bp, Unknown
  misc_feature (1)..( 6): Result.003 file - promoters60/4901516
gttttg

SEQ ID NO: 143822 - DNA, 6 bp, Unknown
  misc_feature (1)..( 6): Result.003 file - promoters60/4901516
acattc

SEQ ID NO: 143823 - DNA, 6 bp, Unknown
  misc_feature (1)..( 6): Result.003 file - promoters60/4901516
acattc

SEQ ID NO: 143824 - DNA, 8 bp, Unknown
  misc_feature (1)..( 8): Result.003 file - promoters60/4901516
aatgattt

SEQ ID NO: 143825 - DNA, 8 bp, Unknown
  misc_feature (1)..( 8): Result.003 file - promoters60/4901516
aatgcttt

SEQ ID NO: 143826 - DNA, 9 bp, Unknown
  misc_feature (1)..( 9): Result.003 file - promoters60/4901516
taaagtcaa

SEQ ID NO: 143827 - DNA, 9 bp, Unknown
  misc_feature (1)..( 9): Result.003 file - promoters60/4901516
taacgtcaa

SEQ ID NO: 143828 - DNA, 10 bp, Unknown
  misc_feature (1)..( 10): Result.003 file - promoters60/4901516
tactaagata

SEQ ID NO: 143829 - DNA, 10 bp, Unknown
  misc_feature (1)..( 10): Result.003 file - promoters60/4901516
aaataaaata

SEQ ID NO: 143830 - DNA, 10 bp, Unknown
  misc_feature (1)..( 10): Result.003 file - promoters60/4901516
aaatgaaata

SEQ ID NO: 143831 - DNA, 8 bp, Unknown
  misc_feature (1)..( 8): Result.003 file - promoters60/4901516
tatatatt

SEQ ID NO: 143832 - DNA, 8 bp, Unknown
  misc_feature (1)..( 8): Result.003 file - promoters60/4901516
tatataaa

SEQ ID NO: 143833 - DNA, 8 bp, Unknown
  misc_feature (1)..( 8): Result.003 file - promoters60/4901516
tatttatt

SEQ ID NO: 143834 - DNA, 6 bp, Unknown
  misc_feature (1)..( 6): Result.003 file - promoters60/4901516
tcgaaa

SEQ ID NO: 143835 - DNA, 6 bp, Unknown
  misc_feature (1)..( 6): Result.003 file - promoters60/4901516
tcgaaa

SEQ ID NO: 143836 - DNA, 7 bp, Unknown
  misc_feature (1)..( 7): Result.003 file - promoters60/4901516
aagttat

SEQ ID NO: 143837 - DNA, 7 bp, Unknown
  misc_feature (1)..( 7): Result.003 file - promoters60/4901516
aagatat

SEQ ID NO: 143838 - DNA, 6 bp, Unknown
  misc_feature (1)..( 6): Result.003 file - promoters60/4901516
ttttgt

SEQ ID NO: 143839 - DNA, 6 bp, Unknown
  misc_feature (1)..( 6): Result.003 file - promoters60/4901516
ttttgt

SEQ ID NO: 143840 - DNA, 14 bp, Unknown
  misc_feature (1)..( 14): Result.003 file - promoters60/4901516
aatacaaacacatt

SEQ ID NO: 143841 - DNA, 14 bp, Unknown
  misc_feature (1)..( 14): Result.003 file - promoters60/4901516
gaaacaaaaacatt

SEQ ID NO: 143842 - DNA, 14 bp, Unknown
  misc_feature (1)..( 14): Result.003 file - promoters60/4901516
gaaagaaagctttg

SEQ ID NO: 143843 - DNA, 6 bp, Unknown
  misc_feature (1)..( 6): Result.003 file - promoters60/4901516
actgtt

SEQ ID NO: 143844 - DNA, 6 bp, Unknown
  misc_feature (1)..( 6): Result.003 file - promoters60/4901516
actgtt

SEQ ID NO: 143845 - DNA, 9 bp, Unknown
  misc_feature (1)..( 9): Result.003 file - promoters60/4901516
aacacaaaa

SEQ ID NO: 143846 - DNA, 9 bp, Unknown
  misc_feature (1)..( 9): Result.003 file - promoters60/4901516
cccactaaa

SEQ ID NO: 143847 - DNA, 9 bp, Unknown
  misc_feature (1)..( 9): Result.003 file - promoters60/4901516
cccactaga

SEQ ID NO: 143848 - DNA, 7 bp, Unknown
  misc_feature (1)..( 7): Result.003 file - promoters60/4901516
aaacaaa

SEQ ID NO: 143849 - DNA, 7 bp, Unknown
  misc_feature (1)..( 7): Result.003 file - promoters60/4901516
aaagaaa

SEQ ID NO: 143850 - DNA, 6 bp, Unknown
  misc_feature (1)..( 6): Result.003 file - promoters60/4901516
ctcctt

SEQ ID NO: 143851 - DNA, 6 bp, Unknown
  misc_feature (1)..( 6): Result.003 file - promoters60/4901516
ctcctt

SEQ ID NO: 143852 - DNA, 6 bp, Unknown
  misc_feature (1)..( 6): Result.003 file - promoters60/4901516
agtaaa

SEQ ID NO: 143853 - DNA, 6 bp, Unknown
  misc_feature (1)..( 6): Result.003 file - promoters60/4901516
agtaaa

SEQ ID NO: 143854 - DNA, 7 bp, Unknown
  misc_feature (1)..( 7): Result.003 file - promoters60/4901516
aatcggg

SEQ ID NO: 143855 - DNA, 7 bp, Unknown
  misc_feature (1)..( 7): Result.003 file - promoters60/4901516
aattggg

SEQ ID NO: 143856 - DNA, 10 bp, Unknown
  misc_feature (1)..( 10): Result.003 file - promoters60/4901516
ggaaaagaaa

SEQ ID NO: 143857 - DNA, 10 bp, Unknown
  misc_feature (1)..( 10): Result.003 file - promoters60/4901516
ggaaatgaaa

SEQ ID NO: 143858 - DNA, 9 bp, Unknown
  misc_feature (1)..( 9): Result.003 file - promoters60/4901516
aaagaaaag

SEQ ID NO: 143859 - DNA, 9 bp, Unknown
  misc_feature (1)..( 9): Result.003 file - promoters60/4901516
aaagtaaag

SEQ ID NO: 143860 - DNA, 7 bp, Unknown
  misc_feature (1)..( 7): Result.003 file - promoters60/4901528
tcagagc

SEQ ID NO: 143861 - DNA, 7 bp, Unknown
  misc_feature (1)..( 7): Result.003 file - promoters60/4901528
tcatagc

SEQ ID NO: 143862 - DNA, 8 bp, Unknown
  misc_feature (1)..( 8): Result.003 file - promoters60/4901528
agtatatt

SEQ ID NO: 143863 - DNA, 8 bp, Unknown
  misc_feature (1)..( 8): Result.003 file - promoters60/4901528
agtttatt

SEQ ID NO: 143864 - DNA, 7 bp, Unknown
  misc_feature (1)..( 7): Result.003 file - promoters60/4901528
ttaaaaa

SEQ ID NO: 143865 - DNA, 7 bp, Unknown
  misc_feature (1)..( 7): Result.003 file - promoters60/4901528
ttataaa

SEQ ID NO: 143866 - DNA, 7 bp, Unknown
  misc_feature (1)..( 7): Result.003 file - promoters60/4901528
ttaaaag

SEQ ID NO: 143867 - DNA, 8 bp, Unknown
  misc_feature (1)..( 8): Result.003 file - promoters60/4901528
taaccaaa

SEQ ID NO: 143868 - DNA, 8 bp, Unknown
  misc_feature (1)..( 8): Result.003 file - promoters60/4901528
taacaaaa

SEQ ID NO: 143869 - DNA, 6 bp, Unknown
  misc_feature (1)..( 6): Result.003 file - promoters60/4901528
ttatca

SEQ ID NO: 143870 - DNA, 6 bp, Unknown
  misc_feature (1)..( 6): Result.003 file - promoters60/4901528
ttatca

SEQ ID NO: 143871 - DNA, 7 bp, Unknown
  misc_feature (1)..( 7): Result.003 file - promoters60/4901528
tttttta

SEQ ID NO: 143872 - DNA, 7 bp, Unknown
  misc_feature (1)..( 7): Result.003 file - promoters60/4901528
tttatta

SEQ ID NO: 143873 - DNA, 7 bp, Unknown
  misc_feature (1)..( 7): Result.003 file - promoters60/4901528
gtatatt

SEQ ID NO: 143874 - DNA, 7 bp, Unknown
  misc_feature (1)..( 7): Result.003 file - promoters60/4901528
gtagatt

SEQ ID NO: 143875 - DNA, 7 bp, Unknown
  misc_feature (1)..( 7): Result.003 file - promoters60/4901528
ttccaaa

SEQ ID NO: 143876 - DNA, 7 bp, Unknown
  misc_feature (1)..( 7): Result.003 file - promoters60/4901528
ttctaaa

SEQ ID NO: 143877 - DNA, 7 bp, Unknown
  misc_feature (1)..( 7): Result.003 file - promoters60/4901528
tttgatt

SEQ ID NO: 143878 - DNA, 7 bp, Unknown
  misc_feature (1)..( 7): Result.003 file - promoters60/4901528
tttgatt

SEQ ID NO: 143879 - DNA, 6 bp, Unknown
  misc_feature (1)..( 6): Result.003 file - promoters60/4901528
gtctcc

SEQ ID NO: 143880 - DNA, 6 bp, Unknown
  misc_feature (1)..( 6): Result.003 file - promoters60/4901528
gtctcc

SEQ ID NO: 143881 - DNA, 11 bp, Unknown
  misc_feature (1)..( 11): Result.003 file - promoters60/4901528
accctagtttt

SEQ ID NO: 143882 - DNA, 11 bp, Unknown
  misc_feature (1)..( 11): Result.003 file - promoters60/4901528
accgtagattt

SEQ ID NO: 143883 - DNA, 10 bp, Unknown
  misc_feature (1)..( 10): Result.003 file - promoters60/4901564
tttcctaatt

SEQ ID NO: 143884 - DNA, 10 bp, Unknown
  misc_feature (1)..( 10): Result.003 file - promoters60/4901564
ttttctaaaa

SEQ ID NO: 143885 - DNA, 10 bp, Unknown
  misc_feature (1)..( 10): Result.003 file - promoters60/4901564
atttctattg

SEQ ID NO: 143886 - DNA, 10 bp, Unknown
  misc_feature (1)..( 10): Result.003 file - promoters60/4901564
gtttataaaa

SEQ ID NO: 143887 - DNA, 10 bp, Unknown
  misc_feature (1)..( 10): Result.003 file - promoters60/4901564
gcttataagt

SEQ ID NO: 143888 - DNA, 12 bp, Unknown
  misc_feature (1)..( 12): Result.003 file - promoters60/4901564
tttatgggccgt

SEQ ID NO: 143889 - DNA, 12 bp, Unknown
  misc_feature (1)..( 12): Result.003 file - promoters60/4901564
ggtttggaccgt

SEQ ID NO: 143890 - DNA, 12 bp, Unknown
  misc_feature (1)..( 12): Result.003 file - promoters60/4901564
catatgggctta

SEQ ID NO: 143891 - DNA, 12 bp, Unknown
  misc_feature (1)..( 12): Result.003 file - promoters60/4901564
ggttttgactat

SEQ ID NO: 143892 - DNA, 12 bp, Unknown
  misc_feature (1)..( 12): Result.003 file - promoters60/4901564
attacgggcttt

SEQ ID NO: 143893 - DNA, 9 bp, Unknown
  misc_feature (1)..( 9): Result.003 file - promoters60/4901673
tatttaagc

SEQ ID NO: 143894 - DNA, 9 bp, Unknown
  misc_feature (1)..( 9): Result.003 file - promoters60/4901673
gttttcagc

SEQ ID NO: 143895 - DNA, 9 bp, Unknown
  misc_feature (1)..( 9): Result.003 file - promoters60/4901673
tatttaatt

SEQ ID NO: 143896 - DNA, 7 bp, Unknown
  misc_feature (1)..( 7): Result.003 file - promoters60/4901673
aattcaa

SEQ ID NO: 143897 - DNA, 7 bp, Unknown
  misc_feature (1)..( 7): Result.003 file - promoters60/4901673
aattcat

SEQ ID NO: 143898 - DNA, 7 bp, Unknown
  misc_feature (1)..( 7): Result.003 file - promoters60/4901673
gattcaa

SEQ ID NO: 143899 - DNA, 8 bp, Unknown
  misc_feature (1)..( 8): Result.003 file - promoters60/4901673
attccata

SEQ ID NO: 143900 - DNA, 8 bp, Unknown
  misc_feature (1)..( 8): Result.003 file - promoters60/4901673
tttcaata

SEQ ID NO: 143901 - DNA, 8 bp, Unknown
  misc_feature (1)..( 8): Result.003 file - promoters60/4901673
attccagc

SEQ ID NO: 143902 - DNA, 13 bp, Unknown
  misc_feature (1)..( 13): Result.003 file - promoters60/4901673
gattccgatccag

SEQ ID NO: 143903 - DNA, 13 bp, Unknown
  misc_feature (1)..( 13): Result.003 file - promoters60/4901673
ttcctagatacag

SEQ ID NO: 143904 - DNA, 13 bp, Unknown
  misc_feature (1)..( 13): Result.003 file - promoters60/4901673
ttcttagctacgt

SEQ ID NO: 143905 - DNA, 9 bp, Unknown
  misc_feature (1)..( 9): Result.003 file - promoters60/4901783
aaataatga

SEQ ID NO: 143906 - DNA, 9 bp, Unknown
  misc_feature (1)..( 9): Result.003 file - promoters60/4901783
aaaaaatct

SEQ ID NO: 143907 - DNA, 9 bp, Unknown
  misc_feature (1)..( 9): Result.003 file - promoters60/4901783
aaacaattt

SEQ ID NO: 143908 - DNA, 9 bp, Unknown
  misc_feature (1)..( 9): Result.003 file - promoters60/4901783
tacaaattt

SEQ ID NO: 143909 - DNA, 8 bp, Unknown
  misc_feature (1)..( 8): Result.003 file - promoters60/4901783
caaagaaa

SEQ ID NO: 143910 - DNA, 8 bp, Unknown
  misc_feature (1)..( 8): Result.003 file - promoters60/4901783
caaacaaa

SEQ ID NO: 143911 - DNA, 8 bp, Unknown
  misc_feature (1)..( 8): Result.003 file - promoters60/4901783
ggaagaaa

SEQ ID NO: 143912 - DNA, 8 bp, Unknown
  misc_feature (1)..( 8): Result.003 file - promoters60/4901783
caaccaat

SEQ ID NO: 143913 - DNA, 9 bp, Unknown
  misc_feature (1)..( 9): Result.003 file - promoters60/4901783
tagatgtca

SEQ ID NO: 143914 - DNA, 9 bp, Unknown
  misc_feature (1)..( 9): Result.003 file - promoters60/4901783
aaaatgtca

SEQ ID NO: 143915 - DNA, 9 bp, Unknown
  misc_feature (1)..( 9): Result.003 file - promoters60/4901783
taaatatca

SEQ ID NO: 143916 - DNA, 9 bp, Unknown
  misc_feature (1)..( 9): Result.003 file - promoters60/4901783
taagtatct

SEQ ID NO: 143917 - DNA, 9 bp, Unknown
  misc_feature (1)..( 9): Result.003 file - promoters60/4901783
tgagaacat

SEQ ID NO: 143918 - DNA, 9 bp, Unknown
  misc_feature (1)..( 9): Result.003 file - promoters60/4901783
tgaaaacta

SEQ ID NO: 143919 - DNA, 9 bp, Unknown
  misc_feature (1)..( 9): Result.003 file - promoters60/4901783
aaaaatcta

SEQ ID NO: 143920 - DNA, 9 bp, Unknown
  misc_feature (1)..( 9): Result.003 file - promoters60/4901783
agaaaacaa

SEQ ID NO: 143921 - DNA, 8 bp, Unknown
  misc_feature (1)..( 8): Result.003 file - promoters60/4901783
caaaaatc

SEQ ID NO: 143922 - DNA, 8 bp, Unknown
  misc_feature (1)..( 8): Result.003 file - promoters60/4901783
caaaaaaa

SEQ ID NO: 143923 - DNA, 8 bp, Unknown
  misc_feature (1)..( 8): Result.003 file - promoters60/4901783
taaatatc

SEQ ID NO: 143924 - DNA, 8 bp, Unknown
  misc_feature (1)..( 8): Result.003 file - promoters60/4901783
taagtatc

SEQ ID NO: 143925 - DNA, 7 bp, Unknown
  misc_feature (1)..( 7): Result.003 file - promoters60/4901822
catttga

SEQ ID NO: 143926 - DNA, 7 bp, Unknown
  misc_feature (1)..( 7): Result.003 file - promoters60/4901822
catgtga

SEQ ID NO: 143927 - DNA, 11 bp, Unknown
  misc_feature (1)..( 11): Result.003 file - promoters60/4901822
aacatcaagag

SEQ ID NO: 143928 - DNA, 11 bp, Unknown
  misc_feature (1)..( 11): Result.003 file - promoters60/4901822
aacctcatgag

SEQ ID NO: 143929 - DNA, 7 bp, Unknown
  misc_feature (1)..( 7): Result.003 file - promoters60/4901822
tcttcag

SEQ ID NO: 143930 - DNA, 7 bp, Unknown
  misc_feature (1)..( 7): Result.003 file - promoters60/4901822
tctgcag

SEQ ID NO: 143931 - DNA, 7 bp, Unknown
  misc_feature (1)..( 7): Result.003 file - promoters60/4901822
aagcagt

SEQ ID NO: 143932 - DNA, 7 bp, Unknown
  misc_feature (1)..( 7): Result.003 file - promoters60/4901822
aagtagt

SEQ ID NO: 143933 - DNA, 8 bp, Unknown
  misc_feature (1)..( 8): Result.003 file - promoters60/4901822
ggttctaa

SEQ ID NO: 143934 - DNA, 8 bp, Unknown
  misc_feature (1)..( 8): Result.003 file - promoters60/4901822
ggtactaa

SEQ ID NO: 143935 - DNA, 9 bp, Unknown
  misc_feature (1)..( 9): Result.003 file - promoters60/4901822
tttctccaa

SEQ ID NO: 143936 - DNA, 9 bp, Unknown
  misc_feature (1)..( 9): Result.003 file - promoters60/4901822
tttctacaa

SEQ ID NO: 143937 - DNA, 6 bp, Unknown
  misc_feature (1)..( 6): Result.003 file - promoters60/4901822
aaaaca

SEQ ID NO: 143938 - DNA, 6 bp, Unknown
  misc_feature (1)..( 6): Result.003 file - promoters60/4901822
aaaaca

SEQ ID NO: 143939 - DNA, 6 bp, Unknown
  misc_feature (1)..( 6): Result.003 file - promoters60/4901822
taatta

SEQ ID NO: 143940 - DNA, 6 bp, Unknown
  misc_feature (1)..( 6): Result.003 file - promoters60/4901822
taatta

SEQ ID NO: 143941 - DNA, 10 bp, Unknown
  misc_feature (1)..( 10): Result.003 file - promoters60/4901822
agaattccgg

SEQ ID NO: 143942 - DNA, 10 bp, Unknown
  misc_feature (1)..( 10): Result.003 file - promoters60/4901822
agatttccgg

SEQ ID NO: 143943 - DNA, 8 bp, Unknown
  misc_feature (1)..( 8): Result.003 file - promoters60/4901822
aacctaca

SEQ ID NO: 143944 - DNA, 8 bp, Unknown
  misc_feature (1)..( 8): Result.003 file - promoters60/4901822
aacctaca

SEQ ID NO: 143945 - DNA, 7 bp, Unknown
  misc_feature (1)..( 7): Result.003 file - promoters60/4901822
tggaaat

SEQ ID NO: 143946 - DNA, 7 bp, Unknown
  misc_feature (1)..( 7): Result.003 file - promoters60/4901822
tggtaat

SEQ ID NO: 143947 - DNA, 7 bp, Unknown
  misc_feature (1)..( 7): Result.003 file - promoters60/4901822
tttgtct

SEQ ID NO: 143948 - DNA, 7 bp, Unknown
  misc_feature (1)..( 7): Result.003 file - promoters60/4901822
tttttct

SEQ ID NO: 143949 - DNA, 10 bp, Unknown
  misc_feature (1)..( 10): Result.003 file - promoters60/4901822
tgagtcaata

SEQ ID NO: 143950 - DNA, 10 bp, Unknown
  misc_feature (1)..( 10): Result.003 file - promoters60/4901822
tgaatcaata

SEQ ID NO: 143951 - DNA, 8 bp, Unknown
  misc_feature (1)..( 8): Result.003 file - promoters60/4901822
ggtttttg

SEQ ID NO: 143952 - DNA, 8 bp, Unknown
  misc_feature (1)..( 8): Result.003 file - promoters60/4901822
ggtgtttg

SEQ ID NO: 143953 - DNA, 6 bp, Unknown
  misc_feature (1)..( 6): Result.003 file - promoters60/4901822
acaaac

SEQ ID NO: 143954 - DNA, 6 bp, Unknown
  misc_feature (1)..( 6): Result.003 file - promoters60/4901822
acaaac

SEQ ID NO: 143955 - DNA, 7 bp, Unknown
  misc_feature (1)..( 7): Result.003 file - promoters60/4901884
aaacaaa

SEQ ID NO: 143956 - DNA, 7 bp, Unknown
  misc_feature (1)..( 7): Result.003 file - promoters60/4901884
aaagaaa

SEQ ID NO: 143957 - DNA, 6 bp, Unknown
  misc_feature (1)..( 6): Result.003 file - promoters60/4901884
acaaaa

SEQ ID NO: 143958 - DNA, 6 bp, Unknown
  misc_feature (1)..( 6): Result.003 file - promoters60/4901884
acaaaa

SEQ ID NO: 143959 - DNA, 6 bp, Unknown
  misc_feature (1)..( 6): Result.003 file - promoters60/4901884
acaata

SEQ ID NO: 143960 - DNA, 6 bp, Unknown
  misc_feature (1)..( 6): Result.003 file - promoters60/4901884
acaata

SEQ ID NO: 143961 - DNA, 8 bp, Unknown
  misc_feature (1)..( 8): Result.003 file - promoters60/4901884
ggccatga

SEQ ID NO: 143962 - DNA, 8 bp, Unknown
  misc_feature (1)..( 8): Result.003 file - promoters60/4901884
ggccatga

SEQ ID NO: 143963 - DNA, 7 bp, Unknown
  misc_feature (1)..( 7): Result.003 file - promoters60/4901884
ataaaaa

SEQ ID NO: 143964 - DNA, 7 bp, Unknown
  misc_feature (1)..( 7): Result.003 file - promoters60/4901884
ataaaac

SEQ ID NO: 143965 - DNA, 7 bp, Unknown
  misc_feature (1)..( 7): Result.003 file - promoters60/4901884
ttaaaac

SEQ ID NO: 143966 - DNA, 6 bp, Unknown
  misc_feature (1)..( 6): Result.003 file - promoters60/4901884
gcaaac

SEQ ID NO: 143967 - DNA, 6 bp, Unknown
  misc_feature (1)..( 6): Result.003 file - promoters60/4901884
gcaaac

SEQ ID NO: 143968 - DNA, 10 bp, Unknown
  misc_feature (1)..( 10): Result.003 file - promoters60/4901884
aaaaaaatta

SEQ ID NO: 143969 - DNA, 10 bp, Unknown
  misc_feature (1)..( 10): Result.003 file - promoters60/4901884
aaaaaactta

SEQ ID NO: 143970 - DNA, 10 bp, Unknown
  misc_feature (1)..( 10): Result.003 file - promoters60/4901884
ataaaacttt

SEQ ID NO: 143971 - DNA, 9 bp, Unknown
  misc_feature (1)..( 9): Result.003 file - promoters60/4901884
tgagacact

SEQ ID NO: 143972 - DNA, 9 bp, Unknown
  misc_feature (1)..( 9): Result.003 file - promoters60/4901884
tgagatact

SEQ ID NO: 143973 - DNA, 6 bp, Unknown
  misc_feature (1)..( 6): Result.003 file - promoters60/4901884
tcattt

SEQ ID NO: 143974 - DNA, 6 bp, Unknown
  misc_feature (1)..( 6): Result.003 file - promoters60/4901884
tcattt

SEQ ID NO: 143975 - DNA, 6 bp, Unknown
  misc_feature (1)..( 6): Result.003 file - promoters60/4901884
tataca

SEQ ID NO: 143976 - DNA, 6 bp, Unknown
  misc_feature (1)..( 6): Result.003 file - promoters60/4901884
tataca

SEQ ID NO: 143977 - DNA, 6 bp, Unknown
  misc_feature (1)..( 6): Result.003 file - promoters60/4901884
aattta

SEQ ID NO: 143978 - DNA, 6 bp, Unknown
  misc_feature (1)..( 6): Result.003 file - promoters60/4901884
aattta

SEQ ID NO: 143979 - DNA, 6 bp, Unknown
  misc_feature (1)..( 6): Result.003 file - promoters60/4901884
ataatt

SEQ ID NO: 143980 - DNA, 6 bp, Unknown
  misc_feature (1)..( 6): Result.003 file - promoters60/4901884
ataatt

SEQ ID NO: 143981 - DNA, 6 bp, Unknown
  misc_feature (1)..( 6): Result.003 file - promoters60/4901884
ttttaa

SEQ ID NO: 143982 - DNA, 6 bp, Unknown
  misc_feature (1)..( 6): Result.003 file - promoters60/4901884
ttttaa

SEQ ID NO: 143983 - DNA, 6 bp, Unknown
  misc_feature (1)..( 6): Result.003 file - promoters60/4901884
aataat

SEQ ID NO: 143984 - DNA, 6 bp, Unknown
  misc_feature (1)..( 6): Result.003 file - promoters60/4901884
aataat

SEQ ID NO: 143985 - DNA, 6 bp, Unknown
  misc_feature (1)..( 6): Result.003 file - promoters60/4902082
ctttta

SEQ ID NO: 143986 - DNA, 6 bp, Unknown
  misc_feature (1)..( 6): Result.003 file - promoters60/4902082
ctttta

SEQ ID NO: 143987 - DNA, 7 bp, Unknown
  misc_feature (1)..( 7): Result.003 file - promoters60/4902082
tttgtta

SEQ ID NO: 143988 - DNA, 7 bp, Unknown
  misc_feature (1)..( 7): Result.003 file - promoters60/4902082
tttatta

SEQ ID NO: 143989 - DNA, 8 bp, Unknown
  misc_feature (1)..( 8): Result.003 file - promoters60/4902082
gtaaattt

SEQ ID NO: 143990 - DNA, 8 bp, Unknown
  misc_feature (1)..( 8): Result.003 file - promoters60/4902082
ataatttt

SEQ ID NO: 143991 - DNA, 9 bp, Unknown
  misc_feature (1)..( 9): Result.003 file - promoters60/4902082
ataatgttt

SEQ ID NO: 143992 - DNA, 6 bp, Unknown
  misc_feature (1)..( 6): Result.003 file - promoters60/4902082
attgaa

SEQ ID NO: 143993 - DNA, 6 bp, Unknown
  misc_feature (1)..( 6): Result.003 file - promoters60/4902082
attgaa

SEQ ID NO: 143994 - DNA, 13 bp, Unknown
  misc_feature (1)..( 13): Result.003 file - promoters60/4902082
ttccttcacattg

SEQ ID NO: 143995 - DNA, 13 bp, Unknown
  misc_feature (1)..( 13): Result.003 file - promoters60/4902082
ttccctcacattg

SEQ ID NO: 143996 - DNA, 13 bp, Unknown
  misc_feature (1)..( 13): Result.003 file - promoters60/4902082
agtattcccatta

SEQ ID NO: 143997 - DNA, 8 bp, Unknown
  misc_feature (1)..( 8): Result.003 file - promoters60/4902082
ttagatcc

SEQ ID NO: 143998 - DNA, 8 bp, Unknown
  misc_feature (1)..( 8): Result.003 file - promoters60/4902082
ttaaatcc

SEQ ID NO: 143999 - DNA, 9 bp, Unknown
  misc_feature (1)..( 9): Result.003 file - promoters60/4902082
acactgatg

SEQ ID NO: 144000 - DNA, 9 bp, Unknown
  misc_feature (1)..( 9): Result.003 file - promoters60/4902082
acaatgatg

SEQ ID NO: 144001 - DNA, 6 bp, Unknown
  misc_feature (1)..( 6): Result.003 file - promoters60/4902082
caaatg

SEQ ID NO: 144002 - DNA, 6 bp, Unknown
  misc_feature (1)..( 6): Result.003 file - promoters60/4902082
caaatg

SEQ ID NO: 144003 - DNA, 6 bp, Unknown
  misc_feature (1)..( 6): Result.003 file - promoters60/4902082
agtata

SEQ ID NO: 144004 - DNA, 6 bp, Unknown
  misc_feature (1)..( 6): Result.003 file - promoters60/4902082
agtata

SEQ ID NO: 144005 - DNA, 8 bp, Unknown
  misc_feature (1)..( 8): Result.003 file - promoters60/4902082
caactggt

SEQ ID NO: 144006 - DNA, 8 bp, Unknown
  misc_feature (1)..( 8): Result.003 file - promoters60/4902082
caaatggt

SEQ ID NO: 144007 - DNA, 7 bp, Unknown
  misc_feature (1)..( 7): Result.003 file - promoters60/4902082
attattt

SEQ ID NO: 144008 - DNA, 7 bp, Unknown
  misc_feature (1)..( 7): Result.003 file - promoters60/4902082
atttttt

SEQ ID NO: 144009 - DNA, 7 bp, Unknown
  misc_feature (1)..( 7): Result.003 file - promoters60/4902082
atagata

SEQ ID NO: 144010 - DNA, 7 bp, Unknown
  misc_feature (1)..( 7): Result.003 file - promoters60/4902082
atatata

SEQ ID NO: 144011 - DNA, 7 bp, Unknown
  misc_feature (1)..( 7): Result.003 file - promoters60/4902082
atgtaat

SEQ ID NO: 144012 - DNA, 7 bp, Unknown
  misc_feature (1)..( 7): Result.003 file - promoters60/4902082
atggaat

SEQ ID NO: 144013 - DNA, 7 bp, Unknown
  misc_feature (1)..( 7): Result.003 file - promoters60/4902082
acctaat

SEQ ID NO: 144014 - DNA, 7 bp, Unknown
  misc_feature (1)..( 7): Result.003 file - promoters60/4902082
accaaat

SEQ ID NO: 144015 - DNA, 6 bp, Unknown
  misc_feature (1)..( 6): Result.003 file - promoters60/4902082
tattat

SEQ ID NO: 144016 - DNA, 6 bp, Unknown
  misc_feature (1)..( 6): Result.003 file - promoters60/4902082
tattat

SEQ ID NO: 144017 - DNA, 6 bp, Unknown
  misc_feature (1)..( 6): Result.003 file - promoters60/4902082
aaaaaa

SEQ ID NO: 144018 - DNA, 6 bp, Unknown
  misc_feature (1)..( 6): Result.003 file - promoters60/4902082
aaaaaa

SEQ ID NO: 144019 - DNA, 6 bp, Unknown
  misc_feature (1)..( 6): Result.003 file - promoters60/4902082
gtcaaa

SEQ ID NO: 144020 - DNA, 6 bp, Unknown
  misc_feature (1)..( 6): Result.003 file - promoters60/4902082
gtcaaa

SEQ ID NO: 144021 - DNA, 6 bp, Unknown
  misc_feature (1)..( 6): Result.003 file - promoters60/4902082
ggcgag

SEQ ID NO: 144022 - DNA, 6 bp, Unknown
  misc_feature (1)..( 6): Result.003 file - promoters60/4902082
ggcgag

SEQ ID NO: 144023 - DNA, 7 bp, Unknown
  misc_feature (1)..( 7): Result.003 file - promoters60/4902143
accagaa

SEQ ID NO: 144024 - DNA, 7 bp, Unknown
  misc_feature (1)..( 7): Result.003 file - promoters60/4902143
accagaa

SEQ ID NO: 144025 - DNA, 7 bp, Unknown
  misc_feature (1)..( 7): Result.003 file - promoters60/4902143
accagaa

SEQ ID NO: 144026 - DNA, 7 bp, Unknown
  misc_feature (1)..( 7): Result.003 file - promoters60/4902143
aaacacc

SEQ ID NO: 144027 - DNA, 7 bp, Unknown
  misc_feature (1)..( 7): Result.003 file - promoters60/4902143
aaaaacc

SEQ ID NO: 144028 - DNA, 7 bp, Unknown
  misc_feature (1)..( 7): Result.003 file - promoters60/4902143
aaacacc

SEQ ID NO: 144029 - DNA, 7 bp, Unknown
  misc_feature (1)..( 7): Result.003 file - promoters60/4902143
aaaatca

SEQ ID NO: 144030 - DNA, 7 bp, Unknown
  misc_feature (1)..( 7): Result.003 file - promoters60/4902143
aaaatca

SEQ ID NO: 144031 - DNA, 7 bp, Unknown
  misc_feature (1)..( 7): Result.003 file - promoters60/4902143
aaaatca

SEQ ID NO: 144032 - DNA, 7 bp, Unknown
  misc_feature (1)..( 7): Result.003 file - promoters60/4902143
cggttta

SEQ ID NO: 144033 - DNA, 7 bp, Unknown
  misc_feature (1)..( 7): Result.003 file - promoters60/4902143
tggttta

SEQ ID NO: 144034 - DNA, 7 bp, Unknown
  misc_feature (1)..( 7): Result.003 file - promoters60/4902143
atgtttt

SEQ ID NO: 144035 - DNA, 7 bp, Unknown
  misc_feature (1)..( 7): Result.003 file - promoters60/4902143
atgtttt

SEQ ID NO: 144036 - DNA, 8 bp, Unknown
  misc_feature (1)..( 8): Result.003 file - promoters60/4902143
gaaaatat

SEQ ID NO: 144037 - DNA, 8 bp, Unknown
  misc_feature (1)..( 8): Result.003 file - promoters60/4902143
taaaatat

SEQ ID NO: 144038 - DNA, 8 bp, Unknown
  misc_feature (1)..( 8): Result.003 file - promoters60/4902143
taaaatgc

SEQ ID NO: 144039 - DNA, 12 bp, Unknown
  misc_feature (1)..( 12): Result.003 file - promoters60/4902143
taaaaaataaat

SEQ ID NO: 144040 - DNA, 12 bp, Unknown
  misc_feature (1)..( 12): Result.003 file - promoters60/4902143
gaaacaataaat

SEQ ID NO: 144041 - DNA, 12 bp, Unknown
  misc_feature (1)..( 12): Result.003 file - promoters60/4902143
taaacagacggt

SEQ ID NO: 144042 - DNA, 9 bp, Unknown
  misc_feature (1)..( 9): Result.003 file - promoters60/4902288
acaatttac

SEQ ID NO: 144043 - DNA, 9 bp, Unknown
  misc_feature (1)..( 9): Result.003 file - promoters60/4902288
taaatctac

SEQ ID NO: 144044 - DNA, 9 bp, Unknown
  misc_feature (1)..( 9): Result.003 file - promoters60/4902288
ttaatttat

SEQ ID NO: 144045 - DNA, 9 bp, Unknown
  misc_feature (1)..( 9): Result.003 file - promoters60/4902288
aaaaactat

SEQ ID NO: 144046 - DNA, 9 bp, Unknown
  misc_feature (1)..( 9): Result.003 file - promoters60/4902288
aaaaacatg

SEQ ID NO: 144047 - DNA, 10 bp, Unknown
  misc_feature (1)..( 10): Result.003 file - promoters60/4902288
aaaagatagc

SEQ ID NO: 144048 - DNA, 10 bp, Unknown
  misc_feature (1)..( 10): Result.003 file - promoters60/4902288
gaaatatata

SEQ ID NO: 144049 - DNA, 10 bp, Unknown
  misc_feature (1)..( 10): Result.003 file - promoters60/4902288
gaaatagatt

SEQ ID NO: 144050 - DNA, 10 bp, Unknown
  misc_feature (1)..( 10): Result.003 file - promoters60/4902288
ttagtagatt

SEQ ID NO: 144051 - DNA, 10 bp, Unknown
  misc_feature (1)..( 10): Result.003 file - promoters60/4902288
ttaatttatt

SEQ ID NO: 144052 - DNA, 10 bp, Unknown
  misc_feature (1)..( 10): Result.003 file - promoters60/4902288
tgattacttt

SEQ ID NO: 144053 - DNA, 15 bp, Unknown
  misc_feature (1)..( 15): Result.003 file - promoters60/4902387
cttatatgatgattg

SEQ ID NO: 144054 - DNA, 15 bp, Unknown
  misc_feature (1)..( 15): Result.003 file - promoters60/4902387
ttggtatcatgttta

SEQ ID NO: 144055 - DNA, 15 bp, Unknown
  misc_feature (1)..( 15): Result.003 file - promoters60/4902387
aaaatatgagataaa

SEQ ID NO: 144056 - DNA, 15 bp, Unknown
  misc_feature (1)..( 15): Result.003 file - promoters60/4902387
tttccttcattttta

SEQ ID NO: 144057 - DNA, 15 bp, Unknown
  misc_feature (1)..( 15): Result.003 file - promoters60/4902387
caaatatgaaaatct

SEQ ID NO: 144058 - DNA, 15 bp, Unknown
  misc_feature (1)..( 15): Result.003 file - promoters60/4902387
caaataaacaaactc

SEQ ID NO: 144059 - DNA, 7 bp, Unknown
  misc_feature (1)..( 7): Result.003 file - promoters60/4902387
tttcaac

SEQ ID NO: 144060 - DNA, 7 bp, Unknown
  misc_feature (1)..( 7): Result.003 file - promoters60/4902387
tttgaac

SEQ ID NO: 144061 - DNA, 7 bp, Unknown
  misc_feature (1)..( 7): Result.003 file - promoters60/4902387
tttgaaa

SEQ ID NO: 144062 - DNA, 8 bp, Unknown
  misc_feature (1)..( 8): Result.003 file - promoters60/4902387
tttagaaa

SEQ ID NO: 144063 - DNA, 8 bp, Unknown
  misc_feature (1)..( 8): Result.003 file - promoters60/4902387
ttaaaaaa

SEQ ID NO: 144064 - DNA, 8 bp, Unknown
  misc_feature (1)..( 8): Result.003 file - promoters60/4902387
aaaagaaa

SEQ ID NO: 144065 - DNA, 8 bp, Unknown
  misc_feature (1)..( 8): Result.003 file - promoters60/4902387
tcagtttc

SEQ ID NO: 144066 - DNA, 8 bp, Unknown
  misc_feature (1)..( 8): Result.003 file - promoters60/4902387
tcattttt

SEQ ID NO: 144067 - DNA, 9 bp, Unknown
  misc_feature (1)..( 9): Result.003 file - promoters60/4902387
tcatgttta

SEQ ID NO: 144068 - DNA, 9 bp, Unknown
  misc_feature (1)..( 9): Result.003 file - promoters60/4902387
caatgatta

SEQ ID NO: 144069 - DNA, 9 bp, Unknown
  misc_feature (1)..( 9): Result.003 file - promoters60/4902387
acatatttt

SEQ ID NO: 144070 - DNA, 9 bp, Unknown
  misc_feature (1)..( 9): Result.003 file - promoters60/4902387
caatgttta

SEQ ID NO: 144071 - DNA, 9 bp, Unknown
  misc_feature (1)..( 9): Result.003 file - promoters60/4902387
aaaaaatat

SEQ ID NO: 144072 - DNA, 9 bp, Unknown
  misc_feature (1)..( 9): Result.003 file - promoters60/4902387
acatatata

SEQ ID NO: 144073 - DNA, 11 bp, Unknown
  misc_feature (1)..( 11): Result.003 file - promoters60/4902387
tatgatgattg

SEQ ID NO: 144074 - DNA, 11 bp, Unknown
  misc_feature (1)..( 11): Result.003 file - promoters60/4902387
ttcaatgatta

SEQ ID NO: 144075 - DNA, 11 bp, Unknown
  misc_feature (1)..( 11): Result.003 file - promoters60/4902387
tatcatgttta

SEQ ID NO: 144076 - DNA, 11 bp, Unknown
  misc_feature (1)..( 11): Result.003 file - promoters60/4902387
aaacatatttt

SEQ ID NO: 144077 - DNA, 11 bp, Unknown
  misc_feature (1)..( 11): Result.003 file - promoters60/4902387
accaatgttta

SEQ ID NO: 144078 - DNA, 11 bp, Unknown
  misc_feature (1)..( 11): Result.003 file - promoters60/4902387
aaaaatatgag

SEQ ID NO: 144079 - DNA, 11 bp, Unknown
  misc_feature (1)..( 11): Result.003 file - promoters60/4902387
gtacatatata

SEQ ID NO: 144080 - DNA, 9 bp, Unknown
  misc_feature (1)..( 9): Result.003 file - promoters60/4902387
tcatgttta

SEQ ID NO: 144081 - DNA, 9 bp, Unknown
  misc_feature (1)..( 9): Result.003 file - promoters60/4902387
caatgttta

SEQ ID NO: 144082 - DNA, 9 bp, Unknown
  misc_feature (1)..( 9): Result.003 file - promoters60/4902387
tcattttta

SEQ ID NO: 144083 - DNA, 9 bp, Unknown
  misc_feature (1)..( 9): Result.003 file - promoters60/4902387
caatgatta

SEQ ID NO: 144084 - DNA, 9 bp, Unknown
  misc_feature (1)..( 9): Result.003 file - promoters60/4902387
acatatttt

SEQ ID NO: 144085 - DNA, 9 bp, Unknown
  misc_feature (1)..( 9): Result.003 file - promoters60/4902387
aaatgttga

SEQ ID NO: 144086 - DNA, 9 bp, Unknown
  misc_feature (1)..( 9): Result.003 file - promoters60/4902387
acatatata

SEQ ID NO: 144087 - DNA, 11 bp, Unknown
  misc_feature (1)..( 11): Result.003 file - promoters60/4902387
taggcaacaaa

SEQ ID NO: 144088 - DNA, 11 bp, Unknown
  misc_feature (1)..( 11): Result.003 file - promoters60/4902387
tattaaacaaa

SEQ ID NO: 144089 - DNA, 11 bp, Unknown
  misc_feature (1)..( 11): Result.003 file - promoters60/4902387
atctaaataaa

SEQ ID NO: 144090 - DNA, 11 bp, Unknown
  misc_feature (1)..( 11): Result.003 file - promoters60/4902387
atctgaatact

SEQ ID NO: 144091 - DNA, 11 bp, Unknown
  misc_feature (1)..( 11): Result.003 file - promoters60/4902387
aatcaaataaa

SEQ ID NO: 144092 - DNA, 11 bp, Unknown
  misc_feature (1)..( 11): Result.003 file - promoters60/4902387
tgctgaatctt

SEQ ID NO: 144093 - DNA, 14 bp, Unknown
  misc_feature (1)..( 14): Result.003 file - promoters60/4902387
atctaaataaattt

SEQ ID NO: 144094 - DNA, 14 bp, Unknown
  misc_feature (1)..( 14): Result.003 file - promoters60/4902387
ccagaaatgaattt

SEQ ID NO: 144095 - DNA, 14 bp, Unknown
  misc_feature (1)..( 14): Result.003 file - promoters60/4902387
tattaaacaaacca

SEQ ID NO: 144096 - DNA, 14 bp, Unknown
  misc_feature (1)..( 14): Result.003 file - promoters60/4902387
gaaaatctgaatac

SEQ ID NO: 144097 - DNA, 14 bp, Unknown
  misc_feature (1)..( 14): Result.003 file - promoters60/4902387
aatcaaataaacaa

SEQ ID NO: 144098 - DNA, 14 bp, Unknown
  misc_feature (1)..( 14): Result.003 file - promoters60/4902387
cagtaatgaagaag

SEQ ID NO: 144099 - DNA, 10 bp, Unknown
  misc_feature (1)..( 10): Result.003 file - promoters60/4902791
aaaactaaaa

SEQ ID NO: 144100 - DNA, 9 bp, Unknown
  misc_feature (1)..( 9): Result.003 file - promoters60/4902791
gaacaaaaa

SEQ ID NO: 144101 - DNA, 10 bp, Unknown
  misc_feature (1)..( 10): Result.003 file - promoters60/4902791
caaaccaaac

SEQ ID NO: 144102 - DNA, 10 bp, Unknown
  misc_feature (1)..( 10): Result.003 file - promoters60/4902791
tacacacaaa

SEQ ID NO: 144103 - DNA, 10 bp, Unknown
  misc_feature (1)..( 10): Result.003 file - promoters60/4902791
gcaacccatt

SEQ ID NO: 144104 - DNA, 9 bp, Unknown
  misc_feature (1)..( 9): Result.003 file - promoters60/4902791
tctcaaacc

SEQ ID NO: 144105 - DNA, 10 bp, Unknown
  misc_feature (1)..( 10): Result.003 file - promoters60/4902791
atataataaa

SEQ ID NO: 144106 - DNA, 10 bp, Unknown
  misc_feature (1)..( 10): Result.003 file - promoters60/4902791
gaatactaaa

SEQ ID NO: 144107 - DNA, 10 bp, Unknown
  misc_feature (1)..( 10): Result.003 file - promoters60/4902791
agttaaaaaa

SEQ ID NO: 144108 - DNA, 10 bp, Unknown
  misc_feature (1)..( 10): Result.003 file - promoters60/4902791
aaataataat

SEQ ID NO: 144109 - DNA, 10 bp, Unknown
  misc_feature (1)..( 10): Result.003 file - promoters60/4902791
agaaaatagt

SEQ ID NO: 144110 - DNA, 10 bp, Unknown
  misc_feature (1)..( 10): Result.003 file - promoters60/4902791
aaattatatc

SEQ ID NO: 144111 - DNA, 9 bp, Unknown
  misc_feature (1)..( 9): Result.003 file - promoters60/4903407
taaataaaa

SEQ ID NO: 144112 - DNA, 9 bp, Unknown
  misc_feature (1)..( 9): Result.003 file - promoters60/4903407
taaatatgt

SEQ ID NO: 144113 - DNA, 9 bp, Unknown
  misc_feature (1)..( 9): Result.003 file - promoters60/4903407
caaataaaa

SEQ ID NO: 144114 - DNA, 9 bp, Unknown
  misc_feature (1)..( 9): Result.003 file - promoters60/4903407
aaaatattt

SEQ ID NO: 144115 - DNA, 8 bp, Unknown
  misc_feature (1)..( 8): Result.003 file - promoters60/4903407
aaagacta

SEQ ID NO: 144116 - DNA, 8 bp, Unknown
  misc_feature (1)..( 8): Result.003 file - promoters60/4903407
aaaaactt

SEQ ID NO: 144117 - DNA, 8 bp, Unknown
  misc_feature (1)..( 8): Result.003 file - promoters60/4903407
aaagacag

SEQ ID NO: 144118 - DNA, 8 bp, Unknown
  misc_feature (1)..( 8): Result.003 file - promoters60/4903407
aaaaacta

SEQ ID NO: 144119 - DNA, 10 bp, Unknown
  misc_feature (1)..( 10): Result.003 file - promoters60/4903407
ctaaaaagta

SEQ ID NO: 144120 - DNA, 10 bp, Unknown
  misc_feature (1)..( 10): Result.003 file - promoters60/4903407
ataaaaaaaa

SEQ ID NO: 144121 - DNA, 10 bp, Unknown
  misc_feature (1)..( 10): Result.003 file - promoters60/4903407
acaaaaaaaa

SEQ ID NO: 144122 - DNA, 10 bp, Unknown
  misc_feature (1)..( 10): Result.003 file - promoters60/4903407
acaaaaagac

SEQ ID NO: 144123 - DNA, 10 bp, Unknown
  misc_feature (1)..( 10): Result.003 file - promoters60/4903407
gtttttctta

SEQ ID NO: 144124 - DNA, 10 bp, Unknown
  misc_feature (1)..( 10): Result.003 file - promoters60/4903407
gtttatctcc

SEQ ID NO: 144125 - DNA, 10 bp, Unknown
  misc_feature (1)..( 10): Result.003 file - promoters60/4903407
gtctttcttt

SEQ ID NO: 144126 - DNA, 10 bp, Unknown
  misc_feature (1)..( 10): Result.003 file - promoters60/4903407
acttttgttt

SEQ ID NO: 144127 - DNA, 11 bp, Unknown
  misc_feature (1)..( 11): Result.003 file - promoters60/4903407
aaaaataaata

SEQ ID NO: 144128 - DNA, 11 bp, Unknown
  misc_feature (1)..( 11): Result.003 file - promoters60/4903407
aaaaatatatt

SEQ ID NO: 144129 - DNA, 11 bp, Unknown
  misc_feature (1)..( 11): Result.003 file - promoters60/4903407
acaaatttatt

SEQ ID NO: 144130 - DNA, 11 bp, Unknown
  misc_feature (1)..( 11): Result.003 file - promoters60/4903407
aaagatatatc

SEQ ID NO: 144131 - DNA, 6 bp, Unknown
  misc_feature (1)..( 6): Result.003 file - promoters60/4903614
gattga

SEQ ID NO: 144132 - DNA, 6 bp, Unknown
  misc_feature (1)..( 6): Result.003 file - promoters60/4903614
gattga

SEQ ID NO: 144133 - DNA, 8 bp, Unknown
  misc_feature (1)..( 8): Result.003 file - promoters60/4903614
tcggtttt

SEQ ID NO: 144134 - DNA, 8 bp, Unknown
  misc_feature (1)..( 8): Result.003 file - promoters60/4903614
tcgatttt

SEQ ID NO: 144135 - DNA, 6 bp, Unknown
  misc_feature (1)..( 6): Result.003 file - promoters60/4903614
atttta

SEQ ID NO: 144136 - DNA, 6 bp, Unknown
  misc_feature (1)..( 6): Result.003 file - promoters60/4903614
atttta

SEQ ID NO: 144137 - DNA, 10 bp, Unknown
  misc_feature (1)..( 10): Result.003 file - promoters60/4903614
ttaatataaa

SEQ ID NO: 144138 - DNA, 10 bp, Unknown
  misc_feature (1)..( 10): Result.003 file - promoters60/4903614
acaatttaaa

SEQ ID NO: 144139 - DNA, 10 bp, Unknown
  misc_feature (1)..( 10): Result.003 file - promoters60/4903614
ttattataaa

SEQ ID NO: 144140 - DNA, 6 bp, Unknown
  misc_feature (1)..( 6): Result.003 file - promoters60/4903614
aaccgt

SEQ ID NO: 144141 - DNA, 6 bp, Unknown
  misc_feature (1)..( 6): Result.003 file - promoters60/4903614
aaccgt

SEQ ID NO: 144142 - DNA, 7 bp, Unknown
  misc_feature (1)..( 7): Result.003 file - promoters60/4903614
taatcta

SEQ ID NO: 144143 - DNA, 7 bp, Unknown
  misc_feature (1)..( 7): Result.003 file - promoters60/4903614
taaacta

SEQ ID NO: 144144 - DNA, 6 bp, Unknown
  misc_feature (1)..( 6): Result.003 file - promoters60/4903614
aatatt

SEQ ID NO: 144145 - DNA, 6 bp, Unknown
  misc_feature (1)..( 6): Result.003 file - promoters60/4903614
aatatt

SEQ ID NO: 144146 - DNA, 7 bp, Unknown
  misc_feature (1)..( 7): Result.003 file - promoters60/4903614
attctaa

SEQ ID NO: 144147 - DNA, 7 bp, Unknown
  misc_feature (1)..( 7): Result.003 file - promoters60/4903614
attataa

SEQ ID NO: 144148 - DNA, 8 bp, Unknown
  misc_feature (1)..( 8): Result.003 file - promoters60/4903614
tattttaa

SEQ ID NO: 144149 - DNA, 8 bp, Unknown
  misc_feature (1)..( 8): Result.003 file - promoters60/4903614
tattataa

SEQ ID NO: 144150 - DNA, 8 bp, Unknown
  misc_feature (1)..( 8): Result.003 file - promoters60/4903614
tttatggt

SEQ ID NO: 144151 - DNA, 8 bp, Unknown
  misc_feature (1)..( 8): Result.003 file - promoters60/4903614
tttctggt

SEQ ID NO: 144152 - DNA, 7 bp, Unknown
  misc_feature (1)..( 7): Result.003 file - promoters60/4903614
aatgaaa

SEQ ID NO: 144153 - DNA, 7 bp, Unknown
  misc_feature (1)..( 7): Result.003 file - promoters60/4903614
aataaaa

SEQ ID NO: 144154 - DNA, 7 bp, Unknown
  misc_feature (1)..( 7): Result.003 file - promoters60/4903614
acaaatt

SEQ ID NO: 144155 - DNA, 7 bp, Unknown
  misc_feature (1)..( 7): Result.003 file - promoters60/4903614
acacatt

SEQ ID NO: 144156 - DNA, 6 bp, Unknown
  misc_feature (1)..( 6): Result.003 file - promoters60/4903614
agaaaa

SEQ ID NO: 144157 - DNA, 6 bp, Unknown
  misc_feature (1)..( 6): Result.003 file - promoters60/4903614
agaaaa

SEQ ID NO: 144158 - DNA, 6 bp, Unknown
  misc_feature (1)..( 6): Result.003 file - promoters60/4903614
taataa

SEQ ID NO: 144159 - DNA, 6 bp, Unknown
  misc_feature (1)..( 6): Result.003 file - promoters60/4903614
taataa

SEQ ID NO: 144160 - DNA, 7 bp, Unknown
  misc_feature (1)..( 7): Result.003 file - promoters60/4903614
tgtttga

SEQ ID NO: 144161 - DNA, 7 bp, Unknown
  misc_feature (1)..( 7): Result.003 file - promoters60/4903614
tgtgtga

SEQ ID NO: 144162 - DNA, 6 bp, Unknown
  misc_feature (1)..( 6): Result.003 file - promoters60/4903614
taaaca

SEQ ID NO: 144163 - DNA, 6 bp, Unknown
  misc_feature (1)..( 6): Result.003 file - promoters60/4903614
taaaca

SEQ ID NO: 144164 - DNA, 7 bp, Unknown
  misc_feature (1)..( 7): Result.003 file - promoters60/4903614
acaaaat

SEQ ID NO: 144165 - DNA, 7 bp, Unknown
  misc_feature (1)..( 7): Result.003 file - promoters60/4903614
acaaaat

SEQ ID NO: 144166 - DNA, 8 bp, Unknown
  misc_feature (1)..( 8): Result.003 file - promoters60/4903614
gttaaata

SEQ ID NO: 144167 - DNA, 8 bp, Unknown
  misc_feature (1)..( 8): Result.003 file - promoters60/4903614
gttatata

SEQ ID NO: 144168 - DNA, 6 bp, Unknown
  misc_feature (1)..( 6): Result.003 file - promoters60/4903614
aaacct

SEQ ID NO: 144169 - DNA, 6 bp, Unknown
  misc_feature (1)..( 6): Result.003 file - promoters60/4903614
aaacct

SEQ ID NO: 144170 - DNA, 8 bp, Unknown
  misc_feature (1)..( 8): Result.003 file - promoters60/4903653
aaacatag

SEQ ID NO: 144171 - DNA, 8 bp, Unknown
  misc_feature (1)..( 8): Result.003 file - promoters60/4903653
aaaaatag

SEQ ID NO: 144172 - DNA, 8 bp, Unknown
  misc_feature (1)..( 8): Result.003 file - promoters60/4903653
caaagtag

SEQ ID NO: 144173 - DNA, 9 bp, Unknown
  misc_feature (1)..( 9): Result.003 file - promoters60/4903653
ataaaaacg

SEQ ID NO: 144174 - DNA, 9 bp, Unknown
  misc_feature (1)..( 9): Result.003 file - promoters60/4903653
ccaaaaacc

SEQ ID NO: 144175 - DNA, 9 bp, Unknown
  misc_feature (1)..( 9): Result.003 file - promoters60/4903653
ttaaaaaaa

SEQ ID NO: 144176 - DNA, 7 bp, Unknown
  misc_feature (1)..( 7): Result.003 file - promoters60/4903653
aaagtat

SEQ ID NO: 144177 - DNA, 7 bp, Unknown
  misc_feature (1)..( 7): Result.003 file - promoters60/4903653
aaagtag

SEQ ID NO: 144178 - DNA, 7 bp, Unknown
  misc_feature (1)..( 7): Result.003 file - promoters60/4903653
aaaatag

SEQ ID NO: 144179 - DNA, 13 bp, Unknown
  misc_feature (1)..( 13): Result.003 file - promoters60/4904511
tgtttcttttttc

SEQ ID NO: 144180 - DNA, 13 bp, Unknown
  misc_feature (1)..( 13): Result.003 file - promoters60/4904511
tgtttctgtttga

SEQ ID NO: 144181 - DNA, 13 bp, Unknown
  misc_feature (1)..( 13): Result.003 file - promoters60/4904511
aagagcttttttc

SEQ ID NO: 144182 - DNA, 13 bp, Unknown
  misc_feature (1)..( 13): Result.003 file - promoters60/4904511
gtcatatgttttt

SEQ ID NO: 144183 - DNA, 13 bp, Unknown
  misc_feature (1)..( 13): Result.003 file - promoters60/4904511
taacaattactaa

SEQ ID NO: 144184 - DNA, 13 bp, Unknown
  misc_feature (1)..( 13): Result.003 file - promoters60/4904511
tctcaatttctac

SEQ ID NO: 144185 - DNA, 13 bp, Unknown
  misc_feature (1)..( 13): Result.003 file - promoters60/4904511
taataattatcac

SEQ ID NO: 144186 - DNA, 13 bp, Unknown
  misc_feature (1)..( 13): Result.003 file - promoters60/4904511
tgtcaataactat

SEQ ID NO: 144187 - DNA, 9 bp, Unknown
  misc_feature (1)..( 9): Result.003 file - promoters60/4904511
agttaaata

SEQ ID NO: 144188 - DNA, 9 bp, Unknown
  misc_feature (1)..( 9): Result.003 file - promoters60/4904511
ttataaata

SEQ ID NO: 144189 - DNA, 9 bp, Unknown
  misc_feature (1)..( 9): Result.003 file - promoters60/4904511
ttataaata

SEQ ID NO: 144190 - DNA, 9 bp, Unknown
  misc_feature (1)..( 9): Result.003 file - promoters60/4904511
ttataaatt

SEQ ID NO: 144191 - DNA, 10 bp, Unknown
  misc_feature (1)..( 10): Result.003 file - promoters60/4904511
tctactcttc

SEQ ID NO: 144192 - DNA, 10 bp, Unknown
  misc_feature (1)..( 10): Result.003 file - promoters60/4904511
tcgactctta

SEQ ID NO: 144193 - DNA, 10 bp, Unknown
  misc_feature (1)..( 10): Result.003 file - promoters60/4904511
tcgacacttc

SEQ ID NO: 144194 - DNA, 10 bp, Unknown
  misc_feature (1)..( 10): Result.003 file - promoters60/4904511
ataactatta

SEQ ID NO: 144195 - DNA, 7 bp, Unknown
  misc_feature (1)..( 7): Result.003 file - promoters60/4906198
atcaaaa

SEQ ID NO: 144196 - DNA, 7 bp, Unknown
  misc_feature (1)..( 7): Result.003 file - promoters60/4906198
atctaaa

SEQ ID NO: 144197 - DNA, 7 bp, Unknown
  misc_feature (1)..( 7): Result.003 file - promoters60/4906198
ctctaaa

SEQ ID NO: 144198 - DNA, 9 bp, Unknown
  misc_feature (1)..( 9): Result.003 file - promoters60/4906198
aaacatttt

SEQ ID NO: 144199 - DNA, 9 bp, Unknown
  misc_feature (1)..( 9): Result.003 file - promoters60/4906198
caacaattt

SEQ ID NO: 144200 - DNA, 9 bp, Unknown
  misc_feature (1)..( 9): Result.003 file - promoters60/4906198
caataatga

SEQ ID NO: 144201 - DNA, 8 bp, Unknown
  misc_feature (1)..( 8): Result.003 file - promoters60/4906198
attagaat

SEQ ID NO: 144202 - DNA, 8 bp, Unknown
  misc_feature (1)..( 8): Result.003 file - promoters60/4906198
tttacaat

SEQ ID NO: 144203 - DNA, 8 bp, Unknown
  misc_feature (1)..( 8): Result.003 file - promoters60/4906198
tttccaac

SEQ ID NO: 144204 - DNA, 8 bp, Unknown
  misc_feature (1)..( 8): Result.003 file - promoters60/4906198
atatgcac

SEQ ID NO: 144205 - DNA, 8 bp, Unknown
  misc_feature (1)..( 8): Result.003 file - promoters60/4906198
atattcac

SEQ ID NO: 144206 - DNA, 8 bp, Unknown
  misc_feature (1)..( 8): Result.003 file - promoters60/4906198
atattcga

SEQ ID NO: 144207 - DNA, 8 bp, Unknown
  misc_feature (1)..( 8): Result.003 file - promoters60/4906198
aatcaaat

SEQ ID NO: 144208 - DNA, 8 bp, Unknown
  misc_feature (1)..( 8): Result.003 file - promoters60/4906198
aataaaaa

SEQ ID NO: 144209 - DNA, 8 bp, Unknown
  misc_feature (1)..( 8): Result.003 file - promoters60/4906198
cttaaaaa

SEQ ID NO: 144210 - DNA, 9 bp, Unknown
  misc_feature (1)..( 9): Result.003 file - promoters60/4909449
catataaag

SEQ ID NO: 144211 - DNA, 9 bp, Unknown
  misc_feature (1)..( 9): Result.003 file - promoters60/4909449
catatatac

SEQ ID NO: 144212 - DNA, 9 bp, Unknown
  misc_feature (1)..( 9): Result.003 file - promoters60/4909449
tatataaac

SEQ ID NO: 144213 - DNA, 9 bp, Unknown
  misc_feature (1)..( 9): Result.003 file - promoters60/4909449
aatataaag

SEQ ID NO: 144214 - DNA, 9 bp, Unknown
  misc_feature (1)..( 9): Result.003 file - promoters60/4909449
tatataaag

SEQ ID NO: 144215 - DNA, 9 bp, Unknown
  misc_feature (1)..( 9): Result.003 file - promoters60/4909449
tatagataa

SEQ ID NO: 144216 - DNA, 10 bp, Unknown
  misc_feature (1)..( 10): Result.003 file - promoters60/4909449
aaagttatag

SEQ ID NO: 144217 - DNA, 10 bp, Unknown
  misc_feature (1)..( 10): Result.003 file - promoters60/4909449
aaatttaatt

SEQ ID NO: 144218 - DNA, 10 bp, Unknown
  misc_feature (1)..( 10): Result.003 file - promoters60/4909449
aaaattagtg

SEQ ID NO: 144219 - DNA, 10 bp, Unknown
  misc_feature (1)..( 10): Result.003 file - promoters60/4909449
gaaactagat

SEQ ID NO: 144220 - DNA, 10 bp, Unknown
  misc_feature (1)..( 10): Result.003 file - promoters60/4909449
agaactagaa

SEQ ID NO: 144221 - DNA, 10 bp, Unknown
  misc_feature (1)..( 10): Result.003 file - promoters60/4909449
acaattaaat

SEQ ID NO: 144222 - DNA, 7 bp, Unknown
  misc_feature (1)..( 7): Result.003 file - promoters60/4910362
acacatg

SEQ ID NO: 144223 - DNA, 7 bp, Unknown
  misc_feature (1)..( 7): Result.003 file - promoters60/4910362
acaaatg

SEQ ID NO: 144224 - DNA, 8 bp, Unknown
  misc_feature (1)..( 8): Result.003 file - promoters60/4910362
atttatct

SEQ ID NO: 144225 - DNA, 8 bp, Unknown
  misc_feature (1)..( 8): Result.003 file - promoters60/4910362
atttgtct

SEQ ID NO: 144226 - DNA, 8 bp, Unknown
  misc_feature (1)..( 8): Result.003 file - promoters60/4910362
ttttgtca

SEQ ID NO: 144227 - DNA, 7 bp, Unknown
  misc_feature (1)..( 7): Result.003 file - promoters60/4910362
ttctttg

SEQ ID NO: 144228 - DNA, 7 bp, Unknown
  misc_feature (1)..( 7): Result.003 file - promoters60/4910362
ctctttg

SEQ ID NO: 144229 - DNA, 7 bp, Unknown
  misc_feature (1)..( 7): Result.003 file - promoters60/4910362
ttcattg

SEQ ID NO: 144230 - DNA, 7 bp, Unknown
  misc_feature (1)..( 7): Result.003 file - promoters60/4910362
aactaaa

SEQ ID NO: 144231 - DNA, 7 bp, Unknown
  misc_feature (1)..( 7): Result.003 file - promoters60/4910362
aacaaaa

SEQ ID NO: 144232 - DNA, 7 bp, Unknown
  misc_feature (1)..( 7): Result.003 file - promoters60/4910362
taatttc

SEQ ID NO: 144233 - DNA, 7 bp, Unknown
  misc_feature (1)..( 7): Result.003 file - promoters60/4910362
taaattc

SEQ ID NO: 144234 - DNA, 9 bp, Unknown
  misc_feature (1)..( 9): Result.003 file - promoters60/4910362
tctttgctt

SEQ ID NO: 144235 - DNA, 9 bp, Unknown
  misc_feature (1)..( 9): Result.003 file - promoters60/4910362
aatttactt

SEQ ID NO: 144236 - DNA, 9 bp, Unknown
  misc_feature (1)..( 9): Result.003 file - promoters60/4910362
aatatacta

SEQ ID NO: 144237 - DNA, 7 bp, Unknown
  misc_feature (1)..( 7): Result.003 file - promoters60/4910362
ttatttt

SEQ ID NO: 144238 - DNA, 7 bp, Unknown
  misc_feature (1)..( 7): Result.003 file - promoters60/4910362
ttatttt

SEQ ID NO: 144239 - DNA, 8 bp, Unknown
  misc_feature (1)..( 8): Result.003 file - promoters60/4910362
tatatatt

SEQ ID NO: 144240 - DNA, 8 bp, Unknown
  misc_feature (1)..( 8): Result.003 file - promoters60/4910362
tatttatt

SEQ ID NO: 144241 - DNA, 9 bp, Unknown
  misc_feature (1)..( 9): Result.003 file - promoters60/4910362
tttttattt

SEQ ID NO: 144242 - DNA, 9 bp, Unknown
  misc_feature (1)..( 9): Result.003 file - promoters60/4910362
tttttgttt

SEQ ID NO: 144243 - DNA, 10 bp, Unknown
  misc_feature (1)..( 10): Result.003 file - promoters60/4910362
ttgaccttat

SEQ ID NO: 144244 - DNA, 10 bp, Unknown
  misc_feature (1)..( 10): Result.003 file - promoters60/4910362
ttgcccttat

SEQ ID NO: 144245 - DNA, 8 bp, Unknown
  misc_feature (1)..( 8): Result.003 file - promoters60/4910362
atttcaca

SEQ ID NO: 144246 - DNA, 8 bp, Unknown
  misc_feature (1)..( 8): Result.003 file - promoters60/4910362
atttaaca

SEQ ID NO: 144247 - DNA, 7 bp, Unknown
  misc_feature (1)..( 7): Result.003 file - promoters60/4910362
ttagtaa

SEQ ID NO: 144248 - DNA, 7 bp, Unknown
  misc_feature (1)..( 7): Result.003 file - promoters60/4910362
ttactaa

SEQ ID NO: 144249 - DNA, 8 bp, Unknown
  misc_feature (1)..( 8): Result.003 file - promoters60/4910362
attctaat

SEQ ID NO: 144250 - DNA, 8 bp, Unknown
  misc_feature (1)..( 8): Result.003 file - promoters60/4910362
attttaat

SEQ ID NO: 144251 - DNA, 9 bp, Unknown
  misc_feature (1)..( 9): Result.003 file - promoters60/4910362
taatctatt

SEQ ID NO: 144252 - DNA, 9 bp, Unknown
  misc_feature (1)..( 9): Result.003 file - promoters60/4910362
taatttatt

SEQ ID NO: 144253 - DNA, 6 bp, Unknown
  misc_feature (1)..( 6): Result.003 file - promoters60/4910362
actgta

SEQ ID NO: 144254 - DNA, 6 bp, Unknown
  misc_feature (1)..( 6): Result.003 file - promoters60/4910362
actgta

SEQ ID NO: 144255 - DNA, 6 bp, Unknown
  misc_feature (1)..( 6): Result.003 file - promoters60/4910362
tttgta

SEQ ID NO: 144256 - DNA, 6 bp, Unknown
  misc_feature (1)..( 6): Result.003 file - promoters60/4910362
tttgta

SEQ ID NO: 144257 - DNA, 7 bp, Unknown
  misc_feature (1)..( 7): Result.003 file - promoters60/4910362
ttttctt

SEQ ID NO: 144258 - DNA, 7 bp, Unknown
  misc_feature (1)..( 7): Result.003 file - promoters60/4910362
tttcctt

SEQ ID NO: 144259 - DNA, 6 bp, Unknown
  misc_feature (1)..( 6): Result.003 file - promoters60/4910362
tatttt

SEQ ID NO: 144260 - DNA, 6 bp, Unknown
  misc_feature (1)..( 6): Result.003 file - promoters60/4910362
tatttt

SEQ ID NO: 144261 - DNA, 7 bp, Unknown
  misc_feature (1)..( 7): Result.003 file - promoters60/4910362
gaaaaaa

SEQ ID NO: 144262 - DNA, 7 bp, Unknown
  misc_feature (1)..( 7): Result.003 file - promoters60/4910362
gaaaaaa

SEQ ID NO: 144263 - DNA, 7 bp, Unknown
  misc_feature (1)..( 7): Result.003 file - promoters60/4910362
aaaatct

SEQ ID NO: 144264 - DNA, 7 bp, Unknown
  misc_feature (1)..( 7): Result.003 file - promoters60/4910362
aaaatct

SEQ ID NO: 144265 - DNA, 7 bp, Unknown
  misc_feature (1)..( 7): Result.003 file - promoters60/4910362
aaccaaa

SEQ ID NO: 144266 - DNA, 7 bp, Unknown
  misc_feature (1)..( 7): Result.003 file - promoters60/4910362
aactaaa

SEQ ID NO: 144267 - DNA, 9 bp, Unknown
  misc_feature (1)..( 9): Result.003 file - promoters60/4910426
tttaattag

SEQ ID NO: 144268 - DNA, 9 bp, Unknown
  misc_feature (1)..( 9): Result.003 file - promoters60/4910426
cttaattac

SEQ ID NO: 144269 - DNA, 9 bp, Unknown
  misc_feature (1)..( 9): Result.003 file - promoters60/4910426
ctttattat

SEQ ID NO: 144270 - DNA, 9 bp, Unknown
  misc_feature (1)..( 9): Result.003 file - promoters60/4910426
cattagtat

SEQ ID NO: 144271 - DNA, 8 bp, Unknown
  misc_feature (1)..( 8): Result.003 file - promoters60/4910426
atatttaa

SEQ ID NO: 144272 - DNA, 8 bp, Unknown
  misc_feature (1)..( 8): Result.003 file - promoters60/4910426
ttatttat

SEQ ID NO: 144273 - DNA, 8 bp, Unknown
  misc_feature (1)..( 8): Result.003 file - promoters60/4910426
ttaattat

SEQ ID NO: 144274 - DNA, 8 bp, Unknown
  misc_feature (1)..( 8): Result.003 file - promoters60/4910426
acaattat

SEQ ID NO: 144275 - DNA, 11 bp, Unknown
  misc_feature (1)..( 11): Result.003 file - promoters60/4910426
ctatatataca

SEQ ID NO: 144276 - DNA, 11 bp, Unknown
  misc_feature (1)..( 11): Result.003 file - promoters60/4910426
gtatttattaa

SEQ ID NO: 144277 - DNA, 11 bp, Unknown
  misc_feature (1)..( 11): Result.003 file - promoters60/4910426
ctatatatata

SEQ ID NO: 144278 - DNA, 11 bp, Unknown
  misc_feature (1)..( 11): Result.003 file - promoters60/4910426
ctataaatata

SEQ ID NO: 144279 - DNA, 11 bp, Unknown
  misc_feature (1)..( 11): Result.003 file - promoters60/4910426
atatacatata

SEQ ID NO: 144280 - DNA, 11 bp, Unknown
  misc_feature (1)..( 11): Result.003 file - promoters60/4910426
ctataaatata

SEQ ID NO: 144281 - DNA, 11 bp, Unknown
  misc_feature (1)..( 11): Result.003 file - promoters60/4910426
atataaatttg

SEQ ID NO: 144282 - DNA, 11 bp, Unknown
  misc_feature (1)..( 11): Result.003 file - promoters60/4910426
ctatatatata

SEQ ID NO: 144283 - DNA, 6 bp, Unknown
  misc_feature (1)..( 6): Result.003 file - promoters60/4911303
tttaag

SEQ ID NO: 144284 - DNA, 6 bp, Unknown
  misc_feature (1)..( 6): Result.003 file - promoters60/4911303
tttaag

SEQ ID NO: 144285 - DNA, 7 bp, Unknown
  misc_feature (1)..( 7): Result.003 file - promoters60/4911303
caattta

SEQ ID NO: 144286 - DNA, 7 bp, Unknown
  misc_feature (1)..( 7): Result.003 file - promoters60/4911303
taattta

SEQ ID NO: 144287 - DNA, 7 bp, Unknown
  misc_feature (1)..( 7): Result.003 file - promoters60/4911303
taagtta

SEQ ID NO: 144288 - DNA, 11 bp, Unknown
  misc_feature (1)..( 11): Result.003 file - promoters60/4911303
agagtaaataa

SEQ ID NO: 144289 - DNA, 11 bp, Unknown
  misc_feature (1)..( 11): Result.003 file - promoters60/4911303
agaggaaatga

SEQ ID NO: 144290 - DNA, 11 bp, Unknown
  misc_feature (1)..( 11): Result.003 file - promoters60/4911303
tcttgaagtga

SEQ ID NO: 144291 - DNA, 9 bp, Unknown
  misc_feature (1)..( 9): Result.003 file - promoters60/4911303
tcttttttt

SEQ ID NO: 144292 - DNA, 9 bp, Unknown
  misc_feature (1)..( 9): Result.003 file - promoters60/4911303
tctatttaa

SEQ ID NO: 144293 - DNA, 9 bp, Unknown
  misc_feature (1)..( 9): Result.003 file - promoters60/4911303
tctaattaa

SEQ ID NO: 144294 - DNA, 9 bp, Unknown
  misc_feature (1)..( 9): Result.003 file - promoters60/4911303
tttttttta

SEQ ID NO: 144295 - DNA, 9 bp, Unknown
  misc_feature (1)..( 9): Result.003 file - promoters60/4911303
ttttcttta

SEQ ID NO: 144296 - DNA, 6 bp, Unknown
  misc_feature (1)..( 6): Result.003 file - promoters60/4911303
atcatt

SEQ ID NO: 144297 - DNA, 6 bp, Unknown
  misc_feature (1)..( 6): Result.003 file - promoters60/4911303
atcatt

SEQ ID NO: 144298 - DNA, 8 bp, Unknown
  misc_feature (1)..( 8): Result.003 file - promoters60/4911303
aagtttta

SEQ ID NO: 144299 - DNA, 8 bp, Unknown
  misc_feature (1)..( 8): Result.003 file - promoters60/4911303
aagtatta

SEQ ID NO: 144300 - DNA, 7 bp, Unknown
  misc_feature (1)..( 7): Result.003 file - promoters60/4911303
taagtta

SEQ ID NO: 144301 - DNA, 7 bp, Unknown
  misc_feature (1)..( 7): Result.003 file - promoters60/4911303
taagtta

SEQ ID NO: 144302 - DNA, 7 bp, Unknown
  misc_feature (1)..( 7): Result.003 file - promoters60/4911303
taattta

SEQ ID NO: 144303 - DNA, 8 bp, Unknown
  misc_feature (1)..( 8): Result.003 file - promoters60/4911303
aaaagaaa

SEQ ID NO: 144304 - DNA, 8 bp, Unknown
  misc_feature (1)..( 8): Result.003 file - promoters60/4911303
aaacgaaa

SEQ ID NO: 144305 - DNA, 11 bp, Unknown
  misc_feature (1)..( 11): Result.003 file - promoters60/4911303
aaaagaaacta

SEQ ID NO: 144306 - DNA, 11 bp, Unknown
  misc_feature (1)..( 11): Result.003 file - promoters60/4911303
aaaagaaacta

SEQ ID NO: 144307 - DNA, 8 bp, Unknown
  misc_feature (1)..( 8): Result.003 file - promoters60/4911303
atttcttt

SEQ ID NO: 144308 - DNA, 8 bp, Unknown
  misc_feature (1)..( 8): Result.003 file - promoters60/4911303
atttgttt

SEQ ID NO: 144309 - DNA, 6 bp, Unknown
  misc_feature (1)..( 6): Result.003 file - promoters60/4911303
ttattt

SEQ ID NO: 144310 - DNA, 6 bp, Unknown
  misc_feature (1)..( 6): Result.003 file - promoters60/4911303
ttattt

SEQ ID NO: 144311 - DNA, 7 bp, Unknown
  misc_feature (1)..( 7): Result.003 file - promoters60/4911303
gacatga

SEQ ID NO: 144312 - DNA, 7 bp, Unknown
  misc_feature (1)..( 7): Result.003 file - promoters60/4911303
gacgtga

SEQ ID NO: 144313 - DNA, 7 bp, Unknown
  misc_feature (1)..( 7): Result.003 file - promoters60/4911303
ccgtgta

SEQ ID NO: 144314 - DNA, 7 bp, Unknown
  misc_feature (1)..( 7): Result.003 file - promoters60/4911303
ccgcgta

SEQ ID NO: 144315 - DNA, 8 bp, Unknown
  misc_feature (1)..( 8): Result.003 file - promoters60/4911303
cgcgggaa

SEQ ID NO: 144316 - DNA, 8 bp, Unknown
  misc_feature (1)..( 8): Result.003 file - promoters60/4911303
cgcgtgaa

SEQ ID NO: 144317 - DNA, 6 bp, Unknown
  misc_feature (1)..( 6): Result.003 file - promoters60/4911303
tttata

SEQ ID NO: 144318 - DNA, 6 bp, Unknown
  misc_feature (1)..( 6): Result.003 file - promoters60/4911303
tttata

SEQ ID NO: 144319 - DNA, 10 bp, Unknown
  misc_feature (1)..( 10): Result.003 file - promoters60/4911303
atacagagat

SEQ ID NO: 144320 - DNA, 10 bp, Unknown
  misc_feature (1)..( 10): Result.003 file - promoters60/4911303
taacagagat

SEQ ID NO: 144321 - DNA, 10 bp, Unknown
  misc_feature (1)..( 10): Result.003 file - promoters60/4911303
taacagaaaa

SEQ ID NO: 144322 - DNA, 6 bp, Unknown
  misc_feature (1)..( 6): Result.003 file - promoters60/4911303
tttata

SEQ ID NO: 144323 - DNA, 6 bp, Unknown
  misc_feature (1)..( 6): Result.003 file - promoters60/4911303
tttata

SEQ ID NO: 144324 - DNA, 6 bp, Unknown
  misc_feature (1)..( 6): Result.003 file - promoters60/4911303
aaacag

SEQ ID NO: 144325 - DNA, 6 bp, Unknown
  misc_feature (1)..( 6): Result.003 file - promoters60/4911303
aaacag

SEQ ID NO: 144326 - DNA, 7 bp, Unknown
  misc_feature (1)..( 7): Result.003 file - promoters60/4911303
ttttatt

SEQ ID NO: 144327 - DNA, 7 bp, Unknown
  misc_feature (1)..( 7): Result.003 file - promoters60/4911303
tttaatt

SEQ ID NO: 144328 - DNA, 6 bp, Unknown
  misc_feature (1)..( 6): Result.003 file - promoters60/4911303
tccact

SEQ ID NO: 144329 - DNA, 6 bp, Unknown
  misc_feature (1)..( 6): Result.003 file - promoters60/4911303
tccact

SEQ ID NO: 144330 - DNA, 8 bp, Unknown
  misc_feature (1)..( 8): Result.003 file - promoters60/4911303
attaatga

SEQ ID NO: 144331 - DNA, 8 bp, Unknown
  misc_feature (1)..( 8): Result.003 file - promoters60/4911303
attgatga

SEQ ID NO: 144332 - DNA, 6 bp, Unknown
  misc_feature (1)..( 6): Result.003 file - promoters60/4911303
cgggtc

SEQ ID NO: 144333 - DNA, 6 bp, Unknown
  misc_feature (1)..( 6): Result.003 file - promoters60/4911303
cgggtc

SEQ ID NO: 144334 - DNA, 12 bp, Unknown
  misc_feature (1)..( 12): Result.003 file - promoters60/4911309
caaaatttcttg

SEQ ID NO: 144335 - DNA, 12 bp, Unknown
  misc_feature (1)..( 12): Result.003 file - promoters60/4911309
caacattgcttg

SEQ ID NO: 144336 - DNA, 12 bp, Unknown
  misc_feature (1)..( 12): Result.003 file - promoters60/4911309
gaaagttttctc

SEQ ID NO: 144337 - DNA, 6 bp, Unknown
  misc_feature (1)..( 6): Result.003 file - promoters60/4911309
ttttct

SEQ ID NO: 144338 - DNA, 6 bp, Unknown
  misc_feature (1)..( 6): Result.003 file - promoters60/4911309
ttttct

SEQ ID NO: 144339 - DNA, 6 bp, Unknown
  misc_feature (1)..( 6): Result.003 file - promoters60/4911309
ttttct

SEQ ID NO: 144340 - DNA, 9 bp, Unknown
  misc_feature (1)..( 9): Result.003 file - promoters60/4911309
gatgcttat

SEQ ID NO: 144341 - DNA, 9 bp, Unknown
  misc_feature (1)..( 9): Result.003 file - promoters60/4911309
aatgtttat

SEQ ID NO: 144342 - DNA, 9 bp, Unknown
  misc_feature (1)..( 9): Result.003 file - promoters60/4911309
tcttcttac

SEQ ID NO: 144343 - DNA, 9 bp, Unknown
  misc_feature (1)..( 9): Result.003 file - promoters60/4911309
tctccttat

SEQ ID NO: 144344 - DNA, 9 bp, Unknown
  misc_feature (1)..( 9): Result.003 file - promoters60/4911309
gcttattat

SEQ ID NO: 144345 - DNA, 9 bp, Unknown
  misc_feature (1)..( 9): Result.003 file - promoters60/4911309
cattattat

SEQ ID NO: 144346 - DNA, 9 bp, Unknown
  misc_feature (1)..( 9): Result.003 file - promoters60/4911309
tcttcttac

SEQ ID NO: 144347 - DNA, 9 bp, Unknown
  misc_feature (1)..( 9): Result.003 file - promoters60/4911309
tctccttat

SEQ ID NO: 144348 - DNA, 10 bp, Unknown
  misc_feature (1)..( 10): Result.003 file - promoters60/4911309
ttcatttgaa

SEQ ID NO: 144349 - DNA, 10 bp, Unknown
  misc_feature (1)..( 10): Result.003 file - promoters60/4911309
ttcttttgag

SEQ ID NO: 144350 - DNA, 10 bp, Unknown
  misc_feature (1)..( 10): Result.003 file - promoters60/4911309
gacttttagt

SEQ ID NO: 144351 - DNA, 11 bp, Unknown
  misc_feature (1)..( 11): Result.003 file - promoters60/4911312
aattttaatct

SEQ ID NO: 144352 - DNA, 11 bp, Unknown
  misc_feature (1)..( 11): Result.003 file - promoters60/4911312
atttttattct

SEQ ID NO: 144353 - DNA, 11 bp, Unknown
  misc_feature (1)..( 11): Result.003 file - promoters60/4911312
aattctaaaat

SEQ ID NO: 144354 - DNA, 11 bp, Unknown
  misc_feature (1)..( 11): Result.003 file - promoters60/4911312
gattttagaaa

SEQ ID NO: 144355 - DNA, 11 bp, Unknown
  misc_feature (1)..( 11): Result.003 file - promoters60/4911312
tattctaaaaa

SEQ ID NO: 144356 - DNA, 12 bp, Unknown
  misc_feature (1)..( 12): Result.003 file - promoters60/4911312
gtttttgattca

SEQ ID NO: 144357 - DNA, 7 bp, Unknown
  misc_feature (1)..( 7): Result.003 file - promoters60/4911314
gagttgg

SEQ ID NO: 144358 - DNA, 7 bp, Unknown
  misc_feature (1)..( 7): Result.003 file - promoters60/4911314
gagttgt

SEQ ID NO: 144359 - DNA, 7 bp, Unknown
  misc_feature (1)..( 7): Result.003 file - promoters60/4911314
cagttgt

SEQ ID NO: 144360 - DNA, 9 bp, Unknown
  misc_feature (1)..( 9): Result.003 file - promoters60/4911314
ctgatgaaa

SEQ ID NO: 144361 - DNA, 9 bp, Unknown
  misc_feature (1)..( 9): Result.003 file - promoters60/4911314
gggatcaaa

SEQ ID NO: 144362 - DNA, 9 bp, Unknown
  misc_feature (1)..( 9): Result.003 file - promoters60/4911314
ctgttgaca

SEQ ID NO: 144363 - DNA, 6 bp, Unknown
  misc_feature (1)..( 6): Result.003 file - promoters60/4911314
aatctt

SEQ ID NO: 144364 - DNA, 6 bp, Unknown
  misc_feature (1)..( 6): Result.003 file - promoters60/4911314
aatctt

SEQ ID NO: 144365 - DNA, 8 bp, Unknown
  misc_feature (1)..( 8): Result.003 file - promoters60/4911314
aacttaaa

SEQ ID NO: 144366 - DNA, 8 bp, Unknown
  misc_feature (1)..( 8): Result.003 file - promoters60/4911314
aacttaaa

SEQ ID NO: 144367 - DNA, 6 bp, Unknown
  misc_feature (1)..( 6): Result.003 file - promoters60/4911314
tagtct

SEQ ID NO: 144368 - DNA, 6 bp, Unknown
  misc_feature (1)..( 6): Result.003 file - promoters60/4911314
tagtct

SEQ ID NO: 144369 - DNA, 6 bp, Unknown
  misc_feature (1)..( 6): Result.003 file - promoters60/4911314
ctaaac

SEQ ID NO: 144370 - DNA, 6 bp, Unknown
  misc_feature (1)..( 6): Result.003 file - promoters60/4911314
ctaaac

SEQ ID NO: 144371 - DNA, 6 bp, Unknown
  misc_feature (1)..( 6): Result.003 file - promoters60/4911314
agttgt

SEQ ID NO: 144372 - DNA, 6 bp, Unknown
  misc_feature (1)..( 6): Result.003 file - promoters60/4911314
agttgt

SEQ ID NO: 144373 - DNA, 6 bp, Unknown
  misc_feature (1)..( 6): Result.003 file - promoters60/4911314
agttgt

SEQ ID NO: 144374 - DNA, 8 bp, Unknown
  misc_feature (1)..( 8): Result.003 file - promoters60/4911314
atgtagct

SEQ ID NO: 144375 - DNA, 8 bp, Unknown
  misc_feature (1)..( 8): Result.003 file - promoters60/4911314
atgtagct

SEQ ID NO: 144376 - DNA, 8 bp, Unknown
  misc_feature (1)..( 8): Result.003 file - promoters60/4911314
ttgagagt

SEQ ID NO: 144377 - DNA, 8 bp, Unknown
  misc_feature (1)..( 8): Result.003 file - promoters60/4911314
ttgacagt

SEQ ID NO: 144378 - DNA, 9 bp, Unknown
  misc_feature (1)..( 9): Result.003 file - promoters60/4911314
tttgtgtaa

SEQ ID NO: 144379 - DNA, 9 bp, Unknown
  misc_feature (1)..( 9): Result.003 file - promoters60/4911314
tttgtctaa

SEQ ID NO: 144380 - DNA, 7 bp, Unknown
  misc_feature (1)..( 7): Result.003 file - promoters60/4911314
tcttctc

SEQ ID NO: 144381 - DNA, 7 bp, Unknown
  misc_feature (1)..( 7): Result.003 file - promoters60/4911314
tcttctc

SEQ ID NO: 144382 - DNA, 7 bp, Unknown
  misc_feature (1)..( 7): Result.003 file - promoters60/4911314
ttccctt

SEQ ID NO: 144383 - DNA, 7 bp, Unknown
  misc_feature (1)..( 7): Result.003 file - promoters60/4911314
ttcactt

SEQ ID NO: 144384 - DNA, 6 bp, Unknown
  misc_feature (1)..( 6): Result.003 file - promoters60/4911314
atttaa

SEQ ID NO: 144385 - DNA, 6 bp, Unknown
  misc_feature (1)..( 6): Result.003 file - promoters60/4911314
atttaa

SEQ ID NO: 144386 - DNA, 7 bp, Unknown
  misc_feature (1)..( 7): Result.003 file - promoters60/4911314
aaagtaa

SEQ ID NO: 144387 - DNA, 7 bp, Unknown
  misc_feature (1)..( 7): Result.003 file - promoters60/4911314
aaattaa

SEQ ID NO: 144388 - DNA, 9 bp, Unknown
  misc_feature (1)..( 9): Result.003 file - promoters60/4911314
cacgtgtga

SEQ ID NO: 144389 - DNA, 9 bp, Unknown
  misc_feature (1)..( 9): Result.003 file - promoters60/4911314
cacgtgtga

SEQ ID NO: 144390 - DNA, 7 bp, Unknown
  misc_feature (1)..( 7): Result.003 file - promoters60/4911314
aagtcaa

SEQ ID NO: 144391 - DNA, 7 bp, Unknown
  misc_feature (1)..( 7): Result.003 file - promoters60/4911314
aagtcaa

SEQ ID NO: 144392 - DNA, 6 bp, Unknown
  misc_feature (1)..( 6): Result.003 file - promoters60/4911314
tcaagt

SEQ ID NO: 144393 - DNA, 6 bp, Unknown
  misc_feature (1)..( 6): Result.003 file - promoters60/4911314
tcaagt

SEQ ID NO: 144394 - DNA, 7 bp, Unknown
  misc_feature (1)..( 7): Result.003 file - promoters60/4911314
acaaaca

SEQ ID NO: 144395 - DNA, 7 bp, Unknown
  misc_feature (1)..( 7): Result.003 file - promoters60/4911314
acaaaca

SEQ ID NO: 144396 - DNA, 10 bp, Unknown
  misc_feature (1)..( 10): Result.003 file - promoters60/4911457
gttgaatttg

SEQ ID NO: 144397 - DNA, 10 bp, Unknown
  misc_feature (1)..( 10): Result.003 file - promoters60/4911457
ggagaatttg

SEQ ID NO: 144398 - DNA, 10 bp, Unknown
  misc_feature (1)..( 10): Result.003 file - promoters60/4911457
gttggatttt

SEQ ID NO: 144399 - DNA, 8 bp, Unknown
  misc_feature (1)..( 8): Result.003 file - promoters60/4911457
tttggata

SEQ ID NO: 144400 - DNA, 8 bp, Unknown
  misc_feature (1)..( 8): Result.003 file - promoters60/4911457
tttagata

SEQ ID NO: 144401 - DNA, 8 bp, Unknown
  misc_feature (1)..( 8): Result.003 file - promoters60/4911457
tttagaat

SEQ ID NO: 144402 - DNA, 7 bp, Unknown
  misc_feature (1)..( 7): Result.003 file - promoters60/4911457
catcaat

SEQ ID NO: 144403 - DNA, 7 bp, Unknown
  misc_feature (1)..( 7): Result.003 file - promoters60/4911457
catcaaa

SEQ ID NO: 144404 - DNA, 7 bp, Unknown
  misc_feature (1)..( 7): Result.003 file - promoters60/4911457
aatcaat

SEQ ID NO: 144405 - DNA, 9 bp, Unknown
  misc_feature (1)..( 9): Result.003 file - promoters60/4911457
tgtgacatc

SEQ ID NO: 144406 - DNA, 9 bp, Unknown
  misc_feature (1)..( 9): Result.003 file - promoters60/4911457
tgtaacatt

SEQ ID NO: 144407 - DNA, 9 bp, Unknown
  misc_feature (1)..( 9): Result.003 file - promoters60/4911457
tttaagatt

SEQ ID NO: 144408 - DNA, 8 bp, Unknown
  misc_feature (1)..( 8): Result.003 file - promoters60/4911457
gtgattta

SEQ ID NO: 144409 - DNA, 8 bp, Unknown
  misc_feature (1)..( 8): Result.003 file - promoters60/4911457
ttgatttc

SEQ ID NO: 144410 - DNA, 8 bp, Unknown
  misc_feature (1)..( 8): Result.003 file - promoters60/4911457
ttggtttc

SEQ ID NO: 144411 - DNA, 8 bp, Unknown
  misc_feature (1)..( 8): Result.003 file - promoters60/4911457
ttgtttta

SEQ ID NO: 144412 - DNA, 8 bp, Unknown
  misc_feature (1)..( 8): Result.003 file - promoters60/4911457
ttggtttc

SEQ ID NO: 144413 - DNA, 8 bp, Unknown
  misc_feature (1)..( 8): Result.003 file - promoters60/4911457
ttgatttc

SEQ ID NO: 144414 - DNA, 13 bp, Unknown
  misc_feature (1)..( 13): Result.003 file - promoters60/4911457
tttgagtccctgg

SEQ ID NO: 144415 - DNA, 13 bp, Unknown
  misc_feature (1)..( 13): Result.003 file - promoters60/4911457
cttgagtcgttta

SEQ ID NO: 144416 - DNA, 13 bp, Unknown
  misc_feature (1)..( 13): Result.003 file - promoters60/4911457
ctttagtctttta

SEQ ID NO: 144417 - DNA, 11 bp, Unknown
  misc_feature (1)..( 11): Result.003 file - promoters60/4911457
gaatttggata

SEQ ID NO: 144418 - DNA, 11 bp, Unknown
  misc_feature (1)..( 11): Result.003 file - promoters60/4911457
gaatttgagat

SEQ ID NO: 144419 - DNA, 11 bp, Unknown
  misc_feature (1)..( 11): Result.003 file - promoters60/4911457
caattttagat

SEQ ID NO: 144420 - DNA, 8 bp, Unknown
  misc_feature (1)..( 8): Result.003 file - promoters60/4911457
ggtattta

SEQ ID NO: 144421 - DNA, 8 bp, Unknown
  misc_feature (1)..( 8): Result.003 file - promoters60/4911457
ggtctttt

SEQ ID NO: 144422 - DNA, 8 bp, Unknown
  misc_feature (1)..( 8): Result.003 file - promoters60/4911457
agtctttt

SEQ ID NO: 144423 - DNA, 9 bp, Unknown
  misc_feature (1)..( 9): Result.003 file - promoters60/4911457
tgttggaga

SEQ ID NO: 144424 - DNA, 9 bp, Unknown
  misc_feature (1)..( 9): Result.003 file - promoters60/4911457
ctttgcaga

SEQ ID NO: 144425 - DNA, 9 bp, Unknown
  misc_feature (1)..( 9): Result.003 file - promoters60/4911457
tgttggatt

SEQ ID NO: 144426 - DNA, 10 bp, Unknown
  misc_feature (1)..( 10): Result.003 file - promoters60/4911457
aattttagat

SEQ ID NO: 144427 - DNA, 10 bp, Unknown
  misc_feature (1)..( 10): Result.003 file - promoters60/4911457
aatattaaaa

SEQ ID NO: 144428 - DNA, 10 bp, Unknown
  misc_feature (1)..( 10): Result.003 file - promoters60/4911457
aatttgagat

SEQ ID NO: 144429 - DNA, 12 bp, Unknown
  misc_feature (1)..( 12): Result.003 file - promoters60/4911457
aacattatggtt

SEQ ID NO: 144430 - DNA, 12 bp, Unknown
  misc_feature (1)..( 12): Result.003 file - promoters60/4911457
ataagtattgtt

SEQ ID NO: 144431 - DNA, 12 bp, Unknown
  misc_feature (1)..( 12): Result.003 file - promoters60/4911457
ataagtattgga

SEQ ID NO: 144432 - DNA, 17 bp, Unknown
  misc_feature (1)..( 17): Result.003 file - promoters60/4911485
tcacttttatgggccgt

SEQ ID NO: 144433 - DNA, 17 bp, Unknown
  misc_feature (1)..( 17): Result.003 file - promoters60/4911485
attattttatttttttt

SEQ ID NO: 144434 - DNA, 17 bp, Unknown
  misc_feature (1)..( 17): Result.003 file - promoters60/4911485
ctcattttaatgggccg

SEQ ID NO: 144435 - DNA, 17 bp, Unknown
  misc_feature (1)..( 17): Result.003 file - promoters60/4911485
caatgtttattaaaaaa

SEQ ID NO: 144436 - DNA, 17 bp, Unknown
  misc_feature (1)..( 17): Result.003 file - promoters60/4911485
tatatataaatgggcct

SEQ ID NO: 144437 - DNA, 17 bp, Unknown
  misc_feature (1)..( 17): Result.003 file - promoters60/4911485
tattaaagtttgggcca

SEQ ID NO: 144438 - DNA, 17 bp, Unknown
  misc_feature (1)..( 17): Result.003 file - promoters60/4911485
atactatatatgggcct

SEQ ID NO: 144439 - DNA, 8 bp, Unknown
  misc_feature (1)..( 8): Result.003 file - promoters60/4911485
tatgggcc

SEQ ID NO: 144440 - DNA, 8 bp, Unknown
  misc_feature (1)..( 8): Result.003 file - promoters60/4911485
aatgggcc

SEQ ID NO: 144441 - DNA, 8 bp, Unknown
  misc_feature (1)..( 8): Result.003 file - promoters60/4911485
tttgggcc

SEQ ID NO: 144442 - DNA, 8 bp, Unknown
  misc_feature (1)..( 8): Result.003 file - promoters60/4911485
tatgggcc

SEQ ID NO: 144443 - DNA, 8 bp, Unknown
  misc_feature (1)..( 8): Result.003 file - promoters60/4911485
aatgggct

SEQ ID NO: 144444 - DNA, 8 bp, Unknown
  misc_feature (1)..( 8): Result.003 file - promoters60/4911485
aatgggcc

SEQ ID NO: 144445 - DNA, 16 bp, Unknown
  misc_feature (1)..( 16): Result.003 file - promoters60/4911485
ggcctataaggcccaa

SEQ ID NO: 144446 - DNA, 16 bp, Unknown
  misc_feature (1)..( 16): Result.003 file - promoters60/4911485
aaaaaataaagcccaa

SEQ ID NO: 144447 - DNA, 16 bp, Unknown
  misc_feature (1)..( 16): Result.003 file - promoters60/4911485
taaacctaaggcccaa

SEQ ID NO: 144448 - DNA, 16 bp, Unknown
  misc_feature (1)..( 16): Result.003 file - promoters60/4911485
ttgaaataaaacaaat

SEQ ID NO: 144449 - DNA, 16 bp, Unknown
  misc_feature (1)..( 16): Result.003 file - promoters60/4911485
cacttaataagcccat

SEQ ID NO: 144450 - DNA, 16 bp, Unknown
  misc_feature (1)..( 16): Result.003 file - promoters60/4911485
ttgagatagccacata

SEQ ID NO: 144451 - DNA, 11 bp, Unknown
  misc_feature (1)..( 11): Result.003 file - promoters60/4911492
aattattttca

SEQ ID NO: 144452 - DNA, 11 bp, Unknown
  misc_feature (1)..( 11): Result.003 file - promoters60/4911492
ttatatattct

SEQ ID NO: 144453 - DNA, 11 bp, Unknown
  misc_feature (1)..( 11): Result.003 file - promoters60/4911492
gtttatttact

SEQ ID NO: 144454 - DNA, 11 bp, Unknown
  misc_feature (1)..( 11): Result.003 file - promoters60/4911492
ttttatttcat

SEQ ID NO: 144455 - DNA, 11 bp, Unknown
  misc_feature (1)..( 11): Result.003 file - promoters60/4911492
tggtatttact

SEQ ID NO: 144456 - DNA, 11 bp, Unknown
  misc_feature (1)..( 11): Result.003 file - promoters60/4911492
ttttatttcac

SEQ ID NO: 144457 - DNA, 11 bp, Unknown
  misc_feature (1)..( 11): Result.003 file - promoters60/4911492
agtataattag

SEQ ID NO: 144458 - DNA, 11 bp, Unknown
  misc_feature (1)..( 11): Result.003 file - promoters60/4911492
ttagtaaatag

SEQ ID NO: 144459 - DNA, 11 bp, Unknown
  misc_feature (1)..( 11): Result.003 file - promoters60/4911492
ttaataattag

SEQ ID NO: 144460 - DNA, 11 bp, Unknown
  misc_feature (1)..( 11): Result.003 file - promoters60/4911492
ttaaaaattcg

SEQ ID NO: 144461 - DNA, 11 bp, Unknown
  misc_feature (1)..( 11): Result.003 file - promoters60/4911492
aaaaaaattcc

SEQ ID NO: 144462 - DNA, 11 bp, Unknown
  misc_feature (1)..( 11): Result.003 file - promoters60/4911492
tatttatataa

SEQ ID NO: 144463 - DNA, 11 bp, Unknown
  misc_feature (1)..( 11): Result.003 file - promoters60/4911492
aatttagataa

SEQ ID NO: 144464 - DNA, 11 bp, Unknown
  misc_feature (1)..( 11): Result.003 file - promoters60/4911492
gatacatatta

SEQ ID NO: 144465 - DNA, 11 bp, Unknown
  misc_feature (1)..( 11): Result.003 file - promoters60/4911492
gattaataatt

SEQ ID NO: 144466 - DNA, 11 bp, Unknown
  misc_feature (1)..( 11): Result.003 file - promoters60/4911492
gattaaaaact

SEQ ID NO: 144467 - DNA, 9 bp, Unknown
  misc_feature (1)..( 9): Result.003 file - promoters60/4911492
gtaaaattt

SEQ ID NO: 144468 - DNA, 9 bp, Unknown
  misc_feature (1)..( 9): Result.003 file - promoters60/4911492
ataaaataa

SEQ ID NO: 144469 - DNA, 9 bp, Unknown
  misc_feature (1)..( 9): Result.003 file - promoters60/4911492
gtataatgg

SEQ ID NO: 144470 - DNA, 9 bp, Unknown
  misc_feature (1)..( 9): Result.003 file - promoters60/4911492
ggaaacttt

SEQ ID NO: 144471 - DNA, 9 bp, Unknown
  misc_feature (1)..( 9): Result.003 file - promoters60/4911492
caaaaataa

SEQ ID NO: 144472 - DNA, 8 bp, Unknown
  misc_feature (1)..( 8): Result.003 file - promoters60/4912240
gaaagcac

SEQ ID NO: 144473 - DNA, 8 bp, Unknown
  misc_feature (1)..( 8): Result.003 file - promoters60/4912240
caaaacac

SEQ ID NO: 144474 - DNA, 8 bp, Unknown
  misc_feature (1)..( 8): Result.003 file - promoters60/4912240
caaaacct

SEQ ID NO: 144475 - DNA, 16 bp, Unknown
  misc_feature (1)..( 16): Result.003 file - promoters60/4912240
taagtgatggtgagag

SEQ ID NO: 144476 - DNA, 16 bp, Unknown
  misc_feature (1)..( 16): Result.003 file - promoters60/4912240
taattgattcaaaatt

SEQ ID NO: 144477 - DNA, 16 bp, Unknown
  misc_feature (1)..( 16): Result.003 file - promoters60/4912240
agcttgaatcaatatt

SEQ ID NO: 144478 - DNA, 7 bp, Unknown
  misc_feature (1)..( 7): Result.003 file - promoters60/4912240
ttttaat

SEQ ID NO: 144479 - DNA, 7 bp, Unknown
  misc_feature (1)..( 7): Result.003 file - promoters60/4912240
ttttaac

SEQ ID NO: 144480 - DNA, 7 bp, Unknown
  misc_feature (1)..( 7): Result.003 file - promoters60/4912240
tttgacc

SEQ ID NO: 144481 - DNA, 11 bp, Unknown
  misc_feature (1)..( 11): Result.003 file - promoters60/4912541
ggctcctgtga

SEQ ID NO: 144482 - DNA, 11 bp, Unknown
  misc_feature (1)..( 11): Result.003 file - promoters60/4912541
ggctcttgtga

SEQ ID NO: 144483 - DNA, 8 bp, Unknown
  misc_feature (1)..( 8): Result.003 file - promoters60/4912541
ctttcaat

SEQ ID NO: 144484 - DNA, 8 bp, Unknown
  misc_feature (1)..( 8): Result.003 file - promoters60/4912541
gtttaaat

SEQ ID NO: 144485 - DNA, 8 bp, Unknown
  misc_feature (1)..( 8): Result.003 file - promoters60/4912541
gtttaaga

SEQ ID NO: 144486 - DNA, 13 bp, Unknown
  misc_feature (1)..( 13): Result.003 file - promoters60/4912541
aaattctctgtct

SEQ ID NO: 144487 - DNA, 13 bp, Unknown
  misc_feature (1)..( 13): Result.003 file - promoters60/4912541
aaattctcagtct

SEQ ID NO: 144488 - DNA, 9 bp, Unknown
  misc_feature (1)..( 9): Result.003 file - promoters60/4912541
gattctaat

SEQ ID NO: 144489 - DNA, 9 bp, Unknown
  misc_feature (1)..( 9): Result.003 file - promoters60/4912541
tgttcaaat

SEQ ID NO: 144490 - DNA, 9 bp, Unknown
  misc_feature (1)..( 9): Result.003 file - promoters60/4912541
gattctaga

SEQ ID NO: 144491 - DNA, 7 bp, Unknown
  misc_feature (1)..( 7): Result.003 file - promoters60/4912541
tgtttaa

SEQ ID NO: 144492 - DNA, 7 bp, Unknown
  misc_feature (1)..( 7): Result.003 file - promoters60/4912541
tgtgtaa

SEQ ID NO: 144493 - DNA, 7 bp, Unknown
  misc_feature (1)..( 7): Result.003 file - promoters60/4912541
gaaaccc

SEQ ID NO: 144494 - DNA, 7 bp, Unknown
  misc_feature (1)..( 7): Result.003 file - promoters60/4912541
gaaaccc

SEQ ID NO: 144495 - DNA, 7 bp, Unknown
  misc_feature (1)..( 7): Result.003 file - promoters60/4912541
aagggct

SEQ ID NO: 144496 - DNA, 7 bp, Unknown
  misc_feature (1)..( 7): Result.003 file - promoters60/4912541
aagggct

SEQ ID NO: 144497 - DNA, 6 bp, Unknown
  misc_feature (1)..( 6): Result.003 file - promoters60/4912541
gctaaa

SEQ ID NO: 144498 - DNA, 6 bp, Unknown
  misc_feature (1)..( 6): Result.003 file - promoters60/4912541
gctaaa

SEQ ID NO: 144499 - DNA, 8 bp, Unknown
  misc_feature (1)..( 8): Result.003 file - promoters60/4912541
ccggtcaa

SEQ ID NO: 144500 - DNA, 8 bp, Unknown
  misc_feature (1)..( 8): Result.003 file - promoters60/4912541
ccggtcaa

SEQ ID NO: 144501 - DNA, 6 bp, Unknown
  misc_feature (1)..( 6): Result.003 file - promoters60/4912541
aaagtt

SEQ ID NO: 144502 - DNA, 6 bp, Unknown
  misc_feature (1)..( 6): Result.003 file - promoters60/4912541
aaagtt

SEQ ID NO: 144503 - DNA, 7 bp, Unknown
  misc_feature (1)..( 7): Result.003 file - promoters60/4912541
ccgtttt

SEQ ID NO: 144504 - DNA, 7 bp, Unknown
  misc_feature (1)..( 7): Result.003 file - promoters60/4912541
ccgtttt

SEQ ID NO: 144505 - DNA, 7 bp, Unknown
  misc_feature (1)..( 7): Result.003 file - promoters60/4912541
tttgttt

SEQ ID NO: 144506 - DNA, 7 bp, Unknown
  misc_feature (1)..( 7): Result.003 file - promoters60/4912541
ttttttt

SEQ ID NO: 144507 - DNA, 6 bp, Unknown
  misc_feature (1)..( 6): Result.003 file - promoters60/4912541
gatttg

SEQ ID NO: 144508 - DNA, 6 bp, Unknown
  misc_feature (1)..( 6): Result.003 file - promoters60/4912541
gatttg

SEQ ID NO: 144509 - DNA, 8 bp, Unknown
  misc_feature (1)..( 8): Result.003 file - promoters60/4912541
aaggagaa

SEQ ID NO: 144510 - DNA, 8 bp, Unknown
  misc_feature (1)..( 8): Result.003 file - promoters60/4912541
aaggggaa

SEQ ID NO: 144511 - DNA, 14 bp, Unknown
  misc_feature (1)..( 14): Result.003 file - promoters60/4913068
ttttgtaaattttg

SEQ ID NO: 144512 - DNA, 14 bp, Unknown
  misc_feature (1)..( 14): Result.003 file - promoters60/4913068
gtttgtatgtttct

SEQ ID NO: 144513 - DNA, 14 bp, Unknown
  misc_feature (1)..( 14): Result.003 file - promoters60/4913068
agttgtaaaaattt

SEQ ID NO: 144514 - DNA, 14 bp, Unknown
  misc_feature (1)..( 14): Result.003 file - promoters60/4913068
cgatgtaaaaatta

SEQ ID NO: 144515 - DNA, 14 bp, Unknown
  misc_feature (1)..( 14): Result.003 file - promoters60/4913068
gttttaaaatttag

SEQ ID NO: 144516 - DNA, 14 bp, Unknown
  misc_feature (1)..( 14): Result.003 file - promoters60/4913068
caacgtaaacttta

SEQ ID NO: 144517 - DNA, 9 bp, Unknown
  misc_feature (1)..( 9): Result.003 file - promoters60/4913068
aaaaatact

SEQ ID NO: 144518 - DNA, 9 bp, Unknown
  misc_feature (1)..( 9): Result.003 file - promoters60/4913068
aaaaataaa

SEQ ID NO: 144519 - DNA, 9 bp, Unknown
  misc_feature (1)..( 9): Result.003 file - promoters60/4913068
aaaaattat

SEQ ID NO: 144520 - DNA, 9 bp, Unknown
  misc_feature (1)..( 9): Result.003 file - promoters60/4913068
aaaaatttg

SEQ ID NO: 144521 - DNA, 9 bp, Unknown
  misc_feature (1)..( 9): Result.003 file - promoters60/4913068
taaaattta

SEQ ID NO: 144522 - DNA, 9 bp, Unknown
  misc_feature (1)..( 9): Result.003 file - promoters60/4913068
taaacttta

SEQ ID NO: 144523 - DNA, 18 bp, Unknown
  misc_feature (1)..( 18): Result.003 file - promoters60/4913068
aacaacttaattcttttt

SEQ ID NO: 144524 - DNA, 18 bp, Unknown
  misc_feature (1)..( 18): Result.003 file - promoters60/4913068
tacgctcactttctattt

SEQ ID NO: 144525 - DNA, 18 bp, Unknown
  misc_feature (1)..( 18): Result.003 file - promoters60/4913068
aaaattgtaatccttttg

SEQ ID NO: 144526 - DNA, 18 bp, Unknown
  misc_feature (1)..( 18): Result.003 file - promoters60/4913068
aaaatagtaatcaaaatt

SEQ ID NO: 144527 - DNA, 8 bp, Unknown
  misc_feature (1)..( 8): Result.003 file - promoters60/4913068
agttggat

SEQ ID NO: 144528 - DNA, 8 bp, Unknown
  misc_feature (1)..( 8): Result.003 file - promoters60/4913068
ctttggat

SEQ ID NO: 144529 - DNA, 8 bp, Unknown
  misc_feature (1)..( 8): Result.003 file - promoters60/4913068
ctttggaa

SEQ ID NO: 144530 - DNA, 8 bp, Unknown
  misc_feature (1)..( 8): Result.003 file - promoters60/4913068
ttttagaa

SEQ ID NO: 144531 - DNA, 8 bp, Unknown
  misc_feature (1)..( 8): Result.003 file - promoters60/4913068
gtttggaa

SEQ ID NO: 144532 - DNA, 12 bp, Unknown
  misc_feature (1)..( 12): Result.003 file - promoters60/4913068
ttgtattatcaa

SEQ ID NO: 144533 - DNA, 12 bp, Unknown
  misc_feature (1)..( 12): Result.003 file - promoters60/4913068
ttttattatttc

SEQ ID NO: 144534 - DNA, 12 bp, Unknown
  misc_feature (1)..( 12): Result.003 file - promoters60/4913068
ttcgattatttt

SEQ ID NO: 144535 - DNA, 12 bp, Unknown
  misc_feature (1)..( 12): Result.003 file - promoters60/4913068
ttttcttacgtt

SEQ ID NO: 144536 - DNA, 12 bp, Unknown
  misc_feature (1)..( 12): Result.003 file - promoters60/4913068
tgaaattgtttt

SEQ ID NO: 144537 - DNA, 14 bp, Unknown
  misc_feature (1)..( 14): Result.003 file - promoters60/4913068
tataattttatata

SEQ ID NO: 144538 - DNA, 14 bp, Unknown
  misc_feature (1)..( 14): Result.003 file - promoters60/4913068
ataaattttttata

SEQ ID NO: 144539 - DNA, 14 bp, Unknown
  misc_feature (1)..( 14): Result.003 file - promoters60/4913068
tatgatttatcgtg

SEQ ID NO: 144540 - DNA, 14 bp, Unknown
  misc_feature (1)..( 14): Result.003 file - promoters60/4913068
ggtcatttttggat

SEQ ID NO: 144541 - DNA, 13 bp, Unknown
  misc_feature (1)..( 13): Result.003 file - promoters60/4913068
aagaaaaaaaaaa

SEQ ID NO: 144542 - DNA, 13 bp, Unknown
  misc_feature (1)..( 13): Result.003 file - promoters60/4913068
tagaagaaacaaa

SEQ ID NO: 144543 - DNA, 13 bp, Unknown
  misc_feature (1)..( 13): Result.003 file - promoters60/4913068
atctagaaagaaa

SEQ ID NO: 144544 - DNA, 13 bp, Unknown
  misc_feature (1)..( 13): Result.003 file - promoters60/4913068
tagtagaatttac

SEQ ID NO: 144545 - DNA, 13 bp, Unknown
  misc_feature (1)..( 13): Result.003 file - promoters60/4913068
tttaagaaaaaaa

SEQ ID NO: 144546 - DNA, 12 bp, Unknown
  misc_feature (1)..( 12): Result.003 file - promoters60/4913068
tttcaaaaatac

SEQ ID NO: 144547 - DNA, 12 bp, Unknown
  misc_feature (1)..( 12): Result.003 file - promoters60/4913068
ttttaaaattta

SEQ ID NO: 144548 - DNA, 12 bp, Unknown
  misc_feature (1)..( 12): Result.003 file - promoters60/4913068
cgttaaaaataa

SEQ ID NO: 144549 - DNA, 12 bp, Unknown
  misc_feature (1)..( 12): Result.003 file - promoters60/4913068
tggtaaaaaata

SEQ ID NO: 144550 - DNA, 12 bp, Unknown
  misc_feature (1)..( 12): Result.003 file - promoters60/4913068
atgtaaaaatta

SEQ ID NO: 144551 - DNA, 12 bp, Unknown
  misc_feature (1)..( 12): Result.003 file - promoters60/4913068
acgtaaacttta

SEQ ID NO: 144552 - DNA, 15 bp, Unknown
  misc_feature (1)..( 15): Result.003 file - promoters60/4913068
ttgtataattttata

SEQ ID NO: 144553 - DNA, 15 bp, Unknown
  misc_feature (1)..( 15): Result.003 file - promoters60/4913068
ttggatattttcagt

SEQ ID NO: 144554 - DNA, 15 bp, Unknown
  misc_feature (1)..( 15): Result.003 file - promoters60/4913068
tcgtataaaaaaaat

SEQ ID NO: 144555 - DNA, 15 bp, Unknown
  misc_feature (1)..( 15): Result.003 file - promoters60/4913068
atatataaaaatttt

SEQ ID NO: 144556 - DNA, 11 bp, Unknown
  misc_feature (1)..( 11): Result.003 file - promoters60/4913068
tcaaaaaaaaa

SEQ ID NO: 144557 - DNA, 11 bp, Unknown
  misc_feature (1)..( 11): Result.003 file - promoters60/4913068
ataaaaaaaaa

SEQ ID NO: 144558 - DNA, 11 bp, Unknown
  misc_feature (1)..( 11): Result.003 file - promoters60/4913068
gtaaaaaatct

SEQ ID NO: 144559 - DNA, 11 bp, Unknown
  misc_feature (1)..( 11): Result.003 file - promoters60/4913068
atataaaaatt

SEQ ID NO: 144560 - DNA, 8 bp, Unknown
  misc_feature (1)..( 8): Result.003 file - promoters60/4913068
ctttggaa

SEQ ID NO: 144561 - DNA, 8 bp, Unknown
  misc_feature (1)..( 8): Result.003 file - promoters60/4913068
ctttggca

SEQ ID NO: 144562 - DNA, 8 bp, Unknown
  misc_feature (1)..( 8): Result.003 file - promoters60/4913068
ttttagaa

SEQ ID NO: 144563 - DNA, 8 bp, Unknown
  misc_feature (1)..( 8): Result.003 file - promoters60/4913068
gtttggaa

SEQ ID NO: 144564 - DNA, 11 bp, Unknown
  misc_feature (1)..( 11): Result.003 file - promoters60/4913068
gatgattttgg

SEQ ID NO: 144565 - DNA, 11 bp, Unknown
  misc_feature (1)..( 11): Result.003 file - promoters60/4913068
gattattttgg

SEQ ID NO: 144566 - DNA, 11 bp, Unknown
  misc_feature (1)..( 11): Result.003 file - promoters60/4913068
tattatttcaa

SEQ ID NO: 144567 - DNA, 11 bp, Unknown
  misc_feature (1)..( 11): Result.003 file - promoters60/4913068
aattgttttcg

SEQ ID NO: 144568 - DNA, 8 bp, Unknown
  misc_feature (1)..( 8): Result.003 file - promoters60/4913068
gtatcttt

SEQ ID NO: 144569 - DNA, 8 bp, Unknown
  misc_feature (1)..( 8): Result.003 file - promoters60/4913068
aaatcttt

SEQ ID NO: 144570 - DNA, 8 bp, Unknown
  misc_feature (1)..( 8): Result.003 file - promoters60/4913068
aaattttt

SEQ ID NO: 144571 - DNA, 8 bp, Unknown
  misc_feature (1)..( 8): Result.003 file - promoters60/4913068
aaatattt

SEQ ID NO: 144572 - DNA, 13 bp, Unknown
  misc_feature (1)..( 13): Result.003 file - promoters60/4913068
tctaatgaaattt

SEQ ID NO: 144573 - DNA, 13 bp, Unknown
  misc_feature (1)..( 13): Result.003 file - promoters60/4913068
acaaattaaattt

SEQ ID NO: 144574 - DNA, 13 bp, Unknown
  misc_feature (1)..( 13): Result.003 file - promoters60/4913068
acaaagtaaagtg

SEQ ID NO: 144575 - DNA, 13 bp, Unknown
  misc_feature (1)..( 13): Result.003 file - promoters60/4913068
aattatttaatct

SEQ ID NO: 144576 - DNA, 10 bp, Unknown
  misc_feature (1)..( 10): Result.003 file - promoters60/4913068
ttaatgtttg

SEQ ID NO: 144577 - DNA, 10 bp, Unknown
  misc_feature (1)..( 10): Result.003 file - promoters60/4913068
ttaatctttt

SEQ ID NO: 144578 - DNA, 10 bp, Unknown
  misc_feature (1)..( 10): Result.003 file - promoters60/4913068
catttgtttg

SEQ ID NO: 144579 - DNA, 10 bp, Unknown
  misc_feature (1)..( 10): Result.003 file - promoters60/4913068
ttaatattta

SEQ ID NO: 144580 - DNA, 8 bp, Unknown
  misc_feature (1)..( 8): Result.003 file - promoters60/4913083
ttattaaa

SEQ ID NO: 144581 - DNA, 8 bp, Unknown
  misc_feature (1)..( 8): Result.003 file - promoters60/4913083
ttactaaa

SEQ ID NO: 144582 - DNA, 7 bp, Unknown
  misc_feature (1)..( 7): Result.003 file - promoters60/4913083
gactaaa

SEQ ID NO: 144583 - DNA, 8 bp, Unknown
  misc_feature (1)..( 8): Result.003 file - promoters60/4913083
gtactaac

SEQ ID NO: 144584 - DNA, 8 bp, Unknown
  misc_feature (1)..( 8): Result.003 file - promoters60/4913083
agtgtgct

SEQ ID NO: 144585 - DNA, 8 bp, Unknown
  misc_feature (1)..( 8): Result.003 file - promoters60/4913083
agtgggct

SEQ ID NO: 144586 - DNA, 9 bp, Unknown
  misc_feature (1)..( 9): Result.003 file - promoters60/4913083
cgtgatgtt

SEQ ID NO: 144587 - DNA, 9 bp, Unknown
  misc_feature (1)..( 9): Result.003 file - promoters60/4913083
gatgatgta

SEQ ID NO: 144588 - DNA, 13 bp, Unknown
  misc_feature (1)..( 13): Result.003 file - promoters60/4913724
aacagtttgctgt

SEQ ID NO: 144589 - DNA, 13 bp, Unknown
  misc_feature (1)..( 13): Result.003 file - promoters60/4913724
aacattttggttt

SEQ ID NO: 144590 - DNA, 13 bp, Unknown
  misc_feature (1)..( 13): Result.003 file - promoters60/4913724
tttcttttggttt

SEQ ID NO: 144591 - DNA, 8 bp, Unknown
  misc_feature (1)..( 8): Result.003 file - promoters60/4913724
attgctgt

SEQ ID NO: 144592 - DNA, 8 bp, Unknown
  misc_feature (1)..( 8): Result.003 file - promoters60/4913724
gttgatgt

SEQ ID NO: 144593 - DNA, 8 bp, Unknown
  misc_feature (1)..( 8): Result.003 file - promoters60/4913724
gttgattt

SEQ ID NO: 144594 - DNA, 13 bp, Unknown
  misc_feature (1)..( 13): Result.003 file - promoters60/4913724
atactaagcattg

SEQ ID NO: 144595 - DNA, 13 bp, Unknown
  misc_feature (1)..( 13): Result.003 file - promoters60/4913724
gagataagtattg

SEQ ID NO: 144596 - DNA, 13 bp, Unknown
  misc_feature (1)..( 13): Result.003 file - promoters60/4913724
gagagaagttgat

SEQ ID NO: 144597 - DNA, 7 bp, Unknown
  misc_feature (1)..( 7): Result.003 file - promoters60/4914111
ttttccg

SEQ ID NO: 144598 - DNA, 7 bp, Unknown
  misc_feature (1)..( 7): Result.003 file - promoters60/4914111
tttgccg

SEQ ID NO: 144599 - DNA, 8 bp, Unknown
  misc_feature (1)..( 8): Result.003 file - promoters60/4914111
ctgtttat

SEQ ID NO: 144600 - DNA, 8 bp, Unknown
  misc_feature (1)..( 8): Result.003 file - promoters60/4914111
gtgtatat

SEQ ID NO: 144601 - DNA, 8 bp, Unknown
  misc_feature (1)..( 8): Result.003 file - promoters60/4914111
ctgttttc

SEQ ID NO: 144602 - DNA, 9 bp, Unknown
  misc_feature (1)..( 9): Result.003 file - promoters60/4914111
ctgtgttga

SEQ ID NO: 144603 - DNA, 9 bp, Unknown
  misc_feature (1)..( 9): Result.003 file - promoters60/4914111
ctgtgtctc

SEQ ID NO: 144604 - DNA, 9 bp, Unknown
  misc_feature (1)..( 9): Result.003 file - promoters60/4914111
ttgtttctc

SEQ ID NO: 144605 - DNA, 7 bp, Unknown
  misc_feature (1)..( 7): Result.003 file - promoters60/4914111
tcttgtt

SEQ ID NO: 144606 - DNA, 7 bp, Unknown
  misc_feature (1)..( 7): Result.003 file - promoters60/4914111
tctggtt

SEQ ID NO: 144607 - DNA, 7 bp, Unknown
  misc_feature (1)..( 7): Result.003 file - promoters60/4914111
gatgcag

SEQ ID NO: 144608 - DNA, 7 bp, Unknown
  misc_feature (1)..( 7): Result.003 file - promoters60/4914111
gatgcac

SEQ ID NO: 144609 - DNA, 7 bp, Unknown
  misc_feature (1)..( 7): Result.003 file - promoters60/4914111
tatgcag

SEQ ID NO: 144610 - DNA, 7 bp, Unknown
  misc_feature (1)..( 7): Result.003 file - promoters60/4914111
acatgtg

SEQ ID NO: 144611 - DNA, 7 bp, Unknown
  misc_feature (1)..( 7): Result.003 file - promoters60/4914111
acaagtg

SEQ ID NO: 144612 - DNA, 7 bp, Unknown
  misc_feature (1)..( 7): Result.003 file - promoters60/4914111
aatagtt

SEQ ID NO: 144613 - DNA, 7 bp, Unknown
  misc_feature (1)..( 7): Result.003 file - promoters60/4914111
aatggtt

SEQ ID NO: 144614 - DNA, 9 bp, Unknown
  misc_feature (1)..( 9): Result.003 file - promoters60/4914111
attggactt

SEQ ID NO: 144615 - DNA, 9 bp, Unknown
  misc_feature (1)..( 9): Result.003 file - promoters60/4914111
attgtactt

SEQ ID NO: 144616 - DNA, 6 bp, Unknown
  misc_feature (1)..( 6): Result.003 file - promoters60/4914111
aatttc

SEQ ID NO: 144617 - DNA, 6 bp, Unknown
  misc_feature (1)..( 6): Result.003 file - promoters60/4914111
aatttc

SEQ ID NO: 144618 - DNA, 7 bp, Unknown
  misc_feature (1)..( 7): Result.003 file - promoters60/4914111
tctgtct

SEQ ID NO: 144619 - DNA, 7 bp, Unknown
  misc_feature (1)..( 7): Result.003 file - promoters60/4914111
tctttct

SEQ ID NO: 144620 - DNA, 8 bp, Unknown
  misc_feature (1)..( 8): Result.003 file - promoters60/4914111
aatggttt

SEQ ID NO: 144621 - DNA, 8 bp, Unknown
  misc_feature (1)..( 8): Result.003 file - promoters60/4914111
aatgattt

SEQ ID NO: 144622 - DNA, 6 bp, Unknown
  misc_feature (1)..( 6): Result.003 file - promoters60/4914111
aacagt

SEQ ID NO: 144623 - DNA, 6 bp, Unknown
  misc_feature (1)..( 6): Result.003 file - promoters60/4914111
aacagt

SEQ ID NO: 144624 - DNA, 6 bp, Unknown
  misc_feature (1)..( 6): Result.003 file - promoters60/4914111
attgga

SEQ ID NO: 144625 - DNA, 6 bp, Unknown
  misc_feature (1)..( 6): Result.003 file - promoters60/4914111
attgga

SEQ ID NO: 144626 - DNA, 6 bp, Unknown
  misc_feature (1)..( 6): Result.003 file - promoters60/4914111
taattt

SEQ ID NO: 144627 - DNA, 6 bp, Unknown
  misc_feature (1)..( 6): Result.003 file - promoters60/4914111
taattt

SEQ ID NO: 144628 - DNA, 7 bp, Unknown
  misc_feature (1)..( 7): Result.003 file - promoters60/4914111
tttattg

SEQ ID NO: 144629 - DNA, 7 bp, Unknown
  misc_feature (1)..( 7): Result.003 file - promoters60/4914111
tttattg

SEQ ID NO: 144630 - DNA, 6 bp, Unknown
  misc_feature (1)..( 6): Result.003 file - promoters60/4914111
tctaga

SEQ ID NO: 144631 - DNA, 6 bp, Unknown
  misc_feature (1)..( 6): Result.003 file - promoters60/4914111
tctaga

SEQ ID NO: 144632 - DNA, 10 bp, Unknown
  misc_feature (1)..( 10): Result.003 file - promoters60/4915127
tatatactta

SEQ ID NO: 144633 - DNA, 10 bp, Unknown
  misc_feature (1)..( 10): Result.003 file - promoters60/4915127
aatacactag

SEQ ID NO: 144634 - DNA, 10 bp, Unknown
  misc_feature (1)..( 10): Result.003 file - promoters60/4915127
tatatatata

SEQ ID NO: 144635 - DNA, 10 bp, Unknown
  misc_feature (1)..( 10): Result.003 file - promoters60/4915127
tatatagata

SEQ ID NO: 144636 - DNA, 10 bp, Unknown
  misc_feature (1)..( 10): Result.003 file - promoters60/4915127
tatataaact

SEQ ID NO: 144637 - DNA, 10 bp, Unknown
  misc_feature (1)..( 10): Result.003 file - promoters60/4915127
aataaaaagc

SEQ ID NO: 144638 - DNA, 8 bp, Unknown
  misc_feature (1)..( 8): Result.003 file - promoters60/4915163
gaaaatat

SEQ ID NO: 144639 - DNA, 8 bp, Unknown
  misc_feature (1)..( 8): Result.003 file - promoters60/4915163
caaattat

SEQ ID NO: 144640 - DNA, 8 bp, Unknown
  misc_feature (1)..( 8): Result.003 file - promoters60/4915163
aaaaatat

SEQ ID NO: 144641 - DNA, 8 bp, Unknown
  misc_feature (1)..( 8): Result.003 file - promoters60/4915163
caaattct

SEQ ID NO: 144642 - DNA, 11 bp, Unknown
  misc_feature (1)..( 11): Result.003 file - promoters60/4915163
taatataagta

SEQ ID NO: 144643 - DNA, 11 bp, Unknown
  misc_feature (1)..( 11): Result.003 file - promoters60/4915163
taatgtaattt

SEQ ID NO: 144644 - DNA, 11 bp, Unknown
  misc_feature (1)..( 11): Result.003 file - promoters60/4915163
ctttataagta

SEQ ID NO: 144645 - DNA, 11 bp, Unknown
  misc_feature (1)..( 11): Result.003 file - promoters60/4915163
gaatgtatata

SEQ ID NO: 144646 - DNA, 10 bp, Unknown
  misc_feature (1)..( 10): Result.003 file - promoters60/4915163
ttgattcatc

SEQ ID NO: 144647 - DNA, 10 bp, Unknown
  misc_feature (1)..( 10): Result.003 file - promoters60/4915163
taatttcatc

SEQ ID NO: 144648 - DNA, 10 bp, Unknown
  misc_feature (1)..( 10): Result.003 file - promoters60/4915163
attattcata

SEQ ID NO: 144649 - DNA, 10 bp, Unknown
  misc_feature (1)..( 10): Result.003 file - promoters60/4915163
attgttcatt

SEQ ID NO: 144650 - DNA, 7 bp, Unknown
  misc_feature (1)..( 7): Result.003 file - promoters60/4915163
attttaa

SEQ ID NO: 144651 - DNA, 7 bp, Unknown
  misc_feature (1)..( 7): Result.003 file - promoters60/4915163
attttaa

SEQ ID NO: 144652 - DNA, 7 bp, Unknown
  misc_feature (1)..( 7): Result.003 file - promoters60/4915163
attctaa

SEQ ID NO: 144653 - DNA, 7 bp, Unknown
  misc_feature (1)..( 7): Result.003 file - promoters60/4915163
cttttaa

SEQ ID NO: 144654 - DNA, 13 bp, Unknown
  misc_feature (1)..( 13): Result.003 file - promoters60/4915163
aatataagtaaca

SEQ ID NO: 144655 - DNA, 13 bp, Unknown
  misc_feature (1)..( 13): Result.003 file - promoters60/4915163
agatgaagtcaca

SEQ ID NO: 144656 - DNA, 13 bp, Unknown
  misc_feature (1)..( 13): Result.003 file - promoters60/4915163
tttataagtataa

SEQ ID NO: 144657 - DNA, 13 bp, Unknown
  misc_feature (1)..( 13): Result.003 file - promoters60/4915163
gaaatttgtaact

SEQ ID NO: 144658 - DNA, 13 bp, Unknown
  misc_feature (1)..( 13): Result.003 file - promoters60/4915163
tttaaaagtaaga

SEQ ID NO: 144659 - DNA, 11 bp, Unknown
  misc_feature (1)..( 11): Result.003 file - promoters60/4915163
ataatattctc

SEQ ID NO: 144660 - DNA, 11 bp, Unknown
  misc_feature (1)..( 11): Result.003 file - promoters60/4915163
ataatatattt

SEQ ID NO: 144661 - DNA, 11 bp, Unknown
  misc_feature (1)..( 11): Result.003 file - promoters60/4915163
aaaatatgttt

SEQ ID NO: 144662 - DNA, 11 bp, Unknown
  misc_feature (1)..( 11): Result.003 file - promoters60/4915163
ttaacatataa

SEQ ID NO: 144663 - DNA, 17 bp, Unknown
  misc_feature (1)..( 17): Result.003 file - promoters60/4915163
taaattttgaaataatt

SEQ ID NO: 144664 - DNA, 17 bp, Unknown
  misc_feature (1)..( 17): Result.003 file - promoters60/4915163
taaattttaaaattatt

SEQ ID NO: 144665 - DNA, 17 bp, Unknown
  misc_feature (1)..( 17): Result.003 file - promoters60/4915163
taattgttaatcttttg

SEQ ID NO: 144666 - DNA, 17 bp, Unknown
  misc_feature (1)..( 17): Result.003 file - promoters60/4915163
cagaaactaagattata

SEQ ID NO: 144667 - DNA, 10 bp, Unknown
  misc_feature (1)..( 10): Result.003 file - promoters60/4915163
atttaaattg

SEQ ID NO: 144668 - DNA, 10 bp, Unknown
  misc_feature (1)..( 10): Result.003 file - promoters60/4915163
atttaaatca

SEQ ID NO: 144669 - DNA, 10 bp, Unknown
  misc_feature (1)..( 10): Result.003 file - promoters60/4915163
gtttaaaaga

SEQ ID NO: 144670 - DNA, 10 bp, Unknown
  misc_feature (1)..( 10): Result.003 file - promoters60/4915163
gtgtaagttg

SEQ ID NO: 144671 - DNA, 10 bp, Unknown
  misc_feature (1)..( 10): Result.003 file - promoters60/4915163
tattttactt

SEQ ID NO: 144672 - DNA, 10 bp, Unknown
  misc_feature (1)..( 10): Result.003 file - promoters60/4915163
tattttaatt

SEQ ID NO: 144673 - DNA, 10 bp, Unknown
  misc_feature (1)..( 10): Result.003 file - promoters60/4915163
gattttacac

SEQ ID NO: 144674 - DNA, 10 bp, Unknown
  misc_feature (1)..( 10): Result.003 file - promoters60/4915163
acttttgatt

SEQ ID NO: 144675 - DNA, 9 bp, Unknown
  misc_feature (1)..( 9): Result.003 file - promoters60/4915163
ttatgtaaa

SEQ ID NO: 144676 - DNA, 9 bp, Unknown
  misc_feature (1)..( 9): Result.003 file - promoters60/4915163
gtatttaag

SEQ ID NO: 144677 - DNA, 9 bp, Unknown
  misc_feature (1)..( 9): Result.003 file - promoters60/4915163
ttatgtatt

SEQ ID NO: 144678 - DNA, 10 bp, Unknown
  misc_feature (1)..( 10): Result.003 file - promoters60/4915163
aattgttaat

SEQ ID NO: 144679 - DNA, 13 bp, Unknown
  misc_feature (1)..( 13): Result.003 file - promoters60/4915163
tttctacgattga

SEQ ID NO: 144680 - DNA, 13 bp, Unknown
  misc_feature (1)..( 13): Result.003 file - promoters60/4915163
aaactaagattat

SEQ ID NO: 144681 - DNA, 13 bp, Unknown
  misc_feature (1)..( 13): Result.003 file - promoters60/4915163
attttaaaattat

SEQ ID NO: 144682 - DNA, 13 bp, Unknown
  misc_feature (1)..( 13): Result.003 file - promoters60/4915163
attctaaaatatt

SEQ ID NO: 144683 - DNA, 12 bp, Unknown
  misc_feature (1)..( 12): Result.003 file - promoters60/4915163
ccataaaagcag

SEQ ID NO: 144684 - DNA, 12 bp, Unknown
  misc_feature (1)..( 12): Result.003 file - promoters60/4915163
ctataaaaacca

SEQ ID NO: 144685 - DNA, 13 bp, Unknown
  misc_feature (1)..( 13): Result.003 file - promoters60/4915163
atataataaccaa

SEQ ID NO: 144686 - DNA, 13 bp, Unknown
  misc_feature (1)..( 13): Result.003 file - promoters60/4915163
ctataaatatcac

SEQ ID NO: 144687 - DNA, 8 bp, Unknown
  misc_feature (1)..( 8): Result.003 file - promoters60/4915163
catattat

SEQ ID NO: 144688 - DNA, 8 bp, Unknown
  misc_feature (1)..( 8): Result.003 file - promoters60/4915163
catattga

SEQ ID NO: 144689 - DNA, 8 bp, Unknown
  misc_feature (1)..( 8): Result.003 file - promoters60/4915163
gatattat

SEQ ID NO: 144690 - DNA, 9 bp, Unknown
  misc_feature (1)..( 9): Result.003 file - promoters60/4915163
tataattgt

SEQ ID NO: 144691 - DNA, 11 bp, Unknown
  misc_feature (1)..( 11): Result.003 file - promoters60/4915163
gtatatataat

SEQ ID NO: 144692 - DNA, 11 bp, Unknown
  misc_feature (1)..( 11): Result.003 file - promoters60/4915163
cgataaatatc

SEQ ID NO: 144693 - DNA, 11 bp, Unknown
  misc_feature (1)..( 11): Result.003 file - promoters60/4915163
ctataaatatc

SEQ ID NO: 144694 - DNA, 11 bp, Unknown
  misc_feature (1)..( 11): Result.003 file - promoters60/4915163
ctataaaaacc

SEQ ID NO: 144695 - DNA, 7 bp, Unknown
  misc_feature (1)..( 7): Result.003 file - promoters60/4915199
tgtgttg

SEQ ID NO: 144696 - DNA, 7 bp, Unknown
  misc_feature (1)..( 7): Result.003 file - promoters60/4915199
tgttttg

SEQ ID NO: 144697 - DNA, 7 bp, Unknown
  misc_feature (1)..( 7): Result.003 file - promoters60/4915199
ttgcttc

SEQ ID NO: 144698 - DNA, 7 bp, Unknown
  misc_feature (1)..( 7): Result.003 file - promoters60/4915199
ttggttc

SEQ ID NO: 144699 - DNA, 8 bp, Unknown
  misc_feature (1)..( 8): Result.003 file - promoters60/4915199
acccaaaa

SEQ ID NO: 144700 - DNA, 8 bp, Unknown
  misc_feature (1)..( 8): Result.003 file - promoters60/4915199
accaaaaa

SEQ ID NO: 144701 - DNA, 7 bp, Unknown
  misc_feature (1)..( 7): Result.003 file - promoters60/4915199
ttttact

SEQ ID NO: 144702 - DNA, 7 bp, Unknown
  misc_feature (1)..( 7): Result.003 file - promoters60/4915199
ttttact

SEQ ID NO: 144703 - DNA, 6 bp, Unknown
  misc_feature (1)..( 6): Result.003 file - promoters60/4915199
aaagct

SEQ ID NO: 144704 - DNA, 6 bp, Unknown
  misc_feature (1)..( 6): Result.003 file - promoters60/4915199
aaagct

SEQ ID NO: 144705 - DNA, 6 bp, Unknown
  misc_feature (1)..( 6): Result.003 file - promoters60/4915199
gtttgt

SEQ ID NO: 144706 - DNA, 6 bp, Unknown
  misc_feature (1)..( 6): Result.003 file - promoters60/4915199
gtttgt

SEQ ID NO: 144707 - DNA, 9 bp, Unknown
  misc_feature (1)..( 9): Result.003 file - promoters60/4915199
tgtctgtgt

SEQ ID NO: 144708 - DNA, 9 bp, Unknown
  misc_feature (1)..( 9): Result.003 file - promoters60/4915199
tgtttgtgt

SEQ ID NO: 144709 - DNA, 6 bp, Unknown
  misc_feature (1)..( 6): Result.003 file - promoters60/4915199
aaaaat

SEQ ID NO: 144710 - DNA, 6 bp, Unknown
  misc_feature (1)..( 6): Result.003 file - promoters60/4915199
aaaaat

SEQ ID NO: 144711 - DNA, 10 bp, Unknown
  misc_feature (1)..( 10): Result.003 file - promoters60/4915199
tattctgtga

SEQ ID NO: 144712 - DNA, 10 bp, Unknown
  misc_feature (1)..( 10): Result.003 file - promoters60/4915199
gtttctctga

SEQ ID NO: 144713 - DNA, 10 bp, Unknown
  misc_feature (1)..( 10): Result.003 file - promoters60/4915199
gtttctctac

SEQ ID NO: 144714 - DNA, 7 bp, Unknown
  misc_feature (1)..( 7): Result.003 file - promoters60/4915199
attagat

SEQ ID NO: 144715 - DNA, 7 bp, Unknown
  misc_feature (1)..( 7): Result.003 file - promoters60/4915199
tttagat

SEQ ID NO: 144716 - DNA, 8 bp, Unknown
  misc_feature (1)..( 8): Result.003 file - promoters60/4915199
gttaagag

SEQ ID NO: 144717 - DNA, 8 bp, Unknown
  misc_feature (1)..( 8): Result.003 file - promoters60/4915199
aaaattat

SEQ ID NO: 144718 - DNA, 8 bp, Unknown
  misc_feature (1)..( 8): Result.003 file - promoters60/4915199
aaaaatat

SEQ ID NO: 144719 - DNA, 8 bp, Unknown
  misc_feature (1)..( 8): Result.003 file - promoters60/4915199
acacaaat

SEQ ID NO: 144720 - DNA, 8 bp, Unknown
  misc_feature (1)..( 8): Result.003 file - promoters60/4915199
acacaaat

SEQ ID NO: 144721 - DNA, 6 bp, Unknown
  misc_feature (1)..( 6): Result.003 file - promoters60/4915199
gataaa

SEQ ID NO: 144722 - DNA, 6 bp, Unknown
  misc_feature (1)..( 6): Result.003 file - promoters60/4915199
gataaa

SEQ ID NO: 144723 - DNA, 6 bp, Unknown
  misc_feature (1)..( 6): Result.003 file - promoters60/4915199
gttgtt

SEQ ID NO: 144724 - DNA, 6 bp, Unknown
  misc_feature (1)..( 6): Result.003 file - promoters60/4915199
gttgtt

SEQ ID NO: 144725 - DNA, 7 bp, Unknown
  misc_feature (1)..( 7): Result.003 file - promoters60/4915199
aatcgta

SEQ ID NO: 144726 - DNA, 7 bp, Unknown
  misc_feature (1)..( 7): Result.003 file - promoters60/4915199
aattgta

SEQ ID NO: 144727 - DNA, 7 bp, Unknown
  misc_feature (1)..( 7): Result.003 file - promoters60/4915199
aaaataa

SEQ ID NO: 144728 - DNA, 7 bp, Unknown
  misc_feature (1)..( 7): Result.003 file - promoters60/4915199
aaattaa

SEQ ID NO: 144729 - DNA, 7 bp, Unknown
  misc_feature (1)..( 7): Result.003 file - promoters60/4915199
attttca

SEQ ID NO: 144730 - DNA, 7 bp, Unknown
  misc_feature (1)..( 7): Result.003 file - promoters60/4915199
attctca

SEQ ID NO: 144731 - DNA, 7 bp, Unknown
  misc_feature (1)..( 7): Result.003 file - promoters60/4915199
atctcaa

SEQ ID NO: 144732 - DNA, 7 bp, Unknown
  misc_feature (1)..( 7): Result.003 file - promoters60/4915199
atcacaa

SEQ ID NO: 144733 - DNA, 6 bp, Unknown
  misc_feature (1)..( 6): Result.003 file - promoters60/4915199
aatcaa

SEQ ID NO: 144734 - DNA, 6 bp, Unknown
  misc_feature (1)..( 6): Result.003 file - promoters60/4915199
aatcaa

SEQ ID NO: 144735 - DNA, 6 bp, Unknown
  misc_feature (1)..( 6): Result.003 file - promoters60/4915199
tttctt

SEQ ID NO: 144736 - DNA, 6 bp, Unknown
  misc_feature (1)..( 6): Result.003 file - promoters60/4915199
tttctt

SEQ ID NO: 144737 - DNA, 9 bp, Unknown
  misc_feature (1)..( 9): Result.003 file - promoters60/4915199
tcactgttt

SEQ ID NO: 144738 - DNA, 9 bp, Unknown
  misc_feature (1)..( 9): Result.003 file - promoters60/4915199
tcactgttt

SEQ ID NO: 144739 - DNA, 8 bp, Unknown
  misc_feature (1)..( 8): Result.003 file - promoters60/4915199
acaccaat

SEQ ID NO: 144740 - DNA, 8 bp, Unknown
  misc_feature (1)..( 8): Result.003 file - promoters60/4915199
acaccaat

SEQ ID NO: 144741 - DNA, 7 bp, Unknown
  misc_feature (1)..( 7): Result.003 file - promoters60/4915199
ctgttga

SEQ ID NO: 144742 - DNA, 7 bp, Unknown
  misc_feature (1)..( 7): Result.003 file - promoters60/4915199
ctggtga

SEQ ID NO: 144743 - DNA, 14 bp, Unknown
  misc_feature (1)..( 14): Result.003 file - promoters60/4915244
tttgcttacaattt

SEQ ID NO: 144744 - DNA, 14 bp, Unknown
  misc_feature (1)..( 14): Result.003 file - promoters60/4915244
ttttcttttcatat

SEQ ID NO: 144745 - DNA, 14 bp, Unknown
  misc_feature (1)..( 14): Result.003 file - promoters60/4915244
gttgtttatataaa

SEQ ID NO: 144746 - DNA, 14 bp, Unknown
  misc_feature (1)..( 14): Result.003 file - promoters60/4915244
tttgctaccgatat

SEQ ID NO: 144747 - DNA, 14 bp, Unknown
  misc_feature (1)..( 14): Result.003 file - promoters60/4915244
catgtttaatctga

SEQ ID NO: 144748 - DNA, 14 bp, Unknown
  misc_feature (1)..( 14): Result.003 file - promoters60/4915244
aaagttaaataaat

SEQ ID NO: 144749 - DNA, 14 bp, Unknown
  misc_feature (1)..( 14): Result.003 file - promoters60/4915244
ttattcaagtaaaa

SEQ ID NO: 144750 - DNA, 14 bp, Unknown
  misc_feature (1)..( 14): Result.003 file - promoters60/4915244
gaatttaaattttt

SEQ ID NO: 144751 - DNA, 10 bp, Unknown
  misc_feature (1)..( 10): Result.003 file - promoters60/4915244
tatatgcaga

SEQ ID NO: 144752 - DNA, 10 bp, Unknown
  misc_feature (1)..( 10): Result.003 file - promoters60/4915244
actatgtaga

SEQ ID NO: 144753 - DNA, 10 bp, Unknown
  misc_feature (1)..( 10): Result.003 file - promoters60/4915244
tatatgtaca

SEQ ID NO: 144754 - DNA, 10 bp, Unknown
  misc_feature (1)..( 10): Result.003 file - promoters60/4915244
gttatatagt

SEQ ID NO: 144755 - DNA, 10 bp, Unknown
  misc_feature (1)..( 10): Result.003 file - promoters60/4915244
gttaaataaa

SEQ ID NO: 144756 - DNA, 10 bp, Unknown
  misc_feature (1)..( 10): Result.003 file - promoters60/4915244
tttaaatttt

SEQ ID NO: 144757 - DNA, 9 bp, Unknown
  misc_feature (1)..( 9): Result.003 file - promoters60/4915244
caatttcac

SEQ ID NO: 144758 - DNA, 9 bp, Unknown
  misc_feature (1)..( 9): Result.003 file - promoters60/4915244
aaatatcag

SEQ ID NO: 144759 - DNA, 9 bp, Unknown
  misc_feature (1)..( 9): Result.003 file - promoters60/4915244
caatttaaa

SEQ ID NO: 144760 - DNA, 9 bp, Unknown
  misc_feature (1)..( 9): Result.003 file - promoters60/4915244
taatataaa

SEQ ID NO: 144761 - DNA, 9 bp, Unknown
  misc_feature (1)..( 9): Result.003 file - promoters60/4915244
aaatataaa

SEQ ID NO: 144762 - DNA, 9 bp, Unknown
  misc_feature (1)..( 9): Result.003 file - promoters60/4915244
gaatttaaa

SEQ ID NO: 144763 - DNA, 17 bp, Unknown
  misc_feature (1)..( 17): Result.003 file - promoters60/4915244
taatataaattagtact

SEQ ID NO: 144764 - DNA, 17 bp, Unknown
  misc_feature (1)..( 17): Result.003 file - promoters60/4915244
aaatataaaatacatga

SEQ ID NO: 144765 - DNA, 17 bp, Unknown
  misc_feature (1)..( 17): Result.003 file - promoters60/4915244
tcaagtaaaagtactat

SEQ ID NO: 144766 - DNA, 17 bp, Unknown
  misc_feature (1)..( 17): Result.003 file - promoters60/4915244
gaatttaaattttttgt

SEQ ID NO: 144767 - DNA, 17 bp, Unknown
  misc_feature (1)..( 17): Result.003 file - promoters60/4915244
caatttaaaaagttaaa

SEQ ID NO: 144768 - DNA, 17 bp, Unknown
  misc_feature (1)..( 17): Result.003 file - promoters60/4915244
aaatatcagtggttata

SEQ ID NO: 144769 - DNA, 9 bp, Unknown
  misc_feature (1)..( 9): Result.003 file - promoters60/4915244
ccaattttt

SEQ ID NO: 144770 - DNA, 9 bp, Unknown
  misc_feature (1)..( 9): Result.003 file - promoters60/4915244
gatattttt

SEQ ID NO: 144771 - DNA, 10 bp, Unknown
  misc_feature (1)..( 10): Result.003 file - promoters60/4915244
ttaattattt

SEQ ID NO: 144772 - DNA, 10 bp, Unknown
  misc_feature (1)..( 10): Result.003 file - promoters60/4915244
ccaatatttt

SEQ ID NO: 144773 - DNA, 10 bp, Unknown
  misc_feature (1)..( 10): Result.003 file - promoters60/4915244
ccaacattct

SEQ ID NO: 144774 - DNA, 10 bp, Unknown
  misc_feature (1)..( 10): Result.003 file - promoters60/4915244
caaatgtttt

SEQ ID NO: 144775 - DNA, 9 bp, Unknown
  misc_feature (1)..( 9): Result.003 file - promoters60/4915244
tttttcttt

SEQ ID NO: 144776 - DNA, 9 bp, Unknown
  misc_feature (1)..( 9): Result.003 file - promoters60/4915244
tttttcatg

SEQ ID NO: 144777 - DNA, 9 bp, Unknown
  misc_feature (1)..( 9): Result.003 file - promoters60/4915244
tttctctac

SEQ ID NO: 144778 - DNA, 9 bp, Unknown
  misc_feature (1)..( 9): Result.003 file - promoters60/4915244
tttttttaa

SEQ ID NO: 144779 - DNA, 9 bp, Unknown
  misc_feature (1)..( 9): Result.003 file - promoters60/4915244
tttgttaaa

SEQ ID NO: 144780 - DNA, 9 bp, Unknown
  misc_feature (1)..( 9): Result.003 file - promoters60/4915244
tttacatat

SEQ ID NO: 144781 - DNA, 8 bp, Unknown
  misc_feature (1)..( 8): Result.003 file - promoters60/4915347
ttttttac

SEQ ID NO: 144782 - DNA, 8 bp, Unknown
  misc_feature (1)..( 8): Result.003 file - promoters60/4915347
ttttttac

SEQ ID NO: 144783 - DNA, 7 bp, Unknown
  misc_feature (1)..( 7): Result.003 file - promoters60/4915347
catttat

SEQ ID NO: 144784 - DNA, 7 bp, Unknown
  misc_feature (1)..( 7): Result.003 file - promoters60/4915347
catatat

SEQ ID NO: 144785 - DNA, 6 bp, Unknown
  misc_feature (1)..( 6): Result.003 file - promoters60/4915347
ttatat

SEQ ID NO: 144786 - DNA, 6 bp, Unknown
  misc_feature (1)..( 6): Result.003 file - promoters60/4915347
ttatat

SEQ ID NO: 144787 - DNA, 7 bp, Unknown
  misc_feature (1)..( 7): Result.003 file - promoters60/4915347
acaatca

SEQ ID NO: 144788 - DNA, 7 bp, Unknown
  misc_feature (1)..( 7): Result.003 file - promoters60/4915347
acattca

SEQ ID NO: 144789 - DNA, 7 bp, Unknown
  misc_feature (1)..( 7): Result.003 file - promoters60/4915347
tgaaaac

SEQ ID NO: 144790 - DNA, 7 bp, Unknown
  misc_feature (1)..( 7): Result.003 file - promoters60/4915347
tgacaac

SEQ ID NO: 144791 - DNA, 6 bp, Unknown
  misc_feature (1)..( 6): Result.003 file - promoters60/4915347
tttttt

SEQ ID NO: 144792 - DNA, 6 bp, Unknown
  misc_feature (1)..( 6): Result.003 file - promoters60/4915347
tttttt

SEQ ID NO: 144793 - DNA, 7 bp, Unknown
  misc_feature (1)..( 7): Result.003 file - promoters60/4915347
gttttaa

SEQ ID NO: 144794 - DNA, 7 bp, Unknown
  misc_feature (1)..( 7): Result.003 file - promoters60/4915347
gttttaa

SEQ ID NO: 144795 - DNA, 7 bp, Unknown
  misc_feature (1)..( 7): Result.003 file - promoters60/4915347
ctctctc

SEQ ID NO: 144796 - DNA, 7 bp, Unknown
  misc_feature (1)..( 7): Result.003 file - promoters60/4915347
ctctctc

SEQ ID NO: 144797 - DNA, 7 bp, Unknown
  misc_feature (1)..( 7): Result.003 file - promoters60/4915347
attggta

SEQ ID NO: 144798 - DNA, 7 bp, Unknown
  misc_feature (1)..( 7): Result.003 file - promoters60/4915347
attggta

SEQ ID NO: 144799 - DNA, 8 bp, Unknown
  misc_feature (1)..( 8): Result.003 file - promoters60/4915347
aatcatat

SEQ ID NO: 144800 - DNA, 8 bp, Unknown
  misc_feature (1)..( 8): Result.003 file - promoters60/4915347
aatcctat

SEQ ID NO: 144801 - DNA, 7 bp, Unknown
  misc_feature (1)..( 7): Result.003 file - promoters60/4915347
tcctttt

SEQ ID NO: 144802 - DNA, 7 bp, Unknown
  misc_feature (1)..( 7): Result.003 file - promoters60/4915347
tcctttt

SEQ ID NO: 144803 - DNA, 7 bp, Unknown
  misc_feature (1)..( 7): Result.003 file - promoters60/4915347
aaacaca

SEQ ID NO: 144804 - DNA, 7 bp, Unknown
  misc_feature (1)..( 7): Result.003 file - promoters60/4915347
aaacaca

SEQ ID NO: 144805 - DNA, 6 bp, Unknown
  misc_feature (1)..( 6): Result.003 file - promoters60/4915347
taataa

SEQ ID NO: 144806 - DNA, 6 bp, Unknown
  misc_feature (1)..( 6): Result.003 file - promoters60/4915347
taataa

SEQ ID NO: 144807 - DNA, 11 bp, Unknown
  misc_feature (1)..( 11): Result.003 file - promoters60/4915347
aacttttgaat

SEQ ID NO: 144808 - DNA, 11 bp, Unknown
  misc_feature (1)..( 11): Result.003 file - promoters60/4915347
atttttttaat

SEQ ID NO: 144809 - DNA, 11 bp, Unknown
  misc_feature (1)..( 11): Result.003 file - promoters60/4915347
atatttttttt

SEQ ID NO: 144810 - DNA, 7 bp, Unknown
  misc_feature (1)..( 7): Result.003 file - promoters60/4915347
gtgggaa

SEQ ID NO: 144811 - DNA, 7 bp, Unknown
  misc_feature (1)..( 7): Result.003 file - promoters60/4915347
gtgtgaa

SEQ ID NO: 144812 - DNA, 6 bp, Unknown
  misc_feature (1)..( 6): Result.003 file - promoters60/4915347
tactgt

SEQ ID NO: 144813 - DNA, 6 bp, Unknown
  misc_feature (1)..( 6): Result.003 file - promoters60/4915347
tactgt

SEQ ID NO: 144814 - DNA, 9 bp, Unknown
  misc_feature (1)..( 9): Result.003 file - promoters60/4915347
tcaaaattt

SEQ ID NO: 144815 - DNA, 9 bp, Unknown
  misc_feature (1)..( 9): Result.003 file - promoters60/4915347
tcagaattt

SEQ ID NO: 144816 - DNA, 6 bp, Unknown
  misc_feature (1)..( 6): Result.003 file - promoters60/4915347
ttgaaa

SEQ ID NO: 144817 - DNA, 6 bp, Unknown
  misc_feature (1)..( 6): Result.003 file - promoters60/4915347
ttgaaa

SEQ ID NO: 144818 - DNA, 7 bp, Unknown
  misc_feature (1)..( 7): Result.003 file - promoters60/4915347
cttctcc

SEQ ID NO: 144819 - DNA, 7 bp, Unknown
  misc_feature (1)..( 7): Result.003 file - promoters60/4915347
cttgtcc

SEQ ID NO: 144820 - DNA, 7 bp, Unknown
  misc_feature (1)..( 7): Result.003 file - promoters60/4915347
ttcatgt

SEQ ID NO: 144821 - DNA, 7 bp, Unknown
  misc_feature (1)..( 7): Result.003 file - promoters60/4915347
ttcatgt

SEQ ID NO: 144822 - DNA, 7 bp, Unknown
  misc_feature (1)..( 7): Result.003 file - promoters60/4915347
aagcttt

SEQ ID NO: 144823 - DNA, 7 bp, Unknown
  misc_feature (1)..( 7): Result.003 file - promoters60/4915347
aagattt

SEQ ID NO: 144824 - DNA, 7 bp, Unknown
  misc_feature (1)..( 7): Result.003 file - promoters60/4915347
tacctca

SEQ ID NO: 144825 - DNA, 7 bp, Unknown
  misc_feature (1)..( 7): Result.003 file - promoters60/4915347
tacctca

SEQ ID NO: 144826 - DNA, 7 bp, Unknown
  misc_feature (1)..( 7): Result.003 file - promoters60/4915347
ttttata

SEQ ID NO: 144827 - DNA, 7 bp, Unknown
  misc_feature (1)..( 7): Result.003 file - promoters60/4915347
tttgata

SEQ ID NO: 144828 - DNA, 9 bp, Unknown
  misc_feature (1)..( 9): Result.003 file - promoters60/4915347
catccttat

SEQ ID NO: 144829 - DNA, 9 bp, Unknown
  misc_feature (1)..( 9): Result.003 file - promoters60/4915347
catcattat

SEQ ID NO: 144830 - DNA, 10 bp, Unknown
  misc_feature (1)..( 10): Result.003 file - promoters60/4915384
tttcaataac

SEQ ID NO: 144831 - DNA, 10 bp, Unknown
  misc_feature (1)..( 10): Result.003 file - promoters60/4915384
tttaaataat

SEQ ID NO: 144832 - DNA, 10 bp, Unknown
  misc_feature (1)..( 10): Result.003 file - promoters60/4915384
cagcaaaaac

SEQ ID NO: 144833 - DNA, 7 bp, Unknown
  misc_feature (1)..( 7): Result.003 file - promoters60/4915384
ttttaag

SEQ ID NO: 144834 - DNA, 7 bp, Unknown
  misc_feature (1)..( 7): Result.003 file - promoters60/4915384
ttttaat

SEQ ID NO: 144835 - DNA, 7 bp, Unknown
  misc_feature (1)..( 7): Result.003 file - promoters60/4915384
tttgatt

SEQ ID NO: 144836 - DNA, 10 bp, Unknown
  misc_feature (1)..( 10): Result.003 file - promoters60/4915384
ttattatttt

SEQ ID NO: 144837 - DNA, 10 bp, Unknown
  misc_feature (1)..( 10): Result.003 file - promoters60/4915384
ggtttatttt

SEQ ID NO: 144838 - DNA, 10 bp, Unknown
  misc_feature (1)..( 10): Result.003 file - promoters60/4915384
ggtttattca

SEQ ID NO: 144839 - DNA, 10 bp, Unknown
  misc_feature (1)..( 10): Result.003 file - promoters60/4915384
attttatttt

SEQ ID NO: 144840 - DNA, 8 bp, Unknown
  misc_feature (1)..( 8): Result.003 file - promoters60/4915384
caaaggta

SEQ ID NO: 144841 - DNA, 8 bp, Unknown
  misc_feature (1)..( 8): Result.003 file - promoters60/4915384
gaaaagta

SEQ ID NO: 144842 - DNA, 8 bp, Unknown
  misc_feature (1)..( 8): Result.003 file - promoters60/4915384
gaaaagaa

SEQ ID NO: 144843 - DNA, 8 bp, Unknown
  misc_feature (1)..( 8): Result.003 file - promoters60/4915384
tcaaattg

SEQ ID NO: 144844 - DNA, 8 bp, Unknown
  misc_feature (1)..( 8): Result.003 file - promoters60/4915384
tcacattc

SEQ ID NO: 144845 - DNA, 8 bp, Unknown
  misc_feature (1)..( 8): Result.003 file - promoters60/4915384
aaaaatga

SEQ ID NO: 144846 - DNA, 8 bp, Unknown
  misc_feature (1)..( 8): Result.003 file - promoters60/4915384
aaatttgt

SEQ ID NO: 144847 - DNA, 8 bp, Unknown
  misc_feature (1)..( 8): Result.003 file - promoters60/4915384
agatttgt

SEQ ID NO: 144848 - DNA, 8 bp, Unknown
  misc_feature (1)..( 8): Result.003 file - promoters60/4915384
aaatatgt

SEQ ID NO: 144849 - DNA, 8 bp, Unknown
  misc_feature (1)..( 8): Result.003 file - promoters60/4915384
ataagaga

SEQ ID NO: 144850 - DNA, 8 bp, Unknown
  misc_feature (1)..( 8): Result.003 file - promoters60/4915384
tcaagaga

SEQ ID NO: 144851 - DNA, 8 bp, Unknown
  misc_feature (1)..( 8): Result.003 file - promoters60/4915384
ttaagaga

SEQ ID NO: 144852 - DNA, 8 bp, Unknown
  misc_feature (1)..( 8): Result.003 file - promoters60/4915384
ttaagaat

SEQ ID NO: 144853 - DNA, 10 bp, Unknown
  misc_feature (1)..( 10): Result.003 file - promoters60/4915384
atttgattat

SEQ ID NO: 144854 - DNA, 10 bp, Unknown
  misc_feature (1)..( 10): Result.003 file - promoters60/4915384
attttatttt

SEQ ID NO: 144855 - DNA, 10 bp, Unknown
  misc_feature (1)..( 10): Result.003 file - promoters60/4915384
ggtttatttt

SEQ ID NO: 144856 - DNA, 11 bp, Unknown
  misc_feature (1)..( 11): Result.003 file - promoters60/4915409
attgttcaaac

SEQ ID NO: 144857 - DNA, 11 bp, Unknown
  misc_feature (1)..( 11): Result.003 file - promoters60/4915409
actcttcaaac

SEQ ID NO: 144858 - DNA, 11 bp, Unknown
  misc_feature (1)..( 11): Result.003 file - promoters60/4915409
atagttcaaaa

SEQ ID NO: 144859 - DNA, 11 bp, Unknown
  misc_feature (1)..( 11): Result.003 file - promoters60/4915409
atagttcacag

SEQ ID NO: 144860 - DNA, 7 bp, Unknown
  misc_feature (1)..( 7): Result.003 file - promoters60/4915409
tttgaga

SEQ ID NO: 144861 - DNA, 7 bp, Unknown
  misc_feature (1)..( 7): Result.003 file - promoters60/4915409
ttttaga

SEQ ID NO: 144862 - DNA, 7 bp, Unknown
  misc_feature (1)..( 7): Result.003 file - promoters60/4915409
ttatata

SEQ ID NO: 144863 - DNA, 7 bp, Unknown
  misc_feature (1)..( 7): Result.003 file - promoters60/4915409
ctatata

SEQ ID NO: 144864 - DNA, 12 bp, Unknown
  misc_feature (1)..( 12): Result.003 file - promoters60/4915420
ttaaaaatccaa

SEQ ID NO: 144865 - DNA, 12 bp, Unknown
  misc_feature (1)..( 12): Result.003 file - promoters60/4915420
ataaatatcctc

SEQ ID NO: 144866 - DNA, 12 bp, Unknown
  misc_feature (1)..( 12): Result.003 file - promoters60/4915420
aacaaaatccaa

SEQ ID NO: 144867 - DNA, 12 bp, Unknown
  misc_feature (1)..( 12): Result.003 file - promoters60/4915420
ttaaaaacaatt

SEQ ID NO: 144868 - DNA, 12 bp, Unknown
  misc_feature (1)..( 12): Result.003 file - promoters60/4915420
ttaaaaacattt

SEQ ID NO: 144869 - DNA, 12 bp, Unknown
  misc_feature (1)..( 12): Result.003 file - promoters60/4915420
aaaaaaagaata

SEQ ID NO: 144870 - DNA, 8 bp, Unknown
  misc_feature (1)..( 8): Result.003 file - promoters60/4915420
tattttga

SEQ ID NO: 144871 - DNA, 8 bp, Unknown
  misc_feature (1)..( 8): Result.003 file - promoters60/4915420
tattttat

SEQ ID NO: 144872 - DNA, 8 bp, Unknown
  misc_feature (1)..( 8): Result.003 file - promoters60/4915420
tattatat

SEQ ID NO: 144873 - DNA, 9 bp, Unknown
  misc_feature (1)..( 9): Result.003 file - promoters60/4915420
tatatatga

SEQ ID NO: 144874 - DNA, 9 bp, Unknown
  misc_feature (1)..( 9): Result.003 file - promoters60/4915420
tatatttta

SEQ ID NO: 144875 - DNA, 9 bp, Unknown
  misc_feature (1)..( 9): Result.003 file - promoters60/4915420
ttcatatga

SEQ ID NO: 144876 - DNA, 14 bp, Unknown
  misc_feature (1)..( 14): Result.003 file - promoters60/4915420
caacaatgtacaaa

SEQ ID NO: 144877 - DNA, 14 bp, Unknown
  misc_feature (1)..( 14): Result.003 file - promoters60/4915420
caataatttacatt

SEQ ID NO: 144878 - DNA, 14 bp, Unknown
  misc_feature (1)..( 14): Result.003 file - promoters60/4915420
acacaatatacaga

SEQ ID NO: 144879 - DNA, 14 bp, Unknown
  misc_feature (1)..( 14): Result.003 file - promoters60/4915420
atttaatttaatat

SEQ ID NO: 144880 - DNA, 14 bp, Unknown
  misc_feature (1)..( 14): Result.003 file - promoters60/4915420
acctgattttatta

SEQ ID NO: 144881 - DNA, 14 bp, Unknown
  misc_feature (1)..( 14): Result.003 file - promoters60/4915420
tgaaaatttatacg

SEQ ID NO: 144882 - DNA, 14 bp, Unknown
  misc_feature (1)..( 14): Result.003 file - promoters60/4915420
atgcaaaatacaga

SEQ ID NO: 144883 - DNA, 9 bp, Unknown
  misc_feature (1)..( 9): Result.003 file - promoters60/4915420
gttatatca

SEQ ID NO: 144884 - DNA, 9 bp, Unknown
  misc_feature (1)..( 9): Result.003 file - promoters60/4915420
tttatctca

SEQ ID NO: 144885 - DNA, 9 bp, Unknown
  misc_feature (1)..( 9): Result.003 file - promoters60/4915420
cttagatcc

SEQ ID NO: 144886 - DNA, 9 bp, Unknown
  misc_feature (1)..( 9): Result.003 file - promoters60/4915420
tttttcttt

SEQ ID NO: 144887 - DNA, 9 bp, Unknown
  misc_feature (1)..( 9): Result.003 file - promoters60/4915420
attttgttt

SEQ ID NO: 144888 - DNA, 9 bp, Unknown
  misc_feature (1)..( 9): Result.003 file - promoters60/4915420
aatttgtta

SEQ ID NO: 144889 - DNA, 13 bp, Unknown
  misc_feature (1)..( 13): Result.003 file - promoters60/4915420
aagattttttatt

SEQ ID NO: 144890 - DNA, 13 bp, Unknown
  misc_feature (1)..( 13): Result.003 file - promoters60/4915420
gagaatttttgta

SEQ ID NO: 144891 - DNA, 13 bp, Unknown
  misc_feature (1)..( 13): Result.003 file - promoters60/4915420
tatattttatatt

SEQ ID NO: 144892 - DNA, 13 bp, Unknown
  misc_feature (1)..( 13): Result.003 file - promoters60/4915420
ttgattttgacta

SEQ ID NO: 144893 - DNA, 13 bp, Unknown
  misc_feature (1)..( 13): Result.003 file - promoters60/4915420
gaaattttcatgt

SEQ ID NO: 144894 - DNA, 13 bp, Unknown
  misc_feature (1)..( 13): Result.003 file - promoters60/4915420
acatgattatatg

SEQ ID NO: 144895 - DNA, 13 bp, Unknown
  misc_feature (1)..( 13): Result.003 file - promoters60/4915420
ttcatatgagtga

SEQ ID NO: 144896 - DNA, 10 bp, Unknown
  misc_feature (1)..( 10): Result.003 file - promoters60/4915420
tatttataaa

SEQ ID NO: 144897 - DNA, 10 bp, Unknown
  misc_feature (1)..( 10): Result.003 file - promoters60/4915420
tttttttaat

SEQ ID NO: 144898 - DNA, 10 bp, Unknown
  misc_feature (1)..( 10): Result.003 file - promoters60/4915420
gattaataca

SEQ ID NO: 144899 - DNA, 10 bp, Unknown
  misc_feature (1)..( 10): Result.003 file - promoters60/4915420
gattaaattg

SEQ ID NO: 144900 - DNA, 10 bp, Unknown
  misc_feature (1)..( 10): Result.003 file - promoters60/4915420
tatttgaatt

SEQ ID NO: 144901 - DNA, 10 bp, Unknown
  misc_feature (1)..( 10): Result.003 file - promoters60/4915420
aatttataac

SEQ ID NO: 144902 - DNA, 17 bp, Unknown
  misc_feature (1)..( 17): Result.003 file - promoters60/4915606
tcatcgttaatttttga

SEQ ID NO: 144903 - DNA, 17 bp, Unknown
  misc_feature (1)..( 17): Result.003 file - promoters60/4915606
tatttgtttatttatga

SEQ ID NO: 144904 - DNA, 17 bp, Unknown
  misc_feature (1)..( 17): Result.003 file - promoters60/4915606
tactgttgaattttttt

SEQ ID NO: 144905 - DNA, 17 bp, Unknown
  misc_feature (1)..( 17): Result.003 file - promoters60/4915606
ataaagttaactttgta

SEQ ID NO: 144906 - DNA, 17 bp, Unknown
  misc_feature (1)..( 17): Result.003 file - promoters60/4915606
tatatgtttatatgacc

SEQ ID NO: 144907 - DNA, 17 bp, Unknown
  misc_feature (1)..( 17): Result.003 file - promoters60/4915606
agtatcatcacttggta

SEQ ID NO: 144908 - DNA, 17 bp, Unknown
  misc_feature (1)..( 17): Result.003 file - promoters60/4915606
tgacagtcaacttgtac

SEQ ID NO: 144909 - DNA, 17 bp, Unknown
  misc_feature (1)..( 17): Result.003 file - promoters60/4915606
tgactgttgactggttc

SEQ ID NO: 144910 - DNA, 13 bp, Unknown
  misc_feature (1)..( 13): Result.003 file - promoters60/4915606
aaatatataaatg

SEQ ID NO: 144911 - DNA, 13 bp, Unknown
  misc_feature (1)..( 13): Result.003 file - promoters60/4915606
ttagatatgaatt

SEQ ID NO: 144912 - DNA, 13 bp, Unknown
  misc_feature (1)..( 13): Result.003 file - promoters60/4915606
tccgataaaaaaa

SEQ ID NO: 144913 - DNA, 13 bp, Unknown
  misc_feature (1)..( 13): Result.003 file - promoters60/4915606
tccgttaaagtta

SEQ ID NO: 144914 - DNA, 13 bp, Unknown
  misc_feature (1)..( 13): Result.003 file - promoters60/4915606
tgagaaagaaaca

SEQ ID NO: 144915 - DNA, 13 bp, Unknown
  misc_feature (1)..( 13): Result.003 file - promoters60/4915606
atttagatggatt

SEQ ID NO: 144916 - DNA, 9 bp, Unknown
  misc_feature (1)..( 9): Result.003 file - promoters60/4915606
actttatta

SEQ ID NO: 144917 - DNA, 9 bp, Unknown
  misc_feature (1)..( 9): Result.003 file - promoters60/4915606
ccttcattt

SEQ ID NO: 144918 - DNA, 9 bp, Unknown
  misc_feature (1)..( 9): Result.003 file - promoters60/4915606
attttttta

SEQ ID NO: 144919 - DNA, 9 bp, Unknown
  misc_feature (1)..( 9): Result.003 file - promoters60/4915606
atttcattt

SEQ ID NO: 144920 - DNA, 9 bp, Unknown
  misc_feature (1)..( 9): Result.003 file - promoters60/4915606
attttattt

SEQ ID NO: 144921 - DNA, 9 bp, Unknown
  misc_feature (1)..( 9): Result.003 file - promoters60/4915606
gaattttta

SEQ ID NO: 144922 - DNA, 9 bp, Unknown
  misc_feature (1)..( 9): Result.003 file - promoters60/4915623
ccatttctg

SEQ ID NO: 144923 - DNA, 9 bp, Unknown
  misc_feature (1)..( 9): Result.003 file - promoters60/4915623
tcatatctg

SEQ ID NO: 144924 - DNA, 9 bp, Unknown
  misc_feature (1)..( 9): Result.003 file - promoters60/4915623
tcatattta

SEQ ID NO: 144925 - DNA, 8 bp, Unknown
  misc_feature (1)..( 8): Result.003 file - promoters60/4915623
tttaaatt

SEQ ID NO: 144926 - DNA, 8 bp, Unknown
  misc_feature (1)..( 8): Result.003 file - promoters60/4915623
tttacatt

SEQ ID NO: 144927 - DNA, 8 bp, Unknown
  misc_feature (1)..( 8): Result.003 file - promoters60/4915623
tttcaatc

SEQ ID NO: 144928 - DNA, 9 bp, Unknown
  misc_feature (1)..( 9): Result.003 file - promoters60/4915623
aatttattt

SEQ ID NO: 144929 - DNA, 9 bp, Unknown
  misc_feature (1)..( 9): Result.003 file - promoters60/4915623
aatctattg

SEQ ID NO: 144930 - DNA, 9 bp, Unknown
  misc_feature (1)..( 9): Result.003 file - promoters60/4915623
ttcttattt

SEQ ID NO: 144931 - DNA, 9 bp, Unknown
  misc_feature (1)..( 9): Result.003 file - promoters60/4915623
ttacattag

SEQ ID NO: 144932 - DNA, 9 bp, Unknown
  misc_feature (1)..( 9): Result.003 file - promoters60/4915623
ttatatttt

SEQ ID NO: 144933 - DNA, 9 bp, Unknown
  misc_feature (1)..( 9): Result.003 file - promoters60/4915623
taacattag

SEQ ID NO: 144934 - DNA, 8 bp, Unknown
  misc_feature (1)..( 8): Result.003 file - promoters60/4915623
ttatgatc

SEQ ID NO: 144935 - DNA, 8 bp, Unknown
  misc_feature (1)..( 8): Result.003 file - promoters60/4915623
atatcatc

SEQ ID NO: 144936 - DNA, 8 bp, Unknown
  misc_feature (1)..( 8): Result.003 file - promoters60/4915623
ttatgaac

SEQ ID NO: 144937 - DNA, 7 bp, Unknown
  misc_feature (1)..( 7): Result.003 file - promoters60/4915623
taacact

SEQ ID NO: 144938 - DNA, 7 bp, Unknown
  misc_feature (1)..( 7): Result.003 file - promoters60/4915623
aaacact

SEQ ID NO: 144939 - DNA, 7 bp, Unknown
  misc_feature (1)..( 7): Result.003 file - promoters60/4915623
aaacact

SEQ ID NO: 144940 - DNA, 9 bp, Unknown
  misc_feature (1)..( 9): Result.003 file - promoters60/4915623
caaataatt

SEQ ID NO: 144941 - DNA, 9 bp, Unknown
  misc_feature (1)..( 9): Result.003 file - promoters60/4915623
tcaataata

SEQ ID NO: 144942 - DNA, 9 bp, Unknown
  misc_feature (1)..( 9): Result.003 file - promoters60/4915623
caaataatt

SEQ ID NO: 144943 - DNA, 6 bp, Unknown
  misc_feature (1)..( 6): Result.003 file - promoters60/4915694
ctactt

SEQ ID NO: 144944 - DNA, 6 bp, Unknown
  misc_feature (1)..( 6): Result.003 file - promoters60/4915694
ctactt

SEQ ID NO: 144945 - DNA, 6 bp, Unknown
  misc_feature (1)..( 6): Result.003 file - promoters60/4915694
tttcaa

SEQ ID NO: 144946 - DNA, 6 bp, Unknown
  misc_feature (1)..( 6): Result.003 file - promoters60/4915694
tttcaa

SEQ ID NO: 144947 - DNA, 7 bp, Unknown
  misc_feature (1)..( 7): Result.003 file - promoters60/4915694
attattt

SEQ ID NO: 144948 - DNA, 7 bp, Unknown
  misc_feature (1)..( 7): Result.003 file - promoters60/4915694
atttttt

SEQ ID NO: 144949 - DNA, 7 bp, Unknown
  misc_feature (1)..( 7): Result.003 file - promoters60/4915694
atttaaa

SEQ ID NO: 144950 - DNA, 7 bp, Unknown
  misc_feature (1)..( 7): Result.003 file - promoters60/4915694
atttaaa

SEQ ID NO: 144951 - DNA, 6 bp, Unknown
  misc_feature (1)..( 6): Result.003 file - promoters60/4915694
ccaaag

SEQ ID NO: 144952 - DNA, 6 bp, Unknown
  misc_feature (1)..( 6): Result.003 file - promoters60/4915694
ccaaag

SEQ ID NO: 144953 - DNA, 8 bp, Unknown
  misc_feature (1)..( 8): Result.003 file - promoters60/4915694
aaatcttg

SEQ ID NO: 144954 - DNA, 8 bp, Unknown
  misc_feature (1)..( 8): Result.003 file - promoters60/4915694
aaatgttg

SEQ ID NO: 144955 - DNA, 8 bp, Unknown
  misc_feature (1)..( 8): Result.003 file - promoters60/4915694
ttttacgt

SEQ ID NO: 144956 - DNA, 8 bp, Unknown
  misc_feature (1)..( 8): Result.003 file - promoters60/4915694
tttaacgt

SEQ ID NO: 144957 - DNA, 6 bp, Unknown
  misc_feature (1)..( 6): Result.003 file - promoters60/4915694
tattta

SEQ ID NO: 144958 - DNA, 6 bp, Unknown
  misc_feature (1)..( 6): Result.003 file - promoters60/4915694
tattta

SEQ ID NO: 144959 - DNA, 6 bp, Unknown
  misc_feature (1)..( 6): Result.003 file - promoters60/4915694
tcaata

SEQ ID NO: 144960 - DNA, 6 bp, Unknown
  misc_feature (1)..( 6): Result.003 file - promoters60/4915694
tcaata

SEQ ID NO: 144961 - DNA, 6 bp, Unknown
  misc_feature (1)..( 6): Result.003 file - promoters60/4915694
aacaaa

SEQ ID NO: 144962 - DNA, 6 bp, Unknown
  misc_feature (1)..( 6): Result.003 file - promoters60/4915694
aacaaa

SEQ ID NO: 144963 - DNA, 8 bp, Unknown
  misc_feature (1)..( 8): Result.003 file - promoters60/4915694
aaagacaa

SEQ ID NO: 144964 - DNA, 8 bp, Unknown
  misc_feature (1)..( 8): Result.003 file - promoters60/4915694
aaaaacaa

SEQ ID NO: 144965 - DNA, 8 bp, Unknown
  misc_feature (1)..( 8): Result.003 file - promoters60/4915694
ttacaaaa

SEQ ID NO: 144966 - DNA, 8 bp, Unknown
  misc_feature (1)..( 8): Result.003 file - promoters60/4915694
ctacaaaa

SEQ ID NO: 144967 - DNA, 8 bp, Unknown
  misc_feature (1)..( 8): Result.003 file - promoters60/4915694
ctacaaga

SEQ ID NO: 144968 - DNA, 8 bp, Unknown
  misc_feature (1)..( 8): Result.003 file - promoters60/4915694
ctaaattc

SEQ ID NO: 144969 - DNA, 8 bp, Unknown
  misc_feature (1)..( 8): Result.003 file - promoters60/4915694
ctaatttc

SEQ ID NO: 144970 - DNA, 8 bp, Unknown
  misc_feature (1)..( 8): Result.003 file - promoters60/4915694
gattcaaa

SEQ ID NO: 144971 - DNA, 8 bp, Unknown
  misc_feature (1)..( 8): Result.003 file - promoters60/4915694
gatttaaa

SEQ ID NO: 144972 - DNA, 7 bp, Unknown
  misc_feature (1)..( 7): Result.003 file - promoters60/4915694
ttttcaa

SEQ ID NO: 144973 - DNA, 7 bp, Unknown
  misc_feature (1)..( 7): Result.003 file - promoters60/4915694
tttacaa

SEQ ID NO: 144974 - DNA, 6 bp, Unknown
  misc_feature (1)..( 6): Result.003 file - promoters60/4915694
gttttg

SEQ ID NO: 144975 - DNA, 6 bp, Unknown
  misc_feature (1)..( 6): Result.003 file - promoters60/4915694
gttttg

SEQ ID NO: 144976 - DNA, 7 bp, Unknown
  misc_feature (1)..( 7): Result.003 file - promoters60/4915694
aaagaaa

SEQ ID NO: 144977 - DNA, 7 bp, Unknown
  misc_feature (1)..( 7): Result.003 file - promoters60/4915694
aaataaa

SEQ ID NO: 144978 - DNA, 7 bp, Unknown
  misc_feature (1)..( 7): Result.003 file - promoters60/4915694
cacattt

SEQ ID NO: 144979 - DNA, 7 bp, Unknown
  misc_feature (1)..( 7): Result.003 file - promoters60/4915694
cactttt

SEQ ID NO: 144980 - DNA, 8 bp, Unknown
  misc_feature (1)..( 8): Result.003 file - promoters60/4915694
taacaatt

SEQ ID NO: 144981 - DNA, 8 bp, Unknown
  misc_feature (1)..( 8): Result.003 file - promoters60/4915694
taacaatt

SEQ ID NO: 144982 - DNA, 6 bp, Unknown
  misc_feature (1)..( 6): Result.003 file - promoters60/4915694
acaaaa

SEQ ID NO: 144983 - DNA, 6 bp, Unknown
  misc_feature (1)..( 6): Result.003 file - promoters60/4915694
acaaaa

SEQ ID NO: 144984 - DNA, 8 bp, Unknown
  misc_feature (1)..( 8): Result.003 file - promoters60/4915816
atttgttt

SEQ ID NO: 144985 - DNA, 8 bp, Unknown
  misc_feature (1)..( 8): Result.003 file - promoters60/4915816
atttcttt

SEQ ID NO: 144986 - DNA, 7 bp, Unknown
  misc_feature (1)..( 7): Result.003 file - promoters60/4915816
atgattg

SEQ ID NO: 144987 - DNA, 7 bp, Unknown
  misc_feature (1)..( 7): Result.003 file - promoters60/4915816
atgattt

SEQ ID NO: 144988 - DNA, 8 bp, Unknown
  misc_feature (1)..( 8): Result.003 file - promoters60/4915816
ttgaattg

SEQ ID NO: 144989 - DNA, 6 bp, Unknown
  misc_feature (1)..( 6): Result.003 file - promoters60/4915816
acatga

SEQ ID NO: 144990 - DNA, 6 bp, Unknown
  misc_feature (1)..( 6): Result.003 file - promoters60/4915816
acatga

SEQ ID NO: 144991 - DNA, 9 bp, Unknown
  misc_feature (1)..( 9): Result.003 file - promoters60/4915816
ggcaaggaa

SEQ ID NO: 144992 - DNA, 9 bp, Unknown
  misc_feature (1)..( 9): Result.003 file - promoters60/4915816
ggcgaggaa

SEQ ID NO: 144993 - DNA, 9 bp, Unknown
  misc_feature (1)..( 9): Result.003 file - promoters60/4915816
agaaacata

SEQ ID NO: 144994 - DNA, 9 bp, Unknown
  misc_feature (1)..( 9): Result.003 file - promoters60/4915816
agaatcata

SEQ ID NO: 144995 - DNA, 6 bp, Unknown
  misc_feature (1)..( 6): Result.003 file - promoters60/4915816
aggaag

SEQ ID NO: 144996 - DNA, 6 bp, Unknown
  misc_feature (1)..( 6): Result.003 file - promoters60/4915816
aggaag

SEQ ID NO: 144997 - DNA, 7 bp, Unknown
  misc_feature (1)..( 7): Result.003 file - promoters60/4915816
atatacc

SEQ ID NO: 144998 - DNA, 7 bp, Unknown
  misc_feature (1)..( 7): Result.003 file - promoters60/4915816
ataaacc

SEQ ID NO: 144999 - DNA, 8 bp, Unknown
  misc_feature (1)..( 8): Result.003 file - promoters60/4915816
taaggatt

SEQ ID NO: 145000 - DNA, 8 bp, Unknown
  misc_feature (1)..( 8): Result.003 file - promoters60/4915816
taaagatt

SEQ ID NO: 145001 - DNA, 6 bp, Unknown
  misc_feature (1)..( 6): Result.003 file - promoters60/4915816
attggg

SEQ ID NO: 145002 - DNA, 6 bp, Unknown
  misc_feature (1)..( 6): Result.003 file - promoters60/4915816
attggg

SEQ ID NO: 145003 - DNA, 6 bp, Unknown
  misc_feature (1)..( 6): Result.003 file - promoters60/4915816
ccattt

SEQ ID NO: 145004 - DNA, 6 bp, Unknown
  misc_feature (1)..( 6): Result.003 file - promoters60/4915816
ccattt

SEQ ID NO: 145005 - DNA, 7 bp, Unknown
  misc_feature (1)..( 7): Result.003 file - promoters60/4915816
aatggcg

SEQ ID NO: 145006 - DNA, 7 bp, Unknown
  misc_feature (1)..( 7): Result.003 file - promoters60/4915816
aatggcg

SEQ ID NO: 145007 - DNA, 7 bp, Unknown
  misc_feature (1)..( 7): Result.003 file - promoters60/4915816
agattgg

SEQ ID NO: 145008 - DNA, 7 bp, Unknown
  misc_feature (1)..( 7): Result.003 file - promoters60/4915816
agattgg

SEQ ID NO: 145009 - DNA, 7 bp, Unknown
  misc_feature (1)..( 7): Result.003 file - promoters60/4915816
ttttctt

SEQ ID NO: 145010 - DNA, 7 bp, Unknown
  misc_feature (1)..( 7): Result.003 file - promoters60/4915816
ttttctt

SEQ ID NO: 145011 - DNA, 6 bp, Unknown
  misc_feature (1)..( 6): Result.003 file - promoters60/4915816
aatgga

SEQ ID NO: 145012 - DNA, 6 bp, Unknown
  misc_feature (1)..( 6): Result.003 file - promoters60/4915816
aatgga

SEQ ID NO: 145013 - DNA, 6 bp, Unknown
  misc_feature (1)..( 6): Result.003 file - promoters60/4915816
aatatt

SEQ ID NO: 145014 - DNA, 6 bp, Unknown
  misc_feature (1)..( 6): Result.003 file - promoters60/4915816
aatatt

SEQ ID NO: 145015 - DNA, 8 bp, Unknown
  misc_feature (1)..( 8): Result.003 file - promoters60/4915816
gaaattag

SEQ ID NO: 145016 - DNA, 8 bp, Unknown
  misc_feature (1)..( 8): Result.003 file - promoters60/4915816
gaatttag

SEQ ID NO: 145017 - DNA, 6 bp, Unknown
  misc_feature (1)..( 6): Result.003 file - promoters60/4915816
aaaaat

SEQ ID NO: 145018 - DNA, 6 bp, Unknown
  misc_feature (1)..( 6): Result.003 file - promoters60/4915816
aaaaat

SEQ ID NO: 145019 - DNA, 6 bp, Unknown
  misc_feature (1)..( 6): Result.003 file - promoters60/4915816
aaatag

SEQ ID NO: 145020 - DNA, 6 bp, Unknown
  misc_feature (1)..( 6): Result.003 file - promoters60/4915816
aaatag

SEQ ID NO: 145021 - DNA, 6 bp, Unknown
  misc_feature (1)..( 6): Result.003 file - promoters60/4915816
atttta

SEQ ID NO: 145022 - DNA, 6 bp, Unknown
  misc_feature (1)..( 6): Result.003 file - promoters60/4915816
atttta

SEQ ID NO: 145023 - DNA, 12 bp, Unknown
  misc_feature (1)..( 12): Result.003 file - promoters60/4915819
aaagaaaaaatt

SEQ ID NO: 145024 - DNA, 12 bp, Unknown
  misc_feature (1)..( 12): Result.003 file - promoters60/4915819
aaataaaacatt

SEQ ID NO: 145025 - DNA, 12 bp, Unknown
  misc_feature (1)..( 12): Result.003 file - promoters60/4915819
aaatttaagata

SEQ ID NO: 145026 - DNA, 12 bp, Unknown
  misc_feature (1)..( 12): Result.003 file - promoters60/4915819
gtgtaaaacgtt

SEQ ID NO: 145027 - DNA, 14 bp, Unknown
  misc_feature (1)..( 14): Result.003 file - promoters60/4915819
aaaccaaacatgtt

SEQ ID NO: 145028 - DNA, 14 bp, Unknown
  misc_feature (1)..( 14): Result.003 file - promoters60/4915819
aaactaaagatgac

SEQ ID NO: 145029 - DNA, 14 bp, Unknown
  misc_feature (1)..( 14): Result.003 file - promoters60/4915819
agagaatacaagtt

SEQ ID NO: 145030 - DNA, 14 bp, Unknown
  misc_feature (1)..( 14): Result.003 file - promoters60/4915819
caataaaagccaac

SEQ ID NO: 145031 - DNA, 8 bp, Unknown
  misc_feature (1)..( 8): Result.003 file - promoters60/4915819
aatcaaac

SEQ ID NO: 145032 - DNA, 8 bp, Unknown
  misc_feature (1)..( 8): Result.003 file - promoters60/4915819
aataaaag

SEQ ID NO: 145033 - DNA, 8 bp, Unknown
  misc_feature (1)..( 8): Result.003 file - promoters60/4915819
aataaaat

SEQ ID NO: 145034 - DNA, 8 bp, Unknown
  misc_feature (1)..( 8): Result.003 file - promoters60/4915819
aatacaag

SEQ ID NO: 145035 - DNA, 10 bp, Unknown
  misc_feature (1)..( 10): Result.003 file - promoters60/4921122
aaatacgata

SEQ ID NO: 145036 - DNA, 10 bp, Unknown
  misc_feature (1)..( 10): Result.003 file - promoters60/4921122
aaatacaata

SEQ ID NO: 145037 - DNA, 10 bp, Unknown
  misc_feature (1)..( 10): Result.003 file - promoters60/4921122
aaacacatga

SEQ ID NO: 145038 - DNA, 8 bp, Unknown
  misc_feature (1)..( 8): Result.003 file - promoters60/4921122
cacgaggc

SEQ ID NO: 145039 - DNA, 8 bp, Unknown
  misc_feature (1)..( 8): Result.003 file - promoters60/4921122
cacaaggc

SEQ ID NO: 145040 - DNA, 8 bp, Unknown
  misc_feature (1)..( 8): Result.003 file - promoters60/4921122
cacaagaa

SEQ ID NO: 145041 - DNA, 6 bp, Unknown
  misc_feature (1)..( 6): Result.003 file - promoters60/4921291
acattt

SEQ ID NO: 145042 - DNA, 6 bp, Unknown
  misc_feature (1)..( 6): Result.003 file - promoters60/4921291
acattt

SEQ ID NO: 145043 - DNA, 11 bp, Unknown
  misc_feature (1)..( 11): Result.003 file - promoters60/4921291
tcctttatgtc

SEQ ID NO: 145044 - DNA, 11 bp, Unknown
  misc_feature (1)..( 11): Result.003 file - promoters60/4921291
tctgatatgtc

SEQ ID NO: 145045 - DNA, 11 bp, Unknown
  misc_feature (1)..( 11): Result.003 file - promoters60/4921291
tccgttatgta

SEQ ID NO: 145046 - DNA, 7 bp, Unknown
  misc_feature (1)..( 7): Result.003 file - promoters60/4921291
acaataa

SEQ ID NO: 145047 - DNA, 7 bp, Unknown
  misc_feature (1)..( 7): Result.003 file - promoters60/4921291
acattaa

SEQ ID NO: 145048 - DNA, 7 bp, Unknown
  misc_feature (1)..( 7): Result.003 file - promoters60/4921291
aatttag

SEQ ID NO: 145049 - DNA, 7 bp, Unknown
  misc_feature (1)..( 7): Result.003 file - promoters60/4921291
aatgtag

SEQ ID NO: 145050 - DNA, 6 bp, Unknown
  misc_feature (1)..( 6): Result.003 file - promoters60/4921291
tctgaa

SEQ ID NO: 145051 - DNA, 6 bp, Unknown
  misc_feature (1)..( 6): Result.003 file - promoters60/4921291
tctgaa

SEQ ID NO: 145052 - DNA, 7 bp, Unknown
  misc_feature (1)..( 7): Result.003 file - promoters60/4921291
atattta

SEQ ID NO: 145053 - DNA, 7 bp, Unknown
  misc_feature (1)..( 7): Result.003 file - promoters60/4921291
ataatta

SEQ ID NO: 145054 - DNA, 7 bp, Unknown
  misc_feature (1)..( 7): Result.003 file - promoters60/4921291
caaaatt

SEQ ID NO: 145055 - DNA, 7 bp, Unknown
  misc_feature (1)..( 7): Result.003 file - promoters60/4921291
caagatt

SEQ ID NO: 145056 - DNA, 7 bp, Unknown
  misc_feature (1)..( 7): Result.003 file - promoters60/4921291
ttcataa

SEQ ID NO: 145057 - DNA, 7 bp, Unknown
  misc_feature (1)..( 7): Result.003 file - promoters60/4921291
ttcataa

SEQ ID NO: 145058 - DNA, 8 bp, Unknown
  misc_feature (1)..( 8): Result.003 file - promoters60/4921291
ttttcctt

SEQ ID NO: 145059 - DNA, 8 bp, Unknown
  misc_feature (1)..( 8): Result.003 file - promoters60/4921291
ttttactt

SEQ ID NO: 145060 - DNA, 7 bp, Unknown
  misc_feature (1)..( 7): Result.003 file - promoters60/4921291
acgcact

SEQ ID NO: 145061 - DNA, 7 bp, Unknown
  misc_feature (1)..( 7): Result.003 file - promoters60/4921291
acgaact

SEQ ID NO: 145062 - DNA, 7 bp, Unknown
  misc_feature (1)..( 7): Result.003 file - promoters60/4921291
tatctcg

SEQ ID NO: 145063 - DNA, 7 bp, Unknown
  misc_feature (1)..( 7): Result.003 file - promoters60/4921291
tatgtcg

SEQ ID NO: 145064 - DNA, 8 bp, Unknown
  misc_feature (1)..( 8): Result.003 file - promoters60/4921291
attttcac

SEQ ID NO: 145065 - DNA, 8 bp, Unknown
  misc_feature (1)..( 8): Result.003 file - promoters60/4921291
atttgcac

SEQ ID NO: 145066 - DNA, 7 bp, Unknown
  misc_feature (1)..( 7): Result.003 file - promoters60/4921291
ttaatat

SEQ ID NO: 145067 - DNA, 7 bp, Unknown
  misc_feature (1)..( 7): Result.003 file - promoters60/4921291
ttaatat

SEQ ID NO: 145068 - DNA, 6 bp, Unknown
  misc_feature (1)..( 6): Result.003 file - promoters60/4921291
aatata

SEQ ID NO: 145069 - DNA, 6 bp, Unknown
  misc_feature (1)..( 6): Result.003 file - promoters60/4921291
aatata

SEQ ID NO: 145070 - DNA, 7 bp, Unknown
  misc_feature (1)..( 7): Result.003 file - promoters60/4921291
tgactaa

SEQ ID NO: 145071 - DNA, 7 bp, Unknown
  misc_feature (1)..( 7): Result.003 file - promoters60/4921291
tgattaa

SEQ ID NO: 145072 - DNA, 6 bp, Unknown
  misc_feature (1)..( 6): Result.003 file - promoters60/4921291
atttat

SEQ ID NO: 145073 - DNA, 6 bp, Unknown
  misc_feature (1)..( 6): Result.003 file - promoters60/4921291
atttat

SEQ ID NO: 145074 - DNA, 7 bp, Unknown
  misc_feature (1)..( 7): Result.003 file - promoters60/4921291
tttattt

SEQ ID NO: 145075 - DNA, 7 bp, Unknown
  misc_feature (1)..( 7): Result.003 file - promoters60/4921291
tttgttt

SEQ ID NO: 145076 - DNA, 8 bp, Unknown
  misc_feature (1)..( 8): Result.003 file - promoters60/4921291
taagtata

SEQ ID NO: 145077 - DNA, 8 bp, Unknown
  misc_feature (1)..( 8): Result.003 file - promoters60/4921291
taaatata

SEQ ID NO: 145078 - DNA, 7 bp, Unknown
  misc_feature (1)..( 7): Result.003 file - promoters60/4921373
atgctta

SEQ ID NO: 145079 - DNA, 7 bp, Unknown
  misc_feature (1)..( 7): Result.003 file - promoters60/4921373
atgatta

SEQ ID NO: 145080 - DNA, 6 bp, Unknown
  misc_feature (1)..( 6): Result.003 file - promoters60/4921373
attaca

SEQ ID NO: 145081 - DNA, 6 bp, Unknown
  misc_feature (1)..( 6): Result.003 file - promoters60/4921373
attaca

SEQ ID NO: 145082 - DNA, 7 bp, Unknown
  misc_feature (1)..( 7): Result.003 file - promoters60/4921373
aattata

SEQ ID NO: 145083 - DNA, 7 bp, Unknown
  misc_feature (1)..( 7): Result.003 file - promoters60/4921373
gattata

SEQ ID NO: 145084 - DNA, 7 bp, Unknown
  misc_feature (1)..( 7): Result.003 file - promoters60/4921373
aataata

SEQ ID NO: 145085 - DNA, 8 bp, Unknown
  misc_feature (1)..( 8): Result.003 file - promoters60/4921373
aaagctta

SEQ ID NO: 145086 - DNA, 8 bp, Unknown
  misc_feature (1)..( 8): Result.003 file - promoters60/4921373
aaagatta

SEQ ID NO: 145087 - DNA, 7 bp, Unknown
  misc_feature (1)..( 7): Result.003 file - promoters60/4921373
aaaagtg

SEQ ID NO: 145088 - DNA, 7 bp, Unknown
  misc_feature (1)..( 7): Result.003 file - promoters60/4921373
aaacgtg

SEQ ID NO: 145089 - DNA, 7 bp, Unknown
  misc_feature (1)..( 7): Result.003 file - promoters60/4921373
tttcatt

SEQ ID NO: 145090 - DNA, 7 bp, Unknown
  misc_feature (1)..( 7): Result.003 file - promoters60/4921373
ttttatt

SEQ ID NO: 145091 - DNA, 6 bp, Unknown
  misc_feature (1)..( 6): Result.003 file - promoters60/4921373
ttcaaa

SEQ ID NO: 145092 - DNA, 6 bp, Unknown
  misc_feature (1)..( 6): Result.003 file - promoters60/4921373
ttcaaa

SEQ ID NO: 145093 - DNA, 9 bp, Unknown
  misc_feature (1)..( 9): Result.003 file - promoters60/4921373
ctataaata

SEQ ID NO: 145094 - DNA, 9 bp, Unknown
  misc_feature (1)..( 9): Result.003 file - promoters60/4921373
ctataaata

SEQ ID NO: 145095 - DNA, 9 bp, Unknown
  misc_feature (1)..( 9): Result.003 file - promoters60/4921373
ctataaaac

SEQ ID NO: 145096 - DNA, 6 bp, Unknown
  misc_feature (1)..( 6): Result.003 file - promoters60/4921373
agtata

SEQ ID NO: 145097 - DNA, 6 bp, Unknown
  misc_feature (1)..( 6): Result.003 file - promoters60/4921373
agtata

SEQ ID NO: 145098 - DNA, 8 bp, Unknown
  misc_feature (1)..( 8): Result.003 file - promoters60/4921373
agttaatt

SEQ ID NO: 145099 - DNA, 8 bp, Unknown
  misc_feature (1)..( 8): Result.003 file - promoters60/4921373
agttgatt

SEQ ID NO: 145100 - DNA, 6 bp, Unknown
  misc_feature (1)..( 6): Result.003 file - promoters60/4921373
taaaag

SEQ ID NO: 145101 - DNA, 6 bp, Unknown
  misc_feature (1)..( 6): Result.003 file - promoters60/4921373
taaaag

SEQ ID NO: 145102 - DNA, 8 bp, Unknown
  misc_feature (1)..( 8): Result.003 file - promoters60/4921373
atgaattt

SEQ ID NO: 145103 - DNA, 8 bp, Unknown
  misc_feature (1)..( 8): Result.003 file - promoters60/4921373
atgacttt

SEQ ID NO: 145104 - DNA, 7 bp, Unknown
  misc_feature (1)..( 7): Result.003 file - promoters60/4921373
tttatgt

SEQ ID NO: 145105 - DNA, 7 bp, Unknown
  misc_feature (1)..( 7): Result.003 file - promoters60/4921373
tttatgt

SEQ ID NO: 145106 - DNA, 6 bp, Unknown
  misc_feature (1)..( 6): Result.003 file - promoters60/4921373
tatatt

SEQ ID NO: 145107 - DNA, 6 bp, Unknown
  misc_feature (1)..( 6): Result.003 file - promoters60/4921373
tatatt

SEQ ID NO: 145108 - DNA, 6 bp, Unknown
  misc_feature (1)..( 6): Result.003 file - promoters60/4921373
tctaaa

SEQ ID NO: 145109 - DNA, 6 bp, Unknown
  misc_feature (1)..( 6): Result.003 file - promoters60/4921373
tctaaa

SEQ ID NO: 145110 - DNA, 10 bp, Unknown
  misc_feature (1)..( 10): Result.003 file - promoters60/4921381
aaaaattgaa

SEQ ID NO: 145111 - DNA, 10 bp, Unknown
  misc_feature (1)..( 10): Result.003 file - promoters60/4921381
aaatatttta

SEQ ID NO: 145112 - DNA, 10 bp, Unknown
  misc_feature (1)..( 10): Result.003 file - promoters60/4921381
tcaaattgaa

SEQ ID NO: 145113 - DNA, 10 bp, Unknown
  misc_feature (1)..( 10): Result.003 file - promoters60/4921381
aaatatcaga

SEQ ID NO: 145114 - DNA, 8 bp, Unknown
  misc_feature (1)..( 8): Result.003 file - promoters60/4921433
cagatttt

SEQ ID NO: 145115 - DNA, 8 bp, Unknown
  misc_feature (1)..( 8): Result.003 file - promoters60/4921433
cagattac

SEQ ID NO: 145116 - DNA, 8 bp, Unknown
  misc_feature (1)..( 8): Result.003 file - promoters60/4921433
aagatttt

SEQ ID NO: 145117 - DNA, 8 bp, Unknown
  misc_feature (1)..( 8): Result.003 file - promoters60/4921433
cagattga

SEQ ID NO: 145118 - DNA, 9 bp, Unknown
  misc_feature (1)..( 9): Result.003 file - promoters60/4921433
aaattgaaa

SEQ ID NO: 145119 - DNA, 9 bp, Unknown
  misc_feature (1)..( 9): Result.003 file - promoters60/4921433
gaatttaaa

SEQ ID NO: 145120 - DNA, 9 bp, Unknown
  misc_feature (1)..( 9): Result.003 file - promoters60/4921433
gaattttgg

SEQ ID NO: 145121 - DNA, 9 bp, Unknown
  misc_feature (1)..( 9): Result.003 file - promoters60/4921433
ggttttaag

SEQ ID NO: 145122 - DNA, 13 bp, Unknown
  misc_feature (1)..( 13): Result.003 file - promoters60/4921433
atggagaggaaga

SEQ ID NO: 145123 - DNA, 13 bp, Unknown
  misc_feature (1)..( 13): Result.003 file - promoters60/4921433
gcacagatgaatt

SEQ ID NO: 145124 - DNA, 13 bp, Unknown
  misc_feature (1)..( 13): Result.003 file - promoters60/4921433
atgtagaggggct

SEQ ID NO: 145125 - DNA, 13 bp, Unknown
  misc_feature (1)..( 13): Result.003 file - promoters60/4921433
ttaaggataaatt

SEQ ID NO: 145126 - DNA, 13 bp, Unknown
  misc_feature (1)..( 13): Result.003 file - promoters60/4921433
gaagtcatgaata

SEQ ID NO: 145127 - DNA, 12 bp, Unknown
  misc_feature (1)..( 12): Result.003 file - promoters60/4921433
aaaaaaaataac

SEQ ID NO: 145128 - DNA, 12 bp, Unknown
  misc_feature (1)..( 12): Result.003 file - promoters60/4921433
gtgaaaaatcgt

SEQ ID NO: 145129 - DNA, 12 bp, Unknown
  misc_feature (1)..( 12): Result.003 file - promoters60/4921433
ggtcaaaataat

SEQ ID NO: 145130 - DNA, 12 bp, Unknown
  misc_feature (1)..( 12): Result.003 file - promoters60/4921433
ggtcaagataca

SEQ ID NO: 145131 - DNA, 8 bp, Unknown
  misc_feature (1)..( 8): Result.003 file - promoters60/4934904
gagctctc

SEQ ID NO: 145132 - DNA, 8 bp, Unknown
  misc_feature (1)..( 8): Result.003 file - promoters60/4934904
cagctctc

SEQ ID NO: 145133 - DNA, 8 bp, Unknown
  misc_feature (1)..( 8): Result.003 file - promoters60/4934904
gagctccg

SEQ ID NO: 145134 - DNA, 8 bp, Unknown
  misc_feature (1)..( 8): Result.003 file - promoters60/4934904
acagctct

SEQ ID NO: 145135 - DNA, 8 bp, Unknown
  misc_feature (1)..( 8): Result.003 file - promoters60/4934904
acatctca

SEQ ID NO: 145136 - DNA, 8 bp, Unknown
  misc_feature (1)..( 8): Result.003 file - promoters60/4934904
gtatctca

SEQ ID NO: 145137 - DNA, 13 bp, Unknown
  misc_feature (1)..( 13): Result.003 file - promoters60/4934904
tctggggaatcgg

SEQ ID NO: 145138 - DNA, 13 bp, Unknown
  misc_feature (1)..( 13): Result.003 file - promoters60/4934904
tctgggaaatcgg

SEQ ID NO: 145139 - DNA, 13 bp, Unknown
  misc_feature (1)..( 13): Result.003 file - promoters60/4934904
atgcggaaattaa

SEQ ID NO: 145140 - DNA, 6 bp, Unknown
  misc_feature (1)..( 6): Result.003 file - promoters60/4934904
tttcaa

SEQ ID NO: 145141 - DNA, 6 bp, Unknown
  misc_feature (1)..( 6): Result.003 file - promoters60/4934904
tttcaa

SEQ ID NO: 145142 - DNA, 6 bp, Unknown
  misc_feature (1)..( 6): Result.003 file - promoters60/4934904
tttcaa

SEQ ID NO: 145143 - DNA, 6 bp, Unknown
  misc_feature (1)..( 6): Result.003 file - promoters60/4934904
ggaaat

SEQ ID NO: 145144 - DNA, 6 bp, Unknown
  misc_feature (1)..( 6): Result.003 file - promoters60/4934904
ggaaat

SEQ ID NO: 145145 - DNA, 6 bp, Unknown
  misc_feature (1)..( 6): Result.003 file - promoters60/4934904
ggaaat

SEQ ID NO: 145146 - DNA, 9 bp, Unknown
  misc_feature (1)..( 9): Result.003 file - promoters60/4938731
aattaaaaa

SEQ ID NO: 145147 - DNA, 9 bp, Unknown
  misc_feature (1)..( 9): Result.003 file - promoters60/4938731
cattaaagc

SEQ ID NO: 145148 - DNA, 9 bp, Unknown
  misc_feature (1)..( 9): Result.003 file - promoters60/4938731
ttttaaaaa

SEQ ID NO: 145149 - DNA, 9 bp, Unknown
  misc_feature (1)..( 9): Result.003 file - promoters60/4938731
atttaaacc

SEQ ID NO: 145150 - DNA, 9 bp, Unknown
  misc_feature (1)..( 9): Result.003 file - promoters60/4938731
cgttaaagc

SEQ ID NO: 145151 - DNA, 9 bp, Unknown
  misc_feature (1)..( 9): Result.003 file - promoters60/4938731
taataaatc

SEQ ID NO: 145152 - DNA, 10 bp, Unknown
  misc_feature (1)..( 10): Result.003 file - promoters60/4938731
ctatatataa

SEQ ID NO: 145153 - DNA, 10 bp, Unknown
  misc_feature (1)..( 10): Result.003 file - promoters60/4938731
ttataaatat

SEQ ID NO: 145154 - DNA, 10 bp, Unknown
  misc_feature (1)..( 10): Result.003 file - promoters60/4938731
atataataca

SEQ ID NO: 145155 - DNA, 10 bp, Unknown
  misc_feature (1)..( 10): Result.003 file - promoters60/4938731
ttataaataa

SEQ ID NO: 145156 - DNA, 10 bp, Unknown
  misc_feature (1)..( 10): Result.003 file - promoters60/4938731
ttaaaaaagc

SEQ ID NO: 145157 - DNA, 10 bp, Unknown
  misc_feature (1)..( 10): Result.003 file - promoters60/4938731
gtataaataa

SEQ ID NO: 145158 - DNA, 10 bp, Unknown
  misc_feature (1)..( 10): Result.003 file - promoters60/4938731
atataaatag

SEQ ID NO: 145159 - DNA, 16 bp, Unknown
  misc_feature (1)..( 16): Result.003 file - promoters60/4938731
ttctatttctatgtgt

SEQ ID NO: 145160 - DNA, 16 bp, Unknown
  misc_feature (1)..( 16): Result.003 file - promoters60/4938731
aaacctttttataatc

SEQ ID NO: 145161 - DNA, 16 bp, Unknown
  misc_feature (1)..( 16): Result.003 file - promoters60/4938731
acagctttctatgtct

SEQ ID NO: 145162 - DNA, 16 bp, Unknown
  misc_feature (1)..( 16): Result.003 file - promoters60/4938731
cattatttcttaaatt

SEQ ID NO: 145163 - DNA, 16 bp, Unknown
  misc_feature (1)..( 16): Result.003 file - promoters60/4938731
tgttatttgagttatg

SEQ ID NO: 145164 - DNA, 16 bp, Unknown
  misc_feature (1)..( 16): Result.003 file - promoters60/4938731
cataattttgcacgtg

SEQ ID NO: 145165 - DNA, 12 bp, Unknown
  misc_feature (1)..( 12): Result.003 file - promoters60/4938731
cgattcatcttc

SEQ ID NO: 145166 - DNA, 12 bp, Unknown
  misc_feature (1)..( 12): Result.003 file - promoters60/4938731
tttttcttcttc

SEQ ID NO: 145167 - DNA, 12 bp, Unknown
  misc_feature (1)..( 12): Result.003 file - promoters60/4938731
tgatttatccta

SEQ ID NO: 145168 - DNA, 12 bp, Unknown
  misc_feature (1)..( 12): Result.003 file - promoters60/4938731
ctatttatttcc

SEQ ID NO: 145169 - DNA, 12 bp, Unknown
  misc_feature (1)..( 12): Result.003 file - promoters60/4938731
tgagttatgtga

SEQ ID NO: 145170 - DNA, 12 bp, Unknown
  misc_feature (1)..( 12): Result.003 file - promoters60/4938731
cattatttctta

SEQ ID NO: 145171 - DNA, 6 bp, Unknown
  misc_feature (1)..( 6): Result.003 file - promoters60/4943425
taaaag

SEQ ID NO: 145172 - DNA, 6 bp, Unknown
  misc_feature (1)..( 6): Result.003 file - promoters60/4943425
taaaag

SEQ ID NO: 145173 - DNA, 8 bp, Unknown
  misc_feature (1)..( 8): Result.003 file - promoters60/4943425
ctgtcaaa

SEQ ID NO: 145174 - DNA, 8 bp, Unknown
  misc_feature (1)..( 8): Result.003 file - promoters60/4943425
ctgtaaaa

SEQ ID NO: 145175 - DNA, 6 bp, Unknown
  misc_feature (1)..( 6): Result.003 file - promoters60/4943425
ggtggt

SEQ ID NO: 145176 - DNA, 6 bp, Unknown
  misc_feature (1)..( 6): Result.003 file - promoters60/4943425
ggtggt

SEQ ID NO: 145177 - DNA, 6 bp, Unknown
  misc_feature (1)..( 6): Result.003 file - promoters60/4943425
ttgagt

SEQ ID NO: 145178 - DNA, 6 bp, Unknown
  misc_feature (1)..( 6): Result.003 file - promoters60/4943425
ttgagt

SEQ ID NO: 145179 - DNA, 7 bp, Unknown
  misc_feature (1)..( 7): Result.003 file - promoters60/4943425
ttttatt

SEQ ID NO: 145180 - DNA, 7 bp, Unknown
  misc_feature (1)..( 7): Result.003 file - promoters60/4943425
tttgatt

SEQ ID NO: 145181 - DNA, 6 bp, Unknown
  misc_feature (1)..( 6): Result.003 file - promoters60/4943425
tcaaaa

SEQ ID NO: 145182 - DNA, 6 bp, Unknown
  misc_feature (1)..( 6): Result.003 file - promoters60/4943425
tcaaaa

SEQ ID NO: 145183 - DNA, 8 bp, Unknown
  misc_feature (1)..( 8): Result.003 file - promoters60/4943425
ctctcgtt

SEQ ID NO: 145184 - DNA, 8 bp, Unknown
  misc_feature (1)..( 8): Result.003 file - promoters60/4943425
ctcttgtt

SEQ ID NO: 145185 - DNA, 7 bp, Unknown
  misc_feature (1)..( 7): Result.003 file - promoters60/4943425
atggtaa

SEQ ID NO: 145186 - DNA, 7 bp, Unknown
  misc_feature (1)..( 7): Result.003 file - promoters60/4943425
atgataa

SEQ ID NO: 145187 - DNA, 7 bp, Unknown
  misc_feature (1)..( 7): Result.003 file - promoters60/4943425
aacctgt

SEQ ID NO: 145188 - DNA, 7 bp, Unknown
  misc_feature (1)..( 7): Result.003 file - promoters60/4943425
aacttgt

SEQ ID NO: 145189 - DNA, 8 bp, Unknown
  misc_feature (1)..( 8): Result.003 file - promoters60/4943425
ttggatat

SEQ ID NO: 145190 - DNA, 8 bp, Unknown
  misc_feature (1)..( 8): Result.003 file - promoters60/4943425
ttgcatat

SEQ ID NO: 145191 - DNA, 8 bp, Unknown
  misc_feature (1)..( 8): Result.003 file - promoters60/4943425
tgttatgc

SEQ ID NO: 145192 - DNA, 8 bp, Unknown
  misc_feature (1)..( 8): Result.003 file - promoters60/4943425
tgttttgc

SEQ ID NO: 145193 - DNA, 7 bp, Unknown
  misc_feature (1)..( 7): Result.003 file - promoters60/4943425
ttgctaa

SEQ ID NO: 145194 - DNA, 7 bp, Unknown
  misc_feature (1)..( 7): Result.003 file - promoters60/4943425
ttgttaa

SEQ ID NO: 145195 - DNA, 6 bp, Unknown
  misc_feature (1)..( 6): Result.003 file - promoters60/4943425
ttcctt

SEQ ID NO: 145196 - DNA, 6 bp, Unknown
  misc_feature (1)..( 6): Result.003 file - promoters60/4943425
ttcctt

SEQ ID NO: 145197 - DNA, 6 bp, Unknown
  misc_feature (1)..( 6): Result.003 file - promoters60/4943425
aagaga

SEQ ID NO: 145198 - DNA, 6 bp, Unknown
  misc_feature (1)..( 6): Result.003 file - promoters60/4943425
aagaga

SEQ ID NO: 145199 - DNA, 7 bp, Unknown
  misc_feature (1)..( 7): Result.003 file - promoters60/4943425
aaggaag

SEQ ID NO: 145200 - DNA, 7 bp, Unknown
  misc_feature (1)..( 7): Result.003 file - promoters60/4943425
aagaaag

SEQ ID NO: 145201 - DNA, 12 bp, Unknown
  misc_feature (1)..( 12): Result.003 file - promoters60/4943637
tcggtttaaaag

SEQ ID NO: 145202 - DNA, 12 bp, Unknown
  misc_feature (1)..( 12): Result.003 file - promoters60/4943637
aatgtttgaaac

SEQ ID NO: 145203 - DNA, 12 bp, Unknown
  misc_feature (1)..( 12): Result.003 file - promoters60/4943637
ttggtctaaata

SEQ ID NO: 145204 - DNA, 12 bp, Unknown
  misc_feature (1)..( 12): Result.003 file - promoters60/4943637
ttagtttgttct

SEQ ID NO: 145205 - DNA, 8 bp, Unknown
  misc_feature (1)..( 8): Result.003 file - promoters60/4943637
tgagaaag

SEQ ID NO: 145206 - DNA, 8 bp, Unknown
  misc_feature (1)..( 8): Result.003 file - promoters60/4943637
aaagaaag

SEQ ID NO: 145207 - DNA, 8 bp, Unknown
  misc_feature (1)..( 8): Result.003 file - promoters60/4943637
tgagaaaa

SEQ ID NO: 145208 - DNA, 10 bp, Unknown
  misc_feature (1)..( 10): Result.003 file - promoters60/4943637
ggtctggtct

SEQ ID NO: 145209 - DNA, 12 bp, Unknown
  misc_feature (1)..( 12): Result.003 file - promoters60/4943637
ttagtttggtct

SEQ ID NO: 145210 - DNA, 12 bp, Unknown
  misc_feature (1)..( 12): Result.003 file - promoters60/4943637
ttagtttgttct

SEQ ID NO: 145211 - DNA, 7 bp, Unknown
  misc_feature (1)..( 7): Result.003 file - promoters60/4943637
tattttt

SEQ ID NO: 145212 - DNA, 7 bp, Unknown
  misc_feature (1)..( 7): Result.003 file - promoters60/4943637
tattttg

SEQ ID NO: 145213 - DNA, 7 bp, Unknown
  misc_feature (1)..( 7): Result.003 file - promoters60/4943637
aattttt

SEQ ID NO: 145214 - DNA, 12 bp, Unknown
  misc_feature (1)..( 12): Result.003 file - promoters60/4943637
gaggtttgtacc

SEQ ID NO: 145215 - DNA, 12 bp, Unknown
  misc_feature (1)..( 12): Result.003 file - promoters60/4943637
ttagtttgttct

SEQ ID NO: 145216 - DNA, 12 bp, Unknown
  misc_feature (1)..( 12): Result.003 file - promoters60/4943637
ttagtttggtct

SEQ ID NO: 145217 - DNA, 10 bp, Unknown
  misc_feature (1)..( 10): Result.003 file - promoters60/4943637
taaatttgct

SEQ ID NO: 145218 - DNA, 10 bp, Unknown
  misc_feature (1)..( 10): Result.003 file - promoters60/4943637
taaatttaaa

SEQ ID NO: 145219 - DNA, 10 bp, Unknown
  misc_feature (1)..( 10): Result.003 file - promoters60/4943637
tgaatctgct

SEQ ID NO: 145220 - DNA, 11 bp, Unknown
  misc_feature (1)..( 11): Result.003 file - promoters60/4949707
attaaaataag

SEQ ID NO: 145221 - DNA, 11 bp, Unknown
  misc_feature (1)..( 11): Result.003 file - promoters60/4949707
attaaaaaaat

SEQ ID NO: 145222 - DNA, 11 bp, Unknown
  misc_feature (1)..( 11): Result.003 file - promoters60/4949707
tctaaaatctt

SEQ ID NO: 145223 - DNA, 11 bp, Unknown
  misc_feature (1)..( 11): Result.003 file - promoters60/4949707
actaaaatatc

SEQ ID NO: 145224 - DNA, 12 bp, Unknown
  misc_feature (1)..( 12): Result.003 file - promoters60/4949707
tttagaaaagtc

SEQ ID NO: 145225 - DNA, 12 bp, Unknown
  misc_feature (1)..( 12): Result.003 file - promoters60/4949707
agaagaaactct

SEQ ID NO: 145226 - DNA, 11 bp, Unknown
  misc_feature (1)..( 11): Result.003 file - promoters60/4949707
taagaatagtg

SEQ ID NO: 145227 - DNA, 11 bp, Unknown
  misc_feature (1)..( 11): Result.003 file - promoters60/4949707
ttagaaaagtc

SEQ ID NO: 145228 - DNA, 11 bp, Unknown
  misc_feature (1)..( 11): Result.003 file - promoters60/4949707
ttaaaaaaatg

SEQ ID NO: 145229 - DNA, 11 bp, Unknown
  misc_feature (1)..( 11): Result.003 file - promoters60/4949707
ctaaaatcttc

SEQ ID NO: 145230 - DNA, 11 bp, Unknown
  misc_feature (1)..( 11): Result.003 file - promoters60/4949707
catcaatcttt

SEQ ID NO: 145231 - DNA, 11 bp, Unknown
  misc_feature (1)..( 11): Result.003 file - promoters60/4949707
gaagaaactct

SEQ ID NO: 145232 - DNA, 11 bp, Unknown
  misc_feature (1)..( 11): Result.003 file - promoters60/4952527
tcgtgaagcct

SEQ ID NO: 145233 - DNA, 11 bp, Unknown
  misc_feature (1)..( 11): Result.003 file - promoters60/4952527
caatgaaacct

SEQ ID NO: 145234 - DNA, 11 bp, Unknown
  misc_feature (1)..( 11): Result.003 file - promoters60/4952527
actggaaacct

SEQ ID NO: 145235 - DNA, 11 bp, Unknown
  misc_feature (1)..( 11): Result.003 file - promoters60/4952527
caatcaaataa

SEQ ID NO: 145236 - DNA, 6 bp, Unknown
  misc_feature (1)..( 6): Result.003 file - promoters60/4974495
ctaatt

SEQ ID NO: 145237 - DNA, 6 bp, Unknown
  misc_feature (1)..( 6): Result.003 file - promoters60/4974495
ctaatt

SEQ ID NO: 145238 - DNA, 7 bp, Unknown
  misc_feature (1)..( 7): Result.003 file - promoters60/4974495
gaatcag

SEQ ID NO: 145239 - DNA, 7 bp, Unknown
  misc_feature (1)..( 7): Result.003 file - promoters60/4974495
gaaacag

SEQ ID NO: 145240 - DNA, 6 bp, Unknown
  misc_feature (1)..( 6): Result.003 file - promoters60/4974495
aagaga

SEQ ID NO: 145241 - DNA, 6 bp, Unknown
  misc_feature (1)..( 6): Result.003 file - promoters60/4974495
aagaga

SEQ ID NO: 145242 - DNA, 6 bp, Unknown
  misc_feature (1)..( 6): Result.003 file - promoters60/4974495
atcata

SEQ ID NO: 145243 - DNA, 6 bp, Unknown
  misc_feature (1)..( 6): Result.003 file - promoters60/4974495
atcata

SEQ ID NO: 145244 - DNA, 7 bp, Unknown
  misc_feature (1)..( 7): Result.003 file - promoters60/4974495
tgtgttt

SEQ ID NO: 145245 - DNA, 7 bp, Unknown
  misc_feature (1)..( 7): Result.003 file - promoters60/4974495
tgtgttt

SEQ ID NO: 145246 - DNA, 11 bp, Unknown
  misc_feature (1)..( 11): Result.003 file - promoters60/4974495
cgaggaagcag

SEQ ID NO: 145247 - DNA, 11 bp, Unknown
  misc_feature (1)..( 11): Result.003 file - promoters60/4974495
ttaggatgcag

SEQ ID NO: 145248 - DNA, 11 bp, Unknown
  misc_feature (1)..( 11): Result.003 file - promoters60/4974495
ttaagatttct

SEQ ID NO: 145249 - DNA, 8 bp, Unknown
  misc_feature (1)..( 8): Result.003 file - promoters60/4974495
aatggatg

SEQ ID NO: 145250 - DNA, 8 bp, Unknown
  misc_feature (1)..( 8): Result.003 file - promoters60/4974495
aatgcatg

SEQ ID NO: 145251 - DNA, 7 bp, Unknown
  misc_feature (1)..( 7): Result.003 file - promoters60/4974495
ttgtttg

SEQ ID NO: 145252 - DNA, 7 bp, Unknown
  misc_feature (1)..( 7): Result.003 file - promoters60/4974495
ttggttg

SEQ ID NO: 145253 - DNA, 6 bp, Unknown
  misc_feature (1)..( 6): Result.003 file - promoters60/4974495
gagatg

SEQ ID NO: 145254 - DNA, 6 bp, Unknown
  misc_feature (1)..( 6): Result.003 file - promoters60/4974495
gagatg

SEQ ID NO: 145255 - DNA, 7 bp, Unknown
  misc_feature (1)..( 7): Result.003 file - promoters60/4974495
ttaatta

SEQ ID NO: 145256 - DNA, 7 bp, Unknown
  misc_feature (1)..( 7): Result.003 file - promoters60/4974495
ttattta

SEQ ID NO: 145257 - DNA, 6 bp, Unknown
  misc_feature (1)..( 6): Result.003 file - promoters60/4974495
agttca

SEQ ID NO: 145258 - DNA, 6 bp, Unknown
  misc_feature (1)..( 6): Result.003 file - promoters60/4974495
agttca

SEQ ID NO: 145259 - DNA, 7 bp, Unknown
  misc_feature (1)..( 7): Result.003 file - promoters60/4974495
ggaagaa

SEQ ID NO: 145260 - DNA, 7 bp, Unknown
  misc_feature (1)..( 7): Result.003 file - promoters60/4974495
ggaagaa

SEQ ID NO: 145261 - DNA, 7 bp, Unknown
  misc_feature (1)..( 7): Result.003 file - promoters60/4974495
aataaaa

SEQ ID NO: 145262 - DNA, 7 bp, Unknown
  misc_feature (1)..( 7): Result.003 file - promoters60/4974495
aatcaaa

SEQ ID NO: 145263 - DNA, 6 bp, Unknown
  misc_feature (1)..( 6): Result.003 file - promoters60/4974495
tgcaca

SEQ ID NO: 145264 - DNA, 6 bp, Unknown
  misc_feature (1)..( 6): Result.003 file - promoters60/4974495
tgcaca

SEQ ID NO: 145265 - DNA, 10 bp, Unknown
  misc_feature (1)..( 10): Result.003 file - promoters60/4974495
tttatccaag

SEQ ID NO: 145266 - DNA, 10 bp, Unknown
  misc_feature (1)..( 10): Result.003 file - promoters60/4974495
tttatgcaag

SEQ ID NO: 145267 - DNA, 17 bp, Unknown
  misc_feature (1)..( 17): Result.003 file - promoters60/4978201
ctcacttttatgggccg

SEQ ID NO: 145268 - DNA, 17 bp, Unknown
  misc_feature (1)..( 17): Result.003 file - promoters60/4978201
tggttacaaatgggcct

SEQ ID NO: 145269 - DNA, 17 bp, Unknown
  misc_feature (1)..( 17): Result.003 file - promoters60/4978201
ctcattttaatgggccg

SEQ ID NO: 145270 - DNA, 17 bp, Unknown
  misc_feature (1)..( 17): Result.003 file - promoters60/4978201
atatgtacaatgggctg

SEQ ID NO: 145271 - DNA, 17 bp, Unknown
  misc_feature (1)..( 17): Result.003 file - promoters60/4978201
gaattggaaataggccc

SEQ ID NO: 145272 - DNA, 17 bp, Unknown
  misc_feature (1)..( 17): Result.003 file - promoters60/4978201
gtggaaattattttatt

SEQ ID NO: 145273 - DNA, 17 bp, Unknown
  misc_feature (1)..( 17): Result.003 file - promoters60/4978201
aaattaaaaatgggtct

SEQ ID NO: 145274 - DNA, 10 bp, Unknown
  misc_feature (1)..( 10): Result.003 file - promoters60/4992383
tttcgatgta

SEQ ID NO: 145275 - DNA, 10 bp, Unknown
  misc_feature (1)..( 10): Result.003 file - promoters60/4992383
ttttgatttg

SEQ ID NO: 145276 - DNA, 10 bp, Unknown
  misc_feature (1)..( 10): Result.003 file - promoters60/4992383
ttttgatttg

SEQ ID NO: 145277 - DNA, 10 bp, Unknown
  misc_feature (1)..( 10): Result.003 file - promoters60/4992383
ctttgctttg

SEQ ID NO: 145278 - DNA, 9 bp, Unknown
  misc_feature (1)..( 9): Result.003 file - promoters60/4992383
aatttattt

SEQ ID NO: 145279 - DNA, 9 bp, Unknown
  misc_feature (1)..( 9): Result.003 file - promoters60/4992383
agtttattc

SEQ ID NO: 145280 - DNA, 9 bp, Unknown
  misc_feature (1)..( 9): Result.003 file - promoters60/4992383
aatatattt

SEQ ID NO: 145281 - DNA, 11 bp, Unknown
  misc_feature (1)..( 11): Result.003 file - promoters60/4992383
tacgtaacatg

SEQ ID NO: 145282 - DNA, 11 bp, Unknown
  misc_feature (1)..( 11): Result.003 file - promoters60/4992383
gtattaatatg

SEQ ID NO: 145283 - DNA, 11 bp, Unknown
  misc_feature (1)..( 11): Result.003 file - promoters60/4992383
tacgttacaat

SEQ ID NO: 145284 - DNA, 12 bp, Unknown
  misc_feature (1)..( 12): Result.003 file - promoters60/4992383
ttattttcagta

SEQ ID NO: 145285 - DNA, 12 bp, Unknown
  misc_feature (1)..( 12): Result.003 file - promoters60/4992383
aacttttaagta

SEQ ID NO: 145286 - DNA, 12 bp, Unknown
  misc_feature (1)..( 12): Result.003 file - promoters60/4992383
aacctttatgta

SEQ ID NO: 145287 - DNA, 8 bp, Unknown
  misc_feature (1)..( 8): Result.003 file - promoters60/4992383
tatttcta

SEQ ID NO: 145288 - DNA, 8 bp, Unknown
  misc_feature (1)..( 8): Result.003 file - promoters60/4992383
agtttcta

SEQ ID NO: 145289 - DNA, 8 bp, Unknown
  misc_feature (1)..( 8): Result.003 file - promoters60/4992383
agtatctg

SEQ ID NO: 145290 - DNA, 8 bp, Unknown
  misc_feature (1)..( 8): Result.003 file - promoters60/4992383
cttatttt

SEQ ID NO: 145291 - DNA, 8 bp, Unknown
  misc_feature (1)..( 8): Result.003 file - promoters60/4992383
tttagttt

SEQ ID NO: 145292 - DNA, 8 bp, Unknown
  misc_feature (1)..( 8): Result.003 file - promoters60/4992383
tttagtta

SEQ ID NO: 145293 - DNA, 7 bp, Unknown
  misc_feature (1)..( 7): Result.003 file - promoters60/4992383
aatattt

SEQ ID NO: 145294 - DNA, 7 bp, Unknown
  misc_feature (1)..( 7): Result.003 file - promoters60/4992383
aatgttt

SEQ ID NO: 145295 - DNA, 7 bp, Unknown
  misc_feature (1)..( 7): Result.003 file - promoters60/4992383
aatgttt

SEQ ID NO: 145296 - DNA, 7 bp, Unknown
  misc_feature (1)..( 7): Result.003 file - promoters60/4992383
actttta

SEQ ID NO: 145297 - DNA, 7 bp, Unknown
  misc_feature (1)..( 7): Result.003 file - promoters60/4992383
actttta

SEQ ID NO: 145298 - DNA, 7 bp, Unknown
  misc_feature (1)..( 7): Result.003 file - promoters60/4992383
acttttt

SEQ ID NO: 145299 - DNA, 10 bp, Unknown
  misc_feature (1)..( 10): Result.003 file - promoters60/4992383
caatttatat

SEQ ID NO: 145300 - DNA, 10 bp, Unknown
  misc_feature (1)..( 10): Result.003 file - promoters60/4992383
aaattgatat

SEQ ID NO: 145301 - DNA, 10 bp, Unknown
  misc_feature (1)..( 10): Result.003 file - promoters60/4992383
aaattgttca

SEQ ID NO: 145302 - DNA, 10 bp, Unknown
  misc_feature (1)..( 10): Result.003 file - promoters60/4992383
ataatataaa

SEQ ID NO: 145303 - DNA, 10 bp, Unknown
  misc_feature (1)..( 10): Result.003 file - promoters60/4992383
tttgtataaa

SEQ ID NO: 145304 - DNA, 10 bp, Unknown
  misc_feature (1)..( 10): Result.003 file - promoters60/4992383
tttgtttaag

SEQ ID NO: 145305 - DNA, 8 bp, Unknown
  misc_feature (1)..( 8): Result.003 file - promoters60/4992383
cggtttgg

SEQ ID NO: 145306 - DNA, 8 bp, Unknown
  misc_feature (1)..( 8): Result.003 file - promoters60/4992383
cggtttaa

SEQ ID NO: 145307 - DNA, 8 bp, Unknown
  misc_feature (1)..( 8): Result.003 file - promoters60/4992383
tggtctgg

SEQ ID NO: 145308 - DNA, 8 bp, Unknown
  misc_feature (1)..( 8): Result.003 file - promoters60/4992383
aggttaat

SEQ ID NO: 145309 - DNA, 8 bp, Unknown
  misc_feature (1)..( 8): Result.003 file - promoters60/4992383
tagttaat

SEQ ID NO: 145310 - DNA, 8 bp, Unknown
  misc_feature (1)..( 8): Result.003 file - promoters60/4992383
tagctaaa

SEQ ID NO: 145311 - DNA, 9 bp, Unknown
  misc_feature (1)..( 9): Result.003 file - promoters60/4992383
acataatat

SEQ ID NO: 145312 - DNA, 9 bp, Unknown
  misc_feature (1)..( 9): Result.003 file - promoters60/4992383
tattaatat

SEQ ID NO: 145313 - DNA, 9 bp, Unknown
  misc_feature (1)..( 9): Result.003 file - promoters60/4992383
tattgataa

SEQ ID NO: 145314 - DNA, 9 bp, Unknown
  misc_feature (1)..( 9): Result.003 file - promoters60/4992383
ttttagaaa

SEQ ID NO: 145315 - DNA, 9 bp, Unknown
  misc_feature (1)..( 9): Result.003 file - promoters60/4992383
tttaagact

SEQ ID NO: 145316 - DNA, 9 bp, Unknown
  misc_feature (1)..( 9): Result.003 file - promoters60/4992383
aattacaaa

SEQ ID NO: 145317 - DNA, 11 bp, Unknown
  misc_feature (1)..( 11): Result.003 file - promoters60/4992383
tgttttctttt

SEQ ID NO: 145318 - DNA, 11 bp, Unknown
  misc_feature (1)..( 11): Result.003 file - promoters60/4992383
tgttttgtttt

SEQ ID NO: 145319 - DNA, 11 bp, Unknown
  misc_feature (1)..( 11): Result.003 file - promoters60/4992383
gcttttgattt

SEQ ID NO: 145320 - DNA, 12 bp, Unknown
  misc_feature (1)..( 12): Result.003 file - promoters60/4992383
aaccaactaaca

SEQ ID NO: 145321 - DNA, 12 bp, Unknown
  misc_feature (1)..( 12): Result.003 file - promoters60/4992383
ttttaactaaca

SEQ ID NO: 145322 - DNA, 12 bp, Unknown
  misc_feature (1)..( 12): Result.003 file - promoters60/4992383
ttttcactaatg

SEQ ID NO: 145323 - DNA, 8 bp, Unknown
  misc_feature (1)..( 8): Result.003 file - promoters60/5003710
agaggaat

SEQ ID NO: 145324 - DNA, 8 bp, Unknown
  misc_feature (1)..( 8): Result.003 file - promoters60/5003710
agaggaat

SEQ ID NO: 145325 - DNA, 13 bp, Unknown
  misc_feature (1)..( 13): Result.003 file - promoters60/5003710
tcctttaaacatt

SEQ ID NO: 145326 - DNA, 13 bp, Unknown
  misc_feature (1)..( 13): Result.003 file - promoters60/5003710
tattcaaaacata

SEQ ID NO: 145327 - DNA, 13 bp, Unknown
  misc_feature (1)..( 13): Result.003 file - promoters60/5003710
tatacaaaatata

SEQ ID NO: 145328 - DNA, 13 bp, Unknown
  misc_feature (1)..( 13): Result.003 file - promoters60/5003710
gtttcaaacggtt

SEQ ID NO: 145329 - DNA, 13 bp, Unknown
  misc_feature (1)..( 13): Result.003 file - promoters60/5003710
tattcaaaacata

SEQ ID NO: 145330 - DNA, 13 bp, Unknown
  misc_feature (1)..( 13): Result.003 file - promoters60/5003710
tatacaaaatata

SEQ ID NO: 145331 - DNA, 12 bp, Unknown
  misc_feature (1)..( 12): Result.003 file - promoters60/5003710
ttttcttgttgt

SEQ ID NO: 145332 - DNA, 12 bp, Unknown
  misc_feature (1)..( 12): Result.003 file - promoters60/5003710
ttttcttattgt

SEQ ID NO: 145333 - DNA, 8 bp, Unknown
  misc_feature (1)..( 8): Result.003 file - promoters60/5003710
atacaaaa

SEQ ID NO: 145334 - DNA, 8 bp, Unknown
  misc_feature (1)..( 8): Result.003 file - promoters60/5003710
atagaaaa

SEQ ID NO: 145335 - DNA, 6 bp, Unknown
  misc_feature (1)..( 6): Result.003 file - promoters60/5003710
atcaca

SEQ ID NO: 145336 - DNA, 6 bp, Unknown
  misc_feature (1)..( 6): Result.003 file - promoters60/5003710
atcaca

SEQ ID NO: 145337 - DNA, 10 bp, Unknown
  misc_feature (1)..( 10): Result.003 file - promoters60/5003710
tactatttta

SEQ ID NO: 145338 - DNA, 10 bp, Unknown
  misc_feature (1)..( 10): Result.003 file - promoters60/5003710
tactttttta

SEQ ID NO: 145339 - DNA, 7 bp, Unknown
  misc_feature (1)..( 7): Result.003 file - promoters60/5003710
caaaact

SEQ ID NO: 145340 - DNA, 7 bp, Unknown
  misc_feature (1)..( 7): Result.003 file - promoters60/5003710
caaaact

SEQ ID NO: 145341 - DNA, 10 bp, Unknown
  misc_feature (1)..( 10): Result.003 file - promoters60/5003710
atatcttttc

SEQ ID NO: 145342 - DNA, 10 bp, Unknown
  misc_feature (1)..( 10): Result.003 file - promoters60/5003710
atatattttc

SEQ ID NO: 145343 - DNA, 7 bp, Unknown
  misc_feature (1)..( 7): Result.003 file - promoters60/5003710
aaaatag

SEQ ID NO: 145344 - DNA, 7 bp, Unknown
  misc_feature (1)..( 7): Result.003 file - promoters60/5003710
aaaatat

SEQ ID NO: 145345 - DNA, 7 bp, Unknown
  misc_feature (1)..( 7): Result.003 file - promoters60/5003710
aaattat

SEQ ID NO: 145346 - DNA, 9 bp, Unknown
  misc_feature (1)..( 9): Result.003 file - promoters60/5003710
aatactaca

SEQ ID NO: 145347 - DNA, 9 bp, Unknown
  misc_feature (1)..( 9): Result.003 file - promoters60/5003710
aataataca

SEQ ID NO: 145348 - DNA, 7 bp, Unknown
  misc_feature (1)..( 7): Result.003 file - promoters60/5003710
aaattat

SEQ ID NO: 145349 - DNA, 7 bp, Unknown
  misc_feature (1)..( 7): Result.003 file - promoters60/5003710
aaaatat

SEQ ID NO: 145350 - DNA, 6 bp, Unknown
  misc_feature (1)..( 6): Result.003 file - promoters60/5003710
gtggaa

SEQ ID NO: 145351 - DNA, 6 bp, Unknown
  misc_feature (1)..( 6): Result.003 file - promoters60/5003710
gtggaa

SEQ ID NO: 145352 - DNA, 7 bp, Unknown
  misc_feature (1)..( 7): Result.003 file - promoters60/5003710
tatccgt

SEQ ID NO: 145353 - DNA, 7 bp, Unknown
  misc_feature (1)..( 7): Result.003 file - promoters60/5003710
tattcgt

SEQ ID NO: 145354 - DNA, 7 bp, Unknown
  misc_feature (1)..( 7): Result.003 file - promoters60/5003710
atccaag

SEQ ID NO: 145355 - DNA, 7 bp, Unknown
  misc_feature (1)..( 7): Result.003 file - promoters60/5003710
atcaaag

SEQ ID NO: 145356 - DNA, 7 bp, Unknown
  misc_feature (1)..( 7): Result.003 file - promoters60/5003710
tttccat

SEQ ID NO: 145357 - DNA, 7 bp, Unknown
  misc_feature (1)..( 7): Result.003 file - promoters60/5003710
tttccat

SEQ ID NO: 145358 - DNA, 6 bp, Unknown
  misc_feature (1)..( 6): Result.003 file - promoters60/5003710
tatatt

SEQ ID NO: 145359 - DNA, 6 bp, Unknown
  misc_feature (1)..( 6): Result.003 file - promoters60/5003710
tatatt

SEQ ID NO: 145360 - DNA, 7 bp, Unknown
  misc_feature (1)..( 7): Result.003 file - promoters60/5003710
acaaaac

SEQ ID NO: 145361 - DNA, 7 bp, Unknown
  misc_feature (1)..( 7): Result.003 file - promoters60/5003710
acagaac

SEQ ID NO: 145362 - DNA, 6 bp, Unknown
  misc_feature (1)..( 6): Result.003 file - promoters60/5003710
gaccta

SEQ ID NO: 145363 - DNA, 6 bp, Unknown
  misc_feature (1)..( 6): Result.003 file - promoters60/5003710
gaccta

SEQ ID NO: 145364 - DNA, 9 bp, Unknown
  misc_feature (1)..( 9): Result.003 file - promoters60/5003848
tcaagaaag

SEQ ID NO: 145365 - DNA, 9 bp, Unknown
  misc_feature (1)..( 9): Result.003 file - promoters60/5003848
tcatgaaag

SEQ ID NO: 145366 - DNA, 6 bp, Unknown
  misc_feature (1)..( 6): Result.003 file - promoters60/5003848
attgtt

SEQ ID NO: 145367 - DNA, 6 bp, Unknown
  misc_feature (1)..( 6): Result.003 file - promoters60/5003848
attgtt

SEQ ID NO: 145368 - DNA, 8 bp, Unknown
  misc_feature (1)..( 8): Result.003 file - promoters60/5003848
ctaagttt

SEQ ID NO: 145369 - DNA, 8 bp, Unknown
  misc_feature (1)..( 8): Result.003 file - promoters60/5003848
ctaaattt

SEQ ID NO: 145370 - DNA, 7 bp, Unknown
  misc_feature (1)..( 7): Result.003 file - promoters60/5003848
ttttgag

SEQ ID NO: 145371 - DNA, 7 bp, Unknown
  misc_feature (1)..( 7): Result.003 file - promoters60/5003848
tttggag

SEQ ID NO: 145372 - DNA, 7 bp, Unknown
  misc_feature (1)..( 7): Result.003 file - promoters60/5003848
gagtgta

SEQ ID NO: 145373 - DNA, 7 bp, Unknown
  misc_feature (1)..( 7): Result.003 file - promoters60/5003848
gagtgta

SEQ ID NO: 145374 - DNA, 6 bp, Unknown
  misc_feature (1)..( 6): Result.003 file - promoters60/5003848
gaacca

SEQ ID NO: 145375 - DNA, 6 bp, Unknown
  misc_feature (1)..( 6): Result.003 file - promoters60/5003848
gaacca

SEQ ID NO: 145376 - DNA, 7 bp, Unknown
  misc_feature (1)..( 7): Result.003 file - promoters60/5003848
tagaaag

SEQ ID NO: 145377 - DNA, 7 bp, Unknown
  misc_feature (1)..( 7): Result.003 file - promoters60/5003848
tagcaag

SEQ ID NO: 145378 - DNA, 7 bp, Unknown
  misc_feature (1)..( 7): Result.003 file - promoters60/5003848
gttctga

SEQ ID NO: 145379 - DNA, 7 bp, Unknown
  misc_feature (1)..( 7): Result.003 file - promoters60/5003848
gttgtga

SEQ ID NO: 145380 - DNA, 6 bp, Unknown
  misc_feature (1)..( 6): Result.003 file - promoters60/5003848
tagtca

SEQ ID NO: 145381 - DNA, 6 bp, Unknown
  misc_feature (1)..( 6): Result.003 file - promoters60/5003848
tagtca

SEQ ID NO: 145382 - DNA, 8 bp, Unknown
  misc_feature (1)..( 8): Result.003 file - promoters60/5003848
tcaaaacc

SEQ ID NO: 145383 - DNA, 8 bp, Unknown
  misc_feature (1)..( 8): Result.003 file - promoters60/5003848
tcacaacc

SEQ ID NO: 145384 - DNA, 8 bp, Unknown
  misc_feature (1)..( 8): Result.003 file - promoters60/5003848
tttgtttt

SEQ ID NO: 145385 - DNA, 8 bp, Unknown
  misc_feature (1)..( 8): Result.003 file - promoters60/5003848
tttgtttt

SEQ ID NO: 145386 - DNA, 6 bp, Unknown
  misc_feature (1)..( 6): Result.003 file - promoters60/5003848
ctttga

SEQ ID NO: 145387 - DNA, 6 bp, Unknown
  misc_feature (1)..( 6): Result.003 file - promoters60/5003848
ctttga

SEQ ID NO: 145388 - DNA, 14 bp, Unknown
  misc_feature (1)..( 14): Result.003 file - promoters60/5662739
caaaaagaaaaaaa

SEQ ID NO: 145389 - DNA, 14 bp, Unknown
  misc_feature (1)..( 14): Result.003 file - promoters60/5662739
tttacccaaaaaat

SEQ ID NO: 145390 - DNA, 14 bp, Unknown
  misc_feature (1)..( 14): Result.003 file - promoters60/5662739
gagaaggaaaaaag

SEQ ID NO: 145391 - DNA, 14 bp, Unknown
  misc_feature (1)..( 14): Result.003 file - promoters60/5662739
aagaagaaaaaaaa

SEQ ID NO: 145392 - DNA, 14 bp, Unknown
  misc_feature (1)..( 14): Result.003 file - promoters60/5662739
aaaaagagaaaaca

SEQ ID NO: 145393 - DNA, 14 bp, Unknown
  misc_feature (1)..( 14): Result.003 file - promoters60/5662739
gtttagaagaagtt

SEQ ID NO: 145394 - DNA, 8 bp, Unknown
  misc_feature (1)..( 8): Result.003 file - promoters60/5662749
catatttt

SEQ ID NO: 145395 - DNA, 8 bp, Unknown
  misc_feature (1)..( 8): Result.003 file - promoters60/5662749
tatatttg

SEQ ID NO: 145396 - DNA, 8 bp, Unknown
  misc_feature (1)..( 8): Result.003 file - promoters60/5662749
catttttt

SEQ ID NO: 145397 - DNA, 8 bp, Unknown
  misc_feature (1)..( 8): Result.003 file - promoters60/5662749
aatttttt

SEQ ID NO: 145398 - DNA, 12 bp, Unknown
  misc_feature (1)..( 12): Result.003 file - promoters60/5662749
actcccaaaaat

SEQ ID NO: 145399 - DNA, 12 bp, Unknown
  misc_feature (1)..( 12): Result.003 file - promoters60/5662749
actcctaaaata

SEQ ID NO: 145400 - DNA, 12 bp, Unknown
  misc_feature (1)..( 12): Result.003 file - promoters60/5662749
cagagtaaaatg

SEQ ID NO: 145401 - DNA, 12 bp, Unknown
  misc_feature (1)..( 12): Result.003 file - promoters60/5662749
taggagaaaatg

SEQ ID NO: 145402 - DNA, 10 bp, Unknown
  misc_feature (1)..( 10): Result.003 file - promoters60/5662749
aaaaataaga

SEQ ID NO: 145403 - DNA, 10 bp, Unknown
  misc_feature (1)..( 10): Result.003 file - promoters60/5662749
taaaataatc

SEQ ID NO: 145404 - DNA, 10 bp, Unknown
  misc_feature (1)..( 10): Result.003 file - promoters60/5662749
gaaaatgatc

SEQ ID NO: 145405 - DNA, 10 bp, Unknown
  misc_feature (1)..( 10): Result.003 file - promoters60/5662749
taaaatgcga

SEQ ID NO: 145406 - DNA, 9 bp, Unknown
  misc_feature (1)..( 9): Result.003 file - promoters60/5662749
atttatttc

SEQ ID NO: 145407 - DNA, 9 bp, Unknown
  misc_feature (1)..( 9): Result.003 file - promoters60/5662749
ttttctttc

SEQ ID NO: 145408 - DNA, 9 bp, Unknown
  misc_feature (1)..( 9): Result.003 file - promoters60/5662749
ctttgtttt

SEQ ID NO: 145409 - DNA, 9 bp, Unknown
  misc_feature (1)..( 9): Result.003 file - promoters60/5662749
ctttgtcct

SEQ ID NO: 145410 - DNA, 8 bp, Unknown
  misc_feature (1)..( 8): Result.003 file - promoters60/5662749
caagtctt

SEQ ID NO: 145411 - DNA, 8 bp, Unknown
  misc_feature (1)..( 8): Result.003 file - promoters60/5662749
aaagtctt

SEQ ID NO: 145412 - DNA, 8 bp, Unknown
  misc_feature (1)..( 8): Result.003 file - promoters60/5662749
aaattctg

SEQ ID NO: 145413 - DNA, 8 bp, Unknown
  misc_feature (1)..( 8): Result.003 file - promoters60/5662749
aaaatctc

SEQ ID NO: 145414 - DNA, 8 bp, Unknown
  misc_feature (1)..( 8): Result.003 file - promoters60/5662749
aaaattca

SEQ ID NO: 145415 - DNA, 8 bp, Unknown
  misc_feature (1)..( 8): Result.003 file - promoters60/5662749
aaaattct

SEQ ID NO: 145416 - DNA, 8 bp, Unknown
  misc_feature (1)..( 8): Result.003 file - promoters60/5662749
taaagtct

SEQ ID NO: 145417 - DNA, 8 bp, Unknown
  misc_feature (1)..( 8): Result.003 file - promoters60/5662749
aaaaatct

SEQ ID NO: 145418 - DNA, 8 bp, Unknown
  misc_feature (1)..( 8): Result.003 file - promoters60/5662749
tataaatt

SEQ ID NO: 145419 - DNA, 8 bp, Unknown
  misc_feature (1)..( 8): Result.003 file - promoters60/5662749
tataaacc

SEQ ID NO: 145420 - DNA, 8 bp, Unknown
  misc_feature (1)..( 8): Result.003 file - promoters60/5662749
cataaatg

SEQ ID NO: 145421 - DNA, 8 bp, Unknown
  misc_feature (1)..( 8): Result.003 file - promoters60/5662749
aataaaaa

SEQ ID NO: 145422 - DNA, 8 bp, Unknown
  misc_feature (1)..( 8): Result.003 file - promoters60/5662763
ttttaata

SEQ ID NO: 145423 - DNA, 8 bp, Unknown
  misc_feature (1)..( 8): Result.003 file - promoters60/5662763
ttttaaaa

SEQ ID NO: 145424 - DNA, 8 bp, Unknown
  misc_feature (1)..( 8): Result.003 file - promoters60/5662763
ttttaata

SEQ ID NO: 145425 - DNA, 7 bp, Unknown
  misc_feature (1)..( 7): Result.003 file - promoters60/5662763
aatcaat

SEQ ID NO: 145426 - DNA, 7 bp, Unknown
  misc_feature (1)..( 7): Result.003 file - promoters60/5662763
aatgaat

SEQ ID NO: 145427 - DNA, 13 bp, Unknown
  misc_feature (1)..( 13): Result.003 file - promoters60/5662763
tgttatgttgtgt

SEQ ID NO: 145428 - DNA, 13 bp, Unknown
  misc_feature (1)..( 13): Result.003 file - promoters60/5662763
tgttgtgtggtgt

SEQ ID NO: 145429 - DNA, 7 bp, Unknown
  misc_feature (1)..( 7): Result.003 file - promoters60/5662763
atttgca

SEQ ID NO: 145430 - DNA, 7 bp, Unknown
  misc_feature (1)..( 7): Result.003 file - promoters60/5662763
attcgca

SEQ ID NO: 145431 - DNA, 9 bp, Unknown
  misc_feature (1)..( 9): Result.003 file - promoters60/5662763
ggagttttt

SEQ ID NO: 145432 - DNA, 9 bp, Unknown
  misc_feature (1)..( 9): Result.003 file - promoters60/5662763
tttgttttt

SEQ ID NO: 145433 - DNA, 9 bp, Unknown
  misc_feature (1)..( 9): Result.003 file - promoters60/5662763
tttgttttg

SEQ ID NO: 145434 - DNA, 7 bp, Unknown
  misc_feature (1)..( 7): Result.003 file - promoters60/5662763
tttgttt

SEQ ID NO: 145435 - DNA, 7 bp, Unknown
  misc_feature (1)..( 7): Result.003 file - promoters60/5662763
tttgttt

SEQ ID NO: 145436 - DNA, 9 bp, Unknown
  misc_feature (1)..( 9): Result.003 file - promoters60/5662763
atgattttg

SEQ ID NO: 145437 - DNA, 9 bp, Unknown
  misc_feature (1)..( 9): Result.003 file - promoters60/5662763
atgaatttg

SEQ ID NO: 145438 - DNA, 11 bp, Unknown
  misc_feature (1)..( 11): Result.003 file - promoters60/5662763
aatttgtttga

SEQ ID NO: 145439 - DNA, 11 bp, Unknown
  misc_feature (1)..( 11): Result.003 file - promoters60/5662763
aatatgtttta

SEQ ID NO: 145440 - DNA, 11 bp, Unknown
  misc_feature (1)..( 11): Result.003 file - promoters60/5662763
tcattgtatga

SEQ ID NO: 145441 - DNA, 6 bp, Unknown
  misc_feature (1)..( 6): Result.003 file - promoters60/5662763
ggtgtt

SEQ ID NO: 145442 - DNA, 6 bp, Unknown
  misc_feature (1)..( 6): Result.003 file - promoters60/5662763
ggtgtt

SEQ ID NO: 145443 - DNA, 7 bp, Unknown
  misc_feature (1)..( 7): Result.003 file - promoters60/5662763
atagttt

SEQ ID NO: 145444 - DNA, 7 bp, Unknown
  misc_feature (1)..( 7): Result.003 file - promoters60/5662763
ataattt

SEQ ID NO: 145445 - DNA, 6 bp, Unknown
  misc_feature (1)..( 6): Result.003 file - promoters60/5662763
ttattt

SEQ ID NO: 145446 - DNA, 6 bp, Unknown
  misc_feature (1)..( 6): Result.003 file - promoters60/5662763
ttattt

SEQ ID NO: 145447 - DNA, 9 bp, Unknown
  misc_feature (1)..( 9): Result.003 file - promoters60/5662763
tttctgttt

SEQ ID NO: 145448 - DNA, 9 bp, Unknown
  misc_feature (1)..( 9): Result.003 file - promoters60/5662763
tttttgttt

SEQ ID NO: 145449 - DNA, 9 bp, Unknown
  misc_feature (1)..( 9): Result.003 file - promoters60/5662763
tttctgttt

SEQ ID NO: 145450 - DNA, 6 bp, Unknown
  misc_feature (1)..( 6): Result.003 file - promoters60/5662763
tttcag

SEQ ID NO: 145451 - DNA, 6 bp, Unknown
  misc_feature (1)..( 6): Result.003 file - promoters60/5662763
tttcag

SEQ ID NO: 145452 - DNA, 7 bp, Unknown
  misc_feature (1)..( 7): Result.003 file - promoters60/5662763
aaccaaa

SEQ ID NO: 145453 - DNA, 7 bp, Unknown
  misc_feature (1)..( 7): Result.003 file - promoters60/5662763
aacaaaa

SEQ ID NO: 145454 - DNA, 8 bp, Unknown
  misc_feature (1)..( 8): Result.003 file - promoters60/5662763
taacaaca

SEQ ID NO: 145455 - DNA, 8 bp, Unknown
  misc_feature (1)..( 8): Result.003 file - promoters60/5662763
taacaaaa

SEQ ID NO: 145456 - DNA, 8 bp, Unknown
  misc_feature (1)..( 8): Result.003 file - promoters60/5662763
taaaaaaa

SEQ ID NO: 145457 - DNA, 7 bp, Unknown
  misc_feature (1)..( 7): Result.003 file - promoters60/5662763
tttttct

SEQ ID NO: 145458 - DNA, 7 bp, Unknown
  misc_feature (1)..( 7): Result.003 file - promoters60/5662763
tttttct

SEQ ID NO: 145459 - DNA, 7 bp, Unknown
  misc_feature (1)..( 7): Result.003 file - promoters60/5662763
aaaattg

SEQ ID NO: 145460 - DNA, 7 bp, Unknown
  misc_feature (1)..( 7): Result.003 file - promoters60/5662763
aaatttg

SEQ ID NO: 145461 - DNA, 9 bp, Unknown
  misc_feature (1)..( 9): Result.003 file - promoters60/5662763
ggttcgatt

SEQ ID NO: 145462 - DNA, 9 bp, Unknown
  misc_feature (1)..( 9): Result.003 file - promoters60/5662763
ggttggatt

SEQ ID NO: 145463 - DNA, 7 bp, Unknown
  misc_feature (1)..( 7): Result.003 file - promoters60/5662763
caacgtc

SEQ ID NO: 145464 - DNA, 7 bp, Unknown
  misc_feature (1)..( 7): Result.003 file - promoters60/5662763
caaagtc

SEQ ID NO: 145465 - DNA, 12 bp, Unknown
  misc_feature (1)..( 12): Result.003 file - promoters60/5662765
cggaacaaaatc

SEQ ID NO: 145466 - DNA, 12 bp, Unknown
  misc_feature (1)..( 12): Result.003 file - promoters60/5662765
agaaacaaaatc

SEQ ID NO: 145467 - DNA, 11 bp, Unknown
  misc_feature (1)..( 11): Result.003 file - promoters60/5662765
agaaaaaaaga

SEQ ID NO: 145468 - DNA, 12 bp, Unknown
  misc_feature (1)..( 12): Result.003 file - promoters60/5662765
agatacaaatgt

SEQ ID NO: 145469 - DNA, 12 bp, Unknown
  misc_feature (1)..( 12): Result.003 file - promoters60/5662765
gaaaataaataa

SEQ ID NO: 145470 - DNA, 12 bp, Unknown
  misc_feature (1)..( 12): Result.003 file - promoters60/5662765
gagataaaaata

SEQ ID NO: 145471 - DNA, 12 bp, Unknown
  misc_feature (1)..( 12): Result.003 file - promoters60/5662765
gaatttagaaaa

SEQ ID NO: 145472 - DNA, 12 bp, Unknown
  misc_feature (1)..( 12): Result.003 file - promoters60/5662765
tttattaaaaaa

SEQ ID NO: 145473 - DNA, 12 bp, Unknown
  misc_feature (1)..( 12): Result.003 file - promoters60/5662765
tttcttaaaagc

SEQ ID NO: 145474 - DNA, 12 bp, Unknown
  misc_feature (1)..( 12): Result.003 file - promoters60/5662765
gccattaaatta

SEQ ID NO: 145475 - DNA, 12 bp, Unknown
  misc_feature (1)..( 12): Result.003 file - promoters60/5662765
ataattaaagac

SEQ ID NO: 145476 - DNA, 12 bp, Unknown
  misc_feature (1)..( 12): Result.003 file - promoters60/5662765
cgtattaaagtt

SEQ ID NO: 145477 - DNA, 10 bp, Unknown
  misc_feature (1)..( 10): Result.003 file - promoters60/5662765
cagcccatat

SEQ ID NO: 145478 - DNA, 10 bp, Unknown
  misc_feature (1)..( 10): Result.003 file - promoters60/5662765
aagcccaagc

SEQ ID NO: 145479 - DNA, 10 bp, Unknown
  misc_feature (1)..( 10): Result.003 file - promoters60/5662765
aggcccatat

SEQ ID NO: 145480 - DNA, 10 bp, Unknown
  misc_feature (1)..( 10): Result.003 file - promoters60/5662765
aggcccataa

SEQ ID NO: 145481 - DNA, 10 bp, Unknown
  misc_feature (1)..( 10): Result.003 file - promoters60/5662765
aggcccaatt

SEQ ID NO: 145482 - DNA, 10 bp, Unknown
  misc_feature (1)..( 10): Result.003 file - promoters60/5662765
aggcccatat

SEQ ID NO: 145483 - DNA, 13 bp, Unknown
  misc_feature (1)..( 13): Result.003 file - promoters60/5662765
attttttttattt

SEQ ID NO: 145484 - DNA, 13 bp, Unknown
  misc_feature (1)..( 13): Result.003 file - promoters60/5662765
aaatttcttaaaa

SEQ ID NO: 145485 - DNA, 13 bp, Unknown
  misc_feature (1)..( 13): Result.003 file - promoters60/5662765
attatttttagca

SEQ ID NO: 145486 - DNA, 13 bp, Unknown
  misc_feature (1)..( 13): Result.003 file - promoters60/5662765
atgtttattaaaa

SEQ ID NO: 145487 - DNA, 13 bp, Unknown
  misc_feature (1)..( 13): Result.003 file - promoters60/5662765
agcataattaaag

SEQ ID NO: 145488 - DNA, 13 bp, Unknown
  misc_feature (1)..( 13): Result.003 file - promoters60/5662765
agccgtattaaag

SEQ ID NO: 145489 - DNA, 7 bp, Unknown
  misc_feature (1)..( 7): Result.003 file - promoters60/5662769
aataaat

SEQ ID NO: 145490 - DNA, 7 bp, Unknown
  misc_feature (1)..( 7): Result.003 file - promoters60/5662769
aatgaat

SEQ ID NO: 145491 - DNA, 7 bp, Unknown
  misc_feature (1)..( 7): Result.003 file - promoters60/5662769
aaaaaaa

SEQ ID NO: 145492 - DNA, 7 bp, Unknown
  misc_feature (1)..( 7): Result.003 file - promoters60/5662769
aataaaa

SEQ ID NO: 145493 - DNA, 8 bp, Unknown
  misc_feature (1)..( 8): Result.003 file - promoters60/5662769
atttttaa

SEQ ID NO: 145494 - DNA, 8 bp, Unknown
  misc_feature (1)..( 8): Result.003 file - promoters60/5662769
ctttttaa

SEQ ID NO: 145495 - DNA, 8 bp, Unknown
  misc_feature (1)..( 8): Result.003 file - promoters60/5662769
ctttttat

SEQ ID NO: 145496 - DNA, 8 bp, Unknown
  misc_feature (1)..( 8): Result.003 file - promoters60/5662769
cttttttt

SEQ ID NO: 145497 - DNA, 7 bp, Unknown
  misc_feature (1)..( 7): Result.003 file - promoters60/5662769
aaaaagc

SEQ ID NO: 145498 - DNA, 7 bp, Unknown
  misc_feature (1)..( 7): Result.003 file - promoters60/5662769
aaaaagg

SEQ ID NO: 145499 - DNA, 7 bp, Unknown
  misc_feature (1)..( 7): Result.003 file - promoters60/5662769
aaaaaaa

SEQ ID NO: 145500 - DNA, 8 bp, Unknown
  misc_feature (1)..( 8): Result.003 file - promoters60/5662769
ataaaaaa

SEQ ID NO: 145501 - DNA, 8 bp, Unknown
  misc_feature (1)..( 8): Result.003 file - promoters60/5662769
ggaaaaaa

SEQ ID NO: 145502 - DNA, 8 bp, Unknown
  misc_feature (1)..( 8): Result.003 file - promoters60/5662769
ataaaaaa

SEQ ID NO: 145503 - DNA, 11 bp, Unknown
  misc_feature (1)..( 11): Result.003 file - promoters60/5662769
tattattatac

SEQ ID NO: 145504 - DNA, 11 bp, Unknown
  misc_feature (1)..( 11): Result.003 file - promoters60/5662769
tattatcataa

SEQ ID NO: 145505 - DNA, 11 bp, Unknown
  misc_feature (1)..( 11): Result.003 file - promoters60/5662769
gatcatcaatg

SEQ ID NO: 145506 - DNA, 11 bp, Unknown
  misc_feature (1)..( 11): Result.003 file - promoters60/5662769
tttctatcaac

SEQ ID NO: 145507 - DNA, 11 bp, Unknown
  misc_feature (1)..( 11): Result.003 file - promoters60/5662769
tttctaattcc

SEQ ID NO: 145508 - DNA, 11 bp, Unknown
  misc_feature (1)..( 11): Result.003 file - promoters60/5662769
tttttaactcc

SEQ ID NO: 145509 - DNA, 9 bp, Unknown
  misc_feature (1)..( 9): Result.003 file - promoters60/5662769
ttaacaaaa

SEQ ID NO: 145510 - DNA, 9 bp, Unknown
  misc_feature (1)..( 9): Result.003 file - promoters60/5662769
ttaaaaaaa

SEQ ID NO: 145511 - DNA, 9 bp, Unknown
  misc_feature (1)..( 9): Result.003 file - promoters60/5662769
gtaataaag

SEQ ID NO: 145512 - DNA, 8 bp, Unknown
  misc_feature (1)..( 8): Result.003 file - promoters60/5662771
tgagatga

SEQ ID NO: 145513 - DNA, 8 bp, Unknown
  misc_feature (1)..( 8): Result.003 file - promoters60/5662771
tgatatga

SEQ ID NO: 145514 - DNA, 6 bp, Unknown
  misc_feature (1)..( 6): Result.003 file - promoters60/5662771
ttttat

SEQ ID NO: 145515 - DNA, 6 bp, Unknown
  misc_feature (1)..( 6): Result.003 file - promoters60/5662771
ttttat

SEQ ID NO: 145516 - DNA, 8 bp, Unknown
  misc_feature (1)..( 8): Result.003 file - promoters60/5662771
gaatcttt

SEQ ID NO: 145517 - DNA, 8 bp, Unknown
  misc_feature (1)..( 8): Result.003 file - promoters60/5662771
gaatattt

SEQ ID NO: 145518 - DNA, 9 bp, Unknown
  misc_feature (1)..( 9): Result.003 file - promoters60/5662771
cccaaccca

SEQ ID NO: 145519 - DNA, 9 bp, Unknown
  misc_feature (1)..( 9): Result.003 file - promoters60/5662771
cccaaacca

SEQ ID NO: 145520 - DNA, 11 bp, Unknown
  misc_feature (1)..( 11): Result.003 file - promoters60/5662771
aattttgtttg

SEQ ID NO: 145521 - DNA, 11 bp, Unknown
  misc_feature (1)..( 11): Result.003 file - promoters60/5662771
aatttcgtttg

SEQ ID NO: 145522 - DNA, 7 bp, Unknown
  misc_feature (1)..( 7): Result.003 file - promoters60/5662771
atttttg

SEQ ID NO: 145523 - DNA, 7 bp, Unknown
  misc_feature (1)..( 7): Result.003 file - promoters60/5662771
attattg

SEQ ID NO: 145524 - DNA, 6 bp, Unknown
  misc_feature (1)..( 6): Result.003 file - promoters60/5662771
cacatt

SEQ ID NO: 145525 - DNA, 6 bp, Unknown
  misc_feature (1)..( 6): Result.003 file - promoters60/5662771
cacatt

SEQ ID NO: 145526 - DNA, 9 bp, Unknown
  misc_feature (1)..( 9): Result.003 file - promoters60/5662771
atccgaatt

SEQ ID NO: 145527 - DNA, 9 bp, Unknown
  misc_feature (1)..( 9): Result.003 file - promoters60/5662771
atcccaatt

SEQ ID NO: 145528 - DNA, 8 bp, Unknown
  misc_feature (1)..( 8): Result.003 file - promoters60/5662771
taactttt

SEQ ID NO: 145529 - DNA, 8 bp, Unknown
  misc_feature (1)..( 8): Result.003 file - promoters60/5662771
taagtttt

SEQ ID NO: 145530 - DNA, 8 bp, Unknown
  misc_feature (1)..( 8): Result.003 file - promoters60/5662771
ttttgttt

SEQ ID NO: 145531 - DNA, 8 bp, Unknown
  misc_feature (1)..( 8): Result.003 file - promoters60/5662771
ttttattt

SEQ ID NO: 145532 - DNA, 8 bp, Unknown
  misc_feature (1)..( 8): Result.003 file - promoters60/5662771
tttctttt

SEQ ID NO: 145533 - DNA, 8 bp, Unknown
  misc_feature (1)..( 8): Result.003 file - promoters60/5662771
tttgtttt

SEQ ID NO: 145534 - DNA, 8 bp, Unknown
  misc_feature (1)..( 8): Result.003 file - promoters60/5662771
tttgctca

SEQ ID NO: 145535 - DNA, 8 bp, Unknown
  misc_feature (1)..( 8): Result.003 file - promoters60/5662771
ttttctca

SEQ ID NO: 145536 - DNA, 6 bp, Unknown
  misc_feature (1)..( 6): Result.003 file - promoters60/5662771
aatatt

SEQ ID NO: 145537 - DNA, 6 bp, Unknown
  misc_feature (1)..( 6): Result.003 file - promoters60/5662771
aatatt

SEQ ID NO: 145538 - DNA, 7 bp, Unknown
  misc_feature (1)..( 7): Result.003 file - promoters60/5662779
aaaagat

SEQ ID NO: 145539 - DNA, 7 bp, Unknown
  misc_feature (1)..( 7): Result.003 file - promoters60/5662779
aaaggat

SEQ ID NO: 145540 - DNA, 7 bp, Unknown
  misc_feature (1)..( 7): Result.003 file - promoters60/5662779
ttagttt

SEQ ID NO: 145541 - DNA, 7 bp, Unknown
  misc_feature (1)..( 7): Result.003 file - promoters60/5662779
ttagttt

SEQ ID NO: 145542 - DNA, 9 bp, Unknown
  misc_feature (1)..( 9): Result.003 file - promoters60/5662779
tttggagaa

SEQ ID NO: 145543 - DNA, 9 bp, Unknown
  misc_feature (1)..( 9): Result.003 file - promoters60/5662779
tttgcagaa

SEQ ID NO: 145544 - DNA, 11 bp, Unknown
  misc_feature (1)..( 11): Result.003 file - promoters60/5662779
agtcaaagaaa

SEQ ID NO: 145545 - DNA, 11 bp, Unknown
  misc_feature (1)..( 11): Result.003 file - promoters60/5662779
agttaaataaa

SEQ ID NO: 145546 - DNA, 9 bp, Unknown
  misc_feature (1)..( 9): Result.003 file - promoters60/5662779
ttaatgtaa

SEQ ID NO: 145547 - DNA, 9 bp, Unknown
  misc_feature (1)..( 9): Result.003 file - promoters60/5662779
ttaatataa

SEQ ID NO: 145548 - DNA, 8 bp, Unknown
  misc_feature (1)..( 8): Result.003 file - promoters60/5662779
gatttaac

SEQ ID NO: 145549 - DNA, 8 bp, Unknown
  misc_feature (1)..( 8): Result.003 file - promoters60/5662779
gatgtaac

SEQ ID NO: 145550 - DNA, 7 bp, Unknown
  misc_feature (1)..( 7): Result.003 file - promoters60/5662779
aatttgt

SEQ ID NO: 145551 - DNA, 7 bp, Unknown
  misc_feature (1)..( 7): Result.003 file - promoters60/5662779
aatatgt

SEQ ID NO: 145552 - DNA, 13 bp, Unknown
  misc_feature (1)..( 13): Result.003 file - promoters60/5662779
agaagaagacgca

SEQ ID NO: 145553 - DNA, 13 bp, Unknown
  misc_feature (1)..( 13): Result.003 file - promoters60/5662779
tgcaaaagaggca

SEQ ID NO: 145554 - DNA, 14 bp, Unknown
  misc_feature (1)..( 14): Result.003 file - promoters60/5662779
ttgcaaatgagccc

SEQ ID NO: 145555 - DNA, 6 bp, Unknown
  misc_feature (1)..( 6): Result.003 file - promoters60/5662779
ttttga

SEQ ID NO: 145556 - DNA, 6 bp, Unknown
  misc_feature (1)..( 6): Result.003 file - promoters60/5662779
ttttga

SEQ ID NO: 145557 - DNA, 6 bp, Unknown
  misc_feature (1)..( 6): Result.003 file - promoters60/5662779
cttgcc

SEQ ID NO: 145558 - DNA, 6 bp, Unknown
  misc_feature (1)..( 6): Result.003 file - promoters60/5662779
cttgcc

SEQ ID NO: 145559 - DNA, 7 bp, Unknown
  misc_feature (1)..( 7): Result.003 file - promoters60/5662779
ctcctgc

SEQ ID NO: 145560 - DNA, 7 bp, Unknown
  misc_feature (1)..( 7): Result.003 file - promoters60/5662779
ctcgtgc

SEQ ID NO: 145561 - DNA, 6 bp, Unknown
  misc_feature (1)..( 6): Result.003 file - promoters60/5662785
aatgtg

SEQ ID NO: 145562 - DNA, 6 bp, Unknown
  misc_feature (1)..( 6): Result.003 file - promoters60/5662785
aatgtg

SEQ ID NO: 145563 - DNA, 6 bp, Unknown
  misc_feature (1)..( 6): Result.003 file - promoters60/5662785
ttctta

SEQ ID NO: 145564 - DNA, 6 bp, Unknown
  misc_feature (1)..( 6): Result.003 file - promoters60/5662785
ttctta

SEQ ID NO: 145565 - DNA, 7 bp, Unknown
  misc_feature (1)..( 7): Result.003 file - promoters60/5662785
gattaaa

SEQ ID NO: 145566 - DNA, 7 bp, Unknown
  misc_feature (1)..( 7): Result.003 file - promoters60/5662785
gattaaa

SEQ ID NO: 145567 - DNA, 8 bp, Unknown
  misc_feature (1)..( 8): Result.003 file - promoters60/5662785
tttgggcc

SEQ ID NO: 145568 - DNA, 8 bp, Unknown
  misc_feature (1)..( 8): Result.003 file - promoters60/5662785
tttgggcc

SEQ ID NO: 145569 - DNA, 8 bp, Unknown
  misc_feature (1)..( 8): Result.003 file - promoters60/5662785
tctcttgg

SEQ ID NO: 145570 - DNA, 8 bp, Unknown
  misc_feature (1)..( 8): Result.003 file - promoters60/5662785
tcttttgg

SEQ ID NO: 145571 - DNA, 7 bp, Unknown
  misc_feature (1)..( 7): Result.003 file - promoters60/5662785
ataattt

SEQ ID NO: 145572 - DNA, 7 bp, Unknown
  misc_feature (1)..( 7): Result.003 file - promoters60/5662785
atatttt

SEQ ID NO: 145573 - DNA, 6 bp, Unknown
  misc_feature (1)..( 6): Result.003 file - promoters60/5662785
tgattt

SEQ ID NO: 145574 - DNA, 6 bp, Unknown
  misc_feature (1)..( 6): Result.003 file - promoters60/5662785
tgattt

SEQ ID NO: 145575 - DNA, 8 bp, Unknown
  misc_feature (1)..( 8): Result.003 file - promoters60/5662785
tttcgttt

SEQ ID NO: 145576 - DNA, 8 bp, Unknown
  misc_feature (1)..( 8): Result.003 file - promoters60/5662785
tttccttt

SEQ ID NO: 145577 - DNA, 7 bp, Unknown
  misc_feature (1)..( 7): Result.003 file - promoters60/5662785
atctttg

SEQ ID NO: 145578 - DNA, 7 bp, Unknown
  misc_feature (1)..( 7): Result.003 file - promoters60/5662785
atctttg

SEQ ID NO: 145579 - DNA, 6 bp, Unknown
  misc_feature (1)..( 6): Result.003 file - promoters60/5662785
tttgat

SEQ ID NO: 145580 - DNA, 6 bp, Unknown
  misc_feature (1)..( 6): Result.003 file - promoters60/5662785
tttgat

SEQ ID NO: 145581 - DNA, 6 bp, Unknown
  misc_feature (1)..( 6): Result.003 file - promoters60/5662785
attctt

SEQ ID NO: 145582 - DNA, 6 bp, Unknown
  misc_feature (1)..( 6): Result.003 file - promoters60/5662785
attctt

SEQ ID NO: 145583 - DNA, 8 bp, Unknown
  misc_feature (1)..( 8): Result.003 file - promoters60/5662785
tttctctt

SEQ ID NO: 145584 - DNA, 8 bp, Unknown
  misc_feature (1)..( 8): Result.003 file - promoters60/5662785
tttatctt

SEQ ID NO: 145585 - DNA, 6 bp, Unknown
  misc_feature (1)..( 6): Result.003 file - promoters60/5662785
ttatat

SEQ ID NO: 145586 - DNA, 6 bp, Unknown
  misc_feature (1)..( 6): Result.003 file - promoters60/5662785
ttatat

SEQ ID NO: 145587 - DNA, 8 bp, Unknown
  misc_feature (1)..( 8): Result.003 file - promoters60/5662785
atatatct

SEQ ID NO: 145588 - DNA, 8 bp, Unknown
  misc_feature (1)..( 8): Result.003 file - promoters60/5662785
atatctct

SEQ ID NO: 145589 - DNA, 7 bp, Unknown
  misc_feature (1)..( 7): Result.003 file - promoters60/5662785
cttggtt

SEQ ID NO: 145590 - DNA, 7 bp, Unknown
  misc_feature (1)..( 7): Result.003 file - promoters60/5662785
cttagtt

SEQ ID NO: 145591 - DNA, 7 bp, Unknown
  misc_feature (1)..( 7): Result.003 file - promoters60/5662785
gtttttt

SEQ ID NO: 145592 - DNA, 7 bp, Unknown
  misc_feature (1)..( 7): Result.003 file - promoters60/5662785
gttattt

SEQ ID NO: 145593 - DNA, 13 bp, Unknown
  misc_feature (1)..( 13): Result.003 file - promoters60/5662799
taagaaaattgac

SEQ ID NO: 145594 - DNA, 13 bp, Unknown
  misc_feature (1)..( 13): Result.003 file - promoters60/5662799
tgtcaaatttgtc

SEQ ID NO: 145595 - DNA, 13 bp, Unknown
  misc_feature (1)..( 13): Result.003 file - promoters60/5662799
aaagaaatttgct

SEQ ID NO: 145596 - DNA, 13 bp, Unknown
  misc_feature (1)..( 13): Result.003 file - promoters60/5662799
aaacaaatcaaat

SEQ ID NO: 145597 - DNA, 13 bp, Unknown
  misc_feature (1)..( 13): Result.003 file - promoters60/5662799
ggtcagattgttc

SEQ ID NO: 145598 - DNA, 13 bp, Unknown
  misc_feature (1)..( 13): Result.003 file - promoters60/5662799
tcccaattttgcc

SEQ ID NO: 145599 - DNA, 13 bp, Unknown
  misc_feature (1)..( 13): Result.003 file - promoters60/5662799
acggagttttgct

SEQ ID NO: 145600 - DNA, 13 bp, Unknown
  misc_feature (1)..( 13): Result.003 file - promoters60/5662799
gaattattttgct

SEQ ID NO: 145601 - DNA, 8 bp, Unknown
  misc_feature (1)..( 8): Result.003 file - promoters60/5662809
tttgttat

SEQ ID NO: 145602 - DNA, 8 bp, Unknown
  misc_feature (1)..( 8): Result.003 file - promoters60/5662809
ttttttag

SEQ ID NO: 145603 - DNA, 8 bp, Unknown
  misc_feature (1)..( 8): Result.003 file - promoters60/5662809
tttgatat

SEQ ID NO: 145604 - DNA, 6 bp, Unknown
  misc_feature (1)..( 6): Result.003 file - promoters60/5662809
ataaaa

SEQ ID NO: 145605 - DNA, 6 bp, Unknown
  misc_feature (1)..( 6): Result.003 file - promoters60/5662809
ataaaa

SEQ ID NO: 145606 - DNA, 13 bp, Unknown
  misc_feature (1)..( 13): Result.003 file - promoters60/5662809
attcttttaaagt

SEQ ID NO: 145607 - DNA, 13 bp, Unknown
  misc_feature (1)..( 13): Result.003 file - promoters60/5662809
attgtttaaaaca

SEQ ID NO: 145608 - DNA, 13 bp, Unknown
  misc_feature (1)..( 13): Result.003 file - promoters60/5662809
atcaattaaagtt

SEQ ID NO: 145609 - DNA, 11 bp, Unknown
  misc_feature (1)..( 11): Result.003 file - promoters60/5662809
ttaaagttcaa

SEQ ID NO: 145610 - DNA, 11 bp, Unknown
  misc_feature (1)..( 11): Result.003 file - promoters60/5662809
acaaaggtcaa

SEQ ID NO: 145611 - DNA, 11 bp, Unknown
  misc_feature (1)..( 11): Result.003 file - promoters60/5662809
ttaaagttggg

SEQ ID NO: 145612 - DNA, 7 bp, Unknown
  misc_feature (1)..( 7): Result.003 file - promoters60/5662809
aatattt

SEQ ID NO: 145613 - DNA, 7 bp, Unknown
  misc_feature (1)..( 7): Result.003 file - promoters60/5662809
aatcttt

SEQ ID NO: 145614 - DNA, 7 bp, Unknown
  misc_feature (1)..( 7): Result.003 file - promoters60/5662809
tttgttt

SEQ ID NO: 145615 - DNA, 7 bp, Unknown
  misc_feature (1)..( 7): Result.003 file - promoters60/5662809
tttcttt

SEQ ID NO: 145616 - DNA, 6 bp, Unknown
  misc_feature (1)..( 6): Result.003 file - promoters60/5662809
cagaca

SEQ ID NO: 145617 - DNA, 6 bp, Unknown
  misc_feature (1)..( 6): Result.003 file - promoters60/5662809
cagaca

SEQ ID NO: 145618 - DNA, 6 bp, Unknown
  misc_feature (1)..( 6): Result.003 file - promoters60/5662809
tttttt

SEQ ID NO: 145619 - DNA, 6 bp, Unknown
  misc_feature (1)..( 6): Result.003 file - promoters60/5662809
tttttt

SEQ ID NO: 145620 - DNA, 6 bp, Unknown
  misc_feature (1)..( 6): Result.003 file - promoters60/5662809
ctttta

SEQ ID NO: 145621 - DNA, 6 bp, Unknown
  misc_feature (1)..( 6): Result.003 file - promoters60/5662809
ctttta

SEQ ID NO: 145622 - DNA, 6 bp, Unknown
  misc_feature (1)..( 6): Result.003 file - promoters60/5662809
caaaaa

SEQ ID NO: 145623 - DNA, 6 bp, Unknown
  misc_feature (1)..( 6): Result.003 file - promoters60/5662809
caaaaa

SEQ ID NO: 145624 - DNA, 11 bp, Unknown
  misc_feature (1)..( 11): Result.003 file - promoters60/5662809
aaacaacaaat

SEQ ID NO: 145625 - DNA, 11 bp, Unknown
  misc_feature (1)..( 11): Result.003 file - promoters60/5662809
aaataacaaat

SEQ ID NO: 145626 - DNA, 7 bp, Unknown
  misc_feature (1)..( 7): Result.003 file - promoters60/5662809
ctattta

SEQ ID NO: 145627 - DNA, 7 bp, Unknown
  misc_feature (1)..( 7): Result.003 file - promoters60/5662809
ctattta

SEQ ID NO: 145628 - DNA, 7 bp, Unknown
  misc_feature (1)..( 7): Result.003 file - promoters60/5662809
ttttctt

SEQ ID NO: 145629 - DNA, 7 bp, Unknown
  misc_feature (1)..( 7): Result.003 file - promoters60/5662809
ttttctt

SEQ ID NO: 145630 - DNA, 6 bp, Unknown
  misc_feature (1)..( 6): Result.004 file - promoters60/5662809
tttatt

SEQ ID NO: 145631 - DNA, 6 bp, Unknown
  misc_feature (1)..( 6): Result.004 file - promoters60/5662809
tttatt

SEQ ID NO: 145632 - DNA, 8 bp, Unknown
  misc_feature (1)..( 8): Result.004 file - promoters60/5662809
ctaattaa

SEQ ID NO: 145633 - DNA, 8 bp, Unknown
  misc_feature (1)..( 8): Result.004 file - promoters60/5662809
ctaattaa

SEQ ID NO: 145634 - DNA, 6 bp, Unknown
  misc_feature (1)..( 6): Result.004 file - promoters60/5662809
aataaa

SEQ ID NO: 145635 - DNA, 6 bp, Unknown
  misc_feature (1)..( 6): Result.004 file - promoters60/5662809
aataaa

SEQ ID NO: 145636 - DNA, 7 bp, Unknown
  misc_feature (1)..( 7): Result.004 file - promoters60/5662809
tttttta

SEQ ID NO: 145637 - DNA, 7 bp, Unknown
  misc_feature (1)..( 7): Result.004 file - promoters60/5662809
tttgtta

SEQ ID NO: 145638 - DNA, 7 bp, Unknown
  misc_feature (1)..( 7): Result.004 file - promoters60/5662809
aaagaaa

SEQ ID NO: 145639 - DNA, 7 bp, Unknown
  misc_feature (1)..( 7): Result.004 file - promoters60/5662809
aaagaaa

SEQ ID NO: 145640 - DNA, 7 bp, Unknown
  misc_feature (1)..( 7): Result.004 file - promoters60/5662809
cgcgttt

SEQ ID NO: 145641 - DNA, 7 bp, Unknown
  misc_feature (1)..( 7): Result.004 file - promoters60/5662828
cgctttt

SEQ ID NO: 145642 - DNA, 8 bp, Unknown
  misc_feature (1)..( 8): Result.004 file - promoters60/5662828
aaatcctc

SEQ ID NO: 145643 - DNA, 8 bp, Unknown
  misc_feature (1)..( 8): Result.004 file - promoters60/5662828
aaattctc

SEQ ID NO: 145644 - DNA, 7 bp, Unknown
  misc_feature (1)..( 7): Result.004 file - promoters60/5662828
aatttct

SEQ ID NO: 145645 - DNA, 7 bp, Unknown
  misc_feature (1)..( 7): Result.004 file - promoters60/5662828
aatatct

SEQ ID NO: 145646 - DNA, 7 bp, Unknown
  misc_feature (1)..( 7): Result.004 file - promoters60/5662828
tttgtaa

SEQ ID NO: 145647 - DNA, 7 bp, Unknown
  misc_feature (1)..( 7): Result.004 file - promoters60/5662828
tttataa

SEQ ID NO: 145648 - DNA, 6 bp, Unknown
  misc_feature (1)..( 6): Result.004 file - promoters60/5662828
ttgtta

SEQ ID NO: 145649 - DNA, 6 bp, Unknown
  misc_feature (1)..( 6): Result.004 file - promoters60/5662828
ttgtta

SEQ ID NO: 145650 - DNA, 7 bp, Unknown
  misc_feature (1)..( 7): Result.004 file - promoters60/5662828
ttttgaa

SEQ ID NO: 145651 - DNA, 7 bp, Unknown
  misc_feature (1)..( 7): Result.004 file - promoters60/5662828
ttttgat

SEQ ID NO: 145652 - DNA, 7 bp, Unknown
  misc_feature (1)..( 7): Result.004 file - promoters60/5662828
tttagat

SEQ ID NO: 145653 - DNA, 8 bp, Unknown
  misc_feature (1)..( 8): Result.004 file - promoters60/5662828
agaccctt

SEQ ID NO: 145654 - DNA, 8 bp, Unknown
  misc_feature (1)..( 8): Result.004 file - promoters60/5662828
agactctt

SEQ ID NO: 145655 - DNA, 6 bp, Unknown
  misc_feature (1)..( 6): Result.004 file - promoters60/5662828
ttgaga

SEQ ID NO: 145656 - DNA, 6 bp, Unknown
  misc_feature (1)..( 6): Result.004 file - promoters60/5662828
ttgaga

SEQ ID NO: 145657 - DNA, 7 bp, Unknown
  misc_feature (1)..( 7): Result.004 file - promoters60/5662828
taaattg

SEQ ID NO: 145658 - DNA, 7 bp, Unknown
  misc_feature (1)..( 7): Result.004 file - promoters60/5662828
taagttg

SEQ ID NO: 145659 - DNA, 6 bp, Unknown
  misc_feature (1)..( 6): Result.004 file - promoters60/5662828
ttttaa

SEQ ID NO: 145660 - DNA, 6 bp, Unknown
  misc_feature (1)..( 6): Result.004 file - promoters60/5662828
ttttaa

SEQ ID NO: 145661 - DNA, 6 bp, Unknown
  misc_feature (1)..( 6): Result.004 file - promoters60/5662828
atacct

SEQ ID NO: 145662 - DNA, 6 bp, Unknown
  misc_feature (1)..( 6): Result.004 file - promoters60/5662828
atacct

SEQ ID NO: 145663 - DNA, 6 bp, Unknown
  misc_feature (1)..( 6): Result.004 file - promoters60/5662828
ataatt

SEQ ID NO: 145664 - DNA, 6 bp, Unknown
  misc_feature (1)..( 6): Result.004 file - promoters60/5662828
ataatt

SEQ ID NO: 145665 - DNA, 6 bp, Unknown
  misc_feature (1)..( 6): Result.004 file - promoters60/5662828
ctacgt

SEQ ID NO: 145666 - DNA, 6 bp, Unknown
  misc_feature (1)..( 6): Result.004 file - promoters60/5662828
ctacgt

SEQ ID NO: 145667 - DNA, 6 bp, Unknown
  misc_feature (1)..( 6): Result.004 file - promoters60/5662828
gttgat

SEQ ID NO: 145668 - DNA, 6 bp, Unknown
  misc_feature (1)..( 6): Result.004 file - promoters60/5662828
gttgat

SEQ ID NO: 145669 - DNA, 8 bp, Unknown
  misc_feature (1)..( 8): Result.004 file - promoters60/5662828
aatttctc

SEQ ID NO: 145670 - DNA, 8 bp, Unknown
  misc_feature (1)..( 8): Result.004 file - promoters60/5662828
aatatctc

SEQ ID NO: 145671 - DNA, 6 bp, Unknown
  misc_feature (1)..( 6): Result.004 file - promoters60/5662828
gggttt

SEQ ID NO: 145672 - DNA, 6 bp, Unknown
  misc_feature (1)..( 6): Result.004 file - promoters60/5662828
gggttt

SEQ ID NO: 145673 - DNA, 6 bp, Unknown
  misc_feature (1)..( 6): Result.004 file - promoters60/5662828
acaaat

SEQ ID NO: 145674 - DNA, 6 bp, Unknown
  misc_feature (1)..( 6): Result.004 file - promoters60/5662828
acaaat

SEQ ID NO: 145675 - DNA, 7 bp, Unknown
  misc_feature (1)..( 7): Result.004 file - promoters60/5662828
tctaaaa

SEQ ID NO: 145676 - DNA, 7 bp, Unknown
  misc_feature (1)..( 7): Result.004 file - promoters60/5662828
tctaaaa

SEQ ID NO: 145677 - DNA, 6 bp, Unknown
  misc_feature (1)..( 6): Result.004 file - promoters60/5662828
aatgtc

SEQ ID NO: 145678 - DNA, 6 bp, Unknown
  misc_feature (1)..( 6): Result.004 file - promoters60/5662828
aatgtc

SEQ ID NO: 145679 - DNA, 7 bp, Unknown
  misc_feature (1)..( 7): Result.004 file - promoters60/5662828
aatctac

SEQ ID NO: 145680 - DNA, 7 bp, Unknown
  misc_feature (1)..( 7): Result.004 file - promoters60/5662835
aatctac

SEQ ID NO: 145681 - DNA, 7 bp, Unknown
  misc_feature (1)..( 7): Result.004 file - promoters60/5662835
tttctga

SEQ ID NO: 145682 - DNA, 7 bp, Unknown
  misc_feature (1)..( 7): Result.004 file - promoters60/5662835
tttatga

SEQ ID NO: 145683 - DNA, 7 bp, Unknown
  misc_feature (1)..( 7): Result.004 file - promoters60/5662835
actcttg

SEQ ID NO: 145684 - DNA, 7 bp, Unknown
  misc_feature (1)..( 7): Result.004 file - promoters60/5662835
actattg

SEQ ID NO: 145685 - DNA, 6 bp, Unknown
  misc_feature (1)..( 6): Result.004 file - promoters60/5662835
taacca

SEQ ID NO: 145686 - DNA, 6 bp, Unknown
  misc_feature (1)..( 6): Result.004 file - promoters60/5662835
taacca

SEQ ID NO: 145687 - DNA, 6 bp, Unknown
  misc_feature (1)..( 6): Result.004 file - promoters60/5662835
gatgag

SEQ ID NO: 145688 - DNA, 6 bp, Unknown
  misc_feature (1)..( 6): Result.004 file - promoters60/5662835
gatgag

SEQ ID NO: 145689 - DNA, 6 bp, Unknown
  misc_feature (1)..( 6): Result.004 file - promoters60/5662835
ttggaa

SEQ ID NO: 145690 - DNA, 6 bp, Unknown
  misc_feature (1)..( 6): Result.004 file - promoters60/5662835
ttggaa

SEQ ID NO: 145691 - DNA, 8 bp, Unknown
  misc_feature (1)..( 8): Result.004 file - promoters60/5662835
acacattc

SEQ ID NO: 145692 - DNA, 8 bp, Unknown
  misc_feature (1)..( 8): Result.004 file - promoters60/5662835
acaaattt

SEQ ID NO: 145693 - DNA, 8 bp, Unknown
  misc_feature (1)..( 8): Result.004 file - promoters60/5662835
tcaatttt

SEQ ID NO: 145694 - DNA, 7 bp, Unknown
  misc_feature (1)..( 7): Result.004 file - promoters60/5662835
ttgcctt

SEQ ID NO: 145695 - DNA, 7 bp, Unknown
  misc_feature (1)..( 7): Result.004 file - promoters60/5662835
ttgactt

SEQ ID NO: 145696 - DNA, 8 bp, Unknown
  misc_feature (1)..( 8): Result.004 file - promoters60/5662835
ttgattta

SEQ ID NO: 145697 - DNA, 8 bp, Unknown
  misc_feature (1)..( 8): Result.004 file - promoters60/5662835
ttgtttta

SEQ ID NO: 145698 - DNA, 6 bp, Unknown
  misc_feature (1)..( 6): Result.004 file - promoters60/5662835
aaacaa

SEQ ID NO: 145699 - DNA, 6 bp, Unknown
  misc_feature (1)..( 6): Result.004 file - promoters60/5662835
aaacaa

SEQ ID NO: 145700 - DNA, 6 bp, Unknown
  misc_feature (1)..( 6): Result.004 file - promoters60/5662835
acacgt

SEQ ID NO: 145701 - DNA, 6 bp, Unknown
  misc_feature (1)..( 6): Result.004 file - promoters60/5662835
acacgt

SEQ ID NO: 145702 - DNA, 6 bp, Unknown
  misc_feature (1)..( 6): Result.004 file - promoters60/5662835
ttaacc

SEQ ID NO: 145703 - DNA, 6 bp, Unknown
  misc_feature (1)..( 6): Result.004 file - promoters60/5662835
ttaacc

SEQ ID NO: 145704 - DNA, 7 bp, Unknown
  misc_feature (1)..( 7): Result.004 file - promoters60/5662835
ttttgaa

SEQ ID NO: 145705 - DNA, 7 bp, Unknown
  misc_feature (1)..( 7): Result.004 file - promoters60/5662835
tttggaa

SEQ ID NO: 145706 - DNA, 6 bp, Unknown
  misc_feature (1)..( 6): Result.004 file - promoters60/5662835
aatttg

SEQ ID NO: 145707 - DNA, 6 bp, Unknown
  misc_feature (1)..( 6): Result.004 file - promoters60/5662835
aatttg

SEQ ID NO: 145708 - DNA, 7 bp, Unknown
  misc_feature (1)..( 7): Result.004 file - promoters60/5662835
attaatt

SEQ ID NO: 145709 - DNA, 7 bp, Unknown
  misc_feature (1)..( 7): Result.004 file - promoters60/5662835
attaatt

SEQ ID NO: 145710 - DNA, 6 bp, Unknown
  misc_feature (1)..( 6): Result.004 file - promoters60/5662835
ttaaaa

SEQ ID NO: 145711 - DNA, 6 bp, Unknown
  misc_feature (1)..( 6): Result.004 file - promoters60/5662893
ttaaaa

SEQ ID NO: 145712 - DNA, 9 bp, Unknown
  misc_feature (1)..( 9): Result.004 file - promoters60/5662893
catataaag

SEQ ID NO: 145713 - DNA, 9 bp, Unknown
  misc_feature (1)..( 9): Result.004 file - promoters60/5662893
catatatac

SEQ ID NO: 145714 - DNA, 9 bp, Unknown
  misc_feature (1)..( 9): Result.004 file - promoters60/5662893
aataaaaag

SEQ ID NO: 145715 - DNA, 9 bp, Unknown
  misc_feature (1)..( 9): Result.004 file - promoters60/5662893
tatagataa

SEQ ID NO: 145716 - DNA, 9 bp, Unknown
  misc_feature (1)..( 9): Result.004 file - promoters60/5662893
tataaaacc

SEQ ID NO: 145717 - DNA, 10 bp, Unknown
  misc_feature (1)..( 10): Result.004 file - promoters60/5662895
actattaaag

SEQ ID NO: 145718 - DNA, 9 bp, Unknown
  misc_feature (1)..( 9): Result.004 file - promoters60/5662895
aattgaaac

SEQ ID NO: 145719 - DNA, 9 bp, Unknown
  misc_feature (1)..( 9): Result.004 file - promoters60/5662895
aattaaaac

SEQ ID NO: 145720 - DNA, 8 bp, Unknown
  misc_feature (1)..( 8): Result.004 file - promoters60/5662895
ttttgttt

SEQ ID NO: 145721 - DNA, 8 bp, Unknown
  misc_feature (1)..( 8): Result.004 file - promoters60/5662895
ttttgttt

SEQ ID NO: 145722 - DNA, 7 bp, Unknown
  misc_feature (1)..( 7): Result.004 file - promoters60/5662895
cattttt

SEQ ID NO: 145723 - DNA, 7 bp, Unknown
  misc_feature (1)..( 7): Result.004 file - promoters60/5662895
cattttt

SEQ ID NO: 145724 - DNA, 6 bp, Unknown
  misc_feature (1)..( 6): Result.004 file - promoters60/5662895
taaatt

SEQ ID NO: 145725 - DNA, 6 bp, Unknown
  misc_feature (1)..( 6): Result.004 file - promoters60/5662895
taaatt

SEQ ID NO: 145726 - DNA, 6 bp, Unknown
  misc_feature (1)..( 6): Result.004 file - promoters60/5662895
ttctta

SEQ ID NO: 145727 - DNA, 6 bp, Unknown
  misc_feature (1)..( 6): Result.004 file - promoters60/5662895
ttctta

SEQ ID NO: 145728 - DNA, 8 bp, Unknown
  misc_feature (1)..( 8): Result.004 file - promoters60/5662895
aaaatttt

SEQ ID NO: 145729 - DNA, 8 bp, Unknown
  misc_feature (1)..( 8): Result.004 file - promoters60/5662895
aaaatttt

SEQ ID NO: 145730 - DNA, 7 bp, Unknown
  misc_feature (1)..( 7): Result.004 file - promoters60/5662895
caacttc

SEQ ID NO: 145731 - DNA, 7 bp, Unknown
  misc_feature (1)..( 7): Result.004 file - promoters60/5662895
caatttc

SEQ ID NO: 145732 - DNA, 6 bp, Unknown
  misc_feature (1)..( 6): Result.004 file - promoters60/5662895
tgattc

SEQ ID NO: 145733 - DNA, 6 bp, Unknown
  misc_feature (1)..( 6): Result.004 file - promoters60/5662895
tgattc

SEQ ID NO: 145734 - DNA, 6 bp, Unknown
  misc_feature (1)..( 6): Result.004 file - promoters60/5662895
aaaaac

SEQ ID NO: 145735 - DNA, 6 bp, Unknown
  misc_feature (1)..( 6): Result.004 file - promoters60/5662895
aaaaac

SEQ ID NO: 145736 - DNA, 6 bp, Unknown
  misc_feature (1)..( 6): Result.004 file - promoters60/5662895
tttatt

SEQ ID NO: 145737 - DNA, 6 bp, Unknown
  misc_feature (1)..( 6): Result.004 file - promoters60/5662895
tttatt

SEQ ID NO: 145738 - DNA, 9 bp, Unknown
  misc_feature (1)..( 9): Result.004 file - promoters60/5662895
tttccatac

SEQ ID NO: 145739 - DNA, 9 bp, Unknown
  misc_feature (1)..( 9): Result.004 file - promoters60/5662895
ttttcataa

SEQ ID NO: 145740 - DNA, 9 bp, Unknown
  misc_feature (1)..( 9): Result.004 file - promoters60/5662895
tttacataa

SEQ ID NO: 145741 - DNA, 7 bp, Unknown
  misc_feature (1)..( 7): Result.004 file - promoters60/5662895
agaagaa

SEQ ID NO: 145742 - DNA, 7 bp, Unknown
  misc_feature (1)..( 7): Result.004 file - promoters60/5662895
agatgaa

SEQ ID NO: 145743 - DNA, 9 bp, Unknown
  misc_feature (1)..( 9): Result.004 file - promoters60/5662895
tgtgtattt

SEQ ID NO: 145744 - DNA, 9 bp, Unknown
  misc_feature (1)..( 9): Result.004 file - promoters60/5662895
tgtggattt

SEQ ID NO: 145745 - DNA, 6 bp, Unknown
  misc_feature (1)..( 6): Result.004 file - promoters60/5662895
tcgaat

SEQ ID NO: 145746 - DNA, 6 bp, Unknown
  misc_feature (1)..( 6): Result.004 file - promoters60/5662895
tcgaat

SEQ ID NO: 145747 - DNA, 7 bp, Unknown
  misc_feature (1)..( 7): Result.004 file - promoters60/5662895
cattaaa

SEQ ID NO: 145748 - DNA, 7 bp, Unknown
  misc_feature (1)..( 7): Result.004 file - promoters60/5662895
cataaaa

SEQ ID NO: 145749 - DNA, 7 bp, Unknown
  misc_feature (1)..( 7): Result.004 file - promoters60/5662895
aatcgga

SEQ ID NO: 145750 - DNA, 7 bp, Unknown
  misc_feature (1)..( 7): Result.004 file - promoters60/5662895
aattgga

SEQ ID NO: 145751 - DNA, 7 bp, Unknown
  misc_feature (1)..( 7): Result.004 file - promoters60/5662895
ttcggat

SEQ ID NO: 145752 - DNA, 7 bp, Unknown
  misc_feature (1)..( 7): Result.004 file - promoters60/5662895
ttcagat

SEQ ID NO: 145753 - DNA, 6 bp, Unknown
  misc_feature (1)..( 6): Result.004 file - promoters60/5662895
ctgtaa

SEQ ID NO: 145754 - DNA, 6 bp, Unknown
  misc_feature (1)..( 6): Result.004 file - promoters60/5662895
ctgtaa

SEQ ID NO: 145755 - DNA, 6 bp, Unknown
  misc_feature (1)..( 6): Result.004 file - promoters60/5662895
aaaatg

SEQ ID NO: 145756 - DNA, 6 bp, Unknown
  misc_feature (1)..( 6): Result.004 file - promoters60/5662895
aaaatg

SEQ ID NO: 145757 - DNA, 8 bp, Unknown
  misc_feature (1)..( 8): Result.004 file - promoters60/5662895
ttatctaa

SEQ ID NO: 145758 - DNA, 8 bp, Unknown
  misc_feature (1)..( 8): Result.004 file - promoters60/5662895
ttatgtaa

SEQ ID NO: 145759 - DNA, 7 bp, Unknown
  misc_feature (1)..( 7): Result.004 file - promoters60/5662895
ttatctt

SEQ ID NO: 145760 - DNA, 7 bp, Unknown
  misc_feature (1)..( 7): Result.004 file - promoters60/5662895
ttatctt

SEQ ID NO: 145761 - DNA, 6 bp, Unknown
  misc_feature (1)..( 6): Result.004 file - promoters60/5662895
attttt

SEQ ID NO: 145762 - DNA, 6 bp, Unknown
  misc_feature (1)..( 6): Result.004 file - promoters60/5662914
attttt

SEQ ID NO: 145763 - DNA, 13 bp, Unknown
  misc_feature (1)..( 13): Result.004 file - promoters60/5662914
gaatttagaaaac

SEQ ID NO: 145764 - DNA, 13 bp, Unknown
  misc_feature (1)..( 13): Result.004 file - promoters60/5662914
caatttaaaaaca

SEQ ID NO: 145765 - DNA, 13 bp, Unknown
  misc_feature (1)..( 13): Result.004 file - promoters60/5662914
ttattaaaaaaaa

SEQ ID NO: 145766 - DNA, 13 bp, Unknown
  misc_feature (1)..( 13): Result.004 file - promoters60/5662914
tattttaaaacaa

SEQ ID NO: 145767 - DNA, 13 bp, Unknown
  misc_feature (1)..( 13): Result.004 file - promoters60/5662914
ttattgaaacgtt

SEQ ID NO: 145768 - DNA, 13 bp, Unknown
  misc_feature (1)..( 13): Result.004 file - promoters60/5662914
tttcttaaaagct

SEQ ID NO: 145769 - DNA, 13 bp, Unknown
  misc_feature (1)..( 13): Result.004 file - promoters60/5662914
caattaaacgctg

SEQ ID NO: 145770 - DNA, 12 bp, Unknown
  misc_feature (1)..( 12): Result.004 file - promoters60/5662914
aatttagaaaac

SEQ ID NO: 145771 - DNA, 12 bp, Unknown
  misc_feature (1)..( 12): Result.004 file - promoters60/5662914
ttattaaaaaaa

SEQ ID NO: 145772 - DNA, 12 bp, Unknown
  misc_feature (1)..( 12): Result.004 file - promoters60/5662914
aatttaaaaaca

SEQ ID NO: 145773 - DNA, 12 bp, Unknown
  misc_feature (1)..( 12): Result.004 file - promoters60/5662914
ttcttaaaagct

SEQ ID NO: 145774 - DNA, 12 bp, Unknown
  misc_feature (1)..( 12): Result.004 file - promoters60/5662914
attttaaaacaa

SEQ ID NO: 145775 - DNA, 12 bp, Unknown
  misc_feature (1)..( 12): Result.004 file - promoters60/5662914
tattgaaacgtt

SEQ ID NO: 145776 - DNA, 12 bp, Unknown
  misc_feature (1)..( 12): Result.004 file - promoters60/5662921
caattaaacgct

SEQ ID NO: 145777 - DNA, 7 bp, Unknown
  misc_feature (1)..( 7): Result.004 file - promoters60/5662921
tttctta

SEQ ID NO: 145778 - DNA, 7 bp, Unknown
  misc_feature (1)..( 7): Result.004 file - promoters60/5662921
tttttta

SEQ ID NO: 145779 - DNA, 6 bp, Unknown
  misc_feature (1)..( 6): Result.004 file - promoters60/5662921
aatgtt

SEQ ID NO: 145780 - DNA, 6 bp, Unknown
  misc_feature (1)..( 6): Result.004 file - promoters60/5662921
aatgtt

SEQ ID NO: 145781 - DNA, 9 bp, Unknown
  misc_feature (1)..( 9): Result.004 file - promoters60/5662921
taatttcaa

SEQ ID NO: 145782 - DNA, 9 bp, Unknown
  misc_feature (1)..( 9): Result.004 file - promoters60/5662921
taatttcca

SEQ ID NO: 145783 - DNA, 9 bp, Unknown
  misc_feature (1)..( 9): Result.004 file - promoters60/5662921
aaatttcaa

SEQ ID NO: 145784 - DNA, 8 bp, Unknown
  misc_feature (1)..( 8): Result.004 file - promoters60/5662921
tggtgtgt

SEQ ID NO: 145785 - DNA, 8 bp, Unknown
  misc_feature (1)..( 8): Result.004 file - promoters60/5662921
tggcgtgt

SEQ ID NO: 145786 - DNA, 8 bp, Unknown
  misc_feature (1)..( 8): Result.004 file - promoters60/5662921
caatctta

SEQ ID NO: 145787 - DNA, 8 bp, Unknown
  misc_feature (1)..( 8): Result.004 file - promoters60/5662921
aaatttta

SEQ ID NO: 145788 - DNA, 8 bp, Unknown
  misc_feature (1)..( 8): Result.004 file - promoters60/5662921
aaatttgt

SEQ ID NO: 145789 - DNA, 8 bp, Unknown
  misc_feature (1)..( 8): Result.004 file - promoters60/5662921
tatttaaa

SEQ ID NO: 145790 - DNA, 8 bp, Unknown
  misc_feature (1)..( 8): Result.004 file - promoters60/5662921
tatataaa

SEQ ID NO: 145791 - DNA, 7 bp, Unknown
  misc_feature (1)..( 7): Result.004 file - promoters60/5662921
aataatt

SEQ ID NO: 145792 - DNA, 7 bp, Unknown
  misc_feature (1)..( 7): Result.004 file - promoters60/5662921
aattatt

SEQ ID NO: 145793 - DNA, 7 bp, Unknown
  misc_feature (1)..( 7): Result.004 file - promoters60/5662921
taaaaaa

SEQ ID NO: 145794 - DNA, 7 bp, Unknown
  misc_feature (1)..( 7): Result.004 file - promoters60/5662921
taaaaaa

SEQ ID NO: 145795 - DNA, 6 bp, Unknown
  misc_feature (1)..( 6): Result.004 file - promoters60/5662921
gttcaa

SEQ ID NO: 145796 - DNA, 6 bp, Unknown
  misc_feature (1)..( 6): Result.004 file - promoters60/5662921
gttcaa

SEQ ID NO: 145797 - DNA, 6 bp, Unknown
  misc_feature (1)..( 6): Result.004 file - promoters60/5662921
ttttgg

SEQ ID NO: 145798 - DNA, 6 bp, Unknown
  misc_feature (1)..( 6): Result.004 file - promoters60/5662921
ttttgg

SEQ ID NO: 145799 - DNA, 8 bp, Unknown
  misc_feature (1)..( 8): Result.004 file - promoters60/5662921
ttgttttt

SEQ ID NO: 145800 - DNA, 8 bp, Unknown
  misc_feature (1)..( 8): Result.004 file - promoters60/5662921
ttggtttt

SEQ ID NO: 145801 - DNA, 8 bp, Unknown
  misc_feature (1)..( 8): Result.004 file - promoters60/5662921
aaacaaaa

SEQ ID NO: 145802 - DNA, 8 bp, Unknown
  misc_feature (1)..( 8): Result.004 file - promoters60/5662921
aaaaaaaa

SEQ ID NO: 145803 - DNA, 8 bp, Unknown
  misc_feature (1)..( 8): Result.004 file - promoters60/5662921
atacacaa

SEQ ID NO: 145804 - DNA, 8 bp, Unknown
  misc_feature (1)..( 8): Result.004 file - promoters60/5662921
atagacaa

SEQ ID NO: 145805 - DNA, 7 bp, Unknown
  misc_feature (1)..( 7): Result.004 file - promoters60/5662921
attataa

SEQ ID NO: 145806 - DNA, 7 bp, Unknown
  misc_feature (1)..( 7): Result.004 file - promoters60/5662921
attataa

SEQ ID NO: 145807 - DNA, 7 bp, Unknown
  misc_feature (1)..( 7): Result.004 file - promoters60/5662921
gtccttt

SEQ ID NO: 145808 - DNA, 7 bp, Unknown
  misc_feature (1)..( 7): Result.004 file - promoters60/5662921
gtctttt

SEQ ID NO: 145809 - DNA, 6 bp, Unknown
  misc_feature (1)..( 6): Result.004 file - promoters60/5662921
ttaaaa

SEQ ID NO: 145810 - DNA, 6 bp, Unknown
  misc_feature (1)..( 6): Result.004 file - promoters60/5662921
ttaaaa

SEQ ID NO: 145811 - DNA, 6 bp, Unknown
  misc_feature (1)..( 6): Result.004 file - promoters60/5662921
gaataa

SEQ ID NO: 145812 - DNA, 6 bp, Unknown
  misc_feature (1)..( 6): Result.004 file - promoters60/5662921
gaataa

SEQ ID NO: 145813 - DNA, 6 bp, Unknown
  misc_feature (1)..( 6): Result.004 file - promoters60/5662921
gagaga

SEQ ID NO: 145814 - DNA, 6 bp, Unknown
  misc_feature (1)..( 6): Result.004 file - promoters60/5662945
gagaga

SEQ ID NO: 145815 - DNA, 9 bp, Unknown
  misc_feature (1)..( 9): Result.004 file - promoters60/5662945
gaatgtgaa

SEQ ID NO: 145816 - DNA, 9 bp, Unknown
  misc_feature (1)..( 9): Result.004 file - promoters60/5662945
gaatttgaa

SEQ ID NO: 145817 - DNA, 7 bp, Unknown
  misc_feature (1)..( 7): Result.004 file - promoters60/5662945
ccaagaa

SEQ ID NO: 145818 - DNA, 7 bp, Unknown
  misc_feature (1)..( 7): Result.004 file - promoters60/5662945
ccaagaa

SEQ ID NO: 145819 - DNA, 7 bp, Unknown
  misc_feature (1)..( 7): Result.004 file - promoters60/5662945
ccaagat

SEQ ID NO: 145820 - DNA, 6 bp, Unknown
  misc_feature (1)..( 6): Result.004 file - promoters60/5662945
tttcct

SEQ ID NO: 145821 - DNA, 6 bp, Unknown
  misc_feature (1)..( 6): Result.004 file - promoters60/5662945
tttcct

SEQ ID NO: 145822 - DNA, 7 bp, Unknown
  misc_feature (1)..( 7): Result.004 file - promoters60/5662945
agaatct

SEQ ID NO: 145823 - DNA, 7 bp, Unknown
  misc_feature (1)..( 7): Result.004 file - promoters60/5662945
agagtct

SEQ ID NO: 145824 - DNA, 8 bp, Unknown
  misc_feature (1)..( 8): Result.004 file - promoters60/5662945
ttgtagaa

SEQ ID NO: 145825 - DNA, 8 bp, Unknown
  misc_feature (1)..( 8): Result.004 file - promoters60/5662945
ttgcagaa

SEQ ID NO: 145826 - DNA, 6 bp, Unknown
  misc_feature (1)..( 6): Result.004 file - promoters60/5662945
caaaac

SEQ ID NO: 145827 - DNA, 6 bp, Unknown
  misc_feature (1)..( 6): Result.004 file - promoters60/5662945
caaaac

SEQ ID NO: 145828 - DNA, 8 bp, Unknown
  misc_feature (1)..( 8): Result.004 file - promoters60/5662945
attgtttg

SEQ ID NO: 145829 - DNA, 8 bp, Unknown
  misc_feature (1)..( 8): Result.004 file - promoters60/5662945
attatttg

SEQ ID NO: 145830 - DNA, 8 bp, Unknown
  misc_feature (1)..( 8): Result.004 file - promoters60/5662945
tttgtttg

SEQ ID NO: 145831 - DNA, 7 bp, Unknown
  misc_feature (1)..( 7): Result.004 file - promoters60/5662945
caactga

SEQ ID NO: 145832 - DNA, 7 bp, Unknown
  misc_feature (1)..( 7): Result.004 file - promoters60/5662945
caaatga

SEQ ID NO: 145833 - DNA, 8 bp, Unknown
  misc_feature (1)..( 8): Result.004 file - promoters60/5662945
acacgtgg

SEQ ID NO: 145834 - DNA, 8 bp, Unknown
  misc_feature (1)..( 8): Result.004 file - promoters60/5662945
acatgtgg

SEQ ID NO: 145835 - DNA, 6 bp, Unknown
  misc_feature (1)..( 6): Result.004 file - promoters60/5662945
ttgttt

SEQ ID NO: 145836 - DNA, 6 bp, Unknown
  misc_feature (1)..( 6): Result.004 file - promoters60/5662945
ttgttt

SEQ ID NO: 145837 - DNA, 6 bp, Unknown
  misc_feature (1)..( 6): Result.004 file - promoters60/5662945
tttctt

SEQ ID NO: 145838 - DNA, 6 bp, Unknown
  misc_feature (1)..( 6): Result.004 file - promoters60/5662945
tttctt

SEQ ID NO: 145839 - DNA, 10 bp, Unknown
  misc_feature (1)..( 10): Result.004 file - promoters60/5662945
gtcatattga

SEQ ID NO: 145840 - DNA, 10 bp, Unknown
  misc_feature (1)..( 10): Result.004 file - promoters60/5662945
gtcattttga

SEQ ID NO: 145841 - DNA, 6 bp, Unknown
  misc_feature (1)..( 6): Result.004 file - promoters60/5662945
aattga

SEQ ID NO: 145842 - DNA, 6 bp, Unknown
  misc_feature (1)..( 6): Result.004 file - promoters60/5662945
aattga

SEQ ID NO: 145843 - DNA, 6 bp, Unknown
  misc_feature (1)..( 6): Result.004 file - promoters60/5662945
ctacct

SEQ ID NO: 145844 - DNA, 6 bp, Unknown
  misc_feature (1)..( 6): Result.004 file - promoters60/5662945
ctacct

SEQ ID NO: 145845 - DNA, 9 bp, Unknown
  misc_feature (1)..( 9): Result.004 file - promoters60/5662945
acgtgaccg

SEQ ID NO: 145846 - DNA, 9 bp, Unknown
  misc_feature (1)..( 9): Result.004 file - promoters60/5662948
acgtaaccg

SEQ ID NO: 145847 - DNA, 6 bp, Unknown
  misc_feature (1)..( 6): Result.004 file - promoters60/5662948
ggaacc

SEQ ID NO: 145848 - DNA, 6 bp, Unknown
  misc_feature (1)..( 6): Result.004 file - promoters60/5662948
ggaacc

SEQ ID NO: 145849 - DNA, 10 bp, Unknown
  misc_feature (1)..( 10): Result.004 file - promoters60/5662948
tatcactgca

SEQ ID NO: 145850 - DNA, 10 bp, Unknown
  misc_feature (1)..( 10): Result.004 file - promoters60/5662948
tatctctgca

SEQ ID NO: 145851 - DNA, 7 bp, Unknown
  misc_feature (1)..( 7): Result.004 file - promoters60/5662948
tgtcgtt

SEQ ID NO: 145852 - DNA, 7 bp, Unknown
  misc_feature (1)..( 7): Result.004 file - promoters60/5662948
tgtggtt

SEQ ID NO: 145853 - DNA, 6 bp, Unknown
  misc_feature (1)..( 6): Result.004 file - promoters60/5662948
aagata

SEQ ID NO: 145854 - DNA, 6 bp, Unknown
  misc_feature (1)..( 6): Result.004 file - promoters60/5662948
aagata

SEQ ID NO: 145855 - DNA, 10 bp, Unknown
  misc_feature (1)..( 10): Result.004 file - promoters60/5662948
tacgatcatc

SEQ ID NO: 145856 - DNA, 10 bp, Unknown
  misc_feature (1)..( 10): Result.004 file - promoters60/5662948
tactatcatc

SEQ ID NO: 145857 - DNA, 7 bp, Unknown
  misc_feature (1)..( 7): Result.004 file - promoters60/5662948
tcttgta

SEQ ID NO: 145858 - DNA, 7 bp, Unknown
  misc_feature (1)..( 7): Result.004 file - promoters60/5662948
tctggta

SEQ ID NO: 145859 - DNA, 7 bp, Unknown
  misc_feature (1)..( 7): Result.004 file - promoters60/5662948
tttgttg

SEQ ID NO: 145860 - DNA, 7 bp, Unknown
  misc_feature (1)..( 7): Result.004 file - promoters60/5662948
tttcttg

SEQ ID NO: 145861 - DNA, 6 bp, Unknown
  misc_feature (1)..( 6): Result.004 file - promoters60/5662948
tccatt

SEQ ID NO: 145862 - DNA, 6 bp, Unknown
  misc_feature (1)..( 6): Result.004 file - promoters60/5662948
tccatt

SEQ ID NO: 145863 - DNA, 9 bp, Unknown
  misc_feature (1)..( 9): Result.004 file - promoters60/5662948
tttattgtt

SEQ ID NO: 145864 - DNA, 9 bp, Unknown
  misc_feature (1)..( 9): Result.004 file - promoters60/5662948
ttttttgtt

SEQ ID NO: 145865 - DNA, 7 bp, Unknown
  misc_feature (1)..( 7): Result.004 file - promoters60/5662948
caagatt

SEQ ID NO: 145866 - DNA, 7 bp, Unknown
  misc_feature (1)..( 7): Result.004 file - promoters60/5662948
caatatt

SEQ ID NO: 145867 - DNA, 7 bp, Unknown
  misc_feature (1)..( 7): Result.004 file - promoters60/5662948
acatgtt

SEQ ID NO: 145868 - DNA, 7 bp, Unknown
  misc_feature (1)..( 7): Result.004 file - promoters60/5662967
acaagtt

SEQ ID NO: 145869 - DNA, 11 bp, Unknown
  misc_feature (1)..( 11): Result.004 file - promoters60/5662967
aaaatattaac

SEQ ID NO: 145870 - DNA, 11 bp, Unknown
  misc_feature (1)..( 11): Result.004 file - promoters60/5662967
taaaaattaaa

SEQ ID NO: 145871 - DNA, 11 bp, Unknown
  misc_feature (1)..( 11): Result.004 file - promoters60/5662967
ggattattaac

SEQ ID NO: 145872 - DNA, 11 bp, Unknown
  misc_feature (1)..( 11): Result.004 file - promoters60/5662967
gtaaaatttca

SEQ ID NO: 145873 - DNA, 11 bp, Unknown
  misc_feature (1)..( 11): Result.004 file - promoters60/5662967
taacaattcta

SEQ ID NO: 145874 - DNA, 11 bp, Unknown
  misc_feature (1)..( 11): Result.004 file - promoters60/5662967
gaacaagtctc

SEQ ID NO: 145875 - DNA, 11 bp, Unknown
  misc_feature (1)..( 11): Result.004 file - promoters60/5662967
taacaaaaaag

SEQ ID NO: 145876 - DNA, 15 bp, Unknown
  misc_feature (1)..( 15): Result.004 file - promoters60/5662967
taaccttgagtttag

SEQ ID NO: 145877 - DNA, 15 bp, Unknown
  misc_feature (1)..( 15): Result.004 file - promoters60/5662967
agttggatagtttaa

SEQ ID NO: 145878 - DNA, 15 bp, Unknown
  misc_feature (1)..( 15): Result.004 file - promoters60/5662967
caactatgactttat

SEQ ID NO: 145879 - DNA, 15 bp, Unknown
  misc_feature (1)..( 15): Result.004 file - promoters60/5662967
gtagattgatttttg

SEQ ID NO: 145880 - DNA, 15 bp, Unknown
  misc_feature (1)..( 15): Result.004 file - promoters60/5662967
caactaagactgagc

SEQ ID NO: 145881 - DNA, 15 bp, Unknown
  misc_feature (1)..( 15): Result.004 file - promoters60/5662967
gcacaatgatggatt

SEQ ID NO: 145882 - DNA, 9 bp, Unknown
  misc_feature (1)..( 9): Result.004 file - promoters60/5662967
aaaaataaa

SEQ ID NO: 145883 - DNA, 9 bp, Unknown
  misc_feature (1)..( 9): Result.004 file - promoters60/5662967
aaaattaat

SEQ ID NO: 145884 - DNA, 9 bp, Unknown
  misc_feature (1)..( 9): Result.004 file - promoters60/5662967
taaaataca

SEQ ID NO: 145885 - DNA, 9 bp, Unknown
  misc_feature (1)..( 9): Result.004 file - promoters60/5662967
gataatatt

SEQ ID NO: 145886 - DNA, 9 bp, Unknown
  misc_feature (1)..( 9): Result.004 file - promoters60/5662967
tatattaat

SEQ ID NO: 145887 - DNA, 9 bp, Unknown
  misc_feature (1)..( 9): Result.004 file - promoters60/5662967
aaaattcct

SEQ ID NO: 145888 - DNA, 10 bp, Unknown
  misc_feature (1)..( 10): Result.004 file - promoters60/5662967
aaataaaagc

SEQ ID NO: 145889 - DNA, 10 bp, Unknown
  misc_feature (1)..( 10): Result.004 file - promoters60/5662967
caataaaatt

SEQ ID NO: 145890 - DNA, 10 bp, Unknown
  misc_feature (1)..( 10): Result.004 file - promoters60/5662967
ttataaaata

SEQ ID NO: 145891 - DNA, 10 bp, Unknown
  misc_feature (1)..( 10): Result.004 file - promoters60/5662967
agataatatt

SEQ ID NO: 145892 - DNA, 10 bp, Unknown
  misc_feature (1)..( 10): Result.004 file - promoters60/5662967
caaaaaactt

SEQ ID NO: 145893 - DNA, 10 bp, Unknown
  misc_feature (1)..( 10): Result.004 file - promoters60/5662967
atatagttct

SEQ ID NO: 145894 - DNA, 9 bp, Unknown
  misc_feature (1)..( 9): Result.004 file - promoters60/5662967
aaaaacaaa

SEQ ID NO: 145895 - DNA, 9 bp, Unknown
  misc_feature (1)..( 9): Result.004 file - promoters60/5662967
ataaataaa

SEQ ID NO: 145896 - DNA, 9 bp, Unknown
  misc_feature (1)..( 9): Result.004 file - promoters60/5662967
tcaaacaaa

SEQ ID NO: 145897 - DNA, 9 bp, Unknown
  misc_feature (1)..( 9): Result.004 file - promoters60/5662967
ttaaaaaaa

SEQ ID NO: 145898 - DNA, 9 bp, Unknown
  misc_feature (1)..( 9): Result.004 file - promoters60/5662967
ttaactaat

SEQ ID NO: 145899 - DNA, 9 bp, Unknown
  misc_feature (1)..( 9): Result.004 file - promoters60/5662967
ttaaaaatg

SEQ ID NO: 145900 - DNA, 12 bp, Unknown
  misc_feature (1)..( 12): Result.004 file - promoters60/5662967
tcatattattag

SEQ ID NO: 145901 - DNA, 12 bp, Unknown
  misc_feature (1)..( 12): Result.004 file - promoters60/5662967
aaatattattag

SEQ ID NO: 145902 - DNA, 12 bp, Unknown
  misc_feature (1)..( 12): Result.004 file - promoters60/5662967
tgttattatatt

SEQ ID NO: 145903 - DNA, 12 bp, Unknown
  misc_feature (1)..( 12): Result.004 file - promoters60/5662967
tgatataattat

SEQ ID NO: 145904 - DNA, 12 bp, Unknown
  misc_feature (1)..( 12): Result.004 file - promoters60/5662967
tcatattcgtat

SEQ ID NO: 145905 - DNA, 12 bp, Unknown
  misc_feature (1)..( 12): Result.004 file - promoters60/5662967
gaatattactaa

SEQ ID NO: 145906 - DNA, 12 bp, Unknown
  misc_feature (1)..( 12): Result.004 file - promoters60/5662967
gattatcatttt

SEQ ID NO: 145907 - DNA, 7 bp, Unknown
  misc_feature (1)..( 7): Result.004 file - promoters60/5662967
tttgttt

SEQ ID NO: 145908 - DNA, 7 bp, Unknown
  misc_feature (1)..( 7): Result.004 file - promoters60/5662967
tttattt

SEQ ID NO: 145909 - DNA, 7 bp, Unknown
  misc_feature (1)..( 7): Result.004 file - promoters60/5662967
tttgttt

SEQ ID NO: 145910 - DNA, 7 bp, Unknown
  misc_feature (1)..( 7): Result.004 file - promoters60/5662967
tttgttt

SEQ ID NO: 145911 - DNA, 7 bp, Unknown
  misc_feature (1)..( 7): Result.004 file - promoters60/5662967
tatgtct

SEQ ID NO: 145912 - DNA, 8 bp, Unknown
  misc_feature (1)..( 8): Result.004 file - promoters60/5662967
tttcattt

SEQ ID NO: 145913 - DNA, 8 bp, Unknown
  misc_feature (1)..( 8): Result.004 file - promoters60/5662967
ttttataa

SEQ ID NO: 145914 - DNA, 13 bp, Unknown
  misc_feature (1)..( 13): Result.004 file - promoters60/5662967
gtttccaatatgt

SEQ ID NO: 145915 - DNA, 13 bp, Unknown
  misc_feature (1)..( 13): Result.004 file - promoters60/5662967
gtttcaaatacaa

SEQ ID NO: 145916 - DNA, 13 bp, Unknown
  misc_feature (1)..( 13): Result.004 file - promoters60/5662967
agatcaaataggt

SEQ ID NO: 145917 - DNA, 13 bp, Unknown
  misc_feature (1)..( 13): Result.004 file - promoters60/5662967
gaaaaaaagacaa

SEQ ID NO: 145918 - DNA, 13 bp, Unknown
  misc_feature (1)..( 13): Result.004 file - promoters60/5662967
aagcaaaatagaa

SEQ ID NO: 145919 - DNA, 13 bp, Unknown
  misc_feature (1)..( 13): Result.004 file - promoters60/5662967
ggtcacaatatat

SEQ ID NO: 145920 - DNA, 11 bp, Unknown
  misc_feature (1)..( 11): Result.004 file - promoters60/5662967
aaaaactaatg

SEQ ID NO: 145921 - DNA, 11 bp, Unknown
  misc_feature (1)..( 11): Result.004 file - promoters60/5662967
gaaaactcatt

SEQ ID NO: 145922 - DNA, 12 bp, Unknown
  misc_feature (1)..( 12): Result.004 file - promoters60/5662967
gtgaaagtaatg

SEQ ID NO: 145923 - DNA, 12 bp, Unknown
  misc_feature (1)..( 12): Result.004 file - promoters60/5662967
aaataactaata

SEQ ID NO: 145924 - DNA, 12 bp, Unknown
  misc_feature (1)..( 12): Result.004 file - promoters60/5662967
attaaagtcaca

SEQ ID NO: 145925 - DNA, 12 bp, Unknown
  misc_feature (1)..( 12): Result.004 file - promoters60/5662977
aaataaacaaaa

SEQ ID NO: 145926 - DNA, 7 bp, Unknown
  misc_feature (1)..( 7): Result.004 file - promoters60/5662977
gttcctt

SEQ ID NO: 145927 - DNA, 7 bp, Unknown
  misc_feature (1)..( 7): Result.004 file - promoters60/5662977
gtttctt

SEQ ID NO: 145928 - DNA, 7 bp, Unknown
  misc_feature (1)..( 7): Result.004 file - promoters60/5662977
gttcctc

SEQ ID NO: 145929 - DNA, 8 bp, Unknown
  misc_feature (1)..( 8): Result.004 file - promoters60/5662977
aaatgtta

SEQ ID NO: 145930 - DNA, 8 bp, Unknown
  misc_feature (1)..( 8): Result.004 file - promoters60/5662977
aaaagttt

SEQ ID NO: 145931 - DNA, 8 bp, Unknown
  misc_feature (1)..( 8): Result.004 file - promoters60/5662977
caatttta

SEQ ID NO: 145932 - DNA, 7 bp, Unknown
  misc_feature (1)..( 7): Result.004 file - promoters60/5662977
gttgatt

SEQ ID NO: 145933 - DNA, 7 bp, Unknown
  misc_feature (1)..( 7): Result.004 file - promoters60/5662977
gttgatg

SEQ ID NO: 145934 - DNA, 7 bp, Unknown
  misc_feature (1)..( 7): Result.004 file - promoters60/5662977
gttaatt

SEQ ID NO: 145935 - DNA, 8 bp, Unknown
  misc_feature (1)..( 8): Result.004 file - promoters60/5662977
cgacatgt

SEQ ID NO: 145936 - DNA, 8 bp, Unknown
  misc_feature (1)..( 8): Result.004 file - promoters60/5662977
cgacatta

SEQ ID NO: 145937 - DNA, 8 bp, Unknown
  misc_feature (1)..( 8): Result.004 file - promoters60/5662977
cgacatgt

SEQ ID NO: 145938 - DNA, 8 bp, Unknown
  misc_feature (1)..( 8): Result.004 file - promoters60/5662977
acacatgt

SEQ ID NO: 145939 - DNA, 6 bp, Unknown
  misc_feature (1)..( 6): Result.004 file - promoters60/5662977
acatgt

SEQ ID NO: 145940 - DNA, 6 bp, Unknown
  misc_feature (1)..( 6): Result.004 file - promoters60/5662977
acatgt

SEQ ID NO: 145941 - DNA, 6 bp, Unknown
  misc_feature (1)..( 6): Result.004 file - promoters60/5662992
acatgt

SEQ ID NO: 145942 - DNA, 6 bp, Unknown
  misc_feature (1)..( 6): Result.004 file - promoters60/5662992
tatttc

SEQ ID NO: 145943 - DNA, 6 bp, Unknown
  misc_feature (1)..( 6): Result.004 file - promoters60/5662992
tatttc

SEQ ID NO: 145944 - DNA, 6 bp, Unknown
  misc_feature (1)..( 6): Result.004 file - promoters60/5662992
acattt

SEQ ID NO: 145945 - DNA, 6 bp, Unknown
  misc_feature (1)..( 6): Result.004 file - promoters60/5662992
acattt

SEQ ID NO: 145946 - DNA, 9 bp, Unknown
  misc_feature (1)..( 9): Result.004 file - promoters60/5662992
atttatata

SEQ ID NO: 145947 - DNA, 9 bp, Unknown
  misc_feature (1)..( 9): Result.004 file - promoters60/5662992
attaatatc

SEQ ID NO: 145948 - DNA, 9 bp, Unknown
  misc_feature (1)..( 9): Result.004 file - promoters60/5662992
aattatata

SEQ ID NO: 145949 - DNA, 8 bp, Unknown
  misc_feature (1)..( 8): Result.004 file - promoters60/5662992
ctatttaa

SEQ ID NO: 145950 - DNA, 8 bp, Unknown
  misc_feature (1)..( 8): Result.004 file - promoters60/5662992
atatataa

SEQ ID NO: 145951 - DNA, 8 bp, Unknown
  misc_feature (1)..( 8): Result.004 file - promoters60/5662992
atatatta

SEQ ID NO: 145952 - DNA, 7 bp, Unknown
  misc_feature (1)..( 7): Result.004 file - promoters60/5662992
ttcgttt

SEQ ID NO: 145953 - DNA, 7 bp, Unknown
  misc_feature (1)..( 7): Result.004 file - promoters60/5662992
ttctttt

SEQ ID NO: 145954 - DNA, 8 bp, Unknown
  misc_feature (1)..( 8): Result.004 file - promoters60/5662992
attttact

SEQ ID NO: 145955 - DNA, 8 bp, Unknown
  misc_feature (1)..( 8): Result.004 file - promoters60/5662992
attttaaa

SEQ ID NO: 145956 - DNA, 8 bp, Unknown
  misc_feature (1)..( 8): Result.004 file - promoters60/5662992
gttttaaa

SEQ ID NO: 145957 - DNA, 11 bp, Unknown
  misc_feature (1)..( 11): Result.004 file - promoters60/5662992
tcacaatttac

SEQ ID NO: 145958 - DNA, 11 bp, Unknown
  misc_feature (1)..( 11): Result.004 file - promoters60/5662992
aactaatttaa

SEQ ID NO: 145959 - DNA, 11 bp, Unknown
  misc_feature (1)..( 11): Result.004 file - promoters60/5662992
aacaaatgtaa

SEQ ID NO: 145960 - DNA, 6 bp, Unknown
  misc_feature (1)..( 6): Result.004 file - promoters60/5662992
atataa

SEQ ID NO: 145961 - DNA, 6 bp, Unknown
  misc_feature (1)..( 6): Result.004 file - promoters60/5662992
atataa

SEQ ID NO: 145962 - DNA, 10 bp, Unknown
  misc_feature (1)..( 10): Result.004 file - promoters60/5662992
aattattttc

SEQ ID NO: 145963 - DNA, 10 bp, Unknown
  misc_feature (1)..( 10): Result.004 file - promoters60/5662992
aatttttttc

SEQ ID NO: 145964 - DNA, 6 bp, Unknown
  misc_feature (1)..( 6): Result.004 file - promoters60/5662992
tttggt

SEQ ID NO: 145965 - DNA, 6 bp, Unknown
  misc_feature (1)..( 6): Result.004 file - promoters60/5662992
tttggt

SEQ ID NO: 145966 - DNA, 7 bp, Unknown
  misc_feature (1)..( 7): Result.004 file - promoters60/5662992
tcttaaa

SEQ ID NO: 145967 - DNA, 7 bp, Unknown
  misc_feature (1)..( 7): Result.004 file - promoters60/5662992
tctaaaa

SEQ ID NO: 145968 - DNA, 6 bp, Unknown
  misc_feature (1)..( 6): Result.004 file - promoters60/5662992
gtaact

SEQ ID NO: 145969 - DNA, 6 bp, Unknown
  misc_feature (1)..( 6): Result.004 file - promoters60/5662992
gtaact

SEQ ID NO: 145970 - DNA, 6 bp, Unknown
  misc_feature (1)..( 6): Result.004 file - promoters60/5662992
cgaaaa

SEQ ID NO: 145971 - DNA, 6 bp, Unknown
  misc_feature (1)..( 6): Result.004 file - promoters60/5662992
cgaaaa

SEQ ID NO: 145972 - DNA, 7 bp, Unknown
  misc_feature (1)..( 7): Result.004 file - promoters60/5662992
aaattat

SEQ ID NO: 145973 - DNA, 7 bp, Unknown
  misc_feature (1)..( 7): Result.004 file - promoters60/5662992
aaaatat

SEQ ID NO: 145974 - DNA, 6 bp, Unknown
  misc_feature (1)..( 6): Result.004 file - promoters60/5662992
tatttt

SEQ ID NO: 145975 - DNA, 6 bp, Unknown
  misc_feature (1)..( 6): Result.004 file - promoters60/5662992
tatttt

SEQ ID NO: 145976 - DNA, 7 bp, Unknown
  misc_feature (1)..( 7): Result.004 file - promoters60/5662992
tttccta

SEQ ID NO: 145977 - DNA, 7 bp, Unknown
  misc_feature (1)..( 7): Result.004 file - promoters60/5662992
ttttcta

SEQ ID NO: 145978 - DNA, 10 bp, Unknown
  misc_feature (1)..( 10): Result.004 file - promoters60/5662992
taattagaaa

SEQ ID NO: 145979 - DNA, 10 bp, Unknown
  misc_feature (1)..( 10): Result.004 file - promoters60/5662992
taattcgaaa

SEQ ID NO: 145980 - DNA, 6 bp, Unknown
  misc_feature (1)..( 6): Result.004 file - promoters60/5662992
aaacat

SEQ ID NO: 145981 - DNA, 6 bp, Unknown
  misc_feature (1)..( 6): Result.004 file - promoters60/5662999
aaacat

SEQ ID NO: 145982 - DNA, 9 bp, Unknown
  misc_feature (1)..( 9): Result.004 file - promoters60/5662999
tagagaatg

SEQ ID NO: 145983 - DNA, 9 bp, Unknown
  misc_feature (1)..( 9): Result.004 file - promoters60/5662999
tagacaatg

SEQ ID NO: 145984 - DNA, 7 bp, Unknown
  misc_feature (1)..( 7): Result.004 file - promoters60/5662999
gatgttg

SEQ ID NO: 145985 - DNA, 7 bp, Unknown
  misc_feature (1)..( 7): Result.004 file - promoters60/5662999
gatgttg

SEQ ID NO: 145986 - DNA, 7 bp, Unknown
  misc_feature (1)..( 7): Result.004 file - promoters60/5662999
ctggttc

SEQ ID NO: 145987 - DNA, 7 bp, Unknown
  misc_feature (1)..( 7): Result.004 file - promoters60/5662999
ctgcttc

SEQ ID NO: 145988 - DNA, 7 bp, Unknown
  misc_feature (1)..( 7): Result.004 file - promoters60/5662999
ctgaatc

SEQ ID NO: 145989 - DNA, 7 bp, Unknown
  misc_feature (1)..( 7): Result.004 file - promoters60/5662999
ctgcatc

SEQ ID NO: 145990 - DNA, 7 bp, Unknown
  misc_feature (1)..( 7): Result.004 file - promoters60/5662999
tgtatag

SEQ ID NO: 145991 - DNA, 7 bp, Unknown
  misc_feature (1)..( 7): Result.004 file - promoters60/5662999
tgtatag

SEQ ID NO: 145992 - DNA, 7 bp, Unknown
  misc_feature (1)..( 7): Result.004 file - promoters60/5662999
aataagt

SEQ ID NO: 145993 - DNA, 7 bp, Unknown
  misc_feature (1)..( 7): Result.004 file - promoters60/5662999
aatgagt

SEQ ID NO: 145994 - DNA, 7 bp, Unknown
  misc_feature (1)..( 7): Result.004 file - promoters60/5662999
caaaaga

SEQ ID NO: 145995 - DNA, 7 bp, Unknown
  misc_feature (1)..( 7): Result.004 file - promoters60/5662999
caagaga

SEQ ID NO: 145996 - DNA, 7 bp, Unknown
  misc_feature (1)..( 7): Result.004 file - promoters60/5662999
ctcctca

SEQ ID NO: 145997 - DNA, 7 bp, Unknown
  misc_feature (1)..( 7): Result.004 file - promoters60/5662999
ctcttca

SEQ ID NO: 145998 - DNA, 6 bp, Unknown
  misc_feature (1)..( 6): Result.004 file - promoters60/5662999
atataa

SEQ ID NO: 145999 - DNA, 6 bp, Unknown
  misc_feature (1)..( 6): Result.004 file - promoters60/5662999
atataa

SEQ ID NO: 146000 - DNA, 6 bp, Unknown
  misc_feature (1)..( 6): Result.004 file - promoters60/5662999
aatctg

SEQ ID NO: 146001 - DNA, 6 bp, Unknown
  misc_feature (1)..( 6): Result.004 file - promoters60/5662999
aatctg

SEQ ID NO: 146002 - DNA, 7 bp, Unknown
  misc_feature (1)..( 7): Result.004 file - promoters60/5662999
tttttaa

SEQ ID NO: 146003 - DNA, 7 bp, Unknown
  misc_feature (1)..( 7): Result.004 file - promoters60/5662999
tttttaa

SEQ ID NO: 146004 - DNA, 8 bp, Unknown
  misc_feature (1)..( 8): Result.004 file - promoters60/5662999
acatttta

SEQ ID NO: 146005 - DNA, 8 bp, Unknown
  misc_feature (1)..( 8): Result.004 file - promoters60/5662999
acaattta

SEQ ID NO: 146006 - DNA, 7 bp, Unknown
  misc_feature (1)..( 7): Result.004 file - promoters60/5662999
caagaaa

SEQ ID NO: 146007 - DNA, 7 bp, Unknown
  misc_feature (1)..( 7): Result.004 file - promoters60/5662999
caataaa

SEQ ID NO: 146008 - DNA, 9 bp, Unknown
  misc_feature (1)..( 9): Result.004 file - promoters60/5662999
aaaagagta

SEQ ID NO: 146009 - DNA, 9 bp, Unknown
  misc_feature (1)..( 9): Result.004 file - promoters60/5662999
aaaagggta

SEQ ID NO: 146010 - DNA, 6 bp, Unknown
  misc_feature (1)..( 6): Result.004 file - promoters60/5662999
ttttgt

SEQ ID NO: 146011 - DNA, 6 bp, Unknown
  misc_feature (1)..( 6): Result.004 file - promoters60/5662999
ttttgt

SEQ ID NO: 146012 - DNA, 8 bp, Unknown
  misc_feature (1)..( 8): Result.004 file - promoters60/5662999
attgcata

SEQ ID NO: 146013 - DNA, 8 bp, Unknown
  misc_feature (1)..( 8): Result.004 file - promoters60/5662999
attgtata

SEQ ID NO: 146014 - DNA, 7 bp, Unknown
  misc_feature (1)..( 7): Result.004 file - promoters60/5662999
tggagtg

SEQ ID NO: 146015 - DNA, 7 bp, Unknown
  misc_feature (1)..( 7): Result.004 file - promoters60/5662999
tggtgtg

SEQ ID NO: 146016 - DNA, 6 bp, Unknown
  misc_feature (1)..( 6): Result.004 file - promoters60/5662999
catatt

SEQ ID NO: 146017 - DNA, 6 bp, Unknown
  misc_feature (1)..( 6): Result.004 file - promoters60/5662999
catatt

SEQ ID NO: 146018 - DNA, 6 bp, Unknown
  misc_feature (1)..( 6): Result.004 file - promoters60/5662999
tttact

SEQ ID NO: 146019 - DNA, 6 bp, Unknown
  misc_feature (1)..( 6): Result.004 file - promoters60/5662999
tttact

SEQ ID NO: 146020 - DNA, 6 bp, Unknown
  misc_feature (1)..( 6): Result.004 file - promoters60/5662999
ttttgt

SEQ ID NO: 146021 - DNA, 6 bp, Unknown
  misc_feature (1)..( 6): Result.004 file - promoters60/5662999
ttttgt

SEQ ID NO: 146022 - DNA, 10 bp, Unknown
  misc_feature (1)..( 10): Result.004 file - promoters60/5662999
agttattctc

SEQ ID NO: 146023 - DNA, 10 bp, Unknown
  misc_feature (1)..( 10): Result.004 file - promoters60/5663003
agttaatctc

SEQ ID NO: 146024 - DNA, 12 bp, Unknown
  misc_feature (1)..( 12): Result.004 file - promoters60/5663003
ccctctcttcct

SEQ ID NO: 146025 - DNA, 12 bp, Unknown
  misc_feature (1)..( 12): Result.004 file - promoters60/5663003
ttctcttttcct

SEQ ID NO: 146026 - DNA, 12 bp, Unknown
  misc_feature (1)..( 12): Result.004 file - promoters60/5663003
acctcttttggg

SEQ ID NO: 146027 - DNA, 12 bp, Unknown
  misc_feature (1)..( 12): Result.004 file - promoters60/5663003
accccttagccg

SEQ ID NO: 146028 - DNA, 8 bp, Unknown
  misc_feature (1)..( 8): Result.004 file - promoters60/5663003
taaaacaa

SEQ ID NO: 146029 - DNA, 8 bp, Unknown
  misc_feature (1)..( 8): Result.004 file - promoters60/5663003
aaaaacag

SEQ ID NO: 146030 - DNA, 8 bp, Unknown
  misc_feature (1)..( 8): Result.004 file - promoters60/5663003
agaaacaa

SEQ ID NO: 146031 - DNA, 8 bp, Unknown
  misc_feature (1)..( 8): Result.004 file - promoters60/5663003
aaaaacaa

SEQ ID NO: 146032 - DNA, 13 bp, Unknown
  misc_feature (1)..( 13): Result.004 file - promoters60/5663003
ctaaaatagtaaa

SEQ ID NO: 146033 - DNA, 13 bp, Unknown
  misc_feature (1)..( 13): Result.004 file - promoters60/5663003
aaataattgtata

SEQ ID NO: 146034 - DNA, 13 bp, Unknown
  misc_feature (1)..( 13): Result.004 file - promoters60/5663003
tcatatttgtata

SEQ ID NO: 146035 - DNA, 13 bp, Unknown
  misc_feature (1)..( 13): Result.004 file - promoters60/5663003
aaagaattgaaca

SEQ ID NO: 146036 - DNA, 10 bp, Unknown
  misc_feature (1)..( 10): Result.004 file - promoters60/5663003
gaaaaagata

SEQ ID NO: 146037 - DNA, 10 bp, Unknown
  misc_feature (1)..( 10): Result.004 file - promoters60/5663003
gaaatagatt

SEQ ID NO: 146038 - DNA, 10 bp, Unknown
  misc_feature (1)..( 10): Result.004 file - promoters60/5663003
ttagtagatt

SEQ ID NO: 146039 - DNA, 10 bp, Unknown
  misc_feature (1)..( 10): Result.004 file - promoters60/5663003
tatataaatt

SEQ ID NO: 146040 - DNA, 10 bp, Unknown
  misc_feature (1)..( 10): Result.004 file - promoters60/5663003
ttactaaaat

SEQ ID NO: 146041 - DNA, 10 bp, Unknown
  misc_feature (1)..( 10): Result.004 file - promoters60/5663003
ttattaattt

SEQ ID NO: 146042 - DNA, 11 bp, Unknown
  misc_feature (1)..( 11): Result.004 file - promoters60/5663003
gaactgaaaga

SEQ ID NO: 146043 - DNA, 11 bp, Unknown
  misc_feature (1)..( 11): Result.004 file - promoters60/5663034
ttgtataaatt

SEQ ID NO: 146044 - DNA, 7 bp, Unknown
  misc_feature (1)..( 7): Result.004 file - promoters60/5663034
ttctaaa

SEQ ID NO: 146045 - DNA, 7 bp, Unknown
  misc_feature (1)..( 7): Result.004 file - promoters60/5663034
ttcaaaa

SEQ ID NO: 146046 - DNA, 14 bp, Unknown
  misc_feature (1)..( 14): Result.004 file - promoters60/5663034
aactgattgacacg

SEQ ID NO: 146047 - DNA, 14 bp, Unknown
  misc_feature (1)..( 14): Result.004 file - promoters60/5663034
aactcattttctta

SEQ ID NO: 146048 - DNA, 14 bp, Unknown
  misc_feature (1)..( 14): Result.004 file - promoters60/5663034
ctctctttttatta

SEQ ID NO: 146049 - DNA, 8 bp, Unknown
  misc_feature (1)..( 8): Result.004 file - promoters60/5663034
aattaata

SEQ ID NO: 146050 - DNA, 8 bp, Unknown
  misc_feature (1)..( 8): Result.004 file - promoters60/5663034
gatttata

SEQ ID NO: 146051 - DNA, 8 bp, Unknown
  misc_feature (1)..( 8): Result.004 file - promoters60/5663034
tttttatt

SEQ ID NO: 146052 - DNA, 8 bp, Unknown
  misc_feature (1)..( 8): Result.004 file - promoters60/5663034
caatatta

SEQ ID NO: 146053 - DNA, 8 bp, Unknown
  misc_feature (1)..( 8): Result.004 file - promoters60/5663034
caatttta

SEQ ID NO: 146054 - DNA, 7 bp, Unknown
  misc_feature (1)..( 7): Result.004 file - promoters60/5663034
tagattt

SEQ ID NO: 146055 - DNA, 7 bp, Unknown
  misc_feature (1)..( 7): Result.004 file - promoters60/5663034
taggttt

SEQ ID NO: 146056 - DNA, 6 bp, Unknown
  misc_feature (1)..( 6): Result.004 file - promoters60/5663034
gttttt

SEQ ID NO: 146057 - DNA, 6 bp, Unknown
  misc_feature (1)..( 6): Result.004 file - promoters60/5663034
gttttt

SEQ ID NO: 146058 - DNA, 9 bp, Unknown
  misc_feature (1)..( 9): Result.004 file - promoters60/5663034
aagaaacaa

SEQ ID NO: 146059 - DNA, 9 bp, Unknown
  misc_feature (1)..( 9): Result.004 file - promoters60/5663034
aagatacaa

SEQ ID NO: 146060 - DNA, 8 bp, Unknown
  misc_feature (1)..( 8): Result.004 file - promoters60/5663034
attttgtt

SEQ ID NO: 146061 - DNA, 8 bp, Unknown
  misc_feature (1)..( 8): Result.004 file - promoters60/5663034
attttgtt

SEQ ID NO: 146062 - DNA, 8 bp, Unknown
  misc_feature (1)..( 8): Result.004 file - promoters60/5663034
gttttgta

SEQ ID NO: 146063 - DNA, 8 bp, Unknown
  misc_feature (1)..( 8): Result.004 file - promoters60/5663034
aaaaatat

SEQ ID NO: 146064 - DNA, 8 bp, Unknown
  misc_feature (1)..( 8): Result.004 file - promoters60/5663034
aaagatat

SEQ ID NO: 146065 - DNA, 6 bp, Unknown
  misc_feature (1)..( 6): Result.004 file - promoters60/5663034
attatt

SEQ ID NO: 146066 - DNA, 6 bp, Unknown
  misc_feature (1)..( 6): Result.004 file - promoters60/5663034
attatt

SEQ ID NO: 146067 - DNA, 7 bp, Unknown
  misc_feature (1)..( 7): Result.004 file - promoters60/5663034
tcaaatc

SEQ ID NO: 146068 - DNA, 7 bp, Unknown
  misc_feature (1)..( 7): Result.004 file - promoters60/5663034
tcacatc

SEQ ID NO: 146069 - DNA, 7 bp, Unknown
  misc_feature (1)..( 7): Result.004 file - promoters60/5663034
atgtcta

SEQ ID NO: 146070 - DNA, 7 bp, Unknown
  misc_feature (1)..( 7): Result.004 file - promoters60/5663034
atgtcta

SEQ ID NO: 146071 - DNA, 6 bp, Unknown
  misc_feature (1)..( 6): Result.004 file - promoters60/5663034
agctaa

SEQ ID NO: 146072 - DNA, 6 bp, Unknown
  misc_feature (1)..( 6): Result.004 file - promoters60/5663034
agctaa

SEQ ID NO: 146073 - DNA, 7 bp, Unknown
  misc_feature (1)..( 7): Result.004 file - promoters60/5663034
cttaaga

SEQ ID NO: 146074 - DNA, 7 bp, Unknown
  misc_feature (1)..( 7): Result.004 file - promoters60/5663034
cttgaga

SEQ ID NO: 146075 - DNA, 6 bp, Unknown
  misc_feature (1)..( 6): Result.004 file - promoters60/5663034
ttttat

SEQ ID NO: 146076 - DNA, 6 bp, Unknown
  misc_feature (1)..( 6): Result.004 file - promoters60/5663034
ttttat

SEQ ID NO: 146077 - DNA, 6 bp, Unknown
  misc_feature (1)..( 6): Result.004 file - promoters60/5663034
ttgcaa

SEQ ID NO: 146078 - DNA, 6 bp, Unknown
  misc_feature (1)..( 6): Result.004 file - promoters60/5663034
ttgcaa

SEQ ID NO: 146079 - DNA, 7 bp, Unknown
  misc_feature (1)..( 7): Result.004 file - promoters60/5663034
aatttta

SEQ ID NO: 146080 - DNA, 7 bp, Unknown
  misc_feature (1)..( 7): Result.004 file - promoters60/5663034
aatctta

SEQ ID NO: 146081 - DNA, 6 bp, Unknown
  misc_feature (1)..( 6): Result.004 file - promoters60/5663034
atttat

SEQ ID NO: 146082 - DNA, 6 bp, Unknown
  misc_feature (1)..( 6): Result.004 file - promoters60/5663034
atttat

SEQ ID NO: 146083 - DNA, 9 bp, Unknown
  misc_feature (1)..( 9): Result.004 file - promoters60/5663034
cctattaaa

SEQ ID NO: 146084 - DNA, 9 bp, Unknown
  misc_feature (1)..( 9): Result.004 file - promoters60/5663050
cctactaaa

SEQ ID NO: 146085 - DNA, 6 bp, Unknown
  misc_feature (1)..( 6): Result.004 file - promoters60/5663050
attctc

SEQ ID NO: 146086 - DNA, 6 bp, Unknown
  misc_feature (1)..( 6): Result.004 file - promoters60/5663050
attctc

SEQ ID NO: 146087 - DNA, 8 bp, Unknown
  misc_feature (1)..( 8): Result.004 file - promoters60/5663050
aacaaatt

SEQ ID NO: 146088 - DNA, 8 bp, Unknown
  misc_feature (1)..( 8): Result.004 file - promoters60/5663050
ctcaaatt

SEQ ID NO: 146089 - DNA, 8 bp, Unknown
  misc_feature (1)..( 8): Result.004 file - promoters60/5663050
ctcacatt

SEQ ID NO: 146090 - DNA, 7 bp, Unknown
  misc_feature (1)..( 7): Result.004 file - promoters60/5663050
tacaaaa

SEQ ID NO: 146091 - DNA, 7 bp, Unknown
  misc_feature (1)..( 7): Result.004 file - promoters60/5663050
tacgaaa

SEQ ID NO: 146092 - DNA, 7 bp, Unknown
  misc_feature (1)..( 7): Result.004 file - promoters60/5663050
aaagagg

SEQ ID NO: 146093 - DNA, 7 bp, Unknown
  misc_feature (1)..( 7): Result.004 file - promoters60/5663050
aaaaagg

SEQ ID NO: 146094 - DNA, 6 bp, Unknown
  misc_feature (1)..( 6): Result.004 file - promoters60/5663050
tattta

SEQ ID NO: 146095 - DNA, 6 bp, Unknown
  misc_feature (1)..( 6): Result.004 file - promoters60/5663050
tattta

SEQ ID NO: 146096 - DNA, 6 bp, Unknown
  misc_feature (1)..( 6): Result.004 file - promoters60/5663050
cttcaa

SEQ ID NO: 146097 - DNA, 6 bp, Unknown
  misc_feature (1)..( 6): Result.004 file - promoters60/5663050
cttcaa

SEQ ID NO: 146098 - DNA, 6 bp, Unknown
  misc_feature (1)..( 6): Result.004 file - promoters60/5663050
tcttac

SEQ ID NO: 146099 - DNA, 6 bp, Unknown
  misc_feature (1)..( 6): Result.004 file - promoters60/5663050
tcttac

SEQ ID NO: 146100 - DNA, 6 bp, Unknown
  misc_feature (1)..( 6): Result.004 file - promoters60/5663050
tgataa

SEQ ID NO: 146101 - DNA, 6 bp, Unknown
  misc_feature (1)..( 6): Result.004 file - promoters60/5663050
tgataa

SEQ ID NO: 146102 - DNA, 7 bp, Unknown
  misc_feature (1)..( 7): Result.004 file - promoters60/5663050
ttaagtt

SEQ ID NO: 146103 - DNA, 7 bp, Unknown
  misc_feature (1)..( 7): Result.004 file - promoters60/5663050
ttaggtt

SEQ ID NO: 146104 - DNA, 8 bp, Unknown
  misc_feature (1)..( 8): Result.004 file - promoters60/5663050
tattgttg

SEQ ID NO: 146105 - DNA, 8 bp, Unknown
  misc_feature (1)..( 8): Result.004 file - promoters60/5663050
tatagttg

SEQ ID NO: 146106 - DNA, 6 bp, Unknown
  misc_feature (1)..( 6): Result.004 file - promoters60/5663050
gaaaaa

SEQ ID NO: 146107 - DNA, 6 bp, Unknown
  misc_feature (1)..( 6): Result.004 file - promoters60/5663050
gaaaaa

SEQ ID NO: 146108 - DNA, 8 bp, Unknown
  misc_feature (1)..( 8): Result.004 file - promoters60/5663050
tgtataga

SEQ ID NO: 146109 - DNA, 8 bp, Unknown
  misc_feature (1)..( 8): Result.004 file - promoters60/5663050
tgtttaga

SEQ ID NO: 146110 - DNA, 7 bp, Unknown
  misc_feature (1)..( 7): Result.004 file - promoters60/5663050
aaagata

SEQ ID NO: 146111 - DNA, 7 bp, Unknown
  misc_feature (1)..( 7): Result.004 file - promoters60/5663050
aaaaata

SEQ ID NO: 146112 - DNA, 7 bp, Unknown
  misc_feature (1)..( 7): Result.004 file - promoters60/5663050
ataatat

SEQ ID NO: 146113 - DNA, 7 bp, Unknown
  misc_feature (1)..( 7): Result.004 file - promoters60/5663050
ataatat

SEQ ID NO: 146114 - DNA, 7 bp, Unknown
  misc_feature (1)..( 7): Result.004 file - promoters60/5663050
aaatgct

SEQ ID NO: 146115 - DNA, 7 bp, Unknown
  misc_feature (1)..( 7): Result.004 file - promoters60/5663050
aaacgct

SEQ ID NO: 146116 - DNA, 9 bp, Unknown
  misc_feature (1)..( 9): Result.004 file - promoters60/5663050
aaaagaaaa

SEQ ID NO: 146117 - DNA, 9 bp, Unknown
  misc_feature (1)..( 9): Result.004 file - promoters60/5663050
aaatgaaaa

SEQ ID NO: 146118 - DNA, 7 bp, Unknown
  misc_feature (1)..( 7): Result.004 file - promoters60/5663050
ctggaat

SEQ ID NO: 146119 - DNA, 7 bp, Unknown
  misc_feature (1)..( 7): Result.004 file - promoters60/5663050
ctgtaat

SEQ ID NO: 146120 - DNA, 7 bp, Unknown
  misc_feature (1)..( 7): Result.004 file - promoters60/5663050
aaacctt

SEQ ID NO: 146121 - DNA, 7 bp, Unknown
  misc_feature (1)..( 7): Result.004 file - promoters60/5663050
aaaactt

SEQ ID NO: 146122 - DNA, 8 bp, Unknown
  misc_feature (1)..( 8): Result.004 file - promoters60/5663050
cttaatta

SEQ ID NO: 146123 - DNA, 8 bp, Unknown
  misc_feature (1)..( 8): Result.004 file - promoters60/5663050
cttattta

SEQ ID NO: 146124 - DNA, 7 bp, Unknown
  misc_feature (1)..( 7): Result.004 file - promoters60/5663050
cacatat

SEQ ID NO: 146125 - DNA, 7 bp, Unknown
  misc_feature (1)..( 7): Result.004 file - promoters60/5663069
cacctat

SEQ ID NO: 146126 - DNA, 7 bp, Unknown
  misc_feature (1)..( 7): Result.004 file - promoters60/5663069
taaaaat

SEQ ID NO: 146127 - DNA, 7 bp, Unknown
  misc_feature (1)..( 7): Result.004 file - promoters60/5663069
taataat

SEQ ID NO: 146128 - DNA, 6 bp, Unknown
  misc_feature (1)..( 6): Result.004 file - promoters60/5663069
cgagtt

SEQ ID NO: 146129 - DNA, 6 bp, Unknown
  misc_feature (1)..( 6): Result.004 file - promoters60/5663069
cgagtt

SEQ ID NO: 146130 - DNA, 6 bp, Unknown
  misc_feature (1)..( 6): Result.004 file - promoters60/5663069
aaaact

SEQ ID NO: 146131 - DNA, 6 bp, Unknown
  misc_feature (1)..( 6): Result.004 file - promoters60/5663069
aaaact

SEQ ID NO: 146132 - DNA, 6 bp, Unknown
  misc_feature (1)..( 6): Result.004 file - promoters60/5663069
ttcgta

SEQ ID NO: 146133 - DNA, 6 bp, Unknown
  misc_feature (1)..( 6): Result.004 file - promoters60/5663069
ttcgta

SEQ ID NO: 146134 - DNA, 9 bp, Unknown
  misc_feature (1)..( 9): Result.004 file - promoters60/5663069
tggagaatg

SEQ ID NO: 146135 - DNA, 9 bp, Unknown
  misc_feature (1)..( 9): Result.004 file - promoters60/5663069
tggacaatg

SEQ ID NO: 146136 - DNA, 8 bp, Unknown
  misc_feature (1)..( 8): Result.004 file - promoters60/5663069
attttaag

SEQ ID NO: 146137 - DNA, 8 bp, Unknown
  misc_feature (1)..( 8): Result.004 file - promoters60/5663069
atttcaag

SEQ ID NO: 146138 - DNA, 10 bp, Unknown
  misc_feature (1)..( 10): Result.004 file - promoters60/5663069
gtccaaaaat

SEQ ID NO: 146139 - DNA, 10 bp, Unknown
  misc_feature (1)..( 10): Result.004 file - promoters60/5663069
ataaaaaaat

SEQ ID NO: 146140 - DNA, 10 bp, Unknown
  misc_feature (1)..( 10): Result.004 file - promoters60/5663069
gtctaaaaac

SEQ ID NO: 146141 - DNA, 6 bp, Unknown
  misc_feature (1)..( 6): Result.004 file - promoters60/5663069
taaatg

SEQ ID NO: 146142 - DNA, 6 bp, Unknown
  misc_feature (1)..( 6): Result.004 file - promoters60/5663069
taaatg

SEQ ID NO: 146143 - DNA, 9 bp, Unknown
  misc_feature (1)..( 9): Result.004 file - promoters60/5663069
taaaaacca

SEQ ID NO: 146144 - DNA, 9 bp, Unknown
  misc_feature (1)..( 9): Result.004 file - promoters60/5663069
taaacacca

SEQ ID NO: 146145 - DNA, 7 bp, Unknown
  misc_feature (1)..( 7): Result.004 file - promoters60/5663069
aaccaat

SEQ ID NO: 146146 - DNA, 7 bp, Unknown
  misc_feature (1)..( 7): Result.004 file - promoters60/5663069
aactaat

SEQ ID NO: 146147 - DNA, 6 bp, Unknown
  misc_feature (1)..( 6): Result.004 file - promoters60/5663069
aaatcc

SEQ ID NO: 146148 - DNA, 6 bp, Unknown
  misc_feature (1)..( 6): Result.004 file - promoters60/5663069
aaatcc

SEQ ID NO: 146149 - DNA, 7 bp, Unknown
  misc_feature (1)..( 7): Result.004 file - promoters60/5663069
atctaaa

SEQ ID NO: 146150 - DNA, 7 bp, Unknown
  misc_feature (1)..( 7): Result.004 file - promoters60/5663069
atccaaa

SEQ ID NO: 146151 - DNA, 8 bp, Unknown
  misc_feature (1)..( 8): Result.004 file - promoters60/5663069
aaaagata

SEQ ID NO: 146152 - DNA, 8 bp, Unknown
  misc_feature (1)..( 8): Result.004 file - promoters60/5663069
aaaaaata

SEQ ID NO: 146153 - DNA, 7 bp, Unknown
  misc_feature (1)..( 7): Result.004 file - promoters60/5663069
attctat

SEQ ID NO: 146154 - DNA, 7 bp, Unknown
  misc_feature (1)..( 7): Result.004 file - promoters60/5663069
attttat

SEQ ID NO: 146155 - DNA, 11 bp, Unknown
  misc_feature (1)..( 11): Result.004 file - promoters60/5663069
ttttcgaaaaa

SEQ ID NO: 146156 - DNA, 11 bp, Unknown
  misc_feature (1)..( 11): Result.004 file - promoters60/5663069
ttttcgaaaaa

SEQ ID NO: 146157 - DNA, 6 bp, Unknown
  misc_feature (1)..( 6): Result.004 file - promoters60/5663069
tataaa

SEQ ID NO: 146158 - DNA, 6 bp, Unknown
  misc_feature (1)..( 6): Result.004 file - promoters60/5663138
tataaa

SEQ ID NO: 146159 - DNA, 14 bp, Unknown
  misc_feature (1)..( 14): Result.004 file - promoters60/5663138
acaaatcaaatcga

SEQ ID NO: 146160 - DNA, 14 bp, Unknown
  misc_feature (1)..( 14): Result.004 file - promoters60/5663138
tcatgtcaaatttg

SEQ ID NO: 146161 - DNA, 14 bp, Unknown
  misc_feature (1)..( 14): Result.004 file - promoters60/5663138
gaaaaacaaaatgg

SEQ ID NO: 146162 - DNA, 14 bp, Unknown
  misc_feature (1)..( 14): Result.004 file - promoters60/5663138
tattaacaattttt

SEQ ID NO: 146163 - DNA, 14 bp, Unknown
  misc_feature (1)..( 14): Result.004 file - promoters60/5663138
tcaatcagaataac

SEQ ID NO: 146164 - DNA, 14 bp, Unknown
  misc_feature (1)..( 14): Result.004 file - promoters60/5663138
gaaaaacatcagaa

SEQ ID NO: 146165 - DNA, 10 bp, Unknown
  misc_feature (1)..( 10): Result.004 file - promoters60/5663138
ggaatcagaa

SEQ ID NO: 146166 - DNA, 10 bp, Unknown
  misc_feature (1)..( 10): Result.004 file - promoters60/5663138
gaaatcagca

SEQ ID NO: 146167 - DNA, 10 bp, Unknown
  misc_feature (1)..( 10): Result.004 file - promoters60/5663138
tgaatcacat

SEQ ID NO: 146168 - DNA, 10 bp, Unknown
  misc_feature (1)..( 10): Result.004 file - promoters60/5663138
gaaatcaaaa

SEQ ID NO: 146169 - DNA, 10 bp, Unknown
  misc_feature (1)..( 10): Result.004 file - promoters60/5663138
ttaattaaaa

SEQ ID NO: 146170 - DNA, 9 bp, Unknown
  misc_feature (1)..( 9): Result.004 file - promoters60/5663138
cgaaatcga

SEQ ID NO: 146171 - DNA, 9 bp, Unknown
  misc_feature (1)..( 9): Result.004 file - promoters60/5663138
cgatatccg

SEQ ID NO: 146172 - DNA, 9 bp, Unknown
  misc_feature (1)..( 9): Result.004 file - promoters60/5663138
agatttccg

SEQ ID NO: 146173 - DNA, 9 bp, Unknown
  misc_feature (1)..( 9): Result.004 file - promoters60/5663138
agatttatt

SEQ ID NO: 146174 - DNA, 7 bp, Unknown
  misc_feature (1)..( 7): Result.004 file - promoters60/5663138
atttcct

SEQ ID NO: 146175 - DNA, 12 bp, Unknown
  misc_feature (1)..( 12): Result.004 file - promoters60/5663138
gctaaacaaaaa

SEQ ID NO: 146176 - DNA, 12 bp, Unknown
  misc_feature (1)..( 12): Result.004 file - promoters60/5663138
gaaaaagaaaaa

SEQ ID NO: 146177 - DNA, 12 bp, Unknown
  misc_feature (1)..( 12): Result.004 file - promoters60/5663138
tcaaaagagaaa

SEQ ID NO: 146178 - DNA, 12 bp, Unknown
  misc_feature (1)..( 12): Result.004 file - promoters60/5663138
agaaaagatgaa

SEQ ID NO: 146179 - DNA, 12 bp, Unknown
  misc_feature (1)..( 12): Result.004 file - promoters60/5663138
ctaaaagattac

SEQ ID NO: 146180 - DNA, 12 bp, Unknown
  misc_feature (1)..( 12): Result.004 file - promoters60/5663138
gaaaaacaaaat

SEQ ID NO: 146181 - DNA, 9 bp, Unknown
  misc_feature (1)..( 9): Result.004 file - promoters60/5663138
taataacaa

SEQ ID NO: 146182 - DNA, 9 bp, Unknown
  misc_feature (1)..( 9): Result.004 file - promoters60/5663138
aaatgacag

SEQ ID NO: 146183 - DNA, 9 bp, Unknown
  misc_feature (1)..( 9): Result.004 file - promoters60/5663138
taataatgt

SEQ ID NO: 146184 - DNA, 9 bp, Unknown
  misc_feature (1)..( 9): Result.004 file - promoters60/5663138
gaatcatgt

SEQ ID NO: 146185 - DNA, 10 bp, Unknown
  misc_feature (1)..( 10): Result.004 file - promoters60/5663138
aaactgacaa

SEQ ID NO: 146186 - DNA, 9 bp, Unknown
  misc_feature (1)..( 9): Result.004 file - promoters60/5663138
caaatttgt

SEQ ID NO: 146187 - DNA, 9 bp, Unknown
  misc_feature (1)..( 9): Result.004 file - promoters60/5663138
aaaaattgt

SEQ ID NO: 146188 - DNA, 9 bp, Unknown
  misc_feature (1)..( 9): Result.004 file - promoters60/5663138
acaattttt

SEQ ID NO: 146189 - DNA, 9 bp, Unknown
  misc_feature (1)..( 9): Result.004 file - promoters60/5663138
gacaattgt

SEQ ID NO: 146190 - DNA, 9 bp, Unknown
  misc_feature (1)..( 9): Result.004 file - promoters60/5663142
aaaaatgac

SEQ ID NO: 146191 - DNA, 10 bp, Unknown
  misc_feature (1)..( 10): Result.004 file - promoters60/5663142
taaaaatgaa

SEQ ID NO: 146192 - DNA, 10 bp, Unknown
  misc_feature (1)..( 10): Result.004 file - promoters60/5663142
taaaaagtct

SEQ ID NO: 146193 - DNA, 10 bp, Unknown
  misc_feature (1)..( 10): Result.004 file - promoters60/5663142
aaaaaaagaa

SEQ ID NO: 146194 - DNA, 10 bp, Unknown
  misc_feature (1)..( 10): Result.004 file - promoters60/5663142
caaaaatctt

SEQ ID NO: 146195 - DNA, 8 bp, Unknown
  misc_feature (1)..( 8): Result.004 file - promoters60/5663142
gctaatga

SEQ ID NO: 146196 - DNA, 8 bp, Unknown
  misc_feature (1)..( 8): Result.004 file - promoters60/5663142
attaatga

SEQ ID NO: 146197 - DNA, 8 bp, Unknown
  misc_feature (1)..( 8): Result.004 file - promoters60/5663142
aataatga

SEQ ID NO: 146198 - DNA, 8 bp, Unknown
  misc_feature (1)..( 8): Result.004 file - promoters60/5663142
aataatta

SEQ ID NO: 146199 - DNA, 14 bp, Unknown
  misc_feature (1)..( 14): Result.004 file - promoters60/5663142
actcataataaata

SEQ ID NO: 146200 - DNA, 14 bp, Unknown
  misc_feature (1)..( 14): Result.004 file - promoters60/5663142
tcatataatagtaa

SEQ ID NO: 146201 - DNA, 14 bp, Unknown
  misc_feature (1)..( 14): Result.004 file - promoters60/5663142
atttataatataat

SEQ ID NO: 146202 - DNA, 14 bp, Unknown
  misc_feature (1)..( 14): Result.004 file - promoters60/5663142
acttataatgaatt

SEQ ID NO: 146203 - DNA, 14 bp, Unknown
  misc_feature (1)..( 14): Result.004 file - promoters60/5663142
taaaataaggaatt

SEQ ID NO: 146204 - DNA, 14 bp, Unknown
  misc_feature (1)..( 14): Result.004 file - promoters60/5663142
atatataataaata

SEQ ID NO: 146205 - DNA, 14 bp, Unknown
  misc_feature (1)..( 14): Result.004 file - promoters60/5663142
aagcataaaaaata

SEQ ID NO: 146206 - DNA, 14 bp, Unknown
  misc_feature (1)..( 14): Result.004 file - promoters60/5663142
tcatataattatct

SEQ ID NO: 146207 - DNA, 14 bp, Unknown
  misc_feature (1)..( 14): Result.004 file - promoters60/5663142
cagtttaataacaa

SEQ ID NO: 146208 - DNA, 14 bp, Unknown
  misc_feature (1)..( 14): Result.004 file - promoters60/5663142
gcctaaaatataat

SEQ ID NO: 146209 - DNA, 14 bp, Unknown
  misc_feature (1)..( 14): Result.004 file - promoters60/5663142
tcatataacaattt

SEQ ID NO: 146210 - DNA, 11 bp, Unknown
  misc_feature (1)..( 11): Result.004 file - promoters60/5663142
tgtatatatat

SEQ ID NO: 146211 - DNA, 11 bp, Unknown
  misc_feature (1)..( 11): Result.004 file - promoters60/5663142
aaaataaatag

SEQ ID NO: 146212 - DNA, 11 bp, Unknown
  misc_feature (1)..( 11): Result.004 file - promoters60/5663142
aaaatatataa

SEQ ID NO: 146213 - DNA, 11 bp, Unknown
  misc_feature (1)..( 11): Result.004 file - promoters60/5663142
agaataaaaat

SEQ ID NO: 146214 - DNA, 11 bp, Unknown
  misc_feature (1)..( 11): Result.004 file - promoters60/5663142
aaaatataata

SEQ ID NO: 146215 - DNA, 12 bp, Unknown
  misc_feature (1)..( 12): Result.004 file - promoters60/5663142
tagaaattaata

SEQ ID NO: 146216 - DNA, 12 bp, Unknown
  misc_feature (1)..( 12): Result.004 file - promoters60/5663142
agataattaagt

SEQ ID NO: 146217 - DNA, 11 bp, Unknown
  misc_feature (1)..( 11): Result.004 file - promoters60/5663142
taaaatcaata

SEQ ID NO: 146218 - DNA, 12 bp, Unknown
  misc_feature (1)..( 12): Result.004 file - promoters60/5663142
ataacatcactt

SEQ ID NO: 146219 - DNA, 12 bp, Unknown
  misc_feature (1)..( 12): Result.004 file - promoters60/5663142
ggtacatcactg

SEQ ID NO: 146220 - DNA, 10 bp, Unknown
  misc_feature (1)..( 10): Result.004 file - promoters60/5663142
ttttatcaca

SEQ ID NO: 146221 - DNA, 10 bp, Unknown
  misc_feature (1)..( 10): Result.004 file - promoters60/5663142
ttttgtcaac

SEQ ID NO: 146222 - DNA, 10 bp, Unknown
  misc_feature (1)..( 10): Result.004 file - promoters60/5663142
ctttatccta

SEQ ID NO: 146223 - DNA, 10 bp, Unknown
  misc_feature (1)..( 10): Result.004 file - promoters60/5663142
gtataacaat

SEQ ID NO: 146224 - DNA, 10 bp, Unknown
  misc_feature (1)..( 10): Result.004 file - promoters60/5663142
gtgtaaacga

SEQ ID NO: 146225 - DNA, 11 bp, Unknown
  misc_feature (1)..( 11): Result.004 file - promoters60/5663142
tcaatcaaaag

SEQ ID NO: 146226 - DNA, 11 bp, Unknown
  misc_feature (1)..( 11): Result.004 file - promoters60/5663142
caaatcaaatt

SEQ ID NO: 146227 - DNA, 11 bp, Unknown
  misc_feature (1)..( 11): Result.004 file - promoters60/5663142
tcaattaaaag

SEQ ID NO: 146228 - DNA, 11 bp, Unknown
  misc_feature (1)..( 11): Result.004 file - promoters60/5663142
cctttcaaata

SEQ ID NO: 146229 - DNA, 11 bp, Unknown
  misc_feature (1)..( 11): Result.004 file - promoters60/5663142
tatttgaaatt

SEQ ID NO: 146230 - DNA, 12 bp, Unknown
  misc_feature (1)..( 12): Result.004 file - promoters60/5663142
agacataataaa

SEQ ID NO: 146231 - DNA, 12 bp, Unknown
  misc_feature (1)..( 12): Result.004 file - promoters60/5663142
atttataataaa

SEQ ID NO: 146232 - DNA, 12 bp, Unknown
  misc_feature (1)..( 12): Result.004 file - promoters60/5663142
agacaaaataaa

SEQ ID NO: 146233 - DNA, 12 bp, Unknown
  misc_feature (1)..( 12): Result.004 file - promoters60/5663142
tataacaataaa

SEQ ID NO: 146234 - DNA, 8 bp, Unknown
  misc_feature (1)..( 8): Result.004 file - promoters60/5663142
atatataa

SEQ ID NO: 146235 - DNA, 8 bp, Unknown
  misc_feature (1)..( 8): Result.004 file - promoters60/5663142
tcatataa

SEQ ID NO: 146236 - DNA, 8 bp, Unknown
  misc_feature (1)..( 8): Result.004 file - promoters60/5663142
tcaaatat

SEQ ID NO: 146237 - DNA, 8 bp, Unknown
  misc_feature (1)..( 8): Result.004 file - promoters60/5663142
tcatataa

SEQ ID NO: 146238 - DNA, 8 bp, Unknown
  misc_feature (1)..( 8): Result.004 file - promoters60/5663142
caatcttg

SEQ ID NO: 146239 - DNA, 8 bp, Unknown
  misc_feature (1)..( 8): Result.004 file - promoters60/5663142
aaatcttg

SEQ ID NO: 146240 - DNA, 8 bp, Unknown
  misc_feature (1)..( 8): Result.004 file - promoters60/5663142
aaatctat

SEQ ID NO: 146241 - DNA, 8 bp, Unknown
  misc_feature (1)..( 8): Result.004 file - promoters60/5663142
aaagcttc

SEQ ID NO: 146242 - DNA, 8 bp, Unknown
  misc_feature (1)..( 8): Result.004 file - promoters60/5663142
tttaaaac

SEQ ID NO: 146243 - DNA, 8 bp, Unknown
  misc_feature (1)..( 8): Result.004 file - promoters60/5663142
tttcaaat

SEQ ID NO: 146244 - DNA, 8 bp, Unknown
  misc_feature (1)..( 8): Result.004 file - promoters60/5663142
aatcaaat

SEQ ID NO: 146245 - DNA, 8 bp, Unknown
  misc_feature (1)..( 8): Result.004 file - promoters60/5663142
tttgaaat

SEQ ID NO: 146246 - DNA, 7 bp, Unknown
  misc_feature (1)..( 7): Result.004 file - promoters60/5663142
cattttt

SEQ ID NO: 146247 - DNA, 7 bp, Unknown
  misc_feature (1)..( 7): Result.004 file - promoters60/5663142
tattttt

SEQ ID NO: 146248 - DNA, 7 bp, Unknown
  misc_feature (1)..( 7): Result.004 file - promoters60/5663142
aattttt

SEQ ID NO: 146249 - DNA, 7 bp, Unknown
  misc_feature (1)..( 7): Result.004 file - promoters60/5663142
aatcttt

SEQ ID NO: 146250 - DNA, 8 bp, Unknown
  misc_feature (1)..( 8): Result.004 file - promoters60/5663142
ttttgttt

SEQ ID NO: 146251 - DNA, 8 bp, Unknown
  misc_feature (1)..( 8): Result.004 file - promoters60/5663142
atttgttt

SEQ ID NO: 146252 - DNA, 8 bp, Unknown
  misc_feature (1)..( 8): Result.004 file - promoters60/5663142
ctttgttg

SEQ ID NO: 146253 - DNA, 8 bp, Unknown
  misc_feature (1)..( 8): Result.004 file - promoters60/5663151
atttattt

SEQ ID NO: 146254 - DNA, 6 bp, Unknown
  misc_feature (1)..( 6): Result.004 file - promoters60/5663151
caattt

SEQ ID NO: 146255 - DNA, 6 bp, Unknown
  misc_feature (1)..( 6): Result.004 file - promoters60/5663151
caattt

SEQ ID NO: 146256 - DNA, 8 bp, Unknown
  misc_feature (1)..( 8): Result.004 file - promoters60/5663151
agaatcca

SEQ ID NO: 146257 - DNA, 8 bp, Unknown
  misc_feature (1)..( 8): Result.004 file - promoters60/5663151
agaatcca

SEQ ID NO: 146258 - DNA, 10 bp, Unknown
  misc_feature (1)..( 10): Result.004 file - promoters60/5663151
aagaaatgat

SEQ ID NO: 146259 - DNA, 10 bp, Unknown
  misc_feature (1)..( 10): Result.004 file - promoters60/5663151
tagatatgat

SEQ ID NO: 146260 - DNA, 10 bp, Unknown
  misc_feature (1)..( 10): Result.004 file - promoters60/5663151
aagaaacgaa

SEQ ID NO: 146261 - DNA, 8 bp, Unknown
  misc_feature (1)..( 8): Result.004 file - promoters60/5663151
aataaaac

SEQ ID NO: 146262 - DNA, 8 bp, Unknown
  misc_feature (1)..( 8): Result.004 file - promoters60/5663151
aatgaaac

SEQ ID NO: 146263 - DNA, 6 bp, Unknown
  misc_feature (1)..( 6): Result.004 file - promoters60/5663151
ccaaaa

SEQ ID NO: 146264 - DNA, 6 bp, Unknown
  misc_feature (1)..( 6): Result.004 file - promoters60/5663151
ccaaaa

SEQ ID NO: 146265 - DNA, 9 bp, Unknown
  misc_feature (1)..( 9): Result.004 file - promoters60/5663151
aaaacgcaa

SEQ ID NO: 146266 - DNA, 9 bp, Unknown
  misc_feature (1)..( 9): Result.004 file - promoters60/5663151
caaacccaa

SEQ ID NO: 146267 - DNA, 9 bp, Unknown
  misc_feature (1)..( 9): Result.004 file - promoters60/5663151
caaacctga

SEQ ID NO: 146268 - DNA, 6 bp, Unknown
  misc_feature (1)..( 6): Result.004 file - promoters60/5663151
aagaat

SEQ ID NO: 146269 - DNA, 6 bp, Unknown
  misc_feature (1)..( 6): Result.004 file - promoters60/5663151
aagaat

SEQ ID NO: 146270 - DNA, 7 bp, Unknown
  misc_feature (1)..( 7): Result.004 file - promoters60/5663151
aaattga

SEQ ID NO: 146271 - DNA, 7 bp, Unknown
  misc_feature (1)..( 7): Result.004 file - promoters60/5663151
aaactga

SEQ ID NO: 146272 - DNA, 7 bp, Unknown
  misc_feature (1)..( 7): Result.004 file - promoters60/5663151
attatct

SEQ ID NO: 146273 - DNA, 7 bp, Unknown
  misc_feature (1)..( 7): Result.004 file - promoters60/5663151
attatct

SEQ ID NO: 146274 - DNA, 6 bp, Unknown
  misc_feature (1)..( 6): Result.004 file - promoters60/5663151
caagaa

SEQ ID NO: 146275 - DNA, 6 bp, Unknown
  misc_feature (1)..( 6): Result.004 file - promoters60/5663151
caagaa

SEQ ID NO: 146276 - DNA, 7 bp, Unknown
  misc_feature (1)..( 7): Result.004 file - promoters60/5663151
tttaggt

SEQ ID NO: 146277 - DNA, 7 bp, Unknown
  misc_feature (1)..( 7): Result.004 file - promoters60/5663151
ttttggt

SEQ ID NO: 146278 - DNA, 6 bp, Unknown
  misc_feature (1)..( 6): Result.004 file - promoters60/5663151
ttcagt

SEQ ID NO: 146279 - DNA, 6 bp, Unknown
  misc_feature (1)..( 6): Result.004 file - promoters60/5663154
ttcagt

SEQ ID NO: 146280 - DNA, 8 bp, Unknown
  misc_feature (1)..( 8): Result.004 file - promoters60/5663154
ttttcttt

SEQ ID NO: 146281 - DNA, 8 bp, Unknown
  misc_feature (1)..( 8): Result.004 file - promoters60/5663154
tttccttt

SEQ ID NO: 146282 - DNA, 8 bp, Unknown
  misc_feature (1)..( 8): Result.004 file - promoters60/5663154
tttactta

SEQ ID NO: 146283 - DNA, 6 bp, Unknown
  misc_feature (1)..( 6): Result.004 file - promoters60/5663154
ttattt

SEQ ID NO: 146284 - DNA, 6 bp, Unknown
  misc_feature (1)..( 6): Result.004 file - promoters60/5663154
ttattt

SEQ ID NO: 146285 - DNA, 8 bp, Unknown
  misc_feature (1)..( 8): Result.004 file - promoters60/5663154
ttttattc

SEQ ID NO: 146286 - DNA, 8 bp, Unknown
  misc_feature (1)..( 8): Result.004 file - promoters60/5663154
ttttgttc

SEQ ID NO: 146287 - DNA, 8 bp, Unknown
  misc_feature (1)..( 8): Result.004 file - promoters60/5663154
attctttt

SEQ ID NO: 146288 - DNA, 8 bp, Unknown
  misc_feature (1)..( 8): Result.004 file - promoters60/5663154
attttttt

SEQ ID NO: 146289 - DNA, 6 bp, Unknown
  misc_feature (1)..( 6): Result.004 file - promoters60/5663154
agtttg

SEQ ID NO: 146290 - DNA, 6 bp, Unknown
  misc_feature (1)..( 6): Result.004 file - promoters60/5663154
agtttg

SEQ ID NO: 146291 - DNA, 7 bp, Unknown
  misc_feature (1)..( 7): Result.004 file - promoters60/5663154
ttcataa

SEQ ID NO: 146292 - DNA, 7 bp, Unknown
  misc_feature (1)..( 7): Result.004 file - promoters60/5663154
ttcataa

SEQ ID NO: 146293 - DNA, 8 bp, Unknown
  misc_feature (1)..( 8): Result.004 file - promoters60/5663154
aaatataa

SEQ ID NO: 146294 - DNA, 8 bp, Unknown
  misc_feature (1)..( 8): Result.004 file - promoters60/5663154
aaagataa

SEQ ID NO: 146295 - DNA, 8 bp, Unknown
  misc_feature (1)..( 8): Result.004 file - promoters60/5663154
ggatataa

SEQ ID NO: 146296 - DNA, 8 bp, Unknown
  misc_feature (1)..( 8): Result.004 file - promoters60/5663154
acgtcgaa

SEQ ID NO: 146297 - DNA, 8 bp, Unknown
  misc_feature (1)..( 8): Result.004 file - promoters60/5663154
acgtggaa

SEQ ID NO: 146298 - DNA, 6 bp, Unknown
  misc_feature (1)..( 6): Result.004 file - promoters60/5663154
aaaaca

SEQ ID NO: 146299 - DNA, 6 bp, Unknown
  misc_feature (1)..( 6): Result.004 file - promoters60/5663154
aaaaca

SEQ ID NO: 146300 - DNA, 7 bp, Unknown
  misc_feature (1)..( 7): Result.004 file - promoters60/5663154
tttgctc

SEQ ID NO: 146301 - DNA, 7 bp, Unknown
  misc_feature (1)..( 7): Result.004 file - promoters60/5663154
tttactc

SEQ ID NO: 146302 - DNA, 6 bp, Unknown
  misc_feature (1)..( 6): Result.004 file - promoters60/5663154
ttttat

SEQ ID NO: 146303 - DNA, 6 bp, Unknown
  misc_feature (1)..( 6): Result.004 file - promoters60/5663154
ttttat

SEQ ID NO: 146304 - DNA, 7 bp, Unknown
  misc_feature (1)..( 7): Result.004 file - promoters60/5663154
actgatt

SEQ ID NO: 146305 - DNA, 7 bp, Unknown
  misc_feature (1)..( 7): Result.004 file - promoters60/5663154
actaatt

SEQ ID NO: 146306 - DNA, 9 bp, Unknown
  misc_feature (1)..( 9): Result.004 file - promoters60/5663154
ttgtttaaa

SEQ ID NO: 146307 - DNA, 9 bp, Unknown
  misc_feature (1)..( 9): Result.004 file - promoters60/5663154
ttgattaaa

SEQ ID NO: 146308 - DNA, 9 bp, Unknown
  misc_feature (1)..( 9): Result.004 file - promoters60/5663154
atgactaag

SEQ ID NO: 146309 - DNA, 6 bp, Unknown
  misc_feature (1)..( 6): Result.004 file - promoters60/5663154
tggata

SEQ ID NO: 146310 - DNA, 6 bp, Unknown
  misc_feature (1)..( 6): Result.004 file - promoters60/5663154
tggata

SEQ ID NO: 146311 - DNA, 7 bp, Unknown
  misc_feature (1)..( 7): Result.004 file - promoters60/5663154
ttggata

SEQ ID NO: 146312 - DNA, 7 bp, Unknown
  misc_feature (1)..( 7): Result.004 file - promoters60/5663154
ttggata

SEQ ID NO: 146313 - DNA, 7 bp, Unknown
  misc_feature (1)..( 7): Result.004 file - promoters60/5663154
taaaaaa

SEQ ID NO: 146314 - DNA, 7 bp, Unknown
  misc_feature (1)..( 7): Result.004 file - promoters60/5663154
taaaaaa

SEQ ID NO: 146315 - DNA, 7 bp, Unknown
  misc_feature (1)..( 7): Result.004 file - promoters60/5663154
acgcact

SEQ ID NO: 146316 - DNA, 7 bp, Unknown
  misc_feature (1)..( 7): Result.004 file - promoters60/5663154
acgaact

SEQ ID NO: 146317 - DNA, 7 bp, Unknown
  misc_feature (1)..( 7): Result.004 file - promoters60/5663154
tatctcg

SEQ ID NO: 146318 - DNA, 7 bp, Unknown
  misc_feature (1)..( 7): Result.004 file - promoters60/5663154
tatgtcg

SEQ ID NO: 146319 - DNA, 8 bp, Unknown
  misc_feature (1)..( 8): Result.004 file - promoters60/5663154
attttcac

SEQ ID NO: 146320 - DNA, 8 bp, Unknown
  misc_feature (1)..( 8): Result.004 file - promoters60/5663154
atttgcac

SEQ ID NO: 146321 - DNA, 7 bp, Unknown
  misc_feature (1)..( 7): Result.004 file - promoters60/5663154
ttaatat

SEQ ID NO: 146322 - DNA, 7 bp, Unknown
  misc_feature (1)..( 7): Result.004 file - promoters60/5663154
ttaatat

SEQ ID NO: 146323 - DNA, 6 bp, Unknown
  misc_feature (1)..( 6): Result.004 file - promoters60/5663154
aatata

SEQ ID NO: 146324 - DNA, 6 bp, Unknown
  misc_feature (1)..( 6): Result.004 file - promoters60/5663182
aatata

SEQ ID NO: 146325 - DNA, 6 bp, Unknown
  misc_feature (1)..( 6): Result.004 file - promoters60/5663182
aaataa

SEQ ID NO: 146326 - DNA, 6 bp, Unknown
  misc_feature (1)..( 6): Result.004 file - promoters60/5663182
aaataa

SEQ ID NO: 146327 - DNA, 7 bp, Unknown
  misc_feature (1)..( 7): Result.004 file - promoters60/5663182
aatctaa

SEQ ID NO: 146328 - DNA, 7 bp, Unknown
  misc_feature (1)..( 7): Result.004 file - promoters60/5663182
aatgtaa

SEQ ID NO: 146329 - DNA, 8 bp, Unknown
  misc_feature (1)..( 8): Result.004 file - promoters60/5663182
atatatac

SEQ ID NO: 146330 - DNA, 8 bp, Unknown
  misc_feature (1)..( 8): Result.004 file - promoters60/5663182
atatctac

SEQ ID NO: 146331 - DNA, 8 bp, Unknown
  misc_feature (1)..( 8): Result.004 file - promoters60/5663182
aatcagtg

SEQ ID NO: 146332 - DNA, 8 bp, Unknown
  misc_feature (1)..( 8): Result.004 file - promoters60/5663182
aatgagtg

SEQ ID NO: 146333 - DNA, 8 bp, Unknown
  misc_feature (1)..( 8): Result.004 file - promoters60/5663182
aaataaat

SEQ ID NO: 146334 - DNA, 8 bp, Unknown
  misc_feature (1)..( 8): Result.004 file - promoters60/5663182
aaaaaaaa

SEQ ID NO: 146335 - DNA, 8 bp, Unknown
  misc_feature (1)..( 8): Result.004 file - promoters60/5663182
tcataaat

SEQ ID NO: 146336 - DNA, 7 bp, Unknown
  misc_feature (1)..( 7): Result.004 file - promoters60/5663182
ataaaac

SEQ ID NO: 146337 - DNA, 7 bp, Unknown
  misc_feature (1)..( 7): Result.004 file - promoters60/5663182
ataaaac

SEQ ID NO: 146338 - DNA, 8 bp, Unknown
  misc_feature (1)..( 8): Result.004 file - promoters60/5663182
aacagaaa

SEQ ID NO: 146339 - DNA, 8 bp, Unknown
  misc_feature (1)..( 8): Result.004 file - promoters60/5663182
aacaaaaa

SEQ ID NO: 146340 - DNA, 6 bp, Unknown
  misc_feature (1)..( 6): Result.004 file - promoters60/5663182
aaaaga

SEQ ID NO: 146341 - DNA, 6 bp, Unknown
  misc_feature (1)..( 6): Result.004 file - promoters60/5663182
aaaaga

SEQ ID NO: 146342 - DNA, 7 bp, Unknown
  misc_feature (1)..( 7): Result.004 file - promoters60/5663182
atcatgt

SEQ ID NO: 146343 - DNA, 7 bp, Unknown
  misc_feature (1)..( 7): Result.004 file - promoters60/5663182
atcatgt

SEQ ID NO: 146344 - DNA, 6 bp, Unknown
  misc_feature (1)..( 6): Result.004 file - promoters60/5663182
gagtcc

SEQ ID NO: 146345 - DNA, 6 bp, Unknown
  misc_feature (1)..( 6): Result.004 file - promoters60/5663182
gagtcc

SEQ ID NO: 146346 - DNA, 9 bp, Unknown
  misc_feature (1)..( 9): Result.004 file - promoters60/5663182
cgtcgattc

SEQ ID NO: 146347 - DNA, 9 bp, Unknown
  misc_feature (1)..( 9): Result.004 file - promoters60/5663182
tttcggttc

SEQ ID NO: 146348 - DNA, 9 bp, Unknown
  misc_feature (1)..( 9): Result.004 file - promoters60/5663182
ttttggttt

SEQ ID NO: 146349 - DNA, 6 bp, Unknown
  misc_feature (1)..( 6): Result.004 file - promoters60/5663182
tcttta

SEQ ID NO: 146350 - DNA, 6 bp, Unknown
  misc_feature (1)..( 6): Result.004 file - promoters60/5663182
tcttta

SEQ ID NO: 146351 - DNA, 6 bp, Unknown
  misc_feature (1)..( 6): Result.004 file - promoters60/5663182
tccctt

SEQ ID NO: 146352 - DNA, 6 bp, Unknown
  misc_feature (1)..( 6): Result.004 file - promoters60/5663221
tccctt

SEQ ID NO: 146353 - DNA, 11 bp, Unknown
  misc_feature (1)..( 11): Result.004 file - promoters60/5663221
ttttatggtcg

SEQ ID NO: 146354 - DNA, 11 bp, Unknown
  misc_feature (1)..( 11): Result.004 file - promoters60/5663221
ttttttggttt

SEQ ID NO: 146355 - DNA, 11 bp, Unknown
  misc_feature (1)..( 11): Result.004 file - promoters60/5663221
atttatgttgt

SEQ ID NO: 146356 - DNA, 11 bp, Unknown
  misc_feature (1)..( 11): Result.004 file - promoters60/5663221
gttgattttga

SEQ ID NO: 146357 - DNA, 11 bp, Unknown
  misc_feature (1)..( 11): Result.004 file - promoters60/5663221
gtttttgtttg

SEQ ID NO: 146358 - DNA, 11 bp, Unknown
  misc_feature (1)..( 11): Result.004 file - promoters60/5663221
gtttttctttc

SEQ ID NO: 146359 - DNA, 11 bp, Unknown
  misc_feature (1)..( 11): Result.004 file - promoters60/5663221
acttttctagc

SEQ ID NO: 146360 - DNA, 11 bp, Unknown
  misc_feature (1)..( 11): Result.004 file - promoters60/5663221
gtcttgtaaac

SEQ ID NO: 146361 - DNA, 11 bp, Unknown
  misc_feature (1)..( 11): Result.004 file - promoters60/5663221
aatttgaaaat

SEQ ID NO: 146362 - DNA, 11 bp, Unknown
  misc_feature (1)..( 11): Result.004 file - promoters60/5663221
cgtttgaattt

SEQ ID NO: 146363 - DNA, 11 bp, Unknown
  misc_feature (1)..( 11): Result.004 file - promoters60/5663221
aatatgaagaa

SEQ ID NO: 146364 - DNA, 11 bp, Unknown
  misc_feature (1)..( 11): Result.004 file - promoters60/5663221
ttttttaattt

SEQ ID NO: 146365 - DNA, 11 bp, Unknown
  misc_feature (1)..( 11): Result.004 file - promoters60/5663221
aatctgatgga

SEQ ID NO: 146366 - DNA, 15 bp, Unknown
  misc_feature (1)..( 15): Result.004 file - promoters60/5663221
taaattattgaagct

SEQ ID NO: 146367 - DNA, 15 bp, Unknown
  misc_feature (1)..( 15): Result.004 file - promoters60/5663221
agggatatagaacaa

SEQ ID NO: 146368 - DNA, 15 bp, Unknown
  misc_feature (1)..( 15): Result.004 file - promoters60/5663221
agggatttagattat

SEQ ID NO: 146369 - DNA, 15 bp, Unknown
  misc_feature (1)..( 15): Result.004 file - promoters60/5663221
caaaacattgagatt

SEQ ID NO: 146370 - DNA, 15 bp, Unknown
  misc_feature (1)..( 15): Result.004 file - promoters60/5663221
tgtgatttactaaga

SEQ ID NO: 146371 - DNA, 15 bp, Unknown
  misc_feature (1)..( 15): Result.004 file - promoters60/5663224
aattcttcggagatt

SEQ ID NO: 146372 - DNA, 10 bp, Unknown
  misc_feature (1)..( 10): Result.004 file - promoters60/5663224
cttttaaatt

SEQ ID NO: 146373 - DNA, 10 bp, Unknown
  misc_feature (1)..( 10): Result.004 file - promoters60/5663224
cttgtaatgt

SEQ ID NO: 146374 - DNA, 11 bp, Unknown
  misc_feature (1)..( 11): Result.004 file - promoters60/5663224
gttttgaatta

SEQ ID NO: 146375 - DNA, 7 bp, Unknown
  misc_feature (1)..( 7): Result.004 file - promoters60/5663224
gaattaa

SEQ ID NO: 146376 - DNA, 7 bp, Unknown
  misc_feature (1)..( 7): Result.004 file - promoters60/5663224
gaattat

SEQ ID NO: 146377 - DNA, 7 bp, Unknown
  misc_feature (1)..( 7): Result.004 file - promoters60/5663234
aaattat

SEQ ID NO: 146378 - DNA, 7 bp, Unknown
  misc_feature (1)..( 7): Result.004 file - promoters60/5663234
aaacttg

SEQ ID NO: 146379 - DNA, 7 bp, Unknown
  misc_feature (1)..( 7): Result.004 file - promoters60/5663234
aaacttt

SEQ ID NO: 146380 - DNA, 8 bp, Unknown
  misc_feature (1)..( 8): Result.004 file - promoters60/5663234
taacgttt

SEQ ID NO: 146381 - DNA, 10 bp, Unknown
  misc_feature (1)..( 10): Result.004 file - promoters60/5663234
catatatata

SEQ ID NO: 146382 - DNA, 10 bp, Unknown
  misc_feature (1)..( 10): Result.004 file - promoters60/5663234
catataaata

SEQ ID NO: 146383 - DNA, 10 bp, Unknown
  misc_feature (1)..( 10): Result.004 file - promoters60/5663234
cctatttatg

SEQ ID NO: 146384 - DNA, 8 bp, Unknown
  misc_feature (1)..( 8): Result.004 file - promoters60/5663234
cattttag

SEQ ID NO: 146385 - DNA, 8 bp, Unknown
  misc_feature (1)..( 8): Result.004 file - promoters60/5663234
cattttcg

SEQ ID NO: 146386 - DNA, 8 bp, Unknown
  misc_feature (1)..( 8): Result.004 file - promoters60/5663234
gattatcg

SEQ ID NO: 146387 - DNA, 10 bp, Unknown
  misc_feature (1)..( 10): Result.004 file - promoters60/5663234
ctttaaagat

SEQ ID NO: 146388 - DNA, 10 bp, Unknown
  misc_feature (1)..( 10): Result.004 file - promoters60/5663234
cataaaagat

SEQ ID NO: 146389 - DNA, 10 bp, Unknown
  misc_feature (1)..( 10): Result.004 file - promoters60/5663234
catacaagaa

SEQ ID NO: 146390 - DNA, 8 bp, Unknown
  misc_feature (1)..( 8): Result.004 file - promoters60/5663234
ataaaaaa

SEQ ID NO: 146391 - DNA, 8 bp, Unknown
  misc_feature (1)..( 8): Result.004 file - promoters60/5663234
ataaaaaa

SEQ ID NO: 146392 - DNA, 8 bp, Unknown
  misc_feature (1)..( 8): Result.004 file - promoters60/5663234
atataaag

SEQ ID NO: 146393 - DNA, 14 bp, Unknown
  misc_feature (1)..( 14): Result.004 file - promoters60/5663234
tgatggtcaagtaa

SEQ ID NO: 146394 - DNA, 14 bp, Unknown
  misc_feature (1)..( 14): Result.004 file - promoters60/5663234
tgatggtattgact

SEQ ID NO: 146395 - DNA, 14 bp, Unknown
  misc_feature (1)..( 14): Result.004 file - promoters60/5663234
atatgttattaact

SEQ ID NO: 146396 - DNA, 8 bp, Unknown
  misc_feature (1)..( 8): Result.004 file - promoters60/5663234
ttaaataa

SEQ ID NO: 146397 - DNA, 8 bp, Unknown
  misc_feature (1)..( 8): Result.004 file - promoters60/5663234
ttatatat

SEQ ID NO: 146398 - DNA, 8 bp, Unknown
  misc_feature (1)..( 8): Result.004 file - promoters60/5663234
ctatatat

SEQ ID NO: 146399 - DNA, 7 bp, Unknown
  misc_feature (1)..( 7): Result.004 file - promoters60/5663234
taaagta

SEQ ID NO: 146400 - DNA, 7 bp, Unknown
  misc_feature (1)..( 7): Result.004 file - promoters60/5663234
taaagtt

SEQ ID NO: 146401 - DNA, 7 bp, Unknown
  misc_feature (1)..( 7): Result.004 file - promoters60/5663234
taatgtt

SEQ ID NO: 146402 - DNA, 7 bp, Unknown
  misc_feature (1)..( 7): Result.004 file - promoters60/5663234
aaatttg

SEQ ID NO: 146403 - DNA, 7 bp, Unknown
  misc_feature (1)..( 7): Result.004 file - promoters60/5663234
aaagttg

SEQ ID NO: 146404 - DNA, 7 bp, Unknown
  misc_feature (1)..( 7): Result.004 file - promoters60/5663234
aaatttg

SEQ ID NO: 146405 - DNA, 7 bp, Unknown
  misc_feature (1)..( 7): Result.004 file - promoters60/5663234
ttttatt

SEQ ID NO: 146406 - DNA, 7 bp, Unknown
  misc_feature (1)..( 7): Result.004 file - promoters60/5663234
atttatt

SEQ ID NO: 146407 - DNA, 8 bp, Unknown
  misc_feature (1)..( 8): Result.004 file - promoters60/5663234
ttttgatt

SEQ ID NO: 146408 - DNA, 7 bp, Unknown
  misc_feature (1)..( 7): Result.004 file - promoters60/5663234
tatttaa

SEQ ID NO: 146409 - DNA, 7 bp, Unknown
  misc_feature (1)..( 7): Result.004 file - promoters60/5663234
tatttat

SEQ ID NO: 146410 - DNA, 7 bp, Unknown
  misc_feature (1)..( 7): Result.004 file - promoters60/5663281
gatttaa

SEQ ID NO: 146411 - DNA, 8 bp, Unknown
  misc_feature (1)..( 8): Result.004 file - promoters60/5663281
aactattt

SEQ ID NO: 146412 - DNA, 8 bp, Unknown
  misc_feature (1)..( 8): Result.004 file - promoters60/5663281
aaccattt

SEQ ID NO: 146413 - DNA, 8 bp, Unknown
  misc_feature (1)..( 8): Result.004 file - promoters60/5663281
aataaaat

SEQ ID NO: 146414 - DNA, 8 bp, Unknown
  misc_feature (1)..( 8): Result.004 file - promoters60/5663281
aataaaat

SEQ ID NO: 146415 - DNA, 12 bp, Unknown
  misc_feature (1)..( 12): Result.004 file - promoters60/5663281
aattaatatttt

SEQ ID NO: 146416 - DNA, 12 bp, Unknown
  misc_feature (1)..( 12): Result.004 file - promoters60/5663281
agttaatttttt

SEQ ID NO: 146417 - DNA, 12 bp, Unknown
  misc_feature (1)..( 12): Result.004 file - promoters60/5663281
aatgaatgaatt

SEQ ID NO: 146418 - DNA, 7 bp, Unknown
  misc_feature (1)..( 7): Result.004 file - promoters60/5663281
ttatttt

SEQ ID NO: 146419 - DNA, 7 bp, Unknown
  misc_feature (1)..( 7): Result.004 file - promoters60/5663281
ttatttt

SEQ ID NO: 146420 - DNA, 6 bp, Unknown
  misc_feature (1)..( 6): Result.004 file - promoters60/5663281
taacat

SEQ ID NO: 146421 - DNA, 6 bp, Unknown
  misc_feature (1)..( 6): Result.004 file - promoters60/5663281
taacat

SEQ ID NO: 146422 - DNA, 7 bp, Unknown
  misc_feature (1)..( 7): Result.004 file - promoters60/5663281
aatgtga

SEQ ID NO: 146423 - DNA, 7 bp, Unknown
  misc_feature (1)..( 7): Result.004 file - promoters60/5663281
aatttga

SEQ ID NO: 146424 - DNA, 8 bp, Unknown
  misc_feature (1)..( 8): Result.004 file - promoters60/5663281
aaaacaaa

SEQ ID NO: 146425 - DNA, 8 bp, Unknown
  misc_feature (1)..( 8): Result.004 file - promoters60/5663281
aaaaaaaa

SEQ ID NO: 146426 - DNA, 8 bp, Unknown
  misc_feature (1)..( 8): Result.004 file - promoters60/5663281
atttgatt

SEQ ID NO: 146427 - DNA, 8 bp, Unknown
  misc_feature (1)..( 8): Result.004 file - promoters60/5663281
atttgatt

SEQ ID NO: 146428 - DNA, 10 bp, Unknown
  misc_feature (1)..( 10): Result.004 file - promoters60/5663281
aaaaatactt

SEQ ID NO: 146429 - DNA, 10 bp, Unknown
  misc_feature (1)..( 10): Result.004 file - promoters60/5663281
aaaaaaactt

SEQ ID NO: 146430 - DNA, 6 bp, Unknown
  misc_feature (1)..( 6): Result.004 file - promoters60/5663281
tatatt

SEQ ID NO: 146431 - DNA, 6 bp, Unknown
  misc_feature (1)..( 6): Result.004 file - promoters60/5663281
tatatt

SEQ ID NO: 146432 - DNA, 8 bp, Unknown
  misc_feature (1)..( 8): Result.004 file - promoters60/5663281
acatgacg

SEQ ID NO: 146433 - DNA, 8 bp, Unknown
  misc_feature (1)..( 8): Result.004 file - promoters60/5663281
acataacg

SEQ ID NO: 146434 - DNA, 7 bp, Unknown
  misc_feature (1)..( 7): Result.004 file - promoters60/5663281
cattttt

SEQ ID NO: 146435 - DNA, 7 bp, Unknown
  misc_feature (1)..( 7): Result.004 file - promoters60/5663281
cattttt

SEQ ID NO: 146436 - DNA, 6 bp, Unknown
  misc_feature (1)..( 6): Result.004 file - promoters60/5663281
tagagt

SEQ ID NO: 146437 - DNA, 6 bp, Unknown
  misc_feature (1)..( 6): Result.004 file - promoters60/5663281
tagagt

SEQ ID NO: 146438 - DNA, 7 bp, Unknown
  misc_feature (1)..( 7): Result.004 file - promoters60/5663281
aaatcct

SEQ ID NO: 146439 - DNA, 7 bp, Unknown
  misc_feature (1)..( 7): Result.004 file - promoters60/5663281
aaaccct

SEQ ID NO: 146440 - DNA, 7 bp, Unknown
  misc_feature (1)..( 7): Result.004 file - promoters60/5663281
gtgttta

SEQ ID NO: 146441 - DNA, 7 bp, Unknown
  misc_feature (1)..( 7): Result.004 file - promoters60/5663281
gtgttta

SEQ ID NO: 146442 - DNA, 6 bp, Unknown
  misc_feature (1)..( 6): Result.004 file - promoters60/5663281
taaaca

SEQ ID NO: 146443 - DNA, 6 bp, Unknown
  misc_feature (1)..( 6): Result.004 file - promoters60/5663281
taaaca

SEQ ID NO: 146444 - DNA, 6 bp, Unknown
  misc_feature (1)..( 6): Result.004 file - promoters60/5663281
aagata

SEQ ID NO: 146445 - DNA, 6 bp, Unknown
  misc_feature (1)..( 6): Result.004 file - promoters60/5663327
aagata

SEQ ID NO: 146446 - DNA, 8 bp, Unknown
  misc_feature (1)..( 8): Result.004 file - promoters60/5663327
cagttttc

SEQ ID NO: 146447 - DNA, 8 bp, Unknown
  misc_feature (1)..( 8): Result.004 file - promoters60/5663327
cagatttc

SEQ ID NO: 146448 - DNA, 9 bp, Unknown
  misc_feature (1)..( 9): Result.004 file - promoters60/5663327
tttttgaat

SEQ ID NO: 146449 - DNA, 9 bp, Unknown
  misc_feature (1)..( 9): Result.004 file - promoters60/5663327
tgtttgaaa

SEQ ID NO: 146450 - DNA, 9 bp, Unknown
  misc_feature (1)..( 9): Result.004 file - promoters60/5663327
tgtatgaaa

SEQ ID NO: 146451 - DNA, 6 bp, Unknown
  misc_feature (1)..( 6): Result.004 file - promoters60/5663327
gaataa

SEQ ID NO: 146452 - DNA, 6 bp, Unknown
  misc_feature (1)..( 6): Result.004 file - promoters60/5663327
gaataa

SEQ ID NO: 146453 - DNA, 10 bp, Unknown
  misc_feature (1)..( 10): Result.004 file - promoters60/5663327
atattttttt

SEQ ID NO: 146454 - DNA, 10 bp, Unknown
  misc_feature (1)..( 10): Result.004 file - promoters60/5663327
acattttttt

SEQ ID NO: 146455 - DNA, 10 bp, Unknown
  misc_feature (1)..( 10): Result.004 file - promoters60/5663327
acattttatc

SEQ ID NO: 146456 - DNA, 7 bp, Unknown
  misc_feature (1)..( 7): Result.004 file - promoters60/5663327
taatatt

SEQ ID NO: 146457 - DNA, 7 bp, Unknown
  misc_feature (1)..( 7): Result.004 file - promoters60/5663327
aaatatt

SEQ ID NO: 146458 - DNA, 7 bp, Unknown
  misc_feature (1)..( 7): Result.004 file - promoters60/5663327
aaaaatt

SEQ ID NO: 146459 - DNA, 9 bp, Unknown
  misc_feature (1)..( 9): Result.004 file - promoters60/5663327
catatcaaa

SEQ ID NO: 146460 - DNA, 9 bp, Unknown
  misc_feature (1)..( 9): Result.004 file - promoters60/5663327
tgtatgaaa

SEQ ID NO: 146461 - DNA, 9 bp, Unknown
  misc_feature (1)..( 9): Result.004 file - promoters60/5663327
tgtttgaaa

SEQ ID NO: 146462 - DNA, 6 bp, Unknown
  misc_feature (1)..( 6): Result.004 file - promoters60/5663327
aatata

SEQ ID NO: 146463 - DNA, 6 bp, Unknown
  misc_feature (1)..( 6): Result.004 file - promoters60/5663327
aatata

SEQ ID NO: 146464 - DNA, 7 bp, Unknown
  misc_feature (1)..( 7): Result.004 file - promoters60/5663327
attttaa

SEQ ID NO: 146465 - DNA, 7 bp, Unknown
  misc_feature (1)..( 7): Result.004 file - promoters60/5663327
attttaa

SEQ ID NO: 146466 - DNA, 8 bp, Unknown
  misc_feature (1)..( 8): Result.004 file - promoters60/5663327
aattgatc

SEQ ID NO: 146467 - DNA, 8 bp, Unknown
  misc_feature (1)..( 8): Result.004 file - promoters60/5663327
aatcgatc

SEQ ID NO: 146468 - DNA, 6 bp, Unknown
  misc_feature (1)..( 6): Result.004 file - promoters60/5663327
aaaaat

SEQ ID NO: 146469 - DNA, 6 bp, Unknown
  misc_feature (1)..( 6): Result.004 file - promoters60/5663327
aaaaat

SEQ ID NO: 146470 - DNA, 10 bp, Unknown
  misc_feature (1)..( 10): Result.004 file - promoters60/5663327
ctcttcaatt

SEQ ID NO: 146471 - DNA, 10 bp, Unknown
  misc_feature (1)..( 10): Result.004 file - promoters60/5663327
ctctgcaatt

SEQ ID NO: 146472 - DNA, 8 bp, Unknown
  misc_feature (1)..( 8): Result.004 file - promoters60/5663327
taaaccga

SEQ ID NO: 146473 - DNA, 8 bp, Unknown
  misc_feature (1)..( 8): Result.004 file - promoters60/5663327
taaaacga

SEQ ID NO: 146474 - DNA, 6 bp, Unknown
  misc_feature (1)..( 6): Result.004 file - promoters60/5663327
ttaatc

SEQ ID NO: 146475 - DNA, 6 bp, Unknown
  misc_feature (1)..( 6): Result.004 file - promoters60/5663327
ttaatc

SEQ ID NO: 146476 - DNA, 12 bp, Unknown
  misc_feature (1)..( 12): Result.004 file - promoters60/5663327
ttaaaatcacat

SEQ ID NO: 146477 - DNA, 12 bp, Unknown
  misc_feature (1)..( 12): Result.004 file - promoters60/5663327
ttataattacat

SEQ ID NO: 146478 - DNA, 14 bp, Unknown
  misc_feature (1)..( 14): Result.004 file - promoters60/5663327
tataagtttgatat

SEQ ID NO: 146479 - DNA, 14 bp, Unknown
  misc_feature (1)..( 14): Result.004 file - promoters60/5663327
tataattttggtat

SEQ ID NO: 146480 - DNA, 10 bp, Unknown
  misc_feature (1)..( 10): Result.004 file - promoters60/5663327
aaactaattt

SEQ ID NO: 146481 - DNA, 10 bp, Unknown
  misc_feature (1)..( 10): Result.004 file - promoters60/5663327
aaattaattt

SEQ ID NO: 146482 - DNA, 9 bp, Unknown
  misc_feature (1)..( 9): Result.004 file - promoters60/5663327
tttcttttc

SEQ ID NO: 146483 - DNA, 9 bp, Unknown
  misc_feature (1)..( 9): Result.004 file - promoters60/5663327
tttcttttc

SEQ ID NO: 146484 - DNA, 10 bp, Unknown
  misc_feature (1)..( 10): Result.004 file - promoters60/5663327
tttatatttt

SEQ ID NO: 146485 - DNA, 10 bp, Unknown
  misc_feature (1)..( 10): Result.004 file - promoters60/5663327
tttaaatttt

SEQ ID NO: 146486 - DNA, 6 bp, Unknown
  misc_feature (1)..( 6): Result.004 file - promoters60/5663327
caaaat

SEQ ID NO: 146487 - DNA, 6 bp, Unknown
  misc_feature (1)..( 6): Result.004 file - promoters60/5663327
caaaat

SEQ ID NO: 146488 - DNA, 13 bp, Unknown
  misc_feature (1)..( 13): Result.004 file - promoters60/5663327
tttaaaaataaat

SEQ ID NO: 146489 - DNA, 13 bp, Unknown
  misc_feature (1)..( 13): Result.004 file - promoters60/5663327
tttagaaattaat

SEQ ID NO: 146490 - DNA, 7 bp, Unknown
  misc_feature (1)..( 7): Result.004 file - promoters60/5663327
aattaaa

SEQ ID NO: 146491 - DNA, 7 bp, Unknown
  misc_feature (1)..( 7): Result.004 file - promoters60/5663333
aatcaaa

SEQ ID NO: 146492 - DNA, 8 bp, Unknown
  misc_feature (1)..( 8): Result.004 file - promoters60/5663333
catgaaga

SEQ ID NO: 146493 - DNA, 8 bp, Unknown
  misc_feature (1)..( 8): Result.004 file - promoters60/5663333
catgaata

SEQ ID NO: 146494 - DNA, 8 bp, Unknown
  misc_feature (1)..( 8): Result.004 file - promoters60/5663333
catggata

SEQ ID NO: 146495 - DNA, 7 bp, Unknown
  misc_feature (1)..( 7): Result.004 file - promoters60/5663333
cgatcat

SEQ ID NO: 146496 - DNA, 7 bp, Unknown
  misc_feature (1)..( 7): Result.004 file - promoters60/5663333
tgatcat

SEQ ID NO: 146497 - DNA, 7 bp, Unknown
  misc_feature (1)..( 7): Result.004 file - promoters60/5663333
cgaccat

SEQ ID NO: 146498 - DNA, 7 bp, Unknown
  misc_feature (1)..( 7): Result.004 file - promoters60/5663333
agaaatt

SEQ ID NO: 146499 - DNA, 7 bp, Unknown
  misc_feature (1)..( 7): Result.004 file - promoters60/5663333
agaaatc

SEQ ID NO: 146500 - DNA, 7 bp, Unknown
  misc_feature (1)..( 7): Result.004 file - promoters60/5663333
agacatt

SEQ ID NO: 146501 - DNA, 7 bp, Unknown
  misc_feature (1)..( 7): Result.004 file - promoters60/5663333
taaactt

SEQ ID NO: 146502 - DNA, 7 bp, Unknown
  misc_feature (1)..( 7): Result.004 file - promoters60/5663333
taatctt

SEQ ID NO: 146503 - DNA, 7 bp, Unknown
  misc_feature (1)..( 7): Result.004 file - promoters60/5663358
taaactt

SEQ ID NO: 146504 - DNA, 13 bp, Unknown
  misc_feature (1)..( 13): Result.004 file - promoters60/5663358
ataaattattttc

SEQ ID NO: 146505 - DNA, 13 bp, Unknown
  misc_feature (1)..( 13): Result.004 file - promoters60/5663358
gtaatttattttc

SEQ ID NO: 146506 - DNA, 13 bp, Unknown
  misc_feature (1)..( 13): Result.004 file - promoters60/5663358
ataaattatacaa

SEQ ID NO: 146507 - DNA, 13 bp, Unknown
  misc_feature (1)..( 13): Result.004 file - promoters60/5663358
atttaatattttt

SEQ ID NO: 146508 - DNA, 13 bp, Unknown
  misc_feature (1)..( 13): Result.004 file - promoters60/5663358
agaatttagtcac

SEQ ID NO: 146509 - DNA, 13 bp, Unknown
  misc_feature (1)..( 13): Result.004 file - promoters60/5663358
tgaacttagtctg

SEQ ID NO: 146510 - DNA, 14 bp, Unknown
  misc_feature (1)..( 14): Result.004 file - promoters60/5663358
gtcagtgaaagcaa

SEQ ID NO: 146511 - DNA, 14 bp, Unknown
  misc_feature (1)..( 14): Result.004 file - promoters60/5663358
aactttgaaagcaa

SEQ ID NO: 146512 - DNA, 14 bp, Unknown
  misc_feature (1)..( 14): Result.004 file - promoters60/5663358
agaagtgaaactga

SEQ ID NO: 146513 - DNA, 14 bp, Unknown
  misc_feature (1)..( 14): Result.004 file - promoters60/5663358
aaactttaaaaact

SEQ ID NO: 146514 - DNA, 14 bp, Unknown
  misc_feature (1)..( 14): Result.004 file - promoters60/5663358
agaaatgaaatcat

SEQ ID NO: 146515 - DNA, 14 bp, Unknown
  misc_feature (1)..( 14): Result.004 file - promoters60/5663358
ccaaaagaaacgaa

SEQ ID NO: 146516 - DNA, 9 bp, Unknown
  misc_feature (1)..( 9): Result.004 file - promoters60/5663358
gatagtatt

SEQ ID NO: 146517 - DNA, 9 bp, Unknown
  misc_feature (1)..( 9): Result.004 file - promoters60/5663358
tataatata

SEQ ID NO: 146518 - DNA, 9 bp, Unknown
  misc_feature (1)..( 9): Result.004 file - promoters60/5663358
attaagata

SEQ ID NO: 146519 - DNA, 9 bp, Unknown
  misc_feature (1)..( 9): Result.004 file - promoters60/5663358
tctaaaata

SEQ ID NO: 146520 - DNA, 9 bp, Unknown
  misc_feature (1)..( 9): Result.004 file - promoters60/5663358
tttaaaatt

SEQ ID NO: 146521 - DNA, 9 bp, Unknown
  misc_feature (1)..( 9): Result.004 file - promoters60/5663370
aaaaaaatt

SEQ ID NO: 146522 - DNA, 8 bp, Unknown
  misc_feature (1)..( 8): Result.004 file - promoters60/5663370
acacacaa

SEQ ID NO: 146523 - DNA, 8 bp, Unknown
  misc_feature (1)..( 8): Result.004 file - promoters60/5663370
acactcaa

SEQ ID NO: 146524 - DNA, 8 bp, Unknown
  misc_feature (1)..( 8): Result.004 file - promoters60/5663370
caagacaa

SEQ ID NO: 146525 - DNA, 8 bp, Unknown
  misc_feature (1)..( 8): Result.004 file - promoters60/5663370
caaaacaa

SEQ ID NO: 146526 - DNA, 8 bp, Unknown
  misc_feature (1)..( 8): Result.004 file - promoters60/5663370
aaataatt

SEQ ID NO: 146527 - DNA, 8 bp, Unknown
  misc_feature (1)..( 8): Result.004 file - promoters60/5663370
aaattatt

SEQ ID NO: 146528 - DNA, 6 bp, Unknown
  misc_feature (1)..( 6): Result.004 file - promoters60/5663370
aaaacg

SEQ ID NO: 146529 - DNA, 6 bp, Unknown
  misc_feature (1)..( 6): Result.004 file - promoters60/5663370
aaaacg

SEQ ID NO: 146530 - DNA, 9 bp, Unknown
  misc_feature (1)..( 9): Result.004 file - promoters60/5663370
aattttggt

SEQ ID NO: 146531 - DNA, 9 bp, Unknown
  misc_feature (1)..( 9): Result.004 file - promoters60/5663370
aatattggt

SEQ ID NO: 146532 - DNA, 7 bp, Unknown
  misc_feature (1)..( 7): Result.004 file - promoters60/5663370
attgcaa

SEQ ID NO: 146533 - DNA, 7 bp, Unknown
  misc_feature (1)..( 7): Result.004 file - promoters60/5663370
atttcaa

SEQ ID NO: 146534 - DNA, 8 bp, Unknown
  misc_feature (1)..( 8): Result.004 file - promoters60/5663370
tggcgtta

SEQ ID NO: 146535 - DNA, 8 bp, Unknown
  misc_feature (1)..( 8): Result.004 file - promoters60/5663370
tggagtta

SEQ ID NO: 146536 - DNA, 10 bp, Unknown
  misc_feature (1)..( 10): Result.004 file - promoters60/5663370
tggtcattat

SEQ ID NO: 146537 - DNA, 10 bp, Unknown
  misc_feature (1)..( 10): Result.004 file - promoters60/5663370
tggttattca

SEQ ID NO: 146538 - DNA, 10 bp, Unknown
  misc_feature (1)..( 10): Result.004 file - promoters60/5663370
atgttattca

SEQ ID NO: 146539 - DNA, 7 bp, Unknown
  misc_feature (1)..( 7): Result.004 file - promoters60/5663370
gagtgga

SEQ ID NO: 146540 - DNA, 7 bp, Unknown
  misc_feature (1)..( 7): Result.004 file - promoters60/5663370
gagagga

SEQ ID NO: 146541 - DNA, 7 bp, Unknown
  misc_feature (1)..( 7): Result.004 file - promoters60/5663370
acaagaa

SEQ ID NO: 146542 - DNA, 7 bp, Unknown
  misc_feature (1)..( 7): Result.004 file - promoters60/5663370
acaagaa

SEQ ID NO: 146543 - DNA, 6 bp, Unknown
  misc_feature (1)..( 6): Result.004 file - promoters60/5663370
ctaaaa

SEQ ID NO: 146544 - DNA, 6 bp, Unknown
  misc_feature (1)..( 6): Result.004 file - promoters60/5663370
ctaaaa

SEQ ID NO: 146545 - DNA, 10 bp, Unknown
  misc_feature (1)..( 10): Result.004 file - promoters60/5663370
aaatcaacca

SEQ ID NO: 146546 - DNA, 10 bp, Unknown
  misc_feature (1)..( 10): Result.004 file - promoters60/5663370
aaaacaacca

SEQ ID NO: 146547 - DNA, 6 bp, Unknown
  misc_feature (1)..( 6): Result.004 file - promoters60/5663370
aaaaat

SEQ ID NO: 146548 - DNA, 6 bp, Unknown
  misc_feature (1)..( 6): Result.004 file - promoters60/5663370
aaaaat

SEQ ID NO: 146549 - DNA, 8 bp, Unknown
  misc_feature (1)..( 8): Result.004 file - promoters60/5663370
tctgtata

SEQ ID NO: 146550 - DNA, 8 bp, Unknown
  misc_feature (1)..( 8): Result.004 file - promoters60/5663370
tctgtata

SEQ ID NO: 146551 - DNA, 9 bp, Unknown
  misc_feature (1)..( 9): Result.004 file - promoters60/5663370
ataaatttc

SEQ ID NO: 146552 - DNA, 9 bp, Unknown
  misc_feature (1)..( 9): Result.004 file - promoters60/5663370
ataagtttc

SEQ ID NO: 146553 - DNA, 9 bp, Unknown
  misc_feature (1)..( 9): Result.004 file - promoters60/5663370
ttctacatg

SEQ ID NO: 146554 - DNA, 9 bp, Unknown
  misc_feature (1)..( 9): Result.004 file - promoters60/5663370
ttcaacatc

SEQ ID NO: 146555 - DNA, 9 bp, Unknown
  misc_feature (1)..( 9): Result.004 file - promoters60/5663370
gttaacatc

SEQ ID NO: 146556 - DNA, 7 bp, Unknown
  misc_feature (1)..( 7): Result.004 file - promoters60/5663370
catttct

SEQ ID NO: 146557 - DNA, 7 bp, Unknown
  misc_feature (1)..( 7): Result.004 file - promoters60/5663370
catctct

SEQ ID NO: 146558 - DNA, 6 bp, Unknown
  misc_feature (1)..( 6): Result.004 file - promoters60/5663370
atgagc

SEQ ID NO: 146559 - DNA, 6 bp, Unknown
  misc_feature (1)..( 6): Result.004 file - promoters60/5663370
atgagc

SEQ ID NO: 146560 - DNA, 6 bp, Unknown
  misc_feature (1)..( 6): Result.004 file - promoters60/5663370
taaaac

SEQ ID NO: 146561 - DNA, 6 bp, Unknown
  misc_feature (1)..( 6): Result.004 file - promoters60/5663370
taaaac

SEQ ID NO: 146562 - DNA, 10 bp, Unknown
  misc_feature (1)..( 10): Result.004 file - promoters60/5663370
ttcaattttt

SEQ ID NO: 146563 - DNA, 10 bp, Unknown
  misc_feature (1)..( 10): Result.004 file - promoters60/5663370
ttctattttt

SEQ ID NO: 146564 - DNA, 6 bp, Unknown
  misc_feature (1)..( 6): Result.004 file - promoters60/5663370
atgaga

SEQ ID NO: 146565 - DNA, 6 bp, Unknown
  misc_feature (1)..( 6): Result.004 file - promoters60/5663370
atgaga

SEQ ID NO: 146566 - DNA, 6 bp, Unknown
  misc_feature (1)..( 6): Result.004 file - promoters60/5663370
gaggaa

SEQ ID NO: 146567 - DNA, 6 bp, Unknown
  misc_feature (1)..( 6): Result.004 file - promoters60/5663370
gaggaa

SEQ ID NO: 146568 - DNA, 8 bp, Unknown
  misc_feature (1)..( 8): Result.004 file - promoters60/5663370
acttttca

SEQ ID NO: 146569 - DNA, 8 bp, Unknown
  misc_feature (1)..( 8): Result.004 file - promoters60/5663370
actcttca

SEQ ID NO: 146570 - DNA, 7 bp, Unknown
  misc_feature (1)..( 7): Result.004 file - promoters60/5663370
caaaata

SEQ ID NO: 146571 - DNA, 7 bp, Unknown
  misc_feature (1)..( 7): Result.004 file - promoters60/5663374
caagata

SEQ ID NO: 146572 - DNA, 8 bp, Unknown
  misc_feature (1)..( 8): Result.004 file - promoters60/5663374
agagattt

SEQ ID NO: 146573 - DNA, 8 bp, Unknown
  misc_feature (1)..( 8): Result.004 file - promoters60/5663374
agacattt

SEQ ID NO: 146574 - DNA, 13 bp, Unknown
  misc_feature (1)..( 13): Result.004 file - promoters60/5663374
caataaattaaat

SEQ ID NO: 146575 - DNA, 13 bp, Unknown
  misc_feature (1)..( 13): Result.004 file - promoters60/5663374
aaataaaataaat

SEQ ID NO: 146576 - DNA, 13 bp, Unknown
  misc_feature (1)..( 13): Result.004 file - promoters60/5663374
aaatgaaatatct

SEQ ID NO: 146577 - DNA, 9 bp, Unknown
  misc_feature (1)..( 9): Result.004 file - promoters60/5663374
ttctcacat

SEQ ID NO: 146578 - DNA, 9 bp, Unknown
  misc_feature (1)..( 9): Result.004 file - promoters60/5663374
ttcccacta

SEQ ID NO: 146579 - DNA, 9 bp, Unknown
  misc_feature (1)..( 9): Result.004 file - promoters60/5663374
aacccacta

SEQ ID NO: 146580 - DNA, 9 bp, Unknown
  misc_feature (1)..( 9): Result.004 file - promoters60/5663374
aaaccagaa

SEQ ID NO: 146581 - DNA, 9 bp, Unknown
  misc_feature (1)..( 9): Result.004 file - promoters60/5663374
aaaccggaa

SEQ ID NO: 146582 - DNA, 6 bp, Unknown
  misc_feature (1)..( 6): Result.004 file - promoters60/5663374
atttcc

SEQ ID NO: 146583 - DNA, 6 bp, Unknown
  misc_feature (1)..( 6): Result.004 file - promoters60/5663374
atttcc

SEQ ID NO: 146584 - DNA, 6 bp, Unknown
  misc_feature (1)..( 6): Result.004 file - promoters60/5663374
atatgg

SEQ ID NO: 146585 - DNA, 6 bp, Unknown
  misc_feature (1)..( 6): Result.004 file - promoters60/5663374
atatgg

SEQ ID NO: 146586 - DNA, 6 bp, Unknown
  misc_feature (1)..( 6): Result.004 file - promoters60/5663374
aagata

SEQ ID NO: 146587 - DNA, 6 bp, Unknown
  misc_feature (1)..( 6): Result.004 file - promoters60/5663374
aagata

SEQ ID NO: 146588 - DNA, 7 bp, Unknown
  misc_feature (1)..( 7): Result.004 file - promoters60/5663374
attttta

SEQ ID NO: 146589 - DNA, 7 bp, Unknown
  misc_feature (1)..( 7): Result.004 file - promoters60/5663374
attgtta

SEQ ID NO: 146590 - DNA, 7 bp, Unknown
  misc_feature (1)..( 7): Result.004 file - promoters60/5663374
aactaaa

SEQ ID NO: 146591 - DNA, 7 bp, Unknown
  misc_feature (1)..( 7): Result.004 file - promoters60/5663374
aactaaa

SEQ ID NO: 146592 - DNA, 6 bp, Unknown
  misc_feature (1)..( 6): Result.004 file - promoters60/5663374
atctat

SEQ ID NO: 146593 - DNA, 6 bp, Unknown
  misc_feature (1)..( 6): Result.004 file - promoters60/5663374
atctat

SEQ ID NO: 146594 - DNA, 6 bp, Unknown
  misc_feature (1)..( 6): Result.004 file - promoters60/5663374
aataaa

SEQ ID NO: 146595 - DNA, 6 bp, Unknown
  misc_feature (1)..( 6): Result.004 file - promoters60/5663374
aataaa

SEQ ID NO: 146596 - DNA, 6 bp, Unknown
  misc_feature (1)..( 6): Result.004 file - promoters60/5663374
agtaaa

SEQ ID NO: 146597 - DNA, 6 bp, Unknown
  misc_feature (1)..( 6): Result.004 file - promoters60/5663374
agtaaa

SEQ ID NO: 146598 - DNA, 7 bp, Unknown
  misc_feature (1)..( 7): Result.004 file - promoters60/5663374
aatcggg

SEQ ID NO: 146599 - DNA, 7 bp, Unknown
  misc_feature (1)..( 7): Result.004 file - promoters60/5663374
aattggg

SEQ ID NO: 146600 - DNA, 8 bp, Unknown
  misc_feature (1)..( 8): Result.004 file - promoters60/5663374
gaaagaaa

SEQ ID NO: 146601 - DNA, 8 bp, Unknown
  misc_feature (1)..( 8): Result.004 file - promoters60/5663374
gaaacaaa

SEQ ID NO: 146602 - DNA, 9 bp, Unknown
  misc_feature (1)..( 9): Result.004 file - promoters60/5663374
aaagaaaag

SEQ ID NO: 146603 - DNA, 9 bp, Unknown
  misc_feature (1)..( 9): Result.004 file - promoters60/5663374
aaagtaaag

SEQ ID NO: 146604 - DNA, 7 bp, Unknown
  misc_feature (1)..( 7): Result.004 file - promoters60/5663374
gtatata

SEQ ID NO: 146605 - DNA, 7 bp, Unknown
  misc_feature (1)..( 7): Result.004 file - promoters60/5663418
gtatata

SEQ ID NO: 146606 - DNA, 7 bp, Unknown
  misc_feature (1)..( 7): Result.004 file - promoters60/5663418
aatcaca

SEQ ID NO: 146607 - DNA, 7 bp, Unknown
  misc_feature (1)..( 7): Result.004 file - promoters60/5663418
aattaca

SEQ ID NO: 146608 - DNA, 7 bp, Unknown
  misc_feature (1)..( 7): Result.004 file - promoters60/5663418
tctttat

SEQ ID NO: 146609 - DNA, 7 bp, Unknown
  misc_feature (1)..( 7): Result.004 file - promoters60/5663418
tctgtat

SEQ ID NO: 146610 - DNA, 7 bp, Unknown
  misc_feature (1)..( 7): Result.004 file - promoters60/5663418
actttat

SEQ ID NO: 146611 - DNA, 7 bp, Unknown
  misc_feature (1)..( 7): Result.004 file - promoters60/5663418
gaaaaaa

SEQ ID NO: 146612 - DNA, 7 bp, Unknown
  misc_feature (1)..( 7): Result.004 file - promoters60/5663418
gaaaaag

SEQ ID NO: 146613 - DNA, 7 bp, Unknown
  misc_feature (1)..( 7): Result.004 file - promoters60/5663418
caaaaaa

SEQ ID NO: 146614 - DNA, 6 bp, Unknown
  misc_feature (1)..( 6): Result.004 file - promoters60/5663418
aaagaa

SEQ ID NO: 146615 - DNA, 6 bp, Unknown
  misc_feature (1)..( 6): Result.004 file - promoters60/5663418
aaagaa

SEQ ID NO: 146616 - DNA, 6 bp, Unknown
  misc_feature (1)..( 6): Result.004 file - promoters60/5663418
ttgctc

SEQ ID NO: 146617 - DNA, 6 bp, Unknown
  misc_feature (1)..( 6): Result.004 file - promoters60/5663418
ttgctc

SEQ ID NO: 146618 - DNA, 7 bp, Unknown
  misc_feature (1)..( 7): Result.004 file - promoters60/5663418
acttgga

SEQ ID NO: 146619 - DNA, 7 bp, Unknown
  misc_feature (1)..( 7): Result.004 file - promoters60/5663418
acttgga

SEQ ID NO: 146620 - DNA, 14 bp, Unknown
  misc_feature (1)..( 14): Result.004 file - promoters60/5663418
ggtttatttttaat

SEQ ID NO: 146621 - DNA, 14 bp, Unknown
  misc_feature (1)..( 14): Result.004 file - promoters60/5663418
ggtctattctaaat

SEQ ID NO: 146622 - DNA, 14 bp, Unknown
  misc_feature (1)..( 14): Result.004 file - promoters60/5663418
catctattctcaat

SEQ ID NO: 146623 - DNA, 7 bp, Unknown
  misc_feature (1)..( 7): Result.004 file - promoters60/5663418
tttaatt

SEQ ID NO: 146624 - DNA, 7 bp, Unknown
  misc_feature (1)..( 7): Result.004 file - promoters60/5663418
tttaatt

SEQ ID NO: 146625 - DNA, 8 bp, Unknown
  misc_feature (1)..( 8): Result.004 file - promoters60/5663418
tctgattt

SEQ ID NO: 146626 - DNA, 8 bp, Unknown
  misc_feature (1)..( 8): Result.004 file - promoters60/5663418
tctgtttt

SEQ ID NO: 146627 - DNA, 6 bp, Unknown
  misc_feature (1)..( 6): Result.004 file - promoters60/5663418
ttttct

SEQ ID NO: 146628 - DNA, 6 bp, Unknown
  misc_feature (1)..( 6): Result.004 file - promoters60/5663418
ttttct

SEQ ID NO: 146629 - DNA, 9 bp, Unknown
  misc_feature (1)..( 9): Result.004 file - promoters60/5663418
tgatttgat

SEQ ID NO: 146630 - DNA, 9 bp, Unknown
  misc_feature (1)..( 9): Result.004 file - promoters60/5663418
tgagttgat

SEQ ID NO: 146631 - DNA, 6 bp, Unknown
  misc_feature (1)..( 6): Result.004 file - promoters60/5663418
cttttt

SEQ ID NO: 146632 - DNA, 6 bp, Unknown
  misc_feature (1)..( 6): Result.004 file - promoters60/5663418
cttttt

SEQ ID NO: 146633 - DNA, 8 bp, Unknown
  misc_feature (1)..( 8): Result.004 file - promoters60/5663418
ttgaattt

SEQ ID NO: 146634 - DNA, 8 bp, Unknown
  misc_feature (1)..( 8): Result.004 file - promoters60/5663418
ttgaattt

SEQ ID NO: 146635 - DNA, 8 bp, Unknown
  misc_feature (1)..( 8): Result.004 file - promoters60/5663418
tcaataca

SEQ ID NO: 146636 - DNA, 8 bp, Unknown
  misc_feature (1)..( 8): Result.004 file - promoters60/5663418
tcattaca

SEQ ID NO: 146637 - DNA, 6 bp, Unknown
  misc_feature (1)..( 6): Result.004 file - promoters60/5663418
acaaat

SEQ ID NO: 146638 - DNA, 6 bp, Unknown
  misc_feature (1)..( 6): Result.004 file - promoters60/5663418
acaaat

SEQ ID NO: 146639 - DNA, 11 bp, Unknown
  misc_feature (1)..( 11): Result.004 file - promoters60/5663418
accaattattg

SEQ ID NO: 146640 - DNA, 11 bp, Unknown
  misc_feature (1)..( 11): Result.004 file - promoters60/5663418
accaaatattg

SEQ ID NO: 146641 - DNA, 7 bp, Unknown
  misc_feature (1)..( 7): Result.004 file - promoters60/5663418
tttatgt

SEQ ID NO: 146642 - DNA, 7 bp, Unknown
  misc_feature (1)..( 7): Result.004 file - promoters60/5663418
tttatgt

SEQ ID NO: 146643 - DNA, 6 bp, Unknown
  misc_feature (1)..( 6): Result.004 file - promoters60/5663418
agactt

SEQ ID NO: 146644 - DNA, 6 bp, Unknown
  misc_feature (1)..( 6): Result.004 file - promoters60/5663418
agactt

SEQ ID NO: 146645 - DNA, 7 bp, Unknown
  misc_feature (1)..( 7): Result.004 file - promoters60/5663418
agaagct

SEQ ID NO: 146646 - DNA, 7 bp, Unknown
  misc_feature (1)..( 7): Result.004 file - promoters60/5663418
agaggct

SEQ ID NO: 146647 - DNA, 7 bp, Unknown
  misc_feature (1)..( 7): Result.004 file - promoters60/5663418
tataaaa

SEQ ID NO: 146648 - DNA, 7 bp, Unknown
  misc_feature (1)..( 7): Result.004 file - promoters60/5663433
tataaaa

SEQ ID NO: 146649 - DNA, 10 bp, Unknown
  misc_feature (1)..( 10): Result.004 file - promoters60/5663433
tttttagatt

SEQ ID NO: 146650 - DNA, 10 bp, Unknown
  misc_feature (1)..( 10): Result.004 file - promoters60/5663433
ggcttagatt

SEQ ID NO: 146651 - DNA, 10 bp, Unknown
  misc_feature (1)..( 10): Result.004 file - promoters60/5663433
ggctttgatg

SEQ ID NO: 146652 - DNA, 6 bp, Unknown
  misc_feature (1)..( 6): Result.004 file - promoters60/5663433
tttttt

SEQ ID NO: 146653 - DNA, 6 bp, Unknown
  misc_feature (1)..( 6): Result.004 file - promoters60/5663433
tttttt

SEQ ID NO: 146654 - DNA, 6 bp, Unknown
  misc_feature (1)..( 6): Result.004 file - promoters60/5663433
aaatat

SEQ ID NO: 146655 - DNA, 6 bp, Unknown
  misc_feature (1)..( 6): Result.004 file - promoters60/5663433
aaatat

SEQ ID NO: 146656 - DNA, 8 bp, Unknown
  misc_feature (1)..( 8): Result.004 file - promoters60/5663433
aaatctca

SEQ ID NO: 146657 - DNA, 8 bp, Unknown
  misc_feature (1)..( 8): Result.004 file - promoters60/5663433
aaatatca

SEQ ID NO: 146658 - DNA, 6 bp, Unknown
  misc_feature (1)..( 6): Result.004 file - promoters60/5663433
acacat

SEQ ID NO: 146659 - DNA, 6 bp, Unknown
  misc_feature (1)..( 6): Result.004 file - promoters60/5663433
acacat

SEQ ID NO: 146660 - DNA, 7 bp, Unknown
  misc_feature (1)..( 7): Result.004 file - promoters60/5663433
atgatta

SEQ ID NO: 146661 - DNA, 7 bp, Unknown
  misc_feature (1)..( 7): Result.004 file - promoters60/5663433
atgatta

SEQ ID NO: 146662 - DNA, 8 bp, Unknown
  misc_feature (1)..( 8): Result.004 file - promoters60/5663433
aatgggcc

SEQ ID NO: 146663 - DNA, 8 bp, Unknown
  misc_feature (1)..( 8): Result.004 file - promoters60/5663433
aatgggcc

SEQ ID NO: 146664 - DNA, 7 bp, Unknown
  misc_feature (1)..( 7): Result.004 file - promoters60/5663433
atgatat

SEQ ID NO: 146665 - DNA, 7 bp, Unknown
  misc_feature (1)..( 7): Result.004 file - promoters60/5663433
atgatat

SEQ ID NO: 146666 - DNA, 6 bp, Unknown
  misc_feature (1)..( 6): Result.004 file - promoters60/5663433
ttttaa

SEQ ID NO: 146667 - DNA, 6 bp, Unknown
  misc_feature (1)..( 6): Result.004 file - promoters60/5663433
ttttaa

SEQ ID NO: 146668 - DNA, 7 bp, Unknown
  misc_feature (1)..( 7): Result.004 file - promoters60/5663433
ttttaga

SEQ ID NO: 146669 - DNA, 7 bp, Unknown
  misc_feature (1)..( 7): Result.004 file - promoters60/5663433
tttgaga

SEQ ID NO: 146670 - DNA, 7 bp, Unknown
  misc_feature (1)..( 7): Result.004 file - promoters60/5663433
gtaaaat

SEQ ID NO: 146671 - DNA, 7 bp, Unknown
  misc_feature (1)..( 7): Result.004 file - promoters60/5663440
gtaaaat

SEQ ID NO: 146672 - DNA, 7 bp, Unknown
  misc_feature (1)..( 7): Result.004 file - promoters60/5663440
gaaggaa

SEQ ID NO: 146673 - DNA, 7 bp, Unknown
  misc_feature (1)..( 7): Result.004 file - promoters60/5663440
aaaggaa

SEQ ID NO: 146674 - DNA, 7 bp, Unknown
  misc_feature (1)..( 7): Result.004 file - promoters60/5663440
aaaagaa

SEQ ID NO: 146675 - DNA, 7 bp, Unknown
  misc_feature (1)..( 7): Result.004 file - promoters60/5663440
aaaagaa

SEQ ID NO: 146676 - DNA, 16 bp, Unknown
  misc_feature (1)..( 16): Result.004 file - promoters60/5663440
tctcttcttcattgaa

SEQ ID NO: 146677 - DNA, 16 bp, Unknown
  misc_feature (1)..( 16): Result.004 file - promoters60/5663440
tcttttctctctataa

SEQ ID NO: 146678 - DNA, 16 bp, Unknown
  misc_feature (1)..( 16): Result.004 file - promoters60/5663440
acttttgtctatataa

SEQ ID NO: 146679 - DNA, 16 bp, Unknown
  misc_feature (1)..( 16): Result.004 file - promoters60/5663440
atgtttctcttcttct

SEQ ID NO: 146680 - DNA, 7 bp, Unknown
  misc_feature (1)..( 7): Result.004 file - promoters60/5663440
aagcaag

SEQ ID NO: 146681 - DNA, 7 bp, Unknown
  misc_feature (1)..( 7): Result.004 file - promoters60/5663440
aagcaaa

SEQ ID NO: 146682 - DNA, 7 bp, Unknown
  misc_feature (1)..( 7): Result.004 file - promoters60/5663440
aagtaaa

SEQ ID NO: 146683 - DNA, 7 bp, Unknown
  misc_feature (1)..( 7): Result.004 file - promoters60/5663440
aagtaac

SEQ ID NO: 146684 - DNA, 9 bp, Unknown
  misc_feature (1)..( 9): Result.004 file - promoters60/5663440
ttacattaa

SEQ ID NO: 146685 - DNA, 9 bp, Unknown
  misc_feature (1)..( 9): Result.004 file - promoters60/5663440
ttatattta

SEQ ID NO: 146686 - DNA, 9 bp, Unknown
  misc_feature (1)..( 9): Result.004 file - promoters60/5663440
acatatttg

SEQ ID NO: 146687 - DNA, 9 bp, Unknown
  misc_feature (1)..( 9): Result.004 file - promoters60/5663474
taataatta

SEQ ID NO: 146688 - DNA, 9 bp, Unknown
  misc_feature (1)..( 9): Result.004 file - promoters60/5663474
taaagatgt

SEQ ID NO: 146689 - DNA, 9 bp, Unknown
  misc_feature (1)..( 9): Result.004 file - promoters60/5663474
taaagctgt

SEQ ID NO: 146690 - DNA, 8 bp, Unknown
  misc_feature (1)..( 8): Result.004 file - promoters60/5663474
ttgtgtta

SEQ ID NO: 146691 - DNA, 8 bp, Unknown
  misc_feature (1)..( 8): Result.004 file - promoters60/5663474
ttgtttta

SEQ ID NO: 146692 - DNA, 8 bp, Unknown
  misc_feature (1)..( 8): Result.004 file - promoters60/5663474
ttgtgttg

SEQ ID NO: 146693 - DNA, 6 bp, Unknown
  misc_feature (1)..( 6): Result.004 file - promoters60/5663474
gttttt

SEQ ID NO: 146694 - DNA, 6 bp, Unknown
  misc_feature (1)..( 6): Result.004 file - promoters60/5663474
gttttt

SEQ ID NO: 146695 - DNA, 7 bp, Unknown
  misc_feature (1)..( 7): Result.004 file - promoters60/5663474
aatacaa

SEQ ID NO: 146696 - DNA, 7 bp, Unknown
  misc_feature (1)..( 7): Result.004 file - promoters60/5663474
aatacaa

SEQ ID NO: 146697 - DNA, 7 bp, Unknown
  misc_feature (1)..( 7): Result.004 file - promoters60/5663474
aagaaag

SEQ ID NO: 146698 - DNA, 7 bp, Unknown
  misc_feature (1)..( 7): Result.004 file - promoters60/5663474
aaggaag

SEQ ID NO: 146699 - DNA, 9 bp, Unknown
  misc_feature (1)..( 9): Result.004 file - promoters60/5663474
tctaatgaa

SEQ ID NO: 146700 - DNA, 9 bp, Unknown
  misc_feature (1)..( 9): Result.004 file - promoters60/5663474
tctattgaa

SEQ ID NO: 146701 - DNA, 7 bp, Unknown
  misc_feature (1)..( 7): Result.004 file - promoters60/5663474
tgaagaa

SEQ ID NO: 146702 - DNA, 7 bp, Unknown
  misc_feature (1)..( 7): Result.004 file - promoters60/5663474
tgatgaa

SEQ ID NO: 146703 - DNA, 9 bp, Unknown
  misc_feature (1)..( 9): Result.004 file - promoters60/5663474
tcacaaaga

SEQ ID NO: 146704 - DNA, 9 bp, Unknown
  misc_feature (1)..( 9): Result.004 file - promoters60/5663474
tcaaaaaga

SEQ ID NO: 146705 - DNA, 7 bp, Unknown
  misc_feature (1)..( 7): Result.004 file - promoters60/5663474
tgtgttg

SEQ ID NO: 146706 - DNA, 7 bp, Unknown
  misc_feature (1)..( 7): Result.004 file - promoters60/5663474
tgtgttg

SEQ ID NO: 146707 - DNA, 6 bp, Unknown
  misc_feature (1)..( 6): Result.004 file - promoters60/5663474
atctcc

SEQ ID NO: 146708 - DNA, 6 bp, Unknown
  misc_feature (1)..( 6): Result.004 file - promoters60/5663474
atctcc

SEQ ID NO: 146709 - DNA, 7 bp, Unknown
  misc_feature (1)..( 7): Result.004 file - promoters60/5663474
gttggat

SEQ ID NO: 146710 - DNA, 7 bp, Unknown
  misc_feature (1)..( 7): Result.004 file - promoters60/5663474
gtttgat

SEQ ID NO: 146711 - DNA, 7 bp, Unknown
  misc_feature (1)..( 7): Result.004 file - promoters60/5663474
catgtaa

SEQ ID NO: 146712 - DNA, 7 bp, Unknown
  misc_feature (1)..( 7): Result.004 file - promoters60/5663474
catataa

SEQ ID NO: 146713 - DNA, 9 bp, Unknown
  misc_feature (1)..( 9): Result.004 file - promoters60/5663474
tcttataat

SEQ ID NO: 146714 - DNA, 9 bp, Unknown
  misc_feature (1)..( 9): Result.004 file - promoters60/5663478
tcttgtaat

SEQ ID NO: 146715 - DNA, 8 bp, Unknown
  misc_feature (1)..( 8): Result.004 file - promoters60/5663478
acagcttt

SEQ ID NO: 146716 - DNA, 8 bp, Unknown
  misc_feature (1)..( 8): Result.004 file - promoters60/5663478
caagcttt

SEQ ID NO: 146717 - DNA, 8 bp, Unknown
  misc_feature (1)..( 8): Result.004 file - promoters60/5663478
caagtttt

SEQ ID NO: 146718 - DNA, 11 bp, Unknown
  misc_feature (1)..( 11): Result.004 file - promoters60/5663478
aaaatcataat

SEQ ID NO: 146719 - DNA, 11 bp, Unknown
  misc_feature (1)..( 11): Result.004 file - promoters60/5663478
aaactcaaaat

SEQ ID NO: 146720 - DNA, 11 bp, Unknown
  misc_feature (1)..( 11): Result.004 file - promoters60/5663478
ccaatcattag

SEQ ID NO: 146721 - DNA, 10 bp, Unknown
  misc_feature (1)..( 10): Result.004 file - promoters60/5663478
tgattagcaa

SEQ ID NO: 146722 - DNA, 10 bp, Unknown
  misc_feature (1)..( 10): Result.004 file - promoters60/5663478
tgattagtta

SEQ ID NO: 146723 - DNA, 10 bp, Unknown
  misc_feature (1)..( 10): Result.004 file - promoters60/5663478
cgatgagtac

SEQ ID NO: 146724 - DNA, 10 bp, Unknown
  misc_feature (1)..( 10): Result.004 file - promoters60/5663478
tcattagtta

SEQ ID NO: 146725 - DNA, 8 bp, Unknown
  misc_feature (1)..( 8): Result.004 file - promoters60/5663478
tttattaa

SEQ ID NO: 146726 - DNA, 8 bp, Unknown
  misc_feature (1)..( 8): Result.004 file - promoters60/5663478
tttcttaa

SEQ ID NO: 146727 - DNA, 8 bp, Unknown
  misc_feature (1)..( 8): Result.004 file - promoters60/5663478
tttcataa

SEQ ID NO: 146728 - DNA, 10 bp, Unknown
  misc_feature (1)..( 10): Result.004 file - promoters60/5663478
tgcaatcttt

SEQ ID NO: 146729 - DNA, 10 bp, Unknown
  misc_feature (1)..( 10): Result.004 file - promoters60/5663478
ctcaaacttg

SEQ ID NO: 146730 - DNA, 10 bp, Unknown
  misc_feature (1)..( 10): Result.004 file - promoters60/5663502
ctcaaaattg

SEQ ID NO: 146731 - DNA, 6 bp, Unknown
  misc_feature (1)..( 6): Result.004 file - promoters60/5663502
aaaaaa

SEQ ID NO: 146732 - DNA, 6 bp, Unknown
  misc_feature (1)..( 6): Result.004 file - promoters60/5663502
aaaaaa

SEQ ID NO: 146733 - DNA, 11 bp, Unknown
  misc_feature (1)..( 11): Result.004 file - promoters60/5663502
attgatcaaaa

SEQ ID NO: 146734 - DNA, 11 bp, Unknown
  misc_feature (1)..( 11): Result.004 file - promoters60/5663502
atttatcgaat

SEQ ID NO: 146735 - DNA, 11 bp, Unknown
  misc_feature (1)..( 11): Result.004 file - promoters60/5663502
ctttttcgaat

SEQ ID NO: 146736 - DNA, 7 bp, Unknown
  misc_feature (1)..( 7): Result.004 file - promoters60/5663502
cacggaa

SEQ ID NO: 146737 - DNA, 7 bp, Unknown
  misc_feature (1)..( 7): Result.004 file - promoters60/5663502
caccgaa

SEQ ID NO: 146738 - DNA, 6 bp, Unknown
  misc_feature (1)..( 6): Result.004 file - promoters60/5663502
actttt

SEQ ID NO: 146739 - DNA, 6 bp, Unknown
  misc_feature (1)..( 6): Result.004 file - promoters60/5663502
actttt

SEQ ID NO: 146740 - DNA, 6 bp, Unknown
  misc_feature (1)..( 6): Result.004 file - promoters60/5663502
ttttac

SEQ ID NO: 146741 - DNA, 6 bp, Unknown
  misc_feature (1)..( 6): Result.004 file - promoters60/5663502
ttttac

SEQ ID NO: 146742 - DNA, 6 bp, Unknown
  misc_feature (1)..( 6): Result.004 file - promoters60/5663502
tcttgt

SEQ ID NO: 146743 - DNA, 6 bp, Unknown
  misc_feature (1)..( 6): Result.004 file - promoters60/5663502
tcttgt

SEQ ID NO: 146744 - DNA, 7 bp, Unknown
  misc_feature (1)..( 7): Result.004 file - promoters60/5663502
attcttc

SEQ ID NO: 146745 - DNA, 7 bp, Unknown
  misc_feature (1)..( 7): Result.004 file - promoters60/5663502
atttttc

SEQ ID NO: 146746 - DNA, 14 bp, Unknown
  misc_feature (1)..( 14): Result.004 file - promoters60/5663502
tcatttttttttgt

SEQ ID NO: 146747 - DNA, 14 bp, Unknown
  misc_feature (1)..( 14): Result.004 file - promoters60/5663502
actagtttttgtgt

SEQ ID NO: 146748 - DNA, 14 bp, Unknown
  misc_feature (1)..( 14): Result.004 file - promoters60/5663502
tcatatttttttca

SEQ ID NO: 146749 - DNA, 10 bp, Unknown
  misc_feature (1)..( 10): Result.004 file - promoters60/5663502
aatttttttt

SEQ ID NO: 146750 - DNA, 10 bp, Unknown
  misc_feature (1)..( 10): Result.004 file - promoters60/5663502
aatttttttt

SEQ ID NO: 146751 - DNA, 10 bp, Unknown
  misc_feature (1)..( 10): Result.004 file - promoters60/5663502
aaacacatct

SEQ ID NO: 146752 - DNA, 10 bp, Unknown
  misc_feature (1)..( 10): Result.004 file - promoters60/5663502
aaatacattt

SEQ ID NO: 146753 - DNA, 10 bp, Unknown
  misc_feature (1)..( 10): Result.004 file - promoters60/5663502
tcacacgtct

SEQ ID NO: 146754 - DNA, 9 bp, Unknown
  misc_feature (1)..( 9): Result.004 file - promoters60/5663502
tattacttt

SEQ ID NO: 146755 - DNA, 9 bp, Unknown
  misc_feature (1)..( 9): Result.004 file - promoters60/5663502
catttcttt

SEQ ID NO: 146756 - DNA, 9 bp, Unknown
  misc_feature (1)..( 9): Result.004 file - promoters60/5663502
catttgttt

SEQ ID NO: 146757 - DNA, 8 bp, Unknown
  misc_feature (1)..( 8): Result.004 file - promoters60/5663502
aattatat

SEQ ID NO: 146758 - DNA, 8 bp, Unknown
  misc_feature (1)..( 8): Result.004 file - promoters60/5663502
aattttat

SEQ ID NO: 146759 - DNA, 6 bp, Unknown
  misc_feature (1)..( 6): Result.004 file - promoters60/5663502
attctt

SEQ ID NO: 146760 - DNA, 6 bp, Unknown
  misc_feature (1)..( 6): Result.004 file - promoters60/5663502
attctt

SEQ ID NO: 146761 - DNA, 6 bp, Unknown
  misc_feature (1)..( 6): Result.004 file - promoters60/5663502
aaatca

SEQ ID NO: 146762 - DNA, 6 bp, Unknown
  misc_feature (1)..( 6): Result.004 file - promoters60/5663502
aaatca

SEQ ID NO: 146763 - DNA, 7 bp, Unknown
  misc_feature (1)..( 7): Result.004 file - promoters60/5663502
ttacctt

SEQ ID NO: 146764 - DNA, 7 bp, Unknown
  misc_feature (1)..( 7): Result.004 file - promoters60/5663502
ttaactt

SEQ ID NO: 146765 - DNA, 6 bp, Unknown
  misc_feature (1)..( 6): Result.004 file - promoters60/5663502
ttcaaa

SEQ ID NO: 146766 - DNA, 6 bp, Unknown
  misc_feature (1)..( 6): Result.004 file - promoters60/5663502
ttcaaa

SEQ ID NO: 146767 - DNA, 6 bp, Unknown
  misc_feature (1)..( 6): Result.004 file - promoters60/5663502
gtttct

SEQ ID NO: 146768 - DNA, 6 bp, Unknown
  misc_feature (1)..( 6): Result.004 file - promoters60/5663502
gtttct

SEQ ID NO: 146769 - DNA, 7 bp, Unknown
  misc_feature (1)..( 7): Result.004 file - promoters60/5663502
ttagatt

SEQ ID NO: 146770 - DNA, 7 bp, Unknown
  misc_feature (1)..( 7): Result.004 file - promoters60/5663502
ttaaatt

SEQ ID NO: 146771 - DNA, 7 bp, Unknown
  misc_feature (1)..( 7): Result.004 file - promoters60/5663502
atatctt

SEQ ID NO: 146772 - DNA, 7 bp, Unknown
  misc_feature (1)..( 7): Result.004 file - promoters60/5663502
atatctt

SEQ ID NO: 146773 - DNA, 10 bp, Unknown
  misc_feature (1)..( 10): Result.004 file - promoters60/5663502
ttttaatctc

SEQ ID NO: 146774 - DNA, 10 bp, Unknown
  misc_feature (1)..( 10): Result.004 file - promoters60/5663577
ttttaacctc

SEQ ID NO: 146775 - DNA, 8 bp, Unknown
  misc_feature (1)..( 8): Result.004 file - promoters60/5663577
gtaagaat

SEQ ID NO: 146776 - DNA, 8 bp, Unknown
  misc_feature (1)..( 8): Result.004 file - promoters60/5663577
gtacgaat

SEQ ID NO: 146777 - DNA, 8 bp, Unknown
  misc_feature (1)..( 8): Result.004 file - promoters60/5663577
aaacgaat

SEQ ID NO: 146778 - DNA, 8 bp, Unknown
  misc_feature (1)..( 8): Result.004 file - promoters60/5663577
atttcatt

SEQ ID NO: 146779 - DNA, 8 bp, Unknown
  misc_feature (1)..( 8): Result.004 file - promoters60/5663577
gtttcata

SEQ ID NO: 146780 - DNA, 8 bp, Unknown
  misc_feature (1)..( 8): Result.004 file - promoters60/5663585
atttcatt

SEQ ID NO: 146781 - DNA, 6 bp, Unknown
  misc_feature (1)..( 6): Result.004 file - promoters60/5663585
atcaaa

SEQ ID NO: 146782 - DNA, 6 bp, Unknown
  misc_feature (1)..( 6): Result.004 file - promoters60/5663585
atcaaa

SEQ ID NO: 146783 - DNA, 13 bp, Unknown
  misc_feature (1)..( 13): Result.004 file - promoters60/5663585
attattaatgtcg

SEQ ID NO: 146784 - DNA, 13 bp, Unknown
  misc_feature (1)..( 13): Result.004 file - promoters60/5663585
attcttaactttt

SEQ ID NO: 146785 - DNA, 13 bp, Unknown
  misc_feature (1)..( 13): Result.004 file - promoters60/5663585
ttccttaagtttt

SEQ ID NO: 146786 - DNA, 6 bp, Unknown
  misc_feature (1)..( 6): Result.004 file - promoters60/5663585
ccaaat

SEQ ID NO: 146787 - DNA, 6 bp, Unknown
  misc_feature (1)..( 6): Result.004 file - promoters60/5663585
ccaaat

SEQ ID NO: 146788 - DNA, 6 bp, Unknown
  misc_feature (1)..( 6): Result.004 file - promoters60/5663585
attatt

SEQ ID NO: 146789 - DNA, 6 bp, Unknown
  misc_feature (1)..( 6): Result.004 file - promoters60/5663585
attatt

SEQ ID NO: 146790 - DNA, 9 bp, Unknown
  misc_feature (1)..( 9): Result.004 file - promoters60/5663585
tattcaaac

SEQ ID NO: 146791 - DNA, 9 bp, Unknown
  misc_feature (1)..( 9): Result.004 file - promoters60/5663585
tatgcaaaa

SEQ ID NO: 146792 - DNA, 9 bp, Unknown
  misc_feature (1)..( 9): Result.004 file - promoters60/5663585
gaatcaaac

SEQ ID NO: 146793 - DNA, 6 bp, Unknown
  misc_feature (1)..( 6): Result.004 file - promoters60/5663585
atttgg

SEQ ID NO: 146794 - DNA, 6 bp, Unknown
  misc_feature (1)..( 6): Result.004 file - promoters60/5663585
atttgg

SEQ ID NO: 146795 - DNA, 8 bp, Unknown
  misc_feature (1)..( 8): Result.004 file - promoters60/5663585
taacaagc

SEQ ID NO: 146796 - DNA, 8 bp, Unknown
  misc_feature (1)..( 8): Result.004 file - promoters60/5663585
taagaagc

SEQ ID NO: 146797 - DNA, 8 bp, Unknown
  misc_feature (1)..( 8): Result.004 file - promoters60/5663585
cttaatac

SEQ ID NO: 146798 - DNA, 8 bp, Unknown
  misc_feature (1)..( 8): Result.004 file - promoters60/5663585
ctttataa

SEQ ID NO: 146799 - DNA, 8 bp, Unknown
  misc_feature (1)..( 8): Result.004 file - promoters60/5663585
ttttataa

SEQ ID NO: 146800 - DNA, 7 bp, Unknown
  misc_feature (1)..( 7): Result.004 file - promoters60/5663585
gtgtaaa

SEQ ID NO: 146801 - DNA, 7 bp, Unknown
  misc_feature (1)..( 7): Result.004 file - promoters60/5663585
gtgaaaa

SEQ ID NO: 146802 - DNA, 6 bp, Unknown
  misc_feature (1)..( 6): Result.004 file - promoters60/5663585
agacaa

SEQ ID NO: 146803 - DNA, 6 bp, Unknown
  misc_feature (1)..( 6): Result.004 file - promoters60/5663585
agacaa

SEQ ID NO: 146804 - DNA, 6 bp, Unknown
  misc_feature (1)..( 6): Result.004 file - promoters60/5663585
ttctta

SEQ ID NO: 146805 - DNA, 6 bp, Unknown
  misc_feature (1)..( 6): Result.004 file - promoters60/5663585
ttctta

SEQ ID NO: 146806 - DNA, 8 bp, Unknown
  misc_feature (1)..( 8): Result.004 file - promoters60/5663585
ataaacaa

SEQ ID NO: 146807 - DNA, 8 bp, Unknown
  misc_feature (1)..( 8): Result.004 file - promoters60/5663585
atatacaa

SEQ ID NO: 146808 - DNA, 7 bp, Unknown
  misc_feature (1)..( 7): Result.004 file - promoters60/5663585
aaatcca

SEQ ID NO: 146809 - DNA, 7 bp, Unknown
  misc_feature (1)..( 7): Result.004 file - promoters60/5663585
aaatcca

SEQ ID NO: 146810 - DNA, 7 bp, Unknown
  misc_feature (1)..( 7): Result.004 file - promoters60/5663585
attattc

SEQ ID NO: 146811 - DNA, 7 bp, Unknown
  misc_feature (1)..( 7): Result.004 file - promoters60/5663585
atttttc

SEQ ID NO: 146812 - DNA, 7 bp, Unknown
  misc_feature (1)..( 7): Result.004 file - promoters60/5663585
atgatat

SEQ ID NO: 146813 - DNA, 7 bp, Unknown
  misc_feature (1)..( 7): Result.004 file - promoters60/5663585
atggtat

SEQ ID NO: 146814 - DNA, 7 bp, Unknown
  misc_feature (1)..( 7): Result.004 file - promoters60/5663585
aatattt

SEQ ID NO: 146815 - DNA, 7 bp, Unknown
  misc_feature (1)..( 7): Result.004 file - promoters60/5663585
aatattt

SEQ ID NO: 146816 - DNA, 8 bp, Unknown
  misc_feature (1)..( 8): Result.004 file - promoters60/5663585
aaatcttt

SEQ ID NO: 146817 - DNA, 8 bp, Unknown
  misc_feature (1)..( 8): Result.004 file - promoters60/5663585
aaagcttt

SEQ ID NO: 146818 - DNA, 7 bp, Unknown
  misc_feature (1)..( 7): Result.004 file - promoters60/5663585
acatatt

SEQ ID NO: 146819 - DNA, 7 bp, Unknown
  misc_feature (1)..( 7): Result.004 file - promoters60/5663585
acaaatt

SEQ ID NO: 146820 - DNA, 6 bp, Unknown
  misc_feature (1)..( 6): Result.004 file - promoters60/5663585
cacata

SEQ ID NO: 146821 - DNA, 6 bp, Unknown
  misc_feature (1)..( 6): Result.004 file - promoters60/5663585
cacata

SEQ ID NO: 146822 - DNA, 6 bp, Unknown
  misc_feature (1)..( 6): Result.004 file - promoters60/5663585
aagttt

SEQ ID NO: 146823 - DNA, 6 bp, Unknown
  misc_feature (1)..( 6): Result.004 file - promoters60/5663585
aagttt

SEQ ID NO: 146824 - DNA, 6 bp, Unknown
  misc_feature (1)..( 6): Result.004 file - promoters60/5663585
ataaat

SEQ ID NO: 146825 - DNA, 6 bp, Unknown
  misc_feature (1)..( 6): Result.004 file - promoters60/5663585
ataaat

SEQ ID NO: 146826 - DNA, 8 bp, Unknown
  misc_feature (1)..( 8): Result.004 file - promoters60/5663585
attgtaat

SEQ ID NO: 146827 - DNA, 8 bp, Unknown
  misc_feature (1)..( 8): Result.004 file - promoters60/5663585
attgtaat

SEQ ID NO: 146828 - DNA, 8 bp, Unknown
  misc_feature (1)..( 8): Result.004 file - promoters60/5663585
aattatac

SEQ ID NO: 146829 - DNA, 8 bp, Unknown
  misc_feature (1)..( 8): Result.004 file - promoters60/5663585
aattatac

SEQ ID NO: 146830 - DNA, 6 bp, Unknown
  misc_feature (1)..( 6): Result.004 file - promoters60/5663585
gtaaaa

SEQ ID NO: 146831 - DNA, 6 bp, Unknown
  misc_feature (1)..( 6): Result.004 file - promoters60/5663585
gtaaaa

SEQ ID NO: 146832 - DNA, 7 bp, Unknown
  misc_feature (1)..( 7): Result.004 file - promoters60/5663585
tttctat

SEQ ID NO: 146833 - DNA, 7 bp, Unknown
  misc_feature (1)..( 7): Result.004 file - promoters60/5663585
tttttat

SEQ ID NO: 146834 - DNA, 10 bp, Unknown
  misc_feature (1)..( 10): Result.004 file - promoters60/5663585
tataaaagtt

SEQ ID NO: 146835 - DNA, 10 bp, Unknown
  misc_feature (1)..( 10): Result.004 file - promoters60/5663595
tattaaagtt

SEQ ID NO: 146836 - DNA, 9 bp, Unknown
  misc_feature (1)..( 9): Result.004 file - promoters60/5663595
gacaaaata

SEQ ID NO: 146837 - DNA, 9 bp, Unknown
  misc_feature (1)..( 9): Result.004 file - promoters60/5663595
gacataata

SEQ ID NO: 146838 - DNA, 6 bp, Unknown
  misc_feature (1)..( 6): Result.004 file - promoters60/5663595
aatact

SEQ ID NO: 146839 - DNA, 6 bp, Unknown
  misc_feature (1)..( 6): Result.004 file - promoters60/5663595
aatact

SEQ ID NO: 146840 - DNA, 8 bp, Unknown
  misc_feature (1)..( 8): Result.004 file - promoters60/5663595
ttttattt

SEQ ID NO: 146841 - DNA, 8 bp, Unknown
  misc_feature (1)..( 8): Result.004 file - promoters60/5663595
ttttgttt

SEQ ID NO: 146842 - DNA, 8 bp, Unknown
  misc_feature (1)..( 8): Result.004 file - promoters60/5663595
gtttattt

SEQ ID NO: 146843 - DNA, 7 bp, Unknown
  misc_feature (1)..( 7): Result.004 file - promoters60/5663595
tttttct

SEQ ID NO: 146844 - DNA, 7 bp, Unknown
  misc_feature (1)..( 7): Result.004 file - promoters60/5663595
tttgtct

SEQ ID NO: 146845 - DNA, 7 bp, Unknown
  misc_feature (1)..( 7): Result.004 file - promoters60/5663595
tttagtt

SEQ ID NO: 146846 - DNA, 7 bp, Unknown
  misc_feature (1)..( 7): Result.004 file - promoters60/5663595
tttcgtt

SEQ ID NO: 146847 - DNA, 8 bp, Unknown
  misc_feature (1)..( 8): Result.004 file - promoters60/5663595
ttttcttg

SEQ ID NO: 146848 - DNA, 8 bp, Unknown
  misc_feature (1)..( 8): Result.004 file - promoters60/5663595
tttacttg

SEQ ID NO: 146849 - DNA, 7 bp, Unknown
  misc_feature (1)..( 7): Result.004 file - promoters60/5663595
tttcttt

SEQ ID NO: 146850 - DNA, 7 bp, Unknown
  misc_feature (1)..( 7): Result.004 file - promoters60/5663595
ttttttt

SEQ ID NO: 146851 - DNA, 8 bp, Unknown
  misc_feature (1)..( 8): Result.004 file - promoters60/5663595
tcagttta

SEQ ID NO: 146852 - DNA, 8 bp, Unknown
  misc_feature (1)..( 8): Result.004 file - promoters60/5663595
tcatttta

SEQ ID NO: 146853 - DNA, 6 bp, Unknown
  misc_feature (1)..( 6): Result.004 file - promoters60/5663595
ttttca

SEQ ID NO: 146854 - DNA, 6 bp, Unknown
  misc_feature (1)..( 6): Result.004 file - promoters60/5663595
ttttca

SEQ ID NO: 146855 - DNA, 7 bp, Unknown
  misc_feature (1)..( 7): Result.004 file - promoters60/5663595
atttggt

SEQ ID NO: 146856 - DNA, 7 bp, Unknown
  misc_feature (1)..( 7): Result.004 file - promoters60/5663595
atttggt

SEQ ID NO: 146857 - DNA, 7 bp, Unknown
  misc_feature (1)..( 7): Result.004 file - promoters60/5663595
aaactct

SEQ ID NO: 146858 - DNA, 7 bp, Unknown
  misc_feature (1)..( 7): Result.004 file - promoters60/5663595
aaaatct

SEQ ID NO: 146859 - DNA, 15 bp, Unknown
  misc_feature (1)..( 15): Result.004 file - promoters60/5663595
actaaaatccaaaat

SEQ ID NO: 146860 - DNA, 15 bp, Unknown
  misc_feature (1)..( 15): Result.004 file - promoters60/5663595
actagaattcaaaat

SEQ ID NO: 146861 - DNA, 6 bp, Unknown
  misc_feature (1)..( 6): Result.004 file - promoters60/5663595
ttttct

SEQ ID NO: 146862 - DNA, 6 bp, Unknown
  misc_feature (1)..( 6): Result.004 file - promoters60/5663595
ttttct

SEQ ID NO: 146863 - DNA, 9 bp, Unknown
  misc_feature (1)..( 9): Result.004 file - promoters60/5663595
aaaatgaat

SEQ ID NO: 146864 - DNA, 9 bp, Unknown
  misc_feature (1)..( 9): Result.004 file - promoters60/5663595
aaaattaat

SEQ ID NO: 146865 - DNA, 6 bp, Unknown
  misc_feature (1)..( 6): Result.004 file - promoters60/5663595
tctttt

SEQ ID NO: 146866 - DNA, 6 bp, Unknown
  misc_feature (1)..( 6): Result.004 file - promoters60/5663595
tctttt

SEQ ID NO: 146867 - DNA, 10 bp, Unknown
  misc_feature (1)..( 10): Result.004 file - promoters60/5663595
tttccttttt

SEQ ID NO: 146868 - DNA, 10 bp, Unknown
  misc_feature (1)..( 10): Result.004 file - promoters60/5663595
tttcattttt

SEQ ID NO: 146869 - DNA, 6 bp, Unknown
  misc_feature (1)..( 6): Result.004 file - promoters60/5663595
tttaac

SEQ ID NO: 146870 - DNA, 6 bp, Unknown
  misc_feature (1)..( 6): Result.004 file - promoters60/5663595
tttaac

SEQ ID NO: 146871 - DNA, 7 bp, Unknown
  misc_feature (1)..( 7): Result.004 file - promoters60/5663595
gacataa

SEQ ID NO: 146872 - DNA, 7 bp, Unknown
  misc_feature (1)..( 7): Result.004 file - promoters60/5663595
gacgtaa

SEQ ID NO: 146873 - DNA, 8 bp, Unknown
  misc_feature (1)..( 8): Result.004 file - promoters60/5663595
ttcgaaaa

SEQ ID NO: 146874 - DNA, 8 bp, Unknown
  misc_feature (1)..( 8): Result.004 file - promoters60/5663595
ttccaaaa

SEQ ID NO: 146875 - DNA, 6 bp, Unknown
  misc_feature (1)..( 6): Result.004 file - promoters60/5663595
aaaatt

SEQ ID NO: 146876 - DNA, 6 bp, Unknown
  misc_feature (1)..( 6): Result.004 file - promoters60/5663595
aaaatt

SEQ ID NO: 146877 - DNA, 6 bp, Unknown
  misc_feature (1)..( 6): Result.004 file - promoters60/5663595
aattaa

SEQ ID NO: 146878 - DNA, 6 bp, Unknown
  misc_feature (1)..( 6): Result.004 file - promoters60/5663595
aattaa

SEQ ID NO: 146879 - DNA, 8 bp, Unknown
  misc_feature (1)..( 8): Result.004 file - promoters60/5663595
aaaaaatt

SEQ ID NO: 146880 - DNA, 8 bp, Unknown
  misc_feature (1)..( 8): Result.004 file - promoters60/5663614
aaaacatt

SEQ ID NO: 146881 - DNA, 6 bp, Unknown
  misc_feature (1)..( 6): Result.004 file - promoters60/5663614
aatttg

SEQ ID NO: 146882 - DNA, 6 bp, Unknown
  misc_feature (1)..( 6): Result.004 file - promoters60/5663614
aatttg

SEQ ID NO: 146883 - DNA, 7 bp, Unknown
  misc_feature (1)..( 7): Result.004 file - promoters60/5663614
cttgtaa

SEQ ID NO: 146884 - DNA, 7 bp, Unknown
  misc_feature (1)..( 7): Result.004 file - promoters60/5663614
cttataa

SEQ ID NO: 146885 - DNA, 6 bp, Unknown
  misc_feature (1)..( 6): Result.004 file - promoters60/5663614
aataat

SEQ ID NO: 146886 - DNA, 6 bp, Unknown
  misc_feature (1)..( 6): Result.004 file - promoters60/5663614
aataat

SEQ ID NO: 146887 - DNA, 9 bp, Unknown
  misc_feature (1)..( 9): Result.004 file - promoters60/5663614
aaaacaatt

SEQ ID NO: 146888 - DNA, 9 bp, Unknown
  misc_feature (1)..( 9): Result.004 file - promoters60/5663614
aaaacaatt

SEQ ID NO: 146889 - DNA, 6 bp, Unknown
  misc_feature (1)..( 6): Result.004 file - promoters60/5663614
agcaaa

SEQ ID NO: 146890 - DNA, 6 bp, Unknown
  misc_feature (1)..( 6): Result.004 file - promoters60/5663614
agcaaa

SEQ ID NO: 146891 - DNA, 7 bp, Unknown
  misc_feature (1)..( 7): Result.004 file - promoters60/5663614
aaccaaa

SEQ ID NO: 146892 - DNA, 7 bp, Unknown
  misc_feature (1)..( 7): Result.004 file - promoters60/5663614
aactaaa

SEQ ID NO: 146893 - DNA, 12 bp, Unknown
  misc_feature (1)..( 12): Result.004 file - promoters60/5663614
aaaacaaaccaa

SEQ ID NO: 146894 - DNA, 12 bp, Unknown
  misc_feature (1)..( 12): Result.004 file - promoters60/5663614
aaaataaatcaa

SEQ ID NO: 146895 - DNA, 12 bp, Unknown
  misc_feature (1)..( 12): Result.004 file - promoters60/5663614
cccattaatcaa

SEQ ID NO: 146896 - DNA, 6 bp, Unknown
  misc_feature (1)..( 6): Result.004 file - promoters60/5663614
ttcatt

SEQ ID NO: 146897 - DNA, 6 bp, Unknown
  misc_feature (1)..( 6): Result.004 file - promoters60/5663614
ttcatt

SEQ ID NO: 146898 - DNA, 9 bp, Unknown
  misc_feature (1)..( 9): Result.004 file - promoters60/5663614
atataattc

SEQ ID NO: 146899 - DNA, 9 bp, Unknown
  misc_feature (1)..( 9): Result.004 file - promoters60/5663614
atacaattt

SEQ ID NO: 146900 - DNA, 9 bp, Unknown
  misc_feature (1)..( 9): Result.004 file - promoters60/5663614
ttacacttt

SEQ ID NO: 146901 - DNA, 8 bp, Unknown
  misc_feature (1)..( 8): Result.004 file - promoters60/5663614
caactttt

SEQ ID NO: 146902 - DNA, 8 bp, Unknown
  misc_feature (1)..( 8): Result.004 file - promoters60/5663614
aaacttta

SEQ ID NO: 146903 - DNA, 8 bp, Unknown
  misc_feature (1)..( 8): Result.004 file - promoters60/5663614
aaaattta

SEQ ID NO: 146904 - DNA, 13 bp, Unknown
  misc_feature (1)..( 13): Result.004 file - promoters60/5663614
cttttcttagttt

SEQ ID NO: 146905 - DNA, 13 bp, Unknown
  misc_feature (1)..( 13): Result.004 file - promoters60/5663614
atcttcttatttt

SEQ ID NO: 146906 - DNA, 13 bp, Unknown
  misc_feature (1)..( 13): Result.004 file - promoters60/5663614
atcttcttccacg

SEQ ID NO: 146907 - DNA, 6 bp, Unknown
  misc_feature (1)..( 6): Result.004 file - promoters60/5663614
aaaata

SEQ ID NO: 146908 - DNA, 6 bp, Unknown
  misc_feature (1)..( 6): Result.004 file - promoters60/5663614
aaaata

SEQ ID NO: 146909 - DNA, 6 bp, Unknown
  misc_feature (1)..( 6): Result.004 file - promoters60/5663614
tggtct

SEQ ID NO: 146910 - DNA, 6 bp, Unknown
  misc_feature (1)..( 6): Result.004 file - promoters60/5663614
tggtct

SEQ ID NO: 146911 - DNA, 6 bp, Unknown
  misc_feature (1)..( 6): Result.004 file - promoters60/5663614
cccaaa

SEQ ID NO: 146912 - DNA, 6 bp, Unknown
  misc_feature (1)..( 6): Result.004 file - promoters60/5663614
cccaaa

SEQ ID NO: 146913 - DNA, 11 bp, Unknown
  misc_feature (1)..( 11): Result.004 file - promoters60/5663614
caaacggacca

SEQ ID NO: 146914 - DNA, 11 bp, Unknown
  misc_feature (1)..( 11): Result.004 file - promoters60/5663614
caaaaggacca

SEQ ID NO: 146915 - DNA, 6 bp, Unknown
  misc_feature (1)..( 6): Result.004 file - promoters60/5663614
tcagat

SEQ ID NO: 146916 - DNA, 6 bp, Unknown
  misc_feature (1)..( 6): Result.004 file - promoters60/5663614
tcagat

SEQ ID NO: 146917 - DNA, 7 bp, Unknown
  misc_feature (1)..( 7): Result.004 file - promoters60/5663614
tttgttt

SEQ ID NO: 146918 - DNA, 7 bp, Unknown
  misc_feature (1)..( 7): Result.004 file - promoters60/5663614
ttttttt

SEQ ID NO: 146919 - DNA, 6 bp, Unknown
  misc_feature (1)..( 6): Result.004 file - promoters60/5663614
ttctta

SEQ ID NO: 146920 - DNA, 6 bp, Unknown
  misc_feature (1)..( 6): Result.004 file - promoters60/5663614
ttctta

SEQ ID NO: 146921 - DNA, 7 bp, Unknown
  misc_feature (1)..( 7): Result.004 file - promoters60/5663614
aaactaa

SEQ ID NO: 146922 - DNA, 7 bp, Unknown
  misc_feature (1)..( 7): Result.004 file - promoters60/5663614
aaaataa

SEQ ID NO: 146923 - DNA, 6 bp, Unknown
  misc_feature (1)..( 6): Result.004 file - promoters60/5663614
caatat

SEQ ID NO: 146924 - DNA, 6 bp, Unknown
  misc_feature (1)..( 6): Result.004 file - promoters60/5663614
caatat

SEQ ID NO: 146925 - DNA, 8 bp, Unknown
  misc_feature (1)..( 8): Result.004 file - promoters60/5663614
tatttata

SEQ ID NO: 146926 - DNA, 8 bp, Unknown
  misc_feature (1)..( 8): Result.004 file - promoters60/5663614
tattaata

SEQ ID NO: 146927 - DNA, 8 bp, Unknown
  misc_feature (1)..( 8): Result.004 file - promoters60/5663614
ttttgccc

SEQ ID NO: 146928 - DNA, 8 bp, Unknown
  misc_feature (1)..( 8): Result.004 file - promoters60/5663614
tttggccc

SEQ ID NO: 146929 - DNA, 7 bp, Unknown
  misc_feature (1)..( 7): Result.004 file - promoters60/5663614
caaaatt

SEQ ID NO: 146930 - DNA, 7 bp, Unknown
  misc_feature (1)..( 7): Result.004 file - promoters60/5663614
caaaatt

SEQ ID NO: 146931 - DNA, 7 bp, Unknown
  misc_feature (1)..( 7): Result.004 file - promoters60/5663614
aatattt

SEQ ID NO: 146932 - DNA, 7 bp, Unknown
  misc_feature (1)..( 7): Result.004 file - promoters60/5663625
aattttt

SEQ ID NO: 146933 - DNA, 11 bp, Unknown
  misc_feature (1)..( 11): Result.004 file - promoters60/5663625
tctttgcttac

SEQ ID NO: 146934 - DNA, 11 bp, Unknown
  misc_feature (1)..( 11): Result.004 file - promoters60/5663625
gtttttctttt

SEQ ID NO: 146935 - DNA, 11 bp, Unknown
  misc_feature (1)..( 11): Result.004 file - promoters60/5663625
aagttgtttat

SEQ ID NO: 146936 - DNA, 11 bp, Unknown
  misc_feature (1)..( 11): Result.004 file - promoters60/5663625
aattttattta

SEQ ID NO: 146937 - DNA, 11 bp, Unknown
  misc_feature (1)..( 11): Result.004 file - promoters60/5663625
ctttttatttt

SEQ ID NO: 146938 - DNA, 11 bp, Unknown
  misc_feature (1)..( 11): Result.004 file - promoters60/5663625
ttgaatcttaa

SEQ ID NO: 146939 - DNA, 11 bp, Unknown
  misc_feature (1)..( 11): Result.004 file - promoters60/5663625
ttcatgtttaa

SEQ ID NO: 146940 - DNA, 11 bp, Unknown
  misc_feature (1)..( 11): Result.004 file - promoters60/5663625
attatgttttt

SEQ ID NO: 146941 - DNA, 14 bp, Unknown
  misc_feature (1)..( 14): Result.004 file - promoters60/5663625
cttacaatttcact

SEQ ID NO: 146942 - DNA, 14 bp, Unknown
  misc_feature (1)..( 14): Result.004 file - promoters60/5663625
ctttttttttcact

SEQ ID NO: 146943 - DNA, 14 bp, Unknown
  misc_feature (1)..( 14): Result.004 file - promoters60/5663625
tttttcttttcata

SEQ ID NO: 146944 - DNA, 14 bp, Unknown
  misc_feature (1)..( 14): Result.004 file - promoters60/5663625
tttttattttgttg

SEQ ID NO: 146945 - DNA, 14 bp, Unknown
  misc_feature (1)..( 14): Result.004 file - promoters60/5663625
tttacctttttacc

SEQ ID NO: 146946 - DNA, 14 bp, Unknown
  misc_feature (1)..( 14): Result.004 file - promoters60/5663625
cgattatgttttta

SEQ ID NO: 146947 - DNA, 8 bp, Unknown
  misc_feature (1)..( 8): Result.004 file - promoters60/5663625
tattttga

SEQ ID NO: 146948 - DNA, 8 bp, Unknown
  misc_feature (1)..( 8): Result.004 file - promoters60/5663625
tattttat

SEQ ID NO: 146949 - DNA, 8 bp, Unknown
  misc_feature (1)..( 8): Result.004 file - promoters60/5663625
tattatat

SEQ ID NO: 146950 - DNA, 9 bp, Unknown
  misc_feature (1)..( 9): Result.004 file - promoters60/5663625
tatatatga

SEQ ID NO: 146951 - DNA, 9 bp, Unknown
  misc_feature (1)..( 9): Result.004 file - promoters60/5663625
tatatttta

SEQ ID NO: 146952 - DNA, 9 bp, Unknown
  misc_feature (1)..( 9): Result.004 file - promoters60/5663625
ttcatatga

SEQ ID NO: 146953 - DNA, 13 bp, Unknown
  misc_feature (1)..( 13): Result.004 file - promoters60/5663625
caacaatgtacaa

SEQ ID NO: 146954 - DNA, 13 bp, Unknown
  misc_feature (1)..( 13): Result.004 file - promoters60/5663625
caataatttacat

SEQ ID NO: 146955 - DNA, 13 bp, Unknown
  misc_feature (1)..( 13): Result.004 file - promoters60/5663625
gaataataaaatg

SEQ ID NO: 146956 - DNA, 13 bp, Unknown
  misc_feature (1)..( 13): Result.004 file - promoters60/5663625
atttaatttaata

SEQ ID NO: 146957 - DNA, 13 bp, Unknown
  misc_feature (1)..( 13): Result.004 file - promoters60/5663625
acctgattttatt

SEQ ID NO: 146958 - DNA, 13 bp, Unknown
  misc_feature (1)..( 13): Result.004 file - promoters60/5663625
gtataatttaatg

SEQ ID NO: 146959 - DNA, 13 bp, Unknown
  misc_feature (1)..( 13): Result.004 file - promoters60/5663625
tgaaaatttatac

SEQ ID NO: 146960 - DNA, 14 bp, Unknown
  misc_feature (1)..( 14): Result.004 file - promoters60/5663625
gattttttatttta

SEQ ID NO: 146961 - DNA, 14 bp, Unknown
  misc_feature (1)..( 14): Result.004 file - promoters60/5663625
tattttatattagt

SEQ ID NO: 146962 - DNA, 14 bp, Unknown
  misc_feature (1)..( 14): Result.004 file - promoters60/5663625
gattttgactatgc

SEQ ID NO: 146963 - DNA, 14 bp, Unknown
  misc_feature (1)..( 14): Result.004 file - promoters60/5663625
aattttttgttgtt

SEQ ID NO: 146964 - DNA, 14 bp, Unknown
  misc_feature (1)..( 14): Result.004 file - promoters60/5663625
atgattatatgtac

SEQ ID NO: 146965 - DNA, 14 bp, Unknown
  misc_feature (1)..( 14): Result.004 file - promoters60/5663625
cacttcatatgagt

SEQ ID NO: 146966 - DNA, 13 bp, Unknown
  misc_feature (1)..( 13): Result.004 file - promoters60/5663625
atttataaaaatt

SEQ ID NO: 146967 - DNA, 13 bp, Unknown
  misc_feature (1)..( 13): Result.004 file - promoters60/5663625
ttttttaattgat

SEQ ID NO: 146968 - DNA, 13 bp, Unknown
  misc_feature (1)..( 13): Result.004 file - promoters60/5663625
attaatacaattg

SEQ ID NO: 146969 - DNA, 13 bp, Unknown
  misc_feature (1)..( 13): Result.004 file - promoters60/5663625
tatttgaatttag

SEQ ID NO: 146970 - DNA, 13 bp, Unknown
  misc_feature (1)..( 13): Result.004 file - promoters60/5663625
atttataacaaat

SEQ ID NO: 146971 - DNA, 13 bp, Unknown
  misc_feature (1)..( 13): Result.004 file - promoters60/5663698
aataatagaattg

SEQ ID NO: 146972 - DNA, 7 bp, Unknown
  misc_feature (1)..( 7): Result.004 file - promoters60/5663698
tgcttaa

SEQ ID NO: 146973 - DNA, 7 bp, Unknown
  misc_feature (1)..( 7): Result.004 file - promoters60/5663698
tgcataa

SEQ ID NO: 146974 - DNA, 9 bp, Unknown
  misc_feature (1)..( 9): Result.004 file - promoters60/5663698
tcaaaaact

SEQ ID NO: 146975 - DNA, 9 bp, Unknown
  misc_feature (1)..( 9): Result.004 file - promoters60/5663698
tcataaact

SEQ ID NO: 146976 - DNA, 7 bp, Unknown
  misc_feature (1)..( 7): Result.004 file - promoters60/5663698
aacaaag

SEQ ID NO: 146977 - DNA, 7 bp, Unknown
  misc_feature (1)..( 7): Result.004 file - promoters60/5663698
aacaaat

SEQ ID NO: 146978 - DNA, 7 bp, Unknown
  misc_feature (1)..( 7): Result.004 file - promoters60/5663698
tacaaat

SEQ ID NO: 146979 - DNA, 6 bp, Unknown
  misc_feature (1)..( 6): Result.004 file - promoters60/5663698
ttttaa

SEQ ID NO: 146980 - DNA, 6 bp, Unknown
  misc_feature (1)..( 6): Result.004 file - promoters60/5663698
ttttaa

SEQ ID NO: 146981 - DNA, 6 bp, Unknown
  misc_feature (1)..( 6): Result.004 file - promoters60/5663698
ccaatt

SEQ ID NO: 146982 - DNA, 6 bp, Unknown
  misc_feature (1)..( 6): Result.004 file - promoters60/5663698
ccaatt

SEQ ID NO: 146983 - DNA, 9 bp, Unknown
  misc_feature (1)..( 9): Result.004 file - promoters60/5663698
tataatgaa

SEQ ID NO: 146984 - DNA, 9 bp, Unknown
  misc_feature (1)..( 9): Result.004 file - promoters60/5663698
tataatgaa

SEQ ID NO: 146985 - DNA, 8 bp, Unknown
  misc_feature (1)..( 8): Result.004 file - promoters60/5663698
agtgatca

SEQ ID NO: 146986 - DNA, 8 bp, Unknown
  misc_feature (1)..( 8): Result.004 file - promoters60/5663698
tgtgatca

SEQ ID NO: 146987 - DNA, 8 bp, Unknown
  misc_feature (1)..( 8): Result.004 file - promoters60/5663698
agtgattt

SEQ ID NO: 146988 - DNA, 10 bp, Unknown
  misc_feature (1)..( 10): Result.004 file - promoters60/5663698
cttacaattt

SEQ ID NO: 146989 - DNA, 10 bp, Unknown
  misc_feature (1)..( 10): Result.004 file - promoters60/5663698
cttgcaattt

SEQ ID NO: 146990 - DNA, 6 bp, Unknown
  misc_feature (1)..( 6): Result.004 file - promoters60/5663698
tttgta

SEQ ID NO: 146991 - DNA, 6 bp, Unknown
  misc_feature (1)..( 6): Result.004 file - promoters60/5663698
tttgta

SEQ ID NO: 146992 - DNA, 6 bp, Unknown
  misc_feature (1)..( 6): Result.004 file - promoters60/5663698
aatata

SEQ ID NO: 146993 - DNA, 6 bp, Unknown
  misc_feature (1)..( 6): Result.004 file - promoters60/5663698
aatata

SEQ ID NO: 146994 - DNA, 6 bp, Unknown
  misc_feature (1)..( 6): Result.004 file - promoters60/5663698
aatggt

SEQ ID NO: 146995 - DNA, 6 bp, Unknown
  misc_feature (1)..( 6): Result.004 file - promoters60/5663698
aatggt

SEQ ID NO: 146996 - DNA, 8 bp, Unknown
  misc_feature (1)..( 8): Result.004 file - promoters60/5663698
tcagattt

SEQ ID NO: 146997 - DNA, 8 bp, Unknown
  misc_feature (1)..( 8): Result.004 file - promoters60/5663698
tcaaattt

SEQ ID NO: 146998 - DNA, 7 bp, Unknown
  misc_feature (1)..( 7): Result.004 file - promoters60/5663698
aagaaca

SEQ ID NO: 146999 - DNA, 7 bp, Unknown
  misc_feature (1)..( 7): Result.004 file - promoters60/5663698
aagaaca

SEQ ID NO: 147000 - DNA, 7 bp, Unknown
  misc_feature (1)..( 7): Result.004 file - promoters60/5663698
gttagtg

SEQ ID NO: 147001 - DNA, 7 bp, Unknown
  misc_feature (1)..( 7): Result.004 file - promoters60/5663698
gttggtg

SEQ ID NO: 147002 - DNA, 6 bp, Unknown
  misc_feature (1)..( 6): Result.004 file - promoters60/5663698
ttttgc

SEQ ID NO: 147003 - DNA, 6 bp, Unknown
  misc_feature (1)..( 6): Result.004 file - promoters60/5663698
ttttgc

SEQ ID NO: 147004 - DNA, 9 bp, Unknown
  misc_feature (1)..( 9): Result.004 file - promoters60/5663698
tgagaattt

SEQ ID NO: 147005 - DNA, 9 bp, Unknown
  misc_feature (1)..( 9): Result.004 file - promoters60/5663698
tgagaattt

SEQ ID NO: 147006 - DNA, 9 bp, Unknown
  misc_feature (1)..( 9): Result.004 file - promoters60/5663698
gatgttgta

SEQ ID NO: 147007 - DNA, 9 bp, Unknown
  misc_feature (1)..( 9): Result.004 file - promoters60/5663698
gattttgta

SEQ ID NO: 147008 - DNA, 8 bp, Unknown
  misc_feature (1)..( 8): Result.004 file - promoters60/5663698
tctgtctg

SEQ ID NO: 147009 - DNA, 8 bp, Unknown
  misc_feature (1)..( 8): Result.004 file - promoters60/5663706
tctatctg

SEQ ID NO: 147010 - DNA, 10 bp, Unknown
  misc_feature (1)..( 10): Result.004 file - promoters60/5663706
aaaattctaa

SEQ ID NO: 147011 - DNA, 10 bp, Unknown
  misc_feature (1)..( 10): Result.004 file - promoters60/5663706
aaaattttaa

SEQ ID NO: 147012 - DNA, 11 bp, Unknown
  misc_feature (1)..( 11): Result.004 file - promoters60/5663706
aaacattgtat

SEQ ID NO: 147013 - DNA, 7 bp, Unknown
  misc_feature (1)..( 7): Result.004 file - promoters60/5663706
aatattt

SEQ ID NO: 147014 - DNA, 7 bp, Unknown
  misc_feature (1)..( 7): Result.004 file - promoters60/5663706
aatattc

SEQ ID NO: 147015 - DNA, 8 bp, Unknown
  misc_feature (1)..( 8): Result.004 file - promoters60/5663706
aataattc

SEQ ID NO: 147016 - DNA, 8 bp, Unknown
  misc_feature (1)..( 8): Result.004 file - promoters60/5663706
aaatatcc

SEQ ID NO: 147017 - DNA, 8 bp, Unknown
  misc_feature (1)..( 8): Result.004 file - promoters60/5663706
gtaggtag

SEQ ID NO: 147018 - DNA, 8 bp, Unknown
  misc_feature (1)..( 8): Result.004 file - promoters60/5663706
gtaggtgg

SEQ ID NO: 147019 - DNA, 8 bp, Unknown
  misc_feature (1)..( 8): Result.004 file - promoters60/5663706
atagttag

SEQ ID NO: 147020 - DNA, 13 bp, Unknown
  misc_feature (1)..( 13): Result.004 file - promoters60/5663706
gttttattttata

SEQ ID NO: 147021 - DNA, 13 bp, Unknown
  misc_feature (1)..( 13): Result.004 file - promoters60/5663706
gttatataggctc

SEQ ID NO: 147022 - DNA, 13 bp, Unknown
  misc_feature (1)..( 13): Result.004 file - promoters60/5663706
actttatttaata

SEQ ID NO: 147023 - DNA, 7 bp, Unknown
  misc_feature (1)..( 7): Result.004 file - promoters60/5663706
gtaaaaa

SEQ ID NO: 147024 - DNA, 7 bp, Unknown
  misc_feature (1)..( 7): Result.004 file - promoters60/5663706
gtataaa

SEQ ID NO: 147025 - DNA, 7 bp, Unknown
  misc_feature (1)..( 7): Result.004 file - promoters60/5663706
gtagaaa

SEQ ID NO: 147026 - DNA, 10 bp, Unknown
  misc_feature (1)..( 10): Result.004 file - promoters60/5663706
aaatattctt

SEQ ID NO: 147027 - DNA, 10 bp, Unknown
  misc_feature (1)..( 10): Result.004 file - promoters60/5663706
ttatattctt

SEQ ID NO: 147028 - DNA, 10 bp, Unknown
  misc_feature (1)..( 10): Result.004 file - promoters60/5663706
ttaaattacg

SEQ ID NO: 147029 - DNA, 7 bp, Unknown
  misc_feature (1)..( 7): Result.004 file - promoters60/5663706
caattaa

SEQ ID NO: 147030 - DNA, 7 bp, Unknown
  misc_feature (1)..( 7): Result.004 file - promoters60/5663706
aaattaa

SEQ ID NO: 147031 - DNA, 7 bp, Unknown
  misc_feature (1)..( 7): Result.004 file - promoters60/5663706
aaattac

SEQ ID NO: 147032 - DNA, 11 bp, Unknown
  misc_feature (1)..( 11): Result.004 file - promoters60/5663706
ttgaatatttc

SEQ ID NO: 147033 - DNA, 11 bp, Unknown
  misc_feature (1)..( 11): Result.004 file - promoters60/5663706
gtgaatagtga

SEQ ID NO: 147034 - DNA, 11 bp, Unknown
  misc_feature (1)..( 11): Result.004 file - promoters60/5663706
ttgaatgtttc

SEQ ID NO: 147035 - DNA, 7 bp, Unknown
  misc_feature (1)..( 7): Result.004 file - promoters60/5663706
acactta

SEQ ID NO: 147036 - DNA, 7 bp, Unknown
  misc_feature (1)..( 7): Result.004 file - promoters60/5663706
acacttt

SEQ ID NO: 147037 - DNA, 7 bp, Unknown
  misc_feature (1)..( 7): Result.004 file - promoters60/5663706
acattta

SEQ ID NO: 147038 - DNA, 10 bp, Unknown
  misc_feature (1)..( 10): Result.004 file - promoters60/5663706
taattaattt

SEQ ID NO: 147039 - DNA, 10 bp, Unknown
  misc_feature (1)..( 10): Result.004 file - promoters60/5663706
taattagttt

SEQ ID NO: 147040 - DNA, 10 bp, Unknown
  misc_feature (1)..( 10): Result.004 file - promoters60/5663710
ttatttattc

SEQ ID NO: 147041 - DNA, 8 bp, Unknown
  misc_feature (1)..( 8): Result.004 file - promoters60/5663710
catgaaga

SEQ ID NO: 147042 - DNA, 8 bp, Unknown
  misc_feature (1)..( 8): Result.004 file - promoters60/5663710
catgaata

SEQ ID NO: 147043 - DNA, 8 bp, Unknown
  misc_feature (1)..( 8): Result.004 file - promoters60/5663710
catggata

SEQ ID NO: 147044 - DNA, 8 bp, Unknown
  misc_feature (1)..( 8): Result.004 file - promoters60/5663710
tatgaatc

SEQ ID NO: 147045 - DNA, 8 bp, Unknown
  misc_feature (1)..( 8): Result.004 file - promoters60/5663710
tatggatt

SEQ ID NO: 147046 - DNA, 10 bp, Unknown
  misc_feature (1)..( 10): Result.004 file - promoters60/5663710
tgttaaactt

SEQ ID NO: 147047 - DNA, 10 bp, Unknown
  misc_feature (1)..( 10): Result.004 file - promoters60/5663710
gcataatctt

SEQ ID NO: 147048 - DNA, 10 bp, Unknown
  misc_feature (1)..( 10): Result.004 file - promoters60/5663710
tggtaaactt

SEQ ID NO: 147049 - DNA, 10 bp, Unknown
  misc_feature (1)..( 10): Result.004 file - promoters60/5663710
agataatctc

SEQ ID NO: 147050 - DNA, 10 bp, Unknown
  misc_feature (1)..( 10): Result.004 file - promoters60/5663710
agatcatctt

SEQ ID NO: 147051 - DNA, 11 bp, Unknown
  misc_feature (1)..( 11): Result.004 file - promoters60/5663710
gtaatattgtg

SEQ ID NO: 147052 - DNA, 11 bp, Unknown
  misc_feature (1)..( 11): Result.004 file - promoters60/5663710
ataaaattgaa

SEQ ID NO: 147053 - DNA, 11 bp, Unknown
  misc_feature (1)..( 11): Result.004 file - promoters60/5663710
ttaaacttgag

SEQ ID NO: 147054 - DNA, 11 bp, Unknown
  misc_feature (1)..( 11): Result.004 file - promoters60/5663710
ataaaagtcta

SEQ ID NO: 147055 - DNA, 11 bp, Unknown
  misc_feature (1)..( 11): Result.004 file - promoters60/5663744
agaaaacaaaa

SEQ ID NO: 147056 - DNA, 9 bp, Unknown
  misc_feature (1)..( 9): Result.004 file - promoters60/5663744
gtttttctt

SEQ ID NO: 147057 - DNA, 9 bp, Unknown
  misc_feature (1)..( 9): Result.004 file - promoters60/5663744
gttttactt

SEQ ID NO: 147058 - DNA, 8 bp, Unknown
  misc_feature (1)..( 8): Result.004 file - promoters60/5663744
ctagtgat

SEQ ID NO: 147059 - DNA, 8 bp, Unknown
  misc_feature (1)..( 8): Result.004 file - promoters60/5663744
ctattgat

SEQ ID NO: 147060 - DNA, 8 bp, Unknown
  misc_feature (1)..( 8): Result.004 file - promoters60/5663744
aaagatgg

SEQ ID NO: 147061 - DNA, 8 bp, Unknown
  misc_feature (1)..( 8): Result.004 file - promoters60/5663744
aaacatgg

SEQ ID NO: 147062 - DNA, 9 bp, Unknown
  misc_feature (1)..( 9): Result.004 file - promoters60/5663744
gtatagatt

SEQ ID NO: 147063 - DNA, 9 bp, Unknown
  misc_feature (1)..( 9): Result.004 file - promoters60/5663744
gtatcgatt

SEQ ID NO: 147064 - DNA, 8 bp, Unknown
  misc_feature (1)..( 8): Result.004 file - promoters60/5663744
gatatgtg

SEQ ID NO: 147065 - DNA, 8 bp, Unknown
  misc_feature (1)..( 8): Result.004 file - promoters60/5663744
gatacgtg

SEQ ID NO: 147066 - DNA, 10 bp, Unknown
  misc_feature (1)..( 10): Result.004 file - promoters60/5663744
gaactagaag

SEQ ID NO: 147067 - DNA, 10 bp, Unknown
  misc_feature (1)..( 10): Result.004 file - promoters60/5663744
gaactagata

SEQ ID NO: 147068 - DNA, 10 bp, Unknown
  misc_feature (1)..( 10): Result.004 file - promoters60/5663744
gttctacata

SEQ ID NO: 147069 - DNA, 6 bp, Unknown
  misc_feature (1)..( 6): Result.004 file - promoters60/5663744
ttgatt

SEQ ID NO: 147070 - DNA, 6 bp, Unknown
  misc_feature (1)..( 6): Result.004 file - promoters60/5663744
ttgatt

SEQ ID NO: 147071 - DNA, 9 bp, Unknown
  misc_feature (1)..( 9): Result.004 file - promoters60/5663744
taacatttg

SEQ ID NO: 147072 - DNA, 9 bp, Unknown
  misc_feature (1)..( 9): Result.004 file - promoters60/5663744
taacttttt

SEQ ID NO: 147073 - DNA, 9 bp, Unknown
  misc_feature (1)..( 9): Result.004 file - promoters60/5663744
aggcttttt

SEQ ID NO: 147074 - DNA, 7 bp, Unknown
  misc_feature (1)..( 7): Result.004 file - promoters60/5663744
ataaaga

SEQ ID NO: 147075 - DNA, 7 bp, Unknown
  misc_feature (1)..( 7): Result.004 file - promoters60/5663744
ataaaga

SEQ ID NO: 147076 - DNA, 7 bp, Unknown
  misc_feature (1)..( 7): Result.004 file - promoters60/5663744
tcccgaa

SEQ ID NO: 147077 - DNA, 7 bp, Unknown
  misc_feature (1)..( 7): Result.004 file - promoters60/5663744
tccagaa

SEQ ID NO: 147078 - DNA, 8 bp, Unknown
  misc_feature (1)..( 8): Result.004 file - promoters60/5663744
aatcaaag

SEQ ID NO: 147079 - DNA, 8 bp, Unknown
  misc_feature (1)..( 8): Result.004 file - promoters60/5663744
aatgaaag

SEQ ID NO: 147080 - DNA, 7 bp, Unknown
  misc_feature (1)..( 7): Result.004 file - promoters60/5663744
aaacaca

SEQ ID NO: 147081 - DNA, 7 bp, Unknown
  misc_feature (1)..( 7): Result.004 file - promoters60/5663744
aaacaca

SEQ ID NO: 147082 - DNA, 7 bp, Unknown
  misc_feature (1)..( 7): Result.004 file - promoters60/5663744
aaagatc

SEQ ID NO: 147083 - DNA, 7 bp, Unknown
  misc_feature (1)..( 7): Result.004 file - promoters60/5663744
aaatatc

SEQ ID NO: 147084 - DNA, 7 bp, Unknown
  misc_feature (1)..( 7): Result.004 file - promoters60/5663744
aaacaaa

SEQ ID NO: 147085 - DNA, 7 bp, Unknown
  misc_feature (1)..( 7): Result.004 file - promoters60/5663748
aaagaaa

SEQ ID NO: 147086 - DNA, 7 bp, Unknown
  misc_feature (1)..( 7): Result.004 file - promoters60/5663748
tttttaa

SEQ ID NO: 147087 - DNA, 7 bp, Unknown
  misc_feature (1)..( 7): Result.004 file - promoters60/5663748
tttttat

SEQ ID NO: 147088 - DNA, 7 bp, Unknown
  misc_feature (1)..( 7): Result.004 file - promoters60/5663748
cttttat

SEQ ID NO: 147089 - DNA, 6 bp, Unknown
  misc_feature (1)..( 6): Result.004 file - promoters60/5663748
agaaat

SEQ ID NO: 147090 - DNA, 6 bp, Unknown
  misc_feature (1)..( 6): Result.004 file - promoters60/5663748
agaaat

SEQ ID NO: 147091 - DNA, 6 bp, Unknown
  misc_feature (1)..( 6): Result.004 file - promoters60/5663748
agaaat

SEQ ID NO: 147092 - DNA, 7 bp, Unknown
  misc_feature (1)..( 7): Result.004 file - promoters60/5663748
tttatct

SEQ ID NO: 147093 - DNA, 7 bp, Unknown
  misc_feature (1)..( 7): Result.004 file - promoters60/5663748
tttatca

SEQ ID NO: 147094 - DNA, 7 bp, Unknown
  misc_feature (1)..( 7): Result.004 file - promoters60/5663748
gttatct

SEQ ID NO: 147095 - DNA, 8 bp, Unknown
  misc_feature (1)..( 8): Result.004 file - promoters60/5663748
cttttctt

SEQ ID NO: 147096 - DNA, 8 bp, Unknown
  misc_feature (1)..( 8): Result.004 file - promoters60/5663748
ctttactt

SEQ ID NO: 147097 - DNA, 8 bp, Unknown
  misc_feature (1)..( 8): Result.004 file - promoters60/5663748
gtttactc

SEQ ID NO: 147098 - DNA, 8 bp, Unknown
  misc_feature (1)..( 8): Result.004 file - promoters60/5663748
aaatatat

SEQ ID NO: 147099 - DNA, 8 bp, Unknown
  misc_feature (1)..( 8): Result.004 file - promoters60/5663748
aaaaataa

SEQ ID NO: 147100 - DNA, 8 bp, Unknown
  misc_feature (1)..( 8): Result.004 file - promoters60/5663748
aaaaaaaa

SEQ ID NO: 147101 - DNA, 11 bp, Unknown
  misc_feature (1)..( 11): Result.004 file - promoters60/5663748
tctgaaacaga

SEQ ID NO: 147102 - DNA, 11 bp, Unknown
  misc_feature (1)..( 11): Result.004 file - promoters60/5663748
aaacaaaaaga

SEQ ID NO: 147103 - DNA, 11 bp, Unknown
  misc_feature (1)..( 11): Result.004 file - promoters60/5663748
aaccaaaatta

SEQ ID NO: 147104 - DNA, 10 bp, Unknown
  misc_feature (1)..( 10): Result.004 file - promoters60/5663748
agagaaaatg

SEQ ID NO: 147105 - DNA, 10 bp, Unknown
  misc_feature (1)..( 10): Result.004 file - promoters60/5663748
agagaaacat

SEQ ID NO: 147106 - DNA, 10 bp, Unknown
  misc_feature (1)..( 10): Result.004 file - promoters60/5663748
caagaaaatt

SEQ ID NO: 147107 - DNA, 10 bp, Unknown
  misc_feature (1)..( 10): Result.004 file - promoters60/5663748
aaaaaaataa

SEQ ID NO: 147108 - DNA, 7 bp, Unknown
  misc_feature (1)..( 7): Result.004 file - promoters60/5663748
aaatttt

SEQ ID NO: 147109 - DNA, 7 bp, Unknown
  misc_feature (1)..( 7): Result.004 file - promoters60/5663748
aaattta

SEQ ID NO: 147110 - DNA, 7 bp, Unknown
  misc_feature (1)..( 7): Result.004 file - promoters60/5663758
gaatttt

SEQ ID NO: 147111 - DNA, 8 bp, Unknown
  misc_feature (1)..( 8): Result.004 file - promoters60/5663758
catatttg

SEQ ID NO: 147112 - DNA, 8 bp, Unknown
  misc_feature (1)..( 8): Result.004 file - promoters60/5663758
catttttt

SEQ ID NO: 147113 - DNA, 8 bp, Unknown
  misc_feature (1)..( 8): Result.004 file - promoters60/5663758
cattttcg

SEQ ID NO: 147114 - DNA, 9 bp, Unknown
  misc_feature (1)..( 9): Result.004 file - promoters60/5663758
aatttattt

SEQ ID NO: 147115 - DNA, 10 bp, Unknown
  misc_feature (1)..( 10): Result.004 file - promoters60/5663758
gtaaaatttt

SEQ ID NO: 147116 - DNA, 10 bp, Unknown
  misc_feature (1)..( 10): Result.004 file - promoters60/5663758
aaaaaattag

SEQ ID NO: 147117 - DNA, 10 bp, Unknown
  misc_feature (1)..( 10): Result.004 file - promoters60/5663758
ctaaaatctt

SEQ ID NO: 147118 - DNA, 10 bp, Unknown
  misc_feature (1)..( 10): Result.004 file - promoters60/5663758
ctaaaataat

SEQ ID NO: 147119 - DNA, 10 bp, Unknown
  misc_feature (1)..( 10): Result.004 file - promoters60/5663758
gtaaaagaat

SEQ ID NO: 147120 - DNA, 10 bp, Unknown
  misc_feature (1)..( 10): Result.004 file - promoters60/5663758
ctacaatttt

SEQ ID NO: 147121 - DNA, 13 bp, Unknown
  misc_feature (1)..( 13): Result.004 file - promoters60/5663758
tttttttttgttc

SEQ ID NO: 147122 - DNA, 13 bp, Unknown
  misc_feature (1)..( 13): Result.004 file - promoters60/5663758
gtattttgtgttc

SEQ ID NO: 147123 - DNA, 13 bp, Unknown
  misc_feature (1)..( 13): Result.004 file - promoters60/5663758
ttttttttttttc

SEQ ID NO: 147124 - DNA, 13 bp, Unknown
  misc_feature (1)..( 13): Result.004 file - promoters60/5663758
atcaaatttgtta

SEQ ID NO: 147125 - DNA, 9 bp, Unknown
  misc_feature (1)..( 9): Result.004 file - promoters60/5663758
tcaaaatta

SEQ ID NO: 147126 - DNA, 9 bp, Unknown
  misc_feature (1)..( 9): Result.004 file - promoters60/5663758
tcaaaatta

SEQ ID NO: 147127 - DNA, 9 bp, Unknown
  misc_feature (1)..( 9): Result.004 file - promoters60/5663758
acaatattt

SEQ ID NO: 147128 - DNA, 9 bp, Unknown
  misc_feature (1)..( 9): Result.004 file - promoters60/5663758
tcaatatgt

SEQ ID NO: 147129 - DNA, 8 bp, Unknown
  misc_feature (1)..( 8): Result.004 file - promoters60/5663758
ttgtgtaa

SEQ ID NO: 147130 - DNA, 8 bp, Unknown
  misc_feature (1)..( 8): Result.004 file - promoters60/5663758
ttgtgttt

SEQ ID NO: 147131 - DNA, 8 bp, Unknown
  misc_feature (1)..( 8): Result.004 file - promoters60/5663758
ttgtattt

SEQ ID NO: 147132 - DNA, 8 bp, Unknown
  misc_feature (1)..( 8): Result.004 file - promoters60/5663758
ttgggttt

SEQ ID NO: 147133 - DNA, 10 bp, Unknown
  misc_feature (1)..( 10): Result.004 file - promoters60/5663758
gtaaaatttt

SEQ ID NO: 147134 - DNA, 10 bp, Unknown
  misc_feature (1)..( 10): Result.004 file - promoters60/5663758
gtaaaagaat

SEQ ID NO: 147135 - DNA, 10 bp, Unknown
  misc_feature (1)..( 10): Result.004 file - promoters60/5663758
ctaaaatctt

SEQ ID NO: 147136 - DNA, 10 bp, Unknown
  misc_feature (1)..( 10): Result.004 file - promoters60/5663758
ctaaaataat

SEQ ID NO: 147137 - DNA, 10 bp, Unknown
  misc_feature (1)..( 10): Result.004 file - promoters60/5663758
ttaaaaaaat

SEQ ID NO: 147138 - DNA, 10 bp, Unknown
  misc_feature (1)..( 10): Result.004 file - promoters60/5663758
ctacaatttt

SEQ ID NO: 147139 - DNA, 9 bp, Unknown
  misc_feature (1)..( 9): Result.004 file - promoters60/5663758
atctaaaat

SEQ ID NO: 147140 - DNA, 9 bp, Unknown
  misc_feature (1)..( 9): Result.004 file - promoters60/5663758
atctaacaa

SEQ ID NO: 147141 - DNA, 9 bp, Unknown
  misc_feature (1)..( 9): Result.004 file - promoters60/5663758
ttctaaaat

SEQ ID NO: 147142 - DNA, 9 bp, Unknown
  misc_feature (1)..( 9): Result.004 file - promoters60/5663785
gcctacaat

SEQ ID NO: 147143 - DNA, 8 bp, Unknown
  misc_feature (1)..( 8): Result.004 file - promoters60/5663785
caaataaa

SEQ ID NO: 147144 - DNA, 8 bp, Unknown
  misc_feature (1)..( 8): Result.004 file - promoters60/5663785
aaaataaa

SEQ ID NO: 147145 - DNA, 8 bp, Unknown
  misc_feature (1)..( 8): Result.004 file - promoters60/5663785
taaaaaaa

SEQ ID NO: 147146 - DNA, 8 bp, Unknown
  misc_feature (1)..( 8): Result.004 file - promoters60/5663785
aaaataaa

SEQ ID NO: 147147 - DNA, 8 bp, Unknown
  misc_feature (1)..( 8): Result.004 file - promoters60/5663785
aaaataat

SEQ ID NO: 147148 - DNA, 10 bp, Unknown
  misc_feature (1)..( 10): Result.004 file - promoters60/5663785
taaaattttt

SEQ ID NO: 147149 - DNA, 10 bp, Unknown
  misc_feature (1)..( 10): Result.004 file - promoters60/5663785
taaaataact

SEQ ID NO: 147150 - DNA, 10 bp, Unknown
  misc_feature (1)..( 10): Result.004 file - promoters60/5663785
gaaactttat

SEQ ID NO: 147151 - DNA, 10 bp, Unknown
  misc_feature (1)..( 10): Result.004 file - promoters60/5663785
aaaaagaaaa

SEQ ID NO: 147152 - DNA, 10 bp, Unknown
  misc_feature (1)..( 10): Result.004 file - promoters60/5663785
aaaaataata

SEQ ID NO: 147153 - DNA, 9 bp, Unknown
  misc_feature (1)..( 9): Result.004 file - promoters60/5663785
ttgttattt

SEQ ID NO: 147154 - DNA, 9 bp, Unknown
  misc_feature (1)..( 9): Result.004 file - promoters60/5663785
ctgtttttt

SEQ ID NO: 147155 - DNA, 9 bp, Unknown
  misc_feature (1)..( 9): Result.004 file - promoters60/5663785
ctgttatgt

SEQ ID NO: 147156 - DNA, 9 bp, Unknown
  misc_feature (1)..( 9): Result.004 file - promoters60/5663785
ttgctatac

SEQ ID NO: 147157 - DNA, 9 bp, Unknown
  misc_feature (1)..( 9): Result.004 file - promoters60/5663785
aaaattaaa

SEQ ID NO: 147158 - DNA, 9 bp, Unknown
  misc_feature (1)..( 9): Result.004 file - promoters60/5663785
aaacttaat

SEQ ID NO: 147159 - DNA, 9 bp, Unknown
  misc_feature (1)..( 9): Result.004 file - promoters60/5663785
gtatttaat

SEQ ID NO: 147160 - DNA, 9 bp, Unknown
  misc_feature (1)..( 9): Result.004 file - promoters60/5663785
tagattaaa

SEQ ID NO: 147161 - DNA, 10 bp, Unknown
  misc_feature (1)..( 10): Result.004 file - promoters60/5663785
tatatagaac

SEQ ID NO: 147162 - DNA, 10 bp, Unknown
  misc_feature (1)..( 10): Result.004 file - promoters60/5663785
aaaatagaaa

SEQ ID NO: 147163 - DNA, 10 bp, Unknown
  misc_feature (1)..( 10): Result.004 file - promoters60/5663785
ttaatggaaa

SEQ ID NO: 147164 - DNA, 10 bp, Unknown
  misc_feature (1)..( 10): Result.004 file - promoters60/5663785
ttattggatt

SEQ ID NO: 147165 - DNA, 9 bp, Unknown
  misc_feature (1)..( 9): Result.004 file - promoters60/5663785
aaaagacaa

SEQ ID NO: 147166 - DNA, 9 bp, Unknown
  misc_feature (1)..( 9): Result.004 file - promoters60/5663785
aaaagaaaa

SEQ ID NO: 147167 - DNA, 9 bp, Unknown
  misc_feature (1)..( 9): Result.004 file - promoters60/5663785
aaaataaaa

SEQ ID NO: 147168 - DNA, 9 bp, Unknown
  misc_feature (1)..( 9): Result.004 file - promoters60/5663785
aaaataata

SEQ ID NO: 147169 - DNA, 9 bp, Unknown
  misc_feature (1)..( 9): Result.004 file - promoters60/5663785
aaactaaac

SEQ ID NO: 147170 - DNA, 11 bp, Unknown
  misc_feature (1)..( 11): Result.004 file - promoters60/5663785
tttaaccaaaa

SEQ ID NO: 147171 - DNA, 11 bp, Unknown
  misc_feature (1)..( 11): Result.004 file - promoters60/5663785
tttcaccaagg

SEQ ID NO: 147172 - DNA, 11 bp, Unknown
  misc_feature (1)..( 11): Result.004 file - promoters60/5663785
tataaccaaaa

SEQ ID NO: 147173 - DNA, 11 bp, Unknown
  misc_feature (1)..( 11): Result.004 file - promoters60/5663805
ataaactaaac

SEQ ID NO: 147174 - DNA, 8 bp, Unknown
  misc_feature (1)..( 8): Result.004 file - promoters60/5663805
tttgtata

SEQ ID NO: 147175 - DNA, 8 bp, Unknown
  misc_feature (1)..( 8): Result.004 file - promoters60/5663805
ggtgtata

SEQ ID NO: 147176 - DNA, 8 bp, Unknown
  misc_feature (1)..( 8): Result.004 file - promoters60/5663805
tttctatc

SEQ ID NO: 147177 - DNA, 8 bp, Unknown
  misc_feature (1)..( 8): Result.004 file - promoters60/5663805
tttttatc

SEQ ID NO: 147178 - DNA, 8 bp, Unknown
  misc_feature (1)..( 8): Result.004 file - promoters60/5663805
tttttaat

SEQ ID NO: 147179 - DNA, 13 bp, Unknown
  misc_feature (1)..( 13): Result.004 file - promoters60/5663805
ttacaataaatat

SEQ ID NO: 147180 - DNA, 13 bp, Unknown
  misc_feature (1)..( 13): Result.004 file - promoters60/5663805
acataataaatat

SEQ ID NO: 147181 - DNA, 13 bp, Unknown
  misc_feature (1)..( 13): Result.004 file - promoters60/5663805
ttataataaaact

SEQ ID NO: 147182 - DNA, 13 bp, Unknown
  misc_feature (1)..( 13): Result.004 file - promoters60/5663805
acaaaataaaata

SEQ ID NO: 147183 - DNA, 13 bp, Unknown
  misc_feature (1)..( 13): Result.004 file - promoters60/5663805
taacaataaagaa

SEQ ID NO: 147184 - DNA, 14 bp, Unknown
  misc_feature (1)..( 14): Result.004 file - promoters60/5663805
tctcataagtttga

SEQ ID NO: 147185 - DNA, 14 bp, Unknown
  misc_feature (1)..( 14): Result.004 file - promoters60/5663805
actcataataaata

SEQ ID NO: 147186 - DNA, 14 bp, Unknown
  misc_feature (1)..( 14): Result.004 file - promoters60/5663805
acttataatgaatt

SEQ ID NO: 147187 - DNA, 14 bp, Unknown
  misc_feature (1)..( 14): Result.004 file - promoters60/5663805
tcatataatagtaa

SEQ ID NO: 147188 - DNA, 14 bp, Unknown
  misc_feature (1)..( 14): Result.004 file - promoters60/5663805
atttataatataat

SEQ ID NO: 147189 - DNA, 14 bp, Unknown
  misc_feature (1)..( 14): Result.004 file - promoters60/5663805
taaaataaggaatt

SEQ ID NO: 147190 - DNA, 10 bp, Unknown
  misc_feature (1)..( 10): Result.004 file - promoters60/5663805
tgtttttgtg

SEQ ID NO: 147191 - DNA, 10 bp, Unknown
  misc_feature (1)..( 10): Result.004 file - promoters60/5663805
gatttttgta

SEQ ID NO: 147192 - DNA, 10 bp, Unknown
  misc_feature (1)..( 10): Result.004 file - promoters60/5663805
ggtttttata

SEQ ID NO: 147193 - DNA, 10 bp, Unknown
  misc_feature (1)..( 10): Result.004 file - promoters60/5663805
tgtttttgtg

SEQ ID NO: 147194 - DNA, 10 bp, Unknown
  misc_feature (1)..( 10): Result.004 file - promoters60/5663805
gattttttct

SEQ ID NO: 147195 - DNA, 14 bp, Unknown
  misc_feature (1)..( 14): Result.004 file - promoters60/5663805
ccccaaaagaaaaa

SEQ ID NO: 147196 - DNA, 14 bp, Unknown
  misc_feature (1)..( 14): Result.004 file - promoters60/5663805
ataaaaaataaata

SEQ ID NO: 147197 - DNA, 14 bp, Unknown
  misc_feature (1)..( 14): Result.004 file - promoters60/5663805
aatcagaataaaaa

SEQ ID NO: 147198 - DNA, 14 bp, Unknown
  misc_feature (1)..( 14): Result.004 file - promoters60/5663805
atatataataaata

SEQ ID NO: 147199 - DNA, 14 bp, Unknown
  misc_feature (1)..( 14): Result.004 file - promoters60/5663805
aattattatacttc

SEQ ID NO: 147200 - DNA, 14 bp, Unknown
  misc_feature (1)..( 14): Result.004 file - promoters60/5663805
tcatataattatct

SEQ ID NO: 147201 - DNA, 14 bp, Unknown
  misc_feature (1)..( 14): Result.004 file - promoters60/5663805
tcatataacaattt

SEQ ID NO: 147202 - DNA, 13 bp, Unknown
  misc_feature (1)..( 13): Result.004 file - promoters60/5663805
aaaagaaaaaaaa

SEQ ID NO: 147203 - DNA, 13 bp, Unknown
  misc_feature (1)..( 13): Result.004 file - promoters60/5663805
agcataaaaaata

SEQ ID NO: 147204 - DNA, 13 bp, Unknown
  misc_feature (1)..( 13): Result.004 file - promoters60/5663805
agaataaaaattg

SEQ ID NO: 147205 - DNA, 13 bp, Unknown
  misc_feature (1)..( 13): Result.004 file - promoters60/5663805
tatataataaata

SEQ ID NO: 147206 - DNA, 13 bp, Unknown
  misc_feature (1)..( 13): Result.004 file - promoters60/5663805
taattattatact

SEQ ID NO: 147207 - DNA, 13 bp, Unknown
  misc_feature (1)..( 13): Result.004 file - promoters60/5663805
atcatataattat

SEQ ID NO: 147208 - DNA, 13 bp, Unknown
  misc_feature (1)..( 13): Result.004 file - promoters60/5663805
gtcatataacaat

SEQ ID NO: 147209 - DNA, 10 bp, Unknown
  misc_feature (1)..( 10): Result.004 file - promoters60/5663805
aaataatgaa

SEQ ID NO: 147210 - DNA, 10 bp, Unknown
  misc_feature (1)..( 10): Result.004 file - promoters60/5663805
gaatactgaa

SEQ ID NO: 147211 - DNA, 10 bp, Unknown
  misc_feature (1)..( 10): Result.004 file - promoters60/5663805
aaataataaa

SEQ ID NO: 147212 - DNA, 10 bp, Unknown
  misc_feature (1)..( 10): Result.004 file - promoters60/5663805
acttaatgac

SEQ ID NO: 147213 - DNA, 10 bp, Unknown
  misc_feature (1)..( 10): Result.004 file - promoters60/5663805
aaatcatatt

SEQ ID NO: 147214 - DNA, 14 bp, Unknown
  misc_feature (1)..( 14): Result.004 file - promoters60/5663805
actcataataaata

SEQ ID NO: 147215 - DNA, 14 bp, Unknown
  misc_feature (1)..( 14): Result.004 file - promoters60/5663805
tcatataatagtaa

SEQ ID NO: 147216 - DNA, 14 bp, Unknown
  misc_feature (1)..( 14): Result.004 file - promoters60/5663805
atttataatataat

SEQ ID NO: 147217 - DNA, 14 bp, Unknown
  misc_feature (1)..( 14): Result.004 file - promoters60/5663805
acttataatgaatt

SEQ ID NO: 147218 - DNA, 14 bp, Unknown
  misc_feature (1)..( 14): Result.004 file - promoters60/5663805
taaaataaggaatt

SEQ ID NO: 147219 - DNA, 13 bp, Unknown
  misc_feature (1)..( 13): Result.004 file - promoters60/5663805
tttgttatataag

SEQ ID NO: 147220 - DNA, 13 bp, Unknown
  misc_feature (1)..( 13): Result.004 file - promoters60/5663805
tcctttatatatt

SEQ ID NO: 147221 - DNA, 13 bp, Unknown
  misc_feature (1)..( 13): Result.004 file - promoters60/5663805
cttattatataga

SEQ ID NO: 147222 - DNA, 13 bp, Unknown
  misc_feature (1)..( 13): Result.004 file - promoters60/5663805
cgtcccataaaga

SEQ ID NO: 147223 - DNA, 13 bp, Unknown
  misc_feature (1)..( 13): Result.004 file - promoters60/5663820
cgtcctataaata

SEQ ID NO: 147224 - DNA, 6 bp, Unknown
  misc_feature (1)..( 6): Result.004 file - promoters60/5663820
ttatca

SEQ ID NO: 147225 - DNA, 6 bp, Unknown
  misc_feature (1)..( 6): Result.004 file - promoters60/5663820
ttatca

SEQ ID NO: 147226 - DNA, 8 bp, Unknown
  misc_feature (1)..( 8): Result.004 file - promoters60/5663820
ttttattt

SEQ ID NO: 147227 - DNA, 8 bp, Unknown
  misc_feature (1)..( 8): Result.004 file - promoters60/5663820
tttttttt

SEQ ID NO: 147228 - DNA, 8 bp, Unknown
  misc_feature (1)..( 8): Result.004 file - promoters60/5663820
cctacttt

SEQ ID NO: 147229 - DNA, 8 bp, Unknown
  misc_feature (1)..( 8): Result.004 file - promoters60/5663820
cctatttt

SEQ ID NO: 147230 - DNA, 7 bp, Unknown
  misc_feature (1)..( 7): Result.004 file - promoters60/5663820
tttggtt

SEQ ID NO: 147231 - DNA, 7 bp, Unknown
  misc_feature (1)..( 7): Result.004 file - promoters60/5663820
ttttgtt

SEQ ID NO: 147232 - DNA, 7 bp, Unknown
  misc_feature (1)..( 7): Result.004 file - promoters60/5663820
tttctct

SEQ ID NO: 147233 - DNA, 7 bp, Unknown
  misc_feature (1)..( 7): Result.004 file - promoters60/5663820
tttttct

SEQ ID NO: 147234 - DNA, 6 bp, Unknown
  misc_feature (1)..( 6): Result.004 file - promoters60/5663820
cactta

SEQ ID NO: 147235 - DNA, 6 bp, Unknown
  misc_feature (1)..( 6): Result.004 file - promoters60/5663820
cactta

SEQ ID NO: 147236 - DNA, 6 bp, Unknown
  misc_feature (1)..( 6): Result.004 file - promoters60/5663820
gaaagt

SEQ ID NO: 147237 - DNA, 6 bp, Unknown
  misc_feature (1)..( 6): Result.004 file - promoters60/5663820
gaaagt

SEQ ID NO: 147238 - DNA, 9 bp, Unknown
  misc_feature (1)..( 9): Result.004 file - promoters60/5663820
ttgtgatcc

SEQ ID NO: 147239 - DNA, 9 bp, Unknown
  misc_feature (1)..( 9): Result.004 file - promoters60/5663820
ttgggatcc

SEQ ID NO: 147240 - DNA, 8 bp, Unknown
  misc_feature (1)..( 8): Result.004 file - promoters60/5663820
tatgtgtg

SEQ ID NO: 147241 - DNA, 8 bp, Unknown
  misc_feature (1)..( 8): Result.004 file - promoters60/5663820
tatgtgtg

SEQ ID NO: 147242 - DNA, 6 bp, Unknown
  misc_feature (1)..( 6): Result.004 file - promoters60/5663820
ttttca

SEQ ID NO: 147243 - DNA, 6 bp, Unknown
  misc_feature (1)..( 6): Result.004 file - promoters60/5663820
ttttca

SEQ ID NO: 147244 - DNA, 7 bp, Unknown
  misc_feature (1)..( 7): Result.004 file - promoters60/5663820
gttcaaa

SEQ ID NO: 147245 - DNA, 7 bp, Unknown
  misc_feature (1)..( 7): Result.004 file - promoters60/5663820
gttgaaa

SEQ ID NO: 147246 - DNA, 7 bp, Unknown
  misc_feature (1)..( 7): Result.004 file - promoters60/5663820
gcaatga

SEQ ID NO: 147247 - DNA, 7 bp, Unknown
  misc_feature (1)..( 7): Result.004 file - promoters60/5663820
gcaatga

SEQ ID NO: 147248 - DNA, 6 bp, Unknown
  misc_feature (1)..( 6): Result.004 file - promoters60/5663820
tgtttt

SEQ ID NO: 147249 - DNA, 6 bp, Unknown
  misc_feature (1)..( 6): Result.004 file - promoters60/5663820
tgtttt

SEQ ID NO: 147250 - DNA, 6 bp, Unknown
  misc_feature (1)..( 6): Result.004 file - promoters60/5663820
accttc

SEQ ID NO: 147251 - DNA, 6 bp, Unknown
  misc_feature (1)..( 6): Result.004 file - promoters60/5663820
accttc

SEQ ID NO: 147252 - DNA, 6 bp, Unknown
  misc_feature (1)..( 6): Result.004 file - promoters60/5663820
tctttt

SEQ ID NO: 147253 - DNA, 6 bp, Unknown
  misc_feature (1)..( 6): Result.004 file - promoters60/5663820
tctttt

SEQ ID NO: 147254 - DNA, 7 bp, Unknown
  misc_feature (1)..( 7): Result.004 file - promoters60/5663820
ctttatt

SEQ ID NO: 147255 - DNA, 7 bp, Unknown
  misc_feature (1)..( 7): Result.004 file - promoters60/5663820
cttgatt

SEQ ID NO: 147256 - DNA, 7 bp, Unknown
  misc_feature (1)..( 7): Result.004 file - promoters60/5663820
aatataa

SEQ ID NO: 147257 - DNA, 7 bp, Unknown
  misc_feature (1)..( 7): Result.004 file - promoters60/5663820
aatctaa

SEQ ID NO: 147258 - DNA, 7 bp, Unknown
  misc_feature (1)..( 7): Result.004 file - promoters60/5663820
tatcttt

SEQ ID NO: 147259 - DNA, 7 bp, Unknown
  misc_feature (1)..( 7): Result.004 file - promoters60/5663820
tattttt

SEQ ID NO: 147260 - DNA, 7 bp, Unknown
  misc_feature (1)..( 7): Result.004 file - promoters60/5663820
ttttttt

SEQ ID NO: 147261 - DNA, 7 bp, Unknown
  misc_feature (1)..( 7): Result.004 file - promoters60/5663820
tttcttt

SEQ ID NO: 147262 - DNA, 7 bp, Unknown
  misc_feature (1)..( 7): Result.004 file - promoters60/5663820
aattaac

SEQ ID NO: 147263 - DNA, 7 bp, Unknown
  misc_feature (1)..( 7): Result.004 file - promoters60/5663820
aataaac

SEQ ID NO: 147264 - DNA, 8 bp, Unknown
  misc_feature (1)..( 8): Result.004 file - promoters60/5663820
ccgtttta

SEQ ID NO: 147265 - DNA, 8 bp, Unknown
  misc_feature (1)..( 8): Result.004 file - promoters60/5663862
ccgtgtta

SEQ ID NO: 147266 - DNA, 13 bp, Unknown
  misc_feature (1)..( 13): Result.004 file - promoters60/5663862
acacagacaatcc

SEQ ID NO: 147267 - DNA, 13 bp, Unknown
  misc_feature (1)..( 13): Result.004 file - promoters60/5663862
cataagaaaattg

SEQ ID NO: 147268 - DNA, 13 bp, Unknown
  misc_feature (1)..( 13): Result.004 file - promoters60/5663862
taaaagaaaccaa

SEQ ID NO: 147269 - DNA, 13 bp, Unknown
  misc_feature (1)..( 13): Result.004 file - promoters60/5663862
cataacaaaaaat

SEQ ID NO: 147270 - DNA, 13 bp, Unknown
  misc_feature (1)..( 13): Result.004 file - promoters60/5663862
ccaaagaaaggtc

SEQ ID NO: 147271 - DNA, 13 bp, Unknown
  misc_feature (1)..( 13): Result.004 file - promoters60/5663862
gattataaaattg

SEQ ID NO: 147272 - DNA, 13 bp, Unknown
  misc_feature (1)..( 13): Result.004 file - promoters60/5663862
tcaaacaaatcaa

SEQ ID NO: 147273 - DNA, 8 bp, Unknown
  misc_feature (1)..( 8): Result.004 file - promoters60/5663862
tacgaaaa

SEQ ID NO: 147274 - DNA, 8 bp, Unknown
  misc_feature (1)..( 8): Result.004 file - promoters60/5663862
aacgaaat

SEQ ID NO: 147275 - DNA, 8 bp, Unknown
  misc_feature (1)..( 8): Result.004 file - promoters60/5663862
tactaaaa

SEQ ID NO: 147276 - DNA, 8 bp, Unknown
  misc_feature (1)..( 8): Result.004 file - promoters60/5663862
cacgaaat

SEQ ID NO: 147277 - DNA, 9 bp, Unknown
  misc_feature (1)..( 9): Result.004 file - promoters60/5663862
gacttaaaa

SEQ ID NO: 147278 - DNA, 10 bp, Unknown
  misc_feature (1)..( 10): Result.004 file - promoters60/5663862
ttgttacaat

SEQ ID NO: 147279 - DNA, 13 bp, Unknown
  misc_feature (1)..( 13): Result.004 file - promoters60/5663862
caagacctaaact

SEQ ID NO: 147280 - DNA, 13 bp, Unknown
  misc_feature (1)..( 13): Result.004 file - promoters60/5663862
tcagacctaaaca

SEQ ID NO: 147281 - DNA, 13 bp, Unknown
  misc_feature (1)..( 13): Result.004 file - promoters60/5663862
gaatggcaaaacc

SEQ ID NO: 147282 - DNA, 13 bp, Unknown
  misc_feature (1)..( 13): Result.004 file - promoters60/5663862
acaaatcaaatcg

SEQ ID NO: 147283 - DNA, 13 bp, Unknown
  misc_feature (1)..( 13): Result.004 file - promoters60/5663862
agaaaccaatttc

SEQ ID NO: 147284 - DNA, 13 bp, Unknown
  misc_feature (1)..( 13): Result.004 file - promoters60/5663934
gcataacaaaaaa

SEQ ID NO: 147285 - DNA, 9 bp, Unknown
  misc_feature (1)..( 9): Result.004 file - promoters60/5663934
catataaag

SEQ ID NO: 147286 - DNA, 9 bp, Unknown
  misc_feature (1)..( 9): Result.004 file - promoters60/5663934
catatatac

SEQ ID NO: 147287 - DNA, 9 bp, Unknown
  misc_feature (1)..( 9): Result.004 file - promoters60/5663934
aataaaaag

SEQ ID NO: 147288 - DNA, 9 bp, Unknown
  misc_feature (1)..( 9): Result.004 file - promoters60/5663934
tatatatat

SEQ ID NO: 147289 - DNA, 9 bp, Unknown
  misc_feature (1)..( 9): Result.004 file - promoters60/5663934
tatagataa

SEQ ID NO: 147290 - DNA, 9 bp, Unknown
  misc_feature (1)..( 9): Result.004 file - promoters60/5663934
tataaaacc

SEQ ID NO: 147291 - DNA, 11 bp, Unknown
  misc_feature (1)..( 11): Result.004 file - promoters60/5663934
cttgtttatat

SEQ ID NO: 147292 - DNA, 11 bp, Unknown
  misc_feature (1)..( 11): Result.004 file - promoters60/5663934
tttggttacaa

SEQ ID NO: 147293 - DNA, 11 bp, Unknown
  misc_feature (1)..( 11): Result.004 file - promoters60/5663934
cgagtttattt

SEQ ID NO: 147294 - DNA, 11 bp, Unknown
  misc_feature (1)..( 11): Result.004 file - promoters60/5663934
cttgtttactg

SEQ ID NO: 147295 - DNA, 11 bp, Unknown
  misc_feature (1)..( 11): Result.004 file - promoters60/5663934
acggtttgctg

SEQ ID NO: 147296 - DNA, 11 bp, Unknown
  misc_feature (1)..( 11): Result.004 file - promoters60/5663942
attttttttat

SEQ ID NO: 147297 - DNA, 10 bp, Unknown
  misc_feature (1)..( 10): Result.004 file - promoters60/5663942
gagagatttt

SEQ ID NO: 147298 - DNA, 10 bp, Unknown
  misc_feature (1)..( 10): Result.004 file - promoters60/5663942
gtgagctttt

SEQ ID NO: 147299 - DNA, 10 bp, Unknown
  misc_feature (1)..( 10): Result.004 file - promoters60/5663942
gagagatcgt

SEQ ID NO: 147300 - DNA, 7 bp, Unknown
  misc_feature (1)..( 7): Result.004 file - promoters60/5663942
attaggg

SEQ ID NO: 147301 - DNA, 7 bp, Unknown
  misc_feature (1)..( 7): Result.004 file - promoters60/5663942
atttggg

SEQ ID NO: 147302 - DNA, 7 bp, Unknown
  misc_feature (1)..( 7): Result.004 file - promoters60/5663942
tttagat

SEQ ID NO: 147303 - DNA, 7 bp, Unknown
  misc_feature (1)..( 7): Result.004 file - promoters60/5663942
tttagat

SEQ ID NO: 147304 - DNA, 9 bp, Unknown
  misc_feature (1)..( 9): Result.004 file - promoters60/5663942
gagaagaaa

SEQ ID NO: 147305 - DNA, 9 bp, Unknown
  misc_feature (1)..( 9): Result.004 file - promoters60/5663942
tagaaaaaa

SEQ ID NO: 147306 - DNA, 9 bp, Unknown
  misc_feature (1)..( 9): Result.004 file - promoters60/5663942
gaggagagc

SEQ ID NO: 147307 - DNA, 6 bp, Unknown
  misc_feature (1)..( 6): Result.004 file - promoters60/5663942
agtgag

SEQ ID NO: 147308 - DNA, 6 bp, Unknown
  misc_feature (1)..( 6): Result.004 file - promoters60/5663942
agtgag

SEQ ID NO: 147309 - DNA, 6 bp, Unknown
  misc_feature (1)..( 6): Result.004 file - promoters60/5663942
gagaga

SEQ ID NO: 147310 - DNA, 6 bp, Unknown
  misc_feature (1)..( 6): Result.004 file - promoters60/5663942
gagaga

SEQ ID NO: 147311 - DNA, 7 bp, Unknown
  misc_feature (1)..( 7): Result.004 file - promoters60/5663942
taaataa

SEQ ID NO: 147312 - DNA, 7 bp, Unknown
  misc_feature (1)..( 7): Result.004 file - promoters60/5663942
taaataa

SEQ ID NO: 147313 - DNA, 6 bp, Unknown
  misc_feature (1)..( 6): Result.004 file - promoters60/5663942
tcaccg

SEQ ID NO: 147314 - DNA, 6 bp, Unknown
  misc_feature (1)..( 6): Result.004 file - promoters60/5663942
tcaccg

SEQ ID NO: 147315 - DNA, 6 bp, Unknown
  misc_feature (1)..( 6): Result.004 file - promoters60/5663942
aggaga

SEQ ID NO: 147316 - DNA, 6 bp, Unknown
  misc_feature (1)..( 6): Result.004 file - promoters60/5663942
aggaga

SEQ ID NO: 147317 - DNA, 7 bp, Unknown
  misc_feature (1)..( 7): Result.004 file - promoters60/5663942
acgacca

SEQ ID NO: 147318 - DNA, 7 bp, Unknown
  misc_feature (1)..( 7): Result.004 file - promoters60/5663942
acggcca

SEQ ID NO: 147319 - DNA, 6 bp, Unknown
  misc_feature (1)..( 6): Result.004 file - promoters60/5663942
agagaa

SEQ ID NO: 147320 - DNA, 6 bp, Unknown
  misc_feature (1)..( 6): Result.004 file - promoters60/5663942
agagaa

SEQ ID NO: 147321 - DNA, 6 bp, Unknown
  misc_feature (1)..( 6): Result.004 file - promoters60/5663942
tgcaaa

SEQ ID NO: 147322 - DNA, 6 bp, Unknown
  misc_feature (1)..( 6): Result.004 file - promoters60/5663942
tgcaaa

SEQ ID NO: 147323 - DNA, 7 bp, Unknown
  misc_feature (1)..( 7): Result.004 file - promoters60/5663942
caattaa

SEQ ID NO: 147324 - DNA, 7 bp, Unknown
  misc_feature (1)..( 7): Result.004 file - promoters60/5663942
caattaa

SEQ ID NO: 147325 - DNA, 9 bp, Unknown
  misc_feature (1)..( 9): Result.004 file - promoters60/5663942
caatcgacg

SEQ ID NO: 147326 - DNA, 9 bp, Unknown
  misc_feature (1)..( 9): Result.004 file - promoters60/5663942
caatccacg

SEQ ID NO: 147327 - DNA, 7 bp, Unknown
  misc_feature (1)..( 7): Result.004 file - promoters60/5663942
agtattg

SEQ ID NO: 147328 - DNA, 7 bp, Unknown
  misc_feature (1)..( 7): Result.004 file - promoters60/5663942
agtattg

SEQ ID NO: 147329 - DNA, 7 bp, Unknown
  misc_feature (1)..( 7): Result.004 file - promoters60/5663942
tattaaa

SEQ ID NO: 147330 - DNA, 7 bp, Unknown
  misc_feature (1)..( 7): Result.004 file - promoters60/5663942
tatgaaa

SEQ ID NO: 147331 - DNA, 8 bp, Unknown
  misc_feature (1)..( 8): Result.004 file - promoters60/5663942
ttatatat

SEQ ID NO: 147332 - DNA, 8 bp, Unknown
  misc_feature (1)..( 8): Result.004 file - promoters60/5663942
ttatatat

SEQ ID NO: 147333 - DNA, 6 bp, Unknown
  misc_feature (1)..( 6): Result.004 file - promoters60/5663942
actcac

SEQ ID NO: 147334 - DNA, 6 bp, Unknown
  misc_feature (1)..( 6): Result.004 file - promoters60/5663942
actcac

SEQ ID NO: 147335 - DNA, 6 bp, Unknown
  misc_feature (1)..( 6): Result.004 file - promoters60/5663942
gagaat

SEQ ID NO: 147336 - DNA, 6 bp, Unknown
  misc_feature (1)..( 6): Result.004 file - promoters60/5663942
gagaat

SEQ ID NO: 147337 - DNA, 9 bp, Unknown
  misc_feature (1)..( 9): Result.004 file - promoters60/5663942
cagatttca

SEQ ID NO: 147338 - DNA, 9 bp, Unknown
  misc_feature (1)..( 9): Result.004 file - promoters60/5663942
caggtttca

SEQ ID NO: 147339 - DNA, 7 bp, Unknown
  misc_feature (1)..( 7): Result.004 file - promoters60/5663942
aaaatat

SEQ ID NO: 147340 - DNA, 7 bp, Unknown
  misc_feature (1)..( 7): Result.004 file - promoters60/5663942
aaattat

SEQ ID NO: 147341 - DNA, 6 bp, Unknown
  misc_feature (1)..( 6): Result.004 file - promoters60/5663942
ataaaa

SEQ ID NO: 147342 - DNA, 6 bp, Unknown
  misc_feature (1)..( 6): Result.004 file - promoters60/5663942
ataaaa

SEQ ID NO: 147343 - DNA, 7 bp, Unknown
  misc_feature (1)..( 7): Result.004 file - promoters60/5663942
gttgata

SEQ ID NO: 147344 - DNA, 7 bp, Unknown
  misc_feature (1)..( 7): Result.004 file - promoters60/5663946
gttgata

SEQ ID NO: 147345 - DNA, 8 bp, Unknown
  misc_feature (1)..( 8): Result.004 file - promoters60/5663946
gaaataaa

SEQ ID NO: 147346 - DNA, 8 bp, Unknown
  misc_feature (1)..( 8): Result.004 file - promoters60/5663946
aaaataac

SEQ ID NO: 147347 - DNA, 8 bp, Unknown
  misc_feature (1)..( 8): Result.004 file - promoters60/5663946
taaagaaa

SEQ ID NO: 147348 - DNA, 8 bp, Unknown
  misc_feature (1)..( 8): Result.004 file - promoters60/5663946
taaagagc

SEQ ID NO: 147349 - DNA, 8 bp, Unknown
  misc_feature (1)..( 8): Result.004 file - promoters60/5663946
ttttctta

SEQ ID NO: 147350 - DNA, 8 bp, Unknown
  misc_feature (1)..( 8): Result.004 file - promoters60/5663946
tttccttt

SEQ ID NO: 147351 - DNA, 8 bp, Unknown
  misc_feature (1)..( 8): Result.004 file - promoters60/5663946
atttcttc

SEQ ID NO: 147352 - DNA, 8 bp, Unknown
  misc_feature (1)..( 8): Result.004 file - promoters60/5663950
gtttcttc

SEQ ID NO: 147353 - DNA, 11 bp, Unknown
  misc_feature (1)..( 11): Result.004 file - promoters60/5663950
tgagaagattt

SEQ ID NO: 147354 - DNA, 11 bp, Unknown
  misc_feature (1)..( 11): Result.004 file - promoters60/5663950
aagaaagattc

SEQ ID NO: 147355 - DNA, 11 bp, Unknown
  misc_feature (1)..( 11): Result.004 file - promoters60/5663950
tcggaaaattt

SEQ ID NO: 147356 - DNA, 11 bp, Unknown
  misc_feature (1)..( 11): Result.004 file - promoters60/5663950
aagaaaaatta

SEQ ID NO: 147357 - DNA, 11 bp, Unknown
  misc_feature (1)..( 11): Result.004 file - promoters60/5663950
tatcgaaatta

SEQ ID NO: 147358 - DNA, 11 bp, Unknown
  misc_feature (1)..( 11): Result.004 file - promoters60/5663950
ttggatgaatt

SEQ ID NO: 147359 - DNA, 11 bp, Unknown
  misc_feature (1)..( 11): Result.004 file - promoters60/5663950
accgtttagat

SEQ ID NO: 147360 - DNA, 11 bp, Unknown
  misc_feature (1)..( 11): Result.004 file - promoters60/5663950
acctttttaaa

SEQ ID NO: 147361 - DNA, 11 bp, Unknown
  misc_feature (1)..( 11): Result.004 file - promoters60/5663950
atctttttaaa

SEQ ID NO: 147362 - DNA, 11 bp, Unknown
  misc_feature (1)..( 11): Result.004 file - promoters60/5663950
ttttttataac

SEQ ID NO: 147363 - DNA, 11 bp, Unknown
  misc_feature (1)..( 11): Result.004 file - promoters60/5663950
ccctttcatag

SEQ ID NO: 147364 - DNA, 11 bp, Unknown
  misc_feature (1)..( 11): Result.004 file - promoters60/5663950
tcctttttgta

SEQ ID NO: 147365 - DNA, 12 bp, Unknown
  misc_feature (1)..( 12): Result.004 file - promoters60/5663950
attttcttcaca

SEQ ID NO: 147366 - DNA, 12 bp, Unknown
  misc_feature (1)..( 12): Result.004 file - promoters60/5663950
gtttgcttcttt

SEQ ID NO: 147367 - DNA, 10 bp, Unknown
  misc_feature (1)..( 10): Result.004 file - promoters60/5663950
aatcttcaat

SEQ ID NO: 147368 - DNA, 12 bp, Unknown
  misc_feature (1)..( 12): Result.004 file - promoters60/5663950
ttttttttcggg

SEQ ID NO: 147369 - DNA, 12 bp, Unknown
  misc_feature (1)..( 12): Result.004 file - promoters60/5663950
aggatctgcaat

SEQ ID NO: 147370 - DNA, 12 bp, Unknown
  misc_feature (1)..( 12): Result.004 file - promoters60/5663954
tttattttccaa

SEQ ID NO: 147371 - DNA, 11 bp, Unknown
  misc_feature (1)..( 11): Result.004 file - promoters60/5663954
gtttcctagct

SEQ ID NO: 147372 - DNA, 11 bp, Unknown
  misc_feature (1)..( 11): Result.004 file - promoters60/5663954
aattcttagaa

SEQ ID NO: 147373 - DNA, 11 bp, Unknown
  misc_feature (1)..( 11): Result.004 file - promoters60/5663954
aatacttacaa

SEQ ID NO: 147374 - DNA, 11 bp, Unknown
  misc_feature (1)..( 11): Result.004 file - promoters60/5663954
ttgtctgagaa

SEQ ID NO: 147375 - DNA, 11 bp, Unknown
  misc_feature (1)..( 11): Result.004 file - promoters60/5663962
gaaattgagaa

SEQ ID NO: 147376 - DNA, 6 bp, Unknown
  misc_feature (1)..( 6): Result.004 file - promoters60/5663962
gcagta

SEQ ID NO: 147377 - DNA, 6 bp, Unknown
  misc_feature (1)..( 6): Result.004 file - promoters60/5663962
gcagta

SEQ ID NO: 147378 - DNA, 7 bp, Unknown
  misc_feature (1)..( 7): Result.004 file - promoters60/5663962
accagca

SEQ ID NO: 147379 - DNA, 7 bp, Unknown
  misc_feature (1)..( 7): Result.004 file - promoters60/5663962
acccgca

SEQ ID NO: 147380 - DNA, 6 bp, Unknown
  misc_feature (1)..( 6): Result.004 file - promoters60/5663962
aaccga

SEQ ID NO: 147381 - DNA, 6 bp, Unknown
  misc_feature (1)..( 6): Result.004 file - promoters60/5663962
aaccga

SEQ ID NO: 147382 - DNA, 6 bp, Unknown
  misc_feature (1)..( 6): Result.004 file - promoters60/5663962
aaccgg

SEQ ID NO: 147383 - DNA, 6 bp, Unknown
  misc_feature (1)..( 6): Result.004 file - promoters60/5663962
aaccgg

SEQ ID NO: 147384 - DNA, 7 bp, Unknown
  misc_feature (1)..( 7): Result.004 file - promoters60/5663962
gattcca

SEQ ID NO: 147385 - DNA, 7 bp, Unknown
  misc_feature (1)..( 7): Result.004 file - promoters60/5663962
gatacca

SEQ ID NO: 147386 - DNA, 9 bp, Unknown
  misc_feature (1)..( 9): Result.004 file - promoters60/5663962
ctccgccga

SEQ ID NO: 147387 - DNA, 9 bp, Unknown
  misc_feature (1)..( 9): Result.004 file - promoters60/5663962
ctccggcga

SEQ ID NO: 147388 - DNA, 7 bp, Unknown
  misc_feature (1)..( 7): Result.004 file - promoters60/5663962
tcataat

SEQ ID NO: 147389 - DNA, 7 bp, Unknown
  misc_feature (1)..( 7): Result.004 file - promoters60/5663962
tcataat

SEQ ID NO: 147390 - DNA, 6 bp, Unknown
  misc_feature (1)..( 6): Result.004 file - promoters60/5663962
attgtt

SEQ ID NO: 147391 - DNA, 6 bp, Unknown
  misc_feature (1)..( 6): Result.004 file - promoters60/5663970
attgtt

SEQ ID NO: 147392 - DNA, 9 bp, Unknown
  misc_feature (1)..( 9): Result.004 file - promoters60/5663970
aaagtttca

SEQ ID NO: 147393 - DNA, 9 bp, Unknown
  misc_feature (1)..( 9): Result.004 file - promoters60/5663970
aaaatttga

SEQ ID NO: 147394 - DNA, 9 bp, Unknown
  misc_feature (1)..( 9): Result.004 file - promoters60/5663970
ttagtttcc

SEQ ID NO: 147395 - DNA, 9 bp, Unknown
  misc_feature (1)..( 9): Result.004 file - promoters60/5663970
gaaatttgt

SEQ ID NO: 147396 - DNA, 9 bp, Unknown
  misc_feature (1)..( 9): Result.004 file - promoters60/5663970
caaatttgt

SEQ ID NO: 147397 - DNA, 9 bp, Unknown
  misc_feature (1)..( 9): Result.004 file - promoters60/5663970
ttattttcc

SEQ ID NO: 147398 - DNA, 11 bp, Unknown
  misc_feature (1)..( 11): Result.004 file - promoters60/5663970
tctgaatttta

SEQ ID NO: 147399 - DNA, 11 bp, Unknown
  misc_feature (1)..( 11): Result.004 file - promoters60/5663970
tccgaaatttg

SEQ ID NO: 147400 - DNA, 11 bp, Unknown
  misc_feature (1)..( 11): Result.004 file - promoters60/5663970
tctcaatttct

SEQ ID NO: 147401 - DNA, 11 bp, Unknown
  misc_feature (1)..( 11): Result.004 file - promoters60/5663970
ttcaaaatttg

SEQ ID NO: 147402 - DNA, 11 bp, Unknown
  misc_feature (1)..( 11): Result.004 file - promoters60/5663970
gattaatgtct

SEQ ID NO: 147403 - DNA, 11 bp, Unknown
  misc_feature (1)..( 11): Result.004 file - promoters60/5663970
gattaatttct

SEQ ID NO: 147404 - DNA, 13 bp, Unknown
  misc_feature (1)..( 13): Result.004 file - promoters60/5663970
tggttaattctcg

SEQ ID NO: 147405 - DNA, 13 bp, Unknown
  misc_feature (1)..( 13): Result.004 file - promoters60/5663970
tggataattgaag

SEQ ID NO: 147406 - DNA, 13 bp, Unknown
  misc_feature (1)..( 13): Result.004 file - promoters60/5663970
cggttgattttga

SEQ ID NO: 147407 - DNA, 13 bp, Unknown
  misc_feature (1)..( 13): Result.004 file - promoters60/5663970
agaatatttgata

SEQ ID NO: 147408 - DNA, 13 bp, Unknown
  misc_feature (1)..( 13): Result.004 file - promoters60/5663970
acactatttgata

SEQ ID NO: 147409 - DNA, 13 bp, Unknown
  misc_feature (1)..( 13): Result.004 file - promoters60/5663985
ttgttaacgatgt

SEQ ID NO: 147410 - DNA, 7 bp, Unknown
  misc_feature (1)..( 7): Result.004 file - promoters60/5663985
tgtttaa

SEQ ID NO: 147411 - DNA, 7 bp, Unknown
  misc_feature (1)..( 7): Result.004 file - promoters60/5663985
tgtttaa

SEQ ID NO: 147412 - DNA, 8 bp, Unknown
  misc_feature (1)..( 8): Result.004 file - promoters60/5663985
gttaactt

SEQ ID NO: 147413 - DNA, 8 bp, Unknown
  misc_feature (1)..( 8): Result.004 file - promoters60/5663985
gttatctt

SEQ ID NO: 147414 - DNA, 8 bp, Unknown
  misc_feature (1)..( 8): Result.004 file - promoters60/5663985
tattttga

SEQ ID NO: 147415 - DNA, 8 bp, Unknown
  misc_feature (1)..( 8): Result.004 file - promoters60/5663985
tattttga

SEQ ID NO: 147416 - DNA, 8 bp, Unknown
  misc_feature (1)..( 8): Result.004 file - promoters60/5663985
tatcttgc

SEQ ID NO: 147417 - DNA, 8 bp, Unknown
  misc_feature (1)..( 8): Result.004 file - promoters60/5663985
ttagtgtt

SEQ ID NO: 147418 - DNA, 8 bp, Unknown
  misc_feature (1)..( 8): Result.004 file - promoters60/5663985
ttagtgtt

SEQ ID NO: 147419 - DNA, 15 bp, Unknown
  misc_feature (1)..( 15): Result.004 file - promoters60/5663985
aatcaaggagcaatt

SEQ ID NO: 147420 - DNA, 15 bp, Unknown
  misc_feature (1)..( 15): Result.004 file - promoters60/5663985
aatcaaggagcaatt

SEQ ID NO: 147421 - DNA, 7 bp, Unknown
  misc_feature (1)..( 7): Result.004 file - promoters60/5663985
gattcag

SEQ ID NO: 147422 - DNA, 7 bp, Unknown
  misc_feature (1)..( 7): Result.004 file - promoters60/5663985
gatacag

SEQ ID NO: 147423 - DNA, 6 bp, Unknown
  misc_feature (1)..( 6): Result.004 file - promoters60/5663985
ttcagc

SEQ ID NO: 147424 - DNA, 6 bp, Unknown
  misc_feature (1)..( 6): Result.004 file - promoters60/5663985
ttcagc

SEQ ID NO: 147425 - DNA, 6 bp, Unknown
  misc_feature (1)..( 6): Result.004 file - promoters60/5663985
tcttgt

SEQ ID NO: 147426 - DNA, 6 bp, Unknown
  misc_feature (1)..( 6): Result.004 file - promoters60/5663985
tcttgt

SEQ ID NO: 147427 - DNA, 6 bp, Unknown
  misc_feature (1)..( 6): Result.004 file - promoters60/5663985
cttctt

SEQ ID NO: 147428 - DNA, 6 bp, Unknown
  misc_feature (1)..( 6): Result.004 file - promoters60/5663985
cttctt

SEQ ID NO: 147429 - DNA, 6 bp, Unknown
  misc_feature (1)..( 6): Result.004 file - promoters60/5663985
caaaaa

SEQ ID NO: 147430 - DNA, 6 bp, Unknown
  misc_feature (1)..( 6): Result.004 file - promoters60/5663985
caaaaa

SEQ ID NO: 147431 - DNA, 7 bp, Unknown
  misc_feature (1)..( 7): Result.004 file - promoters60/5663985
tatgggc

SEQ ID NO: 147432 - DNA, 7 bp, Unknown
  misc_feature (1)..( 7): Result.004 file - promoters60/5663985
tatgggc

SEQ ID NO: 147433 - DNA, 6 bp, Unknown
  misc_feature (1)..( 6): Result.004 file - promoters60/5663985
gggctt

SEQ ID NO: 147434 - DNA, 6 bp, Unknown
  misc_feature (1)..( 6): Result.004 file - promoters60/5663985
gggctt

SEQ ID NO: 147435 - DNA, 9 bp, Unknown
  misc_feature (1)..( 9): Result.004 file - promoters60/5663985
tttttgtta

SEQ ID NO: 147436 - DNA, 9 bp, Unknown
  misc_feature (1)..( 9): Result.004 file - promoters60/5663985
ttttggtta

SEQ ID NO: 147437 - DNA, 6 bp, Unknown
  misc_feature (1)..( 6): Result.004 file - promoters60/5663985
tttttg

SEQ ID NO: 147438 - DNA, 6 bp, Unknown
  misc_feature (1)..( 6): Result.004 file - promoters60/5663985
tttttg

SEQ ID NO: 147439 - DNA, 9 bp, Unknown
  misc_feature (1)..( 9): Result.004 file - promoters60/5663985
tttcaaaag

SEQ ID NO: 147440 - DNA, 9 bp, Unknown
  misc_feature (1)..( 9): Result.004 file - promoters60/5663985
ttttaaaag

SEQ ID NO: 147441 - DNA, 7 bp, Unknown
  misc_feature (1)..( 7): Result.004 file - promoters60/5663985
aagagaa

SEQ ID NO: 147442 - DNA, 7 bp, Unknown
  misc_feature (1)..( 7): Result.004 file - promoters60/5663996
aagtgaa

SEQ ID NO: 147443 - DNA, 12 bp, Unknown
  misc_feature (1)..( 12): Result.004 file - promoters60/5663996
ggtgaaacttac

SEQ ID NO: 147444 - DNA, 12 bp, Unknown
  misc_feature (1)..( 12): Result.004 file - promoters60/5663996
ttccgtacttac

SEQ ID NO: 147445 - DNA, 12 bp, Unknown
  misc_feature (1)..( 12): Result.004 file - promoters60/5663996
cccaaaaattat

SEQ ID NO: 147446 - DNA, 12 bp, Unknown
  misc_feature (1)..( 12): Result.004 file - promoters60/5663996
gtactaacttgt

SEQ ID NO: 147447 - DNA, 12 bp, Unknown
  misc_feature (1)..( 12): Result.004 file - promoters60/5663996
tcaacaaattaa

SEQ ID NO: 147448 - DNA, 12 bp, Unknown
  misc_feature (1)..( 12): Result.004 file - promoters60/5663996
attcaaaattct

SEQ ID NO: 147449 - DNA, 11 bp, Unknown
  misc_feature (1)..( 11): Result.004 file - promoters60/5663996
taagaacattg

SEQ ID NO: 147450 - DNA, 11 bp, Unknown
  misc_feature (1)..( 11): Result.004 file - promoters60/5663996
taataacattg

SEQ ID NO: 147451 - DNA, 11 bp, Unknown
  misc_feature (1)..( 11): Result.004 file - promoters60/5663996
cacgaacatgg

SEQ ID NO: 147452 - DNA, 11 bp, Unknown
  misc_feature (1)..( 11): Result.004 file - promoters60/5663996
tctctacattg

SEQ ID NO: 147453 - DNA, 11 bp, Unknown
  misc_feature (1)..( 11): Result.004 file - promoters60/5663996
aagtaaaattt

SEQ ID NO: 147454 - DNA, 11 bp, Unknown
  misc_feature (1)..( 11): Result.004 file - promoters60/5664022
gaataacaaaa

SEQ ID NO: 147455 - DNA, 7 bp, Unknown
  misc_feature (1)..( 7): Result.004 file - promoters60/5664022
aacttaa

SEQ ID NO: 147456 - DNA, 7 bp, Unknown
  misc_feature (1)..( 7): Result.004 file - promoters60/5664022
aacttaa

SEQ ID NO: 147457 - DNA, 6 bp, Unknown
  misc_feature (1)..( 6): Result.004 file - promoters60/5664022
caaaac

SEQ ID NO: 147458 - DNA, 6 bp, Unknown
  misc_feature (1)..( 6): Result.004 file - promoters60/5664022
caaaac

SEQ ID NO: 147459 - DNA, 6 bp, Unknown
  misc_feature (1)..( 6): Result.004 file - promoters60/5664022
ttcaaa

SEQ ID NO: 147460 - DNA, 6 bp, Unknown
  misc_feature (1)..( 6): Result.004 file - promoters60/5664022
ttcaaa

SEQ ID NO: 147461 - DNA, 8 bp, Unknown
  misc_feature (1)..( 8): Result.004 file - promoters60/5664022
ttgtgaca

SEQ ID NO: 147462 - DNA, 8 bp, Unknown
  misc_feature (1)..( 8): Result.004 file - promoters60/5664022
ttgtaaca

SEQ ID NO: 147463 - DNA, 6 bp, Unknown
  misc_feature (1)..( 6): Result.004 file - promoters60/5664022
cttttc

SEQ ID NO: 147464 - DNA, 6 bp, Unknown
  misc_feature (1)..( 6): Result.004 file - promoters60/5664022
cttttc

SEQ ID NO: 147465 - DNA, 8 bp, Unknown
  misc_feature (1)..( 8): Result.004 file - promoters60/5664022
aataaaaa

SEQ ID NO: 147466 - DNA, 8 bp, Unknown
  misc_feature (1)..( 8): Result.004 file - promoters60/5664022
aatagaaa

SEQ ID NO: 147467 - DNA, 9 bp, Unknown
  misc_feature (1)..( 9): Result.004 file - promoters60/5664022
acccaaaaa

SEQ ID NO: 147468 - DNA, 9 bp, Unknown
  misc_feature (1)..( 9): Result.004 file - promoters60/5664022
ggccaaaaa

SEQ ID NO: 147469 - DNA, 9 bp, Unknown
  misc_feature (1)..( 9): Result.004 file - promoters60/5664022
acccaaatt

SEQ ID NO: 147470 - DNA, 7 bp, Unknown
  misc_feature (1)..( 7): Result.004 file - promoters60/5664022
ctagcaa

SEQ ID NO: 147471 - DNA, 7 bp, Unknown
  misc_feature (1)..( 7): Result.004 file - promoters60/5664022
ctatcaa

SEQ ID NO: 147472 - DNA, 7 bp, Unknown
  misc_feature (1)..( 7): Result.004 file - promoters60/5664022
taaaccc

SEQ ID NO: 147473 - DNA, 7 bp, Unknown
  misc_feature (1)..( 7): Result.004 file - promoters60/5664022
taatccc

SEQ ID NO: 147474 - DNA, 7 bp, Unknown
  misc_feature (1)..( 7): Result.004 file - promoters60/5664022
atatctt

SEQ ID NO: 147475 - DNA, 7 bp, Unknown
  misc_feature (1)..( 7): Result.004 file - promoters60/5664022
ataactt

SEQ ID NO: 147476 - DNA, 7 bp, Unknown
  misc_feature (1)..( 7): Result.004 file - promoters60/5664022
attggaa

SEQ ID NO: 147477 - DNA, 7 bp, Unknown
  misc_feature (1)..( 7): Result.004 file - promoters60/5664022
atttgaa

SEQ ID NO: 147478 - DNA, 7 bp, Unknown
  misc_feature (1)..( 7): Result.004 file - promoters60/5664022
tactaaa

SEQ ID NO: 147479 - DNA, 7 bp, Unknown
  misc_feature (1)..( 7): Result.004 file - promoters60/5664060
tactaaa

SEQ ID NO: 147480 - DNA, 9 bp, Unknown
  misc_feature (1)..( 9): Result.004 file - promoters60/5664060
tcaaataat

SEQ ID NO: 147481 - DNA, 9 bp, Unknown
  misc_feature (1)..( 9): Result.004 file - promoters60/5664060
gaaaacaat

SEQ ID NO: 147482 - DNA, 9 bp, Unknown
  misc_feature (1)..( 9): Result.004 file - promoters60/5664060
acaaattta

SEQ ID NO: 147483 - DNA, 9 bp, Unknown
  misc_feature (1)..( 9): Result.004 file - promoters60/5664060
attagatta

SEQ ID NO: 147484 - DNA, 9 bp, Unknown
  misc_feature (1)..( 9): Result.004 file - promoters60/5664060
attggatta

SEQ ID NO: 147485 - DNA, 9 bp, Unknown
  misc_feature (1)..( 9): Result.004 file - promoters60/5664060
catagttta

SEQ ID NO: 147486 - DNA, 9 bp, Unknown
  misc_feature (1)..( 9): Result.004 file - promoters60/5664060
atttgtctt

SEQ ID NO: 147487 - DNA, 9 bp, Unknown
  misc_feature (1)..( 9): Result.004 file - promoters60/5664060
atttatcta

SEQ ID NO: 147488 - DNA, 9 bp, Unknown
  misc_feature (1)..( 9): Result.004 file - promoters60/5664060
ttttgttta

SEQ ID NO: 147489 - DNA, 8 bp, Unknown
  misc_feature (1)..( 8): Result.004 file - promoters60/5664060
agatgtca

SEQ ID NO: 147490 - DNA, 8 bp, Unknown
  misc_feature (1)..( 8): Result.004 file - promoters60/5664060
aaatgtca

SEQ ID NO: 147491 - DNA, 8 bp, Unknown
  misc_feature (1)..( 8): Result.004 file - promoters60/5664060
aaatatca

SEQ ID NO: 147492 - DNA, 7 bp, Unknown
  misc_feature (1)..( 7): Result.004 file - promoters60/5664060
tgagaac

SEQ ID NO: 147493 - DNA, 7 bp, Unknown
  misc_feature (1)..( 7): Result.004 file - promoters60/5664060
tgaaaac

SEQ ID NO: 147494 - DNA, 7 bp, Unknown
  misc_feature (1)..( 7): Result.004 file - promoters60/5664072
agaaaac

SEQ ID NO: 147495 - DNA, 6 bp, Unknown
  misc_feature (1)..( 6): Result.004 file - promoters60/5664072
tagaaa

SEQ ID NO: 147496 - DNA, 6 bp, Unknown
  misc_feature (1)..( 6): Result.004 file - promoters60/5664072
tagaaa

SEQ ID NO: 147497 - DNA, 7 bp, Unknown
  misc_feature (1)..( 7): Result.004 file - promoters60/5664072
ataatga

SEQ ID NO: 147498 - DNA, 7 bp, Unknown
  misc_feature (1)..( 7): Result.004 file - promoters60/5664072
atactga

SEQ ID NO: 147499 - DNA, 7 bp, Unknown
  misc_feature (1)..( 7): Result.004 file - promoters60/5664072
taaaaat

SEQ ID NO: 147500 - DNA, 7 bp, Unknown
  misc_feature (1)..( 7): Result.004 file - promoters60/5664072
taacaat

SEQ ID NO: 147501 - DNA, 6 bp, Unknown
  misc_feature (1)..( 6): Result.004 file - promoters60/5664072
aaacag

SEQ ID NO: 147502 - DNA, 6 bp, Unknown
  misc_feature (1)..( 6): Result.004 file - promoters60/5664072
aaacag

SEQ ID NO: 147503 - DNA, 8 bp, Unknown
  misc_feature (1)..( 8): Result.004 file - promoters60/5664072
atcttttt

SEQ ID NO: 147504 - DNA, 8 bp, Unknown
  misc_feature (1)..( 8): Result.004 file - promoters60/5664072
ctctattt

SEQ ID NO: 147505 - DNA, 8 bp, Unknown
  misc_feature (1)..( 8): Result.004 file - promoters60/5664072
ctccattg

SEQ ID NO: 147506 - DNA, 7 bp, Unknown
  misc_feature (1)..( 7): Result.004 file - promoters60/5664072
attcttt

SEQ ID NO: 147507 - DNA, 7 bp, Unknown
  misc_feature (1)..( 7): Result.004 file - promoters60/5664072
attcttt

SEQ ID NO: 147508 - DNA, 10 bp, Unknown
  misc_feature (1)..( 10): Result.004 file - promoters60/5664072
taggatttat

SEQ ID NO: 147509 - DNA, 10 bp, Unknown
  misc_feature (1)..( 10): Result.004 file - promoters60/5664072
tagcatttat

SEQ ID NO: 147510 - DNA, 6 bp, Unknown
  misc_feature (1)..( 6): Result.004 file - promoters60/5664072
aaagaa

SEQ ID NO: 147511 - DNA, 6 bp, Unknown
  misc_feature (1)..( 6): Result.004 file - promoters60/5664072
aaagaa

SEQ ID NO: 147512 - DNA, 7 bp, Unknown
  misc_feature (1)..( 7): Result.004 file - promoters60/5664072
tagagaa

SEQ ID NO: 147513 - DNA, 7 bp, Unknown
  misc_feature (1)..( 7): Result.004 file - promoters60/5664072
tagagaa

SEQ ID NO: 147514 - DNA, 7 bp, Unknown
  misc_feature (1)..( 7): Result.004 file - promoters60/5664072
aaggaga

SEQ ID NO: 147515 - DNA, 7 bp, Unknown
  misc_feature (1)..( 7): Result.004 file - promoters60/5664072
aagtaga

SEQ ID NO: 147516 - DNA, 7 bp, Unknown
  misc_feature (1)..( 7): Result.004 file - promoters60/5664072
aaagaag

SEQ ID NO: 147517 - DNA, 7 bp, Unknown
  misc_feature (1)..( 7): Result.004 file - promoters60/5664072
aaagaag

SEQ ID NO: 147518 - DNA, 6 bp, Unknown
  misc_feature (1)..( 6): Result.004 file - promoters60/5664072
caaaag

SEQ ID NO: 147519 - DNA, 6 bp, Unknown
  misc_feature (1)..( 6): Result.004 file - promoters60/5664072
caaaag

SEQ ID NO: 147520 - DNA, 6 bp, Unknown
  misc_feature (1)..( 6): Result.004 file - promoters60/5664072
caacac

SEQ ID NO: 147521 - DNA, 6 bp, Unknown
  misc_feature (1)..( 6): Result.004 file - promoters60/5664072
caacac

SEQ ID NO: 147522 - DNA, 6 bp, Unknown
  misc_feature (1)..( 6): Result.004 file - promoters60/5664072
ttgaag

SEQ ID NO: 147523 - DNA, 6 bp, Unknown
  misc_feature (1)..( 6): Result.004 file - promoters60/5664080
ttgaag

SEQ ID NO: 147524 - DNA, 12 bp, Unknown
  misc_feature (1)..( 12): Result.004 file - promoters60/5664080
attgtctcgtag

SEQ ID NO: 147525 - DNA, 12 bp, Unknown
  misc_feature (1)..( 12): Result.004 file - promoters60/5664080
attgtctcgagc

SEQ ID NO: 147526 - DNA, 12 bp, Unknown
  misc_feature (1)..( 12): Result.004 file - promoters60/5664080
ttcttctcttag

SEQ ID NO: 147527 - DNA, 8 bp, Unknown
  misc_feature (1)..( 8): Result.004 file - promoters60/5664080
acttaaaa

SEQ ID NO: 147528 - DNA, 8 bp, Unknown
  misc_feature (1)..( 8): Result.004 file - promoters60/5664080
acttgaaa

SEQ ID NO: 147529 - DNA, 8 bp, Unknown
  misc_feature (1)..( 8): Result.004 file - promoters60/5664080
aaatttac

SEQ ID NO: 147530 - DNA, 8 bp, Unknown
  misc_feature (1)..( 8): Result.004 file - promoters60/5664080
caatttac

SEQ ID NO: 147531 - DNA, 8 bp, Unknown
  misc_feature (1)..( 8): Result.004 file - promoters60/5664080
caaattaa

SEQ ID NO: 147532 - DNA, 7 bp, Unknown
  misc_feature (1)..( 7): Result.004 file - promoters60/5664080
tgaagaa

SEQ ID NO: 147533 - DNA, 7 bp, Unknown
  misc_feature (1)..( 7): Result.004 file - promoters60/5664080
tgatgaa

SEQ ID NO: 147534 - DNA, 8 bp, Unknown
  misc_feature (1)..( 8): Result.004 file - promoters60/5664080
gaaacttt

SEQ ID NO: 147535 - DNA, 8 bp, Unknown
  misc_feature (1)..( 8): Result.004 file - promoters60/5664080
gaatcttt

SEQ ID NO: 147536 - DNA, 12 bp, Unknown
  misc_feature (1)..( 12): Result.004 file - promoters60/5664080
ttttcagcatgc

SEQ ID NO: 147537 - DNA, 12 bp, Unknown
  misc_feature (1)..( 12): Result.004 file - promoters60/5664080
tttacagtatgc

SEQ ID NO: 147538 - DNA, 6 bp, Unknown
  misc_feature (1)..( 6): Result.004 file - promoters60/5664080
tgcttc

SEQ ID NO: 147539 - DNA, 6 bp, Unknown
  misc_feature (1)..( 6): Result.004 file - promoters60/5664080
tgcttc

SEQ ID NO: 147540 - DNA, 6 bp, Unknown
  misc_feature (1)..( 6): Result.004 file - promoters60/5664080
tcagtt

SEQ ID NO: 147541 - DNA, 6 bp, Unknown
  misc_feature (1)..( 6): Result.004 file - promoters60/5664080
tcagtt

SEQ ID NO: 147542 - DNA, 10 bp, Unknown
  misc_feature (1)..( 10): Result.004 file - promoters60/5664080
aaagtgtgtg

SEQ ID NO: 147543 - DNA, 10 bp, Unknown
  misc_feature (1)..( 10): Result.004 file - promoters60/5664080
aaagtgagtg

SEQ ID NO: 147544 - DNA, 10 bp, Unknown
  misc_feature (1)..( 10): Result.004 file - promoters60/5664080
aggataaagt

SEQ ID NO: 147545 - DNA, 10 bp, Unknown
  misc_feature (1)..( 10): Result.004 file - promoters60/5664080
agggtaaagt

SEQ ID NO: 147546 - DNA, 7 bp, Unknown
  misc_feature (1)..( 7): Result.004 file - promoters60/5664080
gaatggt

SEQ ID NO: 147547 - DNA, 7 bp, Unknown
  misc_feature (1)..( 7): Result.004 file - promoters60/5664080
gaatggt

SEQ ID NO: 147548 - DNA, 7 bp, Unknown
  misc_feature (1)..( 7): Result.004 file - promoters60/5664080
gaaaccc

SEQ ID NO: 147549 - DNA, 7 bp, Unknown
  misc_feature (1)..( 7): Result.004 file - promoters60/5664084
gaaaccc

SEQ ID NO: 147550 - DNA, 12 bp, Unknown
  misc_feature (1)..( 12): Result.004 file - promoters60/5664084
gaaaagcaaaac

SEQ ID NO: 147551 - DNA, 12 bp, Unknown
  misc_feature (1)..( 12): Result.004 file - promoters60/5664084
gaagagcaaaac

SEQ ID NO: 147552 - DNA, 8 bp, Unknown
  misc_feature (1)..( 8): Result.004 file - promoters60/5664084
aaagttaa

SEQ ID NO: 147553 - DNA, 8 bp, Unknown
  misc_feature (1)..( 8): Result.004 file - promoters60/5664084
aaaattaa

SEQ ID NO: 147554 - DNA, 8 bp, Unknown
  misc_feature (1)..( 8): Result.004 file - promoters60/5664084
taagttaa

SEQ ID NO: 147555 - DNA, 9 bp, Unknown
  misc_feature (1)..( 9): Result.004 file - promoters60/5664084
ttaaatttt

SEQ ID NO: 147556 - DNA, 9 bp, Unknown
  misc_feature (1)..( 9): Result.004 file - promoters60/5664084
ttaattttt

SEQ ID NO: 147557 - DNA, 7 bp, Unknown
  misc_feature (1)..( 7): Result.004 file - promoters60/5664084
cttcttg

SEQ ID NO: 147558 - DNA, 7 bp, Unknown
  misc_feature (1)..( 7): Result.004 file - promoters60/5664084
cttattg

SEQ ID NO: 147559 - DNA, 7 bp, Unknown
  misc_feature (1)..( 7): Result.004 file - promoters60/5664084
aaaaatc

SEQ ID NO: 147560 - DNA, 7 bp, Unknown
  misc_feature (1)..( 7): Result.004 file - promoters60/5664084
aaatatc

SEQ ID NO: 147561 - DNA, 6 bp, Unknown
  misc_feature (1)..( 6): Result.004 file - promoters60/5664084
aacaca

SEQ ID NO: 147562 - DNA, 6 bp, Unknown
  misc_feature (1)..( 6): Result.004 file - promoters60/5664084
aacaca

SEQ ID NO: 147563 - DNA, 10 bp, Unknown
  misc_feature (1)..( 10): Result.004 file - promoters60/5664084
agaaaccgaa

SEQ ID NO: 147564 - DNA, 10 bp, Unknown
  misc_feature (1)..( 10): Result.004 file - promoters60/5664084
agaaaacgaa

SEQ ID NO: 147565 - DNA, 6 bp, Unknown
  misc_feature (1)..( 6): Result.004 file - promoters60/5664084
ccaacc

SEQ ID NO: 147566 - DNA, 6 bp, Unknown
  misc_feature (1)..( 6): Result.004 file - promoters60/5664084
ccaacc

SEQ ID NO: 147567 - DNA, 7 bp, Unknown
  misc_feature (1)..( 7): Result.004 file - promoters60/5664084
aaatatt

SEQ ID NO: 147568 - DNA, 7 bp, Unknown
  misc_feature (1)..( 7): Result.004 file - promoters60/5664084
aaaaatt

SEQ ID NO: 147569 - DNA, 6 bp, Unknown
  misc_feature (1)..( 6): Result.004 file - promoters60/5664084
atataa

SEQ ID NO: 147570 - DNA, 6 bp, Unknown
  misc_feature (1)..( 6): Result.004 file - promoters60/5664084
atataa

SEQ ID NO: 147571 - DNA, 7 bp, Unknown
  misc_feature (1)..( 7): Result.004 file - promoters60/5664084
ccagaaa

SEQ ID NO: 147572 - DNA, 7 bp, Unknown
  misc_feature (1)..( 7): Result.004 file - promoters60/5664084
ccataaa

SEQ ID NO: 147573 - DNA, 7 bp, Unknown
  misc_feature (1)..( 7): Result.004 file - promoters60/5664084
tcgcttt

SEQ ID NO: 147574 - DNA, 7 bp, Unknown
  misc_feature (1)..( 7): Result.004 file - promoters60/5664084
tcgattt

SEQ ID NO: 147575 - DNA, 7 bp, Unknown
  misc_feature (1)..( 7): Result.004 file - promoters60/5664084
attataa

SEQ ID NO: 147576 - DNA, 7 bp, Unknown
  misc_feature (1)..( 7): Result.004 file - promoters60/5664126
attttaa

SEQ ID NO: 147577 - DNA, 8 bp, Unknown
  misc_feature (1)..( 8): Result.004 file - promoters60/5664126
attataca

SEQ ID NO: 147578 - DNA, 8 bp, Unknown
  misc_feature (1)..( 8): Result.004 file - promoters60/5664126
aatataca

SEQ ID NO: 147579 - DNA, 8 bp, Unknown
  misc_feature (1)..( 8): Result.004 file - promoters60/5664126
attctacc

SEQ ID NO: 147580 - DNA, 8 bp, Unknown
  misc_feature (1)..( 8): Result.004 file - promoters60/5664126
aaatatat

SEQ ID NO: 147581 - DNA, 8 bp, Unknown
  misc_feature (1)..( 8): Result.004 file - promoters60/5664126
aaatatat

SEQ ID NO: 147582 - DNA, 7 bp, Unknown
  misc_feature (1)..( 7): Result.004 file - promoters60/5664126
aacgtaa

SEQ ID NO: 147583 - DNA, 7 bp, Unknown
  misc_feature (1)..( 7): Result.004 file - promoters60/5664126
aacttaa

SEQ ID NO: 147584 - DNA, 7 bp, Unknown
  misc_feature (1)..( 7): Result.004 file - promoters60/5664126
atttgaa

SEQ ID NO: 147585 - DNA, 7 bp, Unknown
  misc_feature (1)..( 7): Result.004 file - promoters60/5664126
attggaa

SEQ ID NO: 147586 - DNA, 6 bp, Unknown
  misc_feature (1)..( 6): Result.004 file - promoters60/5664126
attttt

SEQ ID NO: 147587 - DNA, 6 bp, Unknown
  misc_feature (1)..( 6): Result.004 file - promoters60/5664126
attttt

SEQ ID NO: 147588 - DNA, 8 bp, Unknown
  misc_feature (1)..( 8): Result.004 file - promoters60/5664126
acagacac

SEQ ID NO: 147589 - DNA, 8 bp, Unknown
  misc_feature (1)..( 8): Result.004 file - promoters60/5664126
acacacac

SEQ ID NO: 147590 - DNA, 6 bp, Unknown
  misc_feature (1)..( 6): Result.004 file - promoters60/5664126
tcaaaa

SEQ ID NO: 147591 - DNA, 6 bp, Unknown
  misc_feature (1)..( 6): Result.004 file - promoters60/5664126
tcaaaa

SEQ ID NO: 147592 - DNA, 6 bp, Unknown
  misc_feature (1)..( 6): Result.004 file - promoters60/5664126
acataa

SEQ ID NO: 147593 - DNA, 6 bp, Unknown
  misc_feature (1)..( 6): Result.004 file - promoters60/5664126
acataa

SEQ ID NO: 147594 - DNA, 6 bp, Unknown
  misc_feature (1)..( 6): Result.004 file - promoters60/5664126
aattga

SEQ ID NO: 147595 - DNA, 6 bp, Unknown
  misc_feature (1)..( 6): Result.004 file - promoters60/5664126
aattga

SEQ ID NO: 147596 - DNA, 9 bp, Unknown
  misc_feature (1)..( 9): Result.004 file - promoters60/5664126
aacaaaaat

SEQ ID NO: 147597 - DNA, 9 bp, Unknown
  misc_feature (1)..( 9): Result.004 file - promoters60/5664126
aaccaaaat

SEQ ID NO: 147598 - DNA, 9 bp, Unknown
  misc_feature (1)..( 9): Result.004 file - promoters60/5664126
aaacccttt

SEQ ID NO: 147599 - DNA, 9 bp, Unknown
  misc_feature (1)..( 9): Result.004 file - promoters60/5664126
aaacccttt

SEQ ID NO: 147600 - DNA, 6 bp, Unknown
  misc_feature (1)..( 6): Result.004 file - promoters60/5664126
gaaaat

SEQ ID NO: 147601 - DNA, 6 bp, Unknown
  misc_feature (1)..( 6): Result.004 file - promoters60/5664126
gaaaat

SEQ ID NO: 147602 - DNA, 7 bp, Unknown
  misc_feature (1)..( 7): Result.004 file - promoters60/5664126
ttttttc

SEQ ID NO: 147603 - DNA, 7 bp, Unknown
  misc_feature (1)..( 7): Result.004 file - promoters60/5664126
tttgttc

SEQ ID NO: 147604 - DNA, 8 bp, Unknown
  misc_feature (1)..( 8): Result.004 file - promoters60/5664126
tttaggtc

SEQ ID NO: 147605 - DNA, 8 bp, Unknown
  misc_feature (1)..( 8): Result.004 file - promoters60/5664126
tttatgtc

SEQ ID NO: 147606 - DNA, 7 bp, Unknown
  misc_feature (1)..( 7): Result.004 file - promoters60/5664126
agataat

SEQ ID NO: 147607 - DNA, 7 bp, Unknown
  misc_feature (1)..( 7): Result.004 file - promoters60/5664126
agaaaat

SEQ ID NO: 147608 - DNA, 14 bp, Unknown
  misc_feature (1)..( 14): Result.004 file - promoters60/5664126
ggagtcagaaaaat

SEQ ID NO: 147609 - DNA, 14 bp, Unknown
  misc_feature (1)..( 14): Result.004 file - promoters60/5664126
taattcagaaaaat

SEQ ID NO: 147610 - DNA, 14 bp, Unknown
  misc_feature (1)..( 14): Result.004 file - promoters60/5664126
taattgagaatccg

SEQ ID NO: 147611 - DNA, 6 bp, Unknown
  misc_feature (1)..( 6): Result.004 file - promoters60/5664126
aatata

SEQ ID NO: 147612 - DNA, 6 bp, Unknown
  misc_feature (1)..( 6): Result.004 file - promoters60/5664126
aatata

SEQ ID NO: 147613 - DNA, 6 bp, Unknown
  misc_feature (1)..( 6): Result.004 file - promoters60/5664126
aaaatt

SEQ ID NO: 147614 - DNA, 6 bp, Unknown
  misc_feature (1)..( 6): Result.004 file - promoters60/5664126
aaaatt

SEQ ID NO: 147615 - DNA, 7 bp, Unknown
  misc_feature (1)..( 7): Result.004 file - promoters60/5664126
aactgaa

SEQ ID NO: 147616 - DNA, 7 bp, Unknown
  misc_feature (1)..( 7): Result.004 file - promoters60/5664126
aacagaa

SEQ ID NO: 147617 - DNA, 6 bp, Unknown
  misc_feature (1)..( 6): Result.004 file - promoters60/5664126
tgtaat

SEQ ID NO: 147618 - DNA, 6 bp, Unknown
  misc_feature (1)..( 6): Result.004 file - promoters60/5664126
tgtaat

SEQ ID NO: 147619 - DNA, 7 bp, Unknown
  misc_feature (1)..( 7): Result.004 file - promoters60/5664126
tttattt

SEQ ID NO: 147620 - DNA, 7 bp, Unknown
  misc_feature (1)..( 7): Result.004 file - promoters60/5664126
tttattt

SEQ ID NO: 147621 - DNA, 12 bp, Unknown
  misc_feature (1)..( 12): Result.004 file - promoters60/5664126
aaaagaaaaaac

SEQ ID NO: 147622 - DNA, 12 bp, Unknown
  misc_feature (1)..( 12): Result.004 file - promoters60/5664126
aaatgaaaaaac

SEQ ID NO: 147623 - DNA, 8 bp, Unknown
  misc_feature (1)..( 8): Result.004 file - promoters60/5664126
aatgttct

SEQ ID NO: 147624 - DNA, 8 bp, Unknown
  misc_feature (1)..( 8): Result.004 file - promoters60/5664126
aatgttct

SEQ ID NO: 147625 - DNA, 8 bp, Unknown
  misc_feature (1)..( 8): Result.004 file - promoters60/5664126
taatttgt

SEQ ID NO: 147626 - DNA, 8 bp, Unknown
  misc_feature (1)..( 8): Result.004 file - promoters60/5664126
taatttgt

SEQ ID NO: 147627 - DNA, 6 bp, Unknown
  misc_feature (1)..( 6): Result.004 file - promoters60/5664126
atgggc

SEQ ID NO: 147628 - DNA, 6 bp, Unknown
  misc_feature (1)..( 6): Result.004 file - promoters60/5664126
atgggc

SEQ ID NO: 147629 - DNA, 6 bp, Unknown
  misc_feature (1)..( 6): Result.004 file - promoters60/5664126
ggccca

SEQ ID NO: 147630 - DNA, 6 bp, Unknown
  misc_feature (1)..( 6): Result.004 file - promoters60/5664133
ggccca

SEQ ID NO: 147631 - DNA, 7 bp, Unknown
  misc_feature (1)..( 7): Result.004 file - promoters60/5664133
tcacaag

SEQ ID NO: 147632 - DNA, 7 bp, Unknown
  misc_feature (1)..( 7): Result.004 file - promoters60/5664133
tcacaaa

SEQ ID NO: 147633 - DNA, 7 bp, Unknown
  misc_feature (1)..( 7): Result.004 file - promoters60/5664133
ccacaaa

SEQ ID NO: 147634 - DNA, 9 bp, Unknown
  misc_feature (1)..( 9): Result.004 file - promoters60/5664133
aattaaaaa

SEQ ID NO: 147635 - DNA, 9 bp, Unknown
  misc_feature (1)..( 9): Result.004 file - promoters60/5664133
aattaagtt

SEQ ID NO: 147636 - DNA, 9 bp, Unknown
  misc_feature (1)..( 9): Result.004 file - promoters60/5664133
cattaagtt

SEQ ID NO: 147637 - DNA, 8 bp, Unknown
  misc_feature (1)..( 8): Result.004 file - promoters60/5664133
aacaaaac

SEQ ID NO: 147638 - DNA, 8 bp, Unknown
  misc_feature (1)..( 8): Result.004 file - promoters60/5664133
cacaaaac

SEQ ID NO: 147639 - DNA, 8 bp, Unknown
  misc_feature (1)..( 8): Result.004 file - promoters60/5664133
cacaaaca

SEQ ID NO: 147640 - DNA, 8 bp, Unknown
  misc_feature (1)..( 8): Result.004 file - promoters60/5664133
gaaaaaaa

SEQ ID NO: 147641 - DNA, 8 bp, Unknown
  misc_feature (1)..( 8): Result.004 file - promoters60/5664133
caaacaaa

SEQ ID NO: 147642 - DNA, 8 bp, Unknown
  misc_feature (1)..( 8): Result.004 file - promoters60/5664133
caaacata

SEQ ID NO: 147643 - DNA, 8 bp, Unknown
  misc_feature (1)..( 8): Result.004 file - promoters60/5664133
caaacata

SEQ ID NO: 147644 - DNA, 8 bp, Unknown
  misc_feature (1)..( 8): Result.004 file - promoters60/5664133
aaaacata

SEQ ID NO: 147645 - DNA, 8 bp, Unknown
  misc_feature (1)..( 8): Result.004 file - promoters60/5664133
caaacaaa

SEQ ID NO: 147646 - DNA, 9 bp, Unknown
  misc_feature (1)..( 9): Result.004 file - promoters60/5664133
taacaaaaa

SEQ ID NO: 147647 - DNA, 9 bp, Unknown
  misc_feature (1)..( 9): Result.004 file - promoters60/5664133
tcacaaaac

SEQ ID NO: 147648 - DNA, 9 bp, Unknown
  misc_feature (1)..( 9): Result.004 file - promoters60/5664133
tcacagaac

SEQ ID NO: 147649 - DNA, 9 bp, Unknown
  misc_feature (1)..( 9): Result.004 file - promoters60/5664133
ataaaaatg

SEQ ID NO: 147650 - DNA, 9 bp, Unknown
  misc_feature (1)..( 9): Result.004 file - promoters60/5664133
ataaacatg

SEQ ID NO: 147651 - DNA, 9 bp, Unknown
  misc_feature (1)..( 9): Result.004 file - promoters60/5664141
gtaaacaca

SEQ ID NO: 147652 - DNA, 11 bp, Unknown
  misc_feature (1)..( 11): Result.004 file - promoters60/5664141
ataaaaacact

SEQ ID NO: 147653 - DNA, 11 bp, Unknown
  misc_feature (1)..( 11): Result.004 file - promoters60/5664141
ctaaaaagaaa

SEQ ID NO: 147654 - DNA, 11 bp, Unknown
  misc_feature (1)..( 11): Result.004 file - promoters60/5664141
atataaatata

SEQ ID NO: 147655 - DNA, 11 bp, Unknown
  misc_feature (1)..( 11): Result.004 file - promoters60/5664141
ttaaaaatata

SEQ ID NO: 147656 - DNA, 11 bp, Unknown
  misc_feature (1)..( 11): Result.004 file - promoters60/5664141
ctataaacaaa

SEQ ID NO: 147657 - DNA, 10 bp, Unknown
  misc_feature (1)..( 10): Result.004 file - promoters60/5664141
tatttgtttt

SEQ ID NO: 147658 - DNA, 10 bp, Unknown
  misc_feature (1)..( 10): Result.004 file - promoters60/5664141
gatttgtttg

SEQ ID NO: 147659 - DNA, 10 bp, Unknown
  misc_feature (1)..( 10): Result.004 file - promoters60/5664141
gatttttttt

SEQ ID NO: 147660 - DNA, 10 bp, Unknown
  misc_feature (1)..( 10): Result.004 file - promoters60/5664141
gatttgagtt

SEQ ID NO: 147661 - DNA, 10 bp, Unknown
  misc_feature (1)..( 10): Result.004 file - promoters60/5664141
tattatttac

SEQ ID NO: 147662 - DNA, 11 bp, Unknown
  misc_feature (1)..( 11): Result.004 file - promoters60/5664141
aacgattaaat

SEQ ID NO: 147663 - DNA, 11 bp, Unknown
  misc_feature (1)..( 11): Result.004 file - promoters60/5664141
tctgataaaaa

SEQ ID NO: 147664 - DNA, 11 bp, Unknown
  misc_feature (1)..( 11): Result.004 file - promoters60/5664141
aacaattatgt

SEQ ID NO: 147665 - DNA, 11 bp, Unknown
  misc_feature (1)..( 11): Result.004 file - promoters60/5664141
tggaataaaaa

SEQ ID NO: 147666 - DNA, 11 bp, Unknown
  misc_feature (1)..( 11): Result.004 file - promoters60/5664141
gctcttaaaaa

SEQ ID NO: 147667 - DNA, 12 bp, Unknown
  misc_feature (1)..( 12): Result.004 file - promoters60/5664141
tagaattttctg

SEQ ID NO: 147668 - DNA, 12 bp, Unknown
  misc_feature (1)..( 12): Result.004 file - promoters60/5664141
atgaatttaaaa

SEQ ID NO: 147669 - DNA, 12 bp, Unknown
  misc_feature (1)..( 12): Result.004 file - promoters60/5664141
ttgagtttttat

SEQ ID NO: 147670 - DNA, 12 bp, Unknown
  misc_feature (1)..( 12): Result.004 file - promoters60/5664141
atgaaattatta

SEQ ID NO: 147671 - DNA, 12 bp, Unknown
  misc_feature (1)..( 12): Result.004 file - promoters60/5664141
taatttttaagt

SEQ ID NO: 147672 - DNA, 13 bp, Unknown
  misc_feature (1)..( 13): Result.004 file - promoters60/5664141
atgtataaaaaca

SEQ ID NO: 147673 - DNA, 13 bp, Unknown
  misc_feature (1)..( 13): Result.004 file - promoters60/5664141
cactataaacaaa

SEQ ID NO: 147674 - DNA, 13 bp, Unknown
  misc_feature (1)..( 13): Result.004 file - promoters60/5664141
tcatataaatata

SEQ ID NO: 147675 - DNA, 13 bp, Unknown
  misc_feature (1)..( 13): Result.004 file - promoters60/5664141
atgtttaattaaa

SEQ ID NO: 147676 - DNA, 13 bp, Unknown
  misc_feature (1)..( 13): Result.004 file - promoters60/5664153
ttctaaaaagaaa

SEQ ID NO: 147677 - DNA, 11 bp, Unknown
  misc_feature (1)..( 11): Result.004 file - promoters60/5664153
aagttatataa

SEQ ID NO: 147678 - DNA, 11 bp, Unknown
  misc_feature (1)..( 11): Result.004 file - promoters60/5664153
aagttatataa

SEQ ID NO: 147679 - DNA, 12 bp, Unknown
  misc_feature (1)..( 12): Result.004 file - promoters60/5664153
tttttatgatct

SEQ ID NO: 147680 - DNA, 7 bp, Unknown
  misc_feature (1)..( 7): Result.004 file - promoters60/5664153
tttaaaa

SEQ ID NO: 147681 - DNA, 7 bp, Unknown
  misc_feature (1)..( 7): Result.004 file - promoters60/5664153
tttcaaa

SEQ ID NO: 147682 - DNA, 7 bp, Unknown
  misc_feature (1)..( 7): Result.004 file - promoters60/5664153
tttcaaa

SEQ ID NO: 147683 - DNA, 6 bp, Unknown
  misc_feature (1)..( 6): Result.004 file - promoters60/5664153
ttagtt

SEQ ID NO: 147684 - DNA, 6 bp, Unknown
  misc_feature (1)..( 6): Result.004 file - promoters60/5664153
ttagtt

SEQ ID NO: 147685 - DNA, 10 bp, Unknown
  misc_feature (1)..( 10): Result.004 file - promoters60/5664153
gaactaaagt

SEQ ID NO: 147686 - DNA, 10 bp, Unknown
  misc_feature (1)..( 10): Result.004 file - promoters60/5664153
gaaccaaagt

SEQ ID NO: 147687 - DNA, 7 bp, Unknown
  misc_feature (1)..( 7): Result.004 file - promoters60/5664153
aacacac

SEQ ID NO: 147688 - DNA, 7 bp, Unknown
  misc_feature (1)..( 7): Result.004 file - promoters60/5664153
aacacac

SEQ ID NO: 147689 - DNA, 6 bp, Unknown
  misc_feature (1)..( 6): Result.004 file - promoters60/5664153
aacatt

SEQ ID NO: 147690 - DNA, 6 bp, Unknown
  misc_feature (1)..( 6): Result.004 file - promoters60/5664153
aacatt

SEQ ID NO: 147691 - DNA, 8 bp, Unknown
  misc_feature (1)..( 8): Result.004 file - promoters60/5664153
gtgagttc

SEQ ID NO: 147692 - DNA, 8 bp, Unknown
  misc_feature (1)..( 8): Result.004 file - promoters60/5664153
gtgagttc

SEQ ID NO: 147693 - DNA, 7 bp, Unknown
  misc_feature (1)..( 7): Result.004 file - promoters60/5664153
ttaattt

SEQ ID NO: 147694 - DNA, 7 bp, Unknown
  misc_feature (1)..( 7): Result.004 file - promoters60/5664153
ttagttt

SEQ ID NO: 147695 - DNA, 7 bp, Unknown
  misc_feature (1)..( 7): Result.004 file - promoters60/5664153
tgactct

SEQ ID NO: 147696 - DNA, 7 bp, Unknown
  misc_feature (1)..( 7): Result.004 file - promoters60/5664153
tgattct

SEQ ID NO: 147697 - DNA, 8 bp, Unknown
  misc_feature (1)..( 8): Result.004 file - promoters60/5664153
ataccaaa

SEQ ID NO: 147698 - DNA, 8 bp, Unknown
  misc_feature (1)..( 8): Result.004 file - promoters60/5664153
gtactaaa

SEQ ID NO: 147699 - DNA, 8 bp, Unknown
  misc_feature (1)..( 8): Result.004 file - promoters60/5664153
gtaataac

SEQ ID NO: 147700 - DNA, 7 bp, Unknown
  misc_feature (1)..( 7): Result.004 file - promoters60/5664153
ttcgtat

SEQ ID NO: 147701 - DNA, 7 bp, Unknown
  misc_feature (1)..( 7): Result.004 file - promoters60/5664153
ttcgtat

SEQ ID NO: 147702 - DNA, 6 bp, Unknown
  misc_feature (1)..( 6): Result.004 file - promoters60/5664153
cagaag

SEQ ID NO: 147703 - DNA, 6 bp, Unknown
  misc_feature (1)..( 6): Result.004 file - promoters60/5664153
cagaag

SEQ ID NO: 147704 - DNA, 7 bp, Unknown
  misc_feature (1)..( 7): Result.004 file - promoters60/5664153
aagtaat

SEQ ID NO: 147705 - DNA, 7 bp, Unknown
  misc_feature (1)..( 7): Result.004 file - promoters60/5664153
aagaaat

SEQ ID NO: 147706 - DNA, 7 bp, Unknown
  misc_feature (1)..( 7): Result.004 file - promoters60/5664153
ccaaaaa

SEQ ID NO: 147707 - DNA, 7 bp, Unknown
  misc_feature (1)..( 7): Result.004 file - promoters60/5664170
ccaaaaa

SEQ ID NO: 147708 - DNA, 7 bp, Unknown
  misc_feature (1)..( 7): Result.004 file - promoters60/5664170
cataatt

SEQ ID NO: 147709 - DNA, 7 bp, Unknown
  misc_feature (1)..( 7): Result.004 file - promoters60/5664170
cataatc

SEQ ID NO: 147710 - DNA, 7 bp, Unknown
  misc_feature (1)..( 7): Result.004 file - promoters60/5664170
cataatt

SEQ ID NO: 147711 - DNA, 7 bp, Unknown
  misc_feature (1)..( 7): Result.004 file - promoters60/5664170
atttttg

SEQ ID NO: 147712 - DNA, 7 bp, Unknown
  misc_feature (1)..( 7): Result.004 file - promoters60/5664170
gtttttg

SEQ ID NO: 147713 - DNA, 7 bp, Unknown
  misc_feature (1)..( 7): Result.004 file - promoters60/5664182
attttta

SEQ ID NO: 147714 - DNA, 11 bp, Unknown
  misc_feature (1)..( 11): Result.004 file - promoters60/5664182
cctcttcaaag

SEQ ID NO: 147715 - DNA, 11 bp, Unknown
  misc_feature (1)..( 11): Result.004 file - promoters60/5664182
catcttcagat

SEQ ID NO: 147716 - DNA, 11 bp, Unknown
  misc_feature (1)..( 11): Result.004 file - promoters60/5664182
cattttctcca

SEQ ID NO: 147717 - DNA, 11 bp, Unknown
  misc_feature (1)..( 11): Result.004 file - promoters60/5664182
cattttccaat

SEQ ID NO: 147718 - DNA, 11 bp, Unknown
  misc_feature (1)..( 11): Result.004 file - promoters60/5664182
ttttttcttga

SEQ ID NO: 147719 - DNA, 11 bp, Unknown
  misc_feature (1)..( 11): Result.004 file - promoters60/5664182
aatttttactt

SEQ ID NO: 147720 - DNA, 11 bp, Unknown
  misc_feature (1)..( 11): Result.004 file - promoters60/5664182
cattttttcct

SEQ ID NO: 147721 - DNA, 16 bp, Unknown
  misc_feature (1)..( 16): Result.004 file - promoters60/5664182
tggttctttttgtgtg

SEQ ID NO: 147722 - DNA, 16 bp, Unknown
  misc_feature (1)..( 16): Result.004 file - promoters60/5664182
ttgggctttttaagcc

SEQ ID NO: 147723 - DNA, 16 bp, Unknown
  misc_feature (1)..( 16): Result.004 file - promoters60/5664182
ttcatctctttattat

SEQ ID NO: 147724 - DNA, 16 bp, Unknown
  misc_feature (1)..( 16): Result.004 file - promoters60/5664182
ttgggcttcttatatc

SEQ ID NO: 147725 - DNA, 16 bp, Unknown
  misc_feature (1)..( 16): Result.004 file - promoters60/5664182
tattaaagtttgggcc

SEQ ID NO: 147726 - DNA, 16 bp, Unknown
  misc_feature (1)..( 16): Result.004 file - promoters60/5664216
cttaagtaaatgggcc

SEQ ID NO: 147727 - DNA, 8 bp, Unknown
  misc_feature (1)..( 8): Result.004 file - promoters60/5664216
taaaacca

SEQ ID NO: 147728 - DNA, 8 bp, Unknown
  misc_feature (1)..( 8): Result.004 file - promoters60/5664216
taaaacag

SEQ ID NO: 147729 - DNA, 8 bp, Unknown
  misc_feature (1)..( 8): Result.004 file - promoters60/5664216
taaagcca

SEQ ID NO: 147730 - DNA, 8 bp, Unknown
  misc_feature (1)..( 8): Result.004 file - promoters60/5664216
taacacat

SEQ ID NO: 147731 - DNA, 8 bp, Unknown
  misc_feature (1)..( 8): Result.004 file - promoters60/5664216
gttaaata

SEQ ID NO: 147732 - DNA, 8 bp, Unknown
  misc_feature (1)..( 8): Result.004 file - promoters60/5664216
tataaata

SEQ ID NO: 147733 - DNA, 8 bp, Unknown
  misc_feature (1)..( 8): Result.004 file - promoters60/5664216
tataaata

SEQ ID NO: 147734 - DNA, 8 bp, Unknown
  misc_feature (1)..( 8): Result.004 file - promoters60/5664222
tataaatc

SEQ ID NO: 147735 - DNA, 9 bp, Unknown
  misc_feature (1)..( 9): Result.004 file - promoters60/5664222
ttggtcaaa

SEQ ID NO: 147736 - DNA, 9 bp, Unknown
  misc_feature (1)..( 9): Result.004 file - promoters60/5664222
ttgttcaaa

SEQ ID NO: 147737 - DNA, 7 bp, Unknown
  misc_feature (1)..( 7): Result.004 file - promoters60/5664222
aaagcaa

SEQ ID NO: 147738 - DNA, 7 bp, Unknown
  misc_feature (1)..( 7): Result.004 file - promoters60/5664222
aaaccaa

SEQ ID NO: 147739 - DNA, 9 bp, Unknown
  misc_feature (1)..( 9): Result.004 file - promoters60/5664222
agaaccaaa

SEQ ID NO: 147740 - DNA, 9 bp, Unknown
  misc_feature (1)..( 9): Result.004 file - promoters60/5664222
agaaccaaa

SEQ ID NO: 147741 - DNA, 7 bp, Unknown
  misc_feature (1)..( 7): Result.004 file - promoters60/5664222
caaacac

SEQ ID NO: 147742 - DNA, 7 bp, Unknown
  misc_feature (1)..( 7): Result.004 file - promoters60/5664222
caaccac

SEQ ID NO: 147743 - DNA, 6 bp, Unknown
  misc_feature (1)..( 6): Result.004 file - promoters60/5664222
tatcta

SEQ ID NO: 147744 - DNA, 6 bp, Unknown
  misc_feature (1)..( 6): Result.004 file - promoters60/5664222
tatcta

SEQ ID NO: 147745 - DNA, 8 bp, Unknown
  misc_feature (1)..( 8): Result.004 file - promoters60/5664222
gaaactca

SEQ ID NO: 147746 - DNA, 8 bp, Unknown
  misc_feature (1)..( 8): Result.004 file - promoters60/5664222
gaatctca

SEQ ID NO: 147747 - DNA, 9 bp, Unknown
  misc_feature (1)..( 9): Result.004 file - promoters60/5664222
attcatttt

SEQ ID NO: 147748 - DNA, 9 bp, Unknown
  misc_feature (1)..( 9): Result.004 file - promoters60/5664222
attcacttt

SEQ ID NO: 147749 - DNA, 8 bp, Unknown
  misc_feature (1)..( 8): Result.004 file - promoters60/5664222
accggttt

SEQ ID NO: 147750 - DNA, 8 bp, Unknown
  misc_feature (1)..( 8): Result.004 file - promoters60/5664222
acccgttt

SEQ ID NO: 147751 - DNA, 7 bp, Unknown
  misc_feature (1)..( 7): Result.004 file - promoters60/5664222
tcataat

SEQ ID NO: 147752 - DNA, 7 bp, Unknown
  misc_feature (1)..( 7): Result.004 file - promoters60/5664222
tcataat

SEQ ID NO: 147753 - DNA, 6 bp, Unknown
  misc_feature (1)..( 6): Result.004 file - promoters60/5664222
attgtt

SEQ ID NO: 147754 - DNA, 6 bp, Unknown
  misc_feature (1)..( 6): Result.004 file - promoters60/5664263
attgtt

SEQ ID NO: 147755 - DNA, 9 bp, Unknown
  misc_feature (1)..( 9): Result.004 file - promoters60/5664263
ccaataatt

SEQ ID NO: 147756 - DNA, 9 bp, Unknown
  misc_feature (1)..( 9): Result.004 file - promoters60/5664263
ggaatgatt

SEQ ID NO: 147757 - DNA, 9 bp, Unknown
  misc_feature (1)..( 9): Result.004 file - promoters60/5664263
tctatgatt

SEQ ID NO: 147758 - DNA, 9 bp, Unknown
  misc_feature (1)..( 9): Result.004 file - promoters60/5664263
ttaatgata

SEQ ID NO: 147759 - DNA, 9 bp, Unknown
  misc_feature (1)..( 9): Result.004 file - promoters60/5664263
tgtattatt

SEQ ID NO: 147760 - DNA, 9 bp, Unknown
  misc_feature (1)..( 9): Result.004 file - promoters60/5664268
tgtattaca

SEQ ID NO: 147761 - DNA, 7 bp, Unknown
  misc_feature (1)..( 7): Result.004 file - promoters60/5664268
gagacga

SEQ ID NO: 147762 - DNA, 7 bp, Unknown
  misc_feature (1)..( 7): Result.004 file - promoters60/5664268
gaggcga

SEQ ID NO: 147763 - DNA, 7 bp, Unknown
  misc_feature (1)..( 7): Result.004 file - promoters60/5664268
gtaacat

SEQ ID NO: 147764 - DNA, 7 bp, Unknown
  misc_feature (1)..( 7): Result.004 file - promoters60/5664268
gtatcat

SEQ ID NO: 147765 - DNA, 7 bp, Unknown
  misc_feature (1)..( 7): Result.004 file - promoters60/5664268
aactatg

SEQ ID NO: 147766 - DNA, 7 bp, Unknown
  misc_feature (1)..( 7): Result.004 file - promoters60/5664268
aacgatg

SEQ ID NO: 147767 - DNA, 8 bp, Unknown
  misc_feature (1)..( 8): Result.004 file - promoters60/5664268
gtgtgaac

SEQ ID NO: 147768 - DNA, 8 bp, Unknown
  misc_feature (1)..( 8): Result.004 file - promoters60/5664268
gtgttaac

SEQ ID NO: 147769 - DNA, 7 bp, Unknown
  misc_feature (1)..( 7): Result.004 file - promoters60/5664268
ctatatt

SEQ ID NO: 147770 - DNA, 7 bp, Unknown
  misc_feature (1)..( 7): Result.004 file - promoters60/5664268
ctatatt

SEQ ID NO: 147771 - DNA, 9 bp, Unknown
  misc_feature (1)..( 9): Result.004 file - promoters60/5664268
atacaccaa

SEQ ID NO: 147772 - DNA, 9 bp, Unknown
  misc_feature (1)..( 9): Result.004 file - promoters60/5664268
ataaaccaa

SEQ ID NO: 147773 - DNA, 6 bp, Unknown
  misc_feature (1)..( 6): Result.004 file - promoters60/5664268
atttaa

SEQ ID NO: 147774 - DNA, 6 bp, Unknown
  misc_feature (1)..( 6): Result.004 file - promoters60/5664268
atttaa

SEQ ID NO: 147775 - DNA, 6 bp, Unknown
  misc_feature (1)..( 6): Result.004 file - promoters60/5664268
gatttg

SEQ ID NO: 147776 - DNA, 6 bp, Unknown
  misc_feature (1)..( 6): Result.004 file - promoters60/5664268
gatttg

SEQ ID NO: 147777 - DNA, 7 bp, Unknown
  misc_feature (1)..( 7): Result.004 file - promoters60/5664268
caaatcg

SEQ ID NO: 147778 - DNA, 7 bp, Unknown
  misc_feature (1)..( 7): Result.004 file - promoters60/5664268
caattcg

SEQ ID NO: 147779 - DNA, 9 bp, Unknown
  misc_feature (1)..( 9): Result.004 file - promoters60/5664268
gatagcaac

SEQ ID NO: 147780 - DNA, 9 bp, Unknown
  misc_feature (1)..( 9): Result.004 file - promoters60/5664268
gataccaac

SEQ ID NO: 147781 - DNA, 6 bp, Unknown
  misc_feature (1)..( 6): Result.004 file - promoters60/5664268
gaacta

SEQ ID NO: 147782 - DNA, 6 bp, Unknown
  misc_feature (1)..( 6): Result.004 file - promoters60/5664268
gaacta

SEQ ID NO: 147783 - DNA, 7 bp, Unknown
  misc_feature (1)..( 7): Result.004 file - promoters60/5664268
tcataat

SEQ ID NO: 147784 - DNA, 7 bp, Unknown
  misc_feature (1)..( 7): Result.004 file - promoters60/5664268
tcataat

SEQ ID NO: 147785 - DNA, 6 bp, Unknown
  misc_feature (1)..( 6): Result.004 file - promoters60/5664268
attgtt

SEQ ID NO: 147786 - DNA, 6 bp, Unknown
  misc_feature (1)..( 6): Result.004 file - promoters60/5664290
attgtt

SEQ ID NO: 147787 - DNA, 6 bp, Unknown
  misc_feature (1)..( 6): Result.004 file - promoters60/5664290
aatttt

SEQ ID NO: 147788 - DNA, 6 bp, Unknown
  misc_feature (1)..( 6): Result.004 file - promoters60/5664290
aatttt

SEQ ID NO: 147789 - DNA, 6 bp, Unknown
  misc_feature (1)..( 6): Result.004 file - promoters60/5664290
aacgaa

SEQ ID NO: 147790 - DNA, 6 bp, Unknown
  misc_feature (1)..( 6): Result.004 file - promoters60/5664290
aacgaa

SEQ ID NO: 147791 - DNA, 8 bp, Unknown
  misc_feature (1)..( 8): Result.004 file - promoters60/5664290
tatgtttt

SEQ ID NO: 147792 - DNA, 8 bp, Unknown
  misc_feature (1)..( 8): Result.004 file - promoters60/5664290
tatgcttt

SEQ ID NO: 147793 - DNA, 8 bp, Unknown
  misc_feature (1)..( 8): Result.004 file - promoters60/5664290
ttaccaaa

SEQ ID NO: 147794 - DNA, 8 bp, Unknown
  misc_feature (1)..( 8): Result.004 file - promoters60/5664290
ttaccaaa

SEQ ID NO: 147795 - DNA, 7 bp, Unknown
  misc_feature (1)..( 7): Result.004 file - promoters60/5664290
attttca

SEQ ID NO: 147796 - DNA, 7 bp, Unknown
  misc_feature (1)..( 7): Result.004 file - promoters60/5664290
attctca

SEQ ID NO: 147797 - DNA, 8 bp, Unknown
  misc_feature (1)..( 8): Result.004 file - promoters60/5664290
tggaatcc

SEQ ID NO: 147798 - DNA, 8 bp, Unknown
  misc_feature (1)..( 8): Result.004 file - promoters60/5664290
tggtatcc

SEQ ID NO: 147799 - DNA, 7 bp, Unknown
  misc_feature (1)..( 7): Result.004 file - promoters60/5664290
atcatgc

SEQ ID NO: 147800 - DNA, 7 bp, Unknown
  misc_feature (1)..( 7): Result.004 file - promoters60/5664294
atcctgc

SEQ ID NO: 147801 - DNA, 8 bp, Unknown
  misc_feature (1)..( 8): Result.004 file - promoters60/5664294
caaaccga

SEQ ID NO: 147802 - DNA, 8 bp, Unknown
  misc_feature (1)..( 8): Result.004 file - promoters60/5664294
aaaatcga

SEQ ID NO: 147803 - DNA, 8 bp, Unknown
  misc_feature (1)..( 8): Result.004 file - promoters60/5664294
aaaatctg

SEQ ID NO: 147804 - DNA, 8 bp, Unknown
  misc_feature (1)..( 8): Result.004 file - promoters60/5664294
gataaaaa

SEQ ID NO: 147805 - DNA, 8 bp, Unknown
  misc_feature (1)..( 8): Result.004 file - promoters60/5664294
tatataaa

SEQ ID NO: 147806 - DNA, 8 bp, Unknown
  misc_feature (1)..( 8): Result.004 file - promoters60/5664294
gataaatg

SEQ ID NO: 147807 - DNA, 9 bp, Unknown
  misc_feature (1)..( 9): Result.004 file - promoters60/5664294
ctttataat

SEQ ID NO: 147808 - DNA, 9 bp, Unknown
  misc_feature (1)..( 9): Result.004 file - promoters60/5664294
cattaaaat

SEQ ID NO: 147809 - DNA, 10 bp, Unknown
  misc_feature (1)..( 10): Result.004 file - promoters60/5664298
acttcataga

SEQ ID NO: 147810 - DNA, 10 bp, Unknown
  misc_feature (1)..( 10): Result.004 file - promoters60/5664298
cacaaaaata

SEQ ID NO: 147811 - DNA, 10 bp, Unknown
  misc_feature (1)..( 10): Result.004 file - promoters60/5664298
cacaagaatt

SEQ ID NO: 147812 - DNA, 10 bp, Unknown
  misc_feature (1)..( 10): Result.004 file - promoters60/5664298
tataaatata

SEQ ID NO: 147813 - DNA, 10 bp, Unknown
  misc_feature (1)..( 10): Result.004 file - promoters60/5664298
tacaaaaaag

SEQ ID NO: 147814 - DNA, 10 bp, Unknown
  misc_feature (1)..( 10): Result.004 file - promoters60/5664298
tttaagaata

SEQ ID NO: 147815 - DNA, 9 bp, Unknown
  misc_feature (1)..( 9): Result.004 file - promoters60/5664302
ttaagaatg

SEQ ID NO: 147816 - DNA, 7 bp, Unknown
  misc_feature (1)..( 7): Result.004 file - promoters60/5664302
tggttat

SEQ ID NO: 147817 - DNA, 7 bp, Unknown
  misc_feature (1)..( 7): Result.004 file - promoters60/5664302
tggttat

SEQ ID NO: 147818 - DNA, 8 bp, Unknown
  misc_feature (1)..( 8): Result.004 file - promoters60/5664302
caaaagga

SEQ ID NO: 147819 - DNA, 8 bp, Unknown
  misc_feature (1)..( 8): Result.004 file - promoters60/5664302
caaacgga

SEQ ID NO: 147820 - DNA, 10 bp, Unknown
  misc_feature (1)..( 10): Result.004 file - promoters60/5664302
agcaggaaga

SEQ ID NO: 147821 - DNA, 10 bp, Unknown
  misc_feature (1)..( 10): Result.004 file - promoters60/5664302
agcaggaaga

SEQ ID NO: 147822 - DNA, 7 bp, Unknown
  misc_feature (1)..( 7): Result.004 file - promoters60/5664302
tataaat

SEQ ID NO: 147823 - DNA, 7 bp, Unknown
  misc_feature (1)..( 7): Result.004 file - promoters60/5664302
tattaat

SEQ ID NO: 147824 - DNA, 7 bp, Unknown
  misc_feature (1)..( 7): Result.004 file - promoters60/5664302
ttggaaa

SEQ ID NO: 147825 - DNA, 7 bp, Unknown
  misc_feature (1)..( 7): Result.004 file - promoters60/5664302
ttgtaaa

SEQ ID NO: 147826 - DNA, 6 bp, Unknown
  misc_feature (1)..( 6): Result.004 file - promoters60/5664302
aaataa

SEQ ID NO: 147827 - DNA, 6 bp, Unknown
  misc_feature (1)..( 6): Result.004 file - promoters60/5664302
aaataa

SEQ ID NO: 147828 - DNA, 6 bp, Unknown
  misc_feature (1)..( 6): Result.004 file - promoters60/5664302
ttaaaa

SEQ ID NO: 147829 - DNA, 6 bp, Unknown
  misc_feature (1)..( 6): Result.004 file - promoters60/5664302
ttaaaa

SEQ ID NO: 147830 - DNA, 10 bp, Unknown
  misc_feature (1)..( 10): Result.004 file - promoters60/5664302
accttaaaaa

SEQ ID NO: 147831 - DNA, 10 bp, Unknown
  misc_feature (1)..( 10): Result.004 file - promoters60/5664302
accttaaaaa

SEQ ID NO: 147832 - DNA, 7 bp, Unknown
  misc_feature (1)..( 7): Result.004 file - promoters60/5664302
aaagcct

SEQ ID NO: 147833 - DNA, 7 bp, Unknown
  misc_feature (1)..( 7): Result.004 file - promoters60/5664302
aaaacct

SEQ ID NO: 147834 - DNA, 6 bp, Unknown
  misc_feature (1)..( 6): Result.004 file - promoters60/5664302
ttaaaa

SEQ ID NO: 147835 - DNA, 6 bp, Unknown
  misc_feature (1)..( 6): Result.004 file - promoters60/5664302
ttaaaa

SEQ ID NO: 147836 - DNA, 8 bp, Unknown
  misc_feature (1)..( 8): Result.004 file - promoters60/5664302
aaaataaa

SEQ ID NO: 147837 - DNA, 8 bp, Unknown
  misc_feature (1)..( 8): Result.004 file - promoters60/5664302
aaattaaa

SEQ ID NO: 147838 - DNA, 7 bp, Unknown
  misc_feature (1)..( 7): Result.004 file - promoters60/5664302
aaaccta

SEQ ID NO: 147839 - DNA, 7 bp, Unknown
  misc_feature (1)..( 7): Result.004 file - promoters60/5664302
aaatcta

SEQ ID NO: 147840 - DNA, 11 bp, Unknown
  misc_feature (1)..( 11): Result.004 file - promoters60/5664302
ataaaccaaaa

SEQ ID NO: 147841 - DNA, 11 bp, Unknown
  misc_feature (1)..( 11): Result.004 file - promoters60/5664302
ataaacctaaa

SEQ ID NO: 147842 - DNA, 6 bp, Unknown
  misc_feature (1)..( 6): Result.004 file - promoters60/5664302
aaaata

SEQ ID NO: 147843 - DNA, 6 bp, Unknown
  misc_feature (1)..( 6): Result.004 file - promoters60/5664302
aaaata

SEQ ID NO: 147844 - DNA, 6 bp, Unknown
  misc_feature (1)..( 6): Result.004 file - promoters60/5664302
ccaaaa

SEQ ID NO: 147845 - DNA, 6 bp, Unknown
  misc_feature (1)..( 6): Result.004 file - promoters60/5664302
ccaaaa

SEQ ID NO: 147846 - DNA, 6 bp, Unknown
  misc_feature (1)..( 6): Result.004 file - promoters60/5664302
ccaaaa

SEQ ID NO: 147847 - DNA, 6 bp, Unknown
  misc_feature (1)..( 6): Result.004 file - promoters60/5664302
ccaaaa

SEQ ID NO: 147848 - DNA, 7 bp, Unknown
  misc_feature (1)..( 7): Result.004 file - promoters60/5664302
aaattca

SEQ ID NO: 147849 - DNA, 7 bp, Unknown
  misc_feature (1)..( 7): Result.004 file - promoters60/5664302
aaaatca

SEQ ID NO: 147850 - DNA, 7 bp, Unknown
  misc_feature (1)..( 7): Result.004 file - promoters60/5664302
tcataaa

SEQ ID NO: 147851 - DNA, 7 bp, Unknown
  misc_feature (1)..( 7): Result.004 file - promoters60/5664302
tcataaa

SEQ ID NO: 147852 - DNA, 10 bp, Unknown
  misc_feature (1)..( 10): Result.004 file - promoters60/5664302
caataattca

SEQ ID NO: 147853 - DNA, 10 bp, Unknown
  misc_feature (1)..( 10): Result.004 file - promoters60/5664302
caaaaattca

SEQ ID NO: 147854 - DNA, 8 bp, Unknown
  misc_feature (1)..( 8): Result.004 file - promoters60/5664302
tgtattat

SEQ ID NO: 147855 - DNA, 8 bp, Unknown
  misc_feature (1)..( 8): Result.004 file - promoters60/5664302
tgtaatat

SEQ ID NO: 147856 - DNA, 7 bp, Unknown
  misc_feature (1)..( 7): Result.004 file - promoters60/5664302
aattggt

SEQ ID NO: 147857 - DNA, 7 bp, Unknown
  misc_feature (1)..( 7): Result.004 file - promoters60/5664302
aattggt

SEQ ID NO: 147858 - DNA, 6 bp, Unknown
  misc_feature (1)..( 6): Result.004 file - promoters60/5664302
ggttat

SEQ ID NO: 147859 - DNA, 6 bp, Unknown
  misc_feature (1)..( 6): Result.004 file - promoters60/5664302
ggttat

SEQ ID NO: 147860 - DNA, 7 bp, Unknown
  misc_feature (1)..( 7): Result.004 file - promoters60/5664302
ggaagat

SEQ ID NO: 147861 - DNA, 7 bp, Unknown
  misc_feature (1)..( 7): Result.004 file - promoters60/5664311
ggaagat

SEQ ID NO: 147862 - DNA, 10 bp, Unknown
  misc_feature (1)..( 10): Result.004 file - promoters60/5664311
taaaagtggc

SEQ ID NO: 147863 - DNA, 10 bp, Unknown
  misc_feature (1)..( 10): Result.004 file - promoters60/5664311
aaaaagttat

SEQ ID NO: 147864 - DNA, 10 bp, Unknown
  misc_feature (1)..( 10): Result.004 file - promoters60/5664311
aaaaagtttc

SEQ ID NO: 147865 - DNA, 10 bp, Unknown
  misc_feature (1)..( 10): Result.004 file - promoters60/5664311
ccaaagaaag

SEQ ID NO: 147866 - DNA, 10 bp, Unknown
  misc_feature (1)..( 10): Result.004 file - promoters60/5664311
caaaatttga

SEQ ID NO: 147867 - DNA, 10 bp, Unknown
  misc_feature (1)..( 10): Result.004 file - promoters60/5664311
caaacaaatc

SEQ ID NO: 147868 - DNA, 10 bp, Unknown
  misc_feature (1)..( 10): Result.004 file - promoters60/5664311
caaaacacat

SEQ ID NO: 147869 - DNA, 10 bp, Unknown
  misc_feature (1)..( 10): Result.004 file - promoters60/5664311
caaaacatcc

SEQ ID NO: 147870 - DNA, 10 bp, Unknown
  misc_feature (1)..( 10): Result.004 file - promoters60/5664311
taaaacaaaa

SEQ ID NO: 147871 - DNA, 10 bp, Unknown
  misc_feature (1)..( 10): Result.004 file - promoters60/5664311
caaaagacac

SEQ ID NO: 147872 - DNA, 10 bp, Unknown
  misc_feature (1)..( 10): Result.004 file - promoters60/5664311
gcaaataaat

SEQ ID NO: 147873 - DNA, 10 bp, Unknown
  misc_feature (1)..( 10): Result.004 file - promoters60/5664311
ctaaacaaaa

SEQ ID NO: 147874 - DNA, 14 bp, Unknown
  misc_feature (1)..( 14): Result.004 file - promoters60/5664311
tctctcaaagattt

SEQ ID NO: 147875 - DNA, 14 bp, Unknown
  misc_feature (1)..( 14): Result.004 file - promoters60/5664311
agtttcaaagaaag

SEQ ID NO: 147876 - DNA, 14 bp, Unknown
  misc_feature (1)..( 14): Result.004 file - promoters60/5664311
tctttcaaaatttg

SEQ ID NO: 147877 - DNA, 14 bp, Unknown
  misc_feature (1)..( 14): Result.004 file - promoters60/5664311
aaaaccaaagaaag

SEQ ID NO: 147878 - DNA, 14 bp, Unknown
  misc_feature (1)..( 14): Result.004 file - promoters60/5664311
gtggagaaaaaaag

SEQ ID NO: 147879 - DNA, 14 bp, Unknown
  misc_feature (1)..( 14): Result.004 file - promoters60/5664329
cctatcaaacaaat

SEQ ID NO: 147880 - DNA, 8 bp, Unknown
  misc_feature (1)..( 8): Result.004 file - promoters60/5664329
aaataaaa

SEQ ID NO: 147881 - DNA, 8 bp, Unknown
  misc_feature (1)..( 8): Result.004 file - promoters60/5664329
aaataatt

SEQ ID NO: 147882 - DNA, 8 bp, Unknown
  misc_feature (1)..( 8): Result.004 file - promoters60/5664329
taataaaa

SEQ ID NO: 147883 - DNA, 9 bp, Unknown
  misc_feature (1)..( 9): Result.004 file - promoters60/5664329
gtctttttc

SEQ ID NO: 147884 - DNA, 9 bp, Unknown
  misc_feature (1)..( 9): Result.004 file - promoters60/5664329
gtctctttc

SEQ ID NO: 147885 - DNA, 7 bp, Unknown
  misc_feature (1)..( 7): Result.004 file - promoters60/5664329
tttttgt

SEQ ID NO: 147886 - DNA, 7 bp, Unknown
  misc_feature (1)..( 7): Result.004 file - promoters60/5664329
tttttgt

SEQ ID NO: 147887 - DNA, 6 bp, Unknown
  misc_feature (1)..( 6): Result.004 file - promoters60/5664329
aaaaaa

SEQ ID NO: 147888 - DNA, 6 bp, Unknown
  misc_feature (1)..( 6): Result.004 file - promoters60/5664329
aaaaaa

SEQ ID NO: 147889 - DNA, 6 bp, Unknown
  misc_feature (1)..( 6): Result.004 file - promoters60/5664329
taaaaa

SEQ ID NO: 147890 - DNA, 6 bp, Unknown
  misc_feature (1)..( 6): Result.004 file - promoters60/5664329
taaaaa

SEQ ID NO: 147891 - DNA, 9 bp, Unknown
  misc_feature (1)..( 9): Result.004 file - promoters60/5664329
acaaatttt

SEQ ID NO: 147892 - DNA, 9 bp, Unknown
  misc_feature (1)..( 9): Result.004 file - promoters60/5664329
acatatttt

SEQ ID NO: 147893 - DNA, 10 bp, Unknown
  misc_feature (1)..( 10): Result.004 file - promoters60/5664329
aaaaataaat

SEQ ID NO: 147894 - DNA, 10 bp, Unknown
  misc_feature (1)..( 10): Result.004 file - promoters60/5664329
aaaaagaaat

SEQ ID NO: 147895 - DNA, 8 bp, Unknown
  misc_feature (1)..( 8): Result.004 file - promoters60/5664329
attacaag

SEQ ID NO: 147896 - DNA, 8 bp, Unknown
  misc_feature (1)..( 8): Result.004 file - promoters60/5664329
attataag

SEQ ID NO: 147897 - DNA, 7 bp, Unknown
  misc_feature (1)..( 7): Result.004 file - promoters60/5664329
aaacaaa

SEQ ID NO: 147898 - DNA, 7 bp, Unknown
  misc_feature (1)..( 7): Result.004 file - promoters60/5664329
aaataaa

SEQ ID NO: 147899 - DNA, 6 bp, Unknown
  misc_feature (1)..( 6): Result.004 file - promoters60/5664329
tgtaca

SEQ ID NO: 147900 - DNA, 6 bp, Unknown
  misc_feature (1)..( 6): Result.004 file - promoters60/5664329
tgtaca

SEQ ID NO: 147901 - DNA, 6 bp, Unknown
  misc_feature (1)..( 6): Result.004 file - promoters60/5664329
ataaaa

SEQ ID NO: 147902 - DNA, 6 bp, Unknown
  misc_feature (1)..( 6): Result.004 file - promoters60/5664329
ataaaa

SEQ ID NO: 147903 - DNA, 8 bp, Unknown
  misc_feature (1)..( 8): Result.004 file - promoters60/5664329
agatgtct

SEQ ID NO: 147904 - DNA, 8 bp, Unknown
  misc_feature (1)..( 8): Result.004 file - promoters60/5664329
agatatct

SEQ ID NO: 147905 - DNA, 8 bp, Unknown
  misc_feature (1)..( 8): Result.004 file - promoters60/5664329
tttactag

SEQ ID NO: 147906 - DNA, 8 bp, Unknown
  misc_feature (1)..( 8): Result.004 file - promoters60/5664329
tttaatag

SEQ ID NO: 147907 - DNA, 9 bp, Unknown
  misc_feature (1)..( 9): Result.004 file - promoters60/5664329
atataataa

SEQ ID NO: 147908 - DNA, 9 bp, Unknown
  misc_feature (1)..( 9): Result.004 file - promoters60/5664329
atatagtaa

SEQ ID NO: 147909 - DNA, 6 bp, Unknown
  misc_feature (1)..( 6): Result.004 file - promoters60/5664329
ttttaa

SEQ ID NO: 147910 - DNA, 6 bp, Unknown
  misc_feature (1)..( 6): Result.004 file - promoters60/5664329
ttttaa

SEQ ID NO: 147911 - DNA, 6 bp, Unknown
  misc_feature (1)..( 6): Result.004 file - promoters60/5664329
cttcca

SEQ ID NO: 147912 - DNA, 6 bp, Unknown
  misc_feature (1)..( 6): Result.004 file - promoters60/5664329
cttcca

SEQ ID NO: 147913 - DNA, 6 bp, Unknown
  misc_feature (1)..( 6): Result.004 file - promoters60/5664329
aaaaat

SEQ ID NO: 147914 - DNA, 6 bp, Unknown
  misc_feature (1)..( 6): Result.004 file - promoters60/5664341
aaaaat

SEQ ID NO: 147915 - DNA, 7 bp, Unknown
  misc_feature (1)..( 7): Result.004 file - promoters60/5664341
ttccctt

SEQ ID NO: 147916 - DNA, 7 bp, Unknown
  misc_feature (1)..( 7): Result.004 file - promoters60/5664341
ttcgctt

SEQ ID NO: 147917 - DNA, 6 bp, Unknown
  misc_feature (1)..( 6): Result.004 file - promoters60/5664341
ctttct

SEQ ID NO: 147918 - DNA, 6 bp, Unknown
  misc_feature (1)..( 6): Result.004 file - promoters60/5664341
ctttct

SEQ ID NO: 147919 - DNA, 6 bp, Unknown
  misc_feature (1)..( 6): Result.004 file - promoters60/5664341
ttctct

SEQ ID NO: 147920 - DNA, 6 bp, Unknown
  misc_feature (1)..( 6): Result.004 file - promoters60/5664341
ttctct

SEQ ID NO: 147921 - DNA, 6 bp, Unknown
  misc_feature (1)..( 6): Result.004 file - promoters60/5664341
ttctat

SEQ ID NO: 147922 - DNA, 6 bp, Unknown
  misc_feature (1)..( 6): Result.004 file - promoters60/5664341
ttctat

SEQ ID NO: 147923 - DNA, 7 bp, Unknown
  misc_feature (1)..( 7): Result.004 file - promoters60/5664341
tatctat

SEQ ID NO: 147924 - DNA, 7 bp, Unknown
  misc_feature (1)..( 7): Result.004 file - promoters60/5664341
tatctat

SEQ ID NO: 147925 - DNA, 7 bp, Unknown
  misc_feature (1)..( 7): Result.004 file - promoters60/5664341
atagtgt

SEQ ID NO: 147926 - DNA, 7 bp, Unknown
  misc_feature (1)..( 7): Result.004 file - promoters60/5664341
atattgt

SEQ ID NO: 147927 - DNA, 6 bp, Unknown
  misc_feature (1)..( 6): Result.004 file - promoters60/5664341
aacttg

SEQ ID NO: 147928 - DNA, 6 bp, Unknown
  misc_feature (1)..( 6): Result.004 file - promoters60/5664341
aacttg

SEQ ID NO: 147929 - DNA, 6 bp, Unknown
  misc_feature (1)..( 6): Result.004 file - promoters60/5664341
tcatat

SEQ ID NO: 147930 - DNA, 6 bp, Unknown
  misc_feature (1)..( 6): Result.004 file - promoters60/5664341
tcatat

SEQ ID NO: 147931 - DNA, 7 bp, Unknown
  misc_feature (1)..( 7): Result.004 file - promoters60/5664341
ttatgta

SEQ ID NO: 147932 - DNA, 7 bp, Unknown
  misc_feature (1)..( 7): Result.004 file - promoters60/5664341
ttacgta

SEQ ID NO: 147933 - DNA, 7 bp, Unknown
  misc_feature (1)..( 7): Result.004 file - promoters60/5664341
ctggtta

SEQ ID NO: 147934 - DNA, 7 bp, Unknown
  misc_feature (1)..( 7): Result.004 file - promoters60/5664341
ctgatta

SEQ ID NO: 147935 - DNA, 6 bp, Unknown
  misc_feature (1)..( 6): Result.004 file - promoters60/5664341
atcatt

SEQ ID NO: 147936 - DNA, 6 bp, Unknown
  misc_feature (1)..( 6): Result.004 file - promoters60/5664341
atcatt

SEQ ID NO: 147937 - DNA, 11 bp, Unknown
  misc_feature (1)..( 11): Result.004 file - promoters60/5664341
ttactgaagtt

SEQ ID NO: 147938 - DNA, 11 bp, Unknown
  misc_feature (1)..( 11): Result.004 file - promoters60/5664341
ttagtgatgtt

SEQ ID NO: 147939 - DNA, 7 bp, Unknown
  misc_feature (1)..( 7): Result.004 file - promoters60/5664341
ttttcat

SEQ ID NO: 147940 - DNA, 7 bp, Unknown
  misc_feature (1)..( 7): Result.004 file - promoters60/5664341
tttccat

SEQ ID NO: 147941 - DNA, 8 bp, Unknown
  misc_feature (1)..( 8): Result.004 file - promoters60/5664341
atcttgtg

SEQ ID NO: 147942 - DNA, 8 bp, Unknown
  misc_feature (1)..( 8): Result.004 file - promoters60/5664362
atctcgtg

SEQ ID NO: 147943 - DNA, 10 bp, Unknown
  misc_feature (1)..( 10): Result.004 file - promoters60/5664362
caatccaaag

SEQ ID NO: 147944 - DNA, 10 bp, Unknown
  misc_feature (1)..( 10): Result.004 file - promoters60/5664362
gaattcaaga

SEQ ID NO: 147945 - DNA, 10 bp, Unknown
  misc_feature (1)..( 10): Result.004 file - promoters60/5664362
aaatcgaaat

SEQ ID NO: 147946 - DNA, 10 bp, Unknown
  misc_feature (1)..( 10): Result.004 file - promoters60/5664362
ctatccgaag

SEQ ID NO: 147947 - DNA, 10 bp, Unknown
  misc_feature (1)..( 10): Result.004 file - promoters60/5664362
gaattctttc

SEQ ID NO: 147948 - DNA, 10 bp, Unknown
  misc_feature (1)..( 10): Result.004 file - promoters60/5664362
aaatcgttag

SEQ ID NO: 147949 - DNA, 10 bp, Unknown
  misc_feature (1)..( 10): Result.004 file - promoters60/5664402
gaatccgaaa

SEQ ID NO: 147950 - DNA, 8 bp, Unknown
  misc_feature (1)..( 8): Result.004 file - promoters60/5664402
aatttttt

SEQ ID NO: 147951 - DNA, 8 bp, Unknown
  misc_feature (1)..( 8): Result.004 file - promoters60/5664402
aatttttt

SEQ ID NO: 147952 - DNA, 7 bp, Unknown
  misc_feature (1)..( 7): Result.004 file - promoters60/5664402
tattttt

SEQ ID NO: 147953 - DNA, 7 bp, Unknown
  misc_feature (1)..( 7): Result.004 file - promoters60/5664402
tattttt

SEQ ID NO: 147954 - DNA, 7 bp, Unknown
  misc_feature (1)..( 7): Result.004 file - promoters60/5664402
ccaaatt

SEQ ID NO: 147955 - DNA, 7 bp, Unknown
  misc_feature (1)..( 7): Result.004 file - promoters60/5664402
ccagatt

SEQ ID NO: 147956 - DNA, 6 bp, Unknown
  misc_feature (1)..( 6): Result.004 file - promoters60/5664402
gaaaca

SEQ ID NO: 147957 - DNA, 6 bp, Unknown
  misc_feature (1)..( 6): Result.004 file - promoters60/5664402
gaaaca

SEQ ID NO: 147958 - DNA, 6 bp, Unknown
  misc_feature (1)..( 6): Result.004 file - promoters60/5664402
acaaac

SEQ ID NO: 147959 - DNA, 6 bp, Unknown
  misc_feature (1)..( 6): Result.004 file - promoters60/5664402
acaaac

SEQ ID NO: 147960 - DNA, 8 bp, Unknown
  misc_feature (1)..( 8): Result.004 file - promoters60/5664402
aaaacaaa

SEQ ID NO: 147961 - DNA, 8 bp, Unknown
  misc_feature (1)..( 8): Result.004 file - promoters60/5664402
aaaaaaaa

SEQ ID NO: 147962 - DNA, 12 bp, Unknown
  misc_feature (1)..( 12): Result.004 file - promoters60/5664402
aaaattaaattt

SEQ ID NO: 147963 - DNA, 12 bp, Unknown
  misc_feature (1)..( 12): Result.004 file - promoters60/5664402
aaaattgaattt

SEQ ID NO: 147964 - DNA, 6 bp, Unknown
  misc_feature (1)..( 6): Result.004 file - promoters60/5664402
tgaaaa

SEQ ID NO: 147965 - DNA, 6 bp, Unknown
  misc_feature (1)..( 6): Result.004 file - promoters60/5664402
tgaaaa

SEQ ID NO: 147966 - DNA, 8 bp, Unknown
  misc_feature (1)..( 8): Result.004 file - promoters60/5664402
acgtttct

SEQ ID NO: 147967 - DNA, 8 bp, Unknown
  misc_feature (1)..( 8): Result.004 file - promoters60/5664402
acgtctct

SEQ ID NO: 147968 - DNA, 7 bp, Unknown
  misc_feature (1)..( 7): Result.004 file - promoters60/5664402
tcatgtt

SEQ ID NO: 147969 - DNA, 7 bp, Unknown
  misc_feature (1)..( 7): Result.004 file - promoters60/5664402
tcatgtt

SEQ ID NO: 147970 - DNA, 7 bp, Unknown
  misc_feature (1)..( 7): Result.004 file - promoters60/5664402
aaaactt

SEQ ID NO: 147971 - DNA, 7 bp, Unknown
  misc_feature (1)..( 7): Result.004 file - promoters60/5664402
aaagctt

SEQ ID NO: 147972 - DNA, 7 bp, Unknown
  misc_feature (1)..( 7): Result.004 file - promoters60/5664402
ccattat

SEQ ID NO: 147973 - DNA, 7 bp, Unknown
  misc_feature (1)..( 7): Result.004 file - promoters60/5664402
ccactat

SEQ ID NO: 147974 - DNA, 6 bp, Unknown
  misc_feature (1)..( 6): Result.004 file - promoters60/5664402
aaattg

SEQ ID NO: 147975 - DNA, 6 bp, Unknown
  misc_feature (1)..( 6): Result.004 file - promoters60/5664402
aaattg

SEQ ID NO: 147976 - DNA, 7 bp, Unknown
  misc_feature (1)..( 7): Result.004 file - promoters60/5664402
agaagaa

SEQ ID NO: 147977 - DNA, 7 bp, Unknown
  misc_feature (1)..( 7): Result.004 file - promoters60/5664402
agaggaa

SEQ ID NO: 147978 - DNA, 8 bp, Unknown
  misc_feature (1)..( 8): Result.004 file - promoters60/5664402
tttctttt

SEQ ID NO: 147979 - DNA, 8 bp, Unknown
  misc_feature (1)..( 8): Result.004 file - promoters60/5664402
tttctttt

SEQ ID NO: 147980 - DNA, 6 bp, Unknown
  misc_feature (1)..( 6): Result.004 file - promoters60/5664402
tcacca

SEQ ID NO: 147981 - DNA, 6 bp, Unknown
  misc_feature (1)..( 6): Result.004 file - promoters60/5664402
tcacca

SEQ ID NO: 147982 - DNA, 7 bp, Unknown
  misc_feature (1)..( 7): Result.004 file - promoters60/5664402
tttgagc

SEQ ID NO: 147983 - DNA, 7 bp, Unknown
  misc_feature (1)..( 7): Result.004 file - promoters60/5664402
ttttagc

SEQ ID NO: 147984 - DNA, 8 bp, Unknown
  misc_feature (1)..( 8): Result.004 file - promoters60/5664402
atatacta

SEQ ID NO: 147985 - DNA, 8 bp, Unknown
  misc_feature (1)..( 8): Result.004 file - promoters60/5664402
atattcta

SEQ ID NO: 147986 - DNA, 7 bp, Unknown
  misc_feature (1)..( 7): Result.004 file - promoters60/5664402
ggtgtga

SEQ ID NO: 147987 - DNA, 7 bp, Unknown
  misc_feature (1)..( 7): Result.004 file - promoters60/5664465
ggtctga

SEQ ID NO: 147988 - DNA, 8 bp, Unknown
  misc_feature (1)..( 8): Result.004 file - promoters60/5664465
aataattc

SEQ ID NO: 147989 - DNA, 8 bp, Unknown
  misc_feature (1)..( 8): Result.004 file - promoters60/5664465
tttaattc

SEQ ID NO: 147990 - DNA, 8 bp, Unknown
  misc_feature (1)..( 8): Result.004 file - promoters60/5664465
tttgatta

SEQ ID NO: 147991 - DNA, 8 bp, Unknown
  misc_feature (1)..( 8): Result.004 file - promoters60/5664465
attaattg

SEQ ID NO: 147992 - DNA, 9 bp, Unknown
  misc_feature (1)..( 9): Result.004 file - promoters60/5664465
ataaaaaag

SEQ ID NO: 147993 - DNA, 9 bp, Unknown
  misc_feature (1)..( 9): Result.004 file - promoters60/5664465
atacaaaat

SEQ ID NO: 147994 - DNA, 9 bp, Unknown
  misc_feature (1)..( 9): Result.004 file - promoters60/5664465
atacaaaac

SEQ ID NO: 147995 - DNA, 9 bp, Unknown
  misc_feature (1)..( 9): Result.004 file - promoters60/5664465
agaaaaaaa

SEQ ID NO: 147996 - DNA, 10 bp, Unknown
  misc_feature (1)..( 10): Result.004 file - promoters60/5664465
ctaaaataat

SEQ ID NO: 147997 - DNA, 10 bp, Unknown
  misc_feature (1)..( 10): Result.004 file - promoters60/5664465
attcattgta

SEQ ID NO: 147998 - DNA, 10 bp, Unknown
  misc_feature (1)..( 10): Result.004 file - promoters60/5664465
attcatcttc

SEQ ID NO: 147999 - DNA, 10 bp, Unknown
  misc_feature (1)..( 10): Result.004 file - promoters60/5664465
attaattgta

SEQ ID NO: 148000 - DNA, 10 bp, Unknown
  misc_feature (1)..( 10): Result.004 file - promoters60/5664465
tttaattctc

SEQ ID NO: 148001 - DNA, 11 bp, Unknown
  misc_feature (1)..( 11): Result.004 file - promoters60/5664465
cagcgacttca

SEQ ID NO: 148002 - DNA, 11 bp, Unknown
  misc_feature (1)..( 11): Result.004 file - promoters60/5664465
cagagacatca

SEQ ID NO: 148003 - DNA, 11 bp, Unknown
  misc_feature (1)..( 11): Result.004 file - promoters60/5664465
tagatacagtg

SEQ ID NO: 148004 - DNA, 11 bp, Unknown
  misc_feature (1)..( 11): Result.004 file - promoters60/5664465
ccgatccagaa

SEQ ID NO: 148005 - DNA, 10 bp, Unknown
  misc_feature (1)..( 10): Result.004 file - promoters60/5664465
caaacttatc

SEQ ID NO: 148006 - DNA, 10 bp, Unknown
  misc_feature (1)..( 10): Result.004 file - promoters60/5664465
caaaattata

SEQ ID NO: 148007 - DNA, 10 bp, Unknown
  misc_feature (1)..( 10): Result.004 file - promoters60/5664465
caatatttgt

SEQ ID NO: 148008 - DNA, 10 bp, Unknown
  misc_feature (1)..( 10): Result.004 file - promoters60/5664465
tgatattata

SEQ ID NO: 148009 - DNA, 10 bp, Unknown
  misc_feature (1)..( 10): Result.004 file - promoters60/5664480
caatatgtgc

SEQ ID NO: 148010 - DNA, 8 bp, Unknown
  misc_feature (1)..( 8): Result.004 file - promoters60/5664480
taatatat

SEQ ID NO: 148011 - DNA, 8 bp, Unknown
  misc_feature (1)..( 8): Result.004 file - promoters60/5664480
taaaatat

SEQ ID NO: 148012 - DNA, 9 bp, Unknown
  misc_feature (1)..( 9): Result.004 file - promoters60/5664480
ttatttgga

SEQ ID NO: 148013 - DNA, 9 bp, Unknown
  misc_feature (1)..( 9): Result.004 file - promoters60/5664480
atatttgtt

SEQ ID NO: 148014 - DNA, 9 bp, Unknown
  misc_feature (1)..( 9): Result.004 file - promoters60/5664480
ttatgtgga

SEQ ID NO: 148015 - DNA, 8 bp, Unknown
  misc_feature (1)..( 8): Result.004 file - promoters60/5664480
atctagtt

SEQ ID NO: 148016 - DNA, 8 bp, Unknown
  misc_feature (1)..( 8): Result.004 file - promoters60/5664480
atctagtt

SEQ ID NO: 148017 - DNA, 7 bp, Unknown
  misc_feature (1)..( 7): Result.004 file - promoters60/5664480
tataaat

SEQ ID NO: 148018 - DNA, 7 bp, Unknown
  misc_feature (1)..( 7): Result.004 file - promoters60/5664480
tataaat

SEQ ID NO: 148019 - DNA, 7 bp, Unknown
  misc_feature (1)..( 7): Result.004 file - promoters60/5664480
tataaaa

SEQ ID NO: 148020 - DNA, 11 bp, Unknown
  misc_feature (1)..( 11): Result.004 file - promoters60/5664480
cgatacttgtc

SEQ ID NO: 148021 - DNA, 11 bp, Unknown
  misc_feature (1)..( 11): Result.004 file - promoters60/5664480
cgaaactggtc

SEQ ID NO: 148022 - DNA, 8 bp, Unknown
  misc_feature (1)..( 8): Result.004 file - promoters60/5664480
gaactcat

SEQ ID NO: 148023 - DNA, 8 bp, Unknown
  misc_feature (1)..( 8): Result.004 file - promoters60/5664480
gaagtcat

SEQ ID NO: 148024 - DNA, 9 bp, Unknown
  misc_feature (1)..( 9): Result.004 file - promoters60/5664480
ttaaatgaa

SEQ ID NO: 148025 - DNA, 9 bp, Unknown
  misc_feature (1)..( 9): Result.004 file - promoters60/5664480
ttacatgaa

SEQ ID NO: 148026 - DNA, 7 bp, Unknown
  misc_feature (1)..( 7): Result.004 file - promoters60/5664480
agaagaa

SEQ ID NO: 148027 - DNA, 7 bp, Unknown
  misc_feature (1)..( 7): Result.004 file - promoters60/5664480
agaagaa

SEQ ID NO: 148028 - DNA, 6 bp, Unknown
  misc_feature (1)..( 6): Result.004 file - promoters60/5664480
gtgtaa

SEQ ID NO: 148029 - DNA, 6 bp, Unknown
  misc_feature (1)..( 6): Result.004 file - promoters60/5664480
gtgtaa

SEQ ID NO: 148030 - DNA, 9 bp, Unknown
  misc_feature (1)..( 9): Result.004 file - promoters60/5664480
aaacaaaaa

SEQ ID NO: 148031 - DNA, 9 bp, Unknown
  misc_feature (1)..( 9): Result.004 file - promoters60/5664480
aaagaaaaa

SEQ ID NO: 148032 - DNA, 7 bp, Unknown
  misc_feature (1)..( 7): Result.004 file - promoters60/5664480
ctaatct

SEQ ID NO: 148033 - DNA, 7 bp, Unknown
  misc_feature (1)..( 7): Result.004 file - promoters60/5664480
ctattct

SEQ ID NO: 148034 - DNA, 6 bp, Unknown
  misc_feature (1)..( 6): Result.004 file - promoters60/5664480
aacaga

SEQ ID NO: 148035 - DNA, 6 bp, Unknown
  misc_feature (1)..( 6): Result.004 file - promoters60/5664480
aacaga

SEQ ID NO: 148036 - DNA, 6 bp, Unknown
  misc_feature (1)..( 6): Result.004 file - promoters60/5664480
agcaat

SEQ ID NO: 148037 - DNA, 6 bp, Unknown
  misc_feature (1)..( 6): Result.004 file - promoters60/5664488
agcaat

SEQ ID NO: 148038 - DNA, 9 bp, Unknown
  misc_feature (1)..( 9): Result.004 file - promoters60/5664488
ttacgaaag

SEQ ID NO: 148039 - DNA, 9 bp, Unknown
  misc_feature (1)..( 9): Result.004 file - promoters60/5664488
ttacggaag

SEQ ID NO: 148040 - DNA, 7 bp, Unknown
  misc_feature (1)..( 7): Result.004 file - promoters60/5664488
acaaaga

SEQ ID NO: 148041 - DNA, 7 bp, Unknown
  misc_feature (1)..( 7): Result.004 file - promoters60/5664488
acagaga

SEQ ID NO: 148042 - DNA, 7 bp, Unknown
  misc_feature (1)..( 7): Result.004 file - promoters60/5664488
tatatat

SEQ ID NO: 148043 - DNA, 7 bp, Unknown
  misc_feature (1)..( 7): Result.004 file - promoters60/5664488
tatatat

SEQ ID NO: 148044 - DNA, 6 bp, Unknown
  misc_feature (1)..( 6): Result.004 file - promoters60/5664488
tcataa

SEQ ID NO: 148045 - DNA, 6 bp, Unknown
  misc_feature (1)..( 6): Result.004 file - promoters60/5664488
tcataa

SEQ ID NO: 148046 - DNA, 6 bp, Unknown
  misc_feature (1)..( 6): Result.004 file - promoters60/5664488
catttc

SEQ ID NO: 148047 - DNA, 6 bp, Unknown
  misc_feature (1)..( 6): Result.004 file - promoters60/5664488
catttc

SEQ ID NO: 148048 - DNA, 7 bp, Unknown
  misc_feature (1)..( 7): Result.004 file - promoters60/5664488
catatgt

SEQ ID NO: 148049 - DNA, 7 bp, Unknown
  misc_feature (1)..( 7): Result.004 file - promoters60/5664488
catatgt

SEQ ID NO: 148050 - DNA, 6 bp, Unknown
  misc_feature (1)..( 6): Result.004 file - promoters60/5664488
caagtc

SEQ ID NO: 148051 - DNA, 6 bp, Unknown
  misc_feature (1)..( 6): Result.004 file - promoters60/5664488
caagtc

SEQ ID NO: 148052 - DNA, 9 bp, Unknown
  misc_feature (1)..( 9): Result.004 file - promoters60/5664488
attaaatat

SEQ ID NO: 148053 - DNA, 9 bp, Unknown
  misc_feature (1)..( 9): Result.004 file - promoters60/5664488
attatatat

SEQ ID NO: 148054 - DNA, 7 bp, Unknown
  misc_feature (1)..( 7): Result.004 file - promoters60/5664488
gattcat

SEQ ID NO: 148055 - DNA, 7 bp, Unknown
  misc_feature (1)..( 7): Result.004 file - promoters60/5664488
gatacat

SEQ ID NO: 148056 - DNA, 8 bp, Unknown
  misc_feature (1)..( 8): Result.004 file - promoters60/5664488
gtcgctct

SEQ ID NO: 148057 - DNA, 8 bp, Unknown
  misc_feature (1)..( 8): Result.004 file - promoters60/5664488
gtcgatct

SEQ ID NO: 148058 - DNA, 6 bp, Unknown
  misc_feature (1)..( 6): Result.004 file - promoters60/5664488
taaact

SEQ ID NO: 148059 - DNA, 6 bp, Unknown
  misc_feature (1)..( 6): Result.004 file - promoters60/5664488
taaact

SEQ ID NO: 148060 - DNA, 8 bp, Unknown
  misc_feature (1)..( 8): Result.004 file - promoters60/5664488
aatggtgt

SEQ ID NO: 148061 - DNA, 8 bp, Unknown
  misc_feature (1)..( 8): Result.004 file - promoters60/5664488
aatgttgt

SEQ ID NO: 148062 - DNA, 6 bp, Unknown
  misc_feature (1)..( 6): Result.004 file - promoters60/5664488
aatgtt

SEQ ID NO: 148063 - DNA, 6 bp, Unknown
  misc_feature (1)..( 6): Result.004 file - promoters60/5664488
aatgtt

SEQ ID NO: 148064 - DNA, 7 bp, Unknown
  misc_feature (1)..( 7): Result.004 file - promoters60/5664488
tgttcat

SEQ ID NO: 148065 - DNA, 7 bp, Unknown
  misc_feature (1)..( 7): Result.004 file - promoters60/5664488
tgtacat

SEQ ID NO: 148066 - DNA, 6 bp, Unknown
  misc_feature (1)..( 6): Result.004 file - promoters60/5664488
tatgag

SEQ ID NO: 148067 - DNA, 6 bp, Unknown
  misc_feature (1)..( 6): Result.004 file - promoters60/5664488
tatgag

SEQ ID NO: 148068 - DNA, 8 bp, Unknown
  misc_feature (1)..( 8): Result.004 file - promoters60/5664488
gatgtttc

SEQ ID NO: 148069 - DNA, 8 bp, Unknown
  misc_feature (1)..( 8): Result.004 file - promoters60/5664517
gatgtttc

SEQ ID NO: 148070 - DNA, 9 bp, Unknown
  misc_feature (1)..( 9): Result.004 file - promoters60/5664517
tttatgaat

SEQ ID NO: 148071 - DNA, 9 bp, Unknown
  misc_feature (1)..( 9): Result.004 file - promoters60/5664517
tatatgaaa

SEQ ID NO: 148072 - DNA, 9 bp, Unknown
  misc_feature (1)..( 9): Result.004 file - promoters60/5664517
tttattaaa

SEQ ID NO: 148073 - DNA, 9 bp, Unknown
  misc_feature (1)..( 9): Result.004 file - promoters60/5664517
ttttttact

SEQ ID NO: 148074 - DNA, 10 bp, Unknown
  misc_feature (1)..( 10): Result.004 file - promoters60/5664517
gaaaatctaa

SEQ ID NO: 148075 - DNA, 10 bp, Unknown
  misc_feature (1)..( 10): Result.004 file - promoters60/5664517
taaaatttaa

SEQ ID NO: 148076 - DNA, 10 bp, Unknown
  misc_feature (1)..( 10): Result.004 file - promoters60/5664517
caaaattaga

SEQ ID NO: 148077 - DNA, 10 bp, Unknown
  misc_feature (1)..( 10): Result.004 file - promoters60/5664633
taatattact

SEQ ID NO: 148078 - DNA, 6 bp, Unknown
  misc_feature (1)..( 6): Result.004 file - promoters60/5664633
atttta

SEQ ID NO: 148079 - DNA, 6 bp, Unknown
  misc_feature (1)..( 6): Result.004 file - promoters60/5664633
atttta

SEQ ID NO: 148080 - DNA, 10 bp, Unknown
  misc_feature (1)..( 10): Result.004 file - promoters60/5664633
aaaaggaaaa

SEQ ID NO: 148081 - DNA, 10 bp, Unknown
  misc_feature (1)..( 10): Result.004 file - promoters60/5664633
aaaagtaaaa

SEQ ID NO: 148082 - DNA, 8 bp, Unknown
  misc_feature (1)..( 8): Result.004 file - promoters60/5664633
gcaaaaat

SEQ ID NO: 148083 - DNA, 8 bp, Unknown
  misc_feature (1)..( 8): Result.004 file - promoters60/5664633
gcaataat

SEQ ID NO: 148084 - DNA, 6 bp, Unknown
  misc_feature (1)..( 6): Result.004 file - promoters60/5664633
tatttt

SEQ ID NO: 148085 - DNA, 6 bp, Unknown
  misc_feature (1)..( 6): Result.004 file - promoters60/5664633
tatttt

SEQ ID NO: 148086 - DNA, 6 bp, Unknown
  misc_feature (1)..( 6): Result.004 file - promoters60/5664633
ttttca

SEQ ID NO: 148087 - DNA, 6 bp, Unknown
  misc_feature (1)..( 6): Result.004 file - promoters60/5664633
ttttca

SEQ ID NO: 148088 - DNA, 6 bp, Unknown
  misc_feature (1)..( 6): Result.004 file - promoters60/5664633
tttttt

SEQ ID NO: 148089 - DNA, 6 bp, Unknown
  misc_feature (1)..( 6): Result.004 file - promoters60/5664633
tttttt

SEQ ID NO: 148090 - DNA, 8 bp, Unknown
  misc_feature (1)..( 8): Result.004 file - promoters60/5664633
attaatta

SEQ ID NO: 148091 - DNA, 8 bp, Unknown
  misc_feature (1)..( 8): Result.004 file - promoters60/5664633
attattta

SEQ ID NO: 148092 - DNA, 6 bp, Unknown
  misc_feature (1)..( 6): Result.004 file - promoters60/5664633
tttttc

SEQ ID NO: 148093 - DNA, 6 bp, Unknown
  misc_feature (1)..( 6): Result.004 file - promoters60/5664633
tttttc

SEQ ID NO: 148094 - DNA, 9 bp, Unknown
  misc_feature (1)..( 9): Result.004 file - promoters60/5664633
aatcattat

SEQ ID NO: 148095 - DNA, 9 bp, Unknown
  misc_feature (1)..( 9): Result.004 file - promoters60/5664633
aatcactat

SEQ ID NO: 148096 - DNA, 8 bp, Unknown
  misc_feature (1)..( 8): Result.004 file - promoters60/5664633
tatgtgtt

SEQ ID NO: 148097 - DNA, 8 bp, Unknown
  misc_feature (1)..( 8): Result.004 file - promoters60/5664633
tatatgtt

SEQ ID NO: 148098 - DNA, 8 bp, Unknown
  misc_feature (1)..( 8): Result.004 file - promoters60/5664633
tttccttt

SEQ ID NO: 148099 - DNA, 8 bp, Unknown
  misc_feature (1)..( 8): Result.004 file - promoters60/5664633
tttcattt

SEQ ID NO: 148100 - DNA, 8 bp, Unknown
  misc_feature (1)..( 8): Result.004 file - promoters60/5664633
tttctcca

SEQ ID NO: 148101 - DNA, 8 bp, Unknown
  misc_feature (1)..( 8): Result.004 file - promoters60/5664633
aaaattaa

SEQ ID NO: 148102 - DNA, 8 bp, Unknown
  misc_feature (1)..( 8): Result.004 file - promoters60/5664633
aaaattaa

SEQ ID NO: 148103 - DNA, 8 bp, Unknown
  misc_feature (1)..( 8): Result.004 file - promoters60/5664633
caaactaa

SEQ ID NO: 148104 - DNA, 8 bp, Unknown
  misc_feature (1)..( 8): Result.004 file - promoters60/5664633
tactaaaa

SEQ ID NO: 148105 - DNA, 8 bp, Unknown
  misc_feature (1)..( 8): Result.004 file - promoters60/5664633
tacgaaaa

SEQ ID NO: 148106 - DNA, 6 bp, Unknown
  misc_feature (1)..( 6): Result.004 file - promoters60/5664633
atttta

SEQ ID NO: 148107 - DNA, 6 bp, Unknown
  misc_feature (1)..( 6): Result.004 file - promoters60/5664633
atttta

SEQ ID NO: 148108 - DNA, 7 bp, Unknown
  misc_feature (1)..( 7): Result.004 file - promoters60/5664633
agagtaa

SEQ ID NO: 148109 - DNA, 7 bp, Unknown
  misc_feature (1)..( 7): Result.004 file - promoters60/5664633
agaataa

SEQ ID NO: 148110 - DNA, 6 bp, Unknown
  misc_feature (1)..( 6): Result.004 file - promoters60/5664633
aagttg

SEQ ID NO: 148111 - DNA, 6 bp, Unknown
  misc_feature (1)..( 6): Result.004 file - promoters60/5664633
aagttg

SEQ ID NO: 148112 - DNA, 7 bp, Unknown
  misc_feature (1)..( 7): Result.004 file - promoters60/5664633
ttttaaa

SEQ ID NO: 148113 - DNA, 7 bp, Unknown
  misc_feature (1)..( 7): Result.004 file - promoters60/5664633
tttgaaa

SEQ ID NO: 148114 - DNA, 7 bp, Unknown
  misc_feature (1)..( 7): Result.004 file - promoters60/5664633
taataaa

SEQ ID NO: 148115 - DNA, 7 bp, Unknown
  misc_feature (1)..( 7): Result.004 file - promoters60/5664633
taagaaa

SEQ ID NO: 148116 - DNA, 7 bp, Unknown
  misc_feature (1)..( 7): Result.004 file - promoters60/5664633
ttgtgaa

SEQ ID NO: 148117 - DNA, 7 bp, Unknown
  misc_feature (1)..( 7): Result.004 file - promoters60/5664633
ttgggaa

SEQ ID NO: 148118 - DNA, 13 bp, Unknown
  misc_feature (1)..( 13): Result.004 file - promoters60/5664633
gttgatttttttc

SEQ ID NO: 148119 - DNA, 13 bp, Unknown
  misc_feature (1)..( 13): Result.004 file - promoters60/5664633
tccgatttctttt

SEQ ID NO: 148120 - DNA, 14 bp, Unknown
  misc_feature (1)..( 14): Result.004 file - promoters60/5664633
tccgatttcatttt

SEQ ID NO: 148121 - DNA, 6 bp, Unknown
  misc_feature (1)..( 6): Result.004 file - promoters60/5664633
agtttt

SEQ ID NO: 148122 - DNA, 6 bp, Unknown
  misc_feature (1)..( 6): Result.004 file - promoters60/5664633
agtttt

SEQ ID NO: 148123 - DNA, 7 bp, Unknown
  misc_feature (1)..( 7): Result.004 file - promoters60/5664633
gaagaaa

SEQ ID NO: 148124 - DNA, 7 bp, Unknown
  misc_feature (1)..( 7): Result.004 file - promoters60/5664633
gaagaaa

SEQ ID NO: 148125 - DNA, 6 bp, Unknown
  misc_feature (1)..( 6): Result.004 file - promoters60/5664633
ttgaat

SEQ ID NO: 148126 - DNA, 6 bp, Unknown
  misc_feature (1)..( 6): Result.004 file - promoters60/5664633
ttgaat

SEQ ID NO: 148127 - DNA, 7 bp, Unknown
  misc_feature (1)..( 7): Result.004 file - promoters60/5664633
aaaatta

SEQ ID NO: 148128 - DNA, 7 bp, Unknown
  misc_feature (1)..( 7): Result.004 file - promoters60/5664633
aaaatta

SEQ ID NO: 148129 - DNA, 7 bp, Unknown
  misc_feature (1)..( 7): Result.004 file - promoters60/5664633
ttttcgc

SEQ ID NO: 148130 - DNA, 7 bp, Unknown
  misc_feature (1)..( 7): Result.004 file - promoters60/5664633
tttccgc

SEQ ID NO: 148131 - DNA, 9 bp, Unknown
  misc_feature (1)..( 9): Result.004 file - promoters60/5664633
aaaaaaaaa

SEQ ID NO: 148132 - DNA, 9 bp, Unknown
  misc_feature (1)..( 9): Result.004 file - promoters60/5664633
aaacaaaaa

SEQ ID NO: 148133 - DNA, 6 bp, Unknown
  misc_feature (1)..( 6): Result.004 file - promoters60/5664633
aaatca

SEQ ID NO: 148134 - DNA, 6 bp, Unknown
  misc_feature (1)..( 6): Result.004 file - promoters60/5664657
aaatca

SEQ ID NO: 148135 - DNA, 9 bp, Unknown
  misc_feature (1)..( 9): Result.004 file - promoters60/5664657
aaaattgac

SEQ ID NO: 148136 - DNA, 9 bp, Unknown
  misc_feature (1)..( 9): Result.004 file - promoters60/5664657
aaaattgga

SEQ ID NO: 148137 - DNA, 9 bp, Unknown
  misc_feature (1)..( 9): Result.004 file - promoters60/5664657
aaaataaat

SEQ ID NO: 148138 - DNA, 8 bp, Unknown
  misc_feature (1)..( 8): Result.004 file - promoters60/5664657
atttaaat

SEQ ID NO: 148139 - DNA, 8 bp, Unknown
  misc_feature (1)..( 8): Result.004 file - promoters60/5664657
ctttaaaa

SEQ ID NO: 148140 - DNA, 8 bp, Unknown
  misc_feature (1)..( 8): Result.004 file - promoters60/5664657
cttgaaaa

SEQ ID NO: 148141 - DNA, 8 bp, Unknown
  misc_feature (1)..( 8): Result.004 file - promoters60/5664657
aaactact

SEQ ID NO: 148142 - DNA, 8 bp, Unknown
  misc_feature (1)..( 8): Result.004 file - promoters60/5664657
aaattaca

SEQ ID NO: 148143 - DNA, 8 bp, Unknown
  misc_feature (1)..( 8): Result.004 file - promoters60/5664657
gaatgaca

SEQ ID NO: 148144 - DNA, 11 bp, Unknown
  misc_feature (1)..( 11): Result.004 file - promoters60/5664657
atttttttgtt

SEQ ID NO: 148145 - DNA, 11 bp, Unknown
  misc_feature (1)..( 11): Result.004 file - promoters60/5664657
atttgtttgaa

SEQ ID NO: 148146 - DNA, 11 bp, Unknown
  misc_feature (1)..( 11): Result.004 file - promoters60/5664703
tggggtttgaa

SEQ ID NO: 148147 - DNA, 12 bp, Unknown
  misc_feature (1)..( 12): Result.004 file - promoters60/5664703
ctttttgtttat

SEQ ID NO: 148148 - DNA, 12 bp, Unknown
  misc_feature (1)..( 12): Result.004 file - promoters60/5664703
tgatttgtatat

SEQ ID NO: 148149 - DNA, 12 bp, Unknown
  misc_feature (1)..( 12): Result.004 file - promoters60/5664703
cttattgtataa

SEQ ID NO: 148150 - DNA, 6 bp, Unknown
  misc_feature (1)..( 6): Result.004 file - promoters60/5664703
attgaa

SEQ ID NO: 148151 - DNA, 6 bp, Unknown
  misc_feature (1)..( 6): Result.004 file - promoters60/5664703
attgaa

SEQ ID NO: 148152 - DNA, 6 bp, Unknown
  misc_feature (1)..( 6): Result.004 file - promoters60/5664703
tgaaca

SEQ ID NO: 148153 - DNA, 6 bp, Unknown
  misc_feature (1)..( 6): Result.004 file - promoters60/5664703
tgaaca

SEQ ID NO: 148154 - DNA, 7 bp, Unknown
  misc_feature (1)..( 7): Result.004 file - promoters60/5664703
tctacga

SEQ ID NO: 148155 - DNA, 7 bp, Unknown
  misc_feature (1)..( 7): Result.004 file - promoters60/5664703
tcttcga

SEQ ID NO: 148156 - DNA, 7 bp, Unknown
  misc_feature (1)..( 7): Result.004 file - promoters60/5664703
agggttt

SEQ ID NO: 148157 - DNA, 7 bp, Unknown
  misc_feature (1)..( 7): Result.004 file - promoters60/5664703
aggattt

SEQ ID NO: 148158 - DNA, 10 bp, Unknown
  misc_feature (1)..( 10): Result.004 file - promoters60/5664703
gcaggagatg

SEQ ID NO: 148159 - DNA, 10 bp, Unknown
  misc_feature (1)..( 10): Result.004 file - promoters60/5664703
gcaggagatg

SEQ ID NO: 148160 - DNA, 8 bp, Unknown
  misc_feature (1)..( 8): Result.004 file - promoters60/5664703
gctggatt

SEQ ID NO: 148161 - DNA, 8 bp, Unknown
  misc_feature (1)..( 8): Result.004 file - promoters60/5664703
tctgaatt

SEQ ID NO: 148162 - DNA, 8 bp, Unknown
  misc_feature (1)..( 8): Result.004 file - promoters60/5664703
tctgaaca

SEQ ID NO: 148163 - DNA, 6 bp, Unknown
  misc_feature (1)..( 6): Result.004 file - promoters60/5664703
aatcta

SEQ ID NO: 148164 - DNA, 6 bp, Unknown
  misc_feature (1)..( 6): Result.004 file - promoters60/5664703
aatcta

SEQ ID NO: 148165 - DNA, 6 bp, Unknown
  misc_feature (1)..( 6): Result.004 file - promoters60/5664703
catcaa

SEQ ID NO: 148166 - DNA, 6 bp, Unknown
  misc_feature (1)..( 6): Result.004 file - promoters60/5664703
catcaa

SEQ ID NO: 148167 - DNA, 8 bp, Unknown
  misc_feature (1)..( 8): Result.004 file - promoters60/5664703
gattggtg

SEQ ID NO: 148168 - DNA, 8 bp, Unknown
  misc_feature (1)..( 8): Result.004 file - promoters60/5664703
gattcgtg

SEQ ID NO: 148169 - DNA, 7 bp, Unknown
  misc_feature (1)..( 7): Result.004 file - promoters60/5664703
cactgtc

SEQ ID NO: 148170 - DNA, 7 bp, Unknown
  misc_feature (1)..( 7): Result.004 file - promoters60/5664703
cacggtc

SEQ ID NO: 148171 - DNA, 6 bp, Unknown
  misc_feature (1)..( 6): Result.004 file - promoters60/5664703
ggttta

SEQ ID NO: 148172 - DNA, 6 bp, Unknown
  misc_feature (1)..( 6): Result.004 file - promoters60/5664703
ggttta

SEQ ID NO: 148173 - DNA, 6 bp, Unknown
  misc_feature (1)..( 6): Result.004 file - promoters60/5664703
ttgact

SEQ ID NO: 148174 - DNA, 6 bp, Unknown
  misc_feature (1)..( 6): Result.004 file - promoters60/5664703
ttgact

SEQ ID NO: 148175 - DNA, 6 bp, Unknown
  misc_feature (1)..( 6): Result.004 file - promoters60/5664703
ggctgt

SEQ ID NO: 148176 - DNA, 6 bp, Unknown
  misc_feature (1)..( 6): Result.004 file - promoters60/5664734
ggctgt

SEQ ID NO: 148177 - DNA, 8 bp, Unknown
  misc_feature (1)..( 8): Result.004 file - promoters60/5664734
aaataagt

SEQ ID NO: 148178 - DNA, 8 bp, Unknown
  misc_feature (1)..( 8): Result.004 file - promoters60/5664734
aaattagt

SEQ ID NO: 148179 - DNA, 8 bp, Unknown
  misc_feature (1)..( 8): Result.004 file - promoters60/5664734
aaattaat

SEQ ID NO: 148180 - DNA, 6 bp, Unknown
  misc_feature (1)..( 6): Result.004 file - promoters60/5664734
atctta

SEQ ID NO: 148181 - DNA, 6 bp, Unknown
  misc_feature (1)..( 6): Result.004 file - promoters60/5664734
atctta

SEQ ID NO: 148182 - DNA, 6 bp, Unknown
  misc_feature (1)..( 6): Result.004 file - promoters60/5664734
tgatgt

SEQ ID NO: 148183 - DNA, 6 bp, Unknown
  misc_feature (1)..( 6): Result.004 file - promoters60/5664734
tgatgt

SEQ ID NO: 148184 - DNA, 9 bp, Unknown
  misc_feature (1)..( 9): Result.004 file - promoters60/5664734
gtgagcgga

SEQ ID NO: 148185 - DNA, 9 bp, Unknown
  misc_feature (1)..( 9): Result.004 file - promoters60/5664734
gtgagagga

SEQ ID NO: 148186 - DNA, 6 bp, Unknown
  misc_feature (1)..( 6): Result.004 file - promoters60/5664734
cggtga

SEQ ID NO: 148187 - DNA, 6 bp, Unknown
  misc_feature (1)..( 6): Result.004 file - promoters60/5664734
cggtga

SEQ ID NO: 148188 - DNA, 6 bp, Unknown
  misc_feature (1)..( 6): Result.004 file - promoters60/5664734
cggtgg

SEQ ID NO: 148189 - DNA, 6 bp, Unknown
  misc_feature (1)..( 6): Result.004 file - promoters60/5664734
cggtgg

SEQ ID NO: 148190 - DNA, 6 bp, Unknown
  misc_feature (1)..( 6): Result.004 file - promoters60/5664734
gagaaa

SEQ ID NO: 148191 - DNA, 6 bp, Unknown
  misc_feature (1)..( 6): Result.004 file - promoters60/5664734
gagaaa

SEQ ID NO: 148192 - DNA, 6 bp, Unknown
  misc_feature (1)..( 6): Result.004 file - promoters60/5664734
aaacta

SEQ ID NO: 148193 - DNA, 6 bp, Unknown
  misc_feature (1)..( 6): Result.004 file - promoters60/5664734
aaacta

SEQ ID NO: 148194 - DNA, 6 bp, Unknown
  misc_feature (1)..( 6): Result.004 file - promoters60/5664734
atgatc

SEQ ID NO: 148195 - DNA, 6 bp, Unknown
  misc_feature (1)..( 6): Result.004 file - promoters60/5664734
atgatc

SEQ ID NO: 148196 - DNA, 7 bp, Unknown
  misc_feature (1)..( 7): Result.004 file - promoters60/5664734
caaatta

SEQ ID NO: 148197 - DNA, 7 bp, Unknown
  misc_feature (1)..( 7): Result.004 file - promoters60/5664734
caattta

SEQ ID NO: 148198 - DNA, 6 bp, Unknown
  misc_feature (1)..( 6): Result.004 file - promoters60/5664734
gacgtg

SEQ ID NO: 148199 - DNA, 6 bp, Unknown
  misc_feature (1)..( 6): Result.004 file - promoters60/5664806
gacgtg

SEQ ID NO: 148200 - DNA, 6 bp, Unknown
  misc_feature (1)..( 6): Result.004 file - promoters60/5664806
atgaaa

SEQ ID NO: 148201 - DNA, 6 bp, Unknown
  misc_feature (1)..( 6): Result.004 file - promoters60/5664806
atgaaa

SEQ ID NO: 148202 - DNA, 10 bp, Unknown
  misc_feature (1)..( 10): Result.004 file - promoters60/5664806
aaggaaataa

SEQ ID NO: 148203 - DNA, 10 bp, Unknown
  misc_feature (1)..( 10): Result.004 file - promoters60/5664806
aagcaaaact

SEQ ID NO: 148204 - DNA, 10 bp, Unknown
  misc_feature (1)..( 10): Result.004 file - promoters60/5664806
aaagaaagga

SEQ ID NO: 148205 - DNA, 7 bp, Unknown
  misc_feature (1)..( 7): Result.004 file - promoters60/5664806
aacatga

SEQ ID NO: 148206 - DNA, 7 bp, Unknown
  misc_feature (1)..( 7): Result.004 file - promoters60/5664806
aacctga

SEQ ID NO: 148207 - DNA, 11 bp, Unknown
  misc_feature (1)..( 11): Result.004 file - promoters60/5664806
accaataaaag

SEQ ID NO: 148208 - DNA, 11 bp, Unknown
  misc_feature (1)..( 11): Result.004 file - promoters60/5664806
accaagaaaac

SEQ ID NO: 148209 - DNA, 11 bp, Unknown
  misc_feature (1)..( 11): Result.004 file - promoters60/5664806
atctggaaaac

SEQ ID NO: 148210 - DNA, 6 bp, Unknown
  misc_feature (1)..( 6): Result.004 file - promoters60/5664806
ttttca

SEQ ID NO: 148211 - DNA, 6 bp, Unknown
  misc_feature (1)..( 6): Result.004 file - promoters60/5664806
ttttca

SEQ ID NO: 148212 - DNA, 10 bp, Unknown
  misc_feature (1)..( 10): Result.004 file - promoters60/5664806
taatagtaat

SEQ ID NO: 148213 - DNA, 10 bp, Unknown
  misc_feature (1)..( 10): Result.004 file - promoters60/5664806
taatagcaat

SEQ ID NO: 148214 - DNA, 8 bp, Unknown
  misc_feature (1)..( 8): Result.004 file - promoters60/5664806
attattat

SEQ ID NO: 148215 - DNA, 8 bp, Unknown
  misc_feature (1)..( 8): Result.004 file - promoters60/5664806
atttttat

SEQ ID NO: 148216 - DNA, 7 bp, Unknown
  misc_feature (1)..( 7): Result.004 file - promoters60/5664806
ttgtgga

SEQ ID NO: 148217 - DNA, 7 bp, Unknown
  misc_feature (1)..( 7): Result.004 file - promoters60/5664806
ttgtgga

SEQ ID NO: 148218 - DNA, 11 bp, Unknown
  misc_feature (1)..( 11): Result.004 file - promoters60/5664806
tcttctttttt

SEQ ID NO: 148219 - DNA, 11 bp, Unknown
  misc_feature (1)..( 11): Result.004 file - promoters60/5664806
tcttatttttt

SEQ ID NO: 148220 - DNA, 7 bp, Unknown
  misc_feature (1)..( 7): Result.004 file - promoters60/5664806
atgtatt

SEQ ID NO: 148221 - DNA, 7 bp, Unknown
  misc_feature (1)..( 7): Result.004 file - promoters60/5664806
atgcatt

SEQ ID NO: 148222 - DNA, 7 bp, Unknown
  misc_feature (1)..( 7): Result.004 file - promoters60/5664806
aattaac

SEQ ID NO: 148223 - DNA, 7 bp, Unknown
  misc_feature (1)..( 7): Result.004 file - promoters60/5664806
aatgaac

SEQ ID NO: 148224 - DNA, 7 bp, Unknown
  misc_feature (1)..( 7): Result.004 file - promoters60/5664806
aaaggaa

SEQ ID NO: 148225 - DNA, 7 bp, Unknown
  misc_feature (1)..( 7): Result.004 file - promoters60/5664806
aaaagaa

SEQ ID NO: 148226 - DNA, 7 bp, Unknown
  misc_feature (1)..( 7): Result.004 file - promoters60/5664806
ttttatt

SEQ ID NO: 148227 - DNA, 7 bp, Unknown
  misc_feature (1)..( 7): Result.004 file - promoters60/5664806
tttaatt

SEQ ID NO: 148228 - DNA, 7 bp, Unknown
  misc_feature (1)..( 7): Result.004 file - promoters60/5664806
ttgtcta

SEQ ID NO: 148229 - DNA, 7 bp, Unknown
  misc_feature (1)..( 7): Result.004 file - promoters60/5664806
ttggcta

SEQ ID NO: 148230 - DNA, 7 bp, Unknown
  misc_feature (1)..( 7): Result.004 file - promoters60/5664806
atatata

SEQ ID NO: 148231 - DNA, 7 bp, Unknown
  misc_feature (1)..( 7): Result.004 file - promoters60/5664806
ataaata

SEQ ID NO: 148232 - DNA, 7 bp, Unknown
  misc_feature (1)..( 7): Result.004 file - promoters60/5664806
taatatt

SEQ ID NO: 148233 - DNA, 7 bp, Unknown
  misc_feature (1)..( 7): Result.004 file - promoters60/5664806
taatatt

SEQ ID NO: 148234 - DNA, 7 bp, Unknown
  misc_feature (1)..( 7): Result.004 file - promoters60/5664806
acaatat

SEQ ID NO: 148235 - DNA, 7 bp, Unknown
  misc_feature (1)..( 7): Result.004 file - promoters60/5664806
acaatat

SEQ ID NO: 148236 - DNA, 7 bp, Unknown
  misc_feature (1)..( 7): Result.004 file - promoters60/5664806
tggtttt

SEQ ID NO: 148237 - DNA, 7 bp, Unknown
  misc_feature (1)..( 7): Result.004 file - promoters60/5664806
tgggttt

SEQ ID NO: 148238 - DNA, 8 bp, Unknown
  misc_feature (1)..( 8): Result.004 file - promoters60/5664806
acaactga

SEQ ID NO: 148239 - DNA, 8 bp, Unknown
  misc_feature (1)..( 8): Result.004 file - promoters60/5664806
acaattga

SEQ ID NO: 148240 - DNA, 6 bp, Unknown
  misc_feature (1)..( 6): Result.004 file - promoters60/5664806
tgtttt

SEQ ID NO: 148241 - DNA, 6 bp, Unknown
  misc_feature (1)..( 6): Result.004 file - promoters60/5664806
tgtttt

SEQ ID NO: 148242 - DNA, 7 bp, Unknown
  misc_feature (1)..( 7): Result.004 file - promoters60/5664806
atgggag

SEQ ID NO: 148243 - DNA, 7 bp, Unknown
  misc_feature (1)..( 7): Result.004 file - promoters60/5664806
atgtgag

SEQ ID NO: 148244 - DNA, 6 bp, Unknown
  misc_feature (1)..( 6): Result.004 file - promoters60/5664806
ctatct

SEQ ID NO: 148245 - DNA, 6 bp, Unknown
  misc_feature (1)..( 6): Result.004 file - promoters60/5664814
ctatct

SEQ ID NO: 148246 - DNA, 7 bp, Unknown
  misc_feature (1)..( 7): Result.004 file - promoters60/5664814
aaataaa

SEQ ID NO: 148247 - DNA, 7 bp, Unknown
  misc_feature (1)..( 7): Result.004 file - promoters60/5664814
aaaaaaa

SEQ ID NO: 148248 - DNA, 7 bp, Unknown
  misc_feature (1)..( 7): Result.004 file - promoters60/5664814
taataaa

SEQ ID NO: 148249 - DNA, 7 bp, Unknown
  misc_feature (1)..( 7): Result.004 file - promoters60/5664814
taaaaaa

SEQ ID NO: 148250 - DNA, 11 bp, Unknown
  misc_feature (1)..( 11): Result.004 file - promoters60/5664814
attttcttaat

SEQ ID NO: 148251 - DNA, 11 bp, Unknown
  misc_feature (1)..( 11): Result.004 file - promoters60/5664814
tttttcataat

SEQ ID NO: 148252 - DNA, 11 bp, Unknown
  misc_feature (1)..( 11): Result.004 file - promoters60/5664814
attttcttgca

SEQ ID NO: 148253 - DNA, 11 bp, Unknown
  misc_feature (1)..( 11): Result.004 file - promoters60/5664814
actttcattca

SEQ ID NO: 148254 - DNA, 10 bp, Unknown
  misc_feature (1)..( 10): Result.004 file - promoters60/5664814
agttaataaa

SEQ ID NO: 148255 - DNA, 10 bp, Unknown
  misc_feature (1)..( 10): Result.004 file - promoters60/5664814
agttaatatt

SEQ ID NO: 148256 - DNA, 10 bp, Unknown
  misc_feature (1)..( 10): Result.004 file - promoters60/5664814
ttgtaacaaa

SEQ ID NO: 148257 - DNA, 10 bp, Unknown
  misc_feature (1)..( 10): Result.004 file - promoters60/5664814
aactaaaaaa

SEQ ID NO: 148258 - DNA, 8 bp, Unknown
  misc_feature (1)..( 8): Result.004 file - promoters60/5664814
tacattct

SEQ ID NO: 148259 - DNA, 8 bp, Unknown
  misc_feature (1)..( 8): Result.004 file - promoters60/5664814
tacatttg

SEQ ID NO: 148260 - DNA, 9 bp, Unknown
  misc_feature (1)..( 9): Result.004 file - promoters60/5664814
aacaattga

SEQ ID NO: 148261 - DNA, 9 bp, Unknown
  misc_feature (1)..( 9): Result.004 file - promoters60/5664814
aaccattac

SEQ ID NO: 148262 - DNA, 7 bp, Unknown
  misc_feature (1)..( 7): Result.004 file - promoters60/5664814
aaaaaaa

SEQ ID NO: 148263 - DNA, 7 bp, Unknown
  misc_feature (1)..( 7): Result.004 file - promoters60/5664814
aaaaaag

SEQ ID NO: 148264 - DNA, 7 bp, Unknown
  misc_feature (1)..( 7): Result.004 file - promoters60/5664814
aaacaga

SEQ ID NO: 148265 - DNA, 7 bp, Unknown
  misc_feature (1)..( 7): Result.004 file - promoters60/5664814
taacaga

SEQ ID NO: 148266 - DNA, 12 bp, Unknown
  misc_feature (1)..( 12): Result.004 file - promoters60/5664814
tctcaaaatcaa

SEQ ID NO: 148267 - DNA, 12 bp, Unknown
  misc_feature (1)..( 12): Result.004 file - promoters60/5664814
attcaagatcaa

SEQ ID NO: 148268 - DNA, 12 bp, Unknown
  misc_feature (1)..( 12): Result.004 file - promoters60/5664814
tctgaaaatgga

SEQ ID NO: 148269 - DNA, 12 bp, Unknown
  misc_feature (1)..( 12): Result.004 file - promoters60/5664873
cttcaaggcttc

SEQ ID NO: 148270 - DNA, 15 bp, Unknown
  misc_feature (1)..( 15): Result.004 file - promoters60/5664873
gtctcctataataaa

SEQ ID NO: 148271 - DNA, 15 bp, Unknown
  misc_feature (1)..( 15): Result.004 file - promoters60/5664873
gtagcctttaaaaaa

SEQ ID NO: 148272 - DNA, 15 bp, Unknown
  misc_feature (1)..( 15): Result.004 file - promoters60/5664873
ttcttctatatatat

SEQ ID NO: 148273 - DNA, 15 bp, Unknown
  misc_feature (1)..( 15): Result.004 file - promoters60/5664873
ttgtcctataaatat

SEQ ID NO: 148274 - DNA, 15 bp, Unknown
  misc_feature (1)..( 15): Result.004 file - promoters60/5664873
gtctcttatatattc

SEQ ID NO: 148275 - DNA, 15 bp, Unknown
  misc_feature (1)..( 15): Result.004 file - promoters60/5664873
ctcttcttcattgaa

SEQ ID NO: 148276 - DNA, 15 bp, Unknown
  misc_feature (1)..( 15): Result.004 file - promoters60/5664873
aaaatcgtaaaattc

SEQ ID NO: 148277 - DNA, 15 bp, Unknown
  misc_feature (1)..( 15): Result.004 file - promoters60/5664873
tataacccaaaattg

SEQ ID NO: 148278 - DNA, 15 bp, Unknown
  misc_feature (1)..( 15): Result.004 file - promoters60/5664873
taaatcgtaaaattt

SEQ ID NO: 148279 - DNA, 15 bp, Unknown
  misc_feature (1)..( 15): Result.004 file - promoters60/5664873
accaaaataaaataa

SEQ ID NO: 148280 - DNA, 15 bp, Unknown
  misc_feature (1)..( 15): Result.004 file - promoters60/5664873
tataaccaaaaataa

SEQ ID NO: 148281 - DNA, 15 bp, Unknown
  misc_feature (1)..( 15): Result.004 file - promoters60/5664942
aacactggaaacttt

SEQ ID NO: 148282 - DNA, 8 bp, Unknown
  misc_feature (1)..( 8): Result.004 file - promoters60/5664942
cataccag

SEQ ID NO: 148283 - DNA, 8 bp, Unknown
  misc_feature (1)..( 8): Result.004 file - promoters60/5664942
cataacag

SEQ ID NO: 148284 - DNA, 6 bp, Unknown
  misc_feature (1)..( 6): Result.004 file - promoters60/5664942
aactta

SEQ ID NO: 148285 - DNA, 6 bp, Unknown
  misc_feature (1)..( 6): Result.004 file - promoters60/5664942
aactta

SEQ ID NO: 148286 - DNA, 6 bp, Unknown
  misc_feature (1)..( 6): Result.004 file - promoters60/5664942
ctttct

SEQ ID NO: 148287 - DNA, 6 bp, Unknown
  misc_feature (1)..( 6): Result.004 file - promoters60/5664942
ctttct

SEQ ID NO: 148288 - DNA, 6 bp, Unknown
  misc_feature (1)..( 6): Result.004 file - promoters60/5664942
aaaatc

SEQ ID NO: 148289 - DNA, 6 bp, Unknown
  misc_feature (1)..( 6): Result.004 file - promoters60/5664942
aaaatc

SEQ ID NO: 148290 - DNA, 6 bp, Unknown
  misc_feature (1)..( 6): Result.004 file - promoters60/5664942
aaaatc

SEQ ID NO: 148291 - DNA, 6 bp, Unknown
  misc_feature (1)..( 6): Result.004 file - promoters60/5664942
aataat

SEQ ID NO: 148292 - DNA, 6 bp, Unknown
  misc_feature (1)..( 6): Result.004 file - promoters60/5664942
aataat

SEQ ID NO: 148293 - DNA, 6 bp, Unknown
  misc_feature (1)..( 6): Result.004 file - promoters60/5664942
acatct

SEQ ID NO: 148294 - DNA, 6 bp, Unknown
  misc_feature (1)..( 6): Result.004 file - promoters60/5664942
acatct

SEQ ID NO: 148295 - DNA, 6 bp, Unknown
  misc_feature (1)..( 6): Result.004 file - promoters60/5664942
tataag

SEQ ID NO: 148296 - DNA, 6 bp, Unknown
  misc_feature (1)..( 6): Result.004 file - promoters60/5664942
tataag

SEQ ID NO: 148297 - DNA, 8 bp, Unknown
  misc_feature (1)..( 8): Result.004 file - promoters60/5664942
tacctttc

SEQ ID NO: 148298 - DNA, 8 bp, Unknown
  misc_feature (1)..( 8): Result.004 file - promoters60/5664942
tacatttc

SEQ ID NO: 148299 - DNA, 7 bp, Unknown
  misc_feature (1)..( 7): Result.004 file - promoters60/5664942
atatata

SEQ ID NO: 148300 - DNA, 7 bp, Unknown
  misc_feature (1)..( 7): Result.004 file - promoters60/5664942
atacata

SEQ ID NO: 148301 - DNA, 6 bp, Unknown
  misc_feature (1)..( 6): Result.004 file - promoters60/5664942
cttcat

SEQ ID NO: 148302 - DNA, 6 bp, Unknown
  misc_feature (1)..( 6): Result.004 file - promoters60/5664942
cttcat

SEQ ID NO: 148303 - DNA, 7 bp, Unknown
  misc_feature (1)..( 7): Result.004 file - promoters60/5664942
tttctat

SEQ ID NO: 148304 - DNA, 7 bp, Unknown
  misc_feature (1)..( 7): Result.004 file - promoters60/5665083
tttttat

SEQ ID NO: 148305 - DNA, 7 bp, Unknown
  misc_feature (1)..( 7): Result.004 file - promoters60/5665083
tcgacaa

SEQ ID NO: 148306 - DNA, 7 bp, Unknown
  misc_feature (1)..( 7): Result.004 file - promoters60/5665083
tcgtcaa

SEQ ID NO: 148307 - DNA, 7 bp, Unknown
  misc_feature (1)..( 7): Result.004 file - promoters60/5665083
gttttta

SEQ ID NO: 148308 - DNA, 7 bp, Unknown
  misc_feature (1)..( 7): Result.004 file - promoters60/5665083
gttttta

SEQ ID NO: 148309 - DNA, 7 bp, Unknown
  misc_feature (1)..( 7): Result.004 file - promoters60/5665083
tttttta

SEQ ID NO: 148310 - DNA, 7 bp, Unknown
  misc_feature (1)..( 7): Result.004 file - promoters60/5665083
gaatcac

SEQ ID NO: 148311 - DNA, 7 bp, Unknown
  misc_feature (1)..( 7): Result.004 file - promoters60/5665083
gaaacac

SEQ ID NO: 148312 - DNA, 8 bp, Unknown
  misc_feature (1)..( 8): Result.004 file - promoters60/5665083
tctctatt

SEQ ID NO: 148313 - DNA, 8 bp, Unknown
  misc_feature (1)..( 8): Result.004 file - promoters60/5665083
tctttatt

SEQ ID NO: 148314 - DNA, 6 bp, Unknown
  misc_feature (1)..( 6): Result.004 file - promoters60/5665083
taaaaa

SEQ ID NO: 148315 - DNA, 6 bp, Unknown
  misc_feature (1)..( 6): Result.004 file - promoters60/5665083
taaaaa

SEQ ID NO: 148316 - DNA, 8 bp, Unknown
  misc_feature (1)..( 8): Result.004 file - promoters60/5665083
tggagtgt

SEQ ID NO: 148317 - DNA, 8 bp, Unknown
  misc_feature (1)..( 8): Result.004 file - promoters60/5665083
tggactgt

SEQ ID NO: 148318 - DNA, 7 bp, Unknown
  misc_feature (1)..( 7): Result.004 file - promoters60/5665083
atcttat

SEQ ID NO: 148319 - DNA, 7 bp, Unknown
  misc_feature (1)..( 7): Result.004 file - promoters60/5665083
atcctat

SEQ ID NO: 148320 - DNA, 6 bp, Unknown
  misc_feature (1)..( 6): Result.004 file - promoters60/5665083
tgaacc

SEQ ID NO: 148321 - DNA, 6 bp, Unknown
  misc_feature (1)..( 6): Result.004 file - promoters60/5665083
tgaacc

SEQ ID NO: 148322 - DNA, 6 bp, Unknown
  misc_feature (1)..( 6): Result.004 file - promoters60/5665083
ttacat

SEQ ID NO: 148323 - DNA, 6 bp, Unknown
  misc_feature (1)..( 6): Result.004 file - promoters60/5665083
ttacat

SEQ ID NO: 148324 - DNA, 7 bp, Unknown
  misc_feature (1)..( 7): Result.004 file - promoters60/5665083
gtgtttt

SEQ ID NO: 148325 - DNA, 7 bp, Unknown
  misc_feature (1)..( 7): Result.004 file - promoters60/5665083
gtgattt

SEQ ID NO: 148326 - DNA, 10 bp, Unknown
  misc_feature (1)..( 10): Result.004 file - promoters60/5665083
ttttgaatct

SEQ ID NO: 148327 - DNA, 10 bp, Unknown
  misc_feature (1)..( 10): Result.004 file - promoters60/5665083
tttttaatct

SEQ ID NO: 148328 - DNA, 7 bp, Unknown
  misc_feature (1)..( 7): Result.004 file - promoters60/5665083
tataatc

SEQ ID NO: 148329 - DNA, 7 bp, Unknown
  misc_feature (1)..( 7): Result.004 file - promoters60/5665083
tatgatc

SEQ ID NO: 148330 - DNA, 6 bp, Unknown
  misc_feature (1)..( 6): Result.004 file - promoters60/5665083
atattg

SEQ ID NO: 148331 - DNA, 6 bp, Unknown
  misc_feature (1)..( 6): Result.004 file - promoters60/5665083
atattg

SEQ ID NO: 148332 - DNA, 7 bp, Unknown
  misc_feature (1)..( 7): Result.004 file - promoters60/5665083
tattgtt

SEQ ID NO: 148333 - DNA, 7 bp, Unknown
  misc_feature (1)..( 7): Result.004 file - promoters60/5665083
tatagtt

SEQ ID NO: 148334 - DNA, 11 bp, Unknown
  misc_feature (1)..( 11): Result.004 file - promoters60/5665083
aaacttcatct

SEQ ID NO: 148335 - DNA, 11 bp, Unknown
  misc_feature (1)..( 11): Result.004 file - promoters60/5665083
aaagttcatct

SEQ ID NO: 148336 - DNA, 7 bp, Unknown
  misc_feature (1)..( 7): Result.004 file - promoters60/5665083
tatatgt

SEQ ID NO: 148337 - DNA, 7 bp, Unknown
  misc_feature (1)..( 7): Result.004 file - promoters60/5665083
tatgtgt

SEQ ID NO: 148338 - DNA, 7 bp, Unknown
  misc_feature (1)..( 7): Result.004 file - promoters60/5665083
taagatt

SEQ ID NO: 148339 - DNA, 7 bp, Unknown
  misc_feature (1)..( 7): Result.004 file - promoters60/5665083
taagatt

SEQ ID NO: 148340 - DNA, 7 bp, Unknown
  misc_feature (1)..( 7): Result.004 file - promoters60/5665083
tggttat

SEQ ID NO: 148341 - DNA, 7 bp, Unknown
  misc_feature (1)..( 7): Result.004 file - promoters60/5665140
tggatat

SEQ ID NO: 148342 - DNA, 16 bp, Unknown
  misc_feature (1)..( 16): Result.004 file - promoters60/5665140
gttgatttaatcataa

SEQ ID NO: 148343 - DNA, 16 bp, Unknown
  misc_feature (1)..( 16): Result.004 file - promoters60/5665140
ctccatttaatttttt

SEQ ID NO: 148344 - DNA, 16 bp, Unknown
  misc_feature (1)..( 16): Result.004 file - promoters60/5665140
gaaactttaatgaatg

SEQ ID NO: 148345 - DNA, 16 bp, Unknown
  misc_feature (1)..( 16): Result.004 file - promoters60/5665140
gtgatttgaattaaac

SEQ ID NO: 148346 - DNA, 16 bp, Unknown
  misc_feature (1)..( 16): Result.004 file - promoters60/5665140
gaaagtttaaaaaggc

SEQ ID NO: 148347 - DNA, 16 bp, Unknown
  misc_feature (1)..( 16): Result.004 file - promoters60/5665140
ccacagatcatgaaag

SEQ ID NO: 148348 - DNA, 11 bp, Unknown
  misc_feature (1)..( 11): Result.004 file - promoters60/5665140
tttaaaataaa

SEQ ID NO: 148349 - DNA, 11 bp, Unknown
  misc_feature (1)..( 11): Result.004 file - promoters60/5665140
gataacataga

SEQ ID NO: 148350 - DNA, 11 bp, Unknown
  misc_feature (1)..( 11): Result.004 file - promoters60/5665140
tttaaaacatg

SEQ ID NO: 148351 - DNA, 11 bp, Unknown
  misc_feature (1)..( 11): Result.004 file - promoters60/5665140
agtaacttagg

SEQ ID NO: 148352 - DNA, 11 bp, Unknown
  misc_feature (1)..( 11): Result.004 file - promoters60/5665140
ttggacataga

SEQ ID NO: 148353 - DNA, 11 bp, Unknown
  misc_feature (1)..( 11): Result.004 file - promoters60/5665140
gtttaatgtta

SEQ ID NO: 148354 - DNA, 11 bp, Unknown
  misc_feature (1)..( 11): Result.004 file - promoters60/5665140
gttaaatgtat

SEQ ID NO: 148355 - DNA, 11 bp, Unknown
  misc_feature (1)..( 11): Result.004 file - promoters60/5665140
atttattgttt

SEQ ID NO: 148356 - DNA, 11 bp, Unknown
  misc_feature (1)..( 11): Result.004 file - promoters60/5665140
accaaatctta

SEQ ID NO: 148357 - DNA, 11 bp, Unknown
  misc_feature (1)..( 11): Result.004 file - promoters60/5665140
aataaagctta

SEQ ID NO: 148358 - DNA, 11 bp, Unknown
  misc_feature (1)..( 11): Result.004 file - promoters60/5665140
agacattgttg

SEQ ID NO: 148359 - DNA, 10 bp, Unknown
  misc_feature (1)..( 10): Result.004 file - promoters60/5665140
tttaatgtta

SEQ ID NO: 148360 - DNA, 10 bp, Unknown
  misc_feature (1)..( 10): Result.004 file - promoters60/5665140
tagtatgtta

SEQ ID NO: 148361 - DNA, 10 bp, Unknown
  misc_feature (1)..( 10): Result.004 file - promoters60/5665140
tttattgttt

SEQ ID NO: 148362 - DNA, 10 bp, Unknown
  misc_feature (1)..( 10): Result.004 file - promoters60/5665140
ccaaatctta

SEQ ID NO: 148363 - DNA, 10 bp, Unknown
  misc_feature (1)..( 10): Result.004 file - promoters60/5665140
ataaagctta

SEQ ID NO: 148364 - DNA, 10 bp, Unknown
  misc_feature (1)..( 10): Result.004 file - promoters60/5665140
gacattgttg

SEQ ID NO: 148365 - DNA, 9 bp, Unknown
  misc_feature (1)..( 9): Result.004 file - promoters60/5665140
acaataaaa

SEQ ID NO: 148366 - DNA, 9 bp, Unknown
  misc_feature (1)..( 9): Result.004 file - promoters60/5665140
gcaaaaaaa

SEQ ID NO: 148367 - DNA, 9 bp, Unknown
  misc_feature (1)..( 9): Result.004 file - promoters60/5665140
acattaaca

SEQ ID NO: 148368 - DNA, 9 bp, Unknown
  misc_feature (1)..( 9): Result.004 file - promoters60/5665140
gtcataaaa

SEQ ID NO: 148369 - DNA, 9 bp, Unknown
  misc_feature (1)..( 9): Result.004 file - promoters60/5665140
gcaagattc

SEQ ID NO: 148370 - DNA, 8 bp, Unknown
  misc_feature (1)..( 8): Result.004 file - promoters60/5665140
aaatcaaa

SEQ ID NO: 148371 - DNA, 8 bp, Unknown
  misc_feature (1)..( 8): Result.004 file - promoters60/5665140
aaaacaat

SEQ ID NO: 148372 - DNA, 8 bp, Unknown
  misc_feature (1)..( 8): Result.004 file - promoters60/5665140
aaatcaaa

SEQ ID NO: 148373 - DNA, 8 bp, Unknown
  misc_feature (1)..( 8): Result.004 file - promoters60/5665140
aaaacatg

SEQ ID NO: 148374 - DNA, 8 bp, Unknown
  misc_feature (1)..( 8): Result.004 file - promoters60/5665140
tataaata

SEQ ID NO: 148375 - DNA, 8 bp, Unknown
  misc_feature (1)..( 8): Result.004 file - promoters60/5665140
aataaata

SEQ ID NO: 148376 - DNA, 8 bp, Unknown
  misc_feature (1)..( 8): Result.004 file - promoters60/5665140
aataaata

SEQ ID NO: 148377 - DNA, 8 bp, Unknown
  misc_feature (1)..( 8): Result.004 file - promoters60/5665140
tataaata

SEQ ID NO: 148378 - DNA, 8 bp, Unknown
  misc_feature (1)..( 8): Result.004 file - promoters60/5665140
aaacatag

SEQ ID NO: 148379 - DNA, 8 bp, Unknown
  misc_feature (1)..( 8): Result.004 file - promoters60/5665140
taacttag

SEQ ID NO: 148380 - DNA, 8 bp, Unknown
  misc_feature (1)..( 8): Result.004 file - promoters60/5665140
aaacatgt

SEQ ID NO: 148381 - DNA, 8 bp, Unknown
  misc_feature (1)..( 8): Result.004 file - promoters60/5665140
ggacatag

SEQ ID NO: 148382 - DNA, 8 bp, Unknown
  misc_feature (1)..( 8): Result.004 file - promoters60/5665140
taacatag

SEQ ID NO: 148383 - DNA, 13 bp, Unknown
  misc_feature (1)..( 13): Result.004 file - promoters60/5665140
aaaacaatagatt

SEQ ID NO: 148384 - DNA, 13 bp, Unknown
  misc_feature (1)..( 13): Result.004 file - promoters60/5665140
ttaacaatatatt

SEQ ID NO: 148385 - DNA, 13 bp, Unknown
  misc_feature (1)..( 13): Result.004 file - promoters60/5665140
aaaacaatgaatt

SEQ ID NO: 148386 - DNA, 13 bp, Unknown
  misc_feature (1)..( 13): Result.004 file - promoters60/5665140
tgaataatgaaaa

SEQ ID NO: 148387 - DNA, 10 bp, Unknown
  misc_feature (1)..( 10): Result.004 file - promoters60/5665140
tgtaattacg

SEQ ID NO: 148388 - DNA, 10 bp, Unknown
  misc_feature (1)..( 10): Result.004 file - promoters60/5665140
tctaattatt

SEQ ID NO: 148389 - DNA, 10 bp, Unknown
  misc_feature (1)..( 10): Result.004 file - promoters60/5665140
caaaattacg

SEQ ID NO: 148390 - DNA, 10 bp, Unknown
  misc_feature (1)..( 10): Result.004 file - promoters60/5665140
aataatttag

SEQ ID NO: 148391 - DNA, 11 bp, Unknown
  misc_feature (1)..( 11): Result.004 file - promoters60/5665140
ttaccaaatca

SEQ ID NO: 148392 - DNA, 11 bp, Unknown
  misc_feature (1)..( 11): Result.004 file - promoters60/5665140
cacacaattca

SEQ ID NO: 148393 - DNA, 11 bp, Unknown
  misc_feature (1)..( 11): Result.004 file - promoters60/5665140
catacaattca

SEQ ID NO: 148394 - DNA, 11 bp, Unknown
  misc_feature (1)..( 11): Result.004 file - promoters60/5665140
catgcaattcc

SEQ ID NO: 148395 - DNA, 9 bp, Unknown
  misc_feature (1)..( 9): Result.004 file - promoters60/5665140
tgtatcatg

SEQ ID NO: 148396 - DNA, 9 bp, Unknown
  misc_feature (1)..( 9): Result.004 file - promoters60/5665140
aatataatg

SEQ ID NO: 148397 - DNA, 9 bp, Unknown
  misc_feature (1)..( 9): Result.004 file - promoters60/5665140
aatttaaat

SEQ ID NO: 148398 - DNA, 10 bp, Unknown
  misc_feature (1)..( 10): Result.004 file - promoters60/5665140
gatttgaatt

SEQ ID NO: 148399 - DNA, 17 bp, Unknown
  misc_feature (1)..( 17): Result.004 file - promoters60/5665140
taatttaactgataaaa

SEQ ID NO: 148400 - DNA, 17 bp, Unknown
  misc_feature (1)..( 17): Result.004 file - promoters60/5665140
ctagtcatgtcataaaa

SEQ ID NO: 148401 - DNA, 17 bp, Unknown
  misc_feature (1)..( 17): Result.004 file - promoters60/5665140
taatctaattgataaac

SEQ ID NO: 148402 - DNA, 17 bp, Unknown
  misc_feature (1)..( 17): Result.004 file - promoters60/5665140
acattaacatcatcaaa

SEQ ID NO: 148403 - DNA, 10 bp, Unknown
  misc_feature (1)..( 10): Result.004 file - promoters60/5665140
aaaaaacaat

SEQ ID NO: 148404 - DNA, 10 bp, Unknown
  misc_feature (1)..( 10): Result.004 file - promoters60/5665140
aaaaaactgt

SEQ ID NO: 148405 - DNA, 10 bp, Unknown
  misc_feature (1)..( 10): Result.004 file - promoters60/5665140
ttaaaacaat

SEQ ID NO: 148406 - DNA, 10 bp, Unknown
  misc_feature (1)..( 10): Result.004 file - promoters60/5665234
aaaaaaagat

SEQ ID NO: 148407 - DNA, 9 bp, Unknown
  misc_feature (1)..( 9): Result.004 file - promoters60/5665234
gaaaaaaag

SEQ ID NO: 148408 - DNA, 9 bp, Unknown
  misc_feature (1)..( 9): Result.004 file - promoters60/5665234
caaacaaat

SEQ ID NO: 148409 - DNA, 9 bp, Unknown
  misc_feature (1)..( 9): Result.004 file - promoters60/5665234
caaagaaag

SEQ ID NO: 148410 - DNA, 9 bp, Unknown
  misc_feature (1)..( 9): Result.004 file - promoters60/5665234
caaaaaaaa

SEQ ID NO: 148411 - DNA, 9 bp, Unknown
  misc_feature (1)..( 9): Result.004 file - promoters60/5665234
caaacacaa

SEQ ID NO: 148412 - DNA, 9 bp, Unknown
  misc_feature (1)..( 9): Result.004 file - promoters60/5665283
caaggaaag

SEQ ID NO: 148413 - DNA, 10 bp, Unknown
  misc_feature (1)..( 10): Result.004 file - promoters60/5665283
ttttaagaga

SEQ ID NO: 148414 - DNA, 10 bp, Unknown
  misc_feature (1)..( 10): Result.004 file - promoters60/5665283
ttttaaaaga

SEQ ID NO: 148415 - DNA, 10 bp, Unknown
  misc_feature (1)..( 10): Result.004 file - promoters60/5665283
tttcaaattg

SEQ ID NO: 148416 - DNA, 7 bp, Unknown
  misc_feature (1)..( 7): Result.004 file - promoters60/5665283
caataat

SEQ ID NO: 148417 - DNA, 7 bp, Unknown
  misc_feature (1)..( 7): Result.004 file - promoters60/5665283
caataat

SEQ ID NO: 148418 - DNA, 7 bp, Unknown
  misc_feature (1)..( 7): Result.004 file - promoters60/5665283
attattg

SEQ ID NO: 148419 - DNA, 7 bp, Unknown
  misc_feature (1)..( 7): Result.004 file - promoters60/5665283
attattg

SEQ ID NO: 148420 - DNA, 7 bp, Unknown
  misc_feature (1)..( 7): Result.004 file - promoters60/5665283
caccaag

SEQ ID NO: 148421 - DNA, 7 bp, Unknown
  misc_feature (1)..( 7): Result.004 file - promoters60/5665283
cacaaag

SEQ ID NO: 148422 - DNA, 6 bp, Unknown
  misc_feature (1)..( 6): Result.004 file - promoters60/5665283
taccct

SEQ ID NO: 148423 - DNA, 6 bp, Unknown
  misc_feature (1)..( 6): Result.004 file - promoters60/5665283
taccct

SEQ ID NO: 148424 - DNA, 10 bp, Unknown
  misc_feature (1)..( 10): Result.004 file - promoters60/5665283
attatttttt

SEQ ID NO: 148425 - DNA, 10 bp, Unknown
  misc_feature (1)..( 10): Result.004 file - promoters60/5665283
attacttttt

SEQ ID NO: 148426 - DNA, 7 bp, Unknown
  misc_feature (1)..( 7): Result.004 file - promoters60/5665283
gatttat

SEQ ID NO: 148427 - DNA, 7 bp, Unknown
  misc_feature (1)..( 7): Result.004 file - promoters60/5665283
gatatat

SEQ ID NO: 148428 - DNA, 6 bp, Unknown
  misc_feature (1)..( 6): Result.004 file - promoters60/5665283
caaaag

SEQ ID NO: 148429 - DNA, 6 bp, Unknown
  misc_feature (1)..( 6): Result.004 file - promoters60/5665283
caaaag

SEQ ID NO: 148430 - DNA, 7 bp, Unknown
  misc_feature (1)..( 7): Result.004 file - promoters60/5665283
ttgggtt

SEQ ID NO: 148431 - DNA, 7 bp, Unknown
  misc_feature (1)..( 7): Result.004 file - promoters60/5665283
ttgagtt

SEQ ID NO: 148432 - DNA, 7 bp, Unknown
  misc_feature (1)..( 7): Result.004 file - promoters60/5665283
atatcta

SEQ ID NO: 148433 - DNA, 7 bp, Unknown
  misc_feature (1)..( 7): Result.004 file - promoters60/5665283
atagcta

SEQ ID NO: 148434 - DNA, 10 bp, Unknown
  misc_feature (1)..( 10): Result.004 file - promoters60/5665283
actatatata

SEQ ID NO: 148435 - DNA, 10 bp, Unknown
  misc_feature (1)..( 10): Result.004 file - promoters60/5665283
actctatata

SEQ ID NO: 148436 - DNA, 8 bp, Unknown
  misc_feature (1)..( 8): Result.004 file - promoters60/5665283
acatagga

SEQ ID NO: 148437 - DNA, 8 bp, Unknown
  misc_feature (1)..( 8): Result.004 file - promoters60/5665283
acattgga

SEQ ID NO: 148438 - DNA, 6 bp, Unknown
  misc_feature (1)..( 6): Result.004 file - promoters60/5665283
tatttt

SEQ ID NO: 148439 - DNA, 6 bp, Unknown
  misc_feature (1)..( 6): Result.004 file - promoters60/5665283
tatttt

SEQ ID NO: 148440 - DNA, 13 bp, Unknown
  misc_feature (1)..( 13): Result.004 file - promoters60/5665283
attggatagatat

SEQ ID NO: 148441 - DNA, 13 bp, Unknown
  misc_feature (1)..( 13): Result.004 file - promoters60/5665283
attgtatacatat

SEQ ID NO: 148442 - DNA, 6 bp, Unknown
  misc_feature (1)..( 6): Result.004 file - promoters60/5665283
gaacat

SEQ ID NO: 148443 - DNA, 6 bp, Unknown
  misc_feature (1)..( 6): Result.004 file - promoters60/5665283
gaacat

SEQ ID NO: 148444 - DNA, 6 bp, Unknown
  misc_feature (1)..( 6): Result.004 file - promoters60/5665283
tttata

SEQ ID NO: 148445 - DNA, 6 bp, Unknown
  misc_feature (1)..( 6): Result.004 file - promoters60/5665283
tttata

SEQ ID NO: 148446 - DNA, 8 bp, Unknown
  misc_feature (1)..( 8): Result.004 file - promoters60/5665283
aatcttta

SEQ ID NO: 148447 - DNA, 8 bp, Unknown
  misc_feature (1)..( 8): Result.004 file - promoters60/5665283
aatgttta

SEQ ID NO: 148448 - DNA, 6 bp, Unknown
  misc_feature (1)..( 6): Result.004 file - promoters60/5665283
ttaata

SEQ ID NO: 148449 - DNA, 6 bp, Unknown
  misc_feature (1)..( 6): Result.004 file - promoters60/5665283
ttaata

SEQ ID NO: 148450 - DNA, 7 bp, Unknown
  misc_feature (1)..( 7): Result.004 file - promoters60/5665283
taacgct

SEQ ID NO: 148451 - DNA, 7 bp, Unknown
  misc_feature (1)..( 7): Result.004 file - promoters60/5665283
taatgct

SEQ ID NO: 148452 - DNA, 6 bp, Unknown
  misc_feature (1)..( 6): Result.004 file - promoters60/5665283
aacaac

SEQ ID NO: 148453 - DNA, 6 bp, Unknown
  misc_feature (1)..( 6): Result.004 file - promoters60/5665283
aacaac

SEQ ID NO: 148454 - DNA, 8 bp, Unknown
  misc_feature (1)..( 8): Result.004 file - promoters60/5665283
gtaataat

SEQ ID NO: 148455 - DNA, 8 bp, Unknown
  misc_feature (1)..( 8): Result.004 file - promoters60/5665314
gtattaat

SEQ ID NO: 148456 - DNA, 7 bp, Unknown
  misc_feature (1)..( 7): Result.004 file - promoters60/5665314
aaataaa

SEQ ID NO: 148457 - DNA, 7 bp, Unknown
  misc_feature (1)..( 7): Result.004 file - promoters60/5665314
aaacaaa

SEQ ID NO: 148458 - DNA, 7 bp, Unknown
  misc_feature (1)..( 7): Result.004 file - promoters60/5665314
aaatgaa

SEQ ID NO: 148459 - DNA, 7 bp, Unknown
  misc_feature (1)..( 7): Result.004 file - promoters60/5665314
aaaagaa

SEQ ID NO: 148460 - DNA, 6 bp, Unknown
  misc_feature (1)..( 6): Result.004 file - promoters60/5665314
gacaaa

SEQ ID NO: 148461 - DNA, 6 bp, Unknown
  misc_feature (1)..( 6): Result.004 file - promoters60/5665314
gacaaa

SEQ ID NO: 148462 - DNA, 8 bp, Unknown
  misc_feature (1)..( 8): Result.004 file - promoters60/5665314
ttttttat

SEQ ID NO: 148463 - DNA, 8 bp, Unknown
  misc_feature (1)..( 8): Result.004 file - promoters60/5665314
tttattat

SEQ ID NO: 148464 - DNA, 7 bp, Unknown
  misc_feature (1)..( 7): Result.004 file - promoters60/5665314
aactgaa

SEQ ID NO: 148465 - DNA, 7 bp, Unknown
  misc_feature (1)..( 7): Result.004 file - promoters60/5665314
aacagaa

SEQ ID NO: 148466 - DNA, 8 bp, Unknown
  misc_feature (1)..( 8): Result.004 file - promoters60/5665314
ttttgata

SEQ ID NO: 148467 - DNA, 8 bp, Unknown
  misc_feature (1)..( 8): Result.004 file - promoters60/5665314
ttttgagt

SEQ ID NO: 148468 - DNA, 8 bp, Unknown
  misc_feature (1)..( 8): Result.004 file - promoters60/5665314
gtttgagt

SEQ ID NO: 148469 - DNA, 7 bp, Unknown
  misc_feature (1)..( 7): Result.004 file - promoters60/5665314
tgtctct

SEQ ID NO: 148470 - DNA, 7 bp, Unknown
  misc_feature (1)..( 7): Result.004 file - promoters60/5665314
tgtatct

SEQ ID NO: 148471 - DNA, 6 bp, Unknown
  misc_feature (1)..( 6): Result.004 file - promoters60/5665314
taataa

SEQ ID NO: 148472 - DNA, 6 bp, Unknown
  misc_feature (1)..( 6): Result.004 file - promoters60/5665314
taataa

SEQ ID NO: 148473 - DNA, 8 bp, Unknown
  misc_feature (1)..( 8): Result.004 file - promoters60/5665314
taaaggat

SEQ ID NO: 148474 - DNA, 8 bp, Unknown
  misc_feature (1)..( 8): Result.004 file - promoters60/5665314
taaaggag

SEQ ID NO: 148475 - DNA, 8 bp, Unknown
  misc_feature (1)..( 8): Result.004 file - promoters60/5665314
agaaggag

SEQ ID NO: 148476 - DNA, 6 bp, Unknown
  misc_feature (1)..( 6): Result.004 file - promoters60/5665314
ttcctg

SEQ ID NO: 148477 - DNA, 6 bp, Unknown
  misc_feature (1)..( 6): Result.004 file - promoters60/5665314
ttcctg

SEQ ID NO: 148478 - DNA, 10 bp, Unknown
  misc_feature (1)..( 10): Result.004 file - promoters60/5665314
gggtttatga

SEQ ID NO: 148479 - DNA, 10 bp, Unknown
  misc_feature (1)..( 10): Result.004 file - promoters60/5665314
gggtttgtga

SEQ ID NO: 148480 - DNA, 8 bp, Unknown
  misc_feature (1)..( 8): Result.004 file - promoters60/5665314
tggaggaa

SEQ ID NO: 148481 - DNA, 8 bp, Unknown
  misc_feature (1)..( 8): Result.004 file - promoters60/5665314
tggaagaa

SEQ ID NO: 148482 - DNA, 6 bp, Unknown
  misc_feature (1)..( 6): Result.004 file - promoters60/5665314
acctgt

SEQ ID NO: 148483 - DNA, 6 bp, Unknown
  misc_feature (1)..( 6): Result.004 file - promoters60/5665314
acctgt

SEQ ID NO: 148484 - DNA, 6 bp, Unknown
  misc_feature (1)..( 6): Result.004 file - promoters60/5665314
cacaag

SEQ ID NO: 148485 - DNA, 6 bp, Unknown
  misc_feature (1)..( 6): Result.004 file - promoters60/5665314
cacaag

SEQ ID NO: 148486 - DNA, 7 bp, Unknown
  misc_feature (1)..( 7): Result.004 file - promoters60/5665314
gaagctt

SEQ ID NO: 148487 - DNA, 7 bp, Unknown
  misc_feature (1)..( 7): Result.004 file - promoters60/5665326
gaatctt

SEQ ID NO: 148488 - DNA, 13 bp, Unknown
  misc_feature (1)..( 13): Result.004 file - promoters60/5665326
aatgaatattaga

SEQ ID NO: 148489 - DNA, 13 bp, Unknown
  misc_feature (1)..( 13): Result.004 file - promoters60/5665326
aattaatgacgat

SEQ ID NO: 148490 - DNA, 13 bp, Unknown
  misc_feature (1)..( 13): Result.004 file - promoters60/5665326
gatgaattccggt

SEQ ID NO: 148491 - DNA, 13 bp, Unknown
  misc_feature (1)..( 13): Result.004 file - promoters60/5665326
tctgaatattaga

SEQ ID NO: 148492 - DNA, 13 bp, Unknown
  misc_feature (1)..( 13): Result.004 file - promoters60/5665326
atataataaatag

SEQ ID NO: 148493 - DNA, 13 bp, Unknown
  misc_feature (1)..( 13): Result.004 file - promoters60/5665326
gcataaaaaataa

SEQ ID NO: 148494 - DNA, 13 bp, Unknown
  misc_feature (1)..( 13): Result.004 file - promoters60/5665326
ttattatacttct

SEQ ID NO: 148495 - DNA, 13 bp, Unknown
  misc_feature (1)..( 13): Result.004 file - promoters60/5665326
tcacaatgaatgg

SEQ ID NO: 148496 - DNA, 13 bp, Unknown
  misc_feature (1)..( 13): Result.004 file - promoters60/5665326
atataattatctc

SEQ ID NO: 148497 - DNA, 13 bp, Unknown
  misc_feature (1)..( 13): Result.004 file - promoters60/5665326
ttgaaatcattat

SEQ ID NO: 148498 - DNA, 10 bp, Unknown
  misc_feature (1)..( 10): Result.004 file - promoters60/5665326
gtatatatat

SEQ ID NO: 148499 - DNA, 10 bp, Unknown
  misc_feature (1)..( 10): Result.004 file - promoters60/5665326
aaataaatag

SEQ ID NO: 148500 - DNA, 10 bp, Unknown
  misc_feature (1)..( 10): Result.004 file - promoters60/5665326
caatgaatgg

SEQ ID NO: 148501 - DNA, 10 bp, Unknown
  misc_feature (1)..( 10): Result.004 file - promoters60/5665326
aaatatataa

SEQ ID NO: 148502 - DNA, 10 bp, Unknown
  misc_feature (1)..( 10): Result.004 file - promoters60/5665326
gaaaaaataa

SEQ ID NO: 148503 - DNA, 9 bp, Unknown
  misc_feature (1)..( 9): Result.004 file - promoters60/5665326
aaattaata

SEQ ID NO: 148504 - DNA, 9 bp, Unknown
  misc_feature (1)..( 9): Result.004 file - promoters60/5665326
taattaagt

SEQ ID NO: 148505 - DNA, 9 bp, Unknown
  misc_feature (1)..( 9): Result.004 file - promoters60/5665326
aaatcaata

SEQ ID NO: 148506 - DNA, 9 bp, Unknown
  misc_feature (1)..( 9): Result.004 file - promoters60/5665326
aaaataaaa

SEQ ID NO: 148507 - DNA, 9 bp, Unknown
  misc_feature (1)..( 9): Result.004 file - promoters60/5665326
taattatta

SEQ ID NO: 148508 - DNA, 9 bp, Unknown
  misc_feature (1)..( 9): Result.004 file - promoters60/5665326
tgttatata

SEQ ID NO: 148509 - DNA, 9 bp, Unknown
  misc_feature (1)..( 9): Result.004 file - promoters60/5665326
ctttatata

SEQ ID NO: 148510 - DNA, 9 bp, Unknown
  misc_feature (1)..( 9): Result.004 file - promoters60/5665326
tattatata

SEQ ID NO: 148511 - DNA, 9 bp, Unknown
  misc_feature (1)..( 9): Result.004 file - promoters60/5665326
ctttataca

SEQ ID NO: 148512 - DNA, 9 bp, Unknown
  misc_feature (1)..( 9): Result.004 file - promoters60/5665326
aaactatac

SEQ ID NO: 148513 - DNA, 9 bp, Unknown
  misc_feature (1)..( 9): Result.004 file - promoters60/5665326
ttactttac

SEQ ID NO: 148514 - DNA, 9 bp, Unknown
  misc_feature (1)..( 9): Result.004 file - promoters60/5665326
atacttttt

SEQ ID NO: 148515 - DNA, 9 bp, Unknown
  misc_feature (1)..( 9): Result.004 file - promoters60/5665326
atacttttt

SEQ ID NO: 148516 - DNA, 9 bp, Unknown
  misc_feature (1)..( 9): Result.004 file - promoters60/5665326
tttgttggt

SEQ ID NO: 148517 - DNA, 9 bp, Unknown
  misc_feature (1)..( 9): Result.004 file - promoters60/5665326
tttgttggt

SEQ ID NO: 148518 - DNA, 9 bp, Unknown
  misc_feature (1)..( 9): Result.004 file - promoters60/5665326
tttattgat

SEQ ID NO: 148519 - DNA, 9 bp, Unknown
  misc_feature (1)..( 9): Result.004 file - promoters60/5665326
gttactgat

SEQ ID NO: 148520 - DNA, 9 bp, Unknown
  misc_feature (1)..( 9): Result.004 file - promoters60/5665326
aatatatat

SEQ ID NO: 148521 - DNA, 9 bp, Unknown
  misc_feature (1)..( 9): Result.004 file - promoters60/5665326
aatttattt

SEQ ID NO: 148522 - DNA, 9 bp, Unknown
  misc_feature (1)..( 9): Result.004 file - promoters60/5665326
gctttgttt

SEQ ID NO: 148523 - DNA, 9 bp, Unknown
  misc_feature (1)..( 9): Result.004 file - promoters60/5665326
catttgttt

SEQ ID NO: 148524 - DNA, 10 bp, Unknown
  misc_feature (1)..( 10): Result.004 file - promoters60/5665326
catttttaag

SEQ ID NO: 148525 - DNA, 10 bp, Unknown
  misc_feature (1)..( 10): Result.004 file - promoters60/5665326
tatttttttt

SEQ ID NO: 148526 - DNA, 10 bp, Unknown
  misc_feature (1)..( 10): Result.004 file - promoters60/5665326
catctttgcc

SEQ ID NO: 148527 - DNA, 10 bp, Unknown
  misc_feature (1)..( 10): Result.004 file - promoters60/5665343
actttttttt

SEQ ID NO: 148528 - DNA, 8 bp, Unknown
  misc_feature (1)..( 8): Result.004 file - promoters60/5665343
ttttttta

SEQ ID NO: 148529 - DNA, 8 bp, Unknown
  misc_feature (1)..( 8): Result.004 file - promoters60/5665343
tttttttt

SEQ ID NO: 148530 - DNA, 8 bp, Unknown
  misc_feature (1)..( 8): Result.004 file - promoters60/5665343
ttttttta

SEQ ID NO: 148531 - DNA, 8 bp, Unknown
  misc_feature (1)..( 8): Result.004 file - promoters60/5665343
tttaagtt

SEQ ID NO: 148532 - DNA, 8 bp, Unknown
  misc_feature (1)..( 8): Result.004 file - promoters60/5665343
cctaagtt

SEQ ID NO: 148533 - DNA, 8 bp, Unknown
  misc_feature (1)..( 8): Result.004 file - promoters60/5665343
ttttagtg

SEQ ID NO: 148534 - DNA, 8 bp, Unknown
  misc_feature (1)..( 8): Result.004 file - promoters60/5665343
acttcttt

SEQ ID NO: 148535 - DNA, 8 bp, Unknown
  misc_feature (1)..( 8): Result.004 file - promoters60/5665343
actactta

SEQ ID NO: 148536 - DNA, 8 bp, Unknown
  misc_feature (1)..( 8): Result.004 file - promoters60/5665343
acttattt

SEQ ID NO: 148537 - DNA, 7 bp, Unknown
  misc_feature (1)..( 7): Result.004 file - promoters60/5665343
ttgattc

SEQ ID NO: 148538 - DNA, 7 bp, Unknown
  misc_feature (1)..( 7): Result.004 file - promoters60/5665343
ttgtttc

SEQ ID NO: 148539 - DNA, 7 bp, Unknown
  misc_feature (1)..( 7): Result.004 file - promoters60/5665343
ttgttta

SEQ ID NO: 148540 - DNA, 13 bp, Unknown
  misc_feature (1)..( 13): Result.004 file - promoters60/5665343
ctaaaaactatga

SEQ ID NO: 148541 - DNA, 13 bp, Unknown
  misc_feature (1)..( 13): Result.004 file - promoters60/5665343
aaaaaaactagtt

SEQ ID NO: 148542 - DNA, 13 bp, Unknown
  misc_feature (1)..( 13): Result.004 file - promoters60/5665343
ctaaatactttga

SEQ ID NO: 148543 - DNA, 7 bp, Unknown
  misc_feature (1)..( 7): Result.004 file - promoters60/5665343
gaagaaa

SEQ ID NO: 148544 - DNA, 7 bp, Unknown
  misc_feature (1)..( 7): Result.004 file - promoters60/5665343
gaaaaaa

SEQ ID NO: 148545 - DNA, 7 bp, Unknown
  misc_feature (1)..( 7): Result.004 file - promoters60/5665343
gaggaaa

SEQ ID NO: 148546 - DNA, 8 bp, Unknown
  misc_feature (1)..( 8): Result.004 file - promoters60/5665343
ttatttta

SEQ ID NO: 148547 - DNA, 8 bp, Unknown
  misc_feature (1)..( 8): Result.004 file - promoters60/5665343
ttattttt

SEQ ID NO: 148548 - DNA, 8 bp, Unknown
  misc_feature (1)..( 8): Result.004 file - promoters60/5665351
acatttta

SEQ ID NO: 148549 - DNA, 7 bp, Unknown
  misc_feature (1)..( 7): Result.004 file - promoters60/5665351
ccatttc

SEQ ID NO: 148550 - DNA, 7 bp, Unknown
  misc_feature (1)..( 7): Result.004 file - promoters60/5665351
gcatttc

SEQ ID NO: 148551 - DNA, 7 bp, Unknown
  misc_feature (1)..( 7): Result.004 file - promoters60/5665351
gcatttg

SEQ ID NO: 148552 - DNA, 8 bp, Unknown
  misc_feature (1)..( 8): Result.004 file - promoters60/5665351
caaatgaa

SEQ ID NO: 148553 - DNA, 8 bp, Unknown
  misc_feature (1)..( 8): Result.004 file - promoters60/5665351
caaatggt

SEQ ID NO: 148554 - DNA, 8 bp, Unknown
  misc_feature (1)..( 8): Result.004 file - promoters60/5665351
aaaaggaa

SEQ ID NO: 148555 - DNA, 6 bp, Unknown
  misc_feature (1)..( 6): Result.004 file - promoters60/5665351
accatt

SEQ ID NO: 148556 - DNA, 6 bp, Unknown
  misc_feature (1)..( 6): Result.004 file - promoters60/5665351
accatt

SEQ ID NO: 148557 - DNA, 6 bp, Unknown
  misc_feature (1)..( 6): Result.004 file - promoters60/5665351
atcttt

SEQ ID NO: 148558 - DNA, 6 bp, Unknown
  misc_feature (1)..( 6): Result.004 file - promoters60/5665351
atcttt

SEQ ID NO: 148559 - DNA, 7 bp, Unknown
  misc_feature (1)..( 7): Result.004 file - promoters60/5665351
tgaaatt

SEQ ID NO: 148560 - DNA, 7 bp, Unknown
  misc_feature (1)..( 7): Result.004 file - promoters60/5665351
tgatatt

SEQ ID NO: 148561 - DNA, 9 bp, Unknown
  misc_feature (1)..( 9): Result.004 file - promoters60/5665351
cttcttctc

SEQ ID NO: 148562 - DNA, 9 bp, Unknown
  misc_feature (1)..( 9): Result.004 file - promoters60/5665351
tttcttctt

SEQ ID NO: 148563 - DNA, 9 bp, Unknown
  misc_feature (1)..( 9): Result.004 file - promoters60/5665351
cttattctc

SEQ ID NO: 148564 - DNA, 6 bp, Unknown
  misc_feature (1)..( 6): Result.004 file - promoters60/5665351
tattat

SEQ ID NO: 148565 - DNA, 6 bp, Unknown
  misc_feature (1)..( 6): Result.004 file - promoters60/5665351
tattat

SEQ ID NO: 148566 - DNA, 7 bp, Unknown
  misc_feature (1)..( 7): Result.004 file - promoters60/5665351
tatttga

SEQ ID NO: 148567 - DNA, 7 bp, Unknown
  misc_feature (1)..( 7): Result.004 file - promoters60/5665351
tatatga

SEQ ID NO: 148568 - DNA, 6 bp, Unknown
  misc_feature (1)..( 6): Result.004 file - promoters60/5665351
atcaac

SEQ ID NO: 148569 - DNA, 6 bp, Unknown
  misc_feature (1)..( 6): Result.004 file - promoters60/5665351
atcaac

SEQ ID NO: 148570 - DNA, 8 bp, Unknown
  misc_feature (1)..( 8): Result.004 file - promoters60/5665351
cgaatcca

SEQ ID NO: 148571 - DNA, 8 bp, Unknown
  misc_feature (1)..( 8): Result.004 file - promoters60/5665351
cgaaacca

SEQ ID NO: 148572 - DNA, 7 bp, Unknown
  misc_feature (1)..( 7): Result.004 file - promoters60/5665351
agggatc

SEQ ID NO: 148573 - DNA, 7 bp, Unknown
  misc_feature (1)..( 7): Result.004 file - promoters60/5665351
aggaatc

SEQ ID NO: 148574 - DNA, 6 bp, Unknown
  misc_feature (1)..( 6): Result.004 file - promoters60/5665351
cttctt

SEQ ID NO: 148575 - DNA, 6 bp, Unknown
  misc_feature (1)..( 6): Result.004 file - promoters60/5665351
cttctt

SEQ ID NO: 148576 - DNA, 9 bp, Unknown
  misc_feature (1)..( 9): Result.004 file - promoters60/5665351
aaggttgtt

SEQ ID NO: 148577 - DNA, 9 bp, Unknown
  misc_feature (1)..( 9): Result.004 file - promoters60/5665351
aagattgtt

SEQ ID NO: 148578 - DNA, 6 bp, Unknown
  misc_feature (1)..( 6): Result.004 file - promoters60/5665351
tgatct

SEQ ID NO: 148579 - DNA, 6 bp, Unknown
  misc_feature (1)..( 6): Result.004 file - promoters60/5665351
tgatct

SEQ ID NO: 148580 - DNA, 7 bp, Unknown
  misc_feature (1)..( 7): Result.004 file - promoters60/5665351
tggtaat

SEQ ID NO: 148581 - DNA, 7 bp, Unknown
  misc_feature (1)..( 7): Result.004 file - promoters60/5665359
tggtaat

SEQ ID NO: 148582 - DNA, 6 bp, Unknown
  misc_feature (1)..( 6): Result.004 file - promoters60/5665359
aattct

SEQ ID NO: 148583 - DNA, 6 bp, Unknown
  misc_feature (1)..( 6): Result.004 file - promoters60/5665359
aattct

SEQ ID NO: 148584 - DNA, 7 bp, Unknown
  misc_feature (1)..( 7): Result.004 file - promoters60/5665359
aaaaatt

SEQ ID NO: 148585 - DNA, 7 bp, Unknown
  misc_feature (1)..( 7): Result.004 file - promoters60/5665359
caaaatt

SEQ ID NO: 148586 - DNA, 7 bp, Unknown
  misc_feature (1)..( 7): Result.004 file - promoters60/5665359
aaaaata

SEQ ID NO: 148587 - DNA, 7 bp, Unknown
  misc_feature (1)..( 7): Result.004 file - promoters60/5665359
tttgaga

SEQ ID NO: 148588 - DNA, 7 bp, Unknown
  misc_feature (1)..( 7): Result.004 file - promoters60/5665359
tttgaga

SEQ ID NO: 148589 - DNA, 6 bp, Unknown
  misc_feature (1)..( 6): Result.004 file - promoters60/5665359
gaactt

SEQ ID NO: 148590 - DNA, 6 bp, Unknown
  misc_feature (1)..( 6): Result.004 file - promoters60/5665359
gaactt

SEQ ID NO: 148591 - DNA, 7 bp, Unknown
  misc_feature (1)..( 7): Result.004 file - promoters60/5665359
gagaaaa

SEQ ID NO: 148592 - DNA, 7 bp, Unknown
  misc_feature (1)..( 7): Result.004 file - promoters60/5665359
gagaaaa

SEQ ID NO: 148593 - DNA, 7 bp, Unknown
  misc_feature (1)..( 7): Result.004 file - promoters60/5665359
gttattt

SEQ ID NO: 148594 - DNA, 7 bp, Unknown
  misc_feature (1)..( 7): Result.004 file - promoters60/5665359
gttgttt

SEQ ID NO: 148595 - DNA, 8 bp, Unknown
  misc_feature (1)..( 8): Result.004 file - promoters60/5665359
tttaattt

SEQ ID NO: 148596 - DNA, 6 bp, Unknown
  misc_feature (1)..( 6): Result.004 file - promoters60/5665359
tattgt

SEQ ID NO: 148597 - DNA, 6 bp, Unknown
  misc_feature (1)..( 6): Result.004 file - promoters60/5665359
tattgt

SEQ ID NO: 148598 - DNA, 6 bp, Unknown
  misc_feature (1)..( 6): Result.004 file - promoters60/5665359
tattgt

SEQ ID NO: 148599 - DNA, 9 bp, Unknown
  misc_feature (1)..( 9): Result.004 file - promoters60/5665359
attgttttg

SEQ ID NO: 148600 - DNA, 9 bp, Unknown
  misc_feature (1)..( 9): Result.004 file - promoters60/5665359
aaagttttg

SEQ ID NO: 148601 - DNA, 9 bp, Unknown
  misc_feature (1)..( 9): Result.004 file - promoters60/5665359
ttggtttat

SEQ ID NO: 148602 - DNA, 8 bp, Unknown
  misc_feature (1)..( 8): Result.004 file - promoters60/5665359
aaaatata

SEQ ID NO: 148603 - DNA, 8 bp, Unknown
  misc_feature (1)..( 8): Result.004 file - promoters60/5665359
aaaatata

SEQ ID NO: 148604 - DNA, 6 bp, Unknown
  misc_feature (1)..( 6): Result.004 file - promoters60/5665359
ttaatt

SEQ ID NO: 148605 - DNA, 6 bp, Unknown
  misc_feature (1)..( 6): Result.004 file - promoters60/5665359
ttaatt

SEQ ID NO: 148606 - DNA, 6 bp, Unknown
  misc_feature (1)..( 6): Result.004 file - promoters60/5665359
cagaag

SEQ ID NO: 148607 - DNA, 6 bp, Unknown
  misc_feature (1)..( 6): Result.004 file - promoters60/5665359
cagaag

SEQ ID NO: 148608 - DNA, 7 bp, Unknown
  misc_feature (1)..( 7): Result.004 file - promoters60/5665359
aatctct

SEQ ID NO: 148609 - DNA, 7 bp, Unknown
  misc_feature (1)..( 7): Result.004 file - promoters60/5665359
aatctct

SEQ ID NO: 148610 - DNA, 10 bp, Unknown
  misc_feature (1)..( 10): Result.004 file - promoters60/5665359
aaagatttct

SEQ ID NO: 148611 - DNA, 10 bp, Unknown
  misc_feature (1)..( 10): Result.004 file - promoters60/5665359
aaaggtttct

SEQ ID NO: 148612 - DNA, 6 bp, Unknown
  misc_feature (1)..( 6): Result.004 file - promoters60/5665359
actttg

SEQ ID NO: 148613 - DNA, 6 bp, Unknown
  misc_feature (1)..( 6): Result.004 file - promoters60/5665359
actttg

SEQ ID NO: 148614 - DNA, 6 bp, Unknown
  misc_feature (1)..( 6): Result.004 file - promoters60/5665359
tttatt

SEQ ID NO: 148615 - DNA, 6 bp, Unknown
  misc_feature (1)..( 6): Result.004 file - promoters60/5665359
tttatt

SEQ ID NO: 148616 - DNA, 8 bp, Unknown
  misc_feature (1)..( 8): Result.004 file - promoters60/5665359
taaagttt

SEQ ID NO: 148617 - DNA, 8 bp, Unknown
  misc_feature (1)..( 8): Result.004 file - promoters60/5665359
taaaattt

SEQ ID NO: 148618 - DNA, 6 bp, Unknown
  misc_feature (1)..( 6): Result.004 file - promoters60/5665359
gtatca

SEQ ID NO: 148619 - DNA, 6 bp, Unknown
  misc_feature (1)..( 6): Result.004 file - promoters60/5665367
gtatca

SEQ ID NO: 148620 - DNA, 8 bp, Unknown
  misc_feature (1)..( 8): Result.004 file - promoters60/5665367
tcgctgaa

SEQ ID NO: 148621 - DNA, 8 bp, Unknown
  misc_feature (1)..( 8): Result.004 file - promoters60/5665367
tcggtgaa

SEQ ID NO: 148622 - DNA, 7 bp, Unknown
  misc_feature (1)..( 7): Result.004 file - promoters60/5665367
aaataaa

SEQ ID NO: 148623 - DNA, 7 bp, Unknown
  misc_feature (1)..( 7): Result.004 file - promoters60/5665367
aaataaa

SEQ ID NO: 148624 - DNA, 8 bp, Unknown
  misc_feature (1)..( 8): Result.004 file - promoters60/5665367
tatgactt

SEQ ID NO: 148625 - DNA, 8 bp, Unknown
  misc_feature (1)..( 8): Result.004 file - promoters60/5665367
tatggctt

SEQ ID NO: 148626 - DNA, 7 bp, Unknown
  misc_feature (1)..( 7): Result.004 file - promoters60/5665367
ggaaaaa

SEQ ID NO: 148627 - DNA, 7 bp, Unknown
  misc_feature (1)..( 7): Result.004 file - promoters60/5665367
ggacaaa

SEQ ID NO: 148628 - DNA, 8 bp, Unknown
  misc_feature (1)..( 8): Result.004 file - promoters60/5665367
tatatata

SEQ ID NO: 148629 - DNA, 8 bp, Unknown
  misc_feature (1)..( 8): Result.004 file - promoters60/5665367
tatatata

SEQ ID NO: 148630 - DNA, 8 bp, Unknown
  misc_feature (1)..( 8): Result.004 file - promoters60/5665367
tatataaa

SEQ ID NO: 148631 - DNA, 9 bp, Unknown
  misc_feature (1)..( 9): Result.004 file - promoters60/5665367
taatagttt

SEQ ID NO: 148632 - DNA, 9 bp, Unknown
  misc_feature (1)..( 9): Result.004 file - promoters60/5665367
taagagttt

SEQ ID NO: 148633 - DNA, 8 bp, Unknown
  misc_feature (1)..( 8): Result.004 file - promoters60/5665367
aggaattc

SEQ ID NO: 148634 - DNA, 8 bp, Unknown
  misc_feature (1)..( 8): Result.004 file - promoters60/5665367
agggattc

SEQ ID NO: 148635 - DNA, 7 bp, Unknown
  misc_feature (1)..( 7): Result.004 file - promoters60/5665367
actttcg

SEQ ID NO: 148636 - DNA, 7 bp, Unknown
  misc_feature (1)..( 7): Result.004 file - promoters60/5665367
actatcg

SEQ ID NO: 148637 - DNA, 7 bp, Unknown
  misc_feature (1)..( 7): Result.004 file - promoters60/5665367
taaaatg

SEQ ID NO: 148638 - DNA, 7 bp, Unknown
  misc_feature (1)..( 7): Result.004 file - promoters60/5665367
taacatg

SEQ ID NO: 148639 - DNA, 7 bp, Unknown
  misc_feature (1)..( 7): Result.004 file - promoters60/5665367
aaaatag

SEQ ID NO: 148640 - DNA, 7 bp, Unknown
  misc_feature (1)..( 7): Result.004 file - promoters60/5665367
aaattag

SEQ ID NO: 148641 - DNA, 9 bp, Unknown
  misc_feature (1)..( 9): Result.004 file - promoters60/5665367
attctattt

SEQ ID NO: 148642 - DNA, 9 bp, Unknown
  misc_feature (1)..( 9): Result.004 file - promoters60/5665367
attctcttt

SEQ ID NO: 148643 - DNA, 7 bp, Unknown
  misc_feature (1)..( 7): Result.004 file - promoters60/5665367
ctagata

SEQ ID NO: 148644 - DNA, 7 bp, Unknown
  misc_feature (1)..( 7): Result.004 file - promoters60/5665367
ttagata

SEQ ID NO: 148645 - DNA, 7 bp, Unknown
  misc_feature (1)..( 7): Result.004 file - promoters60/5665367
ttaaata

SEQ ID NO: 148646 - DNA, 7 bp, Unknown
  misc_feature (1)..( 7): Result.004 file - promoters60/5665367
ttatttc

SEQ ID NO: 148647 - DNA, 7 bp, Unknown
  misc_feature (1)..( 7): Result.004 file - promoters60/5665367
ttagttc

SEQ ID NO: 148648 - DNA, 7 bp, Unknown
  misc_feature (1)..( 7): Result.004 file - promoters60/5665367
acaaaat

SEQ ID NO: 148649 - DNA, 7 bp, Unknown
  misc_feature (1)..( 7): Result.004 file - promoters60/5665367
acaaaat

SEQ ID NO: 148650 - DNA, 6 bp, Unknown
  misc_feature (1)..( 6): Result.004 file - promoters60/5665367
aaaata

SEQ ID NO: 148651 - DNA, 6 bp, Unknown
  misc_feature (1)..( 6): Result.004 file - promoters60/5665367
aaaata

SEQ ID NO: 148652 - DNA, 7 bp, Unknown
  misc_feature (1)..( 7): Result.004 file - promoters60/5665367
aaacgaa

SEQ ID NO: 148653 - DNA, 7 bp, Unknown
  misc_feature (1)..( 7): Result.004 file - promoters60/5665367
aaatgaa

SEQ ID NO: 148654 - DNA, 6 bp, Unknown
  misc_feature (1)..( 6): Result.004 file - promoters60/5665367
taaaaa

SEQ ID NO: 148655 - DNA, 6 bp, Unknown
  misc_feature (1)..( 6): Result.004 file - promoters60/5665367
taaaaa

SEQ ID NO: 148656 - DNA, 7 bp, Unknown
  misc_feature (1)..( 7): Result.004 file - promoters60/5665367
ggttaga

SEQ ID NO: 148657 - DNA, 7 bp, Unknown
  misc_feature (1)..( 7): Result.004 file - promoters60/5665367
ggtgaga

SEQ ID NO: 148658 - DNA, 6 bp, Unknown
  misc_feature (1)..( 6): Result.004 file - promoters60/5665367
gagaaa

SEQ ID NO: 148659 - DNA, 6 bp, Unknown
  misc_feature (1)..( 6): Result.004 file - promoters60/5665374
gagaaa

SEQ ID NO: 148660 - DNA, 7 bp, Unknown
  misc_feature (1)..( 7): Result.004 file - promoters60/5665374
taaaaca

SEQ ID NO: 148661 - DNA, 7 bp, Unknown
  misc_feature (1)..( 7): Result.004 file - promoters60/5665374
taataca

SEQ ID NO: 148662 - DNA, 8 bp, Unknown
  misc_feature (1)..( 8): Result.004 file - promoters60/5665374
agatcaaa

SEQ ID NO: 148663 - DNA, 8 bp, Unknown
  misc_feature (1)..( 8): Result.004 file - promoters60/5665374
ttatcaaa

SEQ ID NO: 148664 - DNA, 8 bp, Unknown
  misc_feature (1)..( 8): Result.004 file - promoters60/5665374
ttaccaat

SEQ ID NO: 148665 - DNA, 7 bp, Unknown
  misc_feature (1)..( 7): Result.004 file - promoters60/5665374
tacagct

SEQ ID NO: 148666 - DNA, 7 bp, Unknown
  misc_feature (1)..( 7): Result.004 file - promoters60/5665374
tactgct

SEQ ID NO: 148667 - DNA, 6 bp, Unknown
  misc_feature (1)..( 6): Result.004 file - promoters60/5665374
ccacta

SEQ ID NO: 148668 - DNA, 6 bp, Unknown
  misc_feature (1)..( 6): Result.004 file - promoters60/5665374
ccacta

SEQ ID NO: 148669 - DNA, 10 bp, Unknown
  misc_feature (1)..( 10): Result.004 file - promoters60/5665374
gctatctaaa

SEQ ID NO: 148670 - DNA, 10 bp, Unknown
  misc_feature (1)..( 10): Result.004 file - promoters60/5665374
actatctaaa

SEQ ID NO: 148671 - DNA, 10 bp, Unknown
  misc_feature (1)..( 10): Result.004 file - promoters60/5665374
actttctctg

SEQ ID NO: 148672 - DNA, 7 bp, Unknown
  misc_feature (1)..( 7): Result.004 file - promoters60/5665374
aaaatta

SEQ ID NO: 148673 - DNA, 7 bp, Unknown
  misc_feature (1)..( 7): Result.004 file - promoters60/5665374
aaaatta

SEQ ID NO: 148674 - DNA, 7 bp, Unknown
  misc_feature (1)..( 7): Result.004 file - promoters60/5665374
aattgac

SEQ ID NO: 148675 - DNA, 7 bp, Unknown
  misc_feature (1)..( 7): Result.004 file - promoters60/5665374
aatggac

SEQ ID NO: 148676 - DNA, 7 bp, Unknown
  misc_feature (1)..( 7): Result.004 file - promoters60/5665374
aataaat

SEQ ID NO: 148677 - DNA, 7 bp, Unknown
  misc_feature (1)..( 7): Result.004 file - promoters60/5665374
aataaat

SEQ ID NO: 148678 - DNA, 7 bp, Unknown
  misc_feature (1)..( 7): Result.004 file - promoters60/5665374
tatgtga

SEQ ID NO: 148679 - DNA, 7 bp, Unknown
  misc_feature (1)..( 7): Result.004 file - promoters60/5665374
tatatga

SEQ ID NO: 148680 - DNA, 7 bp, Unknown
  misc_feature (1)..( 7): Result.004 file - promoters60/5665374
aaatcaa

SEQ ID NO: 148681 - DNA, 7 bp, Unknown
  misc_feature (1)..( 7): Result.004 file - promoters60/5665374
aaaccaa

SEQ ID NO: 148682 - DNA, 6 bp, Unknown
  misc_feature (1)..( 6): Result.004 file - promoters60/5665374
tttttg

SEQ ID NO: 148683 - DNA, 6 bp, Unknown
  misc_feature (1)..( 6): Result.004 file - promoters60/5665374
tttttg

SEQ ID NO: 148684 - DNA, 8 bp, Unknown
  misc_feature (1)..( 8): Result.004 file - promoters60/5665374
aattacca

SEQ ID NO: 148685 - DNA, 8 bp, Unknown
  misc_feature (1)..( 8): Result.004 file - promoters60/5665374
aataacca

SEQ ID NO: 148686 - DNA, 6 bp, Unknown
  misc_feature (1)..( 6): Result.004 file - promoters60/5665374
aaatca

SEQ ID NO: 148687 - DNA, 6 bp, Unknown
  misc_feature (1)..( 6): Result.004 file - promoters60/5665374
aaatca

SEQ ID NO: 148688 - DNA, 6 bp, Unknown
  misc_feature (1)..( 6): Result.004 file - promoters60/5665374
ccaaaa

SEQ ID NO: 148689 - DNA, 6 bp, Unknown
  misc_feature (1)..( 6): Result.004 file - promoters60/5665374
ccaaaa

SEQ ID NO: 148690 - DNA, 8 bp, Unknown
  misc_feature (1)..( 8): Result.004 file - promoters60/5665374
tattgaac

SEQ ID NO: 148691 - DNA, 8 bp, Unknown
  misc_feature (1)..( 8): Result.004 file - promoters60/5665374
tatttaac

SEQ ID NO: 148692 - DNA, 6 bp, Unknown
  misc_feature (1)..( 6): Result.004 file - promoters60/5665374
ttattg

SEQ ID NO: 148693 - DNA, 6 bp, Unknown
  misc_feature (1)..( 6): Result.004 file - promoters60/5665374
ttattg

SEQ ID NO: 148694 - DNA, 8 bp, Unknown
  misc_feature (1)..( 8): Result.004 file - promoters60/5665374
attttcaa

SEQ ID NO: 148695 - DNA, 8 bp, Unknown
  misc_feature (1)..( 8): Result.004 file - promoters60/5665374
attgtcaa

SEQ ID NO: 148696 - DNA, 9 bp, Unknown
  misc_feature (1)..( 9): Result.004 file - promoters60/5665374
gaaaatatg

SEQ ID NO: 148697 - DNA, 9 bp, Unknown
  misc_feature (1)..( 9): Result.004 file - promoters60/5665374
gaaaaaatg

SEQ ID NO: 148698 - DNA, 6 bp, Unknown
  misc_feature (1)..( 6): Result.004 file - promoters60/5665374
taaaag

SEQ ID NO: 148699 - DNA, 6 bp, Unknown
  misc_feature (1)..( 6): Result.004 file - promoters60/5665374
taaaag

SEQ ID NO: 148700 - DNA, 8 bp, Unknown
  misc_feature (1)..( 8): Result.004 file - promoters60/5665374
agcttcac

SEQ ID NO: 148701 - DNA, 8 bp, Unknown
  misc_feature (1)..( 8): Result.004 file - promoters60/5665404
agcctcac

SEQ ID NO: 148702 - DNA, 7 bp, Unknown
  misc_feature (1)..( 7): Result.004 file - promoters60/5665404
agatgtg

SEQ ID NO: 148703 - DNA, 7 bp, Unknown
  misc_feature (1)..( 7): Result.004 file - promoters60/5665404
agatgtg

SEQ ID NO: 148704 - DNA, 9 bp, Unknown
  misc_feature (1)..( 9): Result.004 file - promoters60/5665404
ttcgtcctt

SEQ ID NO: 148705 - DNA, 9 bp, Unknown
  misc_feature (1)..( 9): Result.004 file - promoters60/5665404
aacgttctt

SEQ ID NO: 148706 - DNA, 9 bp, Unknown
  misc_feature (1)..( 9): Result.004 file - promoters60/5665404
ttcgtccaa

SEQ ID NO: 148707 - DNA, 7 bp, Unknown
  misc_feature (1)..( 7): Result.004 file - promoters60/5665404
ttgcttt

SEQ ID NO: 148708 - DNA, 7 bp, Unknown
  misc_feature (1)..( 7): Result.004 file - promoters60/5665404
atgcttt

SEQ ID NO: 148709 - DNA, 7 bp, Unknown
  misc_feature (1)..( 7): Result.004 file - promoters60/5665404
ttgtttt

SEQ ID NO: 148710 - DNA, 10 bp, Unknown
  misc_feature (1)..( 10): Result.004 file - promoters60/5665404
ttttaaaatt

SEQ ID NO: 148711 - DNA, 10 bp, Unknown
  misc_feature (1)..( 10): Result.004 file - promoters60/5665404
aaataaaata

SEQ ID NO: 148712 - DNA, 10 bp, Unknown
  misc_feature (1)..( 10): Result.004 file - promoters60/5665404
aaatgaaata

SEQ ID NO: 148713 - DNA, 10 bp, Unknown
  misc_feature (1)..( 10): Result.004 file - promoters60/5665404
agttaaaaca

SEQ ID NO: 148714 - DNA, 10 bp, Unknown
  misc_feature (1)..( 10): Result.004 file - promoters60/5665404
agttaagaca

SEQ ID NO: 148715 - DNA, 10 bp, Unknown
  misc_feature (1)..( 10): Result.004 file - promoters60/5665404
aacgctaaag

SEQ ID NO: 148716 - DNA, 10 bp, Unknown
  misc_feature (1)..( 10): Result.004 file - promoters60/5665404
aaccctaaag

SEQ ID NO: 148717 - DNA, 6 bp, Unknown
  misc_feature (1)..( 6): Result.004 file - promoters60/5665404
aaaaat

SEQ ID NO: 148718 - DNA, 6 bp, Unknown
  misc_feature (1)..( 6): Result.004 file - promoters60/5665404
aaaaat

SEQ ID NO: 148719 - DNA, 6 bp, Unknown
  misc_feature (1)..( 6): Result.004 file - promoters60/5665404
gcctac

SEQ ID NO: 148720 - DNA, 6 bp, Unknown
  misc_feature (1)..( 6): Result.004 file - promoters60/5665404
gcctac

SEQ ID NO: 148721 - DNA, 9 bp, Unknown
  misc_feature (1)..( 9): Result.004 file - promoters60/5665404
aaatattgt

SEQ ID NO: 148722 - DNA, 9 bp, Unknown
  misc_feature (1)..( 9): Result.004 file - promoters60/5665404
aaacattgt

SEQ ID NO: 148723 - DNA, 6 bp, Unknown
  misc_feature (1)..( 6): Result.004 file - promoters60/5665404
ctattg

SEQ ID NO: 148724 - DNA, 6 bp, Unknown
  misc_feature (1)..( 6): Result.004 file - promoters60/5665404
ctattg

SEQ ID NO: 148725 - DNA, 7 bp, Unknown
  misc_feature (1)..( 7): Result.004 file - promoters60/5665404
aaacaaa

SEQ ID NO: 148726 - DNA, 7 bp, Unknown
  misc_feature (1)..( 7): Result.004 file - promoters60/5665404
aaagaaa

SEQ ID NO: 148727 - DNA, 7 bp, Unknown
  misc_feature (1)..( 7): Result.004 file - promoters60/5665404
aaacttt

SEQ ID NO: 148728 - DNA, 7 bp, Unknown
  misc_feature (1)..( 7): Result.004 file - promoters60/5665404
aaacttt

SEQ ID NO: 148729 - DNA, 6 bp, Unknown
  misc_feature (1)..( 6): Result.004 file - promoters60/5665404
agtaaa

SEQ ID NO: 148730 - DNA, 6 bp, Unknown
  misc_feature (1)..( 6): Result.004 file - promoters60/5665404
agtaaa

SEQ ID NO: 148731 - DNA, 7 bp, Unknown
  misc_feature (1)..( 7): Result.004 file - promoters60/5665404
aatcggg

SEQ ID NO: 148732 - DNA, 7 bp, Unknown
  misc_feature (1)..( 7): Result.004 file - promoters60/5665404
aattggg

SEQ ID NO: 148733 - DNA, 8 bp, Unknown
  misc_feature (1)..( 8): Result.004 file - promoters60/5665404
gaaagaaa

SEQ ID NO: 148734 - DNA, 8 bp, Unknown
  misc_feature (1)..( 8): Result.004 file - promoters60/5665404
gaaacaaa

SEQ ID NO: 148735 - DNA, 10 bp, Unknown
  misc_feature (1)..( 10): Result.004 file - promoters60/5665404
ggaaaagaaa

SEQ ID NO: 148736 - DNA, 10 bp, Unknown
  misc_feature (1)..( 10): Result.004 file - promoters60/5665404
ggaaatgaaa

SEQ ID NO: 148737 - DNA, 7 bp, Unknown
  misc_feature (1)..( 7): Result.004 file - promoters60/5665404
cccacta

SEQ ID NO: 148738 - DNA, 7 bp, Unknown
  misc_feature (1)..( 7): Result.004 file - promoters60/5665404
cccacta

SEQ ID NO: 148739 - DNA, 9 bp, Unknown
  misc_feature (1)..( 9): Result.004 file - promoters60/5665404
aaagaaaag

SEQ ID NO: 148740 - DNA, 9 bp, Unknown
  misc_feature (1)..( 9): Result.004 file - promoters60/5665404
aaagtaaag

SEQ ID NO: 148741 - DNA, 7 bp, Unknown
  misc_feature (1)..( 7): Result.004 file - promoters60/5665404
gtatata

SEQ ID NO: 148742 - DNA, 7 bp, Unknown
  misc_feature (1)..( 7): Result.004 file - promoters60/5665420
gtatata

SEQ ID NO: 148743 - DNA, 7 bp, Unknown
  misc_feature (1)..( 7): Result.004 file - promoters60/5665420
aaaatat

SEQ ID NO: 148744 - DNA, 7 bp, Unknown
  misc_feature (1)..( 7): Result.004 file - promoters60/5665420
aaattat

SEQ ID NO: 148745 - DNA, 7 bp, Unknown
  misc_feature (1)..( 7): Result.004 file - promoters60/5665420
aaaattt

SEQ ID NO: 148746 - DNA, 8 bp, Unknown
  misc_feature (1)..( 8): Result.004 file - promoters60/5665420
caactaaa

SEQ ID NO: 148747 - DNA, 8 bp, Unknown
  misc_feature (1)..( 8): Result.004 file - promoters60/5665420
caacgaaa

SEQ ID NO: 148748 - DNA, 7 bp, Unknown
  misc_feature (1)..( 7): Result.004 file - promoters60/5665420
tatcata

SEQ ID NO: 148749 - DNA, 7 bp, Unknown
  misc_feature (1)..( 7): Result.004 file - promoters60/5665420
tattata

SEQ ID NO: 148750 - DNA, 6 bp, Unknown
  misc_feature (1)..( 6): Result.004 file - promoters60/5665420
atttta

SEQ ID NO: 148751 - DNA, 6 bp, Unknown
  misc_feature (1)..( 6): Result.004 file - promoters60/5665420
atttta

SEQ ID NO: 148752 - DNA, 6 bp, Unknown
  misc_feature (1)..( 6): Result.004 file - promoters60/5665420
gacggt

SEQ ID NO: 148753 - DNA, 6 bp, Unknown
  misc_feature (1)..( 6): Result.004 file - promoters60/5665420
gacggt

SEQ ID NO: 148754 - DNA, 9 bp, Unknown
  misc_feature (1)..( 9): Result.004 file - promoters60/5665420
aaattaaaa

SEQ ID NO: 148755 - DNA, 9 bp, Unknown
  misc_feature (1)..( 9): Result.004 file - promoters60/5665420
aaatgaaaa

SEQ ID NO: 148756 - DNA, 10 bp, Unknown
  misc_feature (1)..( 10): Result.004 file - promoters60/5665420
tgttaattaa

SEQ ID NO: 148757 - DNA, 10 bp, Unknown
  misc_feature (1)..( 10): Result.004 file - promoters60/5665420
tgtgaattaa

SEQ ID NO: 148758 - DNA, 8 bp, Unknown
  misc_feature (1)..( 8): Result.004 file - promoters60/5665420
taataaag

SEQ ID NO: 148759 - DNA, 8 bp, Unknown
  misc_feature (1)..( 8): Result.004 file - promoters60/5665420
taatcaag

SEQ ID NO: 148760 - DNA, 7 bp, Unknown
  misc_feature (1)..( 7): Result.004 file - promoters60/5665420
tctcttt

SEQ ID NO: 148761 - DNA, 7 bp, Unknown
  misc_feature (1)..( 7): Result.004 file - promoters60/5665420
tctgttt

SEQ ID NO: 148762 - DNA, 7 bp, Unknown
  misc_feature (1)..( 7): Result.004 file - promoters60/5665420
tttgagt

SEQ ID NO: 148763 - DNA, 7 bp, Unknown
  misc_feature (1)..( 7): Result.004 file - promoters60/5665420
ttttagt

SEQ ID NO: 148764 - DNA, 9 bp, Unknown
  misc_feature (1)..( 9): Result.004 file - promoters60/5665420
ttaaaatag

SEQ ID NO: 148765 - DNA, 9 bp, Unknown
  misc_feature (1)..( 9): Result.004 file - promoters60/5665420
ttaaagtag

SEQ ID NO: 148766 - DNA, 9 bp, Unknown
  misc_feature (1)..( 9): Result.004 file - promoters60/5665420
ataaattaa

SEQ ID NO: 148767 - DNA, 9 bp, Unknown
  misc_feature (1)..( 9): Result.004 file - promoters60/5665420
atagattaa

SEQ ID NO: 148768 - DNA, 6 bp, Unknown
  misc_feature (1)..( 6): Result.004 file - promoters60/5665420
atatat

SEQ ID NO: 148769 - DNA, 6 bp, Unknown
  misc_feature (1)..( 6): Result.004 file - promoters60/5665420
atatat

SEQ ID NO: 148770 - DNA, 8 bp, Unknown
  misc_feature (1)..( 8): Result.004 file - promoters60/5665420
aactgaaa

SEQ ID NO: 148771 - DNA, 8 bp, Unknown
  misc_feature (1)..( 8): Result.004 file - promoters60/5665420
aacggaaa

SEQ ID NO: 148772 - DNA, 6 bp, Unknown
  misc_feature (1)..( 6): Result.004 file - promoters60/5665420
tcataa

SEQ ID NO: 148773 - DNA, 6 bp, Unknown
  misc_feature (1)..( 6): Result.004 file - promoters60/5665420
tcataa

SEQ ID NO: 148774 - DNA, 7 bp, Unknown
  misc_feature (1)..( 7): Result.004 file - promoters60/5665420
ttatttc

SEQ ID NO: 148775 - DNA, 7 bp, Unknown
  misc_feature (1)..( 7): Result.004 file - promoters60/5665420
ttatttc

SEQ ID NO: 148776 - DNA, 7 bp, Unknown
  misc_feature (1)..( 7): Result.004 file - promoters60/5665420
taaaaca

SEQ ID NO: 148777 - DNA, 7 bp, Unknown
  misc_feature (1)..( 7): Result.004 file - promoters60/5665420
taaaaca

SEQ ID NO: 148778 - DNA, 7 bp, Unknown
  misc_feature (1)..( 7): Result.004 file - promoters60/5665420
aaaacac

SEQ ID NO: 148779 - DNA, 7 bp, Unknown
  misc_feature (1)..( 7): Result.004 file - promoters60/5665420
aaaacaa

SEQ ID NO: 148780 - DNA, 8 bp, Unknown
  misc_feature (1)..( 8): Result.004 file - promoters60/5665420
aaaatcaa

SEQ ID NO: 148781 - DNA, 7 bp, Unknown
  misc_feature (1)..( 7): Result.004 file - promoters60/5665420
tgtatat

SEQ ID NO: 148782 - DNA, 7 bp, Unknown
  misc_feature (1)..( 7): Result.004 file - promoters60/5665420
tgtgtat

SEQ ID NO: 148783 - DNA, 6 bp, Unknown
  misc_feature (1)..( 6): Result.004 file - promoters60/5665420
ttatca

SEQ ID NO: 148784 - DNA, 6 bp, Unknown
  misc_feature (1)..( 6): Result.004 file - promoters60/5665420
ttatca

SEQ ID NO: 148785 - DNA, 6 bp, Unknown
  misc_feature (1)..( 6): Result.004 file - promoters60/5665420
atttat

SEQ ID NO: 148786 - DNA, 6 bp, Unknown
  misc_feature (1)..( 6): Result.004 file - promoters60/5665420
atttat

SEQ ID NO: 148787 - DNA, 8 bp, Unknown
  misc_feature (1)..( 8): Result.004 file - promoters60/5665420
gtgataaa

SEQ ID NO: 148788 - DNA, 8 bp, Unknown
  misc_feature (1)..( 8): Result.004 file - promoters60/5665420
gtgttaaa

SEQ ID NO: 148789 - DNA, 7 bp, Unknown
  misc_feature (1)..( 7): Result.004 file - promoters60/5665420
gaaaata

SEQ ID NO: 148790 - DNA, 7 bp, Unknown
  misc_feature (1)..( 7): Result.004 file - promoters60/5665420
gaatata

SEQ ID NO: 148791 - DNA, 6 bp, Unknown
  misc_feature (1)..( 6): Result.004 file - promoters60/5665420
cagaaa

SEQ ID NO: 148792 - DNA, 6 bp, Unknown
  misc_feature (1)..( 6): Result.004 file - promoters60/5665420
cagaaa

SEQ ID NO: 148793 - DNA, 10 bp, Unknown
  misc_feature (1)..( 10): Result.004 file - promoters60/5665420
ttaaccagta

SEQ ID NO: 148794 - DNA, 10 bp, Unknown
  misc_feature (1)..( 10): Result.004 file - promoters60/5665420
ttaacaagta

SEQ ID NO: 148795 - DNA, 6 bp, Unknown
  misc_feature (1)..( 6): Result.004 file - promoters60/5665420
aagcaa

SEQ ID NO: 148796 - DNA, 6 bp, Unknown
  misc_feature (1)..( 6): Result.004 file - promoters60/5665436
aagcaa

SEQ ID NO: 148797 - DNA, 17 bp, Unknown
  misc_feature (1)..( 17): Result.004 file - promoters60/5665436
agtgattctatttttat

SEQ ID NO: 148798 - DNA, 17 bp, Unknown
  misc_feature (1)..( 17): Result.004 file - promoters60/5665436
aacaattctaattttct

SEQ ID NO: 148799 - DNA, 17 bp, Unknown
  misc_feature (1)..( 17): Result.004 file - promoters60/5665436
caatgatggattattaa

SEQ ID NO: 148800 - DNA, 17 bp, Unknown
  misc_feature (1)..( 17): Result.004 file - promoters60/5665436
aacaagtctctatgaca

SEQ ID NO: 148801 - DNA, 17 bp, Unknown
  misc_feature (1)..( 17): Result.004 file - promoters60/5665436
ttagttaatattaagcc

SEQ ID NO: 148802 - DNA, 17 bp, Unknown
  misc_feature (1)..( 17): Result.004 file - promoters60/5665436
tatataaggcttaataa

SEQ ID NO: 148803 - DNA, 14 bp, Unknown
  misc_feature (1)..( 14): Result.004 file - promoters60/5665436
cttgttctttatgt

SEQ ID NO: 148804 - DNA, 14 bp, Unknown
  misc_feature (1)..( 14): Result.004 file - promoters60/5665436
aatgttcttgataa

SEQ ID NO: 148805 - DNA, 14 bp, Unknown
  misc_feature (1)..( 14): Result.004 file - promoters60/5665436
gtgtttctttttgt

SEQ ID NO: 148806 - DNA, 14 bp, Unknown
  misc_feature (1)..( 14): Result.004 file - promoters60/5665436
aattttctcattgc

SEQ ID NO: 148807 - DNA, 14 bp, Unknown
  misc_feature (1)..( 14): Result.004 file - promoters60/5665436
aattttcttactat

SEQ ID NO: 148808 - DNA, 14 bp, Unknown
  misc_feature (1)..( 14): Result.004 file - promoters60/5665436
catttttttttttc

SEQ ID NO: 148809 - DNA, 12 bp, Unknown
  misc_feature (1)..( 12): Result.004 file - promoters60/5665436
agtattacaatt

SEQ ID NO: 148810 - DNA, 12 bp, Unknown
  misc_feature (1)..( 12): Result.004 file - promoters60/5665436
gtaattacagta

SEQ ID NO: 148811 - DNA, 12 bp, Unknown
  misc_feature (1)..( 12): Result.004 file - promoters60/5665436
tattttaaaatt

SEQ ID NO: 148812 - DNA, 12 bp, Unknown
  misc_feature (1)..( 12): Result.004 file - promoters60/5665436
aatattactaaa

SEQ ID NO: 148813 - DNA, 12 bp, Unknown
  misc_feature (1)..( 12): Result.004 file - promoters60/5665436
cattttaaaaaa

SEQ ID NO: 148814 - DNA, 12 bp, Unknown
  misc_feature (1)..( 12): Result.004 file - promoters60/5665436
taaattacgatg

SEQ ID NO: 148815 - DNA, 12 bp, Unknown
  misc_feature (1)..( 12): Result.004 file - promoters60/5665507
aaaaataataat

SEQ ID NO: 148816 - DNA, 12 bp, Unknown
  misc_feature (1)..( 12): Result.004 file - promoters60/5665507
cgagaatacata

SEQ ID NO: 148817 - DNA, 12 bp, Unknown
  misc_feature (1)..( 12): Result.004 file - promoters60/5665507
ccaaaatccatc

SEQ ID NO: 148818 - DNA, 12 bp, Unknown
  misc_feature (1)..( 12): Result.004 file - promoters60/5665507
gaagaaaacaat

SEQ ID NO: 148819 - DNA, 12 bp, Unknown
  misc_feature (1)..( 12): Result.004 file - promoters60/5665507
ctataaagcaaa

SEQ ID NO: 148820 - DNA, 12 bp, Unknown
  misc_feature (1)..( 12): Result.004 file - promoters60/5665507
ctagaaaatggt

SEQ ID NO: 148821 - DNA, 12 bp, Unknown
  misc_feature (1)..( 12): Result.004 file - promoters60/5665796
gaagaaatcgaa

SEQ ID NO: 148822 - DNA, 12 bp, Unknown
  misc_feature (1)..( 12): Result.004 file - promoters60/5665796
tgattattgttc

SEQ ID NO: 148823 - DNA, 12 bp, Unknown
  misc_feature (1)..( 12): Result.004 file - promoters60/5665796
atattaatgttt

SEQ ID NO: 148824 - DNA, 12 bp, Unknown
  misc_feature (1)..( 12): Result.004 file - promoters60/5665796
tgatttttggca

SEQ ID NO: 148825 - DNA, 12 bp, Unknown
  misc_feature (1)..( 12): Result.004 file - promoters60/5665796
catgtaatgtgt

SEQ ID NO: 148826 - DNA, 12 bp, Unknown
  misc_feature (1)..( 12): Result.004 file - promoters60/5665796
tctccaatgttt

SEQ ID NO: 148827 - DNA, 12 bp, Unknown
  misc_feature (1)..( 12): Result.004 file - promoters60/5665796
tccaaaatgtta

SEQ ID NO: 148828 - DNA, 11 bp, Unknown
  misc_feature (1)..( 11): Result.004 file - promoters60/5665796
attcataattt

SEQ ID NO: 148829 - DNA, 11 bp, Unknown
  misc_feature (1)..( 11): Result.004 file - promoters60/5665796
aaagctaattt

SEQ ID NO: 148830 - DNA, 11 bp, Unknown
  misc_feature (1)..( 11): Result.004 file - promoters60/5665796
ttatatatttt

SEQ ID NO: 148831 - DNA, 11 bp, Unknown
  misc_feature (1)..( 11): Result.004 file - promoters60/5665796
attgatattta

SEQ ID NO: 148832 - DNA, 11 bp, Unknown
  misc_feature (1)..( 11): Result.004 file - promoters60/5665796
attgatttttt

SEQ ID NO: 148833 - DNA, 11 bp, Unknown
  misc_feature (1)..( 11): Result.004 file - promoters60/5665796
tacagtaattt

SEQ ID NO: 148834 - DNA, 12 bp, Unknown
  misc_feature (1)..( 12): Result.004 file - promoters60/5665796
taataaattcat

SEQ ID NO: 148835 - DNA, 12 bp, Unknown
  misc_feature (1)..( 12): Result.004 file - promoters60/5665796
ttatatattttt

SEQ ID NO: 148836 - DNA, 12 bp, Unknown
  misc_feature (1)..( 12): Result.004 file - promoters60/5665796
taacaaatacca

SEQ ID NO: 148837 - DNA, 12 bp, Unknown
  misc_feature (1)..( 12): Result.004 file - promoters60/5665796
atatttatgtgt

SEQ ID NO: 148838 - DNA, 12 bp, Unknown
  misc_feature (1)..( 12): Result.004 file - promoters60/5665796
tgattcatgcta

SEQ ID NO: 148839 - DNA, 12 bp, Unknown
  misc_feature (1)..( 12): Result.004 file - promoters60/5666614
cgattgattttt

SEQ ID NO: 148840 - DNA, 6 bp, Unknown
  misc_feature (1)..( 6): Result.004 file - promoters60/5666614
gaataa

SEQ ID NO: 148841 - DNA, 6 bp, Unknown
  misc_feature (1)..( 6): Result.004 file - promoters60/5666614
gaataa

SEQ ID NO: 148842 - DNA, 7 bp, Unknown
  misc_feature (1)..( 7): Result.004 file - promoters60/5666614
atggaat

SEQ ID NO: 148843 - DNA, 7 bp, Unknown
  misc_feature (1)..( 7): Result.004 file - promoters60/5666614
atggaat

SEQ ID NO: 148844 - DNA, 7 bp, Unknown
  misc_feature (1)..( 7): Result.004 file - promoters60/5666614
ttataaa

SEQ ID NO: 148845 - DNA, 7 bp, Unknown
  misc_feature (1)..( 7): Result.004 file - promoters60/5666614
ttaaaaa

SEQ ID NO: 148846 - DNA, 6 bp, Unknown
  misc_feature (1)..( 6): Result.004 file - promoters60/5666614
caaggg

SEQ ID NO: 148847 - DNA, 6 bp, Unknown
  misc_feature (1)..( 6): Result.004 file - promoters60/5666614
caaggg

SEQ ID NO: 148848 - DNA, 7 bp, Unknown
  misc_feature (1)..( 7): Result.004 file - promoters60/5666614
gttaaac

SEQ ID NO: 148849 - DNA, 7 bp, Unknown
  misc_feature (1)..( 7): Result.004 file - promoters60/5666614
gtttaac

SEQ ID NO: 148850 - DNA, 7 bp, Unknown
  misc_feature (1)..( 7): Result.004 file - promoters60/5666614
ttttaac

SEQ ID NO: 148851 - DNA, 8 bp, Unknown
  misc_feature (1)..( 8): Result.004 file - promoters60/5666614
aaatctcg

SEQ ID NO: 148852 - DNA, 8 bp, Unknown
  misc_feature (1)..( 8): Result.004 file - promoters60/5666614
taatttcg

SEQ ID NO: 148853 - DNA, 8 bp, Unknown
  misc_feature (1)..( 8): Result.004 file - promoters60/5666614
taacttcc

SEQ ID NO: 148854 - DNA, 6 bp, Unknown
  misc_feature (1)..( 6): Result.004 file - promoters60/5666614
caacaa

SEQ ID NO: 148855 - DNA, 6 bp, Unknown
  misc_feature (1)..( 6): Result.004 file - promoters60/5666614
caacaa

SEQ ID NO: 148856 - DNA, 6 bp, Unknown
  misc_feature (1)..( 6): Result.004 file - promoters60/5666614
ccacaa

SEQ ID NO: 148857 - DNA, 6 bp, Unknown
  misc_feature (1)..( 6): Result.004 file - promoters60/5666614
ccacaa

SEQ ID NO: 148858 - DNA, 9 bp, Unknown
  misc_feature (1)..( 9): Result.004 file - promoters60/5666614
agaagtagc

SEQ ID NO: 148859 - DNA, 9 bp, Unknown
  misc_feature (1)..( 9): Result.004 file - promoters60/5666614
agatgtagc

SEQ ID NO: 148860 - DNA, 8 bp, Unknown
  misc_feature (1)..( 8): Result.004 file - promoters60/5666614
acaccaga

SEQ ID NO: 148861 - DNA, 8 bp, Unknown
  misc_feature (1)..( 8): Result.004 file - promoters60/5666614
acaacaga

SEQ ID NO: 148862 - DNA, 8 bp, Unknown
  misc_feature (1)..( 8): Result.004 file - promoters60/5666614
ttgtttac

SEQ ID NO: 148863 - DNA, 8 bp, Unknown
  misc_feature (1)..( 8): Result.004 file - promoters60/5666614
ttgcttac

SEQ ID NO: 148864 - DNA, 7 bp, Unknown
  misc_feature (1)..( 7): Result.004 file - promoters60/5666614
tttttct
